United States Patent Application Publication US 2024/0271161 A1 - sequence listing, part 3

SEQ ID NO: 24386 - protein, 452 aa, Listeria innocua
MKAAIYIRVSTQEQVENYSIQAQTEKLTALCRSKDWDVYDIFIDGGYSGSNMNRPALNEMLSKLHEIDAVVVYRLDRLSRSQRDTITLIEEYFLKNNVEFVSLSETLDTSSPFGRAMIGILSVFAQLERETIRDRMVMGKIKRIEAGLPLTTAKGRTFGYDVIDTKLYINEEEAKQLRLIYDIFEEEQSITFLQKRLKKLGFKVRTYNRYNNWLTNDLYCGYVSYKDKVHVKGIHEPIISEEQFYRVQEIFTRMGKNPNMNRDSASLLNNLVVCGKCGLGFVHRRKDTVSRGKKYHYRYYSCKTYKHTHELEKCGNKIWRADKLEELIIDRVNNYSFASRNVDKEDELDYLNEKLKTEHVKKKRLFDLYISGSYEVSELDAMMADIDAQINYYEAQIEANEELKKNKKIQENLADLATVDFDSLEFREKQLYLKSLINKIYIDGEQVTIEWL

SEQ ID NO: 24387 - DNA, 50 bp, Listeria innocua; identical to SEQ ID NO: 24377
  source 1..50: mol_type = genomic DNA

SEQ ID NO: 24388 - DNA, 40 bp, Listeria innocua; identical to SEQ ID NO: 7873
  source 1..40: mol_type = genomic DNA

SEQ ID NO: 24389 - DNA, 40 bp, Listeria innocua
  source 1..40: mol_type = genomic DNA
tttcggatcgagttatgatagacgtaaagagggaacaaag

SEQ ID NO: 24390 - DNA, 50 bp, Listeria innocua; identical to SEQ ID NO: 24375
  source 1..50: mol_type = genomic DNA

SEQ ID NO: 24391 - protein, 613 aa, Klebsiella variicola
MRRVFVYHRVSSDQQAERGGGMERQAKLLEDYLARTKLCDDMDDPEPIVLGDPGMSAFKGHNLQHGELGTWVDQVKAGMWDGSILVLESIDRFSRLNPFEVLDYLNSIIERNVSIHDVYDNNIINRRDISAFTRALNQADRAFKESKFKSDRISAGWRRKREQAFNNGTIVTKKRPVWIDVVDNKYILNEKAAVVKEIFRLYQTGIGCPTIAKILQKKEGSEWKFDRAWSSEHVHKILRNKRVTGKILISEIIRDYETDDKEKQFTQNFYDMDVYPVVIDEKEFELVQELLKSRRPNAGRATTKKDGDQEIVVKHNMFSGIFRCGDCGQGMFHNVVKTKRNPKKSEARIEEYRYIRCIVERDDLCHNKAMDYTIIEKFLIGRIKNLDFSEIIKVNEVNPEVELVRLQIEQEKAHIQEYELGIERLLNAGKRVSFGMRQELDEAKERLELLESRQAAFETVSVDTDVFTNFDMEELLDITNVGLRSRYERELAKVVDRIELRRRDNLYFVSINYKSTDLIKHWLVIENGKKKGAHLRGDFRIVKDGDTVYYGTDSFVLSSVNDGMPRIHFIENEPLNMIDYAMLLNFIDYIDQNHTVAVWMRHNMNFLFMDTSD

SEQ ID NO: 24392 - DNA, 50 bp, Klebsiella variicola
  source 1..50: mol_type = genomic DNA
ttttgtagtaatgcttcacctattcaaatggctgtggtattattacaaat

SEQ ID NO: 24393 - DNA, 40 bp, Klebsiella variicola; identical to SEQ ID NO: 20913
  source 1..40: mol_type = genomic DNA

SEQ ID NO: 24394 - DNA, 40 bp, Klebsiella variicola
  source 1..40: mol_type = genomic DNA
cttttgcgtgataatcatatgaataagtgccattacaaca

SEQ ID NO: 24395 - DNA, 50 bp, Klebsiella variicola
  source 1..50: mol_type = genomic DNA
ttttctaattctgtttcaactaattgattggctttgatgataaaacaact

SEQ ID NO: 24396 - protein, 613 aa, Cronobacter dublinensis
MRRVFVYHRVSSDQQAERGGGMERQAKLLEDYLARTKLCDDMDDPEPIVLGDPGMSAFKGHNLQHGELGTWVDQVKAGMWDGSILVLESIDRFSRLNPFEVLDYLNSIIERNVSIHDVYDNNIINRKDISAFTRALNQADRAFKESKFKSDRISAGWRRKREQAFNNGTIVTKKRPVWIDVVDNKYVLNEKAAVVKEIFRLYQTGIGCPTIAKILQKKEGSEWKFDRAWSSEHVHKILRNKRVTGKILISEIIRDYETDDKEKQFTQNFYDMDVYPVVIDEKEFELVQELLKSRRPNAGRATTKKDGDQEIVVKHNMFSGIFRCGDCGQGMFHNVVKTKRNPKKSEARIEEYRYIRCIVERDDLCHNKAMDYTIIEKFLIGRIKNLDFSEIIKVNEVNPEVELVRLQIEQEKAHIQDYELGIERLLNAGKRVSFGMRQELDEAKERLELLESRQAAFETVSVDTDVFTNFDMEELLDITNVGLRSRYERELAKVVDRIELRRRDNLYFVSINYKSTDLIKHWLVIENGKKKGAHLRGDFRIVKDGDTVYYGTDSFVLSSVNDGMPRIHFIENEPLNMIDYAMLLNFIDYIDQNHTVAVWMRHNMNFLFMDTSD

SEQ ID NO: 24397 - DNA, 50 bp, Cronobacter dublinensis; identical to SEQ ID NO: 24392
  source 1..50: mol_type = genomic DNA

SEQ ID NO: 24398 - DNA, 40 bp, Cronobacter dublinensis; identical to SEQ ID NO: 21958
  source 1..40: mol_type = genomic DNA

SEQ ID NO: 24399 - DNA, 40 bp, Cronobacter dublinensis
  source 1..40: mol_type = genomic DNA
ttttcgcttgataatcatatgaataagtgccattacaaca

SEQ ID NO: 24400 - DNA, 50 bp, Cronobacter dublinensis; identical to SEQ ID NO: 24395
  source 1..50: mol_type = genomic DNA

SEQ ID NO: 24401 - protein, 526 aa, Clostridium botulinum
MKAAIYSRKSKFTGKGDSIENQIQMCKDYGTKNLNIDKFYIYEDEGFSGGNINRPKFKALLSDIKKKKFDVLICYRLDRISRNVADFSSTLELLRSNDISFVSIKEQFDTSTPMGKAMVYIASVFAQLERETIAERVRDNMLELAKTGRWLGGQTPLGFKSKKIVYIDEEYKERSLYKLSPIMEELEIVKYIYSTYLETHSLRKTVSRLYDKRFKTKNGGDWGVSQVQNILVSPTYVKSSEEVKDFLISQGMSFAGEVNGNGIFLYNKKKGKTKHRDINEWIAAVGKHKGIIESDIWLEVQSLLSSKRFTRGRLGTGSNSLFSGLIKCGKCGSNMTIIHGGVSKGIRKHYYTCSLKRASKGSECNNSNLTVDITDQLLINHLKNIKVKDIKKELNDLYIKKNNTNEIQLIENRIKDEEKAIENLTMQLSTISNSIVSKPIINLLEKKTFELEKLKKQYKELKNNLTKEQLQIVDITNLTDNLNNFKNMIDTAKNIEQKKMLIKSVVENIIVLDGTIEINIKNAKPK

SEQ ID NO: 24402 - DNA, 50 bp, Clostridium botulinum
  source 1..50: mol_type = genomic DNA
atatgctttatgttttgacgagtatcaacatgatagaacatagtacatat

SEQ ID NO: 24403 - DNA, 40 bp, Clostridium botulinum
  source 1..40: mol_type = genomic DNA
tgatcctgtagagattgcttctgtgtgacctacaaataag

SEQ ID NO: 24404 - DNA, 40 bp, Clostridium botulinum
  source 1..40: mol_type = genomic DNA
tgatcctgtagagattgctaatgtgtgacctacaaataag

SEQ ID NO: 24405 - DNA, 50 bp, Clostridium botulinum
  source 1..50: mol_type = genomic DNA
atatgacttgagacttgaagaataaatacaagattgtcaagtggacatat

SEQ ID NO: 24406 - protein, 461 aa, Vibrio parahaemolyticus
MKAGVKVAVTKWNTVFETNMSGPSGLSARIMLEVGLHLANEESRVKSERILATNKILADQGIKTTAKTPIWLYRTKDRTGFQVVEENANVIRRIFELRKNGFGAKRIINELGPLKLARYKYNEEGELVASSYNRPLSESSVNRYLRDQTVIGYRDGVQFCEPIVEEKLFHACQQKIRKQKGGKVTKIKNVLSGLAYCEKCGKKMVFGGESISPKGKIRSYIKCNNKAKTGGCNAKSIRYEPLERCVYNLLHTLNDREEITVDIGQLEMGLASAQEQAANAQSYMIRYPNDSSWVGIYEEQKAKVYELNNLIADAKAERSGRLTEMNLDLSRHENKALFNQILKDYDVKAVLGYESTSDKPRVKLVIGAWGDFVVSATVDKSVSSRRVRAAMKLGAEGIDFDKRDRGHIQFKEPEKFVSDDAKRTAFIDSLTKNFSQTMSDQEKQFILDKVQQQNTNQGSED

SEQ ID NO: 24407 - DNA, 50 bp, Vibrio parahaemolyticus
  source 1..50: mol_type = genomic DNA
gagtggtttattatttacttttctaatgacaactatataataaacaactc

SEQ ID NO: 24408 - DNA, 40 bp, Vibrio parahaemolyticus; identical to SEQ ID NO: 5003
  source 1..40: mol_type = genomic DNA

SEQ ID NO: 24409 - DNA, 40 bp, Vibrio parahaemolyticus
  source 1..40: mol_type = genomic DNA
aggcaagccacagttggcaactgaaacaaacgggccacgt

SEQ ID NO: 24410 - DNA, 50 bp, Vibrio parahaemolyticus
  source 1..50: mol_type = genomic DNA
gattggtttatcatttacatttctacttacatcaacagtttacacaccac

SEQ ID NO: 24411 - protein, 546 aa, Shewanella baltica
MKNLTKVYLYQRFSSPKQELGSSLYRQGNEQRAWLERNKDWAVEAGLYEDKGLSGHTGAHLDKGSLGRLVNDIEIGRVRHGSIILVERFSRLSRMKVSETQELLRKIWKAGVTIVTAKDDARYGPEGEDDLGIQVKLLVEIHGAFSESQNRKERVLGSYNKRRDEARKGITPNIRKPFWLNSDGTVNDKHVVIKDMFELYLSGNGQRNILNQLKDKYPDLLEVQRMNPSTVIKWITSDVVLGYWRINEFECYKVYKAAVDESIYYKAQTVHEKRLHKNVNPNREWHLSGLVQCGHCGNGCSIQKSKHSWPVLRCSYKQRLARNACSSKGIFPYLLPLYFFRSNLEHFFLARLMELSQNEKANLTVSKLDIEIIKCNEKLQVLENKLLSSENEMINSLLKVMEKITAQLNELKGQREEAYSIATGNSILNWVDLKDITSDSKRLNLLFQRLDSKMVIKDDEVSFDHGDLRKTIKYLGYSRKDEAYRIEKNYADMGDLEDEHAVIFIDDQIVAYDELANMLEKMGEVTQLEANIKVLTNLHPKQVIID

SEQ ID NO: 24412 - DNA, 50 bp, Shewanella baltica
  source 1..50: mol_type = genomic DNA
tgtatgcacacctatgcttaaagtgagtactgtggtaaggtgtgcataca

SEQ ID NO: 24413 - DNA, 40 bp, Shewanella baltica
  source 1..40: mol_type = genomic DNA
tatcgatcattgtaactgtgagttaaaagcggctcagacg

SEQ ID NO: 24414 - DNA, 40 bp, Shewanella baltica
  source 1..40: mol_type = genomic DNA
tatcgatcattgtaactgttggttaaaagcggctcagacg

SEQ ID NO: 24415 - DNA, 50 bp, Shewanella baltica
  source 1..50: mol_type = genomic DNA
tgtaagcaagttgatgataaaagttgctactgtggtactaactgcctaat

SEQ ID NO: 24416 - protein, 556 aa, Rhodococcus hoagii
MIYRTTNAGPAPKALIVVRLSRLTDESTSPERQRRECEKLCSERGWEVVGVAEDLDVSAGSTSPFDRPSLREWLAKPEEYDVIVFYRVDRLVRRMHHLTDMIRWSEDYGVNLVSATESHFDLSTAVGKVIAQLVASFGEMELEAISERNSNAFRHNVRAGKWRGGIPPWGYLPEQQDDGTWRYVQDAATALVIRSVVDRVLSNEPLRAIAHDLTERGIPTAKDRFAQHQGREVQGYKWHPGPLKRSLSSPTLLGYAVTREPLTDAQGRIQRESNGKKKFGPETIVRADDGSPIVRAEPILTVAVFERLQAELGNRENRKEPTKRSNALLLQVIKCGVCGNPAYRLKGGTGRAVRYRCSSAQYKTTCGNRTIRQDYADDVVTTLVLGMLGESERKERVWDSGSDHSAELAELDSTLTDLVGQLGTGPFKAGTPQRIKLDQRIAELAARQEELAKAETKAAGWTWQPTGELFSDWWERQTIEQQNVWLRTMGVELTWTFDGDAKEPNVRLDLGDLETLTKQLNPAGSVQEWQKVFDAMTGTGVSSIELPSSGDRLRSR

SEQ ID NO: 24417 - DNA, 50 bp, Rhodococcus hoagii
  source 1..50: mol_type = genomic DNA
tagttgtaaaaccgtgcaattgagtactcggttgtatagaattactaccc

SEQ ID NO: 24418 - DNA, 40 bp, Rhodococcus hoagii
  source 1..40: mol_type = genomic DNA
cggcatgtccaccgccgagtacgccatcggcaccattgcg

SEQ ID NO: 24419 - DNA, 40 bp, Rhodococcus hoagii
  source 1..40: mol_type = genomic DNA
cggcatgtccaccgccgagttcgccatcggcaccattgcg

SEQ ID NO: 24420 - DNA, 50 bp, Rhodococcus hoagii
  source 1..50: mol_type = genomic DNA
tagttcttggtgtttgcaatttagttctcagtgtttagtaattactaacc

SEQ ID NO: 24421 - protein, 525 aa, Pseudomonas aeruginosa
MRFSSTRQEDGSTRTRQNGLIEAFVAKHGLEVDRHLEDAGTSAFHGKHAGSDGVLGQFLKEVRKGEIEKGSYLLIENFDRLSRDKIVRSNKIFTDLLFSGIKIVILDKNKVYDADNLDFGDWITALVEFERANAESQRKSDFSSKAWKLNRDKMHNGEIVTRKVPTWLKVENNTFIIDEVKIDRIRTLFRLSLSKGLQEATKEYNTLYGEKLAIHQAQYLLSNRKLIGEHQPQKIHYNENGRLIRKDEGNPIPNYYPQVIDEDLFLKVQSVITSRKPFSGRYSAQRYNVFRDLIFCRFCGGTIRYMNKGERDYFICTNSMTGNCGLKGQQSIRGKKVFSRFFKFTNGINIGTLLEENTNADEIKNELMKLENQKTKISNRLYDFKSQIKKMIMEGETIPETYNEIIVDLENSIIKLDDEIEIKNKELNKIISSFKSFYDLKEIDIEKIIYDKSQEAIEKRVQYNNELKNIIKKIQIDYLNDILHVEFSNGVNRHILNDELANEYNKDEIENSWASVVKSIAQKTN

SEQ ID NO: 24422 - DNA, 50 bp, Pseudomonas aeruginosa
  source 1..50: mol_type = genomic DNA
atggaaccttttgcagagcatatccagacatgctatgttattagttccac

SEQ ID NO: 24423 - DNA, 40 bp, Pseudomonas aeruginosa
  source 1..40: mol_type = genomic DNA
ccgcgcatagcagtagatgcagccatgctcgcaaccacgg

SEQ ID NO: 24424 - DNA, 40 bp, Pseudomonas aeruginosa
  source 1..40: mol_type = genomic DNA
ccgcgcatagcagtagatgtagccatgctcgcaaccacgg

SEQ ID NO: 24425 - DNA, 50 bp, Pseudomonas aeruginosa
  source 1..50: mol_type = genomic DNA
atagtacctggcacagagcaaatttacaaatgttgtttcattagatccac

SEQ ID NO: 24426 - protein, 525 aa, Pseudomonas oleovorans; identical to SEQ ID NO: 24421

SEQ ID NO: 24427 - DNA, 50 bp, Pseudomonas oleovorans; identical to SEQ ID NO: 24422
  source 1..50: mol_type = genomic DNA

SEQ ID NO: 24428 - DNA, 40 bp, Pseudomonas oleovorans
  source 1..40: mol_type = genomic DNA
cctggcgaagcagtagatgcagccgtgctcgcagccacgg

SEQ ID NO: 24429 - DNA, 40 bp, Pseudomonas oleovorans
  source 1..40: mol_type = genomic DNA
cctggcgaagcagtagatgtagccgtgctcgcagccacgg

SEQ ID NO: 24430 - DNA, 50 bp, Pseudomonas oleovorans; identical to SEQ ID NO: 24425
  source 1..50: mol_type = genomic DNA

SEQ ID NO: 24431 - protein, 533 aa, Pseudomonas mendocina
MTKKCFPYVRFSSTRQEDGSTRTRQNGLIEAFVAKHGLEVDRHLEDAGTSAFHSKHAGSEGVLGQFLKEVRKGEIEKGSYLLIENFDRLSRDKIVRSNKIFTDLLFSGIKIVILDKNKIYDADNLDFGDWITALVEFERANAESQRKSDFSSKAWKLNRDKMHNGEIVTKKVPNWLKVENNTFIIDEVKIDRIRTLFRLSLSKGLQEATKEYNSLYGEKLAIHQAQYLLSNRKLIGEHQPQKIHYNENGRLIRKDEGNPIPDYYPQVIDEDLFLKVQSVITSRKPFSGRYSAQRYNVFRDLIFCRFCGGTIRYMNKGERDYFICTNSMTGKCGLKGQQSIRGKKVFGRFFKFTNGINIGTLLEENTNADEIKNELMKLQNQKTKISNRLDDFKSQIKKMIMEGETIPETYNEIIVDLENSIIKLDDEIEIKNKELNKIISSFKSFYDLKEIDIEKIIYDKSQEAIEKRVQYNNELKNIIKKIQIDYLNDILHVEFSNGVNRHILNDELANEYNKDEIENAWASVVKSMAQKTN

SEQ ID NO: 24432 - DNA, 50 bp, Pseudomonas mendocina
  source 1..50: mol_type = genomic DNA
atggaaccttttgcagagcatacccagacatgttatgttattagttccac

SEQ ID NO: 24433 - DNA, 40 bp, Pseudomonas mendocina
  source 1..40: mol_type = genomic DNA
cctggcgaagcagtagatgcagccgtgctcacagccgcga

SEQ ID NO: 24434 - DNA, 40 bp, Pseudomonas mendocina
  source 1..40: mol_type = genomic DNA
cctggcgaagcagtagatgtagccgtgctcacagccgcga

SEQ ID NO: 24435 - DNA, 50 bp, Pseudomonas mendocina; identical to SEQ ID NO: 24425
  source 1..50: mol_type = genomic DNA

SEQ ID NO: 24436 - protein, 600 aa, Streptococcus constellatus
MFERGNIESKRRNFSYEKNNVEIIKADSLVRRRGINVERHLKRVAAYCRVSSDSEDQKNSYESQVRHYKDYISQCSDWELADIYADEGISGTQTGKRQDFQRLITDCMNGEIDYIVTKAIARFARNTLDTLKYVRMLKDMQIGVYFEEENIDTLTMDGELLLTILSSVAQQEVENTSAHVKKGLKMKMQRGELIGFQGCLGYDYDIETKKLSINKEEAIIVRYIFERYLEGIGGKVIARELDELGYKSPRGLDHWNDTTVLGIIKNEKYKGDILMGKTFTVDPISKRRLSNLGEEDKYYIKDNHEAIISKEDFEKAQEIRLRRAGNKKTAANVNGKRERYSKMYAFSSMLECGFCGSLLSRRSWHCRSDYRKVVWHCVTSIKKGKKYCKHSKGLEEVAIEGAFMEAYRQLYHSNENIMTDLLETIESELNDNSLNKELKKITNKLHALLKKEENLVNLRLEGEISDSIYTEKYNEISSEKEYLAEEKVNIEATLKSEIDVKKRLTEFKQLLSSQKILTEFDRTVFESIVEKIIVGGVNSDGKIDPAMLTIIFKTGETQNKNGKKFKSKRKNATLKSDKLCSQNSDENKKLYSQEIDNTCG

SEQ ID NO: 24437 - DNA, 50 bp, Streptococcus constellatus
  source 1..50: mol_type = genomic DNA
tattcccaagagatagacaacacatgtggagtgcgtagctttgctcgcga

SEQ ID NO: 24438 - DNA, 40 bp, Streptococcus constellatus
  source 1..40: mol_type = genomic DNA
agaagataccgtcagcacatgtggaggtagtatcactgct

SEQ ID NO: 24439 - DNA, 40 bp, Streptococcus constellatus
  source 1..40: mol_type = genomic DNA
agaagataccgtcagcacaggtggaggtagtatcactgct

SEQ ID NO: 24440 - DNA, 50 bp, Streptococcus constellatus
  source 1..50: mol_type = genomic DNA
tattcccagtgggaagacagcacaggtgcagtgtgttcccctacaggcac

SEQ ID NO: 24441 - protein, 540 aa, Coprococcus eutactus; identical to SEQ ID NO: 17726

SEQ ID NO: 24442 - DNA, 50 bp, Coprococcus eutactus
  source 1..50: mol_type = genomic DNA
ttacccaacaatatctttaattaagggaaacaggagtttcccatagttaa

SEQ ID NO: 24443 - DNA, 40 bp, Coprococcus eutactus
  source 1..40: mol_type = genomic DNA
aatcgcagcgtatcaaggtgggaaacgggcagcgacatgc

SEQ ID NO: 24444 - DNA, 40 bp, Coprococcus eutactus
  source 1..40: mol_type = genomic DNA
aatcgcagcgtatcaaggttagaaacgggcagcgacatgc

SEQ ID NO: 24445 - DNA, 50 bp, Coprococcus eutactus
  source 1..50: mol_type = genomic DNA
ttcctgaacatatactttacttgatagtaacaacagtagttaatagttaa

SEQ ID NO: 24446 - protein, 561 aa, Lachnospira multipara
MARKVAIYARVSTEHEAQISALENQVQYYDDILSRHADWTLVDRYIDEGITGTSIHKRESFMRMLKDAKEKKFDLIVTREVSRFARNTVDTLQQTRTLKTYGVEVWFTEDNIWTMNDEDGELRLSIMATLAQNESKKISQRVKAGQMISFKNGVLYGNGNILGYDRVGDKLVVNKEQADTVKRIFELYLAGNGVRKIQDIMEQEGRKTATGLTRWQSGNINRVLRNPFYCGRIVYRKQYVPDYLVQKKINNHGAVDKVYVEGSHEKLVSPEDFDRAQELREKHKSVKTDKNGKAIGQSPCKHLWGNKLVCTCGHAMNRRIAHKANDGTLSYIYQCYGQLRTGTPAGRLKKGLDIEGICDNSSFMEWKLEVQADFVFKKLLGNKDAIYKEAMAMAQDVAEVKAPERNDKERLEANNRQIEKLNRQLANLVDMCSEGDISREVFRSKKKKLEDQISNLEKLNDECRQRVLELEDNGAKDRRIESLSEFIKMTAFDARAKIPDTVIDNFVDQIVFDHGAFIWYLNPVFGNEVYKQDASDWKKKQHLQSLSDKCTLQACPSTGSN

SEQ ID NO: 24447 - DNA, 50 bp, Lachnospira multipara
  source 1..50: mol_type = genomic DNA
taaatgtacgttacaggcctgtcccagcacaggcagctatcgccgagtca

SEQ ID NO: 24448 - DNA, 40 bp, Lachnospira multipara
  source 1..40: mol_type = genomic DNA
ccaattgcgagactggcagcagcacaggcagcaatcagcg

SEQ ID NO: 24449 - DNA, 40 bp, Lachnospira multipara
  source 1..40: mol_type = genomic DNA
ccaattgcgagactggcagcggcacaggcagcaatcagcg

SEQ ID NO: 24450 - DNA, 50 bp, Lachnospira multipara
  source 1..50: mol_type = genomic DNA
taaaggtacttcggagatttctcccgtcacaggcagagcgtgctgaggcc

SEQ ID NO: 24451 - protein, 587 aa, Bacteroides thetaiotaomicron
MRGAIYSRVSTEIQDYGKQTDELKDYAARNNIEVKYIFEEKVSGFKDDRTEFKKLEKLTKNDIDIILVWELSRLSRRSIFIQQTVKNFANKGICIFTKKEGLYTLNDDGTENKNAMFTIGVISMIAEQEIETLKERTISSKRRYILKEGHSYTPIAPYGYNYNLTTKQLTINEDEAEVVRRMYQLSIDGVSTNRISKILTSEGIKTKKGNPNWSLATVRDILHNPVYKGVPKYTMTIRNKKVVELVSAPPIVSEEVFEQSEKELTERRNRSKSEMVNKPLLRALIFCTDCGRRYICNSGRSIYACQTRFDNIRANYVADCHSAGISATNIEPIIWNLVERLFKSTIASSKAQERIEPYQEQLSKLSESKNNFEMQRDKINKDAAKLFDTLLLIRDTNPTVFTSKMEDFNKMSTEANDYQKEIDIIESKKQAIQRRIKAIEEIKDIDITDESEKYDILHKVIEAIKIYSVKTNQKVFTVLFASGLEYNVLYNVNKPKFRIEYAFASDETITFNKKDKLLINKLYSSVRDILPDFSITAGNNDMFDNDVCGDYSFQEVWDLLEKYNKTEVLREWKPDYTKRTINRRSKK

SEQ ID NO: 24452 - DNA, 50 bp, Bacteroides thetaiotaomicron
  source 1..50: mol_type = genomic DNA
agtattatgtgtaagtgaaaataggacaaaaaacatttgcacataatact

SEQ ID NO: 24453 - DNA, 40 bp, Bacteroides thetaiotaomicron
  source 1..40: mol_type = genomic DNA
agctcattggcgtgggtatgataaacagcatgcgaacagc

SEQ ID NO: 24454 - DNA, 40 bp, Bacteroides thetaiotaomicron
  source 1..40: mol_type = genomic DNA
agctcattggcgtgggtattttaaacagcatgcgaacagc

SEQ ID NO: 24455 - DNA, 50 bp, Bacteroides thetaiotaomicron
  source 1..50: mol_type = genomic DNA
agtattttaaaacctttaaaatactttaaaaagtatttagccctaatact

SEQ ID NO: 24456 - protein, 587 aa, Bacteroides xylanisolvens; identical to SEQ ID NO: 24451

SEQ ID NO: 24457 - DNA, 50 bp, Bacteroides xylanisolvens; identical to SEQ ID NO: 24452
  source 1..50: mol_type = genomic DNA

SEQ ID NO: 24458 - DNA, 40 bp, Bacteroides xylanisolvens
  source 1..40: mol_type = genomic DNA
ttcacattggagagggatagataaaatgcacgcaaacaat

SEQ ID NO: 24459 - DNA, 40 bp, Bacteroides xylanisolvens
  source 1..40: mol_type = genomic DNA
ttcacattggagagggatatttaaaatgcacgcaaacaat

SEQ ID NO: 24460 - DNA, 50 bp, Bacteroides xylanisolvens; identical to SEQ ID NO: 24455
  source 1..50: mol_type = genomic DNA

SEQ ID NO: 24461 - protein, 552 aa, Pseudomonas aeruginosa
MARLISYLRMSTSEQLKGFSLERQRKLIADFAAKNGLSLDESHSIEDIGRSSFSDDAEQKQLARFFEDLDAGKFSPGDVFALENIDRLTRRGAIDALLKVNTILSKGLKLAIISDREQRILEEIDVFSIITLSIDAARSHSESKNKSDKGLLNWEEKRNLAATHKIAMTAQAPAWLDTETFYIMDESKGKQIKRRRYVLNPEKSETVRLIFELFQNGNGSLKIKNILNDRKIPTFKGAEYWEPSVISKILRNPATHGFYQPQKQRTGKRDLVPAGDPIEDYFPAIVSRETFEQCQRITAANSTRKGRKGKVFTNLFTGLLRCVDCGGPVHLLNPGIDKRAKVPKSVNYIVCKKGKFTRECILKRLRYDDFEAAMLKAIQEINLADVLNENNPIEQLIKQIRTIETRIEKNNTMLENFRLAFRESGTLPSFMIEEANNAENHNKALEIERTELQAQMAQLNVYNTNIDNAIEELKTNGTYETRAKINLVLHEIIKTINIDFELVDFAIIFKNGVKRFVNDGIVQNVFTTKTGSDQYYSEIDEILNHPTSQSTK

SEQ ID NO: 24462 - DNA, 50 bp, Pseudomonas aeruginosa; identical to SEQ ID NO: 3452
  source 1..50: mol_type = genomic DNA

SEQ ID NO: 24463 - DNA, 40 bp, Pseudomonas aeruginosa; identical to SEQ ID NO: 4683
  source 1..40: mol_type = genomic DNA

SEQ ID NO: 24464 - DNA, 40 bp, Pseudomonas aeruginosa; identical to SEQ ID NO: 4684
  source 1..40: mol_type = genomic DNA

SEQ ID NO: 24465 - DNA, 50 bp, Pseudomonas aeruginosa; identical to SEQ ID NO: 5715
  source 1..50: mol_type = genomic DNA

SEQ ID NO: 24466 - protein, 492 aa, Escherichia coli
MQKQNGLAYSYIRFSSKKQEQGDSVRRQTELAEKYAHENNLTLSEKNFQDLGISAFKEGNRPSLGDMLSAIEQGAIESGSTIIIESLDRLSRRGIDVTQQIIKNILQHNVFIASLVDGLLLNRDSVNDLVSVIRIALAADLAHKESEKKSQRLRETKGQQRKAALEGKVINKILPFWLAREKDQFVFSDKLDAVKRIIELKRKGLGTNKIAKTLNDEGFAPLRSAGWNHTTVGKTISSVALYGAYQTTETTKDRKVILLDIIENYYPAVISKEEFMLLQSDAKQNKPGYKSEQNAFTGLLKHSCGGALVRKFHVVTGKTYQYHVCVNARDGNCSVTRNFKNIETALYKIMKELKLEKKTTIDRTLVKERTEIQEKISSLNEMLMTMAKPPMSVLTTISNLEEKLQELDQEISKQTDMVISENAVDFNLLSEVKDPLELNMLLKRVIKNIVVYNLEKSWRIKVFYLNGHSQSFRWDGKKISFKSDTKKIIEFH

SEQ ID NO: 24467 - DNA, 50 bp, Escherichia coli
  source 1..50: mol_type = genomic DNA
aattagttgctttgaaactatactgtgatattgttgctaaggagcaaaat

SEQ ID NO: 24468 - DNA, 40 bp, Escherichia coli; identical to SEQ ID NO: 4473
  source 1..40: mol_type = genomic DNA

SEQ ID NO: 24469 - DNA, 40 bp, Escherichia coli
  source 1..40: mol_type = genomic DNA
cttactgccgaactgcatggcgacgttactggaaactaac

SEQ ID NO: 24470 - DNA, 50 bp, Escherichia coli
  source 1..50: mol_type = genomic DNA
aattagttggtcataaaccatccagccagatagatgaaagggaggataat

SEQ ID NO: 24471 - protein, 518 aa, Cronobacter sakazakii
MQKTVYCYARVSSRGQAKDGYGMPRQQTMLRDYVAAYDDSLHNRGYELGSVNWLYAEGISAYNGKNIEDGSVLKSFIDDVLERKIINAVLVIENLDRFSRAEPIKAANLFLNLITAGCDIHEVETETIHHSSSDLSIITGGLQRAHNESKRKARLSIKNWDERIKNAIDGKAVLTNRVPSWLEVKDNGYVIKEGEKEKYNLIFQMYADGFGPAAIRDVLKERNMLINDSEPTIAHLNKIIKDERLIGKFNSTGRKKLSGLVIYPVVVDLSLFHIVDQLRKQRNPVGKIHRKANNLFAGLCICMECGRYVQVNSVEPSGESYFRCGGSLVKIDRCQERGFKYKLFENALLQHIRNFDFSSLNANESEVQIRVNHLSIELLTHIKYRDEILQDIEKEDIPDPNDRRILKNIQKKIGEIESEISNLKRLNVNVSTFDELKKYSEELRDPLNVDLRLDFNIKVKRVIKSIIIKRYSDTIFLVVNYIAINEKQAIVINSKSGEVLYMGVQNDDLKKVEHLIRN

SEQ ID NO: 24472 - DNA, 50 bp, Cronobacter sakazakii
  source 1..50: mol_type = genomic DNA
tacagtaatttactgttaattaccaccatgatatactgaattttactgtc

SEQ ID NO: 24473 - DNA, 40 bp, Cronobacter sakazakii; identical to SEQ ID NO: 5718
  source 1..40: mol_type = genomic DNA

SEQ ID NO: 24474 - DNA, 40 bp, Cronobacter sakazakii; identical to SEQ ID NO: 5719
  source 1..40: mol_type = genomic DNA

SEQ ID NO: 24475 - DNA, 50 bp, Cronobacter sakazakii; identical to SEQ ID NO: 920
  source 1..50: mol_type = genomic DNA

SEQ ID NO: 24476 - protein, 518 aa, Cronobacter sakazakii
MQKTVYCYARVSSRGQAKDGYGMPRQQTMLRDYVAAYDDSLHNRGYELGSVNWLYAEGISAYSGKNIEDGSVLKSFIDDVLERKIINAVLVIENLDRFSRAEPIKAANLFLNLITAGCDIHEVETETIHHSSSDLSIITGGLQRAHNESKRKARLSIKNWDERIKNAIDGKAVLTNRVPSWLEVKDNGYVIKEGEKEKYNLIFQMYADGFGPAAIRDVLKERNMLINDSEPTIAHLNKIIKDERLIGKFNSTGRKKLSGLVIYPVVVDLSLFHIVDQLRKQRNPVGKIHRKANNLFAGLCICMECGRYVQVNSVEPSGESYFRCGGSLVKIDRCQERGFKYKLFENALLQHIRNFDFSSLNANESEVQIRVNHLSIELLTHIKYRDEILQDIEKEDIPDPNDRRILKNLQKKIGEIESEISNLKRLNVNVSTFDELKKYSEELRDPLNVDLRLDFNIKVKRVIKSIIIKRYSDTIFLVVNYIAINEKQAIVINSKSGEVLYMGVQNDDLKKVEHLIRN

SEQ ID NO: 24477 - DNA, 50 bp, Cronobacter sakazakii; identical to SEQ ID NO: 24472
  source 1..50: mol_type = genomic DNA

SEQ ID NO: 24478 - DNA, 40 bp, Cronobacter sakazakii; identical to SEQ ID NO: 6878
  source 1..40: mol_type = genomic DNA

SEQ ID NO: 24479 - DNA, 40 bp, Cronobacter sakazakii
  source 1..40: mol_type = genomic DNA
ggcgatgatgcctatcacctacatcagttcaatgagtgta

SEQ ID NO: 24480 - DNA, 50 bp, Cronobacter sakazakii; identical to SEQ ID NO: 920
  source 1..50: mol_type = genomic DNA

SEQ ID NO: 24481 - protein, 518 aa, Enterobacter cloacae; identical to SEQ ID NO: 24471

SEQ ID NO: 24482 - DNA, 50 bp, Enterobacter cloacae; identical to SEQ ID NO: 24472
  source 1..50: mol_type = genomic DNA

SEQ ID NO: 24483 - DNA, 40 bp, Enterobacter cloacae
  source 1..40: mol_type = genomic DNA
ggcaataatgccgattaccaccatcagctcaatgagcgtg

SEQ ID NO: 24484 - DNA, 40 bp, Enterobacter cloacae
  source 1..40: mol_type = genomic DNA
ggcaataatgccgattacctacatcagctcaatgagcgtg

SEQ ID NO: 24485 - DNA, 50 bp, Enterobacter cloacae; identical to SEQ ID NO: 920
  source 1..50: mol_type = genomic DNA

SEQ ID NO: 24486 - protein, 481 aa, Streptococcus agalactiae; identical to SEQ ID NO: 2986

SEQ ID NO: 24487 - DNA, 50 bp, Streptococcus agalactiae; identical to SEQ ID NO: 2997
  source 1..50: mol_type = genomic DNA

SEQ ID NO: 24488 - DNA, 40 bp, Streptococcus agalactiae; identical to SEQ ID NO: 21063
  source 1..40: mol_type = genomic DNA

SEQ ID NO: 24489 - DNA, 40 bp, Streptococcus agalactiae
  source 1..40: mol_type = genomic DNA
gttgggcttaacgtgcttcaagatgaaagtgatactgagc

SEQ ID NO: 24490 - DNA, 50 bp, Streptococcus agalactiae
  source 1..50: mol_type = genomic DNA
taaagaaatttgcattacatagttaaaatcagggttattcaaactttttg

SEQ ID NO: 24491 - protein, 481 aa, Streptococcus agalactiae; identical to SEQ ID NO: 2986

SEQ ID NO: 24492 - DNA, 50 bp, Streptococcus agalactiae; identical to SEQ ID NO: 2997
  source 1..50: mol_type = genomic DNA

SEQ ID NO: 24493 - DNA, 40 bp, Streptococcus agalactiae; identical to SEQ ID NO: 22358
  source 1..40: mol_type = genomic DNA

SEQ ID NO: 24494 - DNA, 40 bp, Streptococcus agalactiae
  source 1..40: mol_type = genomic DNA
aaccaatgctaccaaacataataaaagtgtaaatgcttta

SEQ ID NO: 24495 - DNA, 50 bp, Streptococcus agalactiae; identical to SEQ ID NO: 24490
  source 1..50: mol_type = genomic DNA

SEQ ID NO: 24496 - protein, 514 aa, Agathobaculum butyriciproducens
MPTDYALYLRKSRADLEAEAHGEGDTLARHEHILMELAKSRALPIGAIYREIVSGERIANRPVMQQLLSEVEDGRWKGVLVTETSRLARGDTIDQGIVAQAFKFSGTLIVTPAKTYDPTQEADEEWMEFGLFMSRQEYRMIRRRQLAGTRASKKEGHYVPGRPPYGYERYKLDGRGWSLRPVEPQAGVIRTIYDMYLSGKGFSEIANELNAMKIRTPLDKKWVPATTRAILQNPHYAGFIPSAMKVNTKIVQKGKLITKRPVNKNCELYEGIHEAIIPRDVWYSVQQRMKDTVTPRVPRKYQQMNPLAGLVYCDQCGKLMSRHPYRREDKVRFGCENPSCSTVSSLFEDVENLVLQSLREFLHEIELSSPTLLDTKSEEIALQNIEKQLTDINHRLQRTYELLEDGVYSKETFLQRQSAISQDQTALLNTKHEIERKLHNKQTDIEAQKDSAPLIRHVLDVYPTLEDPKEQNLLLKQVIRRIDYHKTVRVYGKAKSDLHLTIHPKIAIPQTSNI

SEQ ID NO: 24497 - DNA, 50 bp, Agathobaculum butyriciproducens
  source 1..50: mol_type = genomic DNA
aacctctaacatttaagttattgctgtcaaagcataaaatgttataggtt

SEQ ID NO: 24498 - DNA, 40 bp, Agathobaculum butyriciproducens
  source 1..40: mol_type = genomic DNA
aaccagctgcaactgctgctgctgcgcgctgcatgaagta

SEQ ID NO: 24499 - DNA, 40 bp, Agathobaculum butyriciproducens
  source 1..40: mol_type = genomic DNA
aaccagctgcaactgctgctactgcgcgctgcatgaagta

SEQ ID NO: 24500 - DNA, 50 bp, Agathobaculum butyriciproducens
  source 1..50: mol_type = genomic DNA
aacatttcagccctaaggtatttctatataagcacactacattatcggtt

SEQ ID NO: 24501 - protein, 590 aa, Vibrio diabolicus
MAHEVQLRGKITVITAYSYLRLSTKEQIKGDGVRRQMEATERACKENGWQLSKTTFRDLGRSAYHGHHLKHGDFGTILQLIKEGVIASGSVLILENVDRMSRQDPQESVYMMLDIIRAGVKIYTLHDKRLHEREGKDNFMNLMVWALAAERAHDESRVKSERVRQAKAEKRKQAREEGKAIVGRVPSWIRKVTPKGGEPYYELDEERAEVVRLIFQLKLDGYGLGAITNELIKRGIPPMGNRNVRKDLDPKWQVSTVRKWLRSPTVYGQYQPHIRVDGKKVPEGDPIDNFYPAVVDRETFLKVQTILGKHSRGRTAEEGENMLRGLLRCACGGNLSLHITKRGDKRYKYLRCNHDFMDTCQSKRFDYDGIESLIVRAVHSIDWADVLNVQSGKNKETIKTLKERRDVLIADLEETNKRMLNLSNQLEVMDEPSAFLLNRLSELEKGAKQKQVDLDAIESELNSVERVEEEADSKFRSSFEIVELIGFNTTQVEKEDMVKKRVKMNAVLRREIDHILVTKVDNQDWWLWSALTTGGVPLFDLKINAKASKGIIDSEYSTMPELSYYKIDRRKYNRVNRKQVSLVDSVELKS

SEQ ID NO: 24502 - DNA, 50 bp, Vibrio diabolicus
  source 1..50: mol_type = genomic DNA
tttttactaattgttgatttcttcaaggataaatccacatttggtaaaac

SEQ ID NO: 24503 - DNA, 40 bp, Vibrio diabolicus
  source 1..40: mol_type = genomic DNA
cgttgccgttgatttcttcaatatgggcgcgatggaaaac

SEQ ID NO: 24504 - DNA, 40 bp, Vibrio diabolicus
  source 1..40: mol_type = genomic DNA
cgttgccgttgatttcttcagtatgggcgcgatggaaaac

SEQ ID NO: 24505 - DNA, 50 bp, Vibrio diabolicus
  source 1..50: mol_type = genomic DNA
agtctaatgagccttgatttcttcaggggaaaaaactgtgctggtaaaac

SEQ ID NO: 24506 - protein, 531 aa, Vibrio campbellii
MSIAYSYIRFSSAQQAQGDSLRRQTQLAQQYCEKHNLTLSDTNFQDLGVSAFHSVNAQEDSGLGQFLAALRQGLIPEGSYLLVESLDRLSRAKVQTALEQMLGIIRCGVKIVTLIDDCIYDRDSDSRDLIISLTIMERAHNESKTKSERLKAAWDNKRQNPKSTNRHGSTPFWLTLNSDKRTYTVKEEYAELIRKIYQLSIDGWGLVKIVRYLNECGIPAPKGRSWAITTVSKLLNSKAALGHYEPSQGRKSLNTVIKDYYPPIIDEKTYYTSLQRKKERSAPESAGRKTTYPNPLVHIAKCRLCGSSMFFENKQPSLNYLTCREFKKKNCTNKPIRMELIYRFIYEVFNSPMYHQQHVKLVDKSKQKGVNKLAELKGRYEAERKAYEELLEASSSFSDPIILKDLQRRSALILELSKQMEKEKAKEAVEKARTVHINFTEALQLTVNAFHLPLEGIKVEELSTDELFNTRVRLNRILKQAFNHLSIFHCNESKRITIETEVTEDYPIDLRYETNQKAIKEPMKNRIWSVY

SEQ ID NO: 24507 - DNA, 50 bp, Vibrio campbellii
  source 1..50: mol_type = genomic DNA
aaaaggttaatattgcatgtgtacttgatggtatgtaacatttacctttt

SEQ ID NO: 24508 - DNA, 40 bp, Vibrio campbellii
  source 1..40: mol_type = genomic DNA
aagtggtttctgtgcgcagttgattgacggaaacccaagc

SEQ ID NO: 24509 - DNA, 40 bp, Vibrio campbellii
  source 1..40: mol_type = genomic DNA
aagtggtttctgtgcgcagatgattgacggaaacccaagc

SEQ ID NO: 24510 - DNA, 50 bp, Vibrio campbellii
  source 1..50: mol_type = genomic DNA
aaagagttcatttggaatgtttacatgaatggatgttaccattaactttt

SEQ ID NO: 24511 - protein, 490 aa, Pseudomonas syringae
MPVAFSYVRYSSLRQAHGDSLRRQTAMVAEWLKHHPEYVLSADDAYQDLGRSGFSGAHLDNAFGRLRAAVSTGIIKPGDCILIEAIDRAGRLAPSIMLNLLTEIVNAGVSLISLDDGITYDSDPYKSNNLFLLVAKVQQAYQYSDALSRRVKSAYERKREAARSGEATGRRAPIWIKTEYPNGKKAQPVVSLREDLAPLVAQAFQDYADGLGERRIHHRLRDQHPELAKLSTTSLKRWMRNPTAIGNWNDIPDVYPAVVSKELWYRVQKRLNQKSKPKSAASNHLLVGLVKCAKCRANFHVHITPDNAAMKCGKRHRLGDQGCSNKKSLPMAVLDFIRSQTTFKALQRASLSRNLTASEKRALEIEGELAELNRQAATAAEGAVKYGMSAFGPALDRITAQIGVLEDEKLTLVSKSAPSTEGEMIDLQEELLDVDEMRLNALLQEAEYVMWCDDRTITVEEPSIEFSADRQVITYLGKCQRQLKSDPLPC

SEQ ID NO: 24512 - DNA, 50 bp, Pseudomonas syringae
  source 1..50: mol_type = genomic DNA
aaaatacgcaacgcaactatttgcgcgctataggttgcaatgttatgatt

SEQ ID NO: 24513 - DNA, 40 bp, Pseudomonas syringae
  source 1..40: mol_type = genomic DNA
aatccgtacgcccatgaatgcagtgatcggaatgctggag

SEQ ID NO: 24514 - DNA, 40 bp, Pseudomonas syringae
  source 1..40: mol_type = genomic DNA
aatccgtacgcccatgaatagagtgatcggaatgctggag

SEQ ID NO: 24515 - DNA, 50 bp, Pseudomonas syringae
  source 1..50: mol_type = genomic DNA
aaactatgttattcaaggatctgcaggctatactttattgaggtatgatt

SEQ ID NO: 24516 - protein, 547 aa, Pseudomonas amygdali
MPVAFSYVRYSSLRQAHGDSLRRQTAMVAEWLKHHPEYVLSADDAYQDLGRSGFSGAHLDNAFGRLRAAVSTGIIKPGDCILIEAIDRAGRLAPSIMLNLLTEIVNAGVSLISLDDGITYDSDPYKSNNLFLLVAKVQQAYQYSDALSRRVKSAYERKREAARSGEATGRRAPIWIKTEYPNGKKAQPVVSLREDLAPLVAQAFQDYADGLGERRIHHRLRDQHPELAKLSTTSLKRWMRNPTAIGNWNDIPDVYPAVVSKELWYRVQKRLNQKSKPKSAASNHLLVGLVKCAKCRANFHVHITPDNAAMKCGKRHRLGDQGCSNKKSLPMAVLDFIRSQTTFKALQRASLSRNLTASEKRALEIEGELAELNRQAATAAEGAVKYGMSAFGPALDRITAQIGVLEDEKLTLVSKSAPSTEGEMIDLQEELLDVDEMRLNALLQEAEYVMWCDDRTITVEEPSIEFSADRQVITYLGKDRVKGVFRITWNGARIDLPDLLSAPQRAELEQHMVQEARYKSGELERTVMRFNSDTGDMDHVSGPPLKS

SEQ ID NO: 24517 - DNA, 50 bp, Pseudomonas amygdali; identical to SEQ ID NO: 24512
  source 1..50: mol_type = genomic DNA

SEQ ID NO: 24518 - DNA, 40 bp, Pseudomonas amygdali; identical to SEQ ID NO: 24513
  source 1..40: mol_type = genomic DNA

SEQ ID NO: 24519 - DNA, 40 bp, Pseudomonas amygdali; identical to SEQ ID NO: 24514
  source 1..40: mol_type = genomic DNA

SEQ ID NO: 24520 - DNA, 50 bp, Pseudomonas amygdali; identical to SEQ ID NO: 24515
  source 1..50: mol_type = genomic DNA

SEQ ID NO: 24521 - protein, 507 aa, Escherichia fergusonii
MKRVISYIRFSSEKQAKGDSLRRQSKMVTDWLKAHPEYYLDQDLSFRDLGVSGFTGKHLKGGLGDFLTAIEKGLVKAGDTLLIESLDRLSRQAVDRASELLRNILRSGVDVVTLSDGEHYTRESLRDPLALIKSILIMQRAHEESLRKSERIQAAWNRKKELISEGIKISKRCPAWLRLNDDRKSFSVIPDKVETVKRCFQLRLEGKSIWEIVRTLNDEGHQTLNQYKAGKFGQTSVQDLLKNRSVIGYFTPKGREEIAGYFPPIIPETDFYKVQQLSYSRYGRKPASDKPLSVNLFKGVIRCSECGHALIITGFSDTRSGIYRCPLRNENRCSAKGLSRKQTDGTLLTLLSRLDRFDSDTTNTIDTLKLHREHISSNIEKLVQLSLEIEDLSAITSKLKQLKGELSQVDADIEKETQRLKSIDVGCLSDCDLTTKAGRIEAQLIIKSAVKEVVLNTAKRRCKVTFHNGKVIDLPITENPSEDVTEAIQSLSEVIERGLIDADVVEI

SEQ ID NO: 24522 - DNA, 50 bp, Escherichia fergusonii
  source 1..50: mol_type = genomic DNA
tagtgtatttagaccttgatgatttttattagacacgtttaaatacacta

SEQ ID NO: 24523 - DNA, 40 bp, Escherichia fergusonii; identical to SEQ ID NO: 5188
  source 1..40: mol_type = genomic DNA

SEQ ID NO: 24524 - DNA, 40 bp, Escherichia fergusonii; identical to SEQ ID NO: 5749
  source 1..40: mol_type = genomic DNA

SEQ ID NO: 24525 - DNA, 50 bp, Escherichia fergusonii; identical to SEQ ID NO: 5750
  source 1..50: mol_type = genomic DNA

SEQ ID NO: 24526 - protein, 507 aa, Escherichia coli
MKRVISYIRFSSEKQAKGDSLRRQSKMVTDWLKAHPEYYLDESLTFRDLGVSGFTGKHLKGGLGDFLTAIEKGLVKAGDTLLIESLDRLSRQDVDQASELLRNILRSGVDVVTLSDGEHYTSESLKDPLALIKSILIMQRAHEESLRKSERIQAAWDAKKEAAKAGIKVSKRCPAWLKLNDDRKSFSVIPEKVETVKRCFQLRLEGKSIWEIVRTMNAEGHQTLNQYKAGSFGQSSVQDLLKNRSVIGYFTPKGCEEIAGYYPAIIDETTFYKVQQLSYARHGRKPASAKPLSVNLFKGVIRCSECGHALIITGFSDTRNGIYRCPLRNENRCSAKGLSRKQTDGTLLALLSRLDRFDSDMTNTVDTLKLHREHISSNIEKLVQLSLEIEDLSAITSKLKQLKGELSQVDADIEKETQRLKSIDVGCLSDCDLTTKAGRIEAQLIIKSAVKEVVLNTAKRRCKVTFHNGKIIDLPITENPSEDVTEAIQSLSEVTERGLIDVDVVAI

SEQ ID NO: 24527 - DNA, 50 bp, Escherichia coli; identical to SEQ ID NO: 24522
  source 1..50: mol_type = genomic DNA

SEQ ID NO: 24528 - DNA, 40 bp, Escherichia coli; identical to SEQ ID NO: 5188
  source 1..40: mol_type = genomic DNA

SEQ ID NO: 24529 - DNA, 40 bp, Escherichia coli; identical to SEQ ID NO: 5749
  source 1..40: mol_type = genomic DNA

SEQ ID NO: 24530 - DNA, 50 bp, Escherichia coli; identical to SEQ ID NO: 5750
  source 1..50: mol_type = genomic DNA

SEQ ID NO: 24531 - protein, 507 aa, Escherichia coli
MKRVISYIRFSSEKQAKGDSLRRQSKMVTDWLKAHPEYYLDQDLSFRDLGVSGFTGKHLKGGLGDFLTAIEKGLVKAGDTLLIESLDRLSRQDVDQASELLRNILRSGVDVVTLSDGEHYTRESLRDPLALIKSILIMQRAHEESLRKAERIQAAWDAKKEAAKAGIKVSKRCPAWLKLNDDRKSFSVIPEKVETVKRCFQLRLEGKSIWEIVRTLNDEGHQSMSQYKPGSFGQSSVQDLLKNRSVIGYFTPKGREEIADYFPPIIPETDFYKVQQLSYSRYGRKPASDKPLSVNLFKGVIRCSECGHALIITGFSDTRNGIYRCPLRNENRCSAKGLSRKQTDGTLLALLSRLDRFDSDTTNIIDMLRLHREHVSSNIEKLVQLSLEIEDLNAITSKLKQLKGELSQVDADIEKETQRLKSIDVGCLSDCDLTTKAGRIEAQLIIKSAVKEVVLNTAKRRCKVTFHNGKTITLSITENPSEDVTEAIQSLSEAIERGLIDVDVVEI

SEQ ID NO: 24532 - DNA, 50 bp, Escherichia coli; identical to SEQ ID NO: 24522
  source 1..50: mol_type = genomic DNA

SEQ ID NO: 24533 - DNA, 40 bp, Escherichia coli; identical to SEQ ID NO: 5188
  source 1..40: mol_type = genomic DNA

SEQ ID NO: 24534 - DNA, 40 bp, Escherichia coli; identical to SEQ ID NO: 5749
  source 1..40: mol_type = genomic DNA

SEQ ID NO: 24535 - DNA, 50 bp, Escherichia coli; identical to SEQ ID NO: 5750
  source 1..50: mol_type = genomic DNA

SEQ ID NO: 24536 - protein, 507 aa, Escherichia coli
MKRVISYIRFSSEKQAKGDSLRRQSKMVTDWLKAHPEYYLDQDLSFRDLGVSGFTGKHLKGGLGDFLTAIEKGLVKAGDTLLIESLDRLSRQAVDRASELLRNILRSGVDVVTLSDGEHYTSESLKDPLSLIKSILIMQRAHEESLRKAERIQAAWDAKKEAAKAGIKISKRCPAWLKLNDDRKSFSVIPDKVETVKRCFQLRLEGKSIWEIVRTLNDEGHQTLNQYKAGKFGQTSVQDLLKNRSVIGYFTPKGCEEISGYYPAIIDETTFYKVQQLSHYRYGRKPVSDKPLSVNLFKGVIRCSECGHALIITGFSDTRSGIYRCPLRNENRCSAKGLSRKQTDGTLLTLLSRLDRFDSDTTNTIDTLKLHREHISSNIEKLVQLSLEIEDLSAITSKLKQLKGELSQVDADIEKETQRLKSIDVGCLSDCDLTTKAGRIEAQLIIKSAVKEVVLNTAKRRCKVTFHNGKVIDLPITENPSEDVTEAIQSLSEVTERGLIDVDVVEI

SEQ ID NO: 24537 - DNA, 50 bp, Escherichia coli; identical to SEQ ID NO: 24522
  source 1..50: mol_type = genomic DNA

SEQ ID NO: 24538 - DNA, 40 bp, Escherichia coli; identical to SEQ ID NO: 5188
  source 1..40: mol_type = genomic DNA

SEQ ID NO: 24539 - DNA, 40 bp, Escherichia coli; identical to SEQ ID NO: 5749
  source 1..40: mol_type = genomic DNA

SEQ ID NO: 24540 - DNA, 50 bp, Escherichia coli; identical to SEQ ID NO: 5750
  source 1..50: mol_type = genomic DNA

SEQ ID NO: 24541 - protein, 507 aa, Escherichia coli
MKRVISYIRFSSEKQAKGDSLRRQSKMVTDWLKAHPEYYLDQDLSFRDLGVSGFTGKHLKGGLGDFLTAIEKGLVKAGDTLLIESLDRLSRQDVDQASELLRNILRSGVDVVTLSDGEHYTRESLRDPLALIKSILIMQRAHEESLRKSERIQAAWDAKKEAAKAGIKVSKRCPAWLKLNDDRKSFSVIPEKVETVKRCFQLRLEGKSIWEIVRTLNDEGHQTLNQYKAGKFGQTSVQDLLKNRSVIGYFTPKGCEEISGYYPAIIDETTFYKVQQLSHYRYGRKPVSDKPLSVNLFKGVIRCSECGHALIITGFSDTRNGIYRCPLRNENRCSAKGLSRKQTDGTLLTLLSRLDRFDSDTTNTIDTLKLHREHISSNIEKLVQLSLEIEDLSAITIKLRQLKGELSQVDADIEKETQRLKSIDVGCLSDCDLTTKAGRIEAQLIIKSAVKEVVLNTAKRRCKVTFHNGKVIDLPITENPLEDVTEAIQSLSEVIERGLIDADVVEI

SEQ ID NO: 24542 - DNA, 50 bp, Escherichia coli; identical to SEQ ID NO: 24522
  source 1..50: mol_type = genomic DNA

SEQ ID NO: 24543 - DNA, 40 bp, Escherichia coli; identical to SEQ ID NO: 5188
  source 1..40: mol_type = genomic DNA

SEQ ID NO: 24544 - DNA, 40 bp, Escherichia coli; identical to SEQ ID NO: 5749
  source 1..40: mol_type = genomic DNA

SEQ ID NO: 24545 - DNA, 50 bp, Escherichia coli; identical to SEQ ID NO: 5750
  source 1..50: mol_type = genomic DNA

SEQ ID NO: 24546 - protein, 507 aa, Escherichia coli
MKRVISYIRFSSEKQAKGDSLRRQSKMVTDWLKAHPEYYLDQDLSFRDLGVSGFTGKHLKGGLGDFLTAIEKGLVKAGDTLLIESLDRLSRQAVDRASELLRNILRSGVDVVTLSDGEHYTKESLRDPLSLIKSILIMQRAHEESLRKAERIQAAWDAKKEAAKAGIKVSKRCPAWLKLNDDRKSFSVIPEKVETVKRCFQLRLEGKSIWEIVRTLNAEGHRSMNQYKPGKFGQTSVQDLLKNRSVIGYFTPKGCEEIAGYYPSVIDETTFYKVQQLSHSRYGQKPASDKPLSVNLFKGVIRCSECGHALIITGFSNTRNGIYRCPLRNENRCSAKGLSRKQTDGTLLTLLSRLDRFDSDTTNTIDTLKLHREHISNNIEKLVQLSLEIEDLSAITSKLKQLKGELSQVDADIEKETQRLKSIDTGSLSDCDLTTKAGRIEAQLIIKSAVKEVVLNTAKRRCKVTFHNGRAITLPITENPSEDVTEAIQSLSEVTERGLIDVDEVII

SEQ ID NO: 24547 - DNA, 50 bp, Escherichia coli; identical to SEQ ID NO: 24522
  source 1..50: mol_type = genomic DNA

SEQ ID NO: 24548 - DNA, 40 bp, Escherichia coli; identical to SEQ ID NO: 5188
  source 1..40: mol_type = genomic DNA

SEQ ID NO: 24549 - DNA, 40 bp, Escherichia coli; identical to SEQ ID NO: 5749
  source 1..40: mol_type = genomic DNA

SEQ ID NO: 24550 - DNA, 50 bp, Escherichia coli; identical to SEQ ID NO: 5750
  source 1..50: mol_type = genomic DNA

SEQ ID NO: 24551 - protein, 507 aa, Escherichia coli
MKRVISYIRFSSEKQAKGDSLRRQSKMVTDWLKAHPEYYLDQDLSFRDLGVSGFTGKHLKGGLGDFLTAIEKGLVKAGDTLLIESLDRLSRQAVDRASELLRNILRSGVDVVTLSDGEHYTKESLRDPLSLIKSILIMQRAHEESLRKAERIQAAWDAKKEAAKAGIKVSKRCPAWLKLNDDRKSFSVIPEKVETVKRCFQLRLEGKSIWEIVRTLNAEGHRSMNQYKPGKFGQTSVQDLLKNRSVIGYFTPKGCEEIAGYYPSVIDETTFYKVQQLSHSRYGRKPASDKPLSVNLFKGVIRCSECGHALIITGFSNTRNGIYRCPLRNENRCSAKGLSRKQTDGTLLTLLSRLDRFDSDTTNTIDTLKLHREHISNNIEKLVQLSLEIEDLSAITSKLKQLKGELSQVDADIEKETQRLKSIDTGSLSDCDLTTKAGRIEAQLIIKSAVKEVVLNTAKRRCKVTFHNGRAITLPITENPSEDVTEAIQSLSEVTERGLIDVDEVII

SEQ ID NO: 24552 - DNA, 50 bp, Escherichia coli; identical to SEQ ID NO: 24522
  source 1..50: mol_type = genomic DNA

SEQ ID NO: 24553 - DNA, 40 bp, Escherichia coli; identical to SEQ ID NO: 5188
  source 1..40: mol_type = genomic DNA

SEQ ID NO: 24554 - DNA, 40 bp, Escherichia coli; identical to SEQ ID NO: 5749
  source 1..40: mol_type = genomic DNA

SEQ ID NO: 24555 - DNA, 50 bp, Escherichia coli; identical to SEQ ID NO: 5750
  source 1..50: mol_type = genomic DNA

SEQ ID NO: 24556 - protein, 507 aa, Escherichia coli
MKRVISYIRFSSEKQAKGDSLRRQSKMVTDWLKAHPEYYLDQDLSFRDLGVSGFTGKHLKGGLGDFLTAIEKGLVKAGDTLLIESLDRLSRQDVDQASELLRNILRSGVDVVTLSDGEHYTSESLKDPLALIKSILIMQRAHEESLRKSERIQAAWDAKKEAAKAGIKVSKRCPAWLRLNDDRKSFSVIPEKVETVKRCFQLRLEGKSIWEIVRTLNAEGHRSMNQYKPGKFGQTSVQDLLKNRSVIGYFTPKGCEEISGYYPAIIDETTFYKVQQLSYARYGRKPASDKPMAVNLFKGVIRCSECGHALIITGFSDTRNGIYRCPLRNENRCNAKGLSRKQTDGTLLALLSRLDRFDSDMTNVIDALKLHREHISNNIEKLVQLSLEIEDLSAITIKLKQLKGELSQVDADIEKETQRLKSIDVGCLSDCDLTTKAGRIEAQLIIKSAVKEVVLNTAKRRCKVTFHNGKVIDLSITENPSEDVTEAIQSLSEVTERGLIDVDEVII

SEQ ID NO: 24557 - DNA, 50 bp, Escherichia coli; identical to SEQ ID NO: 24522
  source 1..50: mol_type = genomic DNA

SEQ ID NO: 24558 - DNA, 40 bp, Escherichia coli; identical to SEQ ID NO: 5188
  source 1..40: mol_type = genomic DNA

SEQ ID NO: 24559 - DNA, 40 bp, Escherichia coli; identical to SEQ ID NO: 5749
  source 1..40: mol_type = genomic DNA

SEQ ID NO: 24560 - DNA, 50 bp, Escherichia coli; identical to SEQ ID NO: 5750
  source 1..50: mol_type = genomic DNA

SEQ ID NO: 24561 - protein, 507 aa, Escherichia coli
MKRVISYIRFSSEKQAKGDSLRRQSKMVTDWLKAHPEYYLDQDLSFRDLGVSGFTGKHLKGGLGDFLTAIEKGLVKAGDTLLIESLDRLSRQAVDRASELLRNILRSGVDVVTLSDGEHYTKESLRDPLSLIKSILIMQRSHEESLRKSERIQAAWDAKKEAAKAGIKVSKRCPAWLKLNDDRKSFSVIPDKVETVKRCFQLRLEGKSIWEIVRTLNAEGHRSMNQYKPGKFGQTSVQDLLKNRSVIGYFTPKGCEEIAGYYPSVIDETTFYKVQQLSHSRHGRKPVSDKPLSVNLFKGVIRCSECGHALIITGFSDTRNGIYRCPLRNENRCSAKGLSRKQTDGTLLTLLSRLDRFDSDTTNTIDMLRLHREHISSNIEKLVQLSLEIEDLNAITNKLKQLKNELSQVDADIEKETQRLKSIDTGSLSDCDLTTKAGRIEAQLIIKSAVKEVVLNTAKRRCKVTFHNGKSIILSITENPSEDVTEAIQSLSEVTERGLIDVDEVII

SEQ ID NO: 24562 - DNA, 50 bp, Escherichia coli; identical to SEQ ID NO: 24522
  source 1..50: mol_type = genomic DNA

SEQ ID NO: 24563 - DNA, 40 bp, Escherichia coli; identical to SEQ ID NO: 5188
  source 1..40: mol_type = genomic DNA

SEQ ID NO: 24564 - DNA, 40 bp, Escherichia coli; identical to SEQ ID NO: 5749
  source 1..40: mol_type = genomic DNA

SEQ ID NO: 24565 - DNA, 50 bp, Escherichia coli; identical to SEQ ID NO: 5750
  source 1..50: mol_type = genomic DNA

SEQ ID NO: 24566 - protein, 507 aa, Escherichia coli; identical to SEQ ID NO: 24551

SEQ ID NO: 24567 - DNA, 50 bp, Escherichia coli
  source 1..50: mol_type = genomic DNA
tagtgtatttagaccttgatgatttttattagacacgtttaagtacacta

SEQ ID NO: 24568 - DNA, 40 bp, Escherichia coli; identical to SEQ ID NO: 5188
  source 1..40: mol_type = genomic DNA

SEQ ID NO: 24569 - DNA, 40 bp, Escherichia coli; identical to SEQ ID NO: 5749
  source 1..40: mol_type = genomic DNA

SEQ ID NO: 24570 - DNA, 50 bp, Escherichia coli; identical to SEQ ID NO: 5750
  source 1..50: mol_type = genomic DNA

SEQ ID NO: 24571 - protein, 507 aa, Escherichia coli
MKRVISYIRFSSEKQAKGDSLRRQSKMVTDWLKAHPEYYLDESLTFRDLGVSGFTGKHLKGGLGDFLTAIEKGLVKAGDTLLIESLDRLSRQDVDQASELLRNILRSGVDVVTLSDGEHYTSESLKDPLALIKSILIMQRAHEESLRKSERIQAAWDAKKEAAKAGIKVSKRCPAWLKLNDDRKSFSVIPEKVETVKRCFQLRLEGKSIWEIVRTLNDEGHQTLNQYKAGKFGQTSVQDLLKNRSVIGYFTPKGCEEIAGYYPAIIDETTFYKVQQLSHSRYGKRSVSDKPLSVNLFKGVIRCSECGHALIITGFSDTRNGIYRCPLRNENRCSAKGLSRKQTDGTLLTLLSRLDRFDSDTTNTIDTLKLHREHISSNIEKLVQLSLEIEDLSAITSKLKQLKGELSQVDADIEKETQRLKSIDVGCLSDCDLTTKAGRIEAQLIIKSAVKEVVLNTAKRRCKVTFHNGKIIDLPITENPSEDVTEAIQSLSEVTERGLIDVDEVII

SEQ ID NO: 24572 - DNA, 50 bp, Escherichia coli; identical to SEQ ID NO: 24522
  source 1..50: mol_type = genomic DNA

SEQ ID NO: 24573 - DNA, 40 bp, Escherichia coli; identical to SEQ ID NO: 5188
  source 1..40: mol_type = genomic DNA

SEQ ID NO: 24574 - DNA, 40 bp, Escherichia coli; identical to SEQ ID NO: 5749
  source 1..40: mol_type = genomic DNA

SEQ ID NO: 24575 - DNA, 50 bp, Escherichia coli; identical to SEQ ID NO: 5750
  source 1..50: mol_type = genomic DNA

SEQ ID NO: 24576 - protein, 506 aa, Escherichia coli
MKRVISYIRFSSEKQAKGDSLRRQSKMVTDWLKAHPEYYLDQDLSFRDLGVSGFTGKHLKGGLGDFLTAIEKGLVKAGDTLLIESLDRLSRQAVDRASELLRNILRSGVDVVTLSDGEHYTKESLRDPLSLIKSILIMQRAHEESLRKAERIQAAWDAKKEAAKAGIKVSKRCPAWLKLNDDRKSFSVIPEKVETVKRCFQLRLEGKSIWEIVRTLNAEGHRSMNQYKPGKFGQTSVQDLLKNRSVIGYFTPKGCEEIAGYYPSVIDETTFYKVQQLSHSRYGRKPASDKPLSVNLFKGVIRCSECGHALIITGFSNTRNGIYRCPLRNENRCSAKGLSRKQTDGTLLTLLSRDRFDSDTTNTIDTLKLHREHISNNIEKLVQLSLEIEDLSAITSKLKQLKGELSQVDADIEKETQRLKSIDTGSLSDCDLTTKAGRIEAQLIIKSAVKEVVLNTAKRRCKVTFHNGRAITLPITENPSEDVTEAIQSLSEVTERGLIDVDEVII

SEQ ID NO: 24577 - DNA, 50 bp, Escherichia coli; identical to SEQ ID NO: 24522
  source 1..50: mol_type = genomic DNA

SEQ ID NO: 24578 - DNA, 40 bp, Escherichia coli; identical to SEQ ID NO: 5188
  source 1..40: mol_type = genomic DNA

SEQ ID NO: 24579 - DNA, 40 bp, Escherichia coli; identical to SEQ ID NO: 5749
  source 1..40: mol_type = genomic DNA

SEQ ID NO: 24580 - DNA, 50 bp, Escherichia coli; identical to SEQ ID NO: 5750
  source 1..50: mol_type = genomic DNA

SEQ ID NO: 24581 - protein, 507 aa, Escherichia coli
MKRVISYIRFSSEKQAKGDSLRRQSKMVTDWLKAHPEYYLDQDLSFRDLGVSGFTGKHLKGGLGDFLTAIEKGLVKAGDTLLIESLDRLSRQDVDQASELLRNILRSGVDVVTLSDGEHYTRESLKDPLALIKSILIMQRAHEESLRKAERIQAAWDAKKEAAKAGIKISRRCPAWLRLNDDRKTFSVIPEKVATVKRCFQLRLEGKSIWEIVRTLNAEGHQTLNQYKAGSFGQSSVQDLLKNRSVIGYFTPKGCEEISSYYPSVIDETTFYKVQQLSHSRYGRKPVSDKPLSVNLFKGVIRCSECGHALIITGFSDTRNGIYRCPLRNENRCSAKGLSRKQTDGTLLTLLSRLDRFDSDMTNTIDTLKLHREHISSNIEKLVQLSLEIEDLSAITSKLKQLKGELSQVDADIEKETQRLKSIDVGCLSDCDLTTKAGRIEAQLIIKSAVKEVVLNTAKRRCKVTFHNSKSITLPITENPSEDVTEAIQSLSEVTEKGLIDVDVVEI

SEQ ID NO: 24582 - DNA, 50 bp, Escherichia coli; identical to SEQ ID NO: 24522
  source 1..50: mol_type = genomic DNA

SEQ ID NO: 24583 - DNA, 40 bp, Escherichia coli; identical to SEQ ID NO: 5188
  source 1..40: mol_type = genomic DNA

SEQ ID NO: 24584 - DNA, 40 bp, Escherichia coli; identical to SEQ ID NO: 5749
  source 1..40: mol_type = genomic DNA

SEQ ID NO: 24585 - DNA, 50 bp, Escherichia coli; identical to SEQ ID NO: 5750
  source 1..50: mol_type = genomic DNA

SEQ ID NO: 24586 - protein, 507 aa, Escherichia coli
MKRVISYIRFSSEKQSRGDSLRRQSKMVTDWLKAHPEYHLDQDLSFRDLGVSGFTGKHLKGGLGDFLTAIEKGLVKAGDTLLIESLDRLSRQDIDIASELLRRILRAGVDVVTLSDGEHYTKESLRDPLSLIKSILIMQRAHEESLRKAERIQAAWDAKKEAAKAGIKISRRCPAWLRLNDDRKSFSVIPEKVETVKRCFQLRLEGKSIWEIVRTLNDEGHQSMSQYKPGKFGQTSVQDLLKNRSVIGYFTPKGCEEIAGYYPAIIDETTFYKVQQLSHSRYGRKPVSAKPLSVNLFKGVIRCSECGHALIITGFSDTRSGIYRCPLRNENRCSAKGLSRKQTDGTLLTLLSRLDRFDSDTTNTIDTLKLHREHISSNIEKLVQLSLEIEDLNAITSKLKQLKGELSQVDADIEKETQRLKSIDVGCLSDCDLTTKAGRIEAQLIIKSAVKEVVLNTAKRRCKVTFHNGRAITLPITENPSEDVTEAIQSLSEVTERGLIDVDEVII

SEQ ID NO: 24587 - DNA, 50 bp, Escherichia coli; identical to SEQ ID NO: 24522
  source 1..50: mol_type = genomic DNA

SEQ ID NO: 24588 - DNA, 40 bp, Escherichia coli; identical to SEQ ID NO: 5188
  source 1..40: mol_type = genomic DNA

SEQ ID NO: 24589 - DNA, 40 bp, Escherichia coli; identical to SEQ ID NO: 5749
  source 1..40: mol_type = genomic DNA

SEQ ID NO: 24590 - DNA, 50 bp, Escherichia coli; identical to SEQ ID NO: 5750
  source 1..50: mol_type = genomic DNA

SEQ ID NO: 24591 - protein, 507 aa, Escherichia coli
MKRVISYIRFSSERQAKGDSLRRQSKMVNDWLKAHPEYYLDQDLSFRDLGVSGFTGKHLKGGLGDFLTAIEKGLVKAGDTLLIESLDRLSRQDIDIASELLRRILRAGVDVVTLSDGEHYTKESLRDPLSLIKSILIMQRAHEESLRKAERIQAAWDAKKEAAKAGIKISRRCPAWLRLNDDRKSFSVIPEKVETVKRCFQLRLEGKSIWEIVRTLNDEGHQSMSQYKPGKFGQTSVQDLLKNRSVIGYFTPKGCEEIAGYYPAIIDETTFYKVQQLSHSRYGRKPVSAKPLSVNLFKGVIRCSECGHALIITGFSDTRSGIYRCPLRNENRCSAKGLSRKQTDGTLLTLLSRLDRFDSDTTNTIDTLKLHREHISSNIEKLVQLSLEIEDLNAITSKLKQLKGELSQVDADIEKETQRLKSIDVGCLSDCDLTTKAGRIEAQLIIKSAVKEVVLNTAKRRCKVTFHNGRAITLPITENPSEDVTEAIQSLSEVTERGLIDVDEVII

SEQ ID NO: 24592 - DNA, 50 bp, Escherichia coli; identical to SEQ ID NO: 24522
  source 1..50: mol_type = genomic DNA

SEQ ID NO: 24593 - DNA, 40 bp, Escherichia coli; identical to SEQ ID NO: 5188
  source 1..40: mol_type = genomic DNA

SEQ ID NO: 24594 - DNA, 40 bp, Escherichia coli; identical to SEQ ID NO: 5749
  source 1..40: mol_type = genomic DNA

SEQ ID NO: 24595 - DNA, 50 bp, Escherichia coli; identical to SEQ ID NO: 5750
  source 1..50: mol_type = genomic DNA

SEQ ID NO: 24596 - protein, 507 aa, Escherichia coli
MKRVISYIRFSSEKQAKGDSLRRQSKMVTDWLKAHPEYYLDQDLSFRDLGVSGFTGKHLKGGLGDFLTAIEKGLVKAGDTLLIESLDRLSRQDVDQASELLRNILRSGVDVVTLSDGEHYTKESLRDPLSLIKSILIMQRAHEESLRKAERIQAAWDAKKEAAKAGIKISKRCPAWLKLNDDRKSFSVIPEKVETVKRCFQLRLEGKSIWEIVRTLNAEGHQTLNQYKAGKFGQTSVQDLLKNRSVIGYFTPKGCEEISGYYPAIIDETTFYKVQQLSYARYGRKPASDKPMAVNLFKGVIRCSECGHALIITGFSDTRNGIYRCPLRNENRCSAKGLSRKQTDGTLLALLSRLDRFDSDMTNTIDTLKLHREHISSNIEKLVQLSLEIEDLSAITSKLRQLKNELSQVDADIEKETQRLKSIDVGCLSDCDLTTKAGRIEAQLIIKSAVKEVVLNTAKRRCKVTFHNGKVIDLSITEDPSEDVTEAIQSLSEVTERGLIDVDEVII

SEQ ID NO: 24597 - DNA, 50 bp, Escherichia coli; identical to SEQ ID NO: 24522
  source 1..50: mol_type = genomic DNA

SEQ ID NO: 24598 - DNA, 40 bp, Escherichia coli; identical to SEQ ID NO: 5188
  source 1..40: mol_type = genomic DNA

SEQ ID NO: 24599 - DNA, 40 bp, Escherichia coli; identical to SEQ ID NO: 5749
  source 1..40: mol_type = genomic DNA

SEQ ID NO: 24600 - DNA, 50 bp, Escherichia coli; identical to SEQ ID NO: 5750
  source 1..50: mol_type = genomic DNA

SEQ ID NO: 24601 - protein, 507 aa, Escherichia coli
MKRVISYIRFSSEKQAKGDSLRRQSKMVTDWLKAHPEYYLDESLTFRDLGVSGFTGKHLKGGLGDFLTAIEKGLVKAGDTLLIESLDRLSRQNVDRASELLRNILRSGVDVVTLSDGEHYTRESLKDPLALIKSILIMQRSHEESLRKSERIQAAWNRKKELISEGIKISKRCPAWLKLNDDRKSFSVIPEKVETVKRCFQLRLEGKSIWEIVRTLNDEGHQSMSQYKPGSFGQSSVQDLLKNRSVIGYFTPKGCEEIAGYYPAIIDETTFYKVQQLSHSRYGKRSVSDKPLSVNLFKGVIRCSECGHALIITGFSDTRNGIYRCPLRNENRCSAKGLSRKQTDGTLLALLSRLDRFDSDTTNTIDTLKLHREHISSNIEKLVQLSLEIEDLSAITSKLRQLKGELSQVDADIEKETQRLKSIDVGCLSDCDLTTKAGRIEAQLIIKSAVKEVVLNTAKRRCKVTFHNGRAITLPITETPSEDVTEAIQSLSEVTERGLIDVDEVII

SEQ ID NO: 24602 - DNA, 50 bp, Escherichia coli; identical to SEQ ID NO: 24522
  source 1..50: mol_type = genomic DNA

SEQ ID NO: 24603 - DNA, 40 bp, Escherichia coli; identical to SEQ ID NO: 5188
  source 1..40: mol_type = genomic DNA

SEQ ID NO: 24604 - DNA, 40 bp, Escherichia coli; identical to SEQ ID NO: 5749
  source 1..40: mol_type = genomic DNA

SEQ ID NO: 24605 - DNA, 50 bp, Escherichia coli; identical to SEQ ID NO: 5750
  source 1..50: mol_type = genomic DNA

SEQ ID NO: 24606 - protein, 507 aa, Escherichia coli
MKRVISYIRFSSEKQAKGDSLRRQSKMVTDWLKAHPEYYLDQDLSFRDLGVSGFTGKHLKGGLGDFLTAIEKGLVKAGDTLLIESLDRLSRQAVDRASELLRNILRSGVDVVTLSDGEHYTSESLKDPLALIKSILIMQRAHEESLRKSERIQAAWNRKKELISEGIKISKRCPAWLRLNDDRKSFSVIPDKVETVKKCFQLRLEGKSIWEIVRTLNAEGHRSMNQYKPGKFGQTSVQDLLKNRSVIGYFTPKGCEEIAGYYPAIIDETTFYKVQQLSHSRYGKRSVSDKPLSVNLFKGVIRCSECGHALIITGFSDTRNGIYRCPLRNENRCSAKGLSRKQTDGTLLTLLSRLDRFDSDTTNTIDMLRLHREHISSNIEKLVQLSLEIEDLSAITIKLKQLKGELSQVDADIEKETQRLKSIDVGCLSDCDLTTKAGRIEAQLIIKSAVKEVVLNTAKRRCKVTFHNSKSITLSITENPSEDVTEAIQSLSEVTERGLIDVDEVII

SEQ ID NO: 24607 - DNA, 50 bp, Escherichia coli; identical to SEQ ID NO: 24522
  source 1..50: mol_type = genomic DNA

SEQ ID NO: 24608 - DNA, 40 bp, Escherichia coli; identical to SEQ ID NO: 5188
  source 1..40: mol_type = genomic DNA

SEQ ID NO: 24609 - DNA, 40 bp, Escherichia coli; identical to SEQ ID NO: 5749
  source 1..40: mol_type = genomic DNA

SEQ ID NO: 24610 - DNA, 50 bp, Escherichia coli; identical to SEQ ID NO: 5750
  source 1..50: mol_type = genomic DNA

SEQ ID NO: 24611 - protein, 507 aa, Escherichia coli
MKRVISYIRFSSEKQAKGDSLRRQSKMVTDWLKAHPEYYLDQDLSFRDLGVSGFTGKHLKGGLGDFLTAIEKGLVKAGDTLLIESLDRLSRQDVDQASELLRNILRSGVDVVTLSDGEHYTRESLRDPLALIKSILIMQRSHEESLRKSERIQAAWNRKKELISEGIKISKRCPAWLKLNDDRKSFSVIPDKVETVKRCFQLRLEGKSIWEIVRTMNAEGHQTLHQHKPGSFGQSSVQDLLKNRSVIGYFTPKGCEEISSYYPSVIDETTFYKVQQLSHSRYGRKPVSDKPLSVNLFKGVIRCSECGHALIITGFSDTRNGIYRCPLRNENRCNAKGLSRKQTDGTLLTLLSRLDRFDSDMTNVIDTLKLHREHISNNIEKLVQLSLEIEDLSAITNKLKQLKNELSQVDADIEKETQRLKSIDVGCLSDCDLTTKAGRIEAQLIIKSAVKEVVLNTAKRRCKVTFHNGRAITLPITENPSEDVTEAIQSLSEVTERGLLDVDEVII

SEQ ID NO: 24612 - DNA, 50 bp, Escherichia coli; identical to SEQ ID NO: 24522
  source 1..50: mol_type = genomic DNA

SEQ ID NO: 24613 - DNA, 40 bp, Escherichia coli; identical to SEQ ID NO: 5188
  source 1..40: mol_type = genomic DNA

SEQ ID NO: 24614 - DNA, 40 bp, Escherichia coli; identical to SEQ ID NO: 5749
  source 1..40: mol_type = genomic DNA

SEQ ID NO: 24615 - DNA, 50 bp, Escherichia coli; identical to SEQ ID NO: 5750
  source 1..50: mol_type = genomic DNA

SEQ ID NO: 24616 - protein, 507 aa, Escherichia coli
MKRVISYIRFSSEKQAKGDSLRRQSKMVTDWLKAHPEYYLDQDLSFRDLGVSGFTGKHLKGGLGDFLTAIEKGLVKAGDTLLIESLDRLSRQAVDQASELLRNILRSGVDVVTLSDGEHYTKESLRDPLSLIKSILIMQRAHEESLRKAERIQAAWDAKKEAAKAGIKISKRCPAWLKLNDDRKSFSVIPEKVETVKRCFQLRLEGKSIWEIVRTLNAEGHQTLNQYKAGKFGQTSVQDLLKNRSVIGYFTPKGCEEISGYYPAIIDETTFYKVQQLSYARYGRKPASDKPMAVNLFKGVIRCSECGHALIITGFSDTRNGIYRCPLRNENRCSAKGLSRKQTDGTLLALLSRLDRFDSDMTNTIDTLKLHREHISSNIEKLVQLSLEIEDLSAITSKLRQLKNELSQVDADIEKETQRLKSIDVGCLSDCDLTTKAGRIEAQLIIKSAVKEVVLNTAKRRCKVTFHNGKVIDLSITENPSEDVTEAIQSLSEVTERGLIDVDEVII

SEQ ID NO: 24617 - DNA, 50 bp, Escherichia coli
  source 1..50: mol_type = genomic DNA
tagtgtatttagaccttgatgatttttattagacacttttaaatacacta

SEQ ID NO: 24618 - DNA, 40 bp, Escherichia coli; identical to SEQ ID NO: 5188
  source 1..40: mol_type = genomic DNA

SEQ ID NO: 24619 - DNA, 40 bp, Escherichia coli; identical to SEQ ID NO: 5749
  source 1..40: mol_type = genomic DNA

SEQ ID NO: 24620 - DNA, 50 bp, Escherichia coli; identical to SEQ ID NO: 5750
  source 1..50: mol_type = genomic DNA

SEQ ID NO: 24621 - protein, 507 aa, Escherichia coli
MKRVISYIRFSSEKQAKGDSLRRQSKMVNDWLKAHPEYYLDQDLSFRDLGVSGFTGKHLKGGLGDFLTAIEKGLVKAGDTLLIESLDRLSRQAVDRASELLRNILRSGVDVVTLSDGEHYTKESLRDPLSLIKSILIMQRAHEESLRKAERIQAAWDAKKEAAKAGIKISRRCPAWLKLNDDRKSFSVIPEKVETVKRCFQLRLEGKSIWEIVRTLNAEGHQTLNQYKAGKFGQTSVQDLLKNRSVIGYFTPKGCEEISGYYPAIIDETTFYKVQQLSYARYGRKPASDKPMAVNLFKGVIRCSECGHALIITGFSDTRNGIYRCPLRNENRCSAKGLSRKQTDGTLLALLSRLDRFDSDMTNVIDTLKLHREHISSNIEKLVQLSLEIEDLSAITSKLRQLKNELSQVDADIEKETQRLKSIDAGCLSDCDLTTKAGRIEAQLIIKSAVKEVVLNTAKRRCKVTFHNGKAITLPITENPSDNVTEAIQSLSEVTERGLIDVDEVII

SEQ ID NO: 24622 - DNA, 50 bp, Escherichia coli; identical to SEQ ID NO: 24522
  source 1..50: mol_type = genomic DNA

SEQ ID NO: 24623 - DNA, 40 bp, Escherichia coli
  source 1..40: mol_type = genomic DNA
cggcgttaatcgggtgattttagacagccgtccggttcat

SEQ ID NO: 24624 - DNA, 40 bp, Escherichia coli
  source 1..40: mol_type = genomic DNA
cggcgttaatcgggtgattaaagacagccgtccggttcat

SEQ ID NO: 24625 - DNA, 50 bp, Escherichia coli; identical to SEQ ID NO: 5750
  source 1..50: mol_type = genomic DNA

SEQ ID NO: 24626 - protein, 507 aa, Escherichia coli
MKRAISYIRFSSEKQSRGDSLRRQSKMVNDWLKAHPEYYLDQDLSFRDLGVSGFTGKHLKGGLGDFLTAIEKGLVKAGDTLLIESLDRLSRQNVDRASELLRNILRSGVDVVTLSDGEHYTRESLKDPLALIKSILIMQRSHEESLRKSERIQAAWNRKKELISEGIKISKRCPAWLKLNDDRKSFSVIPEKVETVKRCFQLRLEGKSIWEIVRTLNDEGHQTLHQHRAGKFGQTSVQDLLKNRSVIGYFTPKGCEEIAGYYPAIIDETTFYKVQQLSYARYGRKPASDKPMAVNLFKGVIRCSECGHALIITGFSDTRNGIYRCPLRNENRCSAKGLSRKQTDGTLLTLLSRLDRFDSDTTNTIDMLRLHREHISSNIEKLVQLSLEIEDLSAITIKLKQLKGELSQVDADIEKETQRLKSIDVGCLSDCDLTTKAGRIEAQLIIKSAVKEVVLNTAKRRCKVTFHNGKVIDLSITENPSEDVTEAIQSLSEVTERGLIDVDEVII

SEQ ID NO: 24627 - DNA, 50 bp, Escherichia coli; identical to SEQ ID NO: 24522
  source 1..50: mol_type = genomic DNA

SEQ ID NO: 24628 - DNA, 40 bp, Escherichia coli; identical to SEQ ID NO: 5188
  source 1..40: mol_type = genomic DNA

SEQ ID NO: 24629 - DNA, 40 bp, Escherichia coli; identical to SEQ ID NO: 5749
  source 1..40: mol_type = genomic DNA

SEQ ID NO: 24630 - DNA, 50 bp, Escherichia coli; identical to SEQ ID NO: 5750
  source 1..50: mol_type = genomic DNA

SEQ ID NO: 24631 - protein, 507 aa, Escherichia coli
MKRVISYIRFSSEKQAKGDSLRRQSKMVTDWLKAHPEYYLDQDLSFRDLGVSGFTGKHLKGGLGDFLTAIEKGLVKAGDTLLIESLDRLSRQDVDQASELLRNILRSGVDVVTLSDGEHYTRESLRDPLALIKSILIMQRSHEESLRKSERIQAAWNRKKELISEGIKISKRCPAWLKLNDDRKSFSVIPDKVETVKRCFQLRLEGKSIWEIVRTMNAEGHQTLNQYKAGSFGQTSVQDLLKNRSVIGYFTPKGCEEISGYYPAIIDETTFYKVQQLSYARYGRKPASDKPMAVNLFKGVIRCSECGHALIITGFSDTRNGIYRCPLRNENRCSAKGLSRKQTDGTLLTLLSRLDRFDSDTTNVIDMLRLHREHISSNIEKLVQLSLEIEDLSAITNKLKQLKNELSQVDADIEKETQRLKSIDVGCLSDCDLTTKAGRIEAQLIIKSAVKEVVLNTAKRRCKVTFHNGRAITLPITENPSEDVTEAIQSLSEVTERGLLDVDEVII

SEQ ID NO: 24632 - DNA, 50 bp, Escherichia coli; identical to SEQ ID NO: 24522
  source 1..50: mol_type = genomic DNA

SEQ ID NO: 24633 - DNA, 40 bp, Escherichia coli; identical to SEQ ID NO: 22763
  source 1..40: mol_type = genomic DNA

SEQ ID NO: 24634 - DNA, 40 bp, Escherichia coli
  source 1..40: mol_type = genomic DNA
cggcgttaatcgggtgattaaagacagccgctcggttcat

SEQ ID NO: 24635 - DNA, 50 bp, Escherichia coli; identical to SEQ ID NO: 5750
  source 1..50: mol_type = genomic DNA

SEQ ID NO: 24636 - protein, 507 aa, Escherichia coli
MKRVISYIRFSSEKQSRGDSLRRQSKMVTDWLKAHPEYHLDQDLSFRDLGVSGFTGKHLKGGLGDFLTAIEKGLVKAGDTLLIESLDRLSRQDVDQASELLRNILRSGVDVVTLSDGEHYTRESLRDSLALIKSILIMQRAHEESLRKAERIQAAWDAKKEAAKAGIKVSKRCPAWLKLNDDRKSFSVIPEKVETVKRCFQLRLEGKSIWEIVRTLNDEGHQTLNQYKAGKFGQTSVQDLLKNRSVIGYFTPKGCKEISGYYPAIIDETTFYKVQQLSYARYGRKPASDKPLSVNLFKGVIRCSECGHALIITGFSDTRSGIYRCPLRNENRCNAKGLSRKQTDSTLLALLSRLDRFDSDMTNTVDTLKLHREHISNNIEKLVQLSLEIEDLSAITSKLKQLKGELSQVDADIEKETQRLKSIDVGCLSDCDLTTKAGRIEAQLIIKSAVKEVVLNTAKRRCKVTFHNGKVIDLPITENPSEDVTEAIQSLSEVTERGLIDVDEVII

SEQ ID NO: 24637 - DNA, 50 bp, Escherichia coli; identical to SEQ ID NO: 24522
  source 1..50: mol_type = genomic DNA

SEQ ID NO: 24638 - DNA, 40 bp, Escherichia coli; identical to SEQ ID NO: 5188
  source 1..40: mol_type = genomic DNA

SEQ ID NO: 24639 - DNA, 40 bp, Escherichia coli; identical to SEQ ID NO: 5749
  source 1..40: mol_type = genomic DNA

SEQ ID NO: 24640 - DNA, 50 bp, Escherichia coli; identical to SEQ ID NO: 5750
  source 1..50: mol_type = genomic DNA

SEQ ID NO: 24641 - protein, 507 aa, Escherichia coli
MKRVISYIRFSSEKQAKGDSLRRQSKMVTDWLKAHPEYYLDQDLSFRDLGVSGFTGKHLKGGLGDFLTAIEKGLVKAGDTLLIESLDRLSRQAVDRASELLRNILRSGVDVVTLSDGEHYTSESLKDPLALIKSILIMQRAHEESLRKSERIQAAWNRKKELISEGIKVSKRCPAWLRLNDDRKSFSVIPEKVETVKRCFQLRLEGKSIWEIVRTLNDEGHQSMSQYKPGKFGQTSVQDLLKNRSVIGYFTPKGCEEISGYYPAIIDETTFYKVQQLSYARYGRKPASDKPLSVNLFKGVIRCSECGHALIITGFSDTRSGIYRCPLRNENRCSAKGLSRKQTDGTLLTLLSRLDRFDSDTTNIIDMLRLHREHISSNIEKLVQLSLEIEDLNAITSKLKQLKGELSQVDADIEKETQRLKSIDVGCLSDCDLTTKAGRIEAQLIIKSAVKEVVLNTAKRRCKVTFHNGKSITLPITENPSEDVTEAIQSLSEVTERGLIDVDEVII

SEQ ID NO: 24642 - DNA, 50 bp, Escherichia coli; identical to SEQ ID NO: 24522
  source 1..50: mol_type = genomic DNA

SEQ ID NO: 24643 - DNA, 40 bp, Escherichia coli; identical to SEQ ID NO: 5188
  source 1..40: mol_type = genomic DNA

SEQ ID NO: 24644 - DNA, 40 bp, Escherichia coli; identical to SEQ ID NO: 5749
  source 1..40: mol_type = genomic DNA

SEQ ID NO: 24645 - DNA, 50 bp, Escherichia coli; identical to SEQ ID NO: 5750
  source 1..50: mol_type = genomic DNA

SEQ ID NO: 24646 - protein, 507 aa, Escherichia coli
MKRVISYIRFSSEKQAKGDSLRRQSKMVTDWLKAHPEYYLDESLTFRDLGVSGFTGKHLKGGLGDFLTAIEKGLVKAGDTLLIESLDRLSRQAVDRASELLRNILRSGVDVVTLSDGEHYTSESLKDPLALIKSILIMQRAHEESLRKSERIQAAWNRKKELISEGIKVSKRCPAWLRLNDDRKSFSVIPEKVETVKRCFQLRLEGKSIWEIVRTLNDEGHQSMSQYKPGKFGQTSVQDLLKNRSVIGYFTPKGCEEISGYYPAIIDETTFYKVQQLSHYRYGRKPVSDKPLSVNLFKGVIRCSECGHALIITGFSDTRSGIYRCPLRNENRCSAKGLSRKQTDSTLLALLSRLDRFDSDTTNIIDTLKLHREHISSNIEKLVQLSLEIEDLSAITSKLKQLKGELSQVDADIEKETQRLKSIDVGCLSDCDLTTKAGRIEAQLIIKSAVKEVVLNTAKRRCKVTFHNGKAITLPITENPSEDVTEAIQSLSEVTERGLIDVDVVEI

SEQ ID NO: 24647 - DNA, 50 bp, Escherichia coli; identical to SEQ ID NO: 24522
  source 1..50: mol_type = genomic DNA

SEQ ID NO: 24648 - DNA, 40 bp, Escherichia coli; identical to SEQ ID NO: 5188
  source 1..40: mol_type = genomic DNA

SEQ ID NO: 24649 - DNA, 40 bp, Escherichia coli; identical to SEQ ID NO: 5749
  source 1..40: mol_type = genomic DNA

SEQ ID NO: 24650 - DNA, 50 bp, Escherichia coli; identical to SEQ ID NO: 5750
  source 1..50: mol_type = genomic DNA

SEQ ID NO: 24651 - protein, 507 aa, Escherichia coli
MKRVISYIRFSSEKQAKGDSLRRQSKMVTDWLKAHPEYYLDQDLSFRDLGVSGFTGKHLKGGLGDFLTAIEKGLVKAGDTLLIESLDRLSRQDVDQASELLRNILRSGVDVVTLSDGEHYTKESLRDPLSLIKSILIMQRAHEESLRKAERIQAAWDAKKEAAKAGIKISRRCPAWLKLNDDRKSFSVIPEKVETVKRCFQLRLEGKSIWEIVRTLNAEGHQTLNQYKAGKFGQTSVQDLLKNRSVIGYFTPKGCEEISGYYPAIIDETTFYKVQQLSYARYGRKPASDKPMAVNLFKGVIRCSECGHALIITGFSDTRNGIYRCPLRNENRCSAKGLSRKQTDGTLLALLSRLDRFDSDMTNTIDTLKLHREHISSNIEKLVQLSLEIEDLSAITSKLRQLKNELSQVDADIEKETQRLKSIDVGCLSDCDLTTKAGRIEAQLIIKSAVKEVVLNTAKRRCKVTFHNGKVIDLSITENPSEDVTEAIQSLSEVTERGLIDVDEVII

SEQ ID NO: 24652 - DNA, 50 bp, Escherichia coli; identical to SEQ ID NO: 24522
  source 1..50: mol_type = genomic DNA

SEQ ID NO: 24653 - DNA, 40 bp, Escherichia coli; identical to SEQ ID NO: 5188
  source 1..40: mol_type = genomic DNA

SEQ ID NO: 24654 - DNA, 40 bp, Escherichia coli; identical to SEQ ID NO: 5749
  source 1..40: mol_type = genomic DNA

SEQ ID NO: 24655 - DNA, 50 bp, Escherichia coli; identical to SEQ ID NO: 5750
  source 1..50: mol_type = genomic DNA

SEQ ID NO: 24656 - protein, 507 aa, Escherichia coli
MKRVISYIRFSSEKQAKGDSLRRQSKMVTDWLKAHPEYYLDQDLSFRDLGVSGFTGKHLKGGLGDFLTAIEKGLVKAGDTLLIESLDRLSRQAVDRASELLRNILRSGVDVVTLSDGEHYTKESLRDPLSLIKSILIMQRSHEESLRKSERIQAAWDAKKEAAKAGIKVSKRCPAWLKLNDDRKSFSVIPDKVETVKRCFQLRLEGKSIWEIVRTLNAEGHRSMNQYKPGKFGQTSVQDLLKNRSVIGYFTPKGCEEIAGYYPSVIDETTFYKVQQLSHSRHGRKPVSDKPLSVNLFKGVIRCSECGHALIITGFSDTRNGIYRCPLRNENRCSAKGLSRKQTDGTLLTLLSRLDRFDSDTTNTIDMLRLHREHISSNIEKLVQLSLEIEDLSAITSKLRQLKNELSQVDADIEKETQRLKSIDVGCLSDCDLTTKAGRIEAQLIIKSAVKEVVLNTAKRRCKVTFHNGRLIDLPITENPSEDVTEAIQSLSEVTERGLIDVDEVII

SEQ ID NO: 24657 - DNA, 50 bp, Escherichia coli; identical to SEQ ID NO: 24522
  source 1..50: mol_type = genomic DNA

SEQ ID NO: 24658 - DNA, 40 bp, Escherichia coli; identical to SEQ ID NO: 24623
  source 1..40: mol_type = genomic DNA

SEQ ID NO: 24659 - DNA, 40 bp, Escherichia coli; identical to SEQ ID NO: 24624
  source 1..40: mol_type = genomic DNA

SEQ ID NO: 24660 - DNA, 50 bp, Escherichia coli; identical to SEQ ID NO: 5750
  source 1..50: mol_type = genomic DNA

SEQ ID NO: 24661 - protein, 507 aa, Escherichia coli
MKRVISYIRFSSEKQAKGDSLRRQSKMVTDWLKAHPEYYLDQDLSFRDLGVSGFTGKHLKGGLGDFLTAIEKGLVKAGDTLLIESLDRLSRQAVDRASELLRNILRSGVDVVTLSDGEHYTSESLKDPLALIKSILIMQRAHEESLRKSERIQAAWDAKKEAAKAGIKVSKRCPAWLKLNDDRKSFSVIPEKVETVKRCFQLRLEGKSIWEIVRTLNDEGYQTLNQYKAGKFGQTSVQDLLKNRSVIGYFTPKGCEEISGYYPAIIDETTFYKVQQLSHYRYGRKPVSDKPLSVNLFKGVIRCSECGHALIITGFSDTRNGIYRCPLRNENRCSAKGLSRKQTDGTLLTLLSRLDRFDSDMTNTIDTLKLHREHISSNIEKLVQLSLEIEDLSAITIKLKQLKNELSQVDADIEKETQRLKSIDVGCLSDCDLTTKAGRIEAQLIIKSAVKEVVLNTAKRRCKVTFHNGKAITLPITENPSEDVTEAIQSLSEVTERGLIDVDEVIV

SEQ ID NO: 24662 - DNA, 50 bp, Escherichia coli; identical to SEQ ID NO: 24522
  source 1..50: mol_type = genomic DNA

SEQ ID NO: 24663 - DNA, 40 bp, Escherichia coli; identical to SEQ ID NO: 5188
  source 1..40: mol_type = genomic DNA

SEQ ID NO: 24664 - DNA, 40 bp, Escherichia coli; identical to SEQ ID NO: 5749
  source 1..40: mol_type = genomic DNA

SEQ ID NO: 24665 - DNA, 50 bp, Escherichia coli; identical to SEQ ID NO: 5750
  source 1..50: mol_type = genomic DNA

SEQ ID NO: 24666 - protein, 507 aa, Escherichia coli
MKRVISYIRFSSEKQAKGDSLRRQSKMVTDWLKAHPEYYLDESLTFRDLGVSGFTGKHLKGGLGDFLTAIEKGLVKAGDTLLIESLDRLSRQAVDRASELLRNILRSGVDVVTLSDGEHYTKESLRDPLSLIKSILIMQRSHEESLRKSERIQAAWDAKKEAAKAGIKVSKRCPAWLKLNDDRKSFSVIPEKVETVKRCFQLRLEGKSIWEIVRTLNAEGHQTLNQYKAGKFGQTSVQDLLKNRSVIGYFTPKGCEEISGYYPAIIDETTFYKAQQLSYARYGRKPASDKPMAVNLFKGVIRCSECGHALIITGFSDTRNGIYRCPLRNENRCSAKGLSRKQTDGTLLTLLSRLDRFDSNTTNTIDMLRLHREHISNNIEKLVQLSLEIEDLSAITIKLKQLKGELSQVDADIEKETQRLKSIDAGCLSDCDLTTKAGRIEAQLIIKSAVKEVVLNTAKRRCKVTFHNGKIIDLPITENPSEDVTEAIQSLSEVTERGLIDVDVVEI

SEQ ID NO: 24667 - DNA, 50 bp, Escherichia coli; identical to SEQ ID NO: 24522
  source 1..50: mol_type = genomic DNA

SEQ ID NO: 24668 - DNA, 40 bp, Escherichia coli; identical to SEQ ID NO: 5188
  source 1..40: mol_type = genomic DNA

SEQ ID NO: 24669 - DNA, 40 bp, Escherichia coli; identical to SEQ ID NO: 5749
  source 1..40: mol_type = genomic DNA

SEQ ID NO: 24670 - DNA, 50 bp, Escherichia coli; identical to SEQ ID NO: 5750
  source 1..50: mol_type = genomic DNA

SEQ ID NO: 24671 - protein, 507 aa, Escherichia coli
MKRVISYIRFSSEKQAKGDSLRRQSKMVTDWLKAHPEYYLDQDLSFRDLGVSGFTGKHLKGGLGDFLTAIEKGLVKAGDTLLIESLDRLSRQDIDIASELLRNILRSGVDVVTLSDGEHYTRESLRDPLALIKSILIMQRAHEESLRKAERIQAAWDAKKEAAKAGIKVSKRCPAWLKLNDDRKSFSVIPEKVETVKRCFQLRLEGKSIWEIVRTLNDEGHQSMSQYKPGSFGQTSVQDLLKNRSVIGYFTPKGCEEISGYYPSIIHETDFYKVQQLSYARYGRKPASDKPLSVNLFKGVIRCSECGHALIITGFSDTRSGIYRCPSRNENRCSAKGLSRKQTDGTLLALLSRLDRFDSDMTNTIDTLKLHREHISSNIEKLVQLSLEIEDLSAITSKLKQLKGELSQVDADIEKETQRLKSIDVGCLSDCDLTTKAGRIEAQLIIKSAVKEVVLNTAKRRCKVTFHNGKSITLPITENPSEDVTEAIQSLSEVTERGLIDVDEVII

SEQ ID NO: 24672 - DNA, 50 bp, Escherichia coli; identical to SEQ ID NO: 24522
  source 1..50: mol_type = genomic DNA

SEQ ID NO: 24673 - DNA, 40 bp, Escherichia coli; identical to SEQ ID NO: 5188
  source 1..40: mol_type = genomic DNA

SEQ ID NO: 24674 - DNA, 40 bp, Escherichia coli; identical to SEQ ID NO: 5749
  source 1..40: mol_type = genomic DNA

SEQ ID NO: 24675 - DNA, 50 bp, Escherichia coli; identical to SEQ ID NO: 5750
  source 1..50: mol_type = genomic DNA

SEQ ID NO: 24676 - protein, 507 aa, Escherichia coli
MKRVISYIRFSSERQAKGDSLRRQSKMVNDWLKAHPEYYLDQDLSFRDLGVSGFTGKHLKGGLGDFLTAIEKGLVKAGDTLLIESLDRLSRQDVDQASELLRNILRSGVDVVTLSDGEHYTSESLKDPLALIKSILIMQRAHEESLRKSERIQAAWNRKKELISEGIKISKRCPAWLRLNDDRKSFSVIPEKVETVKRCFQLRLEGKSIWEIVRTMNAEGHQTLHQHKPGSFGQSSVQDLLKNRSVIGYFTPKGCEEISSYYPSVIDETTFYKVQQLSHSRYGRKPVSDKPLSVNLFKGVIRCSECGHALIITGFSDTRSGIYRCPLRNENRCSAKGLSRKQTDGTLLTLLSRLDRFDSDMTNTIDMLRLHREHISSNIEKLVQLSLEIEDLSAITNKLKQLKNELSQVDADIEKETQRLKSIDVGCLSDCDLTTKAGRIEAQLIIKSAVKEVVLNTAKRRCKVTFHNGKVIDLSITEDPSEDVTEAIQSLSEVTERGLIDVDEVII

SEQ ID NO: 24677 - DNA, 50 bp, Escherichia coli; identical to SEQ ID NO: 24522
  source 1..50: mol_type = genomic DNA

SEQ ID NO: 24678 - DNA, 40 bp, Escherichia coli; identical to SEQ ID NO: 5188
  source 1..40: mol_type = genomic DNA

SEQ ID NO: 24679 - DNA, 40 bp, Escherichia coli; identical to SEQ ID NO: 5749
  source 1..40: mol_type = genomic DNA

SEQ ID NO: 24680 - DNA, 50 bp, Escherichia coli; identical to SEQ ID NO: 5750
  source 1..50: mol_type = genomic DNA

SEQ ID NO: 24681 - protein, 507 aa, Escherichia coli
MKRVISYIRFSSEKQAKGDSLRRQSKMVNDWLKAHPEYYLDQDLSFRDLGVSGFTGKHLKGGLGDFLTAIEKGLVKAGDTLLIESLDRLSRQDVDQASELLRNILRSGVDVVTLSDGEHYTSESLKDPLALIKSILIMQRAHEESLRKSERIQAAWNRKKELISEGIKVSRRCPAWLRLNDDRKSFSVIPDKVETVKRCFQLRLEGKSIWEIVRTLNAEGHRSMNQYKPGKFGQTSVQDLLKNRSVIGYFTPKGCEEIAGYYPSVIDETTFYKVQQLSYARHGRKPASAKPLSVNLFKGVIRCSECGHALIITGFSDTRNGIYRCPLRNENRCSAKGLSRKQTDGTLLTLLSRLDRFDSDMTNTIDTLKLHREHISSNIEKLVQLSLEIEDLSAITSKLRQLKNELSQVDADIEKETQRLKSIDVGCLSDCDLTTKAGRIEAQLIIKSAVKEVVLNTAKRRCKVTFHNGKVIDLSITENPSEDVTEAIQSLSEVTERGLIDVDEVII

SEQ ID NO: 24682 - DNA, 50 bp, Escherichia coli; identical to SEQ ID NO: 24522
  source 1..50: mol_type = genomic DNA

SEQ ID NO: 24683 - DNA, 40 bp, Escherichia coli; identical to SEQ ID NO: 5188
  source 1..40: mol_type = genomic DNA

SEQ ID NO: 24684 - DNA, 40 bp, Escherichia coli; identical to SEQ ID NO: 5749
  source 1..40: mol_type = genomic DNA

SEQ ID NO: 24685 - DNA, 50 bp, Escherichia coli; identical to SEQ ID NO: 5750
  source 1..50: mol_type = genomic DNA

SEQ ID NO: 24686 - protein, 507 aa, Escherichia coli
MKRVISYIRFSSERQAKGDSLRRQSKMVNDWLKAHPEYYLDQDLSFRDLGVSGFTGKHLKGGLGDFLTAIEKGLVKAGDTLLIESLDRLSRQDIDIASELLRNILRSGVDVVTLSDGEHYTKESLRDPLSLIKSILIMQRAHEESLRKAERIQAAWDAKKEAAKAGIKISRRCPAWLKLNDDRKSFSVIPEKVETVKRCFQLRLEGKSIWEIVRTMNAEGHQTLNQYKAGSFGQSSVQDLLKNRSVIGYFTPKGCEEISSYYPSVIDETTFYKVQQLSHSRYGRKPVSDKPLSVNLFKGVIRCSECGHALIITGFSDTRSGIYRCPLRNENRCSAKGLSRKQTDGTLLTLLSRLDRFDSDMTNTIDMLRLHREHISSNIEKLVQLSLEIEDLSAITNKLKQLKNELSQVDADIEKETQRLKSIDVGCLSDCDLTTKAGRIEAQLIIKSAVKEVVLNTAKRRCKVTFHNGRAITLPITENPSEDVTEAIQSLSEVTERGLLDVDEVII

SEQ ID NO: 24687 - DNA, 50 bp, Escherichia coli; identical to SEQ ID NO: 24522
  source 1..50: mol_type = genomic DNA

SEQ ID NO: 24688 - DNA, 40 bp, Escherichia coli; identical to SEQ ID NO: 5188
  source 1..40: mol_type = genomic DNA

SEQ ID NO: 24689 - DNA, 40 bp, Escherichia coli; identical to SEQ ID NO: 5749
  source 1..40: mol_type = genomic DNA

SEQ ID NO: 24690 - DNA, 50 bp, Escherichia coli; identical to SEQ ID NO: 5750
  source 1..50: mol_type = genomic DNA

SEQ ID NO: 24691 - protein, 507 aa, Escherichia coli
MKRVISYIRFSSEKQAKGDSLRRQSKMVTDWLKAHPEYYLDQDLSFRDLGVSGFTGKHLKGGLGDFLTAIEKGLVKAGDTLLIESLDRLSRQDIDIASELLRNILRSGVDVVTLSDGEHYTRESLRDPLALIKSILIMQRAHEESLRKAERIQAAWDAKKEAAKAGIKVSKRCPAWLKLNDDRKSFSVIPEKVETVKRCFQLRLEGKSIWEIVRTLNDEGHQSMSQYKPGKFGQTSVQDLLKNRSVIGYFTPKGCEEIAGYYPAIIDETTFYKVQQLSHSRYGRKPVSAKPLSVNLFKGVIRCSECGHALIITGFSDTRSGIYRCPSRNENRCNAKGLSRKQTDGTLLALLSRIDRFDSDMTNTIDTLKLHREHISSNIEKLVQLSLEIEDLSAITSKLKQLKGELSQVDADIEKETQRLKSIDVGCLSDCDLTTKAGRIEAQLIIKSAVKEVVLNTAKRRCKVTFHNGKVIDLPITETPSEDVTEAIQSLSEVTERGLIDVDEVII

SEQ ID NO: 24692 - DNA, 50 bp, Escherichia coli; identical to SEQ ID NO: 24522
  source 1..50: mol_type = genomic DNA

SEQ ID NO: 24693 - DNA, 40 bp, Escherichia coli; identical to SEQ ID NO: 5188
  source 1..40: mol_type = genomic DNA

SEQ ID NO: 24694 - DNA, 40 bp, Escherichia coli; identical to SEQ ID NO: 5749
  source 1..40: mol_type = genomic DNA

SEQ ID NO: 24695 - DNA, 50 bp, Escherichia coli; identical to SEQ ID NO: 5750
  source 1..50: mol_type = genomic DNA

SEQ ID NO: 24696 - protein, 507 aa, Escherichia coli
MKRVISYIRFSSEKQAKGDSLRRQSKMVTDWLKAHPEYYLDQDLSFRDLGVSGFTGKHLKGGLGDFLTAIEKGLVKAGDTLLIESLDRLSRQDVDQASELLRNILRSGVDVVTLSDGEHYTSESLKDPLALIKSILIMQRAHEESLRKSERIQAAWNRKKELISEGIKVSKRCPAWLRLNDDRKSFSVIPEKVETVKRCFQLRLEGKSIWEIVRTLNDEGHQSMSQYKPGKFGQTSVQDLLKNRSVIGYFTPKGCEEISGYYPAIIDETTFYKVQQLSYARYGRKPASDKPLSVNLFKGVIRCSECGHALIITGFSDTRSGIYRCPLRNENRCSAKGLSRKQTDSTLLALLSRLDRFDSDMTNTVDTLKLHREHISSNIEKLVQLSLEIEDLSAITSKLKQLKGELSQVDADIEKETQRLKSIDVGCLSDCDLSTKAGRIEAQLIIRSAVKEVVLNTAKRRCKVTFHNSKSITLSITENPSEDVTEAIQSLSEVTERGLIDVDVVEI

SEQ ID NO: 24697 - DNA, 50 bp, Escherichia coli; identical to SEQ ID NO: 24522
  source 1..50: mol_type = genomic DNA

SEQ ID NO: 24698 - DNA, 40 bp, Escherichia coli; identical to SEQ ID NO: 5188
  source 1..40: mol_type = genomic DNA

SEQ ID NO: 24699 - DNA, 40 bp, Escherichia coli; identical to SEQ ID NO: 5749
  source 1..40: mol_type = genomic DNA

SEQ ID NO: 24700 - DNA, 50 bp, Escherichia coli; identical to SEQ ID NO: 5750
  source 1..50: mol_type = genomic DNA

SEQ ID NO: 24701 - protein, 507 aa, Escherichia coli
MKRVISYIRFSSEKQAKGDSLRRQSKMVTDWLKAHPEYYLDESLTFRDLGVSGFTGKHLKGGLGDFLTAIEKGLVKAGDTLLIESLDRLSRQDIDIASELLRNILRSGVDVVTLSDGEHYTRESLRDPLALIKSILIMQRAHEESLRKSERIQAAWDAKKEAAKAGIKVSKRCPAWLKLNDDRKTFSVIPEKVETVKRCFQLRLEGKSIWEIVRTLNDEGHQSMSQYKPGSFGQSSVQDLLKNRSVIGYFTPKGCEEISGYYPAIIDETTFYKVQQLSHSRYGKRSVSDKPLSVNLFKGVIRCSECGHALIITGFSDTRSGIYRCPLRNENRCSAKGLSRKQTDGTLLTLLSRLDRFDSDTTNTIDTLKLHREHISSNIEKLVQLSLEIEDLSAITSKLKQLKNELSQVDADIEKETQRLKSIDVGCLSDCDLTTKAGRIEAQLIIKSAVKEVVLNTAKRRCKVTFHNGKSITLPITENPSEDVTEAIQSLSEVTERGLIDVDVVEI

SEQ ID NO: 24702 - DNA, 50 bp, Escherichia coli; identical to SEQ ID NO: 24522
  source 1..50: mol_type = genomic DNA

SEQ ID NO: 24703 - DNA, 40 bp, Escherichia coli; identical to SEQ ID NO: 5188
  source 1..40: mol_type = genomic DNA

SEQ ID NO: 24704 - DNA, 40 bp, Escherichia coli; identical to SEQ ID NO: 5749
  source 1..40: mol_type = genomic DNA

SEQ ID NO: 24705 - DNA, 50 bp, Escherichia coli; identical to SEQ ID NO: 5750
  source 1..50: mol_type = genomic DNA

SEQ ID NO: 24706 - protein, 507 aa, Escherichia coli
MKRVISYIRFSSEKQAKGDSLRRQSKMVTDWLKAHPEYYLDQDLSFRDLGVSGFTGKHLKGGLGDFLTAIEKGLVKAGDTLLIESLDRLSRQDIDIASELLRNILRSGVDVVTLSDGEHYTRESLRDPLALIKSILIMQRAHEESLRKAERIQAAWDAKKEAAKAGIKVSKRCPAWLKLNDDRKSFSVIPEKVETVKRCFQLRLEGKSIWEIVRTLNDEGHQSMSQYKPGSFGQSSVQDLLKNRSVIGYFTPKGCEEIAGYYPAIIDETTFYKVQQLSYARYGRKPASDKPLSVNLFKGVIRCSECGHALIITGFSDTRSGIYRCPLRNENRCSAKGLSRKQTDGTLLALLSRLDRFDSDMTNTIDTLKLHREHISSNIEKLVQLSLEIEDLNAITNKLKQLKNELSQVDADIEKETQRLKSIDVGCLSDCDLTTKAGRIEAQLIIKSAVKEVVLNTAKRRCKVTFHNGKIIDLPITENPSEDVTEAIQSLSEVTERGLIDVDVVEI

SEQ ID NO: 24707 - DNA, 50 bp, Escherichia coli; identical to SEQ ID NO: 24522
  source 1..50: mol_type = genomic DNA

SEQ ID NO: 24708 - DNA, 40 bp, Escherichia coli; identical to SEQ ID NO: 5188
  source 1..40: mol_type = genomic DNA

SEQ ID NO: 24709 - DNA, 40 bp, Escherichia coli; identical to SEQ ID NO: 5749
  source 1..40: mol_type = genomic DNA

SEQ ID NO: 24710 - DNA, 50 bp, Escherichia coli; identical to SEQ ID NO: 5750
  source 1..50: mol_type = genomic DNA

SEQ ID NO: 24711 - protein, 507 aa, Escherichia coli
MKRVISYIRFSSEKQAKGDSLRRQSKMVTDWLKAHPEYYLDESLTFRDLGVSGFTGKHLKGGLGDFLTAIEKGLVKAGDTLLIESLDRLSRQNVDRASELLRNILRSGVDVVTLSDGEHYTKESLRDPLSLIKSILIMQRSHEESLRKSERIQAAWNRKKELISEGIKISKRCPAWLKLNDDRKSFSVIPEKVETVKRCFQLRLEGKSIWEIVRTLNAEGHQTLNQYKAGSFGQTSVQDLLKNRSVIGYFTPKGCEEISGYYPSIIHETDFYKVQQLSYSRYGRKPASDKPMAVNLFKGVIRCSECGHALIITGFSDTRSGIYRCPLRNENRCSAKGLSRKQTDGTLLALLSRLDRFDSDMTNTIDTLKLHREHISSNIEKLVQLSLEIEDLSAITSKLKQLKNELSQVDADIEKETQRLKSIDVGCLSDCDLTTKAGRIEAQLIIKSAVKEVILNTAKRRCKVTFHNGKVIDLPITETPSEDVTEAIQSLSEVTERGLIDVDEVII

SEQ ID NO: 24712 - DNA, 50 bp, Escherichia coli; identical to SEQ ID NO: 24522
  source 1..50: mol_type = genomic DNA

SEQ ID NO: 24713 - DNA, 40 bp, Escherichia coli; identical to SEQ ID NO: 5188
  source 1..40: mol_type = genomic DNA

SEQ ID NO: 24714 - DNA, 40 bp, Escherichia coli; identical to SEQ ID NO: 5749
  source 1..40: mol_type = genomic DNA

SEQ ID NO: 24715 - DNA, 50 bp, Escherichia coli; identical to SEQ ID NO: 5750
  source 1..50: mol_type = genomic DNA

SEQ ID NO: 24716 - protein, 507 aa, Escherichia coli
MKRVISYIRFSSEKQAKGDSLRRQSKMVTDWLKAHPEYYLDQDLSFRDLGVSGFTGKHLKGGLGDFLTAIEKGLVKAGDTLLIESLDRLSRQDVDQASELLRNILRSGVDVVTLSDGEHYTRESLRDPLALIKSILIMQRAHEESLRKAERIQAAWDAKKEAAKAGIKVSKRCPAWLKLNDDRKSFSVIPEKVETVKRCFQLRLEGKSIWEIVRTLNDEGHQSMSQYKPGSFGQSSVQDLLKNRSVIGYFTPKGREEIAGYFPPIIPETDFYKVQQLSYSRYGRKPASDKPLSVNLFKGVIRCSECGHALIITGFSDTRNGIYRCPLRNENRCSAKGLSRKQTDGTLLALLSRLDRFDSDTTNIIDMLRLHREHVSSNIEKLVQLSLEIEDLNAITSKLKQLKGELSQVDADIEKETQRLKSIDVGCLSDCDLTTKAGRIEAQLIIKSAVKEVVLNTARRRCKVTFHNGKVIDLPITENPSEDVTEAIQSLSEVTAKGLIDVDVVEI

SEQ ID NO: 24717 - DNA, 50 bp, Escherichia coli; identical to SEQ ID NO: 24522
  source 1..50: mol_type = genomic DNA

SEQ ID NO: 24718 - DNA, 40 bp, Escherichia coli; identical to SEQ ID NO: 5188
  source 1..40: mol_type = genomic DNA

SEQ ID NO: 24719 - DNA, 40 bp, Escherichia coli; identical to SEQ ID NO: 5749
  source 1..40: mol_type = genomic DNA

SEQ ID NO: 24720 - DNA, 50 bp, Escherichia coli; identical to SEQ ID NO: 5750
  source 1..50: mol_type = genomic DNA

SEQ ID NO: 24721 - protein, 507 aa, Escherichia coli
MKRVISYIRFSSEKQAKGDSLRRQSKMVTDWLKAHPEYYLDQDLSFRDLGVSGFTGKHLKGGLGDFLTAIEKGLVKAGDTLLIESLDRLSRQDIDIASELLRNILRSGVDVVTLSDGEHYTRESLRDPLALIKSILIMQRAHEESLRKAERIQAAWDAKKEAAKAGIKVSKRCPAWLKLNDDRKSFSVIPEKVETVKRCFQLRLEGKSIWEIVRTLNDEGHQSMSQYKPGSFGQSSVQDLLKNRSVIGYFTPKGCEEIAGYYPAIIDETTFYKVQQLSYARYGRKPASDKPLSVNLFKGVIRCSECGHALIITGFSDTRSGIYRCPLRNENRCSAKGLSRKQTDGTLLALLSRLDRFDSDTTNTIDTLKLHREHISSNIEKLVQLSLEIEDLSAITSKLKQLKGELSQVDADIEKETQRLKSIDVGCLSDCDLTTKAGRIEAQLIIKSAVKEVVLNTAKRRCKVTFHNGKVIDLSITENPSDNVTEAIQSLSEVTERGLIDVDEVII

SEQ ID NO: 24722 - DNA, 50 bp, Escherichia coli; identical to SEQ ID NO: 24522
  source 1..50: mol_type = genomic DNA

SEQ ID NO: 24723 - DNA, 40 bp, Escherichia coli; identical to SEQ ID NO: 5188
  source 1..40: mol_type = genomic DNA

SEQ ID NO: 24724 - DNA, 40 bp, Escherichia coli; identical to SEQ ID NO: 5749
  source 1..40: mol_type = genomic DNA

SEQ ID NO: 24725 - DNA, 50 bp, Escherichia coli; identical to SEQ ID NO: 5750
  source 1..50: mol_type = genomic DNA

SEQ ID NO: 24726 - protein, 507 aa, Escherichia coli
MKRVISYIRFSSEKQAKGDSLRRQSKMVTDWLKAHPEYYLDQDLSFRDLGVSGFTGKHLKGGLGDFLTAIEKGLVKAGDTLLIESLDRLSRQDVDQASELLRNILRSGVDVVTLSDGEHYTSESLKDPLALIKSILIMQRAHEESLRKSERIQAAWNRKKELISEGIKVSKRCPAWLRLNDDRKSFSVIPEKVETVKRCFQLRLEGKSIWEIVRTLNDEGHQSMSQYKPGKFGQTSVQDLLKNRSVIGYFTPKGCEEISGYYPAIIDETTFYKVQQLSHYRYGRKPVSDKPLSVNLFKGVIRCSECGHALIITGFSDTRSGIYRCPLRNENRCSAKGLSRKQTDGTLLALLSRLDRFDSDTTNTIDTLKLHREHISSNIEKLVQLSLEIEDLNAITNKLKQLKNELSQVDADIEKETQRLKSIDVGCLSDCDLSTKAGRIEAQLIIRSAVKEVVLNTAKRRCKVTFHNSKSITLSITENPSEDVTEAIQSLSEVTERGLIDVDEVII

SEQ ID NO: 24727 - DNA, 50 bp, Escherichia coli; identical to SEQ ID NO: 24522
  source 1..50: mol_type = genomic DNA

SEQ ID NO: 24728 - DNA, 40 bp, Escherichia coli; identical to SEQ ID NO: 5188
  source 1..40: mol_type = genomic DNA

SEQ ID NO: 24729 - DNA, 40 bp, Escherichia coli; identical to SEQ ID NO: 5749
  source 1..40: mol_type = genomic DNA

SEQ ID NO: 24730 - DNA, 50 bp, Escherichia coli; identical to SEQ ID NO: 5750
  source 1..50: mol_type = genomic DNA

SEQ ID NO: 24731 - protein, 507 aa, Escherichia coli
MKRVISYIRFSSEKQAKGDSLRRQSKMVTDWLKAHPEYYLDQDLSFRDLGVSGFTGKHLKGGLGDFLTAIEKGLVKAGDTLLIESLDRLSRQAVDRASELLRNILRSGVDIVTLSDGEHYTSESLKDPLALIKSILIMQRAHEESLRKSERIQAAWDAKKEAAKAGIKVSKRCPAWLRLNDDRKSFSVIPEKVETVKRCFQLRLEGKSIWEIVRTLNAEGHRSMNQYKPGKFGQTSVQDLLKNRSVIGYFTPKGCEEISGYYPAIIDETTFYKVQQLSHSRYGKRSVSDKPLSVNLFKGVIRCSECGHALIITGFSDTRNGIYRCPLRNENRCNAKGLSRKQTDGTLLALLSRLDRFDSDMTNVIDALKLHREHISNNIEKLVQLSLEIEDLSAITIKLKQLKGELSQVDADIEKETQRLKSIDVGCLSDCDLTTKAGRIEAQLIIKSAVKEVVLNAAKRRCKVTFHNSKSITLPITENPSEDVTEAIQSLSEVTERGLIDVDEVII

SEQ ID NO: 24732 - DNA, 50 bp, Escherichia coli; identical to SEQ ID NO: 24522
  source 1..50: mol_type = genomic DNA

SEQ ID NO: 24733 - DNA, 40 bp, Escherichia coli; identical to SEQ ID NO: 5188
  source 1..40: mol_type = genomic DNA

SEQ ID NO: 24734 - DNA, 40 bp, Escherichia coli; identical to SEQ ID NO: 5749
  source 1..40: mol_type = genomic DNA

SEQ ID NO: 24735 - DNA, 50 bp, Escherichia coli; identical to SEQ ID NO: 5750
  source 1..50: mol_type = genomic DNA

SEQ ID NO: 24736 - protein, 507 aa, Escherichia coli
MKRVISYIRFSSEKQAKGDSLRRQSKMVTDWLKAHPEYYLDQDLSFRDLGVSGFTGKHLKGGLGDFLTAIEKGLVKAGDTLLIESLDRLSRQDVDQASELLRNILRSGVDVVTLSDGEHYTSESLKDPLALIKSILIMQRAHEESLRKSERIQAAWDAKKEAAKAGIKVSKRCPAWLKLNDDRKSFSVIPEKVETVKRCFQLRLEGKSIWEIVRTLNAEGHQTLNQYKAGKFGQTSVQDLLKNRSVIGYFTPKGCEEISGYYPAIIDETTFYKVQQLSHSRYGKRSVSDKPLSVNLFKGVIRCSECGHALIITGFSDTRSGIYRCPLRNENRCSAKGLSRKQTDGTLLALLSRLDRFDSDTTNIIDTLKLHREHISSNIEKLVQLSLEIEDLSAITSKLKQLKGELSQVDADIEKETQRLKSIDVGCLSDCDLTTKAGRIEAQLIIKSAVKEVVLNTAKRRCKVTFHNGKVIDLSITENPSEDVTEAIQSLSEVTERGLIDVDEVII

SEQ ID NO: 24737 - DNA, 50 bp, Escherichia coli; identical to SEQ ID NO: 24522
  source 1..50: mol_type = genomic DNA

SEQ ID NO: 24738 - DNA, 40 bp, Escherichia coli; identical to SEQ ID NO: 5188
  source 1..40: mol_type = genomic DNA

SEQ ID NO: 24739 - DNA, 40 bp, Escherichia coli; identical to SEQ ID NO: 5749
  source 1..40: mol_type = genomic DNA

SEQ ID NO: 24740 - DNA, 50 bp, Escherichia coli; identical to SEQ ID NO: 5750
  source 1..50: mol_type = genomic DNA

SEQ ID NO: 24741 - protein, 507 aa, Escherichia coli
MKRVISYIRFSSEKQAKGDSLRRQSKMVTDWLKAHPEYYLDQDLSFRDLGVSGFTGKHLKGGLGDFLTAIEKGLVKAGDTLLIESLDRLSRQNVDRASELLRNILRSGVDVVTLSDGEHYTKESLRDPLSLIKSILIMQRSHEESLRKSERIQAAWNRKKELISEGIKVSRRCPAWLRLNDDRKSFSVIPEKVETVKRCFQLRLEGKSIWEIVRTLNDEGHQSMSQYKPGKFGQTSVQDLLKNRSVIGYFTPKGCEEIAGYYPAIIDETTFYKVQQLSYARYGRKPASDKPLSVNLFKGVIRCSECGHALIITGFSDTRSGIYRCPLRNENRCSAKGLSRKQTDGTLLALLSRLDRFDSDTTNTIDTLKLHREHISSNIEKLVQLSLEIEDLSAITSKLKQLKGELSQVDADIEKETQRLKSIDVGCLSDCDLTTKAGRIEAQLIIKSAVKEVVLNTAKRRCKVTFHNGKVIDLSITENPSEDVTEAIQSLSEVTERGLIDVDEVII

SEQ ID NO: 24742 - DNA, 50 bp, Escherichia coli; identical to SEQ ID NO: 24522
  source 1..50: mol_type = genomic DNA

SEQ ID NO: 24743 - DNA, 40 bp, Escherichia coli; identical to SEQ ID NO: 21333
  source 1..40: mol_type = genomic DNA

SEQ ID NO: 24744 - DNA, 40 bp, Escherichia coli
  source 1..40: mol_type = genomic DNA
cggcgttaatcgggtgattaaagacggccgcccggttcat

SEQ ID NO: 24745 - DNA, 50 bp, Escherichia coli; identical to SEQ ID NO: 5750
  source 1..50: mol_type = genomic DNA

SEQ ID NO: 24746 - protein, 507 aa, Escherichia coli
MKRVISYIRFSSEKQAKGDSLRRQSKMVTDWLKAHPEYYLDQDLSFRDLGVSGFTGKHLKGGLGDFLTAIEKGLVKAGDTLLIESLDRLSRQDIDIASELLRNILRSGVDVVTLSDGEHYTRESLRDPLALIKSILIMQRAHEESLRKAERIQAAWDAKKEAAKAGIKVSKRCPAWLKLNDDRKSFSVIPEKVETVKRCFQLRLEGKSIWEIVRTLNDEGHQTLNQYKAGKFGQTSVQDLLKNRSVIGYFTPKGCEEISGYYPAIIDETTFYKVQQLSHYRYGRKPVSDKPLSVNLFKGVIRCSECGHALIITGFSDTRNGIYRCPLRNENRCSAKGLSRKQTDGTLLTLLSRLDRFDSDMTNTIDTLKLHREHISSNIEKLVQLSLEIEDLSAITIKLKQLKNELSQVDADIEKETQRLKSIDVGCLSDCDLTTKAGRIEAQLIIKSAVKEVVLNTAKRRCKVTFHNGKAITLPITENPSEDVTEAIQSLSEVTERGLIDVDEVIV

SEQ ID NO: 24747 - DNA, 50 bp, Escherichia coli; identical to SEQ ID NO: 24522
  source 1..50: mol_type = genomic DNA

SEQ ID NO: 24748 - DNA, 40 bp, Escherichia coli; identical to SEQ ID NO: 5188
  source 1..40: mol_type = genomic DNA

SEQ ID NO: 24749 - DNA, 40 bp, Escherichia coli; identical to SEQ ID NO: 5749
  source 1..40: mol_type = genomic DNA

SEQ ID NO: 24750 - DNA, 50 bp, Escherichia coli; identical to SEQ ID NO: 5750
  source 1..50: mol_type = genomic DNA

SEQ ID NO: 24751 - protein, 507 aa, Escherichia coli
MKRVISYIRFSSEKQAKGDSLRRQSKMVTDWLKAHPEYYLDQDLSFRDLGVSGFTGKHLKGGLGDFLTAIEKGLVKAGDTLLIESLDRLSRQDIDIASELLRNILRSGVDVVTLSDGEHYTRESLRDPLALIKSILIMQRAHEESLRKAERIQAAWDAKKEAAKAGIKVSKRCPAWLKLNDDRKSFSVIPEKVETVKRCFQLRLEGKSIWEIVRTLNDEGHQSMSQYKPGKFGQTSVQDLLKNRSVIGYFTPKGCEEIAGYYPAIIDETTFYKVQQLSHSRYGRKPVSAKPLSVNLFKGVIRCSECGHALIITGFSDTRNGIYRCPLRNENRCNAKGLSRKQTDGTLLALLSRLDRFDSDTTNTIDTLKLHREHLSSNIEKLVQLSLEIEDLNAITNKLKQLKNELSQVDADIEKETQRLKSIDVGCLSDCDLTTKAGRIEAQLIIKSAVKEVVLNTAKRRCKVTFHNGRAITLSITENPSEDVTEAIQSLSEVTERGLIDVDVVAI

SEQ ID NO: 24752 - DNA, 50 bp, Escherichia coli; identical to SEQ ID NO: 24522
  source 1..50: mol_type = genomic DNA

SEQ ID NO: 24753 - DNA, 40 bp, Escherichia coli; identical to SEQ ID NO: 5188
  source 1..40: mol_type = genomic DNA

SEQ ID NO: 24754 - DNA, 40 bp, Escherichia coli; identical to SEQ ID NO: 5749
  source 1..40: mol_type = genomic DNA

SEQ ID NO: 24755 - DNA, 50 bp, Escherichia coli; identical to SEQ ID NO: 5750
  source 1..50: mol_type = genomic DNA

SEQ ID NO: 24756 - protein, 507 aa, Escherichia coli; identical to SEQ ID NO: 24551

SEQ ID NO: 24757 - DNA, 50 bp, Escherichia coli; identical to SEQ ID NO: 24522
  source 1..50: mol_type = genomic DNA

SEQ ID NO: 24758 - DNA, 40 bp, Escherichia coli
  source 1..40: mol_type = genomic DNA
cggcgttaatcgggtgattttggacagccgcccggttcat

SEQ ID NO: 24759 - DNA, 40 bp, Escherichia coli
  source 1..40: mol_type = genomic DNA
cggcgttaatcgggtgattaaggacagccgcccggttcat

SEQ ID NO: 24760 - DNA, 50 bp, Escherichia coli; identical to SEQ ID NO: 5750
  source 1..50: mol_type = genomic DNA

SEQ ID NO: 24761 - protein, 507 aa, Escherichia coli
MKRVISYIRFSSEKQAKGDSLRRQSKMVTDWLKAHPEYYLDQDLSFRDLGVSGFTGKHLKGGLGDFLTAIEKGLVKAGDTLLIESLDRLSRQDIDIASELLRNILRSGVDVVTLSDGEHYTRESLRDPLSLIKSILIMQRSHEESLRKSERIQAAWDAKKEAAKAGIKVSKRCPAWLRLNDDRKSFSVIPEKVETVKRCFQLRLEGKSIWEIVRTLNDEGHQSMSQYKPGSFGQSSVQDLLKNRSVIGYFTPKGREEIAGYFPPIIPETDFYKVQQLSYSRYGRKPASDKPLSVNLFKGVIRCSECGHALIITGFSDTRNGIYRCPLRNENRCNAKGLSRKQTDGTLLALLSRLDRFDSDTTNIIDMLKLHREHISNNIEKLVQLSLEIEDLSAITIKLKQLKGELSQVDADIEKETQRLKSIDVGCLSDCDLSTKAGRIEAQLIIKSAVKEVVLNTAKRRCKVTFHNSKSITLPITENPSEDVTEAIQSLSEVTERGLIDVDVVEI

SEQ ID NO: 24762 - DNA, 50 bp, Escherichia coli; identical to SEQ ID NO: 24522
  source 1..50: mol_type = genomic DNA

SEQ ID NO: 24763 - DNA, 40 bp, Escherichia coli; identical to SEQ ID NO: 5188
  source 1..40: mol_type = genomic DNA

SEQ ID NO: 24764 - DNA, 40 bp, Escherichia coli; identical to SEQ ID NO: 5749
  source 1..40: mol_type = genomic DNA

SEQ ID NO: 24765 - DNA, 50 bp, Escherichia coli; identical to SEQ ID NO: 5750
  source 1..50: mol_type = genomic DNA

SEQ ID NO: 24766 - protein, 507 aa, Escherichia coli
MKRVISYIRFSSEKQSRGDSLRRQSKMVTDWLKAHPEYYLDQDLSFRDLGVSGFTGKHLKGGLGDFLTAIEKGLVKAGDTLLIESLDRLSRQAVDRASELLRNILRSGVDVVTLSDGEHYTSESLKDPLALIKSILIMQRAHEESLRKAERIQAAWDAKKEAAKAGIKISKRCPAWLKLNDDRKSFSIIPEKVETVKRCFQLRLEGKSIWAIVKALNDEGHQTLNQYKAGKFGQTSVQDLLKNRSVIGYFTPKGCEEIAGYYPAIIDETTFYKVQQLSHSRYGKRSVSDKPLSVNLFKGVIRCSECGHALIITGFSDTRNGIYRCPLRNENRCSAKGLSRKQTDGTLLTLLSRLDRFDSDTTNTIDTLKLHREHISSNIEKLVQLSLEIEDLSAITSKLKQLKGELSQVDADIEKETQRLKSIDVGCLSDCDLTTKAGRIEAQLIIKSAVKEVVLNTAKRRCKVTFHNGKAITLPITENPSEDVTEAIQSLSEVTERGLIDVDVVEI

SEQ ID NO: 24767 - DNA, 50 bp, Escherichia coli; identical to SEQ ID NO: 24522
  source 1..50: mol_type = genomic DNA

SEQ ID NO: 24768 - DNA, 40 bp, Escherichia coli; identical to SEQ ID NO: 5188
  source 1..40: mol_type = genomic DNA

SEQ ID NO: 24769 - DNA, 40 bp, Escherichia coli; identical to SEQ ID NO: 5749
  source 1..40: mol_type = genomic DNA

SEQ ID NO: 24770 - DNA, 50 bp, Escherichia coli; identical to SEQ ID NO: 5750
  source 1..50: mol_type = genomic DNA

SEQ ID NO: 24771 - protein, 507 aa, Escherichia coli
MKRVISYIRFSSEKQAKGDSLRRQSKMVTDWLKAHPEYYLDQDLSFRDLGVSGFTGKHLKGGLGDFLTAIEKGLVKAGDTLLIESLDRLSRQNVDRASELLRNILRSGVDVVTLSDGEHYTRESLKDPLALIKSILIMQRSHEESLRKSERIQAAWNRKKELISEGIKISKRCPAWLRLNDDRKTFSVIPEKVETVKRCFQLRLEGKSIWEIVRTMNAEGHQTLNQYKAGSFGQTSVQDLLKNRSVIGYFTPKGREEISGYYPAIIDETTFYKVQQLSYARYGRKPASDKPLSVNLFKGVIRCSECGHALIITGFSDTRSGIYRCPLRNENRCSAKGLSRKQTDGTLLTLLSRLDRFDSDTTNIIDMLRLHREHISNNIEKLVQLSLEIEDLSAITIKLKQLKGELSQVDADIEKETQRLKSIDVGCLSDCDLTTKAGRIEAQLIIKSAVKEVVLNTAKRRCKVTFHNSKSITLPITENPSEDVTEAIQSLSEVTERGLIDVDEVII

SEQ ID NO: 24772 - DNA, 50 bp, Escherichia coli; identical to SEQ ID NO: 24522
  source 1..50: mol_type = genomic DNA

SEQ ID NO: 24773 - DNA, 40 bp, Escherichia coli; identical to SEQ ID NO: 21333
  source 1..40: mol_type = genomic DNA

SEQ ID NO: 24774 - DNA, 40 bp, Escherichia coli; identical to SEQ ID NO: 24744
  source 1..40: mol_type = genomic DNA

SEQ ID NO: 24775 - DNA, 50 bp, Escherichia coli; identical to SEQ ID NO: 5750
  source 1..50: mol_type = genomic DNA

SEQ ID NO: 24776 - protein, 507 aa, Escherichia coli
MKRVISYIRFSSEKQAKGDSLRRQSKMVTDWLKAHPEYYLDQDLSFRDLGVSGFTGKHLKGGLGDFLTAIEKGLVKAGDTLLIESLDRLSRQAVDRASELLRNILRSGVDVVTLSDGEHYTSESLKDPLALIKSILIMQRSHEESLRKSERIQAAWDAKKEAAKAGIKVSKRCPAWLKLNDDRKSFSVIPEKVETVKRCFQLRLEGKSIWEIVRTMNAEGHQTLHQHKPGSFGQSSVQDLLKNRSVIGYFTPKGCEEISGYYPAIIDETTFYKVQQLSYARHGRKPASAKPLSVNLFKGVIRCSECGHALIITGFSDTRNGIYRCPLRNENRCSAKGLSRKQTDGTLLTLLSRLDRFDSDTTNTIDTLKLHREHLSSNIEKLVQLSLEIEDLNAITNKLKQLKNELSQVDADIEKETQRLKSIDVGCLSDCDLSTKAGRIEAQLIIKSAVKEVVLNTAKRRCKVTFHNGKVIDLPITENPSEDVTEAIQSLSEVTAKGLIDVDVVEI

SEQ ID NO: 24777 - DNA, 50 bp, Escherichia coli; identical to SEQ ID NO: 24522
  source 1..50: mol_type = genomic DNA

SEQ ID NO: 24778 - DNA, 40 bp, Escherichia coli; identical to SEQ ID NO: 5188
  source 1..40: mol_type = genomic DNA

SEQ ID NO: 24779 - DNA, 40 bp, Escherichia coli; identical to SEQ ID NO: 5749
  source 1..40: mol_type = genomic DNA

SEQ ID NO: 24780 - DNA, 50 bp, Escherichia coli; identical to SEQ ID NO: 5750
  source 1..50: mol_type = genomic DNA

SEQ ID NO: 24781 - protein, 507 aa, Escherichia coli
MKRVISYIRFSSEKQAKGDSLRRQSKMVTDWLKAHPEYYLDQDLSFRDLGVSGFTGKHLKGGLGDFLTAIEKGLVKAGDTLLIESLDRLSRQDIDIASELLRRILRAGVDVVTLSDGEHYTSESLKDPLALIKSILIMQRAHEESLRKAERIQAAWDAKKEAAKAGIKVSKRCPAWLKLNDDRKTFSVIPEKVETVRRCFQLRLEGKSIWAIVKALNDEGHQSMSQYKPGKFGQTSVQDLLKNRSVIGYFTPKGCEEISGYYPAIIDETTFYKVQQLSYARYGRKPASDKPLSVNLFKGVIRCSECGHALIITGFSDTRSGIYRCPLRNENRCSAKGLSRKQTDGTLLALLSRLDRFDSDMTNTVDTLKLHREHISSNIEKLVQLSLEIEDLSAITSKLRQLKNELSQVDADIEKETQRLKSIDVGCLSDCDLTTKAGRIEAQLIIKSAVKEVVLNTAKRRCKVTFHNGKVIDLPITENPSEDVTEAIQSLSEVTERGLIDVDEVII

SEQ ID NO: 24782 - DNA, 50 bp, Escherichia coli; identical to SEQ ID NO: 24522
  source 1..50: mol_type = genomic DNA

SEQ ID NO: 24783 - DNA, 40 bp, Escherichia coli; identical to SEQ ID NO: 5188
  source 1..40: mol_type = genomic DNA

SEQ ID NO: 24784 - DNA, 40 bp, Escherichia coli; identical to SEQ ID NO: 5749
  source 1..40: mol_type = genomic DNA

SEQ ID NO: 24785 - DNA, 50 bp, Escherichia coli; identical to SEQ ID NO: 5750
  source 1..50: mol_type = genomic DNA

SEQ ID NO: 24786 - protein, 507 aa, Escherichia coli
MKRVISYIRFSSEKQAKGDSLRRQSKMVTDWLKAHPEYYLDQDLSFRDLGVSGFTGKHLKGGLGDFLTAIEKGLVKAGDTLLIESLDRLSRQDVDQASELLRNILRSGVDVVTLSDGEHYTRESLRDPLALIKSILIMQRAHEESLRKAERIQAAWDAKKEAAKAGIKVSKRCPAWLKLNDDRKSFSVIPEKVETVKRCFQLRLEGKSIWEIVRTLNDEGHQSMSQYKPGSFGQSSVQDLLKNRSVIGYFTPKGREEIAGYFPPIIPETDFYKVQQLSYSRYGRKPASDKPLSVNLFKGVIRCSECGHALIITGFSDTRNGIYRCPLRNENRCSAKGLSRKQTDGTLLALLSRLDRFDSDTTNIIDMLRLHREHVSSNIEKLVQLSLEIEDLNAITSKLKQLKGELSQVDADIEKETQRLKSIDVGCLSDCDLTTKAGRIEAQLIIKSAVKEVVLNTAKRRCKVTFHNGKTITLSITENPSEDVTEAIQSLSEVTERGLIDVDVVEI

SEQ ID NO: 24787 - DNA, 50 bp, Escherichia coli; identical to SEQ ID NO: 24522
  source 1..50: mol_type = genomic DNA

SEQ ID NO: 24788 - DNA, 40 bp, Escherichia coli; identical to SEQ ID NO: 5188
  source 1..40: mol_type = genomic DNA

SEQ ID NO: 24789 - DNA, 40 bp, Escherichia coli; identical to SEQ ID NO: 5749
  source 1..40: mol_type = genomic DNA

SEQ ID NO: 24790 - DNA, 50 bp, Escherichia coli; identical to SEQ ID NO: 5750
  source 1..50: mol_type = genomic DNA

SEQ ID NO: 24791 - protein, 507 aa, Escherichia coli
MKRVISYIRFSSEKQAKGDSLRRQSKMVTDWLKAHPEYYLDESLTFRDLGVSGFTGKHLKGGLGDFLTAIEKGLVKAGDTLLIESLDRLSRQAVDRASELLRNILRSGVDVVTLSDGEHYTSESLKDPLALIKSILIMQRAHEESLRKSERIQAAWNRKKELISEGIKISKRCPAWLRLNDDRKSFSVIPDKVETVKKCFQLRLEGKSIWEIVRTLNAEGHRSMNQYKPGKFGQTSVQDLLKNRSVIGYFTPKGCEEIAGYYPAIIDETTFYKVQQLSHSRYGKRSVSDKPLSVNLFKGVIRCSECGHALIITGFSDTRNGIYRCPLRNENRCSAKGLSRKQTDGTLLTLLSRLDRFDSDTTNTIDMLRLHREHISSNIEKLVQLSLEIEDLSAITIKLKQLKGELSQVDADIEKETQRLKSIDVGCLSDCDLTTKAGRIEAQLIIKSAVKEVVLNTAKRRCKVTFHNSKSITLSITENPSEDVTEAIQSLSEVTERGLIDVDEVII

SEQ ID NO: 24792 - DNA, 50 bp, Escherichia coli; identical to SEQ ID NO: 24522
  source 1..50: mol_type = genomic DNA

SEQ ID NO: 24793 - DNA, 40 bp, Escherichia coli; identical to SEQ ID NO: 5188
  source 1..40: mol_type = genomic DNA

SEQ ID NO: 24794 - DNA, 40 bp, Escherichia coli; identical to SEQ ID NO: 5749
  source 1..40: mol_type = genomic DNA

SEQ ID NO: 24795 - DNA, 50 bp, Escherichia coli; identical to SEQ ID NO: 5750
  source 1..50: mol_type = genomic DNA

SEQ ID NO: 24796 - protein, 507 aa, Escherichia coli
MKRVISYIRFSSEKQAKGDSLRRQSKMVTDWLKAHPEYYLDESLTFRDLGVSGFTGKHLKGGLGDFLTAIEKGLVKAGDTLLIESLDRLSRQDVDRASELLRNILRSGVDVVTLSDGEHYTRESLKDPLSLIKSILIMQRAHEESLRKSERIQAAWDAKKEAAKAGIKISRRCPAWLKLNDDRKSFSVIPEKVETVKRCFQLRLEGKSIWEIVRTLNDEGHQSMSQYKPGSFGQTSVQDLLKNRSVIGYFTPKGCEEISGYYPAIIDETTFYKVQQLSHYRYGRKPVSDKPLSVNLFKGVIRCSECGHALIITGFSDTRNGIYRCPLRNENRCSAKGLSRKQTDGTLLALLSRLDRFDSDTTNTIDTLKLHREHISSNIEKLVQLSLEIEDLSAITSKLRQLKGELSQVDADIEKETQRLKSIDVGCLSDCDLTTKAGRIEAQLIIKSAVKEVVLNTAKRRCKVTFHNGKSITLPITENPSEDVTEAIQSLSEVTERGLIDVDEVII

SEQ ID NO: 24797 - DNA, 50 bp, Escherichia coli; identical to SEQ ID NO: 24522
  source 1..50: mol_type = genomic DNA

SEQ ID NO: 24798 - DNA, 40 bp, Escherichia coli; identical to SEQ ID NO: 5188
  source 1..40: mol_type = genomic DNA

SEQ ID NO: 24799 - DNA, 40 bp, Escherichia coli; identical to SEQ ID NO: 5749
  source 1..40: mol_type = genomic DNA

SEQ ID NO: 24800 - DNA, 50 bp, Escherichia coli; identical to SEQ ID NO: 5750
  source 1..50: mol_type = genomic DNA

SEQ ID NO: 24801 - protein, 507 aa, Escherichia coli
MKRVISYIRFSSEKQAKGDSLRRQSKMVTDWLKAHPEYYLDQDLSFRDLGVSGFTGKHLKGGLGDFLTAIEKGLVKAGDTLLIESLDRLSRQDIDIASELLRNILRSGVDVVTLSDGEHYTRESLRDPLALIKSILIMQRAHEESLRKAERIQAAWDAKKEAAKAGIKVSKRCPAWLKLNDDRKSFSVIPEKVETVKRCFQLRLEGKSIWEIVRTLNDEGHQSMSQYKPGSFGQSSVQDLLKNRSVIGYFTPKGCEEIAGYYPAIIDETTFYKVQQLSHSRYGKRSVSDKPLSVNLFKGVIRCSECGHALIITGFSDTRNGIYRCPLRNENRCSAKGLSRKQTDGTLLALLSRLDRFDSDTTNTIDTLKLHREHISSNIEKLVQLSLEIEDLSAITSKLRQLKGELSQVDADIEKETQRLKSIDVGCLSDCDLTTKAGRIEAQLIIKSAVKEVVLNTAKRRCKVTFHNGKLIDLPITETPSDNVTEAIQSLSEVTERGLIDVDEVII

SEQ ID NO: 24802 - DNA, 50 bp, Escherichia coli; identical to SEQ ID NO: 24522
  source 1..50: mol_type = genomic DNA

SEQ ID NO: 24803 - DNA, 40 bp, Escherichia coli; identical to SEQ ID NO: 22878
  source 1..40: mol_type = genomic DNA

SEQ ID NO: 24804 - DNA, 40 bp, Escherichia coli
  source 1..40: mol_type = genomic DNA
cggcgttaatcgggtgattaaagacagccgccctgttcat

SEQ ID NO: 24805 - DNA, 50 bp, Escherichia coli; identical to SEQ ID NO: 5750
  source 1..50: mol_type = genomic DNA

SEQ ID NO: 24806 - protein, 507 aa, Escherichia coli
MKRVISYIRFSSEKQAKGDSLRRQSKMVTDWLKAHPEYYLDQDLSFRDLGVSGFTGKHLKGGLGDFLTAIEKGLVKAGDTLLIESLDRLSRQAVDRASELLRNILRSGVDVVTLSDGEHYTKESLRDPLSLIKSILIMQRAHEESLRKAERIQAAWDAKKEAAKAGIKISRRCPAWLRLNDDRKSFSVIPEKVETVKRCFQLRLEGKSIWEIVRTLNDEGHQTLNQYKAGKFGQTSVQDLLKNRSVIGYFTPKGCEEISGYFPSIIPETDFYKVQQLSYSRYGRKPASDKPLSVNLFKGVIRCSECGHALIITGFSDTRNGIYRCPLRNENRCNAKGLSRKQTDGTLLALLSRLDRFDSDTTNTIDMLRLHREHISSNIEKLVQLSLEIEDLNAITSKLRQLKGELSQVDADIEKETQRLKSIDVGCLSDCDLTTKAGRIEAQLIIKSAVKEVVLNTAKRRCKVTFHNGRAITLPITENPSEDVTEAIQSLSEVTERGLIDVDEVII

SEQ ID NO: 24807 - DNA, 50 bp, Escherichia coli; identical to SEQ ID NO: 24522
  source 1..50: mol_type = genomic DNA

SEQ ID NO: 24808 - DNA, 40 bp, Escherichia coli; identical to SEQ ID NO: 21333
  source 1..40: mol_type = genomic DNA

SEQ ID NO: 24809 - DNA, 40 bp, Escherichia coli; identical to SEQ ID NO: 24744
  source 1..40: mol_type = genomic DNA

SEQ ID NO: 24810 - DNA, 50 bp, Escherichia coli; identical to SEQ ID NO: 5750
  source 1..50: mol_type = genomic DNA

SEQ ID NO: 24811 - protein, 507 aa, Escherichia coli
MKRVISYIRFSSEKQAKGDSLRRQSKMVTDWLKAHPEYYLDQDLSFRDLGVSGFTGKHLKGGLGDFLTAIEKGLVKAGDTLLIESLDRLSRQAVDRASELLRNILRSGVDVVTLSDGEHYTSESLKDPLALIKSILIMQRAHEESLRKSERIQAAWNRKKELISEGIKISKRCPAWLKLNDDRKSFSVIPDKVETVKRCFQLRLEGKSIWEIVRTLNAEGHRSMNQYKPGKFGQTSVQDLLKNRSVIGYFTPKGCEEISGYYPAIIDETTFYKVQQLSHSRYGKRSVSDKPLSVNLFKGVIRCSECGHALIITGFSDTRNGIYRCPLRNENRCNAKGLSRKQTDGTLLALLSRLDRFDSDTTNTIDTLKLHREHLSSNIEKLVQLSLEIEDLNAITNKLKQLKNELSQVDADIEKETQRLKSIDVGCLSDCDLTTKAGRIEAQLIIKSAVKEVVLNTARRRCKVTFHNGKVIDLPITENPSEDVTEAIQSLSEVTAKGLIDVDVVEI

SEQ ID NO: 24812 - DNA, 50 bp, Escherichia coli; identical to SEQ ID NO: 24522
  source 1..50: mol_type = genomic DNA

SEQ ID NO: 24813 - DNA, 40 bp, Escherichia coli; identical to SEQ ID NO: 5188
  source 1..40: mol_type = genomic DNA

SEQ ID NO: 24814 - DNA, 40 bp, Escherichia coli; identical to SEQ ID NO: 5749
  source 1..40: mol_type = genomic DNA

SEQ ID NO: 24815 - DNA, 50 bp, Escherichia coli; identical to SEQ ID NO: 5750
  source 1..50: mol_type = genomic DNA

SEQ ID NO: 24816 - protein, 507 aa, Escherichia coli
MKRVISYIRFSSEKQAKGDSLRRQSKMVNDWLKAHPEYYLDQDLSFRDLGVSGFTGKHLKGGLGDFLTAIEKGLVKAGDTLLIESLDRLSRQDVDQASELLRNILRSGVDVVTLSDGEHYTRESLKDPLALIKSILIMQRSHEESLRKSERIQAAWNRKKELISEGIKISKRCPAWLKLNDDRKSFSVIPEKVETVKRCFQLRLEGKSIWEIVRTLNDEGHQTLNQYKAGSFGQTSVQDLLKNRSVIGYFTPKGCEEIADYYPAIIDETTFYKVQQLSYARYGRKPASDKPMAVNLFKGVIRCSECGHALIITGFSDTRNGIYRCPLRNENRCSAKGLSRKQTDGTLLTLLSRLDRFDSDTTNTIDTLKLHREHISSNIEKLVQLSLEIEDLSAITSKLKQLKNELSQVDADIEKETQRLKSIDVGCLSDCDLTTKAGRIEAQLIIKSAVKEVVLNTAKRRCKVTFHNGRIIDLPITENPSEDVTEAIQSLSEVTERGLIDVDEVII

SEQ ID NO: 24817 - DNA, 50 bp, Escherichia coli
  source 1..50: mol_type = genomic DNA
tagtgtatttagaccttgatgatttttattagacacatttaaatacacta

SEQ ID NO: 24818 - DNA, 40 bp, Escherichia coli; identical to SEQ ID NO: 5188
  source 1..40: mol_type = genomic DNA

SEQ ID NO: 24819 - DNA, 40 bp, Escherichia coli; identical to SEQ ID NO: 5749
  source 1..40: mol_type = genomic DNA

SEQ ID NO: 24820 - DNA, 50 bp, Escherichia coli; identical to SEQ ID NO: 5750
  source 1..50: mol_type = genomic DNA

SEQ ID NO: 24821 - protein, 507 aa, Escherichia coli; identical to SEQ ID NO: 24811

SEQ ID NO: 24822 - DNA, 50 bp, Escherichia coli; identical to SEQ ID NO: 24522
  source 1..50: mol_type = genomic DNA

SEQ ID NO: 24823 - DNA, 40 bp, Escherichia coli; identical to SEQ ID NO: 21333
  source 1..40: mol_type = genomic DNA

SEQ ID NO: 24824 - DNA, 40 bp, Escherichia coli; identical to SEQ ID NO: 24744
  source 1..40: mol_type = genomic DNA

SEQ ID NO: 24825 - DNA, 50 bp, Escherichia coli; identical to SEQ ID NO: 5750
  source 1..50: mol_type = genomic DNA

SEQ ID NO: 24826 - protein, 507 aa, Escherichia coli
MKRVISYIRFSSEKQAKGDSLRRQSKMVNDWLKAHPEYYLDQDLSFRDLGVSGFTGKHLKGGLGDFLTAIEKGLVKAGDTLLIESLDRLSRQDVDQASELLRNILRSGVDVVTLSDGEHYTRESLKDPLALIKSILIMQRAHEESLRKAERIQAAWNRKKELISEGIKVSRRCPAWLRLNDDRKSFSVIPEKVETVKRCFQLRLEGKSIWEIVRTLNAEGHQTLNQYKAGKFGQTSVQDLLKNRSVIGYFTPKGCEEISGYYPAIIDETTFYKVQQLSYARYGRKPASDKPMAVNLFKGVIRCSECGHALIITGFSDTRNGIYRCPLRNENRCSAKGLSRKQTDGTLLALLSRLDRFDSDTTNTIDTLKLHREHISSNIEKLVQLSLEIEDLNAITNKLKQLKNELSQVDADIEKETQRLKSIDVGCLSDCDLTTKAGRIEAQLIIKSAVKEVVLNTAKRRCKVTFHNGKAITLPITENPSDNVTEAIQSLSEVTERGLIDVDEVII

SEQ ID NO: 24827 - DNA, 50 bp, Escherichia coli; identical to SEQ ID NO: 24522
  source 1..50: mol_type = genomic DNA

SEQ ID NO: 24828 - DNA, 40 bp, Escherichia coli; identical to SEQ ID NO: 5188
  source 1..40: mol_type = genomic DNA

SEQ ID NO: 24829 - DNA, 40 bp, Escherichia coli; identical to SEQ ID NO: 5749
  source 1..40: mol_type = genomic DNA

SEQ ID NO: 24830 - DNA, 50 bp, Escherichia coli; identical to SEQ ID NO: 5750
  source 1..50: mol_type = genomic DNA

SEQ ID NO: 24831 - protein, 507 aa, Escherichia coli
MKRVISYIRFSSEKQAKGDSLRRQSKMVTDWLKAHPEYYLDESLTFRDLGVSGFTGKHLKGGLGDFLTAIEKGLVKAGDTLLIESLDRLSRQDIDIASELLRRILRAGVDVVTLSDGEHYTKESLRDPLSLIKSILIMQRAHEESLRKSERIQAAWDAKKEAAKAGIKVSKRCPAWLKLNDDRKSFSVIPEKVETVKRCFQLRLEGKSIWEIVRTLNDEGHQTLNQYKAGKFGQTSVQDLLKNRSVIGYFTPKGREEIAGYYPAIIDETTFYKVQQLSHSRYGRKPVSAKPLSVNLFKGVIRCSECGHALIITGFSDTRNGIYRCPLRNENRCSAKGLSRKQTDGTLLTLLSRLDRFDSDMTNTIDMLRLHREHISSNIEKLVQLSLEIEDLSAITIKLKQLKGELSQVDADIEKETQRLKSIDVGCLSDCDLTTKAGRIEAQLIIKSAVKEVVLNTAKRRCKVTFHNGKVIDLSITENPSEDVTEAIQSLSEVTERGLIDVDEVII

SEQ ID NO: 24832 - DNA, 50 bp, Escherichia coli; identical to SEQ ID NO: 24522
  source 1..50: mol_type = genomic DNA

SEQ ID NO: 24833 - DNA, 40 bp, Escherichia coli; identical to SEQ ID NO: 5188
  source 1..40: mol_type = genomic DNA

SEQ ID NO: 24834 - DNA, 40 bp, Escherichia coli; identical to SEQ ID NO: 5749
  source 1..40: mol_type = genomic DNA

SEQ ID NO: 24835 - DNA, 50 bp, Escherichia coli; identical to SEQ ID NO: 5750
  source 1..50: mol_type = genomic DNA

SEQ ID NO: 24836 - protein, 507 aa, Escherichia coli
MKRVISYIRFSSEKQAKGDSLRRQSKMVTDWLKAHPEYYLDESLTFRDLGVSGFTGKHLKGGLGDFLTAIEKGLVKAGDTLLIESLDRLSRQAVDRASELLRNILRSGVDVVTLSDGEHYTRESLKDPLSLIKSILIMQRAHEESLRKSERIQAAWDAKKEAAKAGIKISRRCPAWLKLNDDRKSFSVIPEKVETVKRCFQLRLEGKSIWEIVRTLNDEGHQSMSQYKPGSFGQSSVQDLLKNRSVIGYFTPKGCEEIAGYYPAIIDETTFYKVQQLSHSRYGKRSVSDKPLSVNLFKGVIRCSECGHALIITGFSDTRSGIYRCPLRNENRCSAKGLSRKQTDGTLLALLSRLDRFDSDMTNTIDTLKLHREHISSNIEKLVQLSLEIEDLSAITSKLKQLKNELSQVDADIEKETQRLKSIDVGCLSDCDLTTKAGRIEAQLIIKSAVKEVVLNTAKRRCKVTFHNGRAITLPITEPPSDNVTEAIQSLSEVTERGLIDVDEVII

SEQ ID NO: 24837 - DNA, 50 bp, Escherichia coli; identical to SEQ ID NO: 24522
  source 1..50: mol_type = genomic DNA

SEQ ID NO: 24838 - DNA, 40 bp, Escherichia coli; identical to SEQ ID NO: 5188
  source 1..40: mol_type = genomic DNA

SEQ ID NO: 24839 - DNA, 40 bp, Escherichia coli; identical to SEQ ID NO: 5749
  source 1..40: mol_type = genomic DNA

SEQ ID NO: 24840 - DNA, 50 bp, Escherichia coli; identical to SEQ ID NO: 5750
  source 1..50: mol_type = genomic DNA

SEQ ID NO: 24841 - protein, 507 aa, Escherichia coli
MKRVISYIRFSSEKQSRGDSLRRQSKMVTDWLKAHPEYYLDQDLSFRDLGVSGFTGKHLKGGLGDFLTAIEKGLVKAGDTLLIESLDRLSRQAVDRASELLRNILRSGVDVVTLSDGEHYTSESLKDPLALIKSILIMQRAHEESLRKAERIQAAWDAKKEAAKAGIKISKRCPAWLKLNDDRKSFSIIPEKVETVKRCFQLRLEGKSIWAIVKALNDEGHQTLNQYKAGKFGQTSVQDLLKNRSVIGYFTPKGCEEIAGYYPAIIDETTFYKVQQLSHSRYGKRSVSDKPLSVNLFKGVIRCSECGHALIITGFSDTRNGIYRCPLRNENRCSAKGLSRKQTDGTLLTLLSRLDRFDSDTTNTIDTLKLHREHISSNIEKLVQLSLEIEDLSAITSKLKQLKGELSQVDADIEKETQRLKSIDVGCLSDCDLTTKAGRIEAQLIIKSAVKEVVLNTAKRRCKVTFHNGKVIGLSITENPSEDVTEAIQSLSEVTERGLIDVDVVEI

SEQ ID NO: 24842 - DNA, 50 bp, Escherichia coli; identical to SEQ ID NO: 24522
  source 1..50: mol_type = genomic DNA

SEQ ID NO: 24843 - DNA, 40 bp, Escherichia coli; identical to SEQ ID NO: 5188
  source 1..40: mol_type = genomic DNA

SEQ ID NO: 24844 - DNA, 40 bp, Escherichia coli; identical to SEQ ID NO: 5749
  source 1..40: mol_type = genomic DNA

SEQ ID NO: 24845 - DNA, 50 bp, Escherichia coli; identical to SEQ ID NO: 5750
  source 1..50: mol_type = genomic DNA

SEQ ID NO: 24846 - protein, 507 aa, Escherichia coli
MKRVISYIRFSSEKQAKGDSLRRQSKMVTDWLKAHPEYYLDQDLSFRDLGVSGFTGKHLKGGLGDFLTAIEKGLVKAGDTLLIESLDRLSRQDVDQASELLRNILRSGVDVVTLSDGEHYTRESLRDPLALIKSILIMQRAHEESLRKAERIQAAWDAKKEAAKAGIKVSKRCPAWLKLNDDRKSFSVIPEKVETVKRCFQLRLEGKSIWEIVRTLNDEGHQSMSQYKPGSFGQSSVQDLLKNRSVIGYFTPKGREEIAGYFPPIIPETDFYKVQQLSYSRYGRKPASDKPLSVNLFKGVIRCSECGHALIITGFSDTRNGIYRCPLRNENRCSAKGLSRKQTDGTLLALLSRLDRFDSDTTNIIDMLRLHREHVSSNIEKLVQLSLEIEDLSAITSKLKQLKGELSQVDADIEKETQRLKSIDVGCLSDCDLTTKAGRIEAQLIIKSAVKEVVLNTAKRRCKVTFHNGKVIDLSITENPSDNVTEAIQSLSEVTERGLIDVDEVII

SEQ ID NO: 24847 - DNA, 50 bp, Escherichia coli; identical to SEQ ID NO: 24522
  source 1..50: mol_type = genomic DNA

SEQ ID NO: 24848 - DNA, 40 bp, Escherichia coli; identical to SEQ ID NO: 5188
  source 1..40: mol_type = genomic DNA

SEQ ID NO: 24849 - DNA, 40 bp, Escherichia coli; identical to SEQ ID NO: 5749
  source 1..40: mol_type = genomic DNA

SEQ ID NO: 24850 - DNA, 50 bp, Escherichia coli; identical to SEQ ID NO: 5750
  source 1..50: mol_type = genomic DNA

SEQ ID NO: 24851 - protein, 507 aa, Escherichia coli
MKRVISYIRFSSEKQSRGDSLRRQSKMVNDWLKAHPEYYLDQDLSFRDLGVSGFTGKHLKGGLGDFLTAIEKGLVKAGDTLLIESLDRLSRQNVDRASELLRNILRSGVAVVTLSDGEHYTRESLKDPLALIKSILIMQRSHEESLRKSERIQAAWNRKKELISEGIKISKRCPAWLKLNDDRKSFSVIPEKVETVKRCFQLRLEGKSIWEIVRTLNDEGHQSMSQYKPGSFGQSSVQDLLKNRSVIGYFTPKGCEEIAGYYPAIIDETTFYKVQQLSHSRYGKRSVSDKPLSVNLFKGVIRCSECGHALIITGFSDTRNGIYRCPLRNENRCSAKGLSRKQTDGTLLALLSRLDRFDSDTTNTIDTLKLHREHISSNIEKLVQLSLEIEDLSAITSKLRQLKGELSQVDADIEKETQRLKSIDVGCLSDCDLTTKAGRIEAQLIIKSAVKEVVLNTAKRRCKVTFHNGRAITLPITETPSEDVTEAIQSLSEVTERGLIDVDEVII

SEQ ID NO: 24852 - DNA, 50 bp, Escherichia coli; identical to SEQ ID NO: 24522
  source 1..50: mol_type = genomic DNA

SEQ ID NO: 24853 - DNA, 40 bp, Escherichia coli; identical to SEQ ID NO: 5188
  source 1..40: mol_type = genomic DNA

SEQ ID NO: 24854 - DNA, 40 bp, Escherichia coli; identical to SEQ ID NO: 5749
  source 1..40: mol_type = genomic DNA

SEQ ID NO: 24855 - DNA, 50 bp, Escherichia coli; identical to SEQ ID NO: 5750
  source 1..50: mol_type = genomic DNA

SEQ ID NO: 24856 - protein, 507 aa, Escherichia coli
MKRVISYIRFSSEKQAKGDSLRRQSKMVTDWLKAHPEYYLDQDLSFRDLGVSGFTGKHLKGGLGDFLTAIEKGLVKAGDTLLIESLDRLSRQAVDRASELLRNILRSGVDVVTLSDGEHYTSESLKDPLALIKSILIMQRAHEESLRKSERIQAAWNRKKELISEGIKISKRCPAWLKLNDDRKSFSVIPDKVETVKRCFQLRLEGKSIWEIVRTLNAEGHRSMNQHKPGKFGQTSVQDLLKNRSVIGYFTPKGCEEIAGYYPSVIDETTFYKVQQLSHSRYGRKPASAKPLSVNLFKGVIRCSECGHALIITGFSDTRSGIYRCPLRNENRCSAKGLSRKQTDGTLLTLLSRLDRFDSDMTNTIDTLKLHREHISSNIEKLVQLSLEIEDLSAITIKLKQLKNELSQVDADIEKETQRLKSIDVGCLSDCDLTTKAGRIEAQLIIKSAVKEVVLNTAKRRCKVTFHNGRAITLPITENPSEDVTEAIQSLSEVTERGLIDVDEVII

SEQ ID NO: 24857 - DNA, 50 bp, Escherichia coli; identical to SEQ ID NO: 24522
  source 1..50: mol_type = genomic DNA

SEQ ID NO: 24858 - DNA, 40 bp, Escherichia coli; identical to SEQ ID NO: 5188
  source 1..40: mol_type = genomic DNA

SEQ ID NO: 24859 - DNA, 40 bp, Escherichia coli; identical to SEQ ID NO: 5749
  source 1..40: mol_type = genomic DNA

SEQ ID NO: 24860 - DNA, 50 bp, Escherichia coli; identical to SEQ ID NO: 5750
  source 1..50: mol_type = genomic DNA

SEQ ID NO: 24861 - protein, 507 aa, Escherichia coli
MKRVISYIRFSSEKQAKGDSLRRQSKMVTDWLKAHPEYYLDQDLSFRDLGVSGFTGKHLKGGLGDFLTAIEKGLVKAGDTLLIESLDRLSRQAVDRASELLRNILRSGVDVVTLSDGEHYTSESLKDPLALIKSILIMQRAHEESLRKSERIQAAWDAKKEAAKAGIKVSKRCPAWLKLNDDRKSFSVIPEKVATVKRCFQLRLEGKSIWEIVRTLNDEGHQTLNQYKAGKFGQTSVQDLLKNRSVIGYFTPKGREEIAGYFPPIIPETDFYKVQQLSYSRYGRKPASDKPLSVNLFKGVIRCSECGHALIITGFSDTRNGIYRCPLRNENRCNAKGLSRKQTDGTLLALLSRLDRFDSDTTNTIDTLKLHREHLSSNIEKLVQLSLEIEDLNAITNKLKQLKNELSQVDADIEKETQRLKSIDVGCLSDCDLTTKAGRIEAQLIIKSAVKEVVLNTAKRRCKVTFHNGKVIDLSITENPSEDVTEAIQSLSEVTERGLIDVDEVII

SEQ ID NO: 24862 - DNA, 50 bp, Escherichia coli; identical to SEQ ID NO: 24522
  source 1..50: mol_type = genomic DNA

SEQ ID NO: 24863 - DNA, 40 bp, Escherichia coli; identical to SEQ ID NO: 5188
  source 1..40: mol_type = genomic DNA

SEQ ID NO: 24864 - DNA, 40 bp, Escherichia coli; identical to SEQ ID NO: 5749
  source 1..40: mol_type = genomic DNA

SEQ ID NO: 24865 - DNA, 50 bp, Escherichia coli; identical to SEQ ID NO: 5750
  source 1..50: mol_type = genomic DNA

SEQ ID NO: 24866 - protein, 507 aa, Escherichia coli
MKRVISYIRFSSEKQAKGDSLRRQSKMVTDWLKAHPEYYLDQDLSFRDLGVSGFTGKHLKGGLGDFLTAIEKGLVKAGDTLLIESLDRLSRQDIDIASELLRNILRSGVDVVTLSDGEHYTRESLRDPLALIKSILIMQRAHEESLRKAERIQAAWDAKKEAAKAGIKVSKRCPAWLKLNDDRKSFSVIPEKVETVKRCFQLRLEGKSIWEIVRTLNDEGHQTLNQYKAGKFGQSSVQDLLKNRSVIGYFTPKGCEEISGYYPAIIDETTFYKVQQLSYARYGRKPASDKPLSVNLFKGVIRCSECGHALIITGFSDTRSGIYRCPLRNENRCSAKGLSRKQTDGTLLTLLSRLDRFDSDTTNTVDMLRLHREHISSNIEKLVQLSLEIEDLSAITSKLKQLKGELSQVDADIEKETQRLKSIDVGCLSDCDLTTKAGRIEAQLIIRSAVKEVVLNTAKRRCKVTFHNGKIIDLPITENPSEDVTEAIQSLSEVTERGLIDVDVVEI

SEQ ID NO: 24867 - DNA, 50 bp, Escherichia coli; identical to SEQ ID NO: 24522
  source 1..50: mol_type = genomic DNA

SEQ ID NO: 24868 - DNA, 40 bp, Escherichia coli; identical to SEQ ID NO: 5188
  source 1..40: mol_type = genomic DNA

SEQ ID NO: 24869 - DNA, 40 bp, Escherichia coli; identical to SEQ ID NO: 5749
  source 1..40: mol_type = genomic DNA

SEQ ID NO: 24870 - DNA, 50 bp, Escherichia coli; identical to SEQ ID NO: 5750
  source 1..50: mol_type = genomic DNA

SEQ ID NO: 24871 - protein, 507 aa, Escherichia coli
MKRVISYFRFSSEKQAKGDSLRRQSKMVTDWLKAHPEYYLDQDLSFRDLGVSGFTGKHLKGGLGDFLTAIEKGLVKAGDTLLIESLDRLSRQAVDRASELLRNILRSGVDVVTLSDGEHYTSESLKDPLALIKSILIMQRAHEESLRKSERIQAAWNRKKELISEGIKISKRCPAWLRLNDDRKSFSVIPDKVETVKRCFQLRLEGKSIWEIVRTMNAEGRQTLNQYEAGSFGQSSVQDLLKNRSVIGYFTPKGCEEIAGYYPAIIDETTFYKVQQLSYARYGRKPASDKPLSVNLFKGVIRCSECGHALIITGFSDTRSGIYRCPLRNENRCSAKGLSRKQTDGTLLTLLSRLDRFDSDTTNIIDMLRLHREHISSNIEKLVQLSLEIEDLSAITSKLKQLKNELSQVDADIEKETQRLKSIDVGCLSDCDLTTKAGRIEAQLIIKSAVKEVVLNTAKRRCKVTFHNGRAITLPITENPSEDVTEAIQSLSEVTERGLIDVDEVII

SEQ ID NO: 24872 - DNA, 50 bp, Escherichia coli; identical to SEQ ID NO: 24522
  source 1..50: mol_type = genomic DNA

SEQ ID NO: 24873 - DNA, 40 bp, Escherichia coli; identical to SEQ ID NO: 5188
  source 1..40: mol_type = genomic DNA

SEQ ID NO: 24874 - DNA, 40 bp, Escherichia coli; identical to SEQ ID NO: 5749
  source 1..40: mol_type = genomic DNA

SEQ ID NO: 24875 - DNA, 50 bp, Escherichia coli; identical to SEQ ID NO: 5750
  source 1..50: mol_type = genomic DNA

SEQ ID NO: 24876 - protein, 507 aa, Escherichia coli
MKRVISYIRFSSEKQAKGDSLRRQSKMVTDWLKAHPEYYLDQDLSFRDLGVSGFTGKHLKGGLGDFLTAIEKGLVKAGDTLLIESLDRLSRQDIDIASELLRNILRSGVDVVTLSDGEHYTRESLRDPLALIKSILIMQRAHEESLRKAERIQAAWDAKKEAAKAGIKVSKRCPAWLKLNDDRKSFSVIPEKVETVKRCFQLRLEGKSIWEIVRTLNDEGHQSMSQYKPGSFGQSSVQDLLKNRSVIGYFTPKGCEEIAGYYPAIIDETTFYKVQQLSYARYGRKPASDKPLSVNLFKGVIRCSECGHALIITGFSDTRSGIYRCPLRNENRCSAKGLSRKQTDGTLLTLLSRLDRFDSDTTNTIDTLKLHREHISNNIEKLVQLSLEIEDLSAITSKLKQLKGELSQVDADIEKETQRLKSIDVGCLSDCDLTTKAGRIEAQLIIKSAVKEVVLNTAKRRCKVTFHNGKAITLPITENPSEDVTEAIQSLSEVTERGLIDVDEVIV

SEQ ID NO: 24877 - DNA, 50 bp, Escherichia coli; identical to SEQ ID NO: 24522
  source 1..50: mol_type = genomic DNA

SEQ ID NO: 24878 - DNA, 40 bp, Escherichia coli; identical to SEQ ID NO: 5188
  source 1..40: mol_type = genomic DNA

SEQ ID NO: 24879 - DNA, 40 bp, Escherichia coli; identical to SEQ ID NO: 5749
  source 1..40: mol_type = genomic DNA

SEQ ID NO: 24880 - DNA, 50 bp, Escherichia coli; identical to SEQ ID NO: 5750
  source 1..50: mol_type = genomic DNA

SEQ ID NO: 24881 - protein, 507 aa, Escherichia coli; identical to SEQ ID NO: 8101

SEQ ID NO: 24882 - DNA, 50 bp, Escherichia coli; identical to SEQ ID NO: 24522
  source 1..50: mol_type = genomic DNA

SEQ ID NO: 24883 - DNA, 40 bp, Escherichia coli; identical to SEQ ID NO: 22988
  source 1..40: mol_type = genomic DNA

SEQ ID NO: 24884 - DNA, 40 bp, Escherichia coli
  source 1..40: mol_type = genomic DNA
cggcgttaatcgggtgattaaagacagccgcccgattcat

SEQ ID NO: 24885 - DNA, 50 bp, Escherichia coli; identical to SEQ ID NO: 5750
  source 1..50: mol_type = genomic DNA

SEQ ID NO: 24886 - protein, 507 aa, Escherichia coli
MKRVISYIRFSSEKQAKGDSLRRQSKMVTDWLKAHPEYYLDQDLSFRDLGVSGFTGKHLKGGLGDFLTAIEKGLVKAGDTLLIESLDRLSRQDIDIASELLRRILRAGVDVVTLSDGEHYTSESLKDPLALIKSILIMQRAHEESLRKAERIQAAWDAKKEAAKAGIKVSKRCPAWLKLNDDRKTFSVIPEKVETVRRCFQLRLEGKSIWAIVKALNDEGHQSMSQYKPGKFGQTSVQDLLKNRSVIGYFTPKGCEEISGYYPAIIDETTFYKVQQLSYARYGRKPASDKPLSVNLFKGVIRCSECGHALIITGFSDTRNGIYRCPLRNENRCSAKGLSRKQTDGTLLALLSRLDRFDSDTTNTIDTLKLHREHISSNIEKLVQLSLEIEDLSAITSKLRQLKGELSQVDADIEKETQRLKSIDVGCLSDCDLTTKAGRIEAQLIIKSAVKEVVLNTAKRRCKVTFHNGRAITLPITENPSEDVTEAIQSLSEVTERGLIDVDEVII

SEQ ID NO: 24887 - DNA, 50 bp, Escherichia coli; identical to SEQ ID NO: 24522
  source 1..50: mol_type = genomic DNA

SEQ ID NO: 24888 - DNA, 40 bp, Escherichia coli; identical to SEQ ID NO: 5188
  source 1..40: mol_type = genomic DNA

SEQ ID NO: 24889 - DNA, 40 bp, Escherichia coli; identical to SEQ ID NO: 5749
  source 1..40: mol_type = genomic DNA

SEQ ID NO: 24890 - DNA, 50 bp, Escherichia coli; identical to SEQ ID NO: 5750
  source 1..50: mol_type = genomic DNA

SEQ ID NO: 24891 - protein, 507 aa, Escherichia coli
MKRVISYIRFSSEKQSRGDSLRRQSKMVNDWLKAHPEYYLDQDLSFRDLGVSGFTGKHLKGGLGDFLTAIEKGLVKAGDTLLIESLDRLSRQDIDIASELLRRILRAGVDVVTLSDGEHYTKESLRDPLSLIKSILIMQRAHEESLRKAERIQAAWDAKKEAAKAGIKVSKRCPAWLKLNDDRKSFSVIPEKVETVKRCFQLRLEGKSIWAIVKALNDEGHQTLNQYKAGKFGQTSVQDLLKNRSVIGYFTPKGCEEIAGYYPAIIDETTFYKVQQLSHSRYGKRSVSDKPLSVNLFKGVIRCSECGHALIITGFSDTRNGIYRCPLRNENRCSAKGLSRKQTDGTLLALLSRLDRFDSDTTNTIDTLKLHREHISSNIEKLVQLSLEIEDLNAITNKLKQLKNELSQVDADIEKETQRLKSIDVGCLSDCDLTTKAGRIEAQLIIKSAVKEVVLNTAKRRCKVTFHNSKVIDLPITENPSEDVTEAIQSLSEVTERGLIDVDEVII

SEQ ID NO: 24892 - DNA, 50 bp, Escherichia coli; identical to SEQ ID NO: 24522
  source 1..50: mol_type = genomic DNA

SEQ ID NO: 24893 - DNA, 40 bp, Escherichia coli; identical to SEQ ID NO: 5188
  source 1..40: mol_type = genomic DNA

SEQ ID NO: 24894 - DNA, 40 bp, Escherichia coli; identical to SEQ ID NO: 5749
  source 1..40: mol_type = genomic DNA

SEQ ID NO: 24895 - DNA, 50 bp, Escherichia coli; identical to SEQ ID NO: 5750
  source 1..50: mol_type = genomic DNA

SEQ ID NO: 24896 - protein, 507 aa, Escherichia coli
MKRVISYIRFSSEKQAKGDSLRRQSKMVTDWLKAHPEYYLDESLTFRDLGVSGFTGKHLKGGLGDFLTAIEKGLVKAGDTLLIESLDRLSRQAVDRASELLRNILRSGVDVVTLSDGEHYTSESLKDPLALIKSILIMQRAHEESLRKSERIQAAWNRKKELISEGIKVSKRCPAWLRLNDDRKSFSVIPEKVETVKRCFQLRLEGKSIWEIVRTLNDEGHQSMSQYKPGKFGQTSVQDLLKNRSVIGYFTPKGCEEISGYYPAIIDETTFYKVQQLSHYRYGRKPVSDKPLSVNLFKGVIRCSECGHALIITGFSDTRNGIYRCPLRNENRCSAKGLSRKQTDGTLLALLSRLDRFDSDTTNTIDTLKLHREHISSNIEKLVQLSLEIEDLSAITSKLKQLKGELSQVDADIEKETQRLKSIDVGCLSDCDLTTKAGRIEAQLIIKSAVKEVVLNTAKRRCKVTFHNGKAITLPITENPSEDVTEAIQSLSEVTERGLIDVDVVEI

SEQ ID NO: 24897 - DNA, 50 bp, Escherichia coli; identical to SEQ ID NO: 24522
  source 1..50: mol_type = genomic DNA

SEQ ID NO: 24898 - DNA, 40 bp, Escherichia coli; identical to SEQ ID NO: 5188
  source 1..40: mol_type = genomic DNA

SEQ ID NO: 24899 - DNA, 40 bp, Escherichia coli; identical to SEQ ID NO: 5749
  source 1..40: mol_type = genomic DNA

SEQ ID NO: 24900 - DNA, 50 bp, Escherichia coli; identical to SEQ ID NO: 5750
  source 1..50: mol_type = genomic DNA

SEQ ID NO: 24901 - protein, 507 aa, Escherichia coli
MKRVISYIRFSSEKQAKGDSLRRQSKMVTDWLKAHPEYYLDQDLSFRDLGVSGFTGKHLKGGLGDFLTAIEKGLVKAGDTLLIESLDRLSRQAVDRASELLRNILRSGVDVVTLSDGEHYTSESLKDPLALIKSILIMQRAHEESLRKSERIQAAWNRKKELISEGIKISKRCPAWLKLNDDRKSFSVIPDKVETVKRCFQLRLEGKSIWEIVRTMNAEGHQTLHQHKPGSFGQSSVQDLLKNRSVIGYFTPKGCEEISGYYPAIIDETTFYKVQQLSYARHGRKPASAKPLSVNLFKGVIRCSECGHALIITGFSDTRNGIYRCPLRNENRCSAKGLSRKQTDGTLLTLLSRLDRFDSDTTNTIDTLKLHREHLSSNIEKLVQLSLEIEDLNAITNKLKQLKNELSQVDADIEKETQRLKSIDVGCLSDCDLSTKAGRIEAQLIIKSAVKEVVLNTAKRRCKVTFHNGRLIDLPITENPSEDVTEAIQSLSEVTEKGLIDVDVVEI

SEQ ID NO: 24902 - DNA, 50 bp, Escherichia coli; identical to SEQ ID NO: 24522
  source 1..50: mol_type = genomic DNA

SEQ ID NO: 24903 - DNA, 40 bp, Escherichia coli; identical to SEQ ID NO: 5188
  source 1..40: mol_type = genomic DNA

SEQ ID NO: 24904 - DNA, 40 bp, Escherichia coli; identical to SEQ ID NO: 5749
  source 1..40: mol_type = genomic DNA

SEQ ID NO: 24905 - DNA, 50 bp, Escherichia coli; identical to SEQ ID NO: 5750
  source 1..50: mol_type = genomic DNA

SEQ ID NO: 24906 - protein, 507 aa, Escherichia coli
MKRVISYIRFSSEKQAKGDSLRRQSKMVTDWLKAHPEYYLDQDLSFRDLGVSGFTGKHLKGGLGDFLTAIEKGLVKAGDTLLIESLDRLSRQDIDIASELLRRILRAGVDVVTLSDGEHYTSESLKDPLALIKSILIMQRAHEESLRKAERIQAAWDAKKEAAKAGIKVSKRCPAWLKLNDDRKTFSVIPEKVETVRRCFQLRLEGKSIWAIVKALNDEGHQSMSQYKPGKFGQTSVQDLLKNRSVIGYFTPKGCEEISGYYPAIIDETTFYKVQQLSYARYGRKPASDKPLSVNLFKGVIRCSECGHALIITGFSDTRSGIYRCPLRNENRCSAKGLSRKQTDGTLLALLSRLDRFDSDMTNTVDTLKLHREHISSNIEKLVQLSLEIEDLSAITSKLKQLKGELSQVDADIEKETQRLKSIDVGCLSDCDLTTKAGRIEAQLIIKSAVKEVVLNTAKRRCKVTFHNGRAITLPITENPSEDVTEAIQSLSEVTERGLIDVDVVET

SEQ ID NO: 24907 - DNA, 50 bp, Escherichia coli; identical to SEQ ID NO: 24522
  source 1..50: mol_type = genomic DNA

SEQ ID NO: 24908 - DNA, 40 bp, Escherichia coli; identical to SEQ ID NO: 5188
  source 1..40: mol_type = genomic DNA

SEQ ID NO: 24909 - DNA, 40 bp, Escherichia coli; identical to SEQ ID NO: 5749
  source 1..40: mol_type = genomic DNA

SEQ ID NO: 24910 - DNA, 50 bp, Escherichia coli; identical to SEQ ID NO: 5750
  source 1..50: mol_type = genomic DNA

SEQ ID NO: 24911 - protein, 507 aa, Escherichia coli
MKRVISYIRFSSEKQAKGDSLRRQSKMVTDWLKAHPEYYLDESLTFRDLGVSGFTGKHLKGGLGDFLTAIEKGLVKAGDTLLIESLDRLSRQDVDQASELLRNILRSGVDVVTLSDGEHYTSESLKDPLALIKSILIMQRAHEESLRKSERIQAAWDAKKEAAKAGIKVSKRCPAWLKLNDDRKSFSVIPEKVETVKRCFQLRLEGKSIWEIVRTLNDECHQSMSQYKPGKFGQTSVQDLLKNRSVIGYFTPKGCEEISGYYPAIIDETTFYKVQQLSHSRYGRKPVSAKPLSVNLFKGVIRCSECGHALIITGFSDTRSGIYRCPLRNENRCNAKGLSRKQTDGTLLALLSRLDRFDSDMTNTVDTLKLHREHISSNIEKLVQLSLEIEDLSAITSKLKQLKGELSQVDADIEKETQRLKSIDVGCLSDCDLTTKAGRIEAQLIIKSAVKEVVLNTAKRRCKVTFHNGKIIDLPITENPSEDVTEAIQSLSEVTERGLIDVDVVEI

SEQ ID NO: 24912 - DNA, 50 bp, Escherichia coli; identical to SEQ ID NO: 24522
  source 1..50: mol_type = genomic DNA

SEQ ID NO: 24913 - DNA, 40 bp, Escherichia coli; identical to SEQ ID NO: 5188
  source 1..40: mol_type = genomic DNA

SEQ ID NO: 24914 - DNA, 40 bp, Escherichia coli; identical to SEQ ID NO: 5749
  source 1..40: mol_type = genomic DNA

SEQ ID NO: 24915 - DNA, 50 bp, Escherichia coli; identical to SEQ ID NO: 5750
  source 1..50: mol_type = genomic DNA

SEQ ID NO: 24916 - protein, 507 aa, Escherichia coli
MKRVISYIRFSSEKQAKGDSLRRQSKMVTDWLKAHPEYYLDQDLSFRDLGVSGFTGKHLKGGLGDFLTAIEKGLVKAGDTLLIESLDRLSRQDIDIASELLRNILRSGVDVVTLSDGEHYTRESLRDPLALIKSILIMQRSHEESLRKSERIQAAWDAKKEAAKAGIKVSKRCPAWLRLNDDRKSFSVIPDKVETVKRCFQLRLEGKSIWEIVRTLNAEGHRSMNQYKPGKFGQTSVQDLLKNRSVIGYFTPKGCEEIAGYYPSVIDETTFYKVQQLSHSRYGRKPVSAKPLSVNLFKGVIRCSECGHALIITGFSDTRNGIYRCPLRNENRCSAKGLSRKQTDGTLLTLLSRLDRFDSDMTNTIDTLKLHREHISSNIEKLVQLSLEIEDLNAITNKLKQLKNELSQVDADIEKETQRLKSIDTGSLSDCDLSTKAGRIEAQLIIKSAVKEVVLNTAKRRCKVTFHNGKSITLPITENPSEDVTEAIQSLSEVTERGLIDVDVVEI

SEQ ID NO: 24917 - DNA, 50 bp, Escherichia coli; identical to SEQ ID NO: 24522
  source 1..50: mol_type = genomic DNA

SEQ ID NO: 24918 - DNA, 40 bp, Escherichia coli; identical to SEQ ID NO: 5188
  source 1..40: mol_type = genomic DNA

SEQ ID NO: 24919 - DNA, 40 bp, Escherichia coli; identical to SEQ ID NO: 5749
  source 1..40: mol_type = genomic DNA

SEQ ID NO: 24920 - DNA, 50 bp, Escherichia coli; identical to SEQ ID NO: 5750
  source 1..50: mol_type = genomic DNA

SEQ ID NO: 24921 - protein, 507 aa, Escherichia coli
MKRVISYIRFSSEKQAKGDSLRRQSKMVTDWLKAHPEYYLDQDLSFRDLGVSGFTGKHLKGGLGDFLTAIEKGLVKAGDTLLIESLDRLSRQAVDRASELLRNILRSGVDVVTLSDGEHYTSESLKDPLALIKSILIMQRAHEESLRKSERIQAAWNRKKELISEGIKISKRCPAWLKLNDDRKSFSVIPDKVETVKRCFQLRLEGKSIWEIVRTLNAEGHRSMNQYKPGKFGQTSVQDLLKNRSVIGYFTPKGCEEISGYYPAIIDETTFYKVQQLSHSRYGKRSVSDKPLSVNLFKGVIRCSECGHALIITGFSDTRNGIYRCPLRNENRCNAKGLSRKQTDGTLLALLSRLDRFDSDTTNTIDTLKLHREHLSSNIEKLVQLSLEIEDLNAITNKLKQLKNELSQVDADIEKETQRLKSIDVGCLSDCDLTTKAGRIEAQLIIKSAVKEVVLNTAKRRCKVTFHNGKLIDLPITETPSDNVTEAIQSLSEVTERGLIDVDEVII

SEQ ID NO: 24922 - DNA, 50 bp, Escherichia coli; identical to SEQ ID NO: 24522
  source 1..50: mol_type = genomic DNA

SEQ ID NO: 24923 - DNA, 40 bp, Escherichia coli; identical to SEQ ID NO: 5188
  source 1..40: mol_type = genomic DNA

SEQ ID NO: 24924 - DNA, 40 bp, Escherichia coli; identical to SEQ ID NO: 5749
  source 1..40: mol_type = genomic DNA

SEQ ID NO: 24925 - DNA, 50 bp, Escherichia coli; identical to SEQ ID NO: 5750
  source 1..50: mol_type = genomic DNA

SEQ ID NO: 24926 - protein, 507 aa, Escherichia coli
MKRVISYIRFSSEKQSRGDSLRRQSKMVTDWLKAHPEYYLDQDLSFRDLGVSGFTGKHLKGGLGDFLTAIEKGLVKAGDTLLIESLDRLSRQAVDRASELLRNILRSGVDVVTLSDGEHYTSESLKDPLALIKSILIMQRAHEESLRKSERIQAAWNRKKELISEGIKISKRCPAWLKLNDDRKSFSVIPEKVETVKRCFQLRLEGKSIWEIVRTLNDEGHQSMSQYKPGKFGQTSVQDLLKNRSVIGYFTPKGCEEISGYYPAIIDETTFYKVQQLSYARHGRKPASAKPLSVNLFKGVIRCSECGHALIITGFSDTRNGIYRCPLRNENRCSAKGLSRKQTDGTLLALLSRLDRFDSDTTNTIDTLKLHREHISSNIEKLVQLSLEIEDLSAITSKLKQLKGELSQVDADIEKETQRLKSIDVGCLSDCDLTTKAGRIEAQLIIKSAVKEVVLNTAKRRCKVTFHNGKSITLPITENPSEDVTEAIQSLSEVTERGLIDVDVVEI

SEQ ID NO: 24927 - DNA, 50 bp, Escherichia coli; identical to SEQ ID NO: 24522
  source 1..50: mol_type = genomic DNA

SEQ ID NO: 24928 - DNA, 40 bp, Escherichia coli; identical to SEQ ID NO: 5188
  source 1..40: mol_type = genomic DNA

SEQ ID NO: 24929 - DNA, 40 bp, Escherichia coli; identical to SEQ ID NO: 5749
  source 1..40: mol_type = genomic DNA

SEQ ID NO: 24930 - DNA, 50 bp, Escherichia coli; identical to SEQ ID NO: 5750
  source 1..50: mol_type = genomic DNA

SEQ ID NO: 24931 - protein, 507 aa, Escherichia coli
MKRVISYIRFSSEKQAKGDSLRRQSKMVTDWLKAHPEYYLDQDLSFRDLGVSGFTGKHLKGGLGDFLTAIEKGLVKAGDTLLIESLDRLSRQAVDRASELLRNILRSGVDVVTLSDGEHYTSESLKDPLALIKSILIMQRAHEESLRKSERIQAAWNRKKELISEGIKISKRCPAWLKLNDDRKSFSVIPDKVETVKRCFQLRLEGKSIWEIVRTLNDEGHQTLNQYKAGKFGQTSVQDLLKNRSVIGYFTPKGCEEISGYYPAIIDETTFYKVQQLSHYRYGRKPVSDKPLSVNLFKGVIRCSECGHALIITGFSDTRSGIYRCPLRNENRCSAKGLSRKQTDGTLLTLLSRLDRFDSDTTNTIDTLKLHREHISSNIEKLVQLSLEIEDLSAITSKLKQLKGELSQVDADIEKETQRLKSIDVGCLSDCDLTTKAGRIEAQLIIKSAVKEVVLNTAKRRCKVTFHNGRAITLPITENPSEDVTEAIQSLSEVTERGLIDVDEVII

SEQ ID NO: 24932 - DNA, 50 bp, Escherichia coli; identical to SEQ ID NO: 24522
  source 1..50: mol_type = genomic DNA

SEQ ID NO: 24933 - DNA, 40 bp, Escherichia coli
  source 1..40: mol_type = genomic DNA
cagcgttaatcgggtgattttagacagccgcccggttcat

SEQ ID NO: 24934 - DNA, 40 bp, Escherichia coli
  source 1..40: mol_type = genomic DNA
cagcgttaatcgggtgattaaagacagccgcccggttcat

SEQ ID NO: 24935 - DNA, 50 bp, Escherichia coli; identical to SEQ ID NO: 5750
  source 1..50: mol_type = genomic DNA

SEQ ID NO: 24936 - protein, 507 aa, Escherichia coli
MKRVISYIRFSSEKQAKGDSLRRQSKMVTDWLKAHPEYYLDESLTFRDLGVSGFTGKHLKGGLGDFLTAIEKGLVKAGDTLLIESLDRLSRQNVDRASELLRNILRSGVDVVTLSDGEHYTRESLKDPLALIKSILIMQRSHEESLRKSERIQAAWNRKKELISEGIKISKRCPAWLKLNDDRKSFSVIPEKVETVKRCFQLRLEGKSIWEIVRTLNDEGHQSMSQYKPGSFGQSSVQDLLKNRSVIGYFTPKGCEEIAGYYPAIIDETTFYKVQQLSHSRYGKRSVSDKPLSVNLFKGVIRCSECGHALIITGFSDTRNGIYRCPLRNENRCSAKGLSRKQTDGTLLALLSRLDRFDSDTTNTIDTLKLHREHISSNIEKLVQLSLEIEDLSAITSKLRQLKGELSQVDADIEKETQRLKSIDVGCLSDCDLTTKAGRIEAQLIIKSAVKEVVLNTAKRRCKVTFHNGRAITLPITENPSEDVTEAIQSLSEVTERGLIDVDVVEI

SEQ ID NO: 24937 - DNA, 50 bp, Escherichia coli; identical to SEQ ID NO: 24522
  source 1..50: mol_type = genomic DNA

SEQ ID NO: 24938 - DNA, 40 bp, Escherichia coli; identical to SEQ ID NO: 5188
  source 1..40: mol_type = genomic DNA

SEQ ID NO: 24939 - DNA, 40 bp, Escherichia coli; identical to SEQ ID NO: 5749
  source 1..40: mol_type = genomic DNA

SEQ ID NO: 24940 - DNA, 50 bp, Escherichia coli; identical to SEQ ID NO: 5750
  source 1..50: mol_type = genomic DNA

SEQ ID NO: 24941 - protein, 507 aa, Escherichia coli
MKRVISYIRFSSEKQSRGDSLRRQSKMVTDWLKAHPEYYLDQDLSFRDLGVSGFTGKHLKGGLGDFLTAIEKGLVKAGDTLLIESLDRLSRQAVDQASELLRNILRSGVDVVTLSDGEHYTRESLKDPLALIKSILIMQRAHEESLRKAERIQAAWDAKKEAAKAGIKISKRCPAWLKLNDDRKSFSVIPEKVETVKRCFQLRLEGKSIWEIVRTLNAEGHQTLNQYKAGKFGQTSVQDLLKNRSVIGYFTPKGCEEISGYYPAIIDETTFYKVQQLSHYRYGRKPVSDKPMAVNLFKGVIRCSECGHALIITGFSDTRSGIYRCPLRNENRCSAKGLSRKQTDGTLLTLLSRLDRFDSDTTNIIDTLKLHREHISSNIEKLVQLSLEIEDLSAITSKLKQLKNELSQVDADIEKETQRLKSIDVGCLSDCDLTTKAGRIEAQLIIKSAVKEVVLNTAKRRCKVTFHNGKAITLPITETPSEDVTEAIQSLSEVTERGLIDVDEVII

SEQ ID NO: 24942 - DNA, 50 bp, Escherichia coli; identical to SEQ ID NO: 24522
  source 1..50: mol_type = genomic DNA

SEQ ID NO: 24943 - DNA, 40 bp, Escherichia coli; identical to SEQ ID NO: 5188
  source 1..40: mol_type = genomic DNA

SEQ ID NO: 24944 - DNA, 40 bp, Escherichia coli; identical to SEQ ID NO: 5749
  source 1..40: mol_type = genomic DNA

SEQ ID NO: 24945 - DNA, 50 bp, Escherichia coli; identical to SEQ ID NO: 5750
  source 1..50: mol_type = genomic DNA

SEQ ID NO: 24946 - protein, 507 aa, Escherichia coli
MKRVISYIRFSSEKQAKGDSLRRQSKMVTDWLKAHPEYYLDQDLSFRDLGVSGFTGKHLKGGLGDFLTAIEKGLVKAGDTLLIESLDRLSRQAVDRASELLRNILRSGVDVVTLSDGEHYTSESLKDPLALIKSILIMQRAHEESLRKAERIQAAWDAKKEAAKAGIKISRRCPAWLKLNDDRKSFSVIPDKVETVKRCFQLRLEGKSIWEIVRTLNAEGHRSMNQYKPGKFGQTSVQDLLKNRSVIGYFTPKGREEIAGYFPPIIPETDFYKVQQLSHSRYGRKPASAKPLSVNLFKGVIRCSECGHALIITGFSDTRNGIYRCPLRNENRCSAKGLSRKQTDGTLLALLSRLDRFDSDTTNTVDTLKLHREHISSNIEKLVQLSLEIEDLSAITIKLKQLKGELSQVDADIEKETQRLKSIDVGCLSDCDLTTKAGRIEAQLIIKSAVKEVVLNTAKRRCKVTFHNGKAITLPITENPSEDVTEAIQSLSEVTERGLIDVDEVII

SEQ ID NO: 24947 - DNA, 50 bp, Escherichia coli; identical to SEQ ID NO: 24522
  source 1..50: mol_type = genomic DNA

SEQ ID NO: 24948 - DNA, 40 bp, Escherichia coli; identical to SEQ ID NO: 5188
  source 1..40: mol_type = genomic DNA

SEQ ID NO: 24949 - DNA, 40 bp, Escherichia coli; identical to SEQ ID NO: 5749
  source 1..40: mol_type = genomic DNA

SEQ ID NO: 24950 - DNA, 50 bp, Escherichia coli; identical to SEQ ID NO: 5750
  source 1..50: mol_type = genomic DNA

SEQ ID NO: 24951 - protein, 507 aa, Escherichia coli
MKRVISYIRFSSEKQAKGDSLRRQSKMVTDWLKAHPEYYLDESLTFRDLGVSGFTGKHLKGGLGDFLTAIEKGLVKAGDTLLIESLDRLSRQNVDRASELLRNILRSGVDVVTLSDGEHYTRESLKDPLALIKSILIMQRAHEESLRKAERIQAAWDAKKEAAKAGIKISKRCPAWLKLNDDRKSFSIIPEKVETVKRCFQLRLEGKSIWAIVKALNDEGHQTLNQYKAGKFGQTSVQDLLKNRSVIGYFTPKGCEEIAGYYPAIIDETTFYKVQQLSHSRYGKRSVSDKPLSVNLFKGVIRCSECGHALIITGFSDTRNGIYRCPLRNENRCSAKGLSRKQTDGTLLTLLSRLDRFDSDTTNTIDTLKLHREHISSNIEKLVQLSLEIEDLSAITSKLKQLKGELSQVDADIEKETQRLKSIDTGSLSDCDLTTKAGRIEAQLIIKSAVKEVVLNTAKRRCKVTFHNGKIIDLPITENPSEDVTEAIQSLSEVTERGLIDVDEVII

SEQ ID NO: 24952 - DNA, 50 bp, Escherichia coli; identical to SEQ ID NO: 24522
  source 1..50: mol_type = genomic DNA

SEQ ID NO: 24953 - DNA, 40 bp, Escherichia coli; identical to SEQ ID NO: 5188
  source 1..40: mol_type = genomic DNA

SEQ ID NO: 24954 - DNA, 40 bp, Escherichia coli; identical to SEQ ID NO: 5749
  source 1..40: mol_type = genomic DNA

SEQ ID NO: 24955 - DNA, 50 bp, Escherichia coli; identical to SEQ ID NO: 5750
  source 1..50: mol_type = genomic DNA

SEQ ID NO: 24956 - protein, 507 aa, Escherichia coli
MKRVISYIRFSSEKQAKGDSLRRQSKMVTDWLKAHPEYYLDQDLSFRDLGVSGFTGKHLKGGLGDFLTAIEKGLVKAGDTLLIESLDRLSRQDIDIASELLRRILRAGVDIVTLSDGEHYTRESLKDPLSLIKSILIMQRAHEESLRKAERIQAAWDAKKEAAKAGIKVSKRCPAWLRLNDDRKSFSVIPEKVETVKRCFQLRLEGKSIWEIVRTLNAEGHRSMNQYKPGKFGQTSVQDLLKNRSVIGYFTPKGCEEISGYYPAIIDETTFYKVQQLSHSRYGKRSVSDKPLSVNLFKGVIRCSECGHALIITGFSDTRNGIYRCPLRNENRCNAKGLSRKQTDGTLLALLSRLDRFDSDMTNVIDALKLHREHISNNIEKLVQLSLEIEDLSAITIKLKQLKGELSQVDADIEKETQRLKSIDVGCLSDCDLTTKAGRIEAQLIIKSAVKEVVLNAAKRRCKVTFHNGKSIDLPITENPSEDVTEAIQSLSEVTERGLIDVDVVAI

SEQ ID NO: 24957 - DNA, 50 bp, Escherichia coli; identical to SEQ ID NO: 24522
  source 1..50: mol_type = genomic DNA

SEQ ID NO: 24958 - DNA, 40 bp, Escherichia coli; identical to SEQ ID NO: 5188
  source 1..40: mol_type = genomic DNA

SEQ ID NO: 24959 - DNA, 40 bp, Escherichia coli; identical to SEQ ID NO: 5749
  source 1..40: mol_type = genomic DNA

SEQ ID NO: 24960 - DNA, 50 bp, Escherichia coli; identical to SEQ ID NO: 5750
  source 1..50: mol_type = genomic DNA

SEQ ID NO: 24961 - protein, 507 aa, Escherichia coli
MKRVISYIRFSSEKQAKGDSLRRQSKMVTDWLKAHPEYYLDQDLSFRDLGVSGFTGKHLKGGLGDFLTAIEKGLVKAGDTLLIESLDRLSRQAVDRASELLRNILRSGVDVVTLSDGEHYTSESLKDPLALIKSILIMQRAHEESLRKSERIQAAWDAKKEAAKAGIKVSKRCPAWLKLNDDRKSFSVIPEKVETVKRCFQLRLEGKSIWEIVRTLNDECHQSMNQYKAGKFGQTSVQDLLKNRSVIGYFTPKGREEIAGYYPAIIDETTFYKVQQLSHSRYGKRSVSDKPLSVNLFKGVIRCSECGHALIITGFSDTRNGIYRCPLRNENRCSAKGLSRKQTDGTLLALLSRLDRFDSDMTNTIDMLRLHREHISSNIEKLVQLSLEIEDLSAITIKLKQLKGELSQVDADIEKETQRLKSIDVGCLSDCDLTTKAGRIEAQLIIKSAVKEVVLNTAKRRCKVTFHNGKSITLPITENPSEDVTEAIQSLSEVTERGLIDVDVVEI

SEQ ID NO: 24962 - DNA, 50 bp, Escherichia coli; identical to SEQ ID NO: 24522
  source 1..50: mol_type = genomic DNA

SEQ ID NO: 24963 - DNA, 40 bp, Escherichia coli; identical to SEQ ID NO: 5188
  source 1..40: mol_type = genomic DNA

SEQ ID NO: 24964 - DNA, 40 bp, Escherichia coli; identical to SEQ ID NO: 5749
  source 1..40: mol_type = genomic DNA

SEQ ID NO: 24965 - DNA, 50 bp, Escherichia coli; identical to SEQ ID NO: 5750
  source 1..50: mol_type = genomic DNA

SEQ ID NO: 24966 - protein, 507 aa, Escherichia coli
MKRVISYIRFSSEKQAKGDSLRRQSKMVTDWLKAHPEYYLDQDLSFRDLGVSGFTGKHLKGGLGDFLTAIEKGLVKAGDTLLIESLDRLSRQDIDIASELLRNILRSGVDVVTLSDGEHYTRESLRDPLALIKSILIMQRSHEESLRKSERIQAAWDAKKEAAKAGIKVSKRCPAWLRLNDDRKSFSVIPDKVETVKRCFQLRLEGKSIWEIVRTLNAEGHRSMNQYKPGKFGQTSVQDLLKNRSVIGYFTPKGCEEIAGYYPSVIDETTFYKVQQLSHSRYGRKPVSAKPLSVNLFKGVIRCSECGHALIITGFSDTRNGIYRCPLRNENRCSAKGLSRKQTDGTLLTLLSRLDRFDSDMTNTIDTLKLHREHISSNIEKLVQLSLEIEDLSAITSKLKQLKGELSQVDADIEKETQRLKSIDVGCLSDCDLTTKAGRIEAQLIIKSAVKEVVLNTAKRRCKVTFHNGKVIGLSITENPSENVTEAIQSLSEVTERGLIDVDEVII

SEQ ID NO: 24967 - DNA, 50 bp, Escherichia coli; identical to SEQ ID NO: 24522
  source 1..50: mol_type = genomic DNA

SEQ ID NO: 24968 - DNA, 40 bp, Escherichia coli; identical to SEQ ID NO: 5188
  source 1..40: mol_type = genomic DNA

SEQ ID NO: 24969 - DNA, 40 bp, Escherichia coli; identical to SEQ ID NO: 5749
  source 1..40: mol_type = genomic DNA

SEQ ID NO: 24970 - DNA, 50 bp, Escherichia coli; identical to SEQ ID NO: 5750
  source 1..50: mol_type = genomic DNA

SEQ ID NO: 24971 - protein, 507 aa, Escherichia coli
MKRVISYIRFSSEKQAKGDSLRRQSKMVTDWLKAHPEYYLDQDLSFRDLGVSGFTGKHLKGGLGDFLTAIEKGLVKAGDTLLIESLDRLSRQDIDIASELLRNILRSGVDVVTLSDGEHYTRESLRDPLALIKSILIMQRAHEESLRKSERIQAAWNRKKELISEGIKISKRCPAWLKLNDDRKSFSVIPEKVETVKRCFQLRLEGKSIWEIVRTLNDEGHQTLNQYKAGKFGQTSVQDLLKNRSVIGYFTPKGCEEIAGYYPAIIDETTFYKVQQLSHSRYGKRSVSDKPLSVNLFKGVIRCSECGHALIITGFSDTRSGIYRCPLRNENRCSAKGLSRKQTDGTLLALLSRLDRFDSDMTNTIDTLKLHREHISSNIEKLVQLSLEIEDLNAITNKLKQLKNELSQVDADIEKETQRLKSIDVGCLPDCDLTTKAGRIEAQLIIKSAVKEVVLNTAKRRCKVTFHNGRAITLPITENPSEDVTEAIQSLSEVTERGLIDVDEVII

SEQ ID NO: 24972 - DNA, 50 bp, Escherichia coli; identical to SEQ ID NO: 24522
  source 1..50: mol_type = genomic DNA

SEQ ID NO: 24973 - DNA, 40 bp, Escherichia coli; identical to SEQ ID NO: 5188
  source 1..40: mol_type = genomic DNA

SEQ ID NO: 24974 - DNA, 40 bp, Escherichia coli; identical to SEQ ID NO: 5749
  source 1..40: mol_type = genomic DNA

SEQ ID NO: 24975 - DNA, 50 bp, Escherichia coli; identical to SEQ ID NO: 5750
  source 1..50: mol_type = genomic DNA

SEQ ID NO: 24976 - protein, 507 aa, Escherichia coli; identical to SEQ ID NO: 24966

SEQ ID NO: 24977 - DNA, 50 bp, Escherichia coli; identical to SEQ ID NO: 24522
  source 1..50: mol_type = genomic DNA

SEQ ID NO: 24978 - DNA, 40 bp, Escherichia coli; identical to SEQ ID NO: 21333
  source 1..40: mol_type = genomic DNA

SEQ ID NO: 24979 - DNA, 40 bp, Escherichia coli; identical to SEQ ID NO: 24744
  source 1..40: mol_type = genomic DNA

SEQ ID NO: 24980 - DNA, 50 bp, Escherichia coli; identical to SEQ ID NO: 5750
  source 1..50: mol_type = genomic DNA

SEQ ID NO: 24981 - protein, 507 aa, Escherichia coli
MKRVISYIRFSSEKQAKGDSLRRQSKMVTDWLKAHPEYYLDQDLSFRDLGVSGFTGKHLKGGLGDFLTAIEKGLVKAGDTLLIESLDRLSRQDIDIASELLRRILRAGVDVVTLSDGEHYTKESLRDPLALIKSILIMQRAHEESLRKAERIQAAWDAKKEAAKAGIKVSKRCPAWLKLNYDRKSFSVIPDKVETVKRCFQLRLEGKSIWEIVRTLNAEGHRSMNQYKPGKFGQTSVQDLLKNRSVIGYFTPKGCEEISGYFPPIIPETDFYKVQQLSYSRYGRKPASDKPLSVNLFKGVIRCSECGHALIITGFSDTRNGIYRCPLRNENRCSAKGLSRKQTDGTLLTLLSRLDRFDSDMTNTIDMLRLHREHISSNIEKLVQLSLEIEDLSAITIKLKQLKGELSQVDADIEKETQRLKSIDVGCLSDCDLTTKAGRIEAQLIIKSAVKEVVLNTAKRRCKVTFHNGKVIDLPITENPSEDVTEAIQSLSEVTAKGLIDVDVVEI

SEQ ID NO: 24982 - DNA, 50 bp, Escherichia coli; identical to SEQ ID NO: 24522
  source 1..50: mol_type = genomic DNA

SEQ ID NO: 24983 - DNA, 40 bp, Escherichia coli; identical to SEQ ID NO: 5188
  source 1..40: mol_type = genomic DNA

SEQ ID NO: 24984 - DNA, 40 bp, Escherichia coli; identical to SEQ ID NO: 5749
  source 1..40: mol_type = genomic DNA

SEQ ID NO: 24985 - DNA, 50 bp, Escherichia coli; identical to SEQ ID NO: 5750
  source 1..50: mol_type = genomic DNA

SEQ ID NO: 24986 - protein, 507 aa, Escherichia coli
MKRVISYIRFSSEKQSRGDSLRRQSKMVTDWLKAHPEYHLDQDLSFRDLGVSGFTGKHLKGGLGDFLTAIEKGLVKAGDTLLIESLDRLSRQDVDQASELLRNILRSGVDVVTLSDGEHYTRESLRDSLALIKSILIMQRAHEESLRKAERIQAAWDAKKEAAKAGIKVSKRCPAWLKLNDDRKSFSVIPEKVETVKRCFQLRLEGKSIWEIVRTLNDEGHQTLNQYKAGKFGQTSVQDLLKNRSVIGYFTPKGCEEISGYYPAIIDETTFYKVQQLSYARYGRKPASDKPLSVNLFKGVIRCSECGHALIITGFSDTRSGIYRCPLRNENRCNAKGLSRKQTDSTLLALLSRLDRFDSDMTNTVDTLKLHREHISNNIEKLVQLSLEIEDLSAITSKLKQLKGELSQVDADIEKETQRLKSIDVGCLSDCDLTTKAGRIEAQLIIKSAVKEVVLNTAKRRCKVTFHNGKVIDLPITENPSEDVTEAIQSLSEVTERGLIDVDEVII

SEQ ID NO: 24987 - DNA, 50 bp, Escherichia coli; identical to SEQ ID NO: 24522
  source 1..50: mol_type = genomic DNA

SEQ ID NO: 24988 - DNA, 40 bp, Escherichia coli; identical to SEQ ID NO: 5188
  source 1..40: mol_type = genomic DNA

SEQ ID NO: 24989 - DNA, 40 bp, Escherichia coli; identical to SEQ ID NO: 5749
  source 1..40: mol_type = genomic DNA

SEQ ID NO: 24990 - DNA, 50 bp, Escherichia coli; identical to SEQ ID NO: 5750
  source 1..50: mol_type = genomic DNA

SEQ ID NO: 24991 - protein, 507 aa, Escherichia coli
MKRVISYIRFSSEKQAKGDSLRRQSKMVTDWLKAHPEYYLDQDLSFRDLGVSGFTGKHLKGGLGDFLTAIEKGLVKAGDTLLIESLDRLSRQAVDRASELLRNILRSGVDVVTLSDGEHYTSESLKDPLALIKSILIMQRAHEESLRKSERIQAAWNRKKELISEGIKISKRCPAWLKLNDDRKSFSVIPEKVETVKRCFQLRLEGKSIWEIVRTMNAEGHQTLHQHKPGSFGQSSVQDLLKNRSVIGYFTPKGCEEISGYYPAIIDETTFYKVQQLSYARHGRKPASAKPLSVNLFKGVIRCSECGHALIITGFSDTRSGIYRCPLRNENRCSAKGLSRKQTDGTLLALLSRLDRFDSDMTNTVDTLKLHREHISSNIEKLVQLSLEIEDLNAITSKLKQLKGELSQVDADIEKETQRLKSIDVGCLSDCDLTTKAGRIEAQLIIKSAVKEVVLNTAKRRCKVTFHNGRAITLPITENPSEDVTEAIQSLSEVTERGLLDVDEVII

SEQ ID NO: 24992 - DNA, 50 bp, Escherichia coli; identical to SEQ ID NO: 24522
  source 1..50: mol_type = genomic DNA

SEQ ID NO: 24993 - DNA, 40 bp, Escherichia coli; identical to SEQ ID NO: 5188
  source 1..40: mol_type = genomic DNA

SEQ ID NO: 24994 - DNA, 40 bp, Escherichia coli; identical to SEQ ID NO: 5749
  source 1..40: mol_type = genomic DNA

SEQ ID NO: 24995 - DNA, 50 bp, Escherichia coli; identical to SEQ ID NO: 5750
  source 1..50: mol_type = genomic DNA

SEQ ID NO: 24996 - protein, 507 aa, Escherichia coli
MKRVISYIRFSSEKQAKGDSLRRQSKMVNDWLKAHPDYYLDQDLSFRDLGVSGFTGKHLKGGLGDFLTAIEKGLVKAGDTLLIESLDRLSRQDIDIASELLRRILRAGVDVVTLSDGEHYTKESLRDPLALIKSILIMQRAHEESLRKAERIQVAWDAKKEAAKAGIKVSKRCPAWLKLNDDRKSFSVIPDKVETVKRCFQLRLEGKSIWEIVRTLNDEGHQSMSQYKPGSFGQSSVQDLLKNRSVIGYFTPKGREEIAGYFPPIIPETDFYKVQQLSYSRYGRKPASDKPLSVNLFKGVIRCSECGHALIITGFSDTRNGIYRCPLRNENRCSAKGLSRKQTDGTLLALLSRLDRFDSDTTNIIDMLRLHREHVSSNIEKLVQLSLEIEDLNAITNKLKQLKNELSQVDADIEKETQRLKSIDVGCLSDCDLSTKAGRIEAQLIIKSAVKEVVLNTAKRRCKVTFHNGRAITLPITENPSEDVTEAIQSLSEVTERGLIDVDVVEI

SEQ ID NO: 24997 - DNA, 50 bp, Escherichia coli; identical to SEQ ID NO: 24522
  source 1..50: mol_type = genomic DNA

SEQ ID NO: 24998 - DNA, 40 bp, Escherichia coli; identical to SEQ ID NO: 5188
  source 1..40: mol_type = genomic DNA

SEQ ID NO: 24999 - DNA, 40 bp, Escherichia coli; identical to SEQ ID NO: 5749
  source 1..40: mol_type = genomic DNA

SEQ ID NO: 25000 - DNA, 50 bp, Escherichia coli; identical to SEQ ID NO: 5750
  source 1..50: mol_type = genomic DNA

SEQ ID NO: 25001 - protein, 507 aa, Escherichia coli
MKRVISYIRFSSEKQAKGDSLRRQSKMVNDWLKAHPEYYLDQDLSFRDLGVSGFTGKHLKGGLGDFLTAIEKGLVKAGDTLLIESLDRLSRQAVDRASELLRNILRSGVDVVTLSDGEHYTSESLKDPLALIKSILIMQRAHEESLRKSERIQAAWNRKKELISEGIKVSKRCPAWLRLNDDRKSFSVIPDKVETVKRCFQLRLEGKSIWEIVRTLNDEGHQSMSQYKPGKFGQTSVQDLLKNRSVIGYFTPKGREEIAGYFPSIIHETDFYKVQQLSYARHGRKPASAKPLSVNLFKGVIRCSECGHALIITGFSDTRNGIYRCPLRNENRCNAKGLSRKQTDGTLLTLLSRLDRFDSDTTNTIDTLKLHREHISSNIEKLVQLSLEIEDLSAITSKLKQLKGELSQVDADIEKETQRLKSIDVGCLSDCDLTTKAGRIEAQLIIKSAVKEVVLNTAKRRCKVTFHNGKSITLPITENPSEDVTEAIQSLSEVTERGLIDVDEVIV

SEQ ID NO: 25002 - DNA, 50 bp, Escherichia coli; identical to SEQ ID NO: 24522
  source 1..50: mol_type = genomic DNA

SEQ ID NO: 25003 - DNA, 40 bp, Escherichia coli; identical to SEQ ID NO: 5188
  source 1..40: mol_type = genomic DNA

SEQ ID NO: 25004 - DNA, 40 bp, Escherichia coli; identical to SEQ ID NO: 5749
  source 1..40: mol_type = genomic DNA

SEQ ID NO: 25005 - DNA, 50 bp, Escherichia coli; identical to SEQ ID NO: 5750
  source 1..50: mol_type = genomic DNA

SEQ ID NO: 25006 - protein, 507 aa, Escherichia coli
MKRVISYIRFSSEKQAKGDSLRRQSKMVTDWLKAHPEYYLDQDLSFRDLGVSGFTGKHLKGGLGDFLTAIEKGLVKAGDTLLIESLDRLSRQDIDIASELLRRILRAGVDVVTLSDGEHYTKESLRDPLSLIKSILIMQRAHEESLRKAERIQAAWDAKKEAAKAGIKVSKRCPAWLKLNDDRKSFSVIPEKVETVKRCFQLRLEGKSIWEIVRTLNDEGHQSMSQYKPGKFGQTSVQDLLKNRSVIGYFTPKGCEEISGYYPAIIDETTFYKVQQLSHYRYGRKPVSDKPLSVNLFKGVIRCSECGHALIITGFSDTRSGIYRCPLRNENRCSAKGLSRKQTDGTLLALLSRLDRFDSDTTNTIDTLKLHREHISSNIEKLVQLSLEIEDLSAITSKLRQLKGELSQVDADIEKETQRLKSIDVGCLSDCDLTTKAGRIEAQLIIKSAVKEVVLNTAKRRCKVTFHNGKLIDLPITETPSDNVTEAIQSLSEVTERGLIDVDVVEI

SEQ ID NO: 25007 - DNA, 50 bp, Escherichia coli; identical to SEQ ID NO: 24522
  source 1..50: mol_type = genomic DNA

SEQ ID NO: 25008 - DNA, 40 bp, Escherichia coli; identical to SEQ ID NO: 5188
  source 1..40: mol_type = genomic DNA

SEQ ID NO: 25009 - DNA, 40 bp, Escherichia coli; identical to SEQ ID NO: 5749
  source 1..40: mol_type = genomic DNA

SEQ ID NO: 25010 - DNA, 50 bp, Escherichia coli; identical to SEQ ID NO: 5750
  source 1..50: mol_type = genomic DNA

SEQ ID NO: 25011 - protein, 507 aa, Escherichia coli
MKRVISYIRFSSEKQAKGDSLRRQSKMVNDWLKAHPEYYLDQDLSFRDLGVSGFTGKHLKGGLGDFLTAIEKGLVKAGDTLLIESLDRLSRQDIDIASELLRRILRAGVDVVTLSDGEHYTRESLRDPLALIKSILIMQRAHEESLRKAERIQAAWNAKKEAAKAGIKVSKRCPAWLKLNDDRKSFSVIPDKVETVKRCFQLRLEGKSIWEIVRTLNDECHQSMNQYKPGKFGQTSVQDLLKNRSVIGYFTPKGCEEISGYYPAIIDETTFYKVQQLSHSRYGRKPASDKPLSVNLFKGVIRCSECGHALIITGFSDTRNGIYRCPLRNENRCSAKGLSRKQTDGTLLALLSRLDRFDSDMTNTVDTLKLHREHISSNIEKLVQLSLEIEDLSAITIKLKQLKGELSQVDADIEKETQRLKSIDVGCLSDCDLTTKAGRIEAQLIIKSAVKEVVLNTAKRRCKVTFHNGKVIGLSITENPSEDVTEAIQSLSEVTERGLIDVDEVII

SEQ ID NO: 25012 - DNA, 50 bp, Escherichia coli; identical to SEQ ID NO: 24522
  source 1..50: mol_type = genomic DNA

SEQ ID NO: 25013 - DNA, 40 bp, Escherichia coli; identical to SEQ ID NO: 5188
  source 1..40: mol_type = genomic DNA

SEQ ID NO: 25014 - DNA, 40 bp, Escherichia coli; identical to SEQ ID NO: 5749
  source 1..40: mol_type = genomic DNA

SEQ ID NO: 25015 - DNA, 50 bp, Escherichia coli; identical to SEQ ID NO: 5750
  source 1..50: mol_type = genomic DNA

SEQ ID NO: 25016 - protein, 507 aa, Escherichia coli
MKRVISYIRFSSEKQAKGDSLRRQSKMVTDWLKAHPEYYLDQDLSFRDLGVSGFTGKHLKGGLGDFLTAIEKGLVKAGDTLLIESLDRLSRQDIDIASELLRNILRSGVDVVTLSDGEHYTSESLKDPLALIKSILIMQRAHEESLRKSERIQAAWDAKKEAAKAGIKVSKRCPAWLKLNDDRKSFSVIPEKVETVKRCFQLRLEGKSIWEIVRTLNDEGHQSMSQYKPGKFGQTSVQDLLKNRSVIGYFTPKGCEEIAGYYPAIIDETTFYKVQQLSHSRYGRKPVSAKPLSVNLFKGVIRCSECGHALIITGFSDTRSGIYRCPLRNENRCSAKGLSRKQTDGTLLALLSRLDRFDSDTTNTIDMLRLHREHISSNIEKLVQLSLEIEDLSAITSKLKQLKNELSQVDADIEKETQRLKSIDVGCLSDCDLTTKAGRIEAQLIIKSAVKEVVLNTAKRRCKVTFHNGKVIDLSITENPSEDVTEAIQSLSEVTERGLIDVDEVII

SEQ ID NO: 25017 - DNA, 50 bp, Escherichia coli; identical to SEQ ID NO: 24522
  source 1..50: mol_type = genomic DNA

SEQ ID NO: 25018 - DNA, 40 bp, Escherichia coli; identical to SEQ ID NO: 5188
  source 1..40: mol_type = genomic DNA

SEQ ID NO: 25019 - DNA, 40 bp, Escherichia coli; identical to SEQ ID NO: 5749
  source 1..40: mol_type = genomic DNA

SEQ ID NO: 25020 - DNA, 50 bp, Escherichia coli; identical to SEQ ID NO: 5750
  source 1..50: mol_type = genomic DNA

SEQ ID NO: 25021 - protein, 507 aa, Escherichia coli
MKRVISYIRFSSEKQAKGDSLRRQSKMVTDWLKAHPEYYLDQDLSFRDLGVSGFTGKHLKGGLGDFLTAIEKGLVKAGDTLLIESLDRLSRQDVDQASELLRNILRSGVDVVTLSDGEHYTKESLRDPLSLIKSILIMQRAHEESLRKAERIQAAWDAKKEAAKAGIKISRRCPAWLKLNDDRKSFSVIPEKVETVKRCFQLRLEGKSIWEIVRTLNAEGHQTLNQYKAGKFGQTSVQDLLKNRSVIGYFTPKGCEEISSYYPSVIDETTFYKVQQLSHSRYGRKPVSDKPLSVNLFKGVIRCSECGHALIITGFSDTRNGIYRCPLRNENRCSAKGLSRKQTDGTLLTLLSRLDRFDSDMTNTIDTLKLHREHISSNIEKLVQLSLEIEDLSAITSKLKQLKGELSQVDADIEKETQRLKSIDVGCLSDCDLSTKAGRIEAQLIIKSAVKEVVLNTAKRRCKVTFHNGKVIDLPITENPSEDVTEAIQSLSEVTAKGLIDVDEVII

SEQ ID NO: 25022 - DNA, 50 bp, Escherichia coli; identical to SEQ ID NO: 24522
  source 1..50: mol_type = genomic DNA

SEQ ID NO: 25023 - DNA, 40 bp, Escherichia coli; identical to SEQ ID NO: 22763
  source 1..40: mol_type = genomic DNA

SEQ ID NO: 25024 - DNA, 40 bp, Escherichia coli; identical to SEQ ID NO: 24634
  source 1..40: mol_type = genomic DNA

SEQ ID NO: 25025 - DNA, 50 bp, Escherichia coli; identical to SEQ ID NO: 5750
  source 1..50: mol_type = genomic DNA

SEQ ID NO: 25026 - protein, 507 aa, Escherichia coli
MKRVISYIRFSSEKQSRGDSLRRQSKMVTDWLKAHPEYYLDQDLSFRDLGVSGFTGKHLKGGLGDFLTAIEKGLVKAGDTLLIESLDRLSRQAVDRASELLRNILRSGVDVVTLSDGEHYTSESLKDPLALIKSILIMQRAHEESLRKSERIQAAWDAKKEAAKAGIKVSKRCPAWLRLNDDRKSFSVIPEKVETVKRCFQLRLEGKSIWEIVRTLNAEGHQTLHQHKPGSFGQSSVQDLLKNRSVIGYFTPKGREEIAGYFPPIIPETDFYKVQQLSYSRYGRKPASDKPLSVNLFKGVIRCSECGHALIITGFSDTRNGIYRCPLRNENRCSAKGLSRKQTDGTLLALLSRLDRFDSDTTNIIDMLRLHREHVSSNIEKLVQLSLEIEDLNAITSKLKQLKGELSQVDADIEKETQRLKSIDVGCLSDCDLTTKAGRIEAQLIIKSAVKEVVLNTAKRRCKVTFHNGKTITLSITENPSEDVTEAIQSLSEVTERGLIDVDEVII

SEQ ID NO: 25027 - DNA, 50 bp, Escherichia coli; identical to SEQ ID NO: 24522
  source 1..50: mol_type = genomic DNA

SEQ ID NO: 25028 - DNA, 40 bp, Escherichia coli; identical to SEQ ID NO: 5188
  source 1..40: mol_type = genomic DNA

SEQ ID NO: 25029 - DNA, 40 bp, Escherichia coli; identical to SEQ ID NO: 5749
  source 1..40: mol_type = genomic DNA

SEQ ID NO: 25030 - DNA, 50 bp, Escherichia coli; identical to SEQ ID NO: 5750
  source 1..50: mol_type = genomic DNA

SEQ ID NO: 25031 - protein, 507 aa, Escherichia coli
MKRVISYIRFSSEKQAKGDSLRRQSKMVTDWLKAHPEYYLDQDLSFRDLGVSGFTGKHLKGGLGDFLTAIEKGLVKAGDTLLIESLDRLSRQAVDRASELLRNILRSGVDVVTLSDGEHYTRESLRDPLALIKSILIMQRAHEESLRKAERIQAAWDAKKEAAKAGIKVSKRCPAWLKLNDDRKSFSVIPEKVETVKRCFQLRLEGKSIWEIVRTLNDEGHQSMSQYKPGKFGQTSVQDLLKNRSVIGYFTPKGCEEISGYYPAIIDETTFYKVQQLSHYRYGRKPVSDKPLSVNLFKGVIRCSECGHALIITGFSDTRNGIYRCPLRNENRCSAKGLSRKQTDGTLLTLLSRLDRFDSDTTNTIDMLRLHREHISSNIEKLVQLSLEIEDLSAITIKLKQLKGELSQVDADIEKETQRLKSIDVGCLSDCDLTTKAGRIEAQLIIKSAVKEVVLNTAKRRCKVTFHNGKSITLPITENPSEDVTEAIQSLSEVTERGLIDVDEVII

SEQ ID NO: 25032 - DNA, 50 bp, Escherichia coli; identical to SEQ ID NO: 24522
  source 1..50: mol_type = genomic DNA

SEQ ID NO: 25033 - DNA, 40 bp, Escherichia coli; identical to SEQ ID NO: 5188
  source 1..40: mol_type = genomic DNA

SEQ ID NO: 25034 - DNA, 40 bp, Escherichia coli; identical to SEQ ID NO: 5749
  source 1..40: mol_type = genomic DNA

SEQ ID NO: 25035 - DNA, 50 bp, Escherichia coli; identical to SEQ ID NO: 5750
  source 1..50: mol_type = genomic DNA

SEQ ID NO: 25036 - protein, 507 aa, Escherichia coli
MKRVISYIRFSSEKQAKGDSLRRQSKMVTDWLKAHPEYYLDESLTFRDLGVSGFTGKHLKGGLGDFLTAIEKGLVKAGDTLLIESLDRLSRQNVDRASELLRNILRSGVDVVTLSDGEHYTRESLRDPLALIKSILIMQRAHEESLRKSERIQAAWNRKKELISEGIKISKRCPAWLKLNDDRKSFSVIPEKVETVKRCFQLRLEGKSIWEIVRTLNDEGHQSMSQYKPGSFGQSSVQDLLKNRSVIGYFTPKGCEELSGYYPAIIDETTFYKVQQLSYARYGRKPASDKPLSVNLFKGVIRCSECGHALIITGFSDTRNGIYRCPLRNENRCSAKGLSRKQTDGTLLALLSRLDRFDSDTTNTIDTLKLHREHISSNIEKLVQLSLEIEDLSAITSKLRQLKGELSQVDADIEKETQRLKSIDVGCLSDCDLTTKAGRIEAQLIIKSAVKEVVLNTAKRRCKVTFHNSKVINLPITETPSDNVTEAIQSLSEVTERGLIDVDEVII

SEQ ID NO: 25037 - DNA, 50 bp, Escherichia coli; identical to SEQ ID NO: 24522
  source 1..50: mol_type = genomic DNA

SEQ ID NO: 25038 - DNA, 40 bp, Escherichia coli; identical to SEQ ID NO: 22763
  source 1..40: mol_type = genomic DNA

SEQ ID NO: 25039 - DNA, 40 bp, Escherichia coli; identical to SEQ ID NO: 24634
  source 1..40: mol_type = genomic DNA

SEQ ID NO: 25040 - DNA, 50 bp, Escherichia coli; identical to SEQ ID NO: 5750
  source 1..50: mol_type = genomic DNA

SEQ ID NO: 25041 - protein, 507 aa, Escherichia coli
MKRVISYIRFSSEKQAKGDSLRRQSKMVTDWLKAHPEYYLDQDLSFRDLGVSGFTGKHLKGGLGDFLTAIEKGLVKAGDTLLIESLDRLSRQDIDIASELLRNILRSGVDVVTLSDGEHYTRESLRDPLALIKSILIMQRAHEESLRKAERIQAAWDAKKEAAKAGIKVSKRCPAWLKLNDDRKSFSVIPEKVETVKRCFQLRLEGKSIWEIVRTLNDEGHQSMSQYKPGSFGQSSVQDLLKNRSVIGYFTPKGCEEIAGYYPAIIDETTFYKVQQLSYARYGRKPASDKPLSVNLFKGVIRCSECGHALIITGFSDTRSGIYRCPLRNENRCSAKGLSRKQTDGTLLALLSRLDRFDSDMTNTIDTLKLHREHISSNIEKLVQLSLEIEDLNAITNKLKQLKNELSQVDADIEKETQRLKSIDVGCLSDCDLTTKAGRIEAQLIIKSAVKEVVLNTAKRRCKVTFHNSKIIDLPITENPSEDVTEAIQSLSEVTERGLIDVDVVEI

SEQ ID NO: 25042 - DNA, 50 bp, Escherichia coli; identical to SEQ ID NO: 24522
  source 1..50: mol_type = genomic DNA

SEQ ID NO: 25043 - DNA, 40 bp, Escherichia coli; identical to SEQ ID NO: 21333
  source 1..40: mol_type = genomic DNA

SEQ ID NO: 25044 - DNA, 40 bp, Escherichia coli; identical to SEQ ID NO: 24744
  source 1..40: mol_type = genomic DNA

SEQ ID NO: 25045 - DNA, 50 bp, Escherichia coli; identical to SEQ ID NO: 5750
  source 1..50: mol_type = genomic DNA

SEQ ID NO: 25046 - protein, 507 aa, Escherichia coli; identical to SEQ ID NO: 24966

SEQ ID NO: 25047 - DNA, 50 bp, Escherichia coli; identical to SEQ ID NO: 24522
  source 1..50: mol_type = genomic DNA

SEQ ID NO: 25048 - DNA, 40 bp, Escherichia coli; identical to SEQ ID NO: 5198
  source 1..40: mol_type = genomic DNA

SEQ ID NO: 25049 - DNA, 40 bp, Escherichia coli
  source 1..40: mol_type = genomic DNA
cggcgttaatcaggtgattaaagacagccgcccggttcat

SEQ ID NO: 25050 - DNA, 50 bp, Escherichia coli; identical to SEQ ID NO: 5750
  source 1..50: mol_type = genomic DNA

SEQ ID NO: 25051 - protein, 507 aa, Escherichia coli
MKRVISYIRFSSEKQAKGDSLRRQSKMVTDWLKAHPEYYLDESLTFRDLGVSGFTGKHLKGGLGDFLTAIEKGLVKAGDTLLIESLDRLSRQDIDIASELLRRILRAGVDVVTLSDGEHYTSESLKDPLALIKSILIMQRAHEESLRKAERIQAAWDAKKEAAKAGIKVSKRCPAWLKLNDDRKTFSVIPEKVETVRRCFQLRLEGKSIWAIVKALNDEGHQSMSQYKPGKFGQTSVQDLLKNRSVIGYFTPKGCEEISGYYPAIIDETTFYKVQQLSYARYGRKPASDKPLSVNLFKGVIRCSECGHALIITGFSDTRSGIYRCPLRNENRCSAKGLSRKQTDGTLLALLSRLDRFDSDMTNTVDTLKLHREHISSNIEKLVQLSLEIEDLSAITSKLRQLKNELSQVDADIEKETQRLKSIDVGCLSDCDLTTKAGRIEAQLIIKSAVKEVVLNTAKRRCKVTFHNGKLIDLPITENPSEDVTEAIQSLSEVTERGLIDVDEVII

SEQ ID NO: 25052 - DNA, 50 bp, Escherichia coli; identical to SEQ ID NO: 24522
  source 1..50: mol_type = genomic DNA

SEQ ID NO: 25053 - DNA, 40 bp, Escherichia coli; identical to SEQ ID NO: 5188
  source 1..40: mol_type = genomic DNA

SEQ ID NO: 25054 - DNA, 40 bp, Escherichia coli; identical to SEQ ID NO: 5749
  source 1..40: mol_type = genomic DNA

SEQ ID NO: 25055 - DNA, 50 bp, Escherichia coli; identical to SEQ ID NO: 5750
  source 1..50: mol_type = genomic DNA

SEQ ID NO: 25056 - protein, 507 aa, Escherichia coli
MKRVISYIRFSSEKQAKGDSLRRQSKMVTDWLKAHPEYYLDESLTFRDLGVSGFTGKHLKGGLGDFLTAIEKGLVKAGDTLLIESLDRLSRQNVDRASELLRNILRSGVDVVTLSDGEHYTRESLKDPLALIKSILIMQRSHEESLRKSERIQAAWNRKKELISEGIKISKRCPAWLKLNDDRKSFSVIPEKVETVKRCFQLRLEGKSIWEIVRTLNDEGHQSMSQYKPGSFGQSSVQDLLKNRSVIGYFTPKGCEEIAGYYPAIIDETTFYKVQQLSYARHGRKPASAKPLSVNLFKGVIRCSECGHALIITGFSDTRNGIYRCPLRNENRCSAKGLSRKQTDGTLLALLSRLDRFDSDTTNTIDTLKLHREHISSNIEKLVQLSLEIEDLSAITSKLRQLKGELSQVDADIEKETQRLKSIDVGCLSDCDLTTKAGRIEAQLIIKSAVKEVVLNTAKRRCKVTFHNGKLIDLPITETPSDNVTEAIQSLSEVTERGLIDVDEVII

SEQ ID NO: 25057 - DNA, 50 bp, Escherichia coli; identical to SEQ ID NO: 24522
  source 1..50: mol_type = genomic DNA

SEQ ID NO: 25058 - DNA, 40 bp, Escherichia coli; identical to SEQ ID NO: 5188
  source 1..40: mol_type = genomic DNA

SEQ ID NO: 25059 - DNA, 40 bp, Escherichia coli; identical to SEQ ID NO: 5749
  source 1..40: mol_type = genomic DNA

SEQ ID NO: 25060 - DNA, 50 bp, Escherichia coli; identical to SEQ ID NO: 5750
  source 1..50: mol_type = genomic DNA

SEQ ID NO: 25061 - protein, 507 aa, Escherichia coli
MKRVISYIRFSSEKQAKGDSLRRQSKMVTDWLKAHPEYYLDQDLSFRDLGVSGFTGKHLKGGLGDFLTAIEKGLVKAGDTLLIESLDRLSRQAVDRASELLRNILRSGVDVVTLSDGEHYTSESLKDPLALIKSILIMQRAHEESLRKSERIQAAWDAKKEAAKAGIKVSKRCPAWLKLNDDRKSFSVIPEKVATVKRCFQLRLEGKSIWEIVRTLNDEGHQTLNQYKPGKFGQTSVQDLLKNRSVIGYFTPKGCEEISGYYPAIIDETTFYKVQQLSYARYGRKPASDKPLSVNLFKGVIRCSECGHALIITGFSDTRSGIYRCPLRNENRCSAKGLSRKQTDGTLLTLLSRLDRFDSDTTNTIDMLRLHREHLSSNIEKLVQLSLEIEDLSAITSKLKQLKNELSQVDADIEKETQRLKSIDVGCLSDCDLTTKAGRIEAQLIIKSAVKEVVLNTAKRRCKVTFHNGRAITLPITENPSEDVTEAIQSLSEVTERGLIDVDEVII

SEQ ID NO: 25062 - DNA, 50 bp, Escherichia coli; identical to SEQ ID NO: 24817
  source 1..50: mol_type = genomic DNA

SEQ ID NO: 25063 - DNA, 40 bp, Escherichia coli; identical to SEQ ID NO: 5188
  source 1..40: mol_type = genomic DNA

SEQ ID NO: 25064 - DNA, 40 bp, Escherichia coli; identical to SEQ ID NO: 5749
  source 1..40: mol_type = genomic DNA

SEQ ID NO: 25065 - DNA, 50 bp, Escherichia coli; identical to SEQ ID NO: 5750
  source 1..50: mol_type = genomic DNA

SEQ ID NO: 25066 - protein, 507 aa, Escherichia coli
MKRVISYIRFSSEKQSRGDSLRRQSKMVTDWLKAHPEYYLDQDLSFRDLGVSGFTGKHLKGGLGDFLTAIEKGLVKAGDTLLIESLDRLSRQAVDQASELLRNILRSGVDVVTLSDGEHYTRESLKDPLALIKSILIMQRSHEESLRKSERIQAAWNRKKELISEGIKISKRCPAWLKLNDDRKSFSVIPDKVETVKRCFQLRLEGKSIWEIVRTLNAEGHRSMNQYKPGKFGQTSVQDLLKNRSVIGYFTPKGCEEISGYYPAIIDETTFYKVQQLSHYRYGRKPVSDKPMAVNLFKGVIRCSECGHALIITGFSDTRSGIYRCPLRNENRCSAKGLSRKQTDGTLLTLLSRLDRFDSDTTNIIDTLKLHREHISSNIEKLVQLSLEIEDLSAITSKLKQLKNELSQVDADIEKETQRLKSIDVGCLSDCDLTTKAGRIEAQLIIKSAVKEVVLNTAKRRCKVTFHNGKAITLPITETPSEDVTEAIQSLSEVTERGLIDVDEVII

SEQ ID NO: 25067 - DNA, 50 bp, Escherichia coli; identical to SEQ ID NO: 24522
  source 1..50: mol_type = genomic DNA

SEQ ID NO: 25068 - DNA, 40 bp, Escherichia coli; identical to SEQ ID NO: 5188
  source 1..40: mol_type = genomic DNA

SEQ ID NO: 25069 - DNA, 40 bp, Escherichia coli; identical to SEQ ID NO: 5749
  source 1..40: mol_type = genomic DNA

SEQ ID NO: 25070 - DNA, 50 bp, Escherichia coli; identical to SEQ ID NO: 5750
  source 1..50: mol_type = genomic DNA

SEQ ID NO: 25071 - protein, 507 aa, Escherichia coli
MKRVISYIRFSSEKQAKGDSLRRQSKMVTDWLKAHPEYYLDQDLSFRDLGVSGFTGKHLKGGLGDFLTAIEKGLVKAGDTLLIESLDRLSRQDVDQASELLRNILRSGVDVVTLSDGEHYTRESLRDPLALIKSILIMQRAHEESLRKAERIQAAWDAKKEAAKAGIKVSKRCPAWLKLNDDRKSFSVIPEKVETVKRCFQLRLEGKSIWEIVRTLNDEGHQSMSQYKPGSFGQSSVQDLLKNRSVIGYFTPKGCEEIAGYYPAIIDETTFYKVQQLSHSRYGKRSVSDKPLSVNLFKGVIRCSECGHALIITGFSDTRNGIYRCPLRNENRCSAKGLSRKQTDGTLLALLSRLDRFDSDTTNTIDTLKLHREHISSNIEKLVQLSLEIEDLSAITSKLRQLKGELSQVDADIEKETQRLKSIDVGCLSDCDLTTKAGRIEAQLIIKSAVKEVVLNTAKRRCKVTFHNGKLIDLPITETPSDNVTEAIQSLSEVTERGLIDVDEVII

SEQ ID NO: 25072 - DNA, 50 bp, Escherichia coli; identical to SEQ ID NO: 24522
  source 1..50: mol_type = genomic DNA

SEQ ID NO: 25073 - DNA, 40 bp, Escherichia coli; identical to SEQ ID NO: 5188
  source 1..40: mol_type = genomic DNA

SEQ ID NO: 25074 - DNA, 40 bp, Escherichia coli; identical to SEQ ID NO: 5749
  source 1..40: mol_type = genomic DNA

SEQ ID NO: 25075 - DNA, 50 bp, Escherichia coli; identical to SEQ ID NO: 5750
  source 1..50: mol_type = genomic DNA

SEQ ID NO: 25076 - protein, 507 aa, Escherichia coli
MKRVISYIRFSSEKQAKGDSLRRQSKMVNDWLKAHPEYYLDQDLSFRDLGVSGFTGKHLKGGLGDFLTAIEKGLVKAGDTLLIESLDRLSRQDIDIASELLRRILRAGVDVVTLSDGEHYTKESLRDPLSLIKSILIMQRAHEESLRKAERIQAAWDAKKEAAKAGIKISKRCPAWLRLNDDRKSFSIIPEKVETVKRCFQLRLEGKSIWEIVRTLNDEGHQTLNQYKAGSFGQSSVQDLLKNRSVIGYFTPKGCEEIAGYYPAIIDETTFYKVQQLSYSRYGRKPASDKPMAVNLFKGVIRCSECGHALIITGFSDTRSGIYRCPLRNENRCSAKGLSRKQTDGTLLALLSRLDRFDSDMTNTIDTLKLHREHISSNIEKLVQLSLEIEDLSAITSKLKQLKNELSQVDADIEKETQRLKSIDVGCLSDCDLTTKAGRIEAQLIIKSAVKEVVLNTAKRRCKVTFHNGKVIDLPITENPSEDVTEAIQSLSEVIERGLIDADVVEI

SEQ ID NO: 25077 - DNA, 50 bp, Escherichia coli; identical to SEQ ID NO: 24522
  source 1..50: mol_type = genomic DNA

SEQ ID NO: 25078 - DNA, 40 bp, Escherichia coli; identical to SEQ ID NO: 5188
  source 1..40: mol_type = genomic DNA

SEQ ID NO: 25079 - DNA, 40 bp, Escherichia coli; identical to SEQ ID NO: 5749
  source 1..40: mol_type = genomic DNA

SEQ ID NO: 25080 - DNA, 50 bp, Escherichia coli; identical to SEQ ID NO: 5750
  source 1..50: mol_type = genomic DNA

SEQ ID NO: 25081 - protein, 507 aa, Escherichia coli
MKRVISYIRFSSEKQAKGDSLRRQSKMVTDWLKAHPEYYLDESLTFRDLGVSGFTGKHLKGGLGDFLTAIEKGLVKAGDTLLIESLDRLSRQAVDRASELLRNILRSGVDVVTLSDGEHYTSESLKDPLALIKSILIMQRAHEESLRKSERIQAAWNRKKELISEGIKVSKRCPAWLRLNDDRKSFSVIPEKVETVKRCFQLRLEGKSIWEIVRTLNDEGHQSMSQYKPGKFGQTSVQDLLKNRSVIGYFTPKGCEEISGYYPAIIDETTFYKVQQLSYARYGRKPASDKPLSVNLFKGVIRCSECGHALIITGFSDTRSGIYRCPLRNENRCSAKGLSRKQTDGTLLALLSRLDRFDSDTTNNINMLRLHREHISSNIEKLVQLSLEIEDLSAITSKLKQLKGELSQVDADIEKETQRLKSIDVGCLSDCDLTTKAGRIEAQLIIKSAVKEVVLNTAKRRCKVTFHNGRAITLPITENPSEDVTEAIQSLSEVTERGLIDVDVVEI

SEQ ID NO: 25082 - DNA, 50 bp, Escherichia coli; identical to SEQ ID NO: 24522
  source 1..50: mol_type = genomic DNA

SEQ ID NO: 25083 - DNA, 40 bp, Escherichia coli; identical to SEQ ID NO: 21333
  source 1..40: mol_type = genomic DNA

SEQ ID NO: 25084 - DNA, 40 bp, Escherichia coli; identical to SEQ ID NO: 24744
  source 1..40: mol_type = genomic DNA

SEQ ID NO: 25085 - DNA, 50 bp, Escherichia coli; identical to SEQ ID NO: 5750
  source 1..50: mol_type = genomic DNA

SEQ ID NO: 25086 - protein, 507 aa, Escherichia coli
MKRVISYIRFSSEKQAKGDSLRRQSKMVTDWLKAHPEYYLDQDLSFRDLGVSGFTGKHLKGGLGDFLTAIEKGLVKAGDTLLIESLDRLSRQAVDRASELLRNILRSGVDVVTLSDGEHYTSESLKDPLALIKSILIMQRAHEESLRKSERIQAAWDAKKEAAKAGIKVSKRCPAWLKLNDDRKSFSVIPEKVETVKRCFQLRLEGKSIWEIVRTLNDECHQSMNQYKPGKFGQTSVQDLLKNRSVIGYFTPKGCEEISGYFPPIIPETDFYKVQQLSYARHGRKPASAKPLSVNLFKGVIRCSECGHALIITGFSDTRNGIYRCPLRNENRCSAKGLSRKQTDGTLLALLSRLDRFDSDTTNTIDMLRLHREHISSNIEKLVQLSLEIEDLSAITSKLKQLKGELSQVDADIEKETQRLKSIDVGCLSDCDLTTKAGRIEAQLIIKSAVKEVVLNTAKRRCKVTFHNGKVIDLPITEPPSEDVTEAIQSLSEVTERGLIDVDEVII

SEQ ID NO: 25087 - DNA, 50 bp, Escherichia coli; identical to SEQ ID NO: 24522
  source 1..50: mol_type = genomic DNA

SEQ ID NO: 25088 - DNA, 40 bp, Escherichia coli; identical to SEQ ID NO: 5188
  source 1..40: mol_type = genomic DNA

SEQ ID NO: 25089 - DNA, 40 bp, Escherichia coli; identical to SEQ ID NO: 5749
  source 1..40: mol_type = genomic DNA

SEQ ID NO: 25090 - DNA, 50 bp, Escherichia coli; identical to SEQ ID NO: 5750
  source 1..50: mol_type = genomic DNA

SEQ ID NO: 25091 - protein, 507 aa, Escherichia coli
MKRVISYIRFSSEKQAKGDSLRRQSKMVTDWLKAHPEYYLDQDLSFRDLGVSGFTGKHLKGGLGDFLTAIEKGLVKAGDTLLIESLDRLSRQDVDQASELLRNILRSGVDVVTLSDGEHYTRESLRDPLALIKSILIMQRAHEESLRKAERIQAAWDAKKEAAKAGIKISRRCPAWLKLNDDRKSFSVIPEKVETVKRCFQLRLEGKSIWEIVRTLNDEGHQTLNQYKAGKFGQSSVQDLLKNRSVIGYFTPKGCEEISCYYPAIIDETTFYKVQQLSYARYGRKPASDKPLSVNLFKGVIRCSECGHALIITGFSDTRNGIYRCPLRNENRCSAKGLSRKQTDGTLLALLSRLDRFDSDTTNTIDTLKLHREHISSNIEKLVQLSLEIEDLNAITSKLKQLKGELSQVDADIEKETQRLKSIDVGCLSDCDLTTKAGRIEAQLIIKSAVKEVVLNTAKRRCKVTFHNGKVIDLSITENPSEDVTEAIQSLSEVTERGLIDVDEVII

SEQ ID NO: 25092 - DNA, 50 bp, Escherichia coli; identical to SEQ ID NO: 24522
  source 1..50: mol_type = genomic DNA

SEQ ID NO: 25093 - DNA, 40 bp, Escherichia coli; identical to SEQ ID NO: 5188
  source 1..40: mol_type = genomic DNA

SEQ ID NO: 25094 - DNA, 40 bp, Escherichia coli; identical to SEQ ID NO: 5749
  source 1..40: mol_type = genomic DNA

SEQ ID NO: 25095 - DNA, 50 bp, Escherichia coli; identical to SEQ ID NO: 5750
  source 1..50: mol_type = genomic DNA

SEQ ID NO: 25096 - protein, 507 aa, Escherichia coli
MKRVISYIRFSSEKQAKGDSLRRQSKMVTDWLKAHPEYYLDQDLSFRDLGVSGFTGKHLKGGLGDFLTAIEKGLVKAGDTLLIESLDRLSRQAVDRASELLRNILRSGVDVVTLSDGEHYTRESLRDPLALIKSILIMQRAHEESLRKAERIQAAWDAKKEAAKAGIKVSKRCPAWLKLNDDRKSFSIIPEKVETVKRCFQLRLEGKSIWEIVRTLNDEGHQSMSQYKPGKFGQTSVQDLLKNRSVIGYFTPKGCEEISGYYPAIIDETTFYKVQQLSYARYGRKPASDKPLSVNLFKGVIRCSECGHALIITGFSDTRSGIYRCPLRNENRCSAKGLSRKQTDGTLLALLSRLDRFDSDTTNTIDMLRLHREHISSNIEKLVQLSLEIEDLSAITSKLKQLKNELSQVDADIEKETQRLKSIDVGCLSDCDLTTKAGRIEAQLIIKSAVKEVVLNTAKRRCKVTFHNGKVIDLSITENPSEDVTEAIQSLSEVTERGLIDVDEVII

SEQ ID NO: 25097 - DNA, 50 bp, Escherichia coli; identical to SEQ ID NO: 24522
  source 1..50: mol_type = genomic DNA

SEQ ID NO: 25098 - DNA, 40 bp, Escherichia coli; identical to SEQ ID NO: 5188
  source 1..40: mol_type = genomic DNA

SEQ ID NO: 25099 - DNA, 40 bp, Escherichia coli; identical to SEQ ID NO: 5749
  source 1..40: mol_type = genomic DNA

SEQ ID NO: 25100 - DNA, 50 bp, Escherichia coli; identical to SEQ ID NO: 5750
  source 1..50: mol_type = genomic DNA

SEQ ID NO: 25101 - protein, 507 aa, Escherichia coli
MKRVISYIRFSSEKQAKGDSLRRQSKMVTDWLKAHPEYYLDESLTFRDLGVSGFTGKHLKGGLGDFLTAIEKGLVKAGDTLLIESLDRLSRQAVDRASELLRNILRSGVDVVTLSDGEHYTSESLKDPLALIKSILIMQRAHEESLRKSERIQAAWNRKKELISEGIKVSKRCPAWLRLNDDRKSFSVIPDKVETVKRCFQLRLEGKSIWEIVRTLNAEGHRSMNQYKPGKFGQTSVQDLLKNRSVIGYFTPKGCEEISGYYPAIIDETTFYKVQQLSHSRYGRKPVSAKPLSVNLFKGVIRCSECGHALIITGFSDTRNGIYRCPLRNENRCSAKGLSRKQTDGTLLTLLSRLDRFDSDMTNTIDMLRLHREHISSNIEKLVQLSLEIEDLSAITIKLKQLKGELSQVDADIEKETQRLKSIDVGCLSDCDLTTKAGRIEAQLIIKSAVKEVVLNTAKRRCKVTFHNGKVIDLPITENPSEDVTEAIQSLSEVTERGLIDVDVVEI

SEQ ID NO: 25102 - DNA, 50 bp, Escherichia coli; identical to SEQ ID NO: 24522
  source 1..50: mol_type = genomic DNA

SEQ ID NO: 25103 - DNA, 40 bp, Escherichia coli; identical to SEQ ID NO: 5188
  source 1..40: mol_type = genomic DNA

SEQ ID NO: 25104 - DNA, 40 bp, Escherichia coli; identical to SEQ ID NO: 5749
  source 1..40: mol_type = genomic DNA

SEQ ID NO: 25105 - DNA, 50 bp, Escherichia coli; identical to SEQ ID NO: 5750
  source 1..50: mol_type = genomic DNA

SEQ ID NO: 25106 - protein, 507 aa, Escherichia coli
MKRVISYIRFSSEKQAKGDSLRRQSKMVTDWLKAHPEYYLDQDLSFRDLGVSGFTGKHLKGGLGDFLTAIEKGLVKAGDTLLIESLDRLSRQAVDRASELLRNILRSGVDVVTLSDGEHYTSESLKDPLALIKSILIMQRAHEESLRKSERIQAAWNRKKELISEGIKVSKRCPAWLRLNDDRKSFSVIPDKVETVKRCFQLRLEGKSIWEIVRTLNAEGHRSMNQYKPGKFGQTSVQDLLKNRSVIGYFTPKGCEEISGYYPAIIDETTFYKVQQLSHYRYGRKPVSDKPLSVNLFKGVIRCSECGHALIITGFSDTRNGIYRCPLRNENRCSAKGLSRKQTDGTLLALLSRLDRFDSDTTNIIDTLKLHREHISSNIEKLVQLSLEIEDLSAITSKLKQLKGELSQVDADIEKETQRLKSIDVGCLSDCDLTTKAGRIEAQLIIKSAVKEVVLNTAKRRCKVTFHNGKVIDLPITENPSEDVTEAIQSLSEVTERGLIDVDVVEI

SEQ ID NO: 25107 - DNA, 50 bp, Escherichia coli; identical to SEQ ID NO: 24522
  source 1..50: mol_type = genomic DNA

SEQ ID NO: 25108 - DNA, 40 bp, Escherichia coli; identical to SEQ ID NO: 5188
  source 1..40: mol_type = genomic DNA

SEQ ID NO: 25109 - DNA, 40 bp, Escherichia coli; identical to SEQ ID NO: 5749
  source 1..40: mol_type = genomic DNA

SEQ ID NO: 25110 - DNA, 50 bp, Escherichia coli; identical to SEQ ID NO: 5750
  source 1..50: mol_type = genomic DNA

SEQ ID NO: 25111 - protein, 507 aa, Escherichia coli
MKRVISYIRFSSEKQAKGDSLRRQSKMVTDWLKAHPEYYLDQDLSFRDLGVSGFTGKHLKGGLGDFLTAIEKGLVKAGDTLLIESLDRLSRQAVDRASELLRNILRSGVDVVTLSDGEHYTSESLKDPLALIKSILIMQRAHEESLRKSERIQAAWDAKKEAAKAGIKVSKRCPAWLKLNDDRKSFSVIPEKVETVKRCFQLRLEGKSIWEIVRTLNDEGHQTLNQYKAGKFGQTSVQDLLKNRSVIGYFTPKGCEEIAGYYPAIIDETTFYKVQQLSHSRYGRKPASDKPLSVNLFKGVIRCSECGHALIITGFSDTRNGIYRCPLRNENRCSAKGLSRKQTDGTLLALLSRLDRFDSDTTNTIDTLKLHREHISSNIEKLVQLSLEIEDLSAITSKLKQLKGELSQVDADIEKETQRLKSIDVGCLSDCDLTTKAGRIEAQLIIKSAVKEVVLNTAKRRCKVTFHNGKAITLPITENPSDNVTEAIQSLSEVTERGLIDVDEVII

SEQ ID NO: 25112 - DNA, 50 bp, Escherichia coli; identical to SEQ ID NO: 24522
  source 1..50: mol_type = genomic DNA

SEQ ID NO: 25113 - DNA, 40 bp, Escherichia coli; identical to SEQ ID NO: 5188
  source 1..40: mol_type = genomic DNA

SEQ ID NO: 25114 - DNA, 40 bp, Escherichia coli; identical to SEQ ID NO: 5749
  source 1..40: mol_type = genomic DNA

SEQ ID NO: 25115 - DNA, 50 bp, Escherichia coli; identical to SEQ ID NO: 5750
  source 1..50: mol_type = genomic DNA

SEQ ID NO: 25116 - protein, 507 aa, Escherichia coli
MKRVISYIRFSSEKQAKGDSLRRQSKMVTDWLKAHPEYYLDQDLSFRDLGVSGFTGKHLKGGLGDFLTAIEKGLVKAGDTLLIESLDRLSRQDIDIASELLRNILRSGVDVVTLSDGEHYTRESLRDPLALIKSILIMQRAHEESLRKAERIQAAWDAKKEAAKAGIKVSKRCPAWLKLNDDRKSFSVIPEKVETVKRCFQLRLEGKSIWEIVRTLNDEGHQSMSQYKPGKFGQTSVQDLLKNRSVIGYFTPKGCEEISGYYPAIIDETTFYKVQQLSHYRYGRKPVSDKPLSVNLFKGVIRCSECGHALIITGFSDTRNGIYRCPLRNENRCSAKGLSRKQTDGTLLTLLSRLDRFDSDTTNTIDTLKLHREHISSNIEKLVQLSLEIEDLSAITSKLKQLKGELSQVDADIEKETQRLKSIDVGCLSDCDLTTKAGRIEAQLIIKSAVKEVVLNTAKRRCKVTFHNGKSITLPITENPSEDVTEAIQSLSEVTERGLIDVDVVEI

SEQ ID NO: 25117 - DNA, 50 bp, Escherichia coli; identical to SEQ ID NO: 24522
  source 1..50: mol_type = genomic DNA

SEQ ID NO: 25118 - DNA, 40 bp, Escherichia coli; identical to SEQ ID NO: 5188
  source 1..40: mol_type = genomic DNA

SEQ ID NO: 25119 - DNA, 40 bp, Escherichia coli; identical to SEQ ID NO: 5749
  source 1..40: mol_type = genomic DNA

SEQ ID NO: 25120 - DNA, 50 bp, Escherichia coli; identical to SEQ ID NO: 5750
  source 1..50: mol_type = genomic DNA

SEQ ID NO: 25121 - protein, 507 aa, Escherichia coli
MKRVISYIRFSSEKQAKGDSLRRQSKMVTDWLKAHPEYYLDESLTFRDLGVSGFTGKHLKGGLGDFLTAIEKGLVKAGDTLLIESLDRLSRQAVDRASELLRNILRSGVDVVTLSDGEHYTSESLKDPLALIKSILIMQRAHEESLRKSERIQAAWDAKKEAAKAGIKVSKRCPAWLRLNDDRKSFSVIPEKVETVKRCFQLRLEGKSIWEIVRTLNDEGHQSMSQYKPGSFGQSSVQDLLKNRSVIGYFTPKGCEEIAGYYPAIIDETTFYKVQQLSYARHGRKPASAKPLSVNLFKGVIRCSECGHALIITGFSDTRNGIYRCPLRNENRCSAKGLSRKQTDGTLLTLLSRLDRFDSDTTNTVDMLRLHREHISSNIEKLVQLSLEIEDLSAITSKLKQLKNELSQVDADIEKETQRLKSIDVGCLSDCDLSTKAGRIEAQLIIRSAVKEVVLNTAKRRCKVTFHNGKSITLPITENPSEDVTEAIQSLSEVTERGLIDVDEVIV

SEQ ID NO: 25122 - DNA, 50 bp, Escherichia coli; identical to SEQ ID NO: 24522
  source 1..50: mol_type = genomic DNA

SEQ ID NO: 25123 - DNA, 40 bp, Escherichia coli; identical to SEQ ID NO: 5188
  source 1..40: mol_type = genomic DNA

SEQ ID NO: 25124 - DNA, 40 bp, Escherichia coli; identical to SEQ ID NO: 5749
  source 1..40: mol_type = genomic DNA

SEQ ID NO: 25125 - DNA, 50 bp, Escherichia coli; identical to SEQ ID NO: 5750
  source 1..50: mol_type = genomic DNA

SEQ ID NO: 25126 - protein, 507 aa, Escherichia coli
MKRVISYIRFSSEKQAKGDSLRRQSKMVTDWLKAHPEYYLDQDLSFRDLGVSGFTGKHLKGGLGDFLTAIEKGLVKAGDTLLIESLDRLSRQAVDRASELLRNILRSGVDVVTLSDGEHYTKESLRDPLSLIKSILIMQRAHEESLRKAERIQAAWDAKKEAAKAGIKISRRCPAWLKLSDDRKSFSVIPEKVETVKRCFQLRLEGKSIWEIVRTLNDEGHQSMSQYKPGKFGQSSVQDLLKNRSVIGYFTPKGCEEIAGYYPAIIDETTFYKVQQLSYARHGRKPASAKPLSVNLFKGVIRCSECGHALIITGFSDTRNGIYRCPLRNENRCSAKGLSRKQTDGTLLALLSRLDRFDSDMTNTIDMLRLHREHISSNIEKLVQLSLEIEDLSAITIKLKQLKNELSQVDADIEKETQRLKSIDVGCLSDCDLTTKAGRIEAQLIIKSAVKEVVLNTAKRRCKVTFHNGKAITLSITENPSEDVTEAIQSLSEVTERGLIDVDVVEI

SEQ ID NO: 25127 - DNA, 50 bp, Escherichia coli; identical to SEQ ID NO: 24522
  source 1..50: mol_type = genomic DNA

SEQ ID NO: 25128 - DNA, 40 bp, Escherichia coli; identical to SEQ ID NO: 5188
  source 1..40: mol_type = genomic DNA

SEQ ID NO: 25129 - DNA, 40 bp, Escherichia coli; identical to SEQ ID NO: 5749
  source 1..40: mol_type = genomic DNA

SEQ ID NO: 25130 - DNA, 50 bp, Escherichia coli; identical to SEQ ID NO: 5750
  source 1..50: mol_type = genomic DNA

SEQ ID NO: 25131 - protein, 507 aa, Escherichia coli
MKRVISYIRFSSEKQAKGDSLRRQSKMVTDWLKAHPEYYLDQDLSFRDLGVSGFTGKHLKGGLGDFLTAIEKGLVKAGDTLLIESLDRLSRQAVDRASELLRNILRSGVDVVTLSDGEHYTRESLKDPLSLIKSILIMQRAHEESLRKSERIQAAWNRKKELISEGIKVSRRCPAWLRLNDDRKSFSVIPDKVETVKRCFQLRLEGKSIWEIVRTLNAEGHRSMNQYKPGKFGQTSVQDLLKNRSVIGYFTPKGCEEIAGYYPSVIDETTFYKVQQLSHSRYGRRSVSGKPLSVNLFRGVIRCSECGHALIITGFSDTRSGIYRCPLRNENRCSAKGLSRKQTDGTLLALLSRLDRFDSDTTNTIDTLKLHREHISSNIEKLVQLSLEIEDLNAITSKLKQLKGELSQVDADIEKETQRLKSIDVGCLSDCDLTTKAGRIEAQLIIKSAVKEVVLNTAKRRCKVTFHNGGAITLPITENPSEDVTEAIQSLSEVTERGLIDVDVVEI

SEQ ID NO: 25132 - DNA, 50 bp, Escherichia coli; identical to SEQ ID NO: 24522
  source 1..50: mol_type = genomic DNA

SEQ ID NO: 25133 - DNA, 40 bp, Escherichia coli; identical to SEQ ID NO: 5188
  source 1..40: mol_type = genomic DNA

SEQ ID NO: 25134 - DNA, 40 bp, Escherichia coli; identical to SEQ ID NO: 5749
  source 1..40: mol_type = genomic DNA

SEQ ID NO: 25135 - DNA, 50 bp, Escherichia coli; identical to SEQ ID NO: 5750
  source 1..50: mol_type = genomic DNA

SEQ ID NO: 25136 - protein, 507 aa, Escherichia coli
MKRVISYIRFSSEKQAKGDSLRRQSKMVTDWLKAHPEYYLDQDLSFRDLGVSGFTGKHLKGGLGDFLTAIEKGLVKAGDTLLIESLDRLSRQAVDRASELLRNILRSGVDVVTLSDGEHYTSESLKDPLALIKSILIMQRAHEESLRKSERIQAAWNAKKEAAKAGIKVSKRCPAWLKLNDDRKSFSVIPEKVETVKRCFQLRLEGKSIWEIVRTLNDEGHQTLNQYKAGKFGQTSVQDLLKNRSVIGYFTPKGCEEISGYYPAIIDETTFYKVQQLSHYRYGRKPVSDKPLSVNLFKGVIRCSECGHALIITGFSDTRNGIYRCPLRNENRCSAKGLSRKQTDGTLLALLSRLDRFDSDMTNTVDTLKLHREHISSNIEKLVQLSLEIEDLSAITSKLKQLKGELSQVDADIEKETQRLKSIDVGCLSDCDLTTKAGRIEAQLIIKSAVKEVVLNTAKRRCKVTFHNGRIIDLPITENPSEDVTEAIQSLSEVTERGLIDVDEVII

SEQ ID NO: 25137 - DNA, 50 bp, Escherichia coli; identical to SEQ ID NO: 24522
  source 1..50: mol_type = genomic DNA

SEQ ID NO: 25138 - DNA, 40 bp, Escherichia coli; identical to SEQ ID NO: 5188
  source 1..40: mol_type = genomic DNA

SEQ ID NO: 25139 - DNA, 40 bp, Escherichia coli; identical to SEQ ID NO: 5749
  source 1..40: mol_type = genomic DNA

SEQ ID NO: 25140 - DNA, 50 bp, Escherichia coli; identical to SEQ ID NO: 5750
  source 1..50: mol_type = genomic DNA

SEQ ID NO: 25141 - protein, 507 aa, Escherichia coli
MKRVISYIRFSSEKQAKGDSLRRQSKMVTDWLKAHPEYYLDESLTFRDLGVSGFTGKHLKGGLGDFLTAIEKGLVKAGDTLLIESLDRLSRQAVDRASELLRNILRSGVDVVTLSDGEHYTSESLKDPLALIKSILIMQRAHEESLRKSERIQAAWDAKKEAAKAGIKVSKRCPAWLKLNDDRKSFSVIPEKVETVKRCFQLRLEGKSIWEIVRTLNDECHQSMNQYKPGKFGQTSVQDLLKNRSVIGYFTPKGREEIAGYFPSIIHETDFYKVQQLSYARHGRKPASAKPLSVNLFKGVIRCSECGHALIITGFSDTRNGIYRCPLRNENRCSAKGLSRKQTDGTLLALLSRLDRFDSDTTNNIDTLKLHREHISSNIEKLVQLSLEIEDLNAITSKLKQLKGELSQVDADIEKETQRLKSIDVGCLSDCDLTTKAGRIEAQLIIKSAVKEVVLNTAKRRCKVTFHNGKIIDLPITENPSEDVTEAIQSLSEVTERGLIDVDVVAI

SEQ ID NO: 25142 - DNA, 50 bp, Escherichia coli; identical to SEQ ID NO: 24522
  source 1..50: mol_type = genomic DNA

SEQ ID NO: 25143 - DNA, 40 bp, Escherichia coli; identical to SEQ ID NO: 5188
  source 1..40: mol_type = genomic DNA

SEQ ID NO: 25144 - DNA, 40 bp, Escherichia coli; identical to SEQ ID NO: 5749
  source 1..40: mol_type = genomic DNA

SEQ ID NO: 25145 - DNA, 50 bp, Escherichia coli; identical to SEQ ID NO: 5750
  source 1..50: mol_type = genomic DNA

SEQ ID NO: 25146 - protein, 507 aa, Escherichia coli
MKRVISYIRFSSEKQAKGDSLRRQSKMVTDWLKAHPEYYLDQDLSFRDLGVSGFTGKHLKGGLGDFLTAIEKGLVKAGDTLLIESLDRLSRQAVDRASELLRNILRSGVDVVTLSDGEHYTSESLKDPLALIKSILIMQRAHEESLRKSERIQAAWDAKKEAAKAGIKVSKRCPAWLKLNDDRKSFSVIPEKVETVKRCFQLRLEGKSIWEIVRTLNDEGHQTLNQYKAGKFGQTSVQDLLKNRSVIGYFTPKGCEEISGYYPAIIDETTFYKVQQLSHYRYGRKPVSDKPLSVNLFKGVIRCSECGHALIITGFSDTRNGIYRCPLRNENRCSAKGLSRKQTDGTLLALLSRLDRFDSDMTNTVDTLKLHREHISSNIEKLVQLSLEIEDLSAITSKLKQLKGELSQVDADIEKETQRLKSIDVGCLSDCDLTTKAGRIEAQLIIKSAVKEVVLNTAKRRCKVTFHNGRIIDLPITENPSEDVTEAIQSLSEVTERGLIDVDEVII

SEQ ID NO: 25147 - DNA, 50 bp, Escherichia coli; identical to SEQ ID NO: 24522
  source 1..50: mol_type = genomic DNA

SEQ ID NO: 25148 - DNA, 40 bp, Escherichia coli; identical to SEQ ID NO: 5188
  source 1..40: mol_type = genomic DNA

SEQ ID NO: 25149 - DNA, 40 bp, Escherichia coli; identical to SEQ ID NO: 5749
  source 1..40: mol_type = genomic DNA

SEQ ID NO: 25150 - DNA, 50 bp, Escherichia coli; identical to SEQ ID NO: 5750
  source 1..50: mol_type = genomic DNA

SEQ ID NO: 25151 - protein, 507 aa, Escherichia coli
MKRVISYIRFSSEKQAKGDSLRRQSKMVTDWLKAHPEYYLDQDLSFRDLGVSGFTGKHLKGGLGDFLTAIEKGLVKAGDTLLIESLDRLSRQDIDIASELLRNILRSGVDVVTLSDGEHYTRESLRDPLALIKSILIMQRAHEESLRKAERIQAAWDAKKEAAKAGIKVSKRCPAWLKLNDDRKSFSVIPEKVETVKRCFQLRLEGKSIWEIVRTLNDEGHQSMSQYKPGSFGQSSVQDLLKNRSVIGYFTPKGCEEISGYYPAIIDETTFYKVQQLSHSRYGRKPVSAKPLSVNLFKGVIRCSECGHALIITGFSDTRNGIYRCPLRNENRCSAKGLSRKQTDGTLLALLSRLDRFDSDTTNIIDMLRLHREHVSSNIEKLVQLSLEIEDLSAITSKLRQLKGELSQVDADIEKETQRLKSIDVGCLSDCDLTTKAGRIEAQLIIKSAVKEVVLNTAKRRCKVTFHNGKVIDLSITENPSDNVTEAIQSLSEVTERGLIDVDVVAI

SEQ ID NO: 25152 - DNA, 50 bp, Escherichia coli; identical to SEQ ID NO: 24522
  source 1..50: mol_type = genomic DNA

SEQ ID NO: 25153 - DNA, 40 bp, Escherichia coli; identical to SEQ ID NO: 5188
  source 1..40: mol_type = genomic DNA

SEQ ID NO: 25154 - DNA, 40 bp, Escherichia coli; identical to SEQ ID NO: 5749
  source 1..40: mol_type = genomic DNA

SEQ ID NO: 25155 - DNA, 50 bp, Escherichia coli; identical to SEQ ID NO: 5750
  source 1..50: mol_type = genomic DNA

SEQ ID NO: 25156 - protein, 507 aa, Escherichia coli
MKRVISYIRFSSEKQSRGDSLRRQSKMVTDWLKAHPEYYLDQDLSFRDLGVSGFTGKHLKGGLGDFLTAIEKGLVKAGDTLLIESLDRLSRQDIDIASELLRNILRSGVDVVTLSDGEHYTRESLRDPLALIKSILIMQRAHEESLRKAERIQAAWDAKKEAAKAGIKVSKRCPAWLKLNDDRKSFSVIPEKVETVKRCFQLRLEGKSIWAIVKALNDEGHQTLNQYKAGKFGQTSVQDLLKNRSVIGYFTPKGREEIAGYYPAIIDETTFYKVQQLSHYRYGRKPVSDKPLSVNLFKGVIRCSECGHALIITGFSDTRNGIYRCPLRNENRCSAKGLSRKQTDGTLLTLLSRLDRFDSDTTNTIDTLKLHREHISSNIEKLVQLSLEIEDLSAITIKLKQLKGELSQVDADIEKETQRLKSIDVGCLSDCDLTTKAGRIEAQLIIKSAVKEVVLNAAKRRCKVTFHNSKSITLPITENPSEDVTEAIQSLSEVTERGLIDVDEVII

SEQ ID NO: 25157 - DNA, 50 bp, Escherichia coli; identical to SEQ ID NO: 24522
  source 1..50: mol_type = genomic DNA

SEQ ID NO: 25158 - DNA, 40 bp, Escherichia coli; identical to SEQ ID NO: 5188
  source 1..40: mol_type = genomic DNA

SEQ ID NO: 25159 - DNA, 40 bp, Escherichia coli; identical to SEQ ID NO: 5749
  source 1..40: mol_type = genomic DNA

SEQ ID NO: 25160 - DNA, 50 bp, Escherichia coli; identical to SEQ ID NO: 5750
  source 1..50: mol_type = genomic DNA

SEQ ID NO: 25161 - protein, 507 aa, Escherichia coli
MKRVISYIRFSSEKQAKGDSLRRQSKMVTDWLKAHPEYYLDQDLSFRDLGVSGFTGKHLKGGLGDFLTAIEKGLVKAGDTLLIESLDRLSRQDIDIASELLRNILRSGVDVVTLSDGEHYTRESLRDPLALIKSILIMQRAHEESLRKAERIQAAWDAKKEAAKAGIKVSKRCPAWLKLNDDRKSFSVIPEKVETVKRCFQLRLEGKSIWEIVRTLNDEGHQSMSQYKPGSFGQSSVQDLLKNRSVIGYFTPKGCEEIAGYYPAIIDETTFYKVQQLSYARYGRKPASDKPLSVNLFKGVIRCSECGHALIITGFSDTRSGIYRCPLRNENRCSAKGLSRKQTDGTLLALLSRLDRFDSDTTNTIDTLKLHREHISSNIEKLVQLSLEIEDLSAITSKLKQLKGELSQVDADIEKETQRLKSIDVGCLSDCDLTTKAGRIEAQLIIKSAVKEVVLNTAKRRCKVTFHNSKSITLSITENPSEDVTEAIQSLSEVTERGLIDVDEVII

SEQ ID NO: 25162 - DNA, 50 bp, Escherichia coli; identical to SEQ ID NO: 24522
  source 1..50: mol_type = genomic DNA

SEQ ID NO: 25163 - DNA, 40 bp, Escherichia coli; identical to SEQ ID NO: 5188
  source 1..40: mol_type = genomic DNA

SEQ ID NO: 25164 - DNA, 40 bp, Escherichia coli; identical to SEQ ID NO: 5749
  source 1..40: mol_type = genomic DNA

SEQ ID NO: 25165 - DNA, 50 bp, Escherichia coli; identical to SEQ ID NO: 5750
  source 1..50: mol_type = genomic DNA

SEQ ID NO: 25166 - protein, 507 aa, Escherichia coli
MKRVISYIRFSSEKQAKGDSLRRQSKMVTDWLKAHPEYYLDESLTFRDLGVSGFTGKHLKGGLGDFLTAIEKGLVKAGDTLLIESLDRLSRQDVDRASELLRNILRSGVDVVTLSDGEHYTRESLKDPLSLIKSILIMQRAHEESLRKSERIQAAWDAKKEAAKAGIKISRRCPAWLKLNDDRKSFSVIPEKVETVKRCFQLRLEGKSIWEIVRTLNDEGHQSMSQYKPGKFGQTSVQDLLKNRSVIGYFTPKGCEEISGYYPAIIDETTFYKVQQLSYARHGRKPASDKPLSVNLFKGVIRCSECGHALIITGFSDTRNGIYRCPLRNENRCSAKGLSRKQTDGTLLTLLSRLDRFDSDTTNTIDTLKLHREHISSNIEKLVQLSLEIEDLSAITSKLKQLKNELSQVDADIEKETQRLKSIDVGCLSDCDLTTKAGRIEAQLIIKSAVKEVVLNTAKRRCKVTFHNGKAITLPITENPSDNVTEAIQSLSEVTERGLIDVDVVEI

SEQ ID NO: 25167 - DNA, 50 bp, Escherichia coli; identical to SEQ ID NO: 24522
  source 1..50: mol_type = genomic DNA

SEQ ID NO: 25168 - DNA, 40 bp, Escherichia coli; identical to SEQ ID NO: 5188
  source 1..40: mol_type = genomic DNA

SEQ ID NO: 25169 - DNA, 40 bp, Escherichia coli; identical to SEQ ID NO: 5749
  source 1..40: mol_type = genomic DNA

SEQ ID NO: 25170 - DNA, 50 bp, Escherichia coli; identical to SEQ ID NO: 5750
  source 1..50: mol_type = genomic DNA

SEQ ID NO: 25171 - protein, 507 aa, Escherichia coli
MKRVISYIRFSSEKQAKGDSLRRQSKMVTDWLKAHPEYYLDESLTFRDLGVSGFTGKHLKGGLGDFLTAIEKGLVKAGDTLLIESLDRLSRQDVDQASELLRNILRSGVDVVTLSDGEHYTSESLKDPLALIKSILIMQRAHEESLRKSERIQAAWDAKKEAAKAGIKVSKRCPAWLKLNDDRKSFSVIPEKVETVKRCFQLRLEGKSIWEIVRTLNDEGHQTLNQYKAGKFGQTSVQDLLKNRSVIGYFTPKGCEEISGYYPAIIDETTFYKVQQLSYARYGRKPASDKPMAVNLFKGVIRCSECGHALIITGFSDTRNGIYRCPLRNENRCSAKGLSRKQTDGTLLTLLSRLDRFDSDTTNTIDTLKLHREHISSNIEKLVQLSLEIEDLSAITIKLKQLKGELSQVDADIEKETQRLKSIDVGCLSDCDLTTKAGRIEAQLIIKSAVKEVVLNAAKRSCKVTFHNSKSITLPITENPSEDVTEAIQSLSEVTEKGLIDVDVVEI

SEQ ID NO: 25172 - DNA, 50 bp, Escherichia coli; identical to SEQ ID NO: 24522
  source 1..50: mol_type = genomic DNA

SEQ ID NO: 25173 - DNA, 40 bp, Escherichia coli; identical to SEQ ID NO: 5188
  source 1..40: mol_type = genomic DNA

SEQ ID NO: 25174 - DNA, 40 bp, Escherichia coli; identical to SEQ ID NO: 5749
  source 1..40: mol_type = genomic DNA

SEQ ID NO: 25175 - DNA, 50 bp, Escherichia coli; identical to SEQ ID NO: 5750
  source 1..50: mol_type = genomic DNA

SEQ ID NO: 25176 - protein, 507 aa, Escherichia coli
MKRVISYIRFSSEKQAKGDSLRRQSKMVTDWLKAHPEYYLDESLTFRDLGVSGFTGKHLKGGLGDFLTAIEKGLVKAGDTLLIESLDRLSRQAVDRASELLRNILRSGVDVVTLSDGEHYTSESLKDPLALIKSILIMQRAHEESLRKSERIQAAWDAKKEAAKAGIKVSKRCPAWLKLNDDRKSFSVIPEKVETVKRCFQLRLEGKSIWEIVRTLNDECHQSMNQYKPGKFGQTSVQDLLKNRSVIGYFTPKGCGEIAGYYPSVIDETTFYKVQQLSHSRYGRKPASDKPLSVNLFKGVIRCSECGHALIITGFSDTRNGIYRCPLRNENRCSAKGLSRKQTDGTLLTLLSRLDRFDSDTTNTIDTLKLHREHLSSNIEKLVQLSLEIEDLNAITSKLKQLKGELSQVDADIEKETQRLKSIDVGCLSDCDLTTKAGRIEAQLIIKSAVKEVVLNTAKRRCKVTFHNSKVIDLSITENPSEDVTEAIQSLSEVTERGLIDVDEVII

SEQ ID NO: 25177 - DNA, 50 bp, Escherichia coli; identical to SEQ ID NO: 24522
  source 1..50: mol_type = genomic DNA

SEQ ID NO: 25178 - DNA, 40 bp, Escherichia coli; identical to SEQ ID NO: 5188
  source 1..40: mol_type = genomic DNA

SEQ ID NO: 25179 - DNA, 40 bp, Escherichia coli; identical to SEQ ID NO: 5749
  source 1..40: mol_type = genomic DNA

SEQ ID NO: 25180 - DNA, 50 bp, Escherichia coli; identical to SEQ ID NO: 5750
  source 1..50: mol_type = genomic DNA

SEQ ID NO: 25181 - protein, 507 aa, Escherichia coli
MKRVISYIRFSSERQAKGDSLRRQSKMVTDWLKAHPEYYLDQDLSFRDLGVSGFTGKHLKGGLGDFLTAIEKGLVKAGDTLLIESLDRLSRQDIDIASELLRRILRAGVDVVTLSDGEHYTKESLKDPLALIKSILIMQRAHEESLRKAERIQAAWDAKKEAAKAGIKVSKRCPAWLKLNDDRKSFSVIPEKVETVKRCFQLRLEGKSIWEIVRTLNDEGRQTLNQHKAGSFGQSSVQDLLKNRSVIGYFTPKGCEEIAGYYPAIIDETTFYKVQQLSYARYGRKPASDKPLSVNLFKGVIRCSECGHALIITGFSDTRNGIYRCPLRNENRCSAKGLSRKQTDGTLLALLSRLDRFDSDMTNTIDTLKLHREHISSNIEKLVQLSLEIEDLNAITNKLKQLKNELSQVDADIEKETQRLKSIDVGCLSDCDLTTKAGRIEAQLIIKSAVKEVVLNTAKRRCKVTFHNGRAITLPITENPSEDVTEAIQSLSEVTERGLIDVDEVII

SEQ ID NO: 25182 - DNA, 50 bp, Escherichia coli; identical to SEQ ID NO: 24522
  source 1..50: mol_type = genomic DNA

SEQ ID NO: 25183 - DNA, 40 bp, Escherichia coli; identical to SEQ ID NO: 5188
  source 1..40: mol_type = genomic DNA

SEQ ID NO: 25184 - DNA, 40 bp, Escherichia coli; identical to SEQ ID NO: 5749
  source 1..40: mol_type = genomic DNA

SEQ ID NO: 25185 - DNA, 50 bp, Escherichia coli; identical to SEQ ID NO: 5750
  source 1..50: mol_type = genomic DNA

SEQ ID NO: 25186 - protein, 507 aa, Escherichia coli
MKRVISYIRFSSEKQAKGDSLRRQSKMVTDWLKAHPEYYLDQDLSFRDLGVSGFTGKHLKGGLGDFLTAIEKGLVKAGDTLLIESLDRLSRQDIDIASELLRNILRSGVDVVTLSDGEHYTRESLRDPLSLIKSILIMQRAHEESLRKSERIQAAWNRKKELISEGIKISKRCPAWLKLNDDRKSFSVIPEKVETVKRCFQLRLEGKSIWEIVRTLNDEGHQSMSQYKPGSFGQSSVQDLLKNRSVIGYFTPKGCEEISGYYPAIIDETTFYKVQQLSYARYGRKPASDKPLSVNLFKGVIRCSECGHALIITGFSDTRNGIYRCPLRNENRCSTKGLSRKQTDGTLLALLSRLDRFDSDTTNTIDTLKLHREHISSNIEKLVQISLEIEDLNAITNKLKQLKNELSQVDADIEKETQRLKSIDTGSLSDCDLSTKAGRIEAQLIIRSAVKEVVLNTAKRRCKVTFHNGKSITLPITENPSEDVTEAIQSLSEVTERGLIDVDVVEI

SEQ ID NO: 25187 - DNA, 50 bp, Escherichia coli; identical to SEQ ID NO: 24522
  source 1..50: mol_type = genomic DNA

SEQ ID NO: 25188 - DNA, 40 bp, Escherichia coli; identical to SEQ ID NO: 5188
  source 1..40: mol_type = genomic DNA

SEQ ID NO: 25189 - DNA, 40 bp, Escherichia coli; identical to SEQ ID NO: 5749
  source 1..40: mol_type = genomic DNA

SEQ ID NO: 25190 - DNA, 50 bp, Escherichia coli; identical to SEQ ID NO: 5750
  source 1..50: mol_type = genomic DNA

SEQ ID NO: 25191 - protein, 507 aa, Escherichia coli
MKRVISYIRFSSEKQAKGDSLRRQSKMVTDWLKAHPEYYLDESLTFRDLGVSGFTGKHLKGGLGDFLTAIEKGLVKAGDTLLIESLDRLSRQAVDQASELLRNILRSGVDVVTLSDGEHYTRESLRDPLALIKSILIMQRAHEESLRKAERIQAAWDAKKEAAKAGIKVSKRCPAWLKLNDDRKSFSVIPEKVETVKRCFQLRLEGKSIWEIVRTLNDEGHQSMSQYKPGSFGQSSVQDLLKNRSVIGYFTPKGREEIAGYFPPIIPETDFYKVQQLSYSRYGRKPASDKPLSVNLFKGVIRCSECGHALIITGFSDTRNGIYRCPLRNENRCSAKGLSRKQTDGTLLTLLSRIDRFDSDMTNTIDTLKLHREHISSNIEKLVQLSLEIEDLSAITSKLKQLKGELSQVDADIEKETQRLKSIDVGCLSDCDLTTKAGRIEAQLIIKSAVKEVVLNTAKRRCKVTFHNGKVIDLSITENPSEDVTEAIQSLSEVTERGLIDVDVVEI

SEQ ID NO: 25192 - DNA, 50 bp, Escherichia coli; identical to SEQ ID NO: 24522
  source 1..50: mol_type = genomic DNA

SEQ ID NO: 25193 - DNA, 40 bp, Escherichia coli; identical to SEQ ID NO: 5188
  source 1..40: mol_type = genomic DNA

SEQ ID NO: 25194 - DNA, 40 bp, Escherichia coli; identical to SEQ ID NO: 5749
  source 1..40: mol_type = genomic DNA

SEQ ID NO: 25195 - DNA, 50 bp, Escherichia coli; identical to SEQ ID NO: 5750
  source 1..50: mol_type = genomic DNA

SEQ ID NO: 25196 - protein, 507 aa, Escherichia coli
MKRVISYIRFSSEKQAKGDSLRRQSKMVTDWLKAHPEYYLDQDLSFRDLGVSGFTGKHLKGGLGDFLTAIEKGLVKAGDTLLIESLDRLSRQDIDIASELLRNILRSGVDVVTLSDGEHYTKESLRDPLSLIKSILIMQRAHEESLRKAERIQAAWDAKKEAAKAGIKVSKRCPAWLKLNDDRKSFSVIPEKVETVKRCFQLRLEGKSIWEIVRTLNDEGHQSMSQYKPGKFGQTSVQDLLKNRSVIGYFTPKGCEEISGYYPAIIDETTFYKVQQLSHYRYGRKPASDKPLSVNLFKGVIRCSECGHALIITGFSDTRSGIYRCPLRNENRCSAKGLSRKQTDGTLLTLLSRLDRFDSDTTNTIDTLKLHREHISSNIEKLVQLSLEIEDLSAITSKLKQLKNELSQVDADIEKETQRLKSIDVGCLSDCDLTTKAGRIEAQLIIKSAVKEVVLNTAKRRCKVTFHNGRAITLPITENPSEDVTEAIQSLSEVTERGLIDVDEVII

SEQ ID NO: 25197 - DNA, 50 bp, Escherichia coli; identical to SEQ ID NO: 24522
  source 1..50: mol_type = genomic DNA

SEQ ID NO: 25198 - DNA, 40 bp, Escherichia coli; identical to SEQ ID NO: 5188
  source 1..40: mol_type = genomic DNA

SEQ ID NO: 25199 - DNA, 40 bp, Escherichia coli; identical to SEQ ID NO: 5749
  source 1..40: mol_type = genomic DNA

SEQ ID NO: 25200 - DNA, 50 bp, Escherichia coli; identical to SEQ ID NO: 5750
  source 1..50: mol_type = genomic DNA

SEQ ID NO: 25201 - protein, 507 aa, Escherichia coli
MKRVISYIRFSSEKQAKGDSLRRQSKMVTDWLKAHPEYYLDESLTFRDLGVSGFTGKHLKGGLGDFLTAIEKGLVKAGDTLLIESLDRLSRQAVDQASELLRNILRSGVDVVTLSDGEHYTRESLRDPLALIKSILIMQRAHEESLRKAERIQAAWDAKKEAAKAGIKVSKRCPAWLKLNDDRKSFSVIPEKVETVKRCFQLRLEGKSIWEIVRTLNDEGHQSMSQYKPGSFGQSSVQDLLKNRSVIGYFTPKGREEIAGYFPPIIPETDFYKVQQLSYSRYGRKPASDKPLSVNLFKGVIRCSECGHALIITGFSDTRNGIYRCPLRNENRCSAKGLSRKQTDGTLLALLSRLDRFDSDTTNIIDMLRLHREHVSSNIEKLVQLSLEIEDLNAITSKLKQLKGELSQVDADIEKETQRLKSIDVGCLSDCDLTTKAGRIEAQLIIKSAVKEVVLNTAKRRCKVTFHNGKVIDLPITENPSEDVTEAIQSLSEVTERGLIDVDVVEI

SEQ ID NO: 25202 - DNA, 50 bp, Escherichia coli; identical to SEQ ID NO: 24522
  source 1..50: mol_type = genomic DNA

SEQ ID NO: 25203 - DNA, 40 bp, Escherichia coli; identical to SEQ ID NO: 5188
  source 1..40: mol_type = genomic DNA

SEQ ID NO: 25204 - DNA, 40 bp, Escherichia coli; identical to SEQ ID NO: 5749
  source 1..40: mol_type = genomic DNA

SEQ ID NO: 25205 - DNA, 50 bp, Escherichia coli; identical to SEQ ID NO: 5750
  source 1..50: mol_type = genomic DNA

SEQ ID NO: 25206 - protein, 507 aa, Escherichia coli
MKRVISYIRFSSEKQAKGDSLRRQSKMVTDWLKAHPEYYLDQDLSFRDLGVSGFTGKHLKGGLGDFLTAIEKGLVKAGDTLLIESLDRLSRQAVDRASELLRNILRSGVDVVTLSDGEHYTRESLKDPLSLIKSILIMQRAHEESLRKSERIQAAWNRKKELISEGIKVSRRCPAWLRLNDDRKSFSVIPDKVETVKRCFQLRLEGKSIWEIVRTLNAEGHQTLNQYKAGKFGQTSVQDLLKNRSVIGYFTPKGREEISGYYPAIIDETTFYKVQQLSYARYGRKPASDKPLSVNLFKGVIRCSECGHALIITGFSDTRSGIYRCPLRNENRCSAKGLSRKQTDGTLLALLSRLDRFDSDTTNTIDTLKLHREHISSNIEKLVQLSLEIEDLSAITIKLRQLKGELSQVDADIEKETQRLKSIDVGCLSDCDLTTKAGRIEAQLIIKSAVKEVVLNTAKRRCKVTFHNGKVIDLPITENPSEDVTEAIQSLSEVTERGLLDVDEVII

SEQ ID NO: 25207 - DNA, 50 bp, Escherichia coli; identical to SEQ ID NO: 24522
  source 1..50: mol_type = genomic DNA

SEQ ID NO: 25208 - DNA, 40 bp, Escherichia coli; identical to SEQ ID NO: 5188
  source 1..40: mol_type = genomic DNA

SEQ ID NO: 25209 - DNA, 40 bp, Escherichia coli; identical to SEQ ID NO: 5749
  source 1..40: mol_type = genomic DNA

SEQ ID NO: 25210 - DNA, 50 bp, Escherichia coli; identical to SEQ ID NO: 5750
  source 1..50: mol_type = genomic DNA

SEQ ID NO: 25211 - protein, 507 aa, Escherichia coli
MKRVISYIRFSSEKQAKGDSLRRQSKMVTDWLKAHPEYYLDQDLSFRDLGVSGFTGKHLKGGLGDFLTAIEKGLVKAGDTLLIESLDRLSRQAVDRASELLRNILRSGVDVVTLSDGEHYTSESLKDPLALIKSILIMQRAHEESLRKSERIQAAWDAKKEAAKAGIKISKRCPAWLKLNDDRKSFSVIPEKVETVKRCFQLRLEGKSIWEIVRTMNAEGHQTLHQHKPGSFGQSSVQDLLKNRSVIGYFTPKGCEEIAGYYPSVIDETTFYKVQQLSHSRYGRKPASAKPLSVNLFKGVIRCSECGHALIITGFSDTRNGIYRCPLRNENRCSAKGLSRKQTDGTLLTLLSRLDRFDSDTTNVIDMLRLHREHISSNIEKLVQLSLEIEDLSAITIKLKQLKGELSQVDADIEKETQRLKSIDVGCLSDCDLTTKAGRIEAQLIIRSAVKEVVLNTAKRRCKVTFHNGKVIDLPITENPSEDVTEAIQSLSEVTAKGLIDVDVVEI

SEQ ID NO: 25212 - DNA, 50 bp, Escherichia coli; identical to SEQ ID NO: 24522
  source 1..50: mol_type = genomic DNA

SEQ ID NO: 25213 - DNA, 40 bp, Escherichia coli; identical to SEQ ID NO: 5188
  source 1..40: mol_type = genomic DNA

SEQ ID NO: 25214 - DNA, 40 bp, Escherichia coli; identical to SEQ ID NO: 5749
  source 1..40: mol_type = genomic DNA

SEQ ID NO: 25215 - DNA, 50 bp, Escherichia coli; identical to SEQ ID NO: 5750
  source 1..50: mol_type = genomic DNA

SEQ ID NO: 25216 - protein, 507 aa, Escherichia coli
MKRVISYIRFSSEKQAKGDSLRRQSKMVTDWLKAHPEYYLDQDLSFRDLGVSGFTGKHLKGGLGDFLTAIEKGLVKAGDTLLIESLDRLSRQDVDQASELLRNILRSGVDVVTLSDGEHYTSESLKDPLALIKSILIMQRAHEESLRKSERIQAAWNRKKELISEGIKVSKRCPAWLKLNDDRKSFSVIPEKVETVKRCFQLRLEGKSIWEIVRTLNAEGHQTLNQYKAGKFGQTSVQDLLKNRSVIGYFTPKGCEEISGYYPAIIDETTFYKVQQLSHSRYGKRSVSDKPLSVNLFKGVIRCSECGHALIITGFSDTRNGIYRCPLRNENRCSAKGLSRKQTDGTLLTLLSRLDRFDSDTTNTIDTLKLHREHISSNIEKLVQLSLEIEDLNAITSKLKQLKGELSQVDADIEKETQRLKSIDVGCLSDCDLTTKAGRIEAQLIIKSAVKEVVLNTAKRRCKVTFHNGKTITLSITETPSDNVTEAIQSLSEVTERGLIDVDEVII

SEQ ID NO: 25217 - DNA, 50 bp, Escherichia coli; identical to SEQ ID NO: 24522
  source 1..50: mol_type = genomic DNA

SEQ ID NO: 25218 - DNA, 40 bp, Escherichia coli; identical to SEQ ID NO: 5188
  source 1..40: mol_type = genomic DNA

SEQ ID NO: 25219 - DNA, 40 bp, Escherichia coli; identical to SEQ ID NO: 5749
  source 1..40: mol_type = genomic DNA

SEQ ID NO: 25220 - DNA, 50 bp, Escherichia coli; identical to SEQ ID NO: 5750
  source 1..50: mol_type = genomic DNA

SEQ ID NO: 25221 - protein, 507 aa, Escherichia coli
MKRVISYIRFSSEKQAKGDSLRRQSKMVTDWLKAHPEYYLDQDLSFRDLGVSGFTGKHLKGGLGDFLTAIEKGLVKAGDTLLIESLDRLSRQDIDIASELLRNILRSGVDVVTLSDGEHYTRESLRDPLALIKSILIMQRAHEESLRKAERIQAAWDAKKEAAKAGIKVSKRCPAWLKLNDDRKSFSVIPEKVETVKRCFQLRLEGKSIWEIVRTLNAEGHQTLNQYKAGKFGQTSVQDLLKNRSVIGYFTPKGCEEISGYYPAIIDETTFYKVQQLSHYRYGRKPVSDKPLSVNLFKGVIRCSECGHALIITGFSDTRNGIYRCPLRNENRCSAKGLSRKQTDGTLLTLLSRLDRFDSDMTNTLDTLKLHREHISSNIEKLVQLSLEIEDLSAITIKLKQLKGELSQVDADIEKETQRLKSIDVGCLSDCDLTTKAGRIEAQLIIKSAVKEVVLNTAKRRCKVTFHNGRAITLPITENPSEDVTEAIQSLSEVTERGLIDVDEVII

SEQ ID NO: 25222 - DNA, 50 bp, Escherichia coli; identical to SEQ ID NO: 24522
  source 1..50: mol_type = genomic DNA

SEQ ID NO: 25223 - DNA, 40 bp, Escherichia coli; identical to SEQ ID NO: 5188
  source 1..40: mol_type = genomic DNA

SEQ ID NO: 25224 - DNA, 40 bp, Escherichia coli; identical to SEQ ID NO: 5749
  source 1..40: mol_type = genomic DNA

SEQ ID NO: 25225 - DNA, 50 bp, Escherichia coli; identical to SEQ ID NO: 5750
  source 1..50: mol_type = genomic DNA

SEQ ID NO: 25226 - protein, 507 aa, Escherichia coli
MKRVISYIRFSSEKQAKGDSLRRQSKMVTDWLKAHPEYYLDQDLSFRDLGVSGFTGKHLKGGLGDFLTAIEKGLVKAGDTLLIESLDRLSRQDIDIASELLRNILRSGVDVVTLSDGEHYTKESLRDPLSLIKSILIMQRAHEESLRKAERIQAAWDAKKEAAKAGIKVSKRCPAWLKLNDDRKSFSVIPEKVETVKRCFQLRLEGKSIWEIVRTLNDEGHQSMSQYKPGKFGQTSVQDLLKNRSVIGYFTPKGCEEISGYYPAIIDETTFYKVQQLSHYRYGRKPVSDKPLSVNLFKGVIRCSECGHALIITGFSDTRNGIYRCPLRNENRCSAKGLSRKQTDGTLLTLLSRLDRFDSDTTNTIDTLKLHREHISSNIEKLVQLSLEIEDLSAITSKLKQLKNELSQVDADIEKETQRLKSIDVGCLSDCDLTTKAGRIEAQLIIKSAVKEVVLNTAKRRCKVTFHNGRAITLPITENPSEDVTEAIQSLSEVTERGLIDVDEVII

SEQ ID NO: 25227 - DNA, 50 bp, Escherichia coli; identical to SEQ ID NO: 24522
  source 1..50: mol_type = genomic DNA

SEQ ID NO: 25228 - DNA, 40 bp, Escherichia coli; identical to SEQ ID NO: 5188
  source 1..40: mol_type = genomic DNA

SEQ ID NO: 25229 - DNA, 40 bp, Escherichia coli; identical to SEQ ID NO: 5749
  source 1..40: mol_type = genomic DNA

SEQ ID NO: 25230 - DNA, 50 bp, Escherichia coli; identical to SEQ ID NO: 5750
  source 1..50: mol_type = genomic DNA

SEQ ID NO: 25231 - protein, 507 aa, Escherichia coli
MKRVISYIRFSSEKQSRGDSLRRQSKMVTDWLKAHPEYHLDQDLSFRDLGVSGFTGKHLKGGLGDFLTAIEKGLVKAGDTLLIESLDRLSRQDVDQASELLRNILRSGVDVVTLSDGEHYTSESLKDPLALIKSILIMQRAHEESLRKSERIQAAWNRKKELISEGIKVSKRCPAWLRLNDDRKSFSVIPEKVETVKRCFQLRLEGKSIWEIVRTLNDEGHQSMSQYKPGKFGQTSVQDLLKNRSVIGYFTPKGCEEISGYYPAIIDETTFYKVQQLSHYRYGRKPVSDKPLSVNLFKGVIRCSECGHALIITGFSDTRSGIYRCPLRNENRCSAKGLSRKQTDGTLLTLLSRLDRFDSDTTNIIDMLRLHREHISSNIEKLVQLSLEIEDLNAITSKLKQLKGELSQVDADIEKETQRLKSIDVGCLSDCDLTTKAGRIEAQLIIKSAVKEVVLNTAKRRCKVTFHNGRAITLPITENPSEDVTEAIQSLSEVTERGLIDVDEVII

SEQ ID NO: 25232 - DNA, 50 bp, Escherichia coli; identical to SEQ ID NO: 24522
  source 1..50: mol_type = genomic DNA

SEQ ID NO: 25233 - DNA, 40 bp, Escherichia coli; identical to SEQ ID NO: 5188
  source 1..40: mol_type = genomic DNA

SEQ ID NO: 25234 - DNA, 40 bp, Escherichia coli; identical to SEQ ID NO: 5749
  source 1..40: mol_type = genomic DNA

SEQ ID NO: 25235 - DNA, 50 bp, Escherichia coli; identical to SEQ ID NO: 5750
  source 1..50: mol_type = genomic DNA

SEQ ID NO: 25236 - protein, 507 aa, Escherichia coli
MKRVISYIRFSSEKQAKGDSLRRQSKMVTDWLKAHPEYYLDQDLSFRDLGVSGFTGKHLKGGLGDFLTAIEKGLVKAGDTLLIESLDRLSRQAVDRASELLRNILRSGVDVVTLSDGEHYTSESLKDPLALIKSILIMQRAHEESLRKSERIQAAWDAKKEAAKAGIKVSKRCPAWLKLNDDRKSFSVIPEKVETVKRCFQLRLEGKSIWEIVRTLNDEGHRSMNQYKPGKFGQTSVQDLLKNRSVIGYFTPKGCEEISGYYPAIIDETTFYKVQQLSHYRYGRKPVSDKPLSVNLFKGVIRCSECGHALIITGFSDTRNGIYRCPLRNENRCSAKGLSRKQTDGTLLALLSRLDRFDSDTTNIINTLKLHREHISSNIEKLVQLSLEIEDLSAITSKLKQLKNELSQVDADIEKETQRLKSIDVGCLSDCDLTTKAGRIEAQLIIKSAVKEVVLNTAKRRCKVTFHNGKSITLPITENPSEDVTEAIQSLSEVTERGLIDVDEVII

SEQ ID NO: 25237 - DNA, 50 bp, Escherichia coli; identical to SEQ ID NO: 24522
  source 1..50: mol_type = genomic DNA

SEQ ID NO: 25238 - DNA, 40 bp, Escherichia coli; identical to SEQ ID NO: 5188
  source 1..40: mol_type = genomic DNA

SEQ ID NO: 25239 - DNA, 40 bp, Escherichia coli; identical to SEQ ID NO: 5749
  source 1..40: mol_type = genomic DNA

SEQ ID NO: 25240 - DNA, 50 bp, Escherichia coli; identical to SEQ ID NO: 5750
  source 1..50: mol_type = genomic DNA

SEQ ID NO: 25241 - protein, 507 aa, Escherichia coli
MKRVISYIRFSSEKQAKGDSLRRQSKMVTDWLKAHPEYYLDQDLSFRDLGVSGFTGKHLKGGLGDFLTAIEKGLVKAGDTLLIESLDRLSRQAVDRASELLRNILRSGVDVVTLSDGEHYTSESLKDPLALIKSILIMQRAHEESLRKSERIQAAWNRKKELISEGIKISKRCPAWLKLNDDRKSFSVIPEKVETVKRCFQLRLEGKSIWEIVRTMNAEGHQTLHQHKPGSFGQSSVQDLLKNRSVIGYFTPKGCEEISGYYPAIIDETTFYKVQQLSYARHGRKPASAKPLSVNLFKGVIRCSECGHALIITGFSDTRSGIYRCPLRNENRCSAKGLSRKQTDGTLLALLSRLDRFDSDMTNTVDTLKLHREHISSNIEKLVQLSLEIEDLNAITSKLKQLKGELSQVDADIEKETQRLKSIDVGCLSDCDLTTKAGRIEAQLIIKSAVKEVVLNTAKRRCKVTFHNGRAITLPITENPSEDVTEAIQSLSEVTERGLIGVDEVII

SEQ ID NO: 25242 - DNA, 50 bp, Escherichia coli; identical to SEQ ID NO: 24522
  source 1..50: mol_type = genomic DNA

SEQ ID NO: 25243 - DNA, 40 bp, Escherichia coli; identical to SEQ ID NO: 5188
  source 1..40: mol_type = genomic DNA

SEQ ID NO: 25244 - DNA, 40 bp, Escherichia coli; identical to SEQ ID NO: 5749
  source 1..40: mol_type = genomic DNA

SEQ ID NO: 25245 - DNA, 50 bp, Escherichia coli; identical to SEQ ID NO: 5750
  source 1..50: mol_type = genomic DNA

SEQ ID NO: 25246 - protein, 507 aa, Escherichia coli
MKRVISYIRFSSEKQAKGDSLRRQSKMVTDWLKAHPEYYLDQDLSFRDLGVSGFTGKHLKGGLGDFLTAIEKGLVKAGDTLLIESLDRLSRQDIDIASELLRNILRSGVDVVTLSDGEHYTRESLRDPLALIKSILIMQRSHEESLRKSERIQAAWDAKKEAAKAGIKVSKRCPAWLRLNDDRKSFSVIPDKVETVKRCFQLRLEGKSIWEIVRTLNAEGHRSMNQYKPGKFGQTSVQDLLKNRSVIGYFTPKGCEEIAGYYPSVIDETTFYKVQQLSHSRYGRKPVSAKPLSVNLFKGVIRCSECGHALIITGFSDTRNGIYRCPLRNENRCSAKGLSRKQTDGTLLTLLSRLDRFDSDMTNTIDTLKLHREHISSNIEKLVQLSLEIEDLNAITNKLKQLKNELSQVDADIEKETQRLKSIDTGSLSDCDLSTKAGRIEAQLIIKSAVKEVVLNTAKRRCKVTFHNGKVIDLPITEDPSENVTEAIQSLSEVTERGLIDVDEVII

SEQ ID NO: 25247 - DNA, 50 bp, Escherichia coli; identical to SEQ ID NO: 24522
  source 1..50: mol_type = genomic DNA

SEQ ID NO: 25248 - DNA, 40 bp, Escherichia coli; identical to SEQ ID NO: 5188
  source 1..40: mol_type = genomic DNA

SEQ ID NO: 25249 - DNA, 40 bp, Escherichia coli; identical to SEQ ID NO: 5749
  source 1..40: mol_type = genomic DNA

SEQ ID NO: 25250 - DNA, 50 bp, Escherichia coli; identical to SEQ ID NO: 5750
  source 1..50: mol_type = genomic DNA

SEQ ID NO: 25251 - protein, 507 aa, Escherichia coli
MKRVISYIRFSSEKQAKGDSLRRQSKMVTDWLKAHPEYYLDQDLSFRDLGVSGFTGKHLKGGLGDFLTAIEKGLVKAGDTLLIESLDRLSRQDIDIASELLRNILRSGVDVVTLSDGEHYTRESLRDPLALIKSILIMQRAHEESLRKAERIQAAWDAKKEAAKAGIKVSKRCPAWLKLNDDRKSFSVIPEKVETVKRCFQLRLEGKSIWEIVRTLNDEGHQTLNQYKAGKFGQTSVQDLLKNRSVIGYFTPKGCEEISGYYPAIIDETTFYKVQQLSHYRYGRKPVSDKPLSVNLFKGVIRCSECGHALIITGFSDTRSGIYRCPLRNENRCNAKGLSRKQTDGTLLTLLSRLDRFDSDTTNTIDTLKLHREHISSNIEKLVQLSLEIEDLNAITSKLKQLKNELSQVDADIEKETQRLKSIDVGCLSDCDLTTKAGRIEAQLIIKSAVKEVVLNTAKRRCKVTFHNGRLIDLPITENPSEDVTEAIQSLSEVTERGLIDVDVVEI

SEQ ID NO: 25252 - DNA, 50 bp, Escherichia coli; identical to SEQ ID NO: 24522
  source 1..50: mol_type = genomic DNA

SEQ ID NO: 25253 - DNA, 40 bp, Escherichia coli; identical to SEQ ID NO: 5188
  source 1..40: mol_type = genomic DNA

SEQ ID NO: 25254 - DNA, 40 bp, Escherichia coli; identical to SEQ ID NO: 5749
  source 1..40: mol_type = genomic DNA

SEQ ID NO: 25255 - DNA, 50 bp, Escherichia coli; identical to SEQ ID NO: 5750
  source 1..50: mol_type = genomic DNA

SEQ ID NO: 25256 - protein, 507 aa, Escherichia coli
MKRVISYIRFSSEKQAKGDSLRRQSKMVTDWLKAHPEYYLDESLTFRDLGVSGFTGKHLKGGLGDFLTAIEKGLVKAGDTLLIESLDRLSRQAVDRASELLRNILRSGVDVVTLSDGEHYTSESLKDPLALIKSILIMQRAHEESLRKSERIQAAWDAKKEAAKAGIKVSKRCPAWLRLNDDRKSFSVIPEKVETVKRCFQLRLEGKSIWEIVRTLNAEGHRSMNQYKPGKFGQTSVQDLLKNRSVIGYFTPKGCEEISGYFPPIIPETDFYKVQQLSHSRYGKRSVSDKPLSVNLFKGVIRCSECGHALIITGFSDTRNGIYRCPLRNENRCSAKGLSRKQTDGTLLTLLSRLDRFDSNTTNTIDMLRLHREHISNNIEKLVQLSLEIEDLSAITIKLKQLKGELSQVDADIEKETQRLKSIDVGCLSDCDLTTKAGRIEAQLIIKSAVKEVVLNTAKRRCKVTFHNGRAITLPITENPSEDVTEAIQSLSEVTERGLIDVDVVEI

SEQ ID NO: 25257 - DNA, 50 bp, Escherichia coli; identical to SEQ ID NO: 24522
  source 1..50: mol_type = genomic DNA

SEQ ID NO: 25258 - DNA, 40 bp, Escherichia coli; identical to SEQ ID NO: 5188
  source 1..40: mol_type = genomic DNA

SEQ ID NO: 25259 - DNA, 40 bp, Escherichia coli; identical to SEQ ID NO: 5749
  source 1..40: mol_type = genomic DNA

SEQ ID NO: 25260 - DNA, 50 bp, Escherichia coli; identical to SEQ ID NO: 5750
  source 1..50: mol_type = genomic DNA

SEQ ID NO: 25261 - protein, 507 aa, Escherichia coli
MKRVISYIRFSSEKQAKGDSLRRQSKMVTDWLKAHPEYYLDQDLSFRDLGVSGFTGKHLKGGLGDFLTAIEKGLVKAGDTLLIESLDRLSRQDVDQASELLRNILRSGVDVVTLSDGEHYTKESLRDPLSLIKSILIMQRSHEESLRKSERIQAAWNRKKELISEGIKISKRCPAWLRLNDDRKSFSVIPEKVETVKRCFQLRLEGKSIWEIVRTLNAEGHQSMSQYKPGKFGQTSVQDLLKNRSVIGYFTPKGCEEISGYYPAIIDETTFYKVQQLSYARHGRKPASAKPLSVNLFKGVIRCSECGHALIITGFSDTRNGIYRCPLRNENRCSAKGLSRKQTDGTLLALLSRLDRFDSDTTNIIDTLKLHREHISSNIEKLVQLSLEIEDLSAITSKLKQLKGELSQVDADIEKETQRLKSIDVGCLSDCDLTTKAGRIEAQLIIKSAVKEVVLNTAKRRCKVTFHNGKSITLPITENPSDNVTEAIQSLSEVTERGLIDVDVVEI

SEQ ID NO: 25262 - DNA, 50 bp, Escherichia coli; identical to SEQ ID NO: 24522
  source 1..50: mol_type = genomic DNA

SEQ ID NO: 25263 - DNA, 40 bp, Escherichia coli; identical to SEQ ID NO: 5188
  source 1..40: mol_type = genomic DNA

SEQ ID NO: 25264 - DNA, 40 bp, Escherichia coli; identical to SEQ ID NO: 5749
  source 1..40: mol_type = genomic DNA

SEQ ID NO: 25265 - DNA, 50 bp, Escherichia coli; identical to SEQ ID NO: 5750
  source 1..50: mol_type = genomic DNA

SEQ ID NO: 25266 - protein, 507 aa, Escherichia coli
MKRVISYIRFSSEKQSRGDSLRRQSKMVTDWLKAHPEYHLDQDLSFRDLGVSGFTGKHLKGGLGDFLTAIKKGLVKAGDTLLIESLDRLSRQDIDIASELLRNILRSGVDVVTLSDGEHYTRESLKDPLALIKSILIMQRAHEESLRKAERIQAAWDAKKEAAKAGIKISRRCPAWLKLNDDRKSFSVIPEKVETVKRCFQLRLEGKSIWEIVRTLNAEGHQTLNQYKAGKFGQTSVQDLLKNRSVIGYFTPKGCEEISGYYPAIIDETTFYKVQQLSYARYGRKPASDKPLSVNLFKGVIRCSECGHALIITGFSDTRSGIYRCPLRNENRCSAKGLSRKQTDGTLLTLLSRLDRFDSDTTNIIDMLRLHREHISSNIEKLVQLSLEIEDLNAITSKLKQLKGELSQVDADIEKETQRLKSIDVGCLSDCDLTTKAGRIEAQLIIKSAVKEVVLNTAKRRCKVTFHNGRAITLPITENPSEDVTEAIQSLSEVTERGLIDVDEVII

SEQ ID NO: 25267 - DNA, 50 bp, Escherichia coli; identical to SEQ ID NO: 24522
  source 1..50: mol_type = genomic DNA

SEQ ID NO: 25268 - DNA, 40 bp, Escherichia coli; identical to SEQ ID NO: 5188
  source 1..40: mol_type = genomic DNA

SEQ ID NO: 25269 - DNA, 40 bp, Escherichia coli; identical to SEQ ID NO: 5749
  source 1..40: mol_type = genomic DNA

SEQ ID NO: 25270 - DNA, 50 bp, Escherichia coli; identical to SEQ ID NO: 5750
  source 1..50: mol_type = genomic DNA

SEQ ID NO: 25271 - protein, 507 aa, Escherichia coli; identical to SEQ ID NO: 24801

SEQ ID NO: 25272 - DNA, 50 bp, Escherichia coli; identical to SEQ ID NO: 24522
  source 1..50: mol_type = genomic DNA

SEQ ID NO: 25273 - DNA, 40 bp, Escherichia coli; identical to SEQ ID NO: 21333
  source 1..40: mol_type = genomic DNA

SEQ ID NO: 25274 - DNA, 40 bp, Escherichia coli; identical to SEQ ID NO: 24744
  source 1..40: mol_type = genomic DNA

SEQ ID NO: 25275 - DNA, 50 bp, Escherichia coli; identical to SEQ ID NO: 5750
  source 1..50: mol_type = genomic DNA

SEQ ID NO: 25276 - protein, 507 aa, Escherichia coli
MKRVISYIRFSSEKQAKGDSLRRQSKMVTDWLKAHPEYYLDESLTFRDLGVSGFTGKHLKGGLGDFLTAIEKGLVKAGDTLLIESLDRLSRQNVDRASELLRNILRSGVDVVTLSDGEHYTRESLKDPLALIKSILIMQRSHEESLRKSERIQAAWNRKKELISEGIKISKRCPAWLKLNDDRKSFSVIPDKVETVKRCFQLRLEGKSIWEIVRTLNAEGHRSMNQYKPGKFGQTSVQDLLKNRSVIGYFTPKGREEIAGYYPSVIDETTFYKVQQLSHSRYGRKPASAKPLSVNLFKGVIRCSECGHALIITGFSDTRNGIYRCPLRNENRCSAKGLSRKQTDGTLLTLLSRLDRFDSDTTNTVDMLRLHREHISSNIEKLVQLSLEIEDLNAITSKLKQLKGELSQVDADIEKETQRLKSIDVGCLSDCDLTTKAGRIEAQLIIKSAVKEVVLNTAKRRCKVTFHNGRAITLPITENPSDNVTEAIQSLSEVTERGLIDVDVVEI

SEQ ID NO: 25277 - DNA, 50 bp, Escherichia coli; identical to SEQ ID NO: 24522
  source 1..50: mol_type = genomic DNA

SEQ ID NO: 25278 - DNA, 40 bp, Escherichia coli; identical to SEQ ID NO: 5188
  source 1..40: mol_type = genomic DNA

SEQ ID NO: 25279 - DNA, 40 bp, Escherichia coli; identical to SEQ ID NO: 5749
  source 1..40: mol_type = genomic DNA

SEQ ID NO: 25280 - DNA, 50 bp, Escherichia coli; identical to SEQ ID NO: 5750
  source 1..50: mol_type = genomic DNA

SEQ ID NO: 25281 - protein, 507 aa, Escherichia coli
MKRVISYIRFSSEKQSRGDSLRRQSKMVTDWLKAHPEYHLDQDLSFRDLGVSGFTGKHLKGGLGDFLTAIEKGLVKAGDTLLIESLDRLSRQDIDIASELLRRILRAGVDVVTLSDGEHYTKESLRDPLSLIKSILIMQRAHEESLRKAERIQAAWDAKKEAAKAGIKVSKRCPAWLKLNDDRKTFSVIPEKVETVKRCFQLRLEGKSIWAIVKALNDEDRQSMNQYKPGKFGQTSVQDLLKNRSVIGYFTPKGCEEISGYYPAIIDETTFYKVQQLSYARYGRKPASDKPLSVNLFKGVIRCSECGHALIITGFSDTRSGIYRCPLRNENRCSAKGLSRKQTDGTLLALLSRLDRFDSDTTNIIDTLKLHREHISSNIEKLVQLSLEIEDLSAITSKLKQLKGELSQVDADIEKETQRLKSIDVGCLSDCDLTTKAGRIEAQLIIKSAVKEVVLNTAKRRCKVTFHNCKVIDLPITENPSEDVTEAIQSLSEVTERGLIDVDEVII

SEQ ID NO: 25282 - DNA, 50 bp, Escherichia coli; identical to SEQ ID NO: 24522
  source 1..50: mol_type = genomic DNA

SEQ ID NO: 25283 - DNA, 40 bp, Escherichia coli; identical to SEQ ID NO: 5188
  source 1..40: mol_type = genomic DNA

SEQ ID NO: 25284 - DNA, 40 bp, Escherichia coli; identical to SEQ ID NO: 5749
  source 1..40: mol_type = genomic DNA

SEQ ID NO: 25285 - DNA, 50 bp, Escherichia coli; identical to SEQ ID NO: 5750
  source 1..50: mol_type = genomic DNA

SEQ ID NO: 25286 - protein, 507 aa, Escherichia coli
MKRVISYIRFSSEKQSRGDSLRRQSKMVNDWLKAHPEYYLDQDLSFRDLGVSGFTGKHLKGGLGDFLTAIEKGLVKAGDTLLIESLDRLSRQNVDRASELLRNILRSGVDVVTLSDGEHYTRESLKDPLALIKSILIMQRSHEESLRKSERIQAAWNRKKELISEGIKISKRCPAWLKLNDDRKSFSVIPDKVETVKRCFQLRLEGKSIWEIVRTLNAEGHQSMSQYKPGSFGQTSVQDLLKNRSVIGYFTPKGCEEISGYYPAIIDETTFYKVQQLSHYRYGRKPVSAKPLSVNLFKGVIRCSECGHALIITGFSDTRNGIYRCPLRNENRCSAKGLSRKQTDGTLLALLSRLDRFDSDTTNTIDTLKLHREHISSNIEKLVQLSLEIEDLSAITSKLKQLKGELSQVDADIEKETQRLKSIDVGCLSDCDLTTKAGRIEAQLIIKSAVKEVVLNTAKRRCKVTFHNGRAITLPITETPSEDVTEAIQSLSEVTERGLIDVDEVII

SEQ ID NO: 25287 - DNA, 50 bp, Escherichia coli; identical to SEQ ID NO: 24522
  source 1..50: mol_type = genomic DNA

SEQ ID NO: 25288 - DNA, 40 bp, Escherichia coli; identical to SEQ ID NO: 5188
  source 1..40: mol_type = genomic DNA

SEQ ID NO: 25289 - DNA, 40 bp, Escherichia coli; identical to SEQ ID NO: 5749
  source 1..40: mol_type = genomic DNA

SEQ ID NO: 25290 - DNA, 50 bp, Escherichia coli; identical to SEQ ID NO: 5750
  source 1..50: mol_type = genomic DNA

SEQ ID NO: 25291 - protein, 507 aa, Escherichia marmotae
MKRVISYIRFSSEKQAKGDSLRRQSKMVNDWLKAHPEYYLDQDLSFRDLGVSGFTGKHLKGGLGDFLTAIEKGLVKAGDTLLIESLDRLSRQAVDRASELLRNILRSGVDVVTLSDGEHYTRESLKDPLSLIKSILIMQRAHEESLRKSERIQAAWNRKKELISEGIKVSRRCPAWLRLNDDRKTFSVIPEKVETVRRCFQLRLEGKSIWEIVRTLNDEGHQTLNQYKAGKFGQTSVQDLLKNRSVIGYFTPKGCEEIAGYFPPIIPETDFYKVQQLSYSRYGRKPASDKPLSVNLFKGVIRCSECGHALIITGFSDTRSGIYRCPLRNENRCNAKGLSRKQTDGTLLTLLSRLDRFDSDTTNTIDTLKLHREHISSNIEKLVQLSLEIEDLNAITSKLKQLKNELSQVDADIEKETQRLKSIDVGCLSDCDLTTKAGRIEAQLIIKSAVKEVVLNTAKRRCKVTFHNGKSIDLPITENPSEDVTEAIQSLSEVTERGLIDVDVVAI

SEQ ID NO: 25292 - DNA, 50 bp, Escherichia marmotae; identical to SEQ ID NO: 24522
  source 1..50: mol_type = genomic DNA

SEQ ID NO: 25293 - DNA, 40 bp, Escherichia marmotae; identical to SEQ ID NO: 24623
  source 1..40: mol_type = genomic DNA

SEQ ID NO: 25294 - DNA, 40 bp, Escherichia marmotae; identical to SEQ ID NO: 24624
  source 1..40: mol_type = genomic DNA

SEQ ID NO: 25295 - DNA, 50 bp, Escherichia marmotae; identical to SEQ ID NO: 5750
  source 1..50: mol_type = genomic DNA

SEQ ID NO: 25296 - protein, 507 aa, Escherichia coli
MKRVISYIRFSSEKQAKGDSLRRQSKMVTDWLKAHPEYYLDESLTFRDLGVSGFTGKHLKGGLGDFLTAIEKGLVKAGDTLLIESLDRLSRQNVDRASELLRNILRSGVDVVTLSDGEHYTRESLKDPLALIKSILIMQRSHEESLRKSERIQAAWNRKKELISEGIKISKRCPAWLKLNDDRKSFSVIPDKVETVKRCFQLRLEGKSIWEIVRTLNAEGHRSMNQYKPGKFGQTSVQDLLKNRSVIGYFTPKGREEIAGYYPSVIDETTFYKVQQLSHSRYGRKPASAKPLSVNLFKGVIRCSECGHALIITGFSDTRNGIYRCPLRNENRCSAKGLSRKQTDGTLLTLLSRLDRFDSDTTNTVDMLRLHREHISSNIEKLVQLSLEIEDLNAITSKLKQLKGELSQVDADIEKETQRLKSIDVGCLSDCDLTTKAGRIEAQLIIKSAVKEVVLNTAKRRCKVTFHNGRAITLPITENPSEDVTEAIQSLSEVTGRGLIDVDEVII

SEQ ID NO: 25297 - DNA, 50 bp, Escherichia coli; identical to SEQ ID NO: 24522
  source 1..50: mol_type = genomic DNA

SEQ ID NO: 25298 - DNA, 40 bp, Escherichia coli; identical to SEQ ID NO: 22878
  source 1..40: mol_type = genomic DNA

SEQ ID NO: 25299 - DNA, 40 bp, Escherichia coli; identical to SEQ ID NO: 24804
  source 1..40: mol_type = genomic DNA

SEQ ID NO: 25300 - DNA, 50 bp, Escherichia coli; identical to SEQ ID NO: 5750
  source 1..50: mol_type = genomic DNA

SEQ ID NO: 25301 - protein, 507 aa, Escherichia coli
MKRVISYIRFSSEKQAKGDSLRRQSKMVTDWLKAHPEYYLDQDLSFRDLGVSGFTGKHLKGGLGDFLTAIEKGLVKAGDTLLIESLDRLSRQAVDQASELLRNILRSGVDVVTLSDGEHYTRESLKDPLALIKSILIMQRSHEESLRKSERIQAAWNRKKELISEGIKISKRCPAWLKLNDDRKSFSVIPDKVETVKRCFQLRLEGKSIWEIVRTLNAEGHRSMNQYKPGKFGQTSVQDLLKNRSVIGYFTPKGCEEISGYYPAIIDETTFYKVQQLSHYRYGRKPVSDKPMAVNLFKGVIRCSECGHALIITGFSDTRSGIYRCPLRNENRCSAKGLSRKQTDGTLLTLLSRLDRFDSDTTNIIDTLKLHREHISSNIEKLVQLSLEIEDLSAITSKLKQLKNELSQVDADIEKETQRLKSIDVGCLSDCDLTTKAGRIEAQLIIKSAVKEVVLNTAKRRCKVTFHNGKAITLPITENPSDNVTEAIQSLSEVTERGLIDVDEVII

SEQ ID NO: 25302 - DNA, 50 bp, Escherichia coli; identical to SEQ ID NO: 24522
  source 1..50: mol_type = genomic DNA

SEQ ID NO: 25303 - DNA, 40 bp, Escherichia coli; identical to SEQ ID NO: 5188
  source 1..40: mol_type = genomic DNA

SEQ ID NO: 25304 - DNA, 40 bp, Escherichia coli; identical to SEQ ID NO: 5749
  source 1..40: mol_type = genomic DNA

SEQ ID NO: 25305 - DNA, 50 bp, Escherichia coli; identical to SEQ ID NO: 5750
  source 1..50: mol_type = genomic DNA

SEQ ID NO: 25306 - protein, 507 aa, Escherichia coli
MKRVISYIRFSSEKQAKGDSLRRQSKMVTDWLKAHPEYYLDQDLSFRDLGVSGFTGKHLKGGLGDFLTAIEKGLVKAGDTLLIESLDRLSRQAVDRASELLRNILRSGVDVVTLSDGEHYTSESLKDPLALIKSILIMQRAHEESLRKSERIQAAWDAKKEAAKAGIKVSKRCPAWLKLNDDRKSFSVIPEKVETVKRCFQLRLEGKSIWEIVRTLNDEGHQSMSQYKPGKFGQTSVQDLLKNRSVIGYFTPKGCEEISGYYPAIIDETTFYKVQQLSHSRYGRKPASDKPLSVNLFKGVIRCSECGHALIITGFSDTRSGIYRCPLRNENRCSAKGLSRKQTDGTLLALLSRLDRFDSDTTNIIDTLKLHREHISSNIEKLVQLSLEIEDLSAITSKLKQLKGELSQVDADIEKETQRLKSIDVGCLSDCDLTTKAGRIEAQLIIKSAVKEVVLNTAKRRCKVTFHNGKVIDLPITENPSDNVTEAIQSLSEVTERGLIDVDEVII

SEQ ID NO: 25307 - DNA, 50 bp, Escherichia coli; identical to SEQ ID NO: 24817
  source 1..50: mol_type = genomic DNA

SEQ ID NO: 25308 - DNA, 40 bp, Escherichia coli; identical to SEQ ID NO: 5188
  source 1..40: mol_type = genomic DNA

SEQ ID NO: 25309 - DNA, 40 bp, Escherichia coli; identical to SEQ ID NO: 5749
  source 1..40: mol_type = genomic DNA

SEQ ID NO: 25310 - DNA, 50 bp, Escherichia coli; identical to SEQ ID NO: 5750
  source 1..50: mol_type = genomic DNA

SEQ ID NO: 25311 - protein, 507 aa, Escherichia coli
MKRVISYIRFSSEKQAKGDSLRRQSKMVTDWLKAHPEYYLDQDLSFRDLGVSGFTGKHLKGGLGDFLTAIEKGLVKAGDTLLIESLDRLSRQDIDIASELLRNILRSGVDVVTLSDGEHYTRESLRDPLALIKSILIMQRAHEESLRKAERIQAAWDAKKEAAKAGIKVSKRCPAWLKLNDDRKSFSVIPEKVETVKRCFQLRLEGKSIWEIVRTLNDEGHQSMSQYKPGSFGQSSVQDLLKNRSVIGYFTPKGCEEISGYYPAIIDETTFYKVQQLSHYRYGRKPVSDKPLSVNLFKGVIRCSECGHALIITGFSDTRNGIYRCPLRNENRCSAKGLSRKQTDGTLLALLSRLDRFDSDMTNVIDTLKLHREHISSNIEKLVQLSLEIEDLSAITSKLKQLKGELSQVDADIEKETQRLKSIDVGCLSDCDLTTKAGRIEAQLIIKSAVKEVVLNTAKRRCKVTFHNGKLIDLPITENPSEDVTEAIQSLSEVTERGLIDVDEVII

SEQ ID NO: 25312 - DNA, 50 bp, Escherichia coli; identical to SEQ ID NO: 24522
  source 1..50: mol_type = genomic DNA

SEQ ID NO: 25313 - DNA, 40 bp, Escherichia coli; identical to SEQ ID NO: 5188
  source 1..40: mol_type = genomic DNA

SEQ ID NO: 25314 - DNA, 40 bp, Escherichia coli; identical to SEQ ID NO: 5749
  source 1..40: mol_type = genomic DNA

SEQ ID NO: 25315 - DNA, 50 bp, Escherichia coli; identical to SEQ ID NO: 5750
  source 1..50: mol_type = genomic DNA

SEQ ID NO: 25316 - protein, 507 aa, Escherichia coli
MKRVISYIRFSSEKQSRGDSLRRQSKMVNDWLKAHPEYYLDQDLSFRDLGVSGFTGKHLKGGLGDFLTAIEKGLVKAGDTLLIESLDRLSRQAVDRASELLRNILRSGVDVVTLSDGEHYTKESLRDPLSLIKSILIMQRAHEESLRKSERIQAAWNRKKELISEGIKVSRRCPAWLRLNDDRKSFSVIPEKVETVKRCFQLRLEGKSIWEIVRTLNDEGHQSMSQYKPGKFGQTSVQDLLKNRSVIGYFTPKGCEEISGYYPAIIDETTFYKVQQLSYARYGRKPASDKPLSVNLFKGVIRCSECGHALIITGFSDTRNGIYRCPLRNENRCSAKGLSRKQTDGTLLTLLSRLDRFDSDTTNTIDTLKLHREHISSNIEKLVQLSLEIEDLSAITIKLRQLKGELSQVDADIEKETQRLKSIDVGCLSDCDLTTKAGRIEAQLIIKSAVKEVVLNTAKRRCKVTFHNGKLIDLPITETPSEDVTEAIQSLSEVTERGLIDVDEVII

SEQ ID NO: 25317 - DNA, 50 bp, Escherichia coli; identical to SEQ ID NO: 24522
  source 1..50: mol_type = genomic DNA

SEQ ID NO: 25318 - DNA, 40 bp, Escherichia coli; identical to SEQ ID NO: 5188
  source 1..40: mol_type = genomic DNA

SEQ ID NO: 25319 - DNA, 40 bp, Escherichia coli; identical to SEQ ID NO: 5749
  source 1..40: mol_type = genomic DNA

SEQ ID NO: 25320 - DNA, 50 bp, Escherichia coli; identical to SEQ ID NO: 5750
  source 1..50: mol_type = genomic DNA

SEQ ID NO: 25321 - protein, 507 aa, Escherichia coli
MKRVISYIRFSSEKQSRGDSLRRQSKMVTDWLKAHPEYYLDQDLSFRDLGVSGFTGKHLKGGLGDFLTAIEKGLVKAGDTLLIESLDRLSRQAVDQASELLRNILRSGVDVVTLSDGEHYTRESLKDPLALIKSILIMQRSHEESLRKSERIQAAWNRKKELISEGIKISKRCPAWLKLNDDRKSFSVIPEKVETVKRCFQLRLEGKSIWEIVRTLNAEGHQTLNQYKAGSFGQTSVQDLLKNRSVIGYFTPKGCEGISGYYPAIIDETTFYKVQQLSHYRYGRKPVSDKPMAVNLFKGVIRCSECGHALIITGFSDTRSGIYRCPLRNENRCSAKGLSRKQTDGTLLALLSRLDRFDSDMTNTVDTLKLHREHISSNIEKLVQLSLEIEDLSAITSKLKQLKGELSQVDADIEKETQRLKSIDVGCLSDCDLTTKAGRIEAQLIIKSAVKEVVLNTAKRRCKVTFHNGRIIDLPITENPSEDVTEAIQSLSEVTERGLIDVDEVII

SEQ ID NO: 25322 - DNA, 50 bp, Escherichia coli; identical to SEQ ID NO: 24522
  source 1..50: mol_type = genomic DNA

SEQ ID NO: 25323 - DNA, 40 bp, Escherichia coli; identical to SEQ ID NO: 5188
  source 1..40: mol_type = genomic DNA

SEQ ID NO: 25324 - DNA, 40 bp, Escherichia coli; identical to SEQ ID NO: 5749
  source 1..40: mol_type = genomic DNA

SEQ ID NO: 25325 - DNA, 50 bp, Escherichia coli; identical to SEQ ID NO: 5750
  source 1..50: mol_type = genomic DNA

SEQ ID NO: 25326 - protein, 507 aa, Escherichia coli
MKRVISYIRFSSEKQSRGDSLRRQSKMVTDWLKAHPEYHLDQDLSFRDLGVSGFTGKHLKGGLGDFLTAIEKGLVKAGDTLLIESLDRLSRQDIDIASELLRNILRSGVDVVTLSDGEHYTRESLKDPLSLIKSILIMQRAHEESLRKSERIQAAWNRKKELISEGIKVSRRCPAWLRLNDDRKSFSVIPEKVETVKRCFQLRLEGKSIWEIVRTLNDEGHQTLNQYKAGSFGQSSVQDLLKNRSVIGYFTPKGCEEIAGYYPAIIDETTFYKVQQLSYARHGRKPASAKPLSVNLFKGVIRCSECGHALIITGFSDTRSGIYRCPLRNENRCSAKGLSRKQTDGTLLALLSRLDRFDSDTTNTIDTLKLHREHISSNIEKLVQLSLEIEDLSAITSKLKQLKNELSQVDADIEKETQRLKSIDVGCLSDCDLSTKAGRIEAQLIIRSAVKEVVLNTAKRRCKVTFHNGKSITLPITENPSEDVTEAIQSLSEVTERGLIDVDEVIV

SEQ ID NO: 25327 - DNA, 50 bp, Escherichia coli; identical to SEQ ID NO: 24522
  source 1..50: mol_type = genomic DNA

SEQ ID NO: 25328 - DNA, 40 bp, Escherichia coli; identical to SEQ ID NO: 5188
  source 1..40: mol_type = genomic DNA

SEQ ID NO: 25329 - DNA, 40 bp, Escherichia coli; identical to SEQ ID NO: 5749
  source 1..40: mol_type = genomic DNA

SEQ ID NO: 25330 - DNA, 50 bp, Escherichia coli; identical to SEQ ID NO: 5750
  source 1..50: mol_type = genomic DNA

SEQ ID NO: 25331 - protein, 507 aa, Escherichia coli
MKRVISYIRFSSEKQAKGDSLRRQSKMVNDWLKAHPEYYLDQDLSFRDLGVSGFTGKHLKGGLGDFLTAIEKGLVKAGDTLLIESLDRLSRQDVDQASELLRNILRSGVDVVTLSDGEHYTRESLKDPLALIKSILIMQRSHEESLRKSERIQAAWDAKKEAAKAGIKISRRCPAWLKLNDDRKSFSVIPEKVETVRRCFQLRLEGKSIWEIVRTLNDEGHQTLNQYKAGKFGQTSVQDLLKNRSVIGYFTPKGCEEISGYFPPIIPETDFYKVQQLSYSRYGRKPASDKPLSVNLFKGVIRCSECGHALIITGFSDTRSGIYRCPSRNENRCNAKGLSRKQTDGTLLALLSRLDRFDSDMTNIIDTLKLHREHISSNIEKLVQLSLEIEDLSAITSKLKQLKGELSQVDADIEKETQRLKSIDVGCLSDCDLTTKAGRIEAQLIIKSAVKEVVLNTAKRRCKVTFHNGKVIDLPITENPSEDVTEAIQSLSEVTERGLLDVDEVII

SEQ ID NO: 25332 - DNA, 50 bp, Escherichia coli; identical to SEQ ID NO: 24522
  source 1..50: mol_type = genomic DNA

SEQ ID NO: 25333 - DNA, 40 bp, Escherichia coli; identical to SEQ ID NO: 5188
  source 1..40: mol_type = genomic DNA

SEQ ID NO: 25334 - DNA, 40 bp, Escherichia coli; identical to SEQ ID NO: 5749
  source 1..40: mol_type = genomic DNA

SEQ ID NO: 25335 - DNA, 50 bp, Escherichia coli; identical to SEQ ID NO: 5750
  source 1..50: mol_type = genomic DNA

SEQ ID NO: 25336 - protein, 507 aa, Escherichia coli
MKRVISYIRFSSEKQAKGDSLRRQSKMVTDWLKAHPEYYLDQDLSFRDLGVSGFTGKHLKGGLGDFLTAIEKGLVKAGDTLLIESLDRLSRQDIDIASELLRRILRAGVDVVTLSDGEHYTKESLRDPLSLIKSILIMQRAHEESLRKAERIQAAWDAKKEAAKAGIKISRRCPAWLRLNDDRKSFSVIPEKVETVKRCFQLRLEGKSIWEIVRTLNDEGHQSMSQYKPGKFGQTSVQDLLKNRSVIGYFTPKGCEEIAGYYPAIIDETTFYKVQQLSHSRYGRKPASAKPLSVNLFKGVIRCSECGHALIITGFSDTRSGIYRCPLRNENRCSAKGLSRKQTDGTLLTLLSRLDRFDSDTTNTIDTLKLHREHISSNIEKLVQLSLEIEDLNAITSKLKQLKGELSQVDADIEKETQRLKSIDVGCLSDCDLTTKAGRIEAQLIIKSAVKEVVLNTAKRRCKVTFHNGRIIDLPITENPSEDVTEAIQSLSEVTERDLIDVDEVII

SEQ ID NO: 25337 - DNA, 50 bp, Escherichia coli; identical to SEQ ID NO: 24522
  source 1..50: mol_type = genomic DNA

SEQ ID NO: 25338 - DNA, 40 bp, Escherichia coli; identical to SEQ ID NO: 5188
  source 1..40: mol_type = genomic DNA

SEQ ID NO: 25339 - DNA, 40 bp, Escherichia coli; identical to SEQ ID NO: 5749
  source 1..40: mol_type = genomic DNA

SEQ ID NO: 25340 - DNA, 50 bp, Escherichia coli; identical to SEQ ID NO: 5750
  source 1..50: mol_type = genomic DNA

SEQ ID NO: 25341 - protein, 507 aa, Escherichia coli
MKRVISYIRFSSEKQAKGDSLRRQSKMVTDWLKAHPEYYLDQDLSFRDLGVSGFTGKHLKGGLGDFLTAIEKGLVKAGDTLLIESLDRLSRQDIDIASELLRNILRSGVDVVTLSDGEHYTRESLRDPLALIKSILIMQRAHEESLRKAERIQAAWDAKKEAAKAGIKVSKRCPAWLKLNDDRKSFSVIPEKVETVKRCFQLRLEGKSIWEIVRTLNDEGHRSMNQYKPGKFGQTSVQDLLKNRSVIGYFTPKGREEISGYYPAIIDETTFYKVQQLSHYRYGRKPVSAKPLSVNLFKGVIRCSECGHALIITGFSDTRNGIYRCPLRNENRCSAKGLSRKQTDGTLLTLLSRLDRFDSDMTNVIDSLKLHREHISSNIEKLVQLSLEIEDLSAITIKLKQLKGELSQVDADIEKETQRLKSIDVGCLSDCDLTTKSGRIEAQLIIKSAVKEVVLNTAKRRCKVTFHNGKAITLPITENPSEDVTEAIQSLSEVTERSLIDVDEVII

SEQ ID NO: 25342 - DNA, 50 bp, Escherichia coli; identical to SEQ ID NO: 24522
  source 1..50: mol_type = genomic DNA

SEQ ID NO: 25343 - DNA, 40 bp, Escherichia coli; identical to SEQ ID NO: 22988
  source 1..40: mol_type = genomic DNA

SEQ ID NO: 25344 - DNA, 40 bp, Escherichia coli; identical to SEQ ID NO: 24884
  source 1..40: mol_type = genomic DNA

SEQ ID NO: 25345 - DNA, 50 bp, Escherichia coli; identical to SEQ ID NO: 5750
  source 1..50: mol_type = genomic DNA

SEQ ID NO: 25346 - protein, 507 aa, Escherichia coli
MKRVISYIRFSSEKQAKGDSLRRQSKMVTDWLKAHPEYYLDQDLSFRDLGVSGFTGKHLKGGLGDFLTAIEKGLVKAGDTLLIESLDRLSRQDIDIASELLRNILRSGVDVVTLSDGEHYTRESLRDPLALIKSILIMQRSHEESLRKSERIQAAWDAKKEAAKAGIKVSKRCPAWLRLNDDRKSFSVIPDKVETVKRCFQLRLEGKSIWEIVRTLNAEVHRSMNQYKPGKFGQTSVQDLLKNRSVIGYFTPKGCEEIAGYYPSVIDETTFYKVQQLSHSRYGRKPVSAKPLSVNLFKGVIRCSECGHALIITGFSDTRNGIYRCPLRNENRCSAKGLSRKQTDGTLLTLLSRLDRFDSDMTNTIDTLKLHREHISSNIEKLVQLSLEIEDLNAITNKLKQLKNELSQVDADIEKETQRLKSIDTGSLSDCDLSTKAGRIEAQLIIKSAVKEVVLNTAKRRCKVTFHNGKVIDLPITEDPSENVTEAIQSLSEVTERGLIDVDEVII

SEQ ID NO: 25347 - DNA, 50 bp, Escherichia coli; identical to SEQ ID NO: 24522
  source 1..50: mol_type = genomic DNA

SEQ ID NO: 25348 - DNA, 40 bp, Escherichia coli; identical to SEQ ID NO: 5188
  source 1..40: mol_type = genomic DNA

SEQ ID NO: 25349 - DNA, 40 bp, Escherichia coli; identical to SEQ ID NO: 5749
  source 1..40: mol_type = genomic DNA

SEQ ID NO: 25350 - DNA, 50 bp, Escherichia coli; identical to SEQ ID NO: 5750
  source 1..50: mol_type = genomic DNA

SEQ ID NO: 25351 - protein, 507 aa, Escherichia coli
MKRVISYIRFSSEKQAKGDSLRRQSKMVTDWLKAHPEYYLDESLTFRDLGVSGFTGKHLKGGLGDFLTAIEKGLVKAGDTLLIESLDRLSRQAVDRASELLRNILRSGVDVVTLSDGEHYTSESLKDPLALIKSILIMQRAHEESLRKSERIQAAWNRKKELISEGIKVSRRCPAWLRLNDDRKSFSVIPEKVETVKRCFQLRLEGKSIWEIVRTLNDECHQSMNQYKPGKFGQTSVQDLLKNRSVIGYFTPKGREEIAGYFPSIIHETDFYKVQQLSHSRYGRKPVSAKPLSVNLFKGVIRCSECGHALIITGFSDTRSGIYRCPLRNENRCNAKGLSRKQTDGTLLTLLSRLDRFDSDMTNTVDTLKLHREHISSNIEKLVQLSLEIEDLNAITSKLKQLKNELSQVDADIEKETQRLKSIDVGCLSDCDLTTKAGRIEAQLIIKSAVKEVVLNTAKRRCKVTFHNGKVIDLPITENPSEDVTEAIQSLSEVTERGLIDVDVVEI

SEQ ID NO: 25352 - DNA, 50 bp, Escherichia coli; identical to SEQ ID NO: 24522
  source 1..50: mol_type = genomic DNA

SEQ ID NO: 25353 - DNA, 40 bp, Escherichia coli; identical to SEQ ID NO: 5188
  source 1..40: mol_type = genomic DNA

SEQ ID NO: 25354 - DNA, 40 bp, Escherichia coli; identical to SEQ ID NO: 5749
  source 1..40: mol_type = genomic DNA

SEQ ID NO: 25355 - DNA, 50 bp, Escherichia coli; identical to SEQ ID NO: 5750
  source 1..50: mol_type = genomic DNA

SEQ ID NO: 25356 - protein, 507 aa, Escherichia coli
MKRVISYIRFSSEKQAKGDSLRRQSKMVNDWLKAHPEYYLDQDLSFRDLGVSGFTGKHLKGGLGDFLTAIEKGLVKAGDTLLIESLDRLSRQDIDIASELLRNILRSGVDVVTLSDGEHYTRESLRDPLALIKSILIMQRAHEESLRKAERIQAAWDAKKEAAKAGIKVSKRCPAWLRLNDDRKSFSVIPDKVETVKRCFQLRLEGKSIWEIVRTLNDEGHQSMSQYKPGKFGQTSVQDLLKNRSVIGYFTPKGCEEIAGYYPAIIDETTFYKVQQLSHSRYGRKPVSAKPLSVNLFKGVIRCSECGHALIITGFSDTRNGIYRCPLRNENRCSAKGLSRKQTDGTLLALLSRLDRFDSDMTNTIDMLRLHREHISSNIEKLVQLSLEIEDLSAITIKLKQLKGELSQVDADIEKETQRLKSIDVGCLSDCDLTTKAGRIEAQLIIKSAVKEVVLNTAKRRCKVTFHNGKSITLPITENPSEDVTEAIQSLSEVTERGLIDVDVVEI

SEQ ID NO: 25357 - DNA, 50 bp, Escherichia coli; identical to SEQ ID NO: 24522
  source 1..50: mol_type = genomic DNA

SEQ ID NO: 25358 - DNA, 40 bp, Escherichia coli; identical to SEQ ID NO: 5188
  source 1..40: mol_type = genomic DNA

SEQ ID NO: 25359 - DNA, 40 bp, Escherichia coli; identical to SEQ ID NO: 5749
  source 1..40: mol_type = genomic DNA

SEQ ID NO: 25360 - DNA, 50 bp, Escherichia coli; identical to SEQ ID NO: 5750
  source 1..50: mol_type = genomic DNA

SEQ ID NO: 25361 - protein, 507 aa, Escherichia coli
MKRVISYIRFSSEKQAKGDSLRRQSKMVTDWLKAHPEYYLDQDLSFRDLGVSGFTGKHLKGGLGDFLTAIEKGLVKAGDTLLIESLDRLSRQDVDQASELLRNILRSGVDVVTLSDGEHYTRESLRDPLALIKSILIMQRAHEESLRKAERIQAAWDAKKEAAKAGIKVSKRCPAWLKLNDDRKSFSVIPEKVETVKRCFQLRLEGKSIWEIVRTLNDEGHQSMSQYKPGSFGQSSVQDLLKNRSVIGYFTPKGREEIAGYFPPIIPETDFYKVQQLSYSRYGRKPASDKPLSVNLFKGVIRCSECGHALIITGFSDTRNGIYRCPLRNENRCSAKGLSRKQTDGTLLALLSRLDRFDSDTTNIIDMLRLHREHVSSNIEKLVQLSLEIEDLNAITSKLKQLKGELSQVDADIEKETQRLKSIDVGCLSDCDLTTKAGRIEAQLIIKSAVKEVVLNTAKRRCKVTFHNGKTITLSITENPSEDVTEAIQSLSEAIERGLIDVDVVEI

SEQ ID NO: 25362 - DNA, 50 bp, Escherichia coli; identical to SEQ ID NO: 24522
  source 1..50: mol_type = genomic DNA

SEQ ID NO: 25363 - DNA, 40 bp, Escherichia coli; identical to SEQ ID NO: 5188
  source 1..40: mol_type = genomic DNA

SEQ ID NO: 25364 - DNA, 40 bp, Escherichia coli; identical to SEQ ID NO: 5749
  source 1..40: mol_type = genomic DNA

SEQ ID NO: 25365 - DNA, 50 bp, Escherichia coli; identical to SEQ ID NO: 5750
  source 1..50: mol_type = genomic DNA

SEQ ID NO: 25366 - protein, 507 aa, Escherichia coli
MKRVISYIRFSSEKQAKGDSLRRQSKMVTDWLKAHPEYYLDQDLSFRDLGVSGFTGKHLKGGLGDFLTAIEKGLVKAGDTLLIESLDRLSRQAVDRASELLRNILRSGVDVVTLSDGEHYTRESLKDPLSLIKSILIMQRAHEESLRKSERIQAAWNRKKELISEGIKVSRRCPAWLRLNDDRKSFSVIPDKVETVKRCFQLRLEGKSIWEIVRTLNAEGHQTLNQYKAGSFGQTSVQDLLKNRSVIGYFTPKGCEEIAGYFPPIIPETDFYKVQQLSYSRYGRKPASDKPLSVNLFKGVIRCSECGHALIITGFSDTRSGIYRCPSRNENRCNAKGLSRKQTDGTLLALLSRLDRFDSDMTNTVDTLKLHREHISSNIEKLVQLSLEIEDLNAITSKLKQLKGELSQVDADIEKETQRLKSIDVGCLSDCDLTTKAGRIEAQLIIKSAVKEVVLNTAKRRCKVTFHNGRAITLSITENPSEDVTEAIQSISEVTERGLIDVDVVEI

SEQ ID NO: 25367 - DNA, 50 bp, Escherichia coli; identical to SEQ ID NO: 24522
  source 1..50: mol_type = genomic DNA

SEQ ID NO: 25368 - DNA, 40 bp, Escherichia coli; identical to SEQ ID NO: 5188
  source 1..40: mol_type = genomic DNA

SEQ ID NO: 25369 - DNA, 40 bp, Escherichia coli; identical to SEQ ID NO: 5749
  source 1..40: mol_type = genomic DNA

SEQ ID NO: 25370 - DNA, 50 bp, Escherichia coli; identical to SEQ ID NO: 5750
  source 1..50: mol_type = genomic DNA

SEQ ID NO: 25371 - protein, 507 aa, Escherichia coli
MKRVISYIRFSSEKQAKGDSLRRQSKMVTDWLKAHPEYYLDQDLSFRDLGVSGFTGKHLKGGLGDFLTAIEKGLVKAGDTLLIESLDRLSRQAVDRASELLRNILRSGVDVVTLSDGEHYTRESLRDPLSLIKSILIMQRSHEESLRKSERIQAAWDAKKEAAKAGIKVSKRCPAWLRLNDDRKSFSVIPDKVETVKRCFQLRLEGKSIWEIVRTLNAEGHRSMNQYKPGKFGQTSVQDLLKNRSVIGYFTPKGCEEIAGYYPSVIDETTFYKVQQLSHSHYGRKPASAKPLSVNLFKGVIRCSECGHALIITGFSDTRNGIYRCPLRNENRCSAKGLSRKQTDGTLLTLLSRLDRFDSDMTNTIDTLKLHREHISSNIEKLVQLSLEIEDLNAITNKLKQLKNELSQVDADIEKETQRLKSIDTGSLSDCDLSTKAGRIEAQLIIKSAVKEVVLNTAKRRCKVTFHNGKSITLPITENPSEDVTEAIQSLSEVTERGLIDVDVVEI

SEQ ID NO: 25372 - DNA, 50 bp, Escherichia coli; identical to SEQ ID NO: 24522
  source 1..50: mol_type = genomic DNA

SEQ ID NO: 25373 - DNA, 40 bp, Escherichia coli; identical to SEQ ID NO: 5188
  source 1..40: mol_type = genomic DNA

SEQ ID NO: 25374 - DNA, 40 bp, Escherichia coli; identical to SEQ ID NO: 5749
  source 1..40: mol_type = genomic DNA

SEQ ID NO: 25375 - DNA, 50 bp, Escherichia coli; identical to SEQ ID NO: 5750
  source 1..50: mol_type = genomic DNA

SEQ ID NO: 25376 - protein, 507 aa, Escherichia coli
MKRVISYIRFSSEKQAKGDSLRRQSKMVTDWLKAHPEYYLDQDLSFRDLGVSGFTGKHLKGGLGDFLTAIEKGLVKAGDTLLIESLDRLSRQDVDQASELLRNILRSGVDVVTLSDGEHYTSESLKDPLALIKSILIMQRAHEESLRKSERIQAAWDAKKEAAKAGIKISKRCPAWLKLNDDRKSFSVIPEKVETVKRCFQLRLEGKSIWEIVRTLNAEGHQTLNQYKAGKFGQTSVQDLLKNRSVIGYFTPKGCEEISGYYPAIIDETTFYKVQQLSHYRYGRKPVSDKPLSVNLFKGVIRCSECGHALIITGFSDTRNGIYRCPLRNENRCNAKGLSRKQTDGTLLALLSRIDRFDSDMTNTIDTLKLHREHISSNIEKLVQLSLEIEDLSAITSKLKQLKGELSQVDADIEKETQRLKSIDVGCLSDCDLTTKAGRIEAQLIIKSAVKEVVLNTAKRRCKVTFHNGKVIDLPITENPSEDVTEAIQSLSEVTERGLIDVDVVEI

SEQ ID NO: 25377 - DNA, 50 bp, Escherichia coli; identical to SEQ ID NO: 24522
  source 1..50: mol_type = genomic DNA

SEQ ID NO: 25378 - DNA, 40 bp, Escherichia coli; identical to SEQ ID NO: 5188
  source 1..40: mol_type = genomic DNA

SEQ ID NO: 25379 - DNA, 40 bp, Escherichia coli; identical to SEQ ID NO: 5749
  source 1..40: mol_type = genomic DNA

SEQ ID NO: 25380 - DNA, 50 bp, Escherichia coli; identical to SEQ ID NO: 5750
  source 1..50: mol_type = genomic DNA

SEQ ID NO: 25381 - protein, 507 aa, Escherichia coli
MKRVISYIRFSSEKQAKGDSLRRQSKMVTDWLKAHPEYYLDQDLSFRDLGVSGFTGKHLKGGLGDFLTAIEKGLVKAGDTLLIESLDRLSRQAVDRASELLRNILRSGVDVVTLSDGEHYTKESLRDPLSLIKSILIMQRSHEESLRKSERIQAAWDAKKEAAKAGIKVSKRCPAWLKLNDDRKSFSVIPDKVETVKRCFQLRLEGKSIWEIVRTLNAEGHRSMNQYKPGKFGQTSVQDLLKNRSVIGYFTPKGCEEIAGYYPSVIDETTFYKVQQLSHSRHGRKPVSDKPLSVNLFKGVIRCSECGHALIITGFSDTRNGIYRCPLRNENRCSAKGLSRKQTDGTLLTLLSRLDRFDSDTTNTIDMLRLHREHISSNIEKLVQLSLEIEDLNAITNKLKQLKNELSQVDADIEKETQRLKSIDTGSLSDCDLSTKAGRIEAQLIIKSAVKEVVLNTAKRRCKVTFHNGKSIILSITENPSEDVTEAIQSLSEVTERGLIDVDEVII

SEQ ID NO: 25382 - DNA, 50 bp, Escherichia coli; identical to SEQ ID NO: 24522
  source 1..50: mol_type = genomic DNA

SEQ ID NO: 25383 - DNA, 40 bp, Escherichia coli; identical to SEQ ID NO: 5188
  source 1..40: mol_type = genomic DNA

SEQ ID NO: 25384 - DNA, 40 bp, Escherichia coli; identical to SEQ ID NO: 5749
  source 1..40: mol_type = genomic DNA

SEQ ID NO: 25385 - DNA, 50 bp, Escherichia coli; identical to SEQ ID NO: 5750
  source 1..50: mol_type = genomic DNA

SEQ ID NO: 25386 - protein, 507 aa, Escherichia coli
MKRVISYIRFSSEKQAKGDSLRRQSKMVTDWLKAHPEYYLDQDLSFRDLGVSGFTGKHLKGGLGDFLTAIEKGLVKAGDTLLIESLDRLSRQAVDRASELLRNILRSGVDVVTLSDGEHYTKESLRDPLALIKSILIMQRSHEESLRKSERIQAAWNRKKELISEGIKISKRCPAWLRLNDDRKTFSVIPEKVETVKRCFQLRLEGKSIWEIVRTLNDECHQSMNQYKPGKFGQTSVQDLLKNRSVIGYFTPKGCEEISGYYPAIIDETTFYKVQQLSHYRYGRKPVSDKPLSVNLFKGVIRCSECGHALIITGFSDTRSGIYRCPLRNENRCSAKGLSRKQTDGTLLTLLSRLDRFDSDTTNIINTLKLHREHISSNIEKLVQLSLEIEDLSAITSKLKQLKNELSQVDADIEKETQRLKSIDVGCLSDCDLTTKAGRIEAQLIIKSAVKEVVLNTAKRRCKVTFHNGKSITLPITENPSEDVTEAIQSLSEVTERGLLDVDTFQL

SEQ ID NO: 25387 - DNA, 50 bp, Escherichia coli; identical to SEQ ID NO: 24522
  source 1..50: mol_type = genomic DNA

SEQ ID NO: 25388 - DNA, 40 bp, Escherichia coli; identical to SEQ ID NO: 5188
  source 1..40: mol_type = genomic DNA

SEQ ID NO: 25389 - DNA, 40 bp, Escherichia coli; identical to SEQ ID NO: 5749
  source 1..40: mol_type = genomic DNA

SEQ ID NO: 25390 - DNA, 50 bp, Escherichia coli; identical to SEQ ID NO: 5750
  source 1..50: mol_type = genomic DNA

SEQ ID NO: 25391 - protein, 507 aa, Escherichia coli
MKRVISYIRFSSEKQAKGDSLRRQSKMVNDWLKAHPEYYLDQDLSFRDLGVSGFTGKHLKGGLGDFLTAIEKGLVKAGDTLLIESLDRLSRQDIDIASELLRRILRAGVDVVTLSDGEHYTSESLKDPLSLIKSILIMQRAHEESLRKAERIQAAWDAKKEAAKAGIKVSKRCPAWLRLNDDRKSFSVIPEKVETVKRCFQLRLEGKSIWEIVRTLNDEGHQSMSQYKAGKFGQTSVQDLLKNRSVIGYFTPKGCEEISGYFPPIIPETDFYKVQQLSYSRYGRKPASDKPLSVNLFKGVIRCSECGHALIITGFSDTRNGIYRCPLRNENRCSAKGLSRKQTDGTLLALLSRIDRFDSDMTNTIDTLKLHREHISSNIEKLVQLSLEIEDLSAITSKLKQLKGELSQVNADIEKETQRLKSIDVGCLSDCDLTTKAGRIEAQLIIKSAVKEVILNTAKRRCKVTFHNGKVIDLPITENPSEDVTEAIQSLSEVTERGLIDVDVVEI

SEQ ID NO: 25392 - DNA, 50 bp, Escherichia coli; identical to SEQ ID NO: 24522
  source 1..50: mol_type = genomic DNA

SEQ ID NO: 25393 - DNA, 40 bp, Escherichia coli; identical to SEQ ID NO: 5188
  source 1..40: mol_type = genomic DNA

SEQ ID NO: 25394 - DNA, 40 bp, Escherichia coli; identical to SEQ ID NO: 5749
  source 1..40: mol_type = genomic DNA

SEQ ID NO: 25395 - DNA, 50 bp, Escherichia coli; identical to SEQ ID NO: 5750
  source 1..50: mol_type = genomic DNA

SEQ ID NO: 25396 - protein, 507 aa, Escherichia coli
MKRVISYIRFSSEKQAKGDSLRRQSKMVTDWLKAHPEYYLDESLTFRDLGVSGFTGKHLKGGLGDFLTAIEKGLVKAGDTLLIESLDRLSRQAVDRASELLRNILRSGVDVVTLSDGEHYTSESLKDPLALIKSILIMQRAHEESLRKSERIQAAWNRKKELISEGIKVSKRCPAWLKLNDDRKSFSVIPEKVETVKRCFQLRLEGKSIWEIVRTLNDEGHQSMSQYKPGSFGQSSVQDLLKNRSVIGYFTPKGCEEIAGYYPAIIDETTFYKVQQLSYARYGRKPASDKPLSVNLFKGVIRCSECGHALIITGFSDTRSGIYRCPLRNENRCSAKGLSRKQTDGTLLALLSRLDRFDSDMTNTIDTLKLHREHISSNIEKLVQLSLEIEDLNAITNKLKQLKNELSQVDADIEKETQRLKSIDVGCLSDCDLTTKAGRIEAQLIIKSAVKEVVLNTAKRRCKVTFHNGKIIDLPITENPSEDVTEAIQSLSEVTERGLIDVDVVEI

SEQ ID NO: 25397 - DNA, 50 bp, Escherichia coli; identical to SEQ ID NO: 24522
  source 1..50: mol_type = genomic DNA

SEQ ID NO: 25398 - DNA, 40 bp, Escherichia coli; identical to SEQ ID NO: 5188
  source 1..40: mol_type = genomic DNA

SEQ ID NO: 25399 - DNA, 40 bp, Escherichia coli; identical to SEQ ID NO: 5749
  source 1..40: mol_type = genomic DNA

SEQ ID NO: 25400 - DNA, 50 bp, Escherichia coli; identical to SEQ ID NO: 5750
  source 1..50: mol_type = genomic DNA

SEQ ID NO: 25401 - protein, 507 aa, Escherichia coli
MKRVISYIRFSSEKQAKGDSLRRQSKMVTDWLKAHPEYYLDESLTFRDLGVSGFTGKHLKGGLGDFLTAIEKGLVKAGDTLLIESLDRLSRQDVDQASELLRNILRSGVDVVTLSDGEHYTSESLKDPLALIKSILIMQRAHEESLRKSERIQAAWDAKKEAAKAGIKVSKRCPAWLKLNDDRKSFSVIPEKVETVKRCFQLRLEGKSIWEIVRTLNDEGHQTLNQYKAGKFGQTSVQDLLKNRSVIGYFTPKGCEEISGYYPAIIDETTFYKVQQLSHYRYGRKPVSDKPLSVNLFKGVIRCSECGHALIITGFSDTRNGIYRCPLRNENRCSAKGLSRKQTDGTLLALLSRLDRFDSDTTNTIDTLKLHREHISSNIEKLVQLSLEIEDLSAITSKLRQLKGELSQVDADIEKETQRLKSIDVGCLSDCDLTTKAGRIEAQLIIKSAVKEVVLNTAKRRCKVTFHNGKVIDLPITETPSKDVTEAIQSLSEVTERGLIDVDEVII

SEQ ID NO: 25402 - DNA, 50 bp, Escherichia coli; identical to SEQ ID NO: 24522
  source 1..50: mol_type = genomic DNA

SEQ ID NO: 25403 - DNA, 40 bp, Escherichia coli; identical to SEQ ID NO: 22763
  source 1..40: mol_type = genomic DNA

SEQ ID NO: 25404 - DNA, 40 bp, Escherichia coli; identical to SEQ ID NO: 24634
  source 1..40: mol_type = genomic DNA

SEQ ID NO: 25405 - DNA, 50 bp, Escherichia coli; identical to SEQ ID NO: 5750
  source 1..50: mol_type = genomic DNA

SEQ ID NO: 25406 - protein, 507 aa, Escherichia coli
MKRVISYIRFSSEKQAKGDSLRRQSKMVNDWLKAHPEYYLDQDLSFRDLGVSGFTGKHLKGGLGDFLTAIEKGLVKAGDTLLIESLDRLSRQDVDQASELLRNILRSGVDVVTLSDGEHYTKESLRDPLSLIKSILIMQRAHEESLRKAERIQAAWDAKKEAAKAGIKISRRCPAWLKLNDDRKSFSVIPEKVETVKRCFQLRLEGKSIWEIVRTLNAEGHQTLNQYKAGKFGQTSVQDLLKNRSVIGYFTPKGREEISGYFPPIIPETDFYKVQQLSHYRYGRKPVSDKPLSVNLFKGVIRCSECGHALIITGFSDTRNGIYRCPLRNENRCNAKGLSRKQTDGTLLALLSRLDRFDSDMTNVIDALKLHREHISSNIEKLVQLSLEIEDLSAITSKLKQLKGELSQVDADIEKETQRLKSIDVGCLSDCDLTTKAGRIEAQLIIKSAVKEVVLNTAKRRCKVTFHNGRAITLPITENPSEDVTEAIQSLSEVTERGLIDVDVVEI

SEQ ID NO: 25407 - DNA, 50 bp, Escherichia coli; identical to SEQ ID NO: 24522
  source 1..50: mol_type = genomic DNA

SEQ ID NO: 25408 - DNA, 40 bp, Escherichia coli; identical to SEQ ID NO: 5188
  source 1..40: mol_type = genomic DNA

SEQ ID NO: 25409 - DNA, 40 bp, Escherichia coli; identical to SEQ ID NO: 5749
  source 1..40: mol_type = genomic DNA

SEQ ID NO: 25410 - DNA, 50 bp, Escherichia coli; identical to SEQ ID NO: 5750
  source 1..50: mol_type = genomic DNA

SEQ ID NO: 25411 - protein, 507 aa, Escherichia coli
MKRVISYIRFSSEKQAKGDSLRRQSKMVTDWLKAHPEYYLDQDLSFRDLGVSGFTGKHLKGGLGDFLTAIEKGLVKAGDTLLIESLDRLSRQAVDRASELLRNILRSGVDVVTLSDGEHYTSESLKDPLALIKSILIMQRAHEESLRKSERIQAAWDAKKEAAKAGIKISKRCPAWLKLNDDRKSFSVIPEKVETVKRCFQLRLEGKSIWEIVRTLNDECHQSMNQYKPGKFGQTSVQDLLKNRSVIGYFTPKGREEIAGYFPSIIHETDFYKVQQLSYARHGRKPASAKPLSVNLFKGVIRCSECGHALIITGFSDTRNGIYRCPLRNENRCSAKGLSRKQTDGTLLALLSRLDRFDSDMTNTIDTLKLHREHISSNIEKLVQLSLEIEDLNAITNKLKQLKNELSQVDADIEKETQRLKSIDVGCLSDCDLTTKAGRIEAQLIIKSAVKEVVLNTAKRRCKVTFHNGKIIDLPITENPSEDVTEAIQSLSEVTERGLIGVDEVII

SEQ ID NO: 25412 - DNA, 50 bp, Escherichia coli; identical to SEQ ID NO: 24522
  source 1..50: mol_type = genomic DNA

SEQ ID NO: 25413 - DNA, 40 bp, Escherichia coli; identical to SEQ ID NO: 5188
  source 1..40: mol_type = genomic DNA

SEQ ID NO: 25414 - DNA, 40 bp, Escherichia coli; identical to SEQ ID NO: 5749
  source 1..40: mol_type = genomic DNA

SEQ ID NO: 25415 - DNA, 50 bp, Escherichia coli; identical to SEQ ID NO: 5750
  source 1..50: mol_type = genomic DNA

SEQ ID NO: 25416 - protein, 507 aa, Escherichia coli
MKRVISYIRFSSEKQAKGDSLRRQSKMVTDWLKAHPEYYLDESLTFRDLGVSGFTGKHLKGGLGDFLTAIEKGLVKAGDTLLIESLDRLSRQDVDQASELLRNILRSGVDVVTLSDGEHYTRESLKDPLALIKSILIMQRSHEESLRKSERIQAAWNRKKELISEGIKISKRCPAWLKLNDDRKSFSVIPDKVETVKRCFQLRLEGKSIWEIVRTLNAEGHRSMNQYKPGKFGQTSVQDLLKNRSVIGYFTPKGCEEIAGYYPSVIDETTFYKVQQLSHSRYGRRSVSGKPLSVNLFRGVIRCSECGHALIITGFSDTRSGIYRCPLRNENRCSAKGLSRKQTDGTLLALLSRLDRFDSDTTNTIDTLKLHREHISSNIEKLVQLSLEIEDLNAITSKLKQLKGELSQVDADIEKETQRLKSIDVGCLSDCDLTTKAGRIEAQLIIKSAVKEVVLNTAKRRCKVTFHNGKIIDLPITENPSEDVTEAIQSLSEVTERGLIDVDVVEI

SEQ ID NO: 25417 - DNA, 50 bp, Escherichia coli; identical to SEQ ID NO: 24817
  source 1..50: mol_type = genomic DNA

SEQ ID NO: 25418 - DNA, 40 bp, Escherichia coli; identical to SEQ ID NO: 5188
  source 1..40: mol_type = genomic DNA

SEQ ID NO: 25419 - DNA, 40 bp, Escherichia coli; identical to SEQ ID NO: 5749
  source 1..40: mol_type = genomic DNA

SEQ ID NO: 25420 - DNA, 50 bp, Escherichia coli; identical to SEQ ID NO: 5750
  source 1..50: mol_type = genomic DNA

SEQ ID NO: 25421 - protein, 507 aa, Escherichia coli
MKRVISYIRFSSEKQAKGDSLRRQSKMVTDWLKAHPEYYLDQDLSFRDLGVSGFTGKHLKGGLGDFLTAIEKGLVKAGDTLLIESLDRLSRQAVDRASELLRNILRSGVDVVTLSDGEHYTRESLKDPLALIKSILIMQRAHEESLRKAERIQAAWDAKKEAAKAGIKISRRCPAWLKLNDDRKSFSVIPEKVETVKRCFQLRLEGKSIWEIVRTLNAEGHQTLNQYKAGKFGQTSVQDLLKNRSVIGYFTPKGCEEISGYYPAIIDETTFYKVQQLSHYRYGRKPVSDKPLSVNLFKGVIRCSECGHALIITGFSDTRNGIYRCPLRNENRCSAKGLSRKQTDGTLLTLLSRLDRFDSDMTNTLDTLKLHREHISSNIEKLVQLSLEIEDLSAITIKLKQLKGELSQVDADIEKETQRLKSIDVGCLSDCDLTTKAGRIEAQLIIKSAVKEVVLNTAKRRCKVTFHNGRAITLPITENPSDNVTEAIQSLSEVTERGLIDVDVVEI

SEQ ID NO: 25422 - DNA, 50 bp, Escherichia coli; identical to SEQ ID NO: 24522
  source 1..50: mol_type = genomic DNA

SEQ ID NO: 25423 - DNA, 40 bp, Escherichia coli; identical to SEQ ID NO: 5188
  source 1..40: mol_type = genomic DNA

SEQ ID NO: 25424 - DNA, 40 bp, Escherichia coli; identical to SEQ ID NO: 5749
  source 1..40: mol_type = genomic DNA

SEQ ID NO: 25425 - DNA, 50 bp, Escherichia coli; identical to SEQ ID NO: 5750
  source 1..50: mol_type = genomic DNA

SEQ ID NO: 25426 - protein, 507 aa, Escherichia coli
MKRVISYIRFSSEKQAKGDSLRRQSKMVTDWLKAHPEYYLDESLTFRDLGVSGFTGKHLKGGLGDFLTAIEKGLVKAGDTLLIESLDRLSRQAVDQASELLRNILRSGVDIVTLSDGEHYTRESLKDPLALIKSILIMQRAHEESLRKSERIQAAWDAKKEAAKAGIKVSKRCPAWLKLNDDRKSFSVIPEKVATVKRCFQLRLEGKSIWEIVRTLNDEGHQTLNQYKPGKFGQTSVQDLLKNRSVIGYFTPKGREEIAGYFPPIIPETDFYKVQQLSYSRYGRKPASDKPLSVNLFKGVIRCSECGHALIITGFSDTRNGIYRCPLRNENRCNAKGLSRKQTDGTLLALLSRLDRFDSDMTNVIDALKLHREHISNNIEKLVQLSLEIEDLSAITIKLKQLKGELSQVDADIEKETQRLKSIDVGCLSDCDLTTKAGRIEAQLIIKSAVKEVVLNTAKRRCKVTFHNGKVIDLPITENPSEDVTEAIQSLSEVTERGLIDVDVVEI

SEQ ID NO: 25427 - DNA, 50 bp, Escherichia coli; identical to SEQ ID NO: 24522
  source 1..50: mol_type = genomic DNA

SEQ ID NO: 25428 - DNA, 40 bp, Escherichia coli; identical to SEQ ID NO: 5188
  source 1..40: mol_type = genomic DNA

SEQ ID NO: 25429 - DNA, 40 bp, Escherichia coli; identical to SEQ ID NO: 5749
  source 1..40: mol_type = genomic DNA

SEQ ID NO: 25430 - DNA, 50 bp, Escherichia coli; identical to SEQ ID NO: 5750
  source 1..50: mol_type = genomic DNA

SEQ ID NO: 25431 - protein, 507 aa, Escherichia coli
MKRVISYIRFSSEKQAKGDSLRRQSKMVTDWLKAHPEYYLDESLTFRDLGVSGFTGKHLKGGLGDFLTAIEKGLVKAGDTLLIESLDRLSRQAVDRASELLRNILRSGVDVVTLSDGEHYTRESLKDPLSLIKSILIMQRAHEESLRKSERIQAAWDAKKEAAKAGIKISRRCPAWLKLNDDRKSFSVIPEKVETVKRCFQLRLEGKSIWEIVRTLNAEGHQTLNQYKAGKFGQTSVQDLLKNRSVIGYFTPKGCEEISGYYPAIIDETTFYKVQQLSHYRYGRKPVSAKPLSVNLFKGVIRCSECGHALIITGFSDTRNGIYRCPLRNENRCSAKGLSRKQTDGTLLTLLSRLDRFDSDMTNTLDTLKLHREHISSNIEKLVQLSLEIEDLNAITSKLKQLKGELSQVDADIEKETQRLKSIDVGCLSDCDLTTKAGRIEAQLIIKSAVKEVVLNTAKRRCKVTFHNGRIIDLPITENPSEDVTEAIQSLSEVTERGLIDVDEVIV

SEQ ID NO: 25432 - DNA, 50 bp, Escherichia coli; identical to SEQ ID NO: 24522
  source 1..50: mol_type = genomic DNA

SEQ ID NO: 25433 - DNA, 40 bp, Escherichia coli; identical to SEQ ID NO: 5188
  source 1..40: mol_type = genomic DNA

SEQ ID NO: 25434 - DNA, 40 bp, Escherichia coli; identical to SEQ ID NO: 5749
  source 1..40: mol_type = genomic DNA

SEQ ID NO: 25435 - DNA, 50 bp, Escherichia coli; identical to SEQ ID NO: 5750
  source 1..50: mol_type = genomic DNA

SEQ ID NO: 25436 - protein, 507 aa, Escherichia coli
MKRVISYIRFSSEKQAKGDSLRRQSKMVTDWLKAHPEYYLDQDLSFRDLGVSGFTGKHLKGGLGDFLTAIEKGLVKAGDTLLIESLDRLSRQDVDQASELLRNILRSGVDVVTLSDGEHYTSESLKDPLALIKSILIMQRAHEESLRKSERIQAAWDAKKEAAKAGIKVSKRCPAWLKLNDDRKSFSVIPEKVETVKRCFQLRLEGKSIWEIVRTLNDEGHQTLNQYKAGKFGQTSVQDLLKNRSVIGYFTPKGREEIAGYYPAIIDETTFYKVQQLSHYRYGRKPVSDKPLSVNLFKGVIRCSECGHALIITGFSDTRSGIYRCPLRNENRCNAKGLSRKQTDGTLLALLSRLDRFDSDMTNTIDMLRLHREHISSNIEKLVQLSLEIEDLSAITSKLKQLKNELSQVDADIEKETQRLKSIDVGCLSDCDLTTKAGRIEAQLIIKSAVKEVVLNTAKRRCKVTFHNGKSITLPITENPSEDVTEAIQSLSEVTERGLIDVDVVAI

SEQ ID NO: 25437 - DNA, 50 bp, Escherichia coli; identical to SEQ ID NO: 24522
  source 1..50: mol_type = genomic DNA

SEQ ID NO: 25438 - DNA, 40 bp, Escherichia coli; identical to SEQ ID NO: 5188
  source 1..40: mol_type = genomic DNA

SEQ ID NO: 25439 - DNA, 40 bp, Escherichia coli; identical to SEQ ID NO: 5749
  source 1..40: mol_type = genomic DNA

SEQ ID NO: 25440 - DNA, 50 bp, Escherichia coli; identical to SEQ ID NO: 5750
  source 1..50: mol_type = genomic DNA

SEQ ID NO: 25441 - protein, 507 aa, Escherichia coli
MKRVISYIRFSSEKQAKGDSLRRQSKMVTDWLKAHPEYYLDQDLSFRDLGVSGFTGKHLKGGLGDFLTAIEKGLVKAGDTLLIESLDRLSRQDVDQASELLRNILRSGVDVVTLSDGEHYTKESLRDPLSLIKSILIMQRAHEESLRKAERIQAAWDAKKEAAKAGIKISKRCPAWLKLNDDRKSFSVIPEKVETVKRCFQLRLEGKSIWEIVRTLNAEGHQTLNQYKAGKFGQTSVQDLLKNRSVIGYFTPKGCEEISGYYPAIIDETTFYKVQQLSYARYGRKPASDKPMAVNLFKGVIRCSECGHALIITGFSDTRNGIYRCPLRNENRCSAKGLSRKQTDGTLLALLSRLDRFDSDMTNTIDTLKLHREHISSNIEKLVQLSLEIEDLSAITIKLKQLKGELSQVDADIEKETQRLKSIDVGCLSDCDLTTKAGRIEAQLIIKSAVKEVVLNTAKRRCKVTFHNGKVIDLPITENPSEDVTEAIQSLSEVTERGLIDVDEVII

SEQ ID NO: 25442 - DNA, 50 bp, Escherichia coli; identical to SEQ ID NO: 24522
  source 1..50: mol_type = genomic DNA

SEQ ID NO: 25443 - DNA, 40 bp, Escherichia coli
  source 1..40: mol_type = genomic DNA
cggcgttaatcgtgtgattttagacagccgcccggttcat

SEQ ID NO: 25444 - DNA, 40 bp, Escherichia coli
  source 1..40: mol_type = genomic DNA
cggcgttaatcgtgtgattaaagacagccgcccggttcat

SEQ ID NO: 25445 - DNA, 50 bp, Escherichia coli; identical to SEQ ID NO: 5750
  source 1..50: mol_type = genomic DNA

SEQ ID NO: 25446 - protein, 507 aa, Escherichia coli
MKRVISYIRFSSEKQAKGDSLRRQSKMVTDWLKAHPEYYLDQDLSFRDLGVSGFTGKHLKGGLGDFLTAIEKGLVKAGDTLLIESLDRLSRQDIDIASELLRNILRSGVDVVTLSDGEHYTSESLKDPLALIKSILIMQRAHEESLRKSERIQAAWNRKKELISEGIKVSKRCPAWLRLNDDRKSFSVIPEKVETVKRCFQLRLEGKSIWAIVKALNDEGHQSMSQYKPGKFGQTSVQDLLKNRSVIGYFTPKGCEEISGYYPAIIDETTFYKVQQLSHYRYGRKPVSDKPLSVNLFKGVIRCSECGHALIITGFSDTRNGIYRCPLRNENRCSAKGLSRKQTDGTLLTLLSRLDRFDSDTTNIIDTLKLHREHISSNIEKLVQLSLEIEDLSAITSKLKQLKGELSQVDADIEKETQRLKSIDVGCLSDCDLTTKAGRIEAQLIIKSAVKEVVLNTAKRRCKVTFHNGKAITLPITENPSEDVTEAIQSLSEVTERGLIDVDVVEI

SEQ ID NO: 25447 - DNA, 50 bp, Escherichia coli; identical to SEQ ID NO: 24522
  source 1..50: mol_type = genomic DNA

SEQ ID NO: 25448 - DNA, 40 bp, Escherichia coli; identical to SEQ ID NO: 5188
  source 1..40: mol_type = genomic DNA

SEQ ID NO: 25449 - DNA, 40 bp, Escherichia coli; identical to SEQ ID NO: 5749
  source 1..40: mol_type = genomic DNA

SEQ ID NO: 25450 - DNA, 50 bp, Escherichia coli; identical to SEQ ID NO: 5750
  source 1..50: mol_type = genomic DNA

SEQ ID NO: 25451 - protein, 507 aa, Escherichia coli
MKRVISYIRFSSEKQAKGDSLRRQSKMVTDWLKAHPEYYLDQDLSFRDLGVSGFTGKHLKGGLGDFLTAIEKGLVKAGDTLLIESLDRLSRQDVDQASELLRNILRSGVDVVTLSDGEHYTRESLRDPLALIKSILIMQRAHEESLRKAERIQAAWDAKKEAAKAGIKVSKRCPAWLKLNDDRKSFSVIPEKVETVKRCFQLRLEGKSIWEIVRTLNDEGHQSMSQYKPGSFGQSSVQDLLKNRSVIGYFTPKGREEIAGYFPPIIPETDFYKVQQLSYSRYGRKPASDKPLSVNLFKGVIRCSECGHALIITGFSDTRNGIYRCPLRNENRCSAKGLSRKQTDGTLLALLSRLDRFDSDTTNTIDTLKLHREHISSNIEKLVQLSLEIEDLSAITSKLRQLKGELSQVDADIEKETQRLKSIDVGCLSDCDLTTKAGRIEAQLIIRSAVKEVVLNTAKRRCKVTFHNGRAITLPITENPSEDVTEAIQSLSEVTERGLIDVDVVEI

SEQ ID NO: 25452 - DNA, 50 bp, Escherichia coli; identical to SEQ ID NO: 24522
  source 1..50: mol_type = genomic DNA

SEQ ID NO: 25453 - DNA, 40 bp, Escherichia coli; identical to SEQ ID NO: 5188
  source 1..40: mol_type = genomic DNA

SEQ ID NO: 25454 - DNA, 40 bp, Escherichia coli; identical to SEQ ID NO: 5749
  source 1..40: mol_type = genomic DNA

SEQ ID NO: 25455 - DNA, 50 bp, Escherichia coli; identical to SEQ ID NO: 5750
  source 1..50: mol_type = genomic DNA

SEQ ID NO: 25456 - protein, 507 aa, Escherichia coli
MKRVISYIRFSSEKQSRGDSLRRQSKMVTDWLKAHPEYYLDQDLSFRDLGVSGFTGKHLKGGLGDFLTAIEKGLVKAGDTLLIESLDRLSRQAVDRASELLRNILRSGVDVVTLSDGEHYTSESLKDPLSLIKSILIMQRAHEESLRKAERIQAAWDAKKEAAKAGIKVSKRCPAWLRLNDDRKSFSVIPEKVETVKRCFQLRLEGKSIWEIVRTLNDEGHQSMSQYKPGKFGQTSVQDLLKNRSVIGYFTPKGCEEIAGYYPAIIDETTFYKVQQLSYARYGRKPASDKPLSVNLFKGVIRCSECGHALIITGFSDTRSGIYRCPLRNENRCSAKGLSRKQTDSTLLALLSRLDRFDSDMTNTVDTLKLHREHISNNIEKLVQLSLEIEDLSAITSKLKQLKGELSQVDADIEKETQRLKSIDVGCLSDCDLTTKAGRIEAQLIIKSAVKEVVLNTAKRRCKVTFHNGKLIDLPITETPSDNVTEAIQSLSEVTERGLIDVDEVII

SEQ ID NO: 25457 - DNA, 50 bp, Escherichia coli; identical to SEQ ID NO: 24522
  source 1..50: mol_type = genomic DNA

SEQ ID NO: 25458 - DNA, 40 bp, Escherichia coli; identical to SEQ ID NO: 5188
  source 1..40: mol_type = genomic DNA

SEQ ID NO: 25459 - DNA, 40 bp, Escherichia coli; identical to SEQ ID NO: 5749
  source 1..40: mol_type = genomic DNA

SEQ ID NO: 25460 - DNA, 50 bp, Escherichia coli; identical to SEQ ID NO: 5750
  source 1..50: mol_type = genomic DNA

SEQ ID NO: 25461 - protein, 507 aa, Escherichia fergusonii
MKRVISYIRFSSEKQAKGDSLRRQSKMVTDWLKAHPEYYLDQDLSFRDLGVSGFTGKHLKGGLGDFLTAIEKGLVKAGDTLLIESLDRLSRQDVDQASELLRNILRSGVDVVTLSDGEHYTRESLKDPLALIKSILIMQRSHEESLRKSERIQAAWDAKKEAAKAGIKISRRCPAWLKLNDDRKSFSVIPEKVETVRRCFQLRLEGKSIWEIVRILNDEGHQTLNQYKAGKFGQTSVQDLLKNRSVIGYFTPKGCEEIAGYYPAIIDETTFYKVQQLSYARYGRKPASDKPLSVNLFKGVIRCSECGHALIITGFSDTRSGIYRCPLRNENRCNAKGLSRKQTDSTLLALLSRLDRFDSDMTNTVDTLKLHREHISNNIEKLVQLSLEIEDLSAITSKLKQLKGELSQVDADIEKETQRLKSIDVGCLSDCDLTTKAGRIEAQLIIKSAVKEVVLNTAKRRCKVTFHNGKVIDLPITENPSEDVTEAIQSLSEVTERGLIDVDEVII

SEQ ID NO: 25462 - DNA, 50 bp, Escherichia fergusonii; identical to SEQ ID NO: 24522
  source 1..50: mol_type = genomic DNA

SEQ ID NO: 25463 - DNA, 40 bp, Escherichia fergusonii; identical to SEQ ID NO: 5188
  source 1..40: mol_type = genomic DNA

SEQ ID NO: 25464 - DNA, 40 bp, Escherichia fergusonii; identical to SEQ ID NO: 5749
  source 1..40: mol_type = genomic DNA

SEQ ID NO: 25465 - DNA, 50 bp, Escherichia fergusonii; identical to SEQ ID NO: 5750
  source 1..50: mol_type = genomic DNA

SEQ ID NO: 25466 - protein, 507 aa, Escherichia fergusonii
MKRVISYIRFSSEKQAKGDSLRRQSKMVTDWLKAHPEYYLDQDLSFRDLGVSGFTGKHLKGGLGDFLTAIEKGLVKAGDTLLIESLDRLSRQDIDIASELLRNILRSGVDVVTLSDGEHYTRESLRDPLSLIKSILIMQRAHEESLRKAERIQAAWDAKKEAAKAGIKISRRCPAWLKLNDDRKSFSVIPEKVETVKRCFQLRLEGKSIWEIVRTLNAEGHQTLNQYKAGSFGQSSVQDLLKNRSVIGYFTPKGCEEIAGYYPAIIDETTFYKVQQLSYARHGRKPASDKPLSVNLFKGVIRCSECGHALIITGFSDTRNGIYRCPLRNENRCSAKGLSRKQTDGTLLTLLSRLDRFDSDTTNTVDMLRLHREHISSNIEKLVQLSLEIEDLSAITSKLKQLKGELSQVDADIEKETQRLKSIDVGCLSDCDLTTKAGRIEAQLIIKSAVKEVVLNTAKRRCKVTFHNGKIIDLPITENPSEDVTEAIQSLSEVTERGLIDVDVVAI

SEQ ID NO: 25467 - DNA, 50 bp, Escherichia fergusonii; identical to SEQ ID NO: 24522
  source 1..50: mol_type = genomic DNA

SEQ ID NO: 25468 - DNA, 40 bp, Escherichia fergusonii; identical to SEQ ID NO: 5188
  source 1..40: mol_type = genomic DNA

SEQ ID NO: 25469 - DNA, 40 bp, Escherichia fergusonii; identical to SEQ ID NO: 5749
  source 1..40: mol_type = genomic DNA

SEQ ID NO: 25470 - DNA, 50 bp, Escherichia fergusonii; identical to SEQ ID NO: 5750
  source 1..50: mol_type = genomic DNA

SEQ ID NO: 25471 - protein, 507 aa, Escherichia coli
MKRVISYIRFSSEKQAKGDSLRRQSKLVTDWLKAHPEYYLDESLTFRDLGVSGFTGKHLKGGLGDFLTAIEKGLVKAGDTLLIESLDRLSRQDIDIASELLRRILRAGVDVVTLSDGEHYTKESLRDPLSLIKSILIMQRAHEESLRKAERIQAAWDAKKEAAKAGIKVSKRCPAWLKLNDDRKSFSIIPEKVETVKRCFQLRLEGKSIWEIVRTLNDEGHQTLNQYKAGSFGQSSVQDLLKNRSVIGYFTPKGCEEIAGYYPAIIDETTFYKVQQLSYARYGRKPASDKPLSVNLFKGVIRCSECGHALIITGFSDTRSGIYRCPLRNENRCSAKGLSRKQTDGTLLALLSRLDRFDSDMTNTVDTLKLHREHISSNIEKLVQLSLEIEDLSAITSKLKQLKGELSQVDADIEKETQRLKSIDVGCLSDCDLTTKAGRIEAQLIIKSAVKEVVLNTAKRRCKVTFHNGKVIDLSITENPSEDVTEAIQSLSEVTERGLIDVDEVII

SEQ ID NO: 25472 - DNA, 50 bp, Escherichia coli; identical to SEQ ID NO: 24817
  source 1..50: mol_type = genomic DNA

SEQ ID NO: 25473 - DNA, 40 bp, Escherichia coli
  source 1..40: mol_type = genomic DNA
cggcgttaatcgggtgattttagatagccgcccggttcat

SEQ ID NO: 25474 - DNA, 40 bp, Escherichia coli
  source 1..40: mol_type = genomic DNA
cggcgttaatcgggtgattaaagatagccgcccggttcat

SEQ ID NO: 25475 - DNA, 50 bp, Escherichia coli; identical to SEQ ID NO: 5750
  source 1..50: mol_type = genomic DNA

SEQ ID NO: 25476 - protein, 507 aa, Escherichia coli
MKRVISYIRFSSEKQAKGDSLRRQSKMVTDWLKAHPEYYLDESLTFRDLGVSGFTGKHLKGGLGDFLTAIEKGLVKAGDTLLIESLDRLSRQDVDQASELLRNILRSGVDVVTLSDGEHYTSESLKDPLALIKSILIMQRAHEESLRKSERIQAAWDAKKEAAKAGIKVSKRCPAWLKLNDDRKSFSVIPEKVETVKRCFQLRLEGKSIWEIVRTLNDEGHQTLNQYKAGKFGQTSVQDLLKNRSVIGYFTPKGCEEISGYYPAIIDETTFYKVQQLSHYRYGRKPVSDKPLSVNLFKGVIHCSECGHALIITGFSDTRNGIYRCPLRNENRCSAKGLSRKQTDGTLLALLSRLDRFDSDMTNTVDTLKLHREHISSNIEKLVQLSLEIEDLSAITSKLKQLKGELSQVDADIEKETQRLKSIDVGCLSDCDLTTKAGRIEAQLIIKSAVKEVVLNTAKRRCKVTFHNGKVIGLSITENPSEDVTEAIQSLSEVTERGLIDVDEVII

SEQ ID NO: 25477 - DNA, 50 bp, Escherichia coli; identical to SEQ ID NO: 24522
  source 1..50: mol_type = genomic DNA

SEQ ID NO: 25478 - DNA, 40 bp, Escherichia coli; identical to SEQ ID NO: 22763
  source 1..40: mol_type = genomic DNA

SEQ ID NO: 25479 - DNA, 40 bp, Escherichia coli; identical to SEQ ID NO: 24634
  source 1..40: mol_type = genomic DNA

SEQ ID NO: 25480 - DNA, 50 bp, Escherichia coli; identical to SEQ ID NO: 5750
  source 1..50: mol_type = genomic DNA

SEQ ID NO: 25481 - protein, 507 aa, Escherichia coli
MKRVISYIRFSSEKQSRGDSLRRQSKMVTDWLKAHPEYHLDQDLSFRDLGVSGFTGKHLKGGLGDFLTAIEKGLVKAGDTLLIESLDRLSRQDVDQASELLRNILRSGVDVVTLSDGEHYTRESLRDSLALIKSILIMQRAHEESLRKAERIQAAWDAKKEAAKAGIKVSKRCPAWLKLNDDRKSFSVIPEKVETVKRCFQLRLEGKSIWEIVRTLNDEGHQTLNQYKAGKFGQTSVQDLLKNRSVIGYFTPKGCEEISGYYPAIIDETTFYKVQQLSHSRYGRKPVSAKPLSVNLFKGVIRCSECGHALIITGFSDTRNGIYRCPLRNENRCSAKGLSRKQTDGTLLALLSRLDRFDSDTTNIIDTLKLHREHISNNIEKLVQLSLEIEDLSAITSKLKQLKGELSQVDADIEKETQRLKSIDVGCLSDCDLTTKAGRIEAQLIIKSAVKEVVLNTAKRRCKVTFHNGKVIDLPITENPSEDVTEAIQSLSEVTERGLIDVDEVII

SEQ ID NO: 25482 - DNA, 50 bp, Escherichia coli; identical to SEQ ID NO: 24522
  source 1..50: mol_type = genomic DNA

SEQ ID NO: 25483 - DNA, 40 bp, Escherichia coli; identical to SEQ ID NO: 5188
  source 1..40: mol_type = genomic DNA

SEQ ID NO: 25484 - DNA, 40 bp, Escherichia coli; identical to SEQ ID NO: 5749
  source 1..40: mol_type = genomic DNA

SEQ ID NO: 25485 - DNA, 50 bp, Escherichia coli; identical to SEQ ID NO: 5750
  source 1..50: mol_type = genomic DNA

SEQ ID NO: 25486 - protein, 507 aa, Escherichia coli
MKRVISYIRFSSEKQAKGDSLRRQSKMVTDWLKAHPEYYLDQDLSFRDLGVSGFTGKHLKGGLGDFLTAIEKGLVKAGDTLLIESLDRLSRQDIDIASELLRNILRSGVDVVTLSDGEHYTRESLKDPLALIKSILIMQRAHEESLRKSERIQAAWNRKKELISEGIKVSKRCPAWLKLNDDRKTFSVIPEKVETVKRCFQLRLEGKSIWAIVKALNDEDRQSMNQYKPGKFGQTSVQDLLKNRSVIGYFTPKGCEEIAGYYPAIIDETTFYKVQQLSYARHGRKPASAKPLSVNLFKGVIRCSECGHALIITGFSDTRNGIYRCPLRNENRCSAKGLSRKQTDGTLLALLSRLDRFDSDTTNIIDTLKLHREHISSNIEKLVQLSLEIEDLSAITSKLKQLKGELSQVDADIEKETQRLKSIDVGCLSDCDLTTKAGRIEAQLIIKSAVKEVVLNTVKRRCKVTFHNGKVIDLSITENPSEDVTEAIQSLSEVTERGLIDVDEVII

SEQ ID NO: 25487 - DNA, 50 bp, Escherichia coli; identical to SEQ ID NO: 24522
  source 1..50: mol_type = genomic DNA

SEQ ID NO: 25488 - DNA, 40 bp, Escherichia coli; identical to SEQ ID NO: 5188
  source 1..40: mol_type = genomic DNA

SEQ ID NO: 25489 - DNA, 40 bp, Escherichia coli; identical to SEQ ID NO: 5749
  source 1..40: mol_type = genomic DNA

SEQ ID NO: 25490 - DNA, 50 bp, Escherichia coli; identical to SEQ ID NO: 5750
  source 1..50: mol_type = genomic DNA

SEQ ID NO: 25491 - protein, 507 aa, Escherichia coli
MKRVISYIRFSSEKQAKGDSLRRQSKMVTDWLKAHPEYYLDQDLSFRDLGVSGFTGKHLKGGLGDFLTAIEKGLVKAGDTLLIESLDRLSRQDVDQASELLRNILRSGVDVVTLSDGEHYTKESLRDPLSLIKSILIMQRAHEESLRKAERIQAAWDAKKEAAKAGIKISKRCPAWLKLNDDRKSFSVIPEKVETVKRCFQLRLEGKSIWEIVRTLNAEGHQTLNQYKAGKFGQTSVQDLLKNRSVIGYFTPKGCEEISGYYPAIIDETTFYKVQQLSYARYGRKPASDKPMAVNLFKGVIRCSECGHALIITGFSDTRNGIYRCPLRNENRCSAKGLSRKQTDGTLLALLSRLDRFDSDMTNTIDTLKLHREHISSNIEKLVQLSLEIEDLSAITSKLRQLKNELSQVDADIEKETQRLKSIDVGCLSDCDLTTKAGRIEAQLIIKSAVKEVVLNTAKRRCKVTFHNGKSITLPITENPSEDVTEAIQSLSEVTERGLIDVDVVEI

SEQ ID NO: 25492 - DNA, 50 bp, Escherichia coli; identical to SEQ ID NO: 24522
  source 1..50: mol_type = genomic DNA

SEQ ID NO: 25493 - DNA, 40 bp, Escherichia coli; identical to SEQ ID NO: 5188
  source 1..40: mol_type = genomic DNA

SEQ ID NO: 25494 - DNA, 40 bp, Escherichia coli; identical to SEQ ID NO: 5749
  source 1..40: mol_type = genomic DNA

SEQ ID NO: 25495 - DNA, 50 bp, Escherichia coli; identical to SEQ ID NO: 5750
  source 1..50: mol_type = genomic DNA

SEQ ID NO: 25496 - protein, 507 aa, Escherichia coli
MKRVISYIRFSSEKQAKGDSLRRQSKMVTDWLKAHPEYYLDESLTFRDLGVSGFTGKHLKGGLGDFLTAIEKGLVKAGDTLLIESLDRLSRQDVDQASELLRNILRSGVDVVTLSDGEHYTRESLKDPLALIKSILIMQRAHEESLRKAERIQAAWDAKKEAAKAGIKISKRCPAWLKLNDDRKSFSIIPEKVETVKRCFQLRLEGKSIWAIVKALNDEGHQTLNQYKAGKFGQTSVQDLLKNRSVIGYFTPKGCEEIAGYYPAIIDETTFYKVQQLSHSRYGKRSVSDKPLSVNLFKGVIRCSECGHALIITGFSDTRNGIYRCPLRNENRCSAKGLSRKQTDGTLLALLSRLDRFDSDTTNIIDTLKLHREHISSNIEKLVQLSLEIEDLSAITSKLKQLKGELSQVDADIEKETQRLKSIDVGCLSDCDLTTKAGRIEAQLIIKSAVKEVVLNTAKRRCKVTFHNGKVIDLSITENPSEDVTEAIQSLSEVTERGLIDVDEVII

SEQ ID NO: 25497 - DNA, 50 bp, Escherichia coli; identical to SEQ ID NO: 24522
  source 1..50: mol_type = genomic DNA

SEQ ID NO: 25498 - DNA, 40 bp, Escherichia coli; identical to SEQ ID NO: 5188
  source 1..40: mol_type = genomic DNA

SEQ ID NO: 25499 - DNA, 40 bp, Escherichia coli; identical to SEQ ID NO: 5749
  source 1..40: mol_type = genomic DNA

SEQ ID NO: 25500 - DNA, 50 bp, Escherichia coli; identical to SEQ ID NO: 5750
  source 1..50: mol_type = genomic DNA

SEQ ID NO: 25501 - protein, 507 aa, Escherichia coli
MKRVISYIRFSSEKQAKGDSLRRQSKMVTDWLKAHPEYYLDQDLSFRDLGVSGFTGKHLKGGLGDFLTAIEKGLVKAGDTLLIESLDRLSRQAVDRASELLRNILRSGVDVVTLSDGEHYTRESLKDPLALIKSILIMQRAHEESLRKAERIQAAWNRKKELISEGIKISKRCPAWLKLNDDRKSFSVIPEKVETVKRCFQLRLEGKSIWEIVRTLNAEGHQTLNQYKAGKFGQTSVQDLLKNRSVIGYFTPKGCEEISGYYPAIIDETTFYKVQQLSYARYGRKPASDKPLSVNLFKGVIRCSECGHALIITGFSDTRSGIYRCPLRNENRCSAKGLSRKQTDGTLLTLLSRLDRFDSDTTNTVDMLRLHREHISSNIEKLVQLSLEIEDLNAITSKLKQLKGELSQVDADIEKETQRLKSIDVGCLSDCDLTTKAGRIEAQLIIKSAVKEVVLNTAKRRCKVTFHNGKIINLPITENPSEDVTEAIQSLSEVTERGLIDVDVVAI

SEQ ID NO: 25502 - DNA, 50 bp, Escherichia coli; identical to SEQ ID NO: 24522
  source 1..50: mol_type = genomic DNA

SEQ ID NO: 25503 - DNA, 40 bp, Escherichia coli; identical to SEQ ID NO: 5188
  source 1..40: mol_type = genomic DNA

SEQ ID NO: 25504 - DNA, 40 bp, Escherichia coli; identical to SEQ ID NO: 5749
  source 1..40: mol_type = genomic DNA

SEQ ID NO: 25505 - DNA, 50 bp, Escherichia coli; identical to SEQ ID NO: 5750
  source 1..50: mol_type = genomic DNA

SEQ ID NO: 25506 - protein, 507 aa, Escherichia coli
MKRVISYIRFSSEKQAKGDSLRRQSKMVTDWLKAHPEYYLDESLTFRDLGVSGFTGKHLKGGLGDFLTAIEKGLVKAGDTLLIESLDRLSRQAVDRASELLRNILRSGVDVVTLSDGEHYTSESLKDPLALIKSILIMQRAHEESLRKSERIQAAWDAKKEAAKAGIKVSKRCPAWLKLNDDRKSFSVIPEKVETVKRCFQLRLEGKSIWEIVRTLNDEGHQTLNQYKAGKFGQTSVQDLLKNRSVIGYFTPKGREEIAGYFPSIIHETDFYKVQQLSYARHGRKPASAKPLSVNLFKGVIRCSECGHALIITGFSDTRNGIYRCPLRNENRCSAKGLSRKQTDGTLLALLSRLDRFDSDMTNTIDTLKLRREHISSNIEKLVQLSLEIEDLSAITSKLKQLKNELSQVDADIEKETQRLKSIDVGCLSDCDLTTKAGRIEAQLIIKSAVKEVVLNTAKRRCKVTFHNGKIIDLPITENPSEDVTEAIQSLSEVTERGLIDVDEVII

SEQ ID NO: 25507 - DNA, 50 bp, Escherichia coli; identical to SEQ ID NO: 24522
  source 1..50: mol_type = genomic DNA

SEQ ID NO: 25508 - DNA, 40 bp, Escherichia coli; identical to SEQ ID NO: 5188
  source 1..40: mol_type = genomic DNA

SEQ ID NO: 25509 - DNA, 40 bp, Escherichia coli; identical to SEQ ID NO: 5749
  source 1..40: mol_type = genomic DNA

SEQ ID NO: 25510 - DNA, 50 bp, Escherichia coli; identical to SEQ ID NO: 5750
  source 1..50: mol_type = genomic DNA

SEQ ID NO: 25511 - protein, 507 aa, Escherichia coli
MKRVISYIRFSSEKQAKGDSLRRQSKMVTDWLKAHPEYYLDQDLSFRDLGVSGFTGKHLKGGLGDFLTAIEKGLVKAGDTLLIESLDRLSRQDVDQASELLRNILRSGVDVVTLSDGEHYTSESLKDPLALIKSILIMQRAHEESLRKSERIQAAWNRKKELISEGIKISKRCPAWLRLNDDRKSFSVIPDKVETVKRCFQLRLEGKSIWEIVRTMNAEGRQTLHQYKAGSFGQTSVQDLLKNRSVIGYFTPKGCCEIAGYYPSIIPESDFYKVQQLSHSRHGRKPVSAKPLSVNLFKGVIRCSECGHALIITGFSDTRNGIYRCPLRNENRCSAKGLSRKQTDGTLLALLSRLDRFDSDTTNTIDMLRLHREHISSNIEKLVQLSLEIEDLNAITSKLKQLKNELSQVDADIEKETQRLKSIDVGCLSDCDLTTKAGRIEAQLIIKSAVKEVVLNTAKRRCKVTFHNGKSITLPITENPSEDVTEAIQSLSEVTERGLIDVDEVII

SEQ ID NO: 25512 - DNA, 50 bp, Escherichia coli; identical to SEQ ID NO: 24522
  source 1..50: mol_type = genomic DNA

SEQ ID NO: 25513 - DNA, 40 bp, Escherichia coli; identical to SEQ ID NO: 5188
  source 1..40: mol_type = genomic DNA

SEQ ID NO: 25514 - DNA, 40 bp, Escherichia coli; identical to SEQ ID NO: 5749
  source 1..40: mol_type = genomic DNA

SEQ ID NO: 25515 - DNA, 50 bp, Escherichia coli; identical to SEQ ID NO: 5750
  source 1..50: mol_type = genomic DNA

SEQ ID NO: 25516 - protein, 507 aa, Escherichia coli
MKRVISYIRFSSEKQSRGDSLRRQSKMVNDWLKAHPEYYLDQDLSFRDLGVSGFTGKHLKGGLGDFLTAIEKGLVKAGDTLLIESLDRLSRQDIDIASELLRNILRSGVDVVTLSDGEHYTRESLKDPLALIKSILIMQRAHEESLRKAERIQAAWDAKKEAAKAGIKVSKRCPAWLRLNDDRKSFSVIPEKVETVKRCFQLRLEGKSIWEIVRTLNDEGRQTLNQHKAGSFGQSSVQDLLKNRSVIGYFTPKGCEEIAGYYPAIIDETTFYKVQQLSYARYGRKPVSAKPLSVNLFKGVIRCSECGHALIITGFSDTRNGIYRCPLRNENRCSAKGLSRKQTDGTLLALLSRLDRFDSDTTNIIDTLKLHREHISSNIEKLVQLSLEIEDLSAITSKLKQLKGELSQVDADIEKETQRLKSIDVGCLSDCDLTTKAGRIEAQLIIKSAVKEVVLNTAKRRCKVTFHNGKSITLPITENPSEDVTEAIQSLSEVTERGLIDVDEVII

SEQ ID NO: 25517 - DNA, 50 bp, Escherichia coli; identical to SEQ ID NO: 24522
  source 1..50: mol_type = genomic DNA

SEQ ID NO: 25518 - DNA, 40 bp, Escherichia coli; identical to SEQ ID NO: 5188
  source 1..40: mol_type = genomic DNA

SEQ ID NO: 25519 - DNA, 40 bp, Escherichia coli; identical to SEQ ID NO: 5749
  source 1..40: mol_type = genomic DNA

SEQ ID NO: 25520 - DNA, 50 bp, Escherichia coli; identical to SEQ ID NO: 5750
  source 1..50: mol_type = genomic DNA

SEQ ID NO: 25521 - protein, 507 aa, Escherichia coli
MKRVISYIRFSSEKQAKGDSLRRQSKMVTDWLKAHPEYYLDQDLSFRDLGVSGFTGKHLKGGLGDFLTAIEKGLVKAGDTLLIESLDRLSRQAVDRASELLRNILRSGVDVVTLSDGEHYTSESLKDPLALIKSILIMQRAHEESLRKSERIQAAWNRKKELISEGIKISKRCPAWLKLNDDRKSFSVIPDKVETVKRCFQLRLEGKSIWEIVRTLNDEGHQTLNQYKAGKFGQTSVQDLLKNRSVIGYFTPKGREEIAGYFPPIIPETDFYKVQQLSYSRYGRKPASDKPLSVNLFKGVIRCSECGHALIITGFSDTRSGIYRCPLRNENRCSAKGLSRKQTDGTLLTLLSRLDRFDSDTTNTIDTLKLHREHISSNIEKLVQLSLEIEDLSAITSKLKQLKGELSQVDADIEKETQRLKSIDVGCLSDCDLTTKAGRIEAQLIIKSAVKEVVLNTAKRRCKVTFHNGKVIDLSITENPSEDVTEAIQSLSEVTERGLIDVDEVII

SEQ ID NO: 25522 - DNA, 50 bp, Escherichia coli; identical to SEQ ID NO: 24522
  source 1..50: mol_type = genomic DNA

SEQ ID NO: 25523 - DNA, 40 bp, Escherichia coli; identical to SEQ ID NO: 5188
  source 1..40: mol_type = genomic DNA

SEQ ID NO: 25524 - DNA, 40 bp, Escherichia coli; identical to SEQ ID NO: 5749
  source 1..40: mol_type = genomic DNA

SEQ ID NO: 25525 - DNA, 50 bp, Escherichia coli; identical to SEQ ID NO: 5750
  source 1..50: mol_type = genomic DNA

SEQ ID NO: 25526 - protein, 507 aa, Escherichia coli
MKRVISYIRFSSEKQAKGDSLRRQSKMVTDWLKAHPEYYLDESLTFRDLGVSGFTGKHLKGGLGDFLTAIEKGLVKAGDTLLIESLDRLSRQNVDRASELLRNILRSGVDVVTLSDGEHYTKESLRDPLSLIKSILIMQRSHEESLRKSERIQAAWNRKKELISEGIKISKRCPAWLKLNDDRKSFSVIPEKVETVKRCFQLRLEGKSIWEIVRTLNAEGHQTLNQYKAGSFGQTSVQDLLKNRSVIGYFTPKGCEEISGYYPSIIHETDFYKVQQLSYSRYGRKPASDKPMAVNLFKGVIRCSECGHALIITGFSDTRSGIYRCPLRNENRCSAKGLSRKQTDGTLLALLSRLDRFDSDMTNTIDTLKLHREHISSNIEKLVQLSLEIEDLSAITSKLKQLKNELSQVDADIEKETQRLKSIDVGCLSDCDLTTKAGRIEAQLIIRSAVKEVVLNTAKRRCKVTFHNSKSITLSITENPSEDVTEAIQSLSEVTERGLIDVDEVII

SEQ ID NO: 25527 - DNA, 50 bp, Escherichia coli; identical to SEQ ID NO: 24522
  source 1..50: mol_type = genomic DNA

SEQ ID NO: 25528 - DNA, 40 bp, Escherichia coli; identical to SEQ ID NO: 5188
  source 1..40: mol_type = genomic DNA

SEQ ID NO: 25529 - DNA, 40 bp, Escherichia coli; identical to SEQ ID NO: 5749
  source 1..40: mol_type = genomic DNA

SEQ ID NO: 25530 - DNA, 50 bp, Escherichia coli; identical to SEQ ID NO: 5750
  source 1..50: mol_type = genomic DNA

SEQ ID NO: 25531 - protein, 507 aa, Escherichia coli
MKRVISYFRFSSEKQAKGDSLRRQSKMVTDWLKAHPEYYLDQDLSFRDLGVSGFTGKHLKGGLGDFLTATEKGLVKAGDTLLIESLDRLSRQAVDRASELLRNILRSGVDVVTLSDGEHYTSESLKDPLALIKSILIMQRAHEESLRKSERIQAAWDAKKEAAKAGIKVSKRCPAWLKLNDDRKSFSVIPEKVETVKRCFQLRLEGKSIWEIVRTLNDECHQSMNQYKPGKFGQTSVQDLLKNRSVIGYFTPKGCEEIAGYYPAIIDETTFYKVQQLSHSRYGRKPVSAKPLSVNLFKGVIRCSECGHALIITGFSDTRNGIYRCPLRNENRCSAKGLSRKQTDGTLLALLSRLDRFDSDTTNTIDTLKLHREHISSNIEKLVQLSLEIEDLNAITSKLKQLKGELSQVDADIEKETQRLKSIDVGCLSDCDLTTKVGRIEAQLIIKSAVKEVVLNTAKRRCKVTFHNGKIIDLPITENPSEDVTEAIQSLSEVTERGLIDVDVVEI

SEQ ID NO: 25532 - DNA, 50 bp, Escherichia coli; identical to SEQ ID NO: 24522
  source 1..50: mol_type = genomic DNA

SEQ ID NO: 25533 - DNA, 40 bp, Escherichia coli; identical to SEQ ID NO: 5188
  source 1..40: mol_type = genomic DNA

SEQ ID NO: 25534 - DNA, 40 bp, Escherichia coli; identical to SEQ ID NO: 5749
  source 1..40: mol_type = genomic DNA

SEQ ID NO: 25535 - DNA, 50 bp, Escherichia coli; identical to SEQ ID NO: 5750
  source 1..50: mol_type = genomic DNA

SEQ ID NO: 25536 - protein, 507 aa, Escherichia coli
MKRVISYIRFSSEKQAKGDSLRRQSKMVTDWLKAHPEYYLDESLTFRDLGVSGFTGKHLKGGLGDFLTAIEKGLVKAGDTLLIESLDRLSRQAVDRASELLRNILRSGVDVVTLSDGEHYTSESLKDPLALIKSILIMQRAHEESLRKSERIQAAWNRKKELISEGIKVSKRCPAWLRLNDDRKSFSVIPEKVETVKRCFQLRLEGKSIWEIVRTLNDEGHQSMSQYKPGKFGQTSVQDLLKNRSVIGYFTPKGREEISGYYPAIVDETTFYKVQQLSHSRYGRKPVSAKPLSVNLFKGVIRCSECGHALIITGFSDTRNGIYRCPLRNENRCSAKGLSRKQTDGTLLALLSRLDRFDSDTTNTIDTLKLHREHISSNIEKLVQLSLEIEDLSAITSKLKQLKGELSQVDADIEKETQRLKSIDVGCLSDCDLTTKAGRIEAQLIIKSAVKEVVLNTAKRRCKVTFHNGKAITLPITENPSEDVTEAIQSLSEVTERGLIDVDVVEI

SEQ ID NO: 25537 - DNA, 50 bp, Escherichia coli; identical to SEQ ID NO: 24522
  source 1..50: mol_type = genomic DNA

SEQ ID NO: 25538 - DNA, 40 bp, Escherichia coli; identical to SEQ ID NO: 5188
  source 1..40: mol_type = genomic DNA

SEQ ID NO: 25539 - DNA, 40 bp, Escherichia coli; identical to SEQ ID NO: 5749
  source 1..40: mol_type = genomic DNA

SEQ ID NO: 25540 - DNA, 50 bp, Escherichia coli; identical to SEQ ID NO: 5750
  source 1..50: mol_type = genomic DNA

SEQ ID NO: 25541 - protein, 507 aa, Escherichia coli
MKRVISYIRFSSEKQAKGDSLRRQSKMVTDWLKAHPEYYLDQDLSFRDLGVSGFTGKHLKGGLGDFLTAIEKGLVKAGDTLLIESLDRLSRQDVDQASELLRNILRSGVDVVTLSDGEHYTSESLKDPLALIKSILIMQRAHEESLRKAERIQAAWDAKKEAAKAGIKISKRCPAWLKLNDDRKSFSVIPDKVETVKRCFQLRLEGKSIWEIVRTLNDEGHQTLNQYKAGKFGQTSVQDLLKNRSVIGYFTPKGREEIAGYFPPIIPETDFYKVQQLSYARYGRKPASDKPLSVNLFKGVIRCSECGHALIITGFSDTRSGIYRCPLRNENRCSAKGLSRKQTDGTLLTLLSRLDRFDSDTTNTIDTLKLHREHISSNIEKLVQLSLEIEDLSAITSKLKQLKNELSQVDADIEKETQRLKSIDVGCLSDCDLTTKAGRIEAQLIIKSAVKEVILNTAKRRCKVTFHNGKVIDLPITETPSEDVTEAIQSLSEVTERGLIDVDEVII

SEQ ID NO: 25542 - DNA, 50 bp, Escherichia coli; identical to SEQ ID NO: 24522
  source 1..50: mol_type = genomic DNA

SEQ ID NO: 25543 - DNA, 40 bp, Escherichia coli; identical to SEQ ID NO: 5188
  source 1..40: mol_type = genomic DNA

SEQ ID NO: 25544 - DNA, 40 bp, Escherichia coli; identical to SEQ ID NO: 5749
  source 1..40: mol_type = genomic DNA

SEQ ID NO: 25545 - DNA, 50 bp, Escherichia coli; identical to SEQ ID NO: 5750
  source 1..50: mol_type = genomic DNA

SEQ ID NO: 25546 - protein, 507 aa, Escherichia coli
MKRVISYIRFSSEKQSRGDSLRRQSKMVTDWLKAHPEYYLDESLTFRDLGVSGFTGKHLKGGLGDFLTAIEKGLVKAGDTLLIESLDRLSRQAVDRASELLRNILRSGVDVVTLSDGEHYTSESLKDPLALIKSILIMQRAHEESLRKSERIQAAWDAKKEAAKAGIKVSKRCPAWLKLNDDRKSFSVIPEKVATVKRCFQLRLEGKSIWEIVRTLNDEGHQTLNQYKPGKFGQTSVQDLLKNRSVIGYFTPKGCEEISGYYPAIIDETTFYKVQQLSYARYGRKPASDKPMAVNLFKGVIRCSECGHALIITGFSDTRNGIYRCPLRNENRCSAKGLSRKQTDGTLLALLSRLDRFDSDMTNTIDTLKLHREHISSNIEKLVQLSLEIEDLSAITSKLRQLKNELSQVDADIEKETQRLKSIDVGCLSDCDLSTKAGRIEAQLIIRSAVKEVVLNTAKRRCKVTFHNGKSITLPITENPSEDVTEAIQSLSEVTERGLIDVDEVII

SEQ ID NO: 25547 - DNA, 50 bp, Escherichia coli; identical to SEQ ID NO: 24522
  source 1..50: mol_type = genomic DNA

SEQ ID NO: 25548 - DNA, 40 bp, Escherichia coli; identical to SEQ ID NO: 5188
  source 1..40: mol_type = genomic DNA

SEQ ID NO: 25549 - DNA, 40 bp, Escherichia coli; identical to SEQ ID NO: 5749
  source 1..40: mol_type = genomic DNA

SEQ ID NO: 25550 - DNA, 50 bp, Escherichia coli; identical to SEQ ID NO: 5750
  source 1..50: mol_type = genomic DNA

SEQ ID NO: 25551 - protein, 507 aa, Escherichia coli
MKRVISYIRFSSEKQAKGDSLRRQSKMVTDWLKAHPEYYLDESLTFRDLGVSGFTGKHLKGGLGDFLTAIEKGLVKAGDTLLIESLDRLSRQDVDQASELLRNILRSGVDVVTLSDGEHYTSESLKDPLALIKSILIMQRAHEESLRKSERIQAAWDAKKEAAKAGIKISKRCPAWLKLNDDRKSFSIIPEKVETVKRCFQLRLEGKSIWAIVKALNDEGHQTLNQYKAGKFGQTSVQDLLKNRSVIGYFTPKGCEEIAGYYPAIIDETTFYKVQQLSHSRYGKRSVSDKPLSVNLFKGVIRCSECGHALIITGFSDTRSGIYRCPLRNENRCNAKGLSRKQTDGTLLALLSRLDRFDSDMTNVIDTLKLHREHISSNIEKLVQLSLEIEDLNAITNKLKQLKNELSQVDADIEKETQRLKSIDVGCLSDCDLTTKAGRIEAQLIIKSAVKEVVLNTAKRRCKVTFHNGKAITLPITENPSEDVTEAIQSLSEVTERGLIDVDEVIV

SEQ ID NO: 25552 - DNA, 50 bp, Escherichia coli; identical to SEQ ID NO: 24522
  source 1..50: mol_type = genomic DNA

SEQ ID NO: 25553 - DNA, 40 bp, Escherichia coli; identical to SEQ ID NO: 5188
  source 1..40: mol_type = genomic DNA

SEQ ID NO: 25554 - DNA, 40 bp, Escherichia coli; identical to SEQ ID NO: 5749
  source 1..40: mol_type = genomic DNA

SEQ ID NO: 25555 - DNA, 50 bp, Escherichia coli; identical to SEQ ID NO: 5750
  source 1..50: mol_type = genomic DNA

SEQ ID NO: 25556 - protein, 507 aa, Escherichia coli
MKRVISYIRFSSEKQAKGDSLRRQSKMVTDWLKAHPEYYLDQDLSFRDLGVSGFTGKHLKGGLGDFLTAIEKGLVKAGDTLLIESLDRLSRQAVDRASELLRNILRSGVDVVTLSDGEHYTKESLRDPLSLIKSILIMQRSHEESLRKSERIQAAWDAKKEAAKAGIKVSKRCPAWLKLNDDRKSFSVIPDKVETVKRCFQLRLEGKSIWEIVRTLNAEGHRSMNQYKPGKFGQTSVQDLLKNRSVIGYFTPKGCEEISGYFPPIIPETVFYKVQQLSHSRHGRKPVSDKPLSVNLFKGVIRCSECGHALIITGFSDTRNGIYRCPLRNENRCSAKGLSRKQTDGTLLTLLSRLDRFDSDTTNTIDMLRLHREHISSNIEKLVQLSLEIEDLSAITIKLKQLKGELSQVDADIEKETQRLKSIDTGSLSDCDLTTKAGRIEAQLIIKSAVKEVVLNTAKRRCKVTFHNGRAITLPITENPSKDVTEAIQSLSEVTERGLIDVDEVII

SEQ ID NO: 25557 - DNA, 50 bp, Escherichia coli; identical to SEQ ID NO: 24522
  source 1..50: mol_type = genomic DNA

SEQ ID NO: 25558 - DNA, 40 bp, Escherichia coli; identical to SEQ ID NO: 5188
  source 1..40: mol_type = genomic DNA

SEQ ID NO: 25559 - DNA, 40 bp, Escherichia coli; identical to SEQ ID NO: 5749
  source 1..40: mol_type = genomic DNA

SEQ ID NO: 25560 - DNA, 50 bp, Escherichia coli; identical to SEQ ID NO: 5750
  source 1..50: mol_type = genomic DNA

SEQ ID NO: 25561 - protein, 507 aa, Escherichia coli; identical to SEQ ID NO: 25401

SEQ ID NO: 25562 - DNA, 50 bp, Escherichia coli; identical to SEQ ID NO: 24522
  source 1..50: mol_type = genomic DNA

SEQ ID NO: 25563 - DNA, 40 bp, Escherichia coli; identical to SEQ ID NO: 5188
  source 1..40: mol_type = genomic DNA

SEQ ID NO: 25564 - DNA, 40 bp, Escherichia coli; identical to SEQ ID NO: 5749
  source 1..40: mol_type = genomic DNA

SEQ ID NO: 25565 - DNA, 50 bp, Escherichia coli; identical to SEQ ID NO: 5750
  source 1..50: mol_type = genomic DNA

SEQ ID NO: 25566 - protein, 507 aa, Escherichia coli
MKRVISYIRFSSEKQAKGDSLRRQSKMVTDWLKAHPEYYLDQDLSFRDLGVSGFTGKHLKGGLGDFLTAIEKGLVKAGDTLLIESLDRLSRQAVDRASELLRNILRSGVDVVTLSDGEHYTRESLRDPLSLIKSILIMQRSHEESLRKSERIQAAWDAKKEAAKAGIKVSKRCPAWLRLNDDRKSFSVIPDKVETVKRCFQLRLEGKSIWEIVRTLNAEGHRSMNQYKPGKFGQTSVQDLLKNRSVIGYFTPKGCEEIAGYYPSVIDETTFYKVQQLSHSRYGRKPASAKPLSVNLFKGVIRCSECGHALIITGFSDTRNGIYRCPLRNENRCSAKGLSRKQTDGTLLTLLSRLDRFDSDMTNTIDTLKLHREHISSNIEKLVQLSLEIEDLNAITNKLKQLKNELSQVDADIEKETQRLKSIDTGSLSDCDLSTKAGRIEAQLIIKSAVKEVVLNTAKRRCKVTFHNGKVIDLSITENPSEDVTEAIQSLSEVTERGLIDVDEVII

SEQ ID NO: 25567 - DNA, 50 bp, Escherichia coli; identical to SEQ ID NO: 24522
  source 1..50: mol_type = genomic DNA

SEQ ID NO: 25568 - DNA, 40 bp, Escherichia coli; identical to SEQ ID NO: 5188
  source 1..40: mol_type = genomic DNA

SEQ ID NO: 25569 - DNA, 40 bp, Escherichia coli; identical to SEQ ID NO: 5749
  source 1..40: mol_type = genomic DNA

SEQ ID NO: 25570 - DNA, 50 bp, Escherichia coli; identical to SEQ ID NO: 5750
  source 1..50: mol_type = genomic DNA

SEQ ID NO: 25571 - protein, 507 aa, Escherichia coli
MKRVISYIRFSSEKQAKGDSLRRQSKMVTDWLKAHPEYYLDQDLSFRDLGVSGFTGKHLKGGLGDFLTAIEKGLVKAGDTLLIESLDRLSRQAVDKASELLRNILRSGVDIVTLSDGEHYTRESLKDPLALIKSILIMQRAHEESLRKAERIQAAWDAKKEAAKAGIKISKRCPAWLKLNDDRKSFSVIPEKVETVKRCFQLRLEGKSIWEIVRTLNDECHQSMNQYKPGKFGQTSVQDLLKNRSVIGYFTPKGREEIAGYFPSIIHETDFYKVQQLSYARHGRKPASAKPLSVNLFKGVIRCSECGHALIITGFSDTRNGIYRCPLRNENRCSAKGLSRKQTDGTLLALLSRLDRFDSDMTNTIDTLKLHREHISSNIEKLVQLSLEIEDLNAITNKLKQLKNELSQVDADIEKETQRLKSIDVGCLSDCDLTTKAGRIEAQLIIKSAVKEVVLNTAKRRCKVTFHNGKIIDLPITENPSEDVTEAIQSLSEVTERGLIGVDEVII

SEQ ID NO: 25572 - DNA, 50 bp, Escherichia coli; identical to SEQ ID NO: 24522
  source 1..50: mol_type = genomic DNA

SEQ ID NO: 25573 - DNA, 40 bp, Escherichia coli; identical to SEQ ID NO: 5188
  source 1..40: mol_type = genomic DNA

SEQ ID NO: 25574 - DNA, 40 bp, Escherichia coli; identical to SEQ ID NO: 5749
  source 1..40: mol_type = genomic DNA

SEQ ID NO: 25575 - DNA, 50 bp, Escherichia coli; identical to SEQ ID NO: 5750
  source 1..50: mol_type = genomic DNA

SEQ ID NO: 25576 - protein, 507 aa, Escherichia coli
MKRVISYIRFSSEKQAKGDSLRRQSKMVTDWLKAHPEYYLDQDLSFRDLGVSGFTGKHLKGGLGDFLTAIEKGLVKAGDTLLIESLDRLSRQDVDQASELLRNILRSGVDVVTLSDGEHYTSESLKDPLALIKSILIMQRAHEESLRKSERIQAAWNRKKELISEGIKISKRCPAWLRLNDDRKSFSVIPDKVETVKRCFQLRLEGKSIWEIVRTLNDEGHQTLNQYKAGSFGQTSVQDLLKNRSVIGYFTPKGCEEIAGYFPPIIPETDFYKVQQLSYARYGRKPASDKPLSVNLFKGVIRCSECGHALIITGFSDTRSGIYRCPLRNENRCSAKGLSRKQTDGTLLTLLSRLDRFDSDTTNTIDTLKLHREHISSNIEKLVQLSLEIEDLSAITIKLKQLKGELSQVDADIEKETQRLKSIDVGCLSDCDLTTKAGRIEAQLIIKSAVKEVVLNTAKRRCKVTFHNGKVIDLPITENPSEDVTEAIQSLSEVIERGLIDVDEVIV

SEQ ID NO: 25577 - DNA, 50 bp, Escherichia coli; identical to SEQ ID NO: 24522
  source 1..50: mol_type = genomic DNA

SEQ ID NO: 25578 - DNA, 40 bp, Escherichia coli; identical to SEQ ID NO: 5188
  source 1..40: mol_type = genomic DNA

SEQ ID NO: 25579 - DNA, 40 bp, Escherichia coli; identical to SEQ ID NO: 5749
  source 1..40: mol_type = genomic DNA

SEQ ID NO: 25580 - DNA, 50 bp, Escherichia coli; identical to SEQ ID NO: 5750
  source 1..50: mol_type = genomic DNA

SEQ ID NO: 25581 - protein, 507 aa, Escherichia coli
MKRVISYIRFSSEKQAKGDSLRRQSKMVTDWLKAHPEYYLDQDLSFRDLGVSGFTGKHLKGGLGDFLTAIEKGLVKAGDTLLIESLDRLSRQAVDRASELLRNILRSGVDVVTLSDGEHYTSESLKDPLALIKSILIMQRAHEESLRKSERIQAAWDAKKEAAKAGIKVSKRCPAWLKLNDDRKSFSVIPEKVETVKRCFQLRLEGKSIWEIVRTLNDEGHQTLNQYKAGKFGQTSVQDLLKNRSVIGYFTPKGCEGISGYYPAIIDETTFYKVQQLSHYRYGRKPVSDKPLSVNLFKGVIRCSECGHALIITGFSDTRNGIYRCPLRNENRCSAKGLSRKQTDGTLLTLLSRLDRFDSDTTNTIDTLKLHREHISSNIEKLVQLSLEIEDLSAITIKLRQLKGELSQVDADIEKETQRLKSIDVGCLSDCDLTTKAGRIEAQLIIKSAVKEVVLNTAKRRCKVTFHNGKLIDLPITETPSKDVTEAIQSLSEVTERGLIDVDEVII

SEQ ID NO: 25582 - DNA, 50 bp, Escherichia coli; identical to SEQ ID NO: 24522
  source 1..50: mol_type = genomic DNA

SEQ ID NO: 25583 - DNA, 40 bp, Escherichia coli; identical to SEQ ID NO: 5188
  source 1..40: mol_type = genomic DNA

SEQ ID NO: 25584 - DNA, 40 bp, Escherichia coli; identical to SEQ ID NO: 5749
  source 1..40: mol_type = genomic DNA

SEQ ID NO: 25585 - DNA, 50 bp, Escherichia coli; identical to SEQ ID NO: 5750
  source 1..50: mol_type = genomic DNA

SEQ ID NO: 25586 - protein, 507 aa, Escherichia coli
MKRVISYIRFSSERQAKGDSLRRQSKMVNDWLKAHPEYYLDQDLSFRDLGVSGFTGKHLKGGLGDFLTAIEKGLVKAGDTLLIESLDRLSRQAVDRASELLRNILRSGVDVVTLSDGEHYTSESLKDPLALIKSILIMQRAHEESLRKSERIQAAWDAKKEAAKAGIKVSKRCPAWLKLNDDRKSFSVIPDKVETVKRCFQLRLEGKSIWEIVRTLNAEGRQTLNQHKAGSFGQTSVQDLLKNRSVIGYFTPKGCEEISGYYPAIIDETTFYKVQQLSYARHGRKPASAKPLSVNLFKGVIRCSECGHALIITGFSDTRNGIYRCPLRNENRCSAKGLSRKQTDGTLLTLLSRLDRFDSDTTNTIDTLKLHREHISSNIEKLVQLSLEIEDLSAITIKLKQLKGELSQVDADIEKETQRLKSIDVGCLSDCDLTTKAGRIEAQLIIKSAVKEVVLNTAKRRCKVTFHNGKSITLPITENPSEDVTEATQSLSEVTERGLIDVDEVII

SEQ ID NO: 25587 - DNA, 50 bp, Escherichia coli
  source 1..50: mol_type = genomic DNA
tagtgtatttagacattgatgatttttattagacacgtttaaatacacca

SEQ ID NO: 25588 - DNA, 40 bp, Escherichia coli; identical to SEQ ID NO: 5188
  source 1..40: mol_type = genomic DNA

SEQ ID NO: 25589 - DNA, 40 bp, Escherichia coli; identical to SEQ ID NO: 5749
  source 1..40: mol_type = genomic DNA

SEQ ID NO: 25590 - DNA, 50 bp, Escherichia coli; identical to SEQ ID NO: 5750
  source 1..50: mol_type = genomic DNA

SEQ ID NO: 25591 - protein, 507 aa, Escherichia coli
MKRVISYIRFSSEKQAKGDSLRRQSKMVTDWLKAHPEYYLDQDLSFRDLGVSGFTGKHLKGGLGDFLTAIEKGLVKAGDTLLIESLDRLSRQDVDQASELLRNILRSGVDVVTLSDGEHYTRESLRDPLALIKSILIMQRSHEESLRKSERIQAAWNRKKELISEGIKISKRCPAWLKLNDDRKSFSVIPDKVETVKRCFQLRLEGKSIWEIVRTMNAEGHQTLHQHKPGSFGQSSVQDLLKNRSVIGYFTPKGCEEISSYYPSVIDETTFYKVQQLSHSRYGRKPVSDKPLSVNLFKGVIRCSECGHALIITGFSDTRNGIYRCPLRNENRCSAKGLSRKQTDGTLLTLLSRLDRFDSDTTNVIDMLRLHREHISSNIEKLVQLSLEIEDLSAITIKLKQLKGELSQVDADIEKETQRLKSIDVGCLSDCDLTTKAGRIEAQLIIKSAVKEVVLNTAKRRCKVTFHNGKVIDLPITENPSEDVTEAIQSLSEVTERGLIDVDEVII

SEQ ID NO: 25592 - DNA, 50 bp, Escherichia coli; identical to SEQ ID NO: 24522
  source 1..50: mol_type = genomic DNA

SEQ ID NO: 25593 - DNA, 40 bp, Escherichia coli; identical to SEQ ID NO: 5188
  source 1..40: mol_type = genomic DNA

SEQ ID NO: 25594 - DNA, 40 bp, Escherichia coli; identical to SEQ ID NO: 5749
  source 1..40: mol_type = genomic DNA

SEQ ID NO: 25595 - DNA, 50 bp, Escherichia coli; identical to SEQ ID NO: 5750
  source 1..50: mol_type = genomic DNA

SEQ ID NO: 25596 - protein, 507 aa, Escherichia coli
MKRVISYIRFSSEKQAKGDSLRRQSKMVTDWLKAHPEYYLDQDLSFRDLGVSGFTGKHLKGGLGDFLTAIEKGLVKAGDTLLIESLDRLSRQDVDQASELLRNILRSGVDVVTLSDGEHYTSESLKDPLALIKSILIMQRAHEESLRKSERIQAAWNRKKELISEGIKISKRCPAWLKLNDDRKSFSVIPEKVETVKRCFQLRLEGKSIWEIVRTLNDEGHQSMSQYKPGKFGQTSVQDLLKNRSVIGYFTPKGCEEIAGYYPAIIDETTFYKVQQLAYARYGRKPVSDKPLSVNLFKGVIRCSECGHALIITGFSDTRSGIYRCPLRNENRCSAKGLSRKQTDGTLLTLLSRLDRFDSDMTNTIDMLRLHREHISSNIEKLVQLSLEIEDLSAITSKLKQLKGELSQVDADIEKETQRLKSIDVGCLSDCDLTTKAGRIEAQLIIKSAVKEVVLNTAKRRCKVTFHNSKSITLPITENPSDNVTEAIQSLSEVTERGLIDVDVVEI

SEQ ID NO: 25597 - DNA, 50 bp, Escherichia coli; identical to SEQ ID NO: 24522
  source 1..50: mol_type = genomic DNA

SEQ ID NO: 25598 - DNA, 40 bp, Escherichia coli; identical to SEQ ID NO: 5188
  source 1..40: mol_type = genomic DNA

SEQ ID NO: 25599 - DNA, 40 bp, Escherichia coli; identical to SEQ ID NO: 5749
  source 1..40: mol_type = genomic DNA

SEQ ID NO: 25600 - DNA, 50 bp, Escherichia coli; identical to SEQ ID NO: 5750
  source 1..50: mol_type = genomic DNA

SEQ ID NO: 25601 - protein, 507 aa, Escherichia coli
MKRVISYIRFSSEKQAKGDSLRRQSKMVTDWLKAHPEYYLDQDLSFRDLGVSGFTGKHLKGGLGDFLTAIEKGLVKAGDTLLIESLDRLSRQDVDQASELLRNILRSGVDVVTLSDGEHYTRESLKDPLALIKSILIMQRSHEESLRKSERIQAAWNRKKELISEGIKISKRCPAWLRLNDDRKSFSVIPEKVETVKRCFQLRLEGKSIWEIVRTMNAEGHQSMSQYKPGKFGQTSVQDLLKNRSVIGYFTPKGCEEIAGYYPAIIDETTFYKVQQLSHSRYGRKPVSAKPLSVNLFKGVIRCSECGHALIITGFSDTRSGIYRCPLRNENRCSAKGLSRKQTDGTLLALLSRLDRFDSDTTNIIDTLKLHREHISNNIEKLVQLSLEIEDLSAITIKLKQLKNELSQVDADIEKETQRLKSIDVGCLSDCDLTTKAGRIEAQLIIKSAVKEVVLNTAKRRCKVTFHNGKVIGLSITETPSEDVTEAIQSLSEVTERGLIDVDEVII

SEQ ID NO: 25602 - DNA, 50 bp, Escherichia coli; identical to SEQ ID NO: 24522
  source 1..50: mol_type = genomic DNA

SEQ ID NO: 25603 - DNA, 40 bp, Escherichia coli; identical to SEQ ID NO: 5188
  source 1..40: mol_type = genomic DNA

SEQ ID NO: 25604 - DNA, 40 bp, Escherichia coli; identical to SEQ ID NO: 5749
  source 1..40: mol_type = genomic DNA

SEQ ID NO: 25605 - DNA, 50 bp, Escherichia coli; identical to SEQ ID NO: 5750
  source 1..50: mol_type = genomic DNA

SEQ ID NO: 25606 - protein, 507 aa, Escherichia coli
MKRVISYIRFSSEKQAKGDSLRRQSKMVTDWLKAHPEYYLDQDLSFRDLGVSGFTGKHLKGGLGDFLTAIEKGLVKAGDTLLIESLDRLSRQNVDRASELLRNILRSGVDVVTLSDGEHYTRESLKDPLALIKSILIMQRSHEESLRKSERIQAAWNRKKELISEGIKISKRCPAWLRLNDDRKSFSVIPDKVETVKRCFQLRLEGKSIWEIVRTLNAEGHRSMNQYKPGKFGQTSVQDLLKNRSVIGYFTPKGCEEISSYYPSVIDETTFYKVQQLSHSRYGRKPVSAKPLSVNLFKGVIRCSECGHALIITGFSDTRNGIYRCPLRNENRCSAKGLSRKQTDGTLLTLLSRLDRFDSDTTNTIDMLRLHREHISSNIEKLVQLSLEIEDLSAITIKLKQLKGELSQVDADIEKETQRLKSIDVGCLSDCDLTTKAGRIEAQLIIKSAVKEVVLNTAKRRCKVTFHNSKSITLSITENPSEDVTEAIQSLSEVTERGLIDVDVVKI

SEQ ID NO: 25607 - DNA, 50 bp, Escherichia coli; identical to SEQ ID NO: 24522
  source 1..50: mol_type = genomic DNA

SEQ ID NO: 25608 - DNA, 40 bp, Escherichia coli; identical to SEQ ID NO: 5188
  source 1..40: mol_type = genomic DNA

SEQ ID NO: 25609 - DNA, 40 bp, Escherichia coli; identical to SEQ ID NO: 5749
  source 1..40: mol_type = genomic DNA

SEQ ID NO: 25610 - DNA, 50 bp, Escherichia coli; identical to SEQ ID NO: 5750
  source 1..50: mol_type = genomic DNA

SEQ ID NO: 25611 - protein, 507 aa, Escherichia coli
MKRVISYIRFSSEKQAKGDSLRRQSKMVTDWLKAHPEYYLDQDLSFRDLGVSGFTGKHLKGGLGDFLTAIEKGLVKAGDTLLIESLDRLSRQAVDRASELLRNILRSGVDVVTLSDGEHYTRESLRDPLSLIKSILIMQRSHEESLRKSERIQAAWDAKKEAAKAGIKVSKRCPAWLRLNDDRKSFSVIPDKVETVKRCFQLRLEGKSIWEIVRTLNAEGHRSMNQYKPGKFGQTSVQDLLKNRSVIGYFTPKGCEEIAGYYPSVIDETTFYKVQQLSHSRYGRKPASAKPLSVNLFKGVIRCSECGHALIITGFSDTRNGIYRCPLRNENRCSAKGLSRKQTDGTLLTLLSRLDRFDSDMTNTIDTLKLHREHISSNIEKLVQLSLEIEDLNAITSKLKQLKGELSQVDADIEKETQRLKSIDVGCLSDCDLTTKAGRIEAQLIIKSAVKEVVLNTAKRRCKVTFHNGKSITLPITENPSEDVTEAIQSLSEVTERGLIDVDVVEI

SEQ ID NO: 25612 - DNA, 50 bp, Escherichia coli; identical to SEQ ID NO: 24522
  source 1..50: mol_type = genomic DNA

SEQ ID NO: 25613 - DNA, 40 bp, Escherichia coli; identical to SEQ ID NO: 5188
  source 1..40: mol_type = genomic DNA

SEQ ID NO: 25614 - DNA, 40 bp, Escherichia coli; identical to SEQ ID NO: 5749
  source 1..40: mol_type = genomic DNA

SEQ ID NO: 25615 - DNA, 50 bp, Escherichia coli; identical to SEQ ID NO: 5750
  source 1..50: mol_type = genomic DNA

SEQ ID NO: 25616 - protein, 507 aa, Escherichia coli; identical to SEQ ID NO: 24551

SEQ ID NO: 25617 - DNA, 50 bp, Escherichia coli; identical to SEQ ID NO: 24522
  source 1..50: mol_type = genomic DNA

SEQ ID NO: 25618 - DNA, 40 bp, Escherichia coli; identical to SEQ ID NO: 22763
  source 1..40: mol_type = genomic DNA

SEQ ID NO: 25619 - DNA, 40 bp, Escherichia coli; identical to SEQ ID NO: 24634
  source 1..40: mol_type = genomic DNA

SEQ ID NO: 25620 - DNA, 50 bp, Escherichia coli; identical to SEQ ID NO: 5750
  source 1..50: mol_type = genomic DNA

SEQ ID NO: 25621 - protein, 507 aa, Escherichia coli; identical to SEQ ID NO: 24551

SEQ ID NO: 25622 - DNA, 50 bp, Escherichia coli; identical to SEQ ID NO: 24522
  source 1..50: mol_type = genomic DNA

SEQ ID NO: 25623 - DNA, 40 bp, Escherichia coli; identical to SEQ ID NO: 21333
  source 1..40: mol_type = genomic DNA

SEQ ID NO: 25624 - DNA, 40 bp, Escherichia coli; identical to SEQ ID NO: 24744
  source 1..40: mol_type = genomic DNA

SEQ ID NO: 25625 - DNA, 50 bp, Escherichia coli; identical to SEQ ID NO: 5750
  source 1..50: mol_type = genomic DNA

SEQ ID NO: 25626 - protein, 507 aa, Escherichia coli
MKRVISYIRFSSEKQAKGDSLRRQSKMVTDWLKAHPEYYLDQDLSFRDLGVSGFTGKHLKGGLGDFLTAIEKGLVKAGDTLLIESLDRLSRQDVDQASELLRNILRSGVDVVTLSDGEHYTSESLKDPLALIKSILIMQRAHEESLRKSERIQAAWDAKKEAAKAGIKVSKRCPAWLKLNDDRKSFSVIPDKVETVKRCFQLRLEGKSIWEIVRTLNAEGHRSMNQYKPGKFGQTSVQDLLKNRSVIGYFTPKGCEEISGYFPPIIPETDFYKVQQLSYSRYGRKPVSDKPLSVNLFKGVIRCSECGHALIITGFSDTKNGIYRCPLRNENRCSAKGLSRKQTDGTLLTLLSRLDRFDSDTTNIIDMLRLHREHISSNIEKLVQLSLEIEDLNAITSKLKQLKGELSQVDADIEKETQRLKSIDVGCLSDCDLTTKAGRIEAQLIIKSAVKEVVLNTARRRCKVTFHNGKVIDLPITENPSEDVTEAIQSLSEVTAKGLIDVDVVEI

SEQ ID NO: 25627 - DNA, 50 bp, Escherichia coli; identical to SEQ ID NO: 24522
  source 1..50: mol_type = genomic DNA

SEQ ID NO: 25628 - DNA, 40 bp, Escherichia coli; identical to SEQ ID NO: 21333
  source 1..40: mol_type = genomic DNA

SEQ ID NO: 25629 - DNA, 40 bp, Escherichia coli; identical to SEQ ID NO: 24744
  source 1..40: mol_type = genomic DNA

SEQ ID NO: 25630 - DNA, 50 bp, Escherichia coli; identical to SEQ ID NO: 5750
  source 1..50: mol_type = genomic DNA

SEQ ID NO: 25631 - protein, 507 aa, Escherichia coli
MKRVISYIRFSSEKQAKGDSLRRQSKMVTDWLKAHPEYYLDQDLSFRDLGVSGFTGKHLKGGLGDFLTAIEKGLVKAGDTLLIESLDRLSRQAVDRASELLRNILRSGVDVVTLSDGEHYTSESLKDPLALIKSILIMQRAHEESLRKSERIQAAWDAKKEAAKAGIKVSKRCPAWLKLNDDRKSFSVIPEKVETVKRCFQLRLEGKSIWEIVRTLNDEGHQSMSQYKPGSFGQSSVQDLLKNRSVIGYFTPKGREEIAGYFPPIIPETDFYKVQQLSYSRYGRKPASDKPLSVNLFKGVIRCSECGHALIITGFSDTRNGIYRCPLRNENRCSAKGLSRKQTDGTLLALLSRLDRFDSDTTNIIDMLRLHREHVSSNIEKLVQLSLEIEDLNAITSKLKQLKGELSQVDADIEKETQRLKSIDVGCLSDCDLTTKAGRIEAQLIIKSAVKEVVLNTAKRRCKVTFHNGKTITLSITENPSEDVTEAIQSLSEVTERGLIDVDVVEI

SEQ ID NO: 25632 - DNA, 50 bp, Escherichia coli; identical to SEQ ID NO: 24522
  source 1..50: mol_type = genomic DNA

SEQ ID NO: 25633 - DNA, 40 bp, Escherichia coli; identical to SEQ ID NO: 5198
  source 1..40: mol_type = genomic DNA

SEQ ID NO: 25634 - DNA, 40 bp, Escherichia coli; identical to SEQ ID NO: 25049
  source 1..40: mol_type = genomic DNA

SEQ ID NO: 25635 - DNA, 50 bp, Escherichia coli; identical to SEQ ID NO: 5750
  source 1..50: mol_type = genomic DNA

SEQ ID NO: 25636 - protein, 507 aa, Escherichia coli
MKRVISYIRFSSEKQAKGDSLRRQSKMVTDWLKAHPEYYLDESLTFRDLGVSGFTGKHLKGGLGDFLTAIEKGLVKAGDTLLIESLDRLSRQAVDRASELLRNILRSGVDVVTLSDGEHYTSESLKDPLALIKSILIMQRAHEESLRKSERIQAAWDAKKEAAKAGIKVSKRCPAWLKLNDDRKSFSVIPEKVATVKRCFQLRLEGKSIWEIVRTLNAEGHQTLNQYKAGSFGQSSVQDLLKNRSVIGYFTPKGCEEISGYYPEVIDETTFYKVQQLSYSRYGRKPASDKPLSVNLFKGVIRCSECGHALIITGFSDTRSGIYRCPLRNENRCSAKGLSRKQTDGTLLALLSRLDRFDSDTTNIIDMLRLHREHISSNIEKLVQLSLEIEDLNAITNKLKQLKNELSQVDADIEKETQRLKSIDVGCLSDCDLTTKAGRIEAQLIIKSAVKEVVLNTAKRRCKVTFHNGKVIDLPITENPSEDVTEAIQSLSEVTERGLIDVDEVII

SEQ ID NO: 25637 - DNA, 50 bp, Escherichia coli; identical to SEQ ID NO: 24522
  source 1..50: mol_type = genomic DNA

SEQ ID NO: 25638 - DNA, 40 bp, Escherichia coli; identical to SEQ ID NO: 5188
  source 1..40: mol_type = genomic DNA

SEQ ID NO: 25639 - DNA, 40 bp, Escherichia coli; identical to SEQ ID NO: 5749
  source 1..40: mol_type = genomic DNA

SEQ ID NO: 25640 - DNA, 50 bp, Escherichia coli; identical to SEQ ID NO: 5750
  source 1..50: mol_type = genomic DNA

SEQ ID NO: 25641 - protein, 507 aa, Escherichia coli
MKRVISYIRFSSEKQAKGDSLRRQSKMVNDWLKAHPEYYLDQDLSFRDLGVSGFTGKHLKGGLGDFLTAIEKGLVKAGDTLLIESLDRLSRQAVDRASELLRNILRSGVDVVTLSDGEHYTSESLKDPLALIKSILIMQRAHEESLRKSERIQAAWDAKKEAAKAGIKVSKRCPAWLKLNDDRKSFSVIPEKVETVKRCFQLRLEGKSIWEIVRTLNDEGRQTLNQYKPGKFGQTSVQDLLKNRSVIGYFTPKGREEIAGYFPSIIHETDFYKVQQLSYARHGRKPASAKPLSVNLFKGVIRCSECGHALIITGFSDTRSGIYRCPLRNENRCSAKGLSRKQTDGTLLTLLSRLDRFDSDTTNTIDTLKLHREHISSNIEKLVQLSLEIEDLSAITSKLKQLKNELSQVDADIEKETQRLKSIDVGCLSDCDLTTKAGRIEAQLIIKSAVKEVVLNTAKRRCKVTFHNGRAITLPITENPSEDVTEAIQSLSEVTERGLIDVDEVII

SEQ ID NO: 25642 - DNA, 50 bp, Escherichia coli; identical to SEQ ID NO: 24522
  source 1..50: mol_type = genomic DNA

SEQ ID NO: 25643 - DNA, 40 bp, Escherichia coli; identical to SEQ ID NO: 5188
  source 1..40: mol_type = genomic DNA

SEQ ID NO: 25644 - DNA, 40 bp, Escherichia coli; identical to SEQ ID NO: 5749
  source 1..40: mol_type = genomic DNA

SEQ ID NO: 25645 - DNA, 50 bp, Escherichia coli; identical to SEQ ID NO: 5750
  source 1..50: mol_type = genomic DNA

SEQ ID NO: 25646 - protein, 507 aa, Escherichia coli
MKRVISYIRFSSEKQAKGDSLRRQSKMVTDWLKAHPEYYLDQDLSFRDLGVSGFTGKHLKGGLGDFLIAIEKGLVKAGDTLLIESLDRLSRQDVDQASELLRNILRSGVDVVTLSDGEHYTRESLRDPLALIKSILIMQRSHEESLRKSERIQAAWNRKKELISEGIKISKRCPAWLKLNDDRKSFSVIPDKVETVKRCFQLRLEGKSIWEIVRTMNAEGHQTLHQHKPGSFGQSSVQDLLKNRSVIGYFTPKGCEEISSYYPSVIDETTFYKVQQLSHSRYGRKPVSDKPLSVNLFKGVIRCSECGHALIITGFSDTRSGIYRCPLRNENRCSAKGLSRKQTDGTLLTLLSRLDRFDSDMTNTIDMLRLHREHISSNIEKLVQLSLEIEDLSAITNKLKQLKNELSQVDADIEKETQRLKSIDVGCLSDCDLTTKAGRIEAQLIIKSAVKEVVLNTAKRRCKVTFHNGRAITLPITENPSEDVTEAIQSLSEVTERGLLDVDEVII

SEQ ID NO: 25647 - DNA, 50 bp, Escherichia coli; identical to SEQ ID NO: 24522
  source 1..50: mol_type = genomic DNA

SEQ ID NO: 25648 - DNA, 40 bp, Escherichia coli; identical to SEQ ID NO: 5188
  source 1..40: mol_type = genomic DNA

SEQ ID NO: 25649 - DNA, 40 bp, Escherichia coli; identical to SEQ ID NO: 5749
  source 1..40: mol_type = genomic DNA

SEQ ID NO: 25650 - DNA, 50 bp, Escherichia coli; identical to SEQ ID NO: 5750
  source 1..50: mol_type = genomic DNA

SEQ ID NO: 25651 - protein, 507 aa, Escherichia coli
MKRVISYIRFSSEKQAKGDSLRRQSKMVTDWLKAHPEYYLDQDLSFRDLGVSGFTGKHLKGGLGDFLTAIEKGLVKAGDTLLIESLDRLSRQDVDQASELLRNILRSGVDIVTLSDGEHYTRESLKDPLALIKSILIMQRAHEESLRKSERIQAAWDAKKEAAKAGIKVSRRCPAWLRLNDDRKSFSVIPEKVETVKRCFQLRLEGKSIWEIVRTLNAEGHRSMNQYKPGKFGQTSVQDLLKNRSVIGYFTPKGCEEISGYFPPIIPETDFYKVQQLSYSRYGKRSVSDKPLSVNLFKGVIRCSECGHALIITGFSDTRNGIYRCPLRNENRCSAKGLSRKQTDGTLLTLLSRLDRFDSNTTNTIDMLRLHREHISNNIEKLVQLSLEIEDLSAITIKLKQLKGELSQVDADIEKETQRLKSIDAGCLSDCDLTTKAGRIEAQLIIKSAVKEVVLNTAKRRCKVTFHNGRIIDLPITENPSEDVTEAIQSLSEVTEKGLIDVDVVEI

SEQ ID NO: 25652 - DNA, 50 bp, Escherichia coli; identical to SEQ ID NO: 24522
  source 1..50: mol_type = genomic DNA

SEQ ID NO: 25653 - DNA, 40 bp, Escherichia coli; identical to SEQ ID NO: 22878
  source 1..40: mol_type = genomic DNA

SEQ ID NO: 25654 - DNA, 40 bp, Escherichia coli; identical to SEQ ID NO: 24804
  source 1..40: mol_type = genomic DNA

SEQ ID NO: 25655 - DNA, 50 bp, Escherichia coli; identical to SEQ ID NO: 5750
  source 1..50: mol_type = genomic DNA

SEQ ID NO: 25656 - protein, 507 aa, Escherichia coli; identical to SEQ ID NO: 25276

SEQ ID NO: 25657 - DNA, 50 bp, Escherichia coli; identical to SEQ ID NO: 24522
  source 1..50: mol_type = genomic DNA

SEQ ID NO: 25658 - DNA, 40 bp, Escherichia coli; identical to SEQ ID NO: 22878
  source 1..40: mol_type = genomic DNA

SEQ ID NO: 25659 - DNA, 40 bp, Escherichia coli; identical to SEQ ID NO: 24804
  source 1..40: mol_type = genomic DNA

SEQ ID NO: 25660 - DNA, 50 bp, Escherichia coli; identical to SEQ ID NO: 5750
  source 1..50: mol_type = genomic DNA

SEQ ID NO: 25661 - protein, 507 aa, Escherichia coli
MKRVISYIRFSSEKQAKGDSLRRQSKMVTDWLKAHPEYYLDESLTFRDLGVSGFTGKHLKGGLGDFLTAIEKGLVKAGDTLLIESLDRLSRQDIDIASELLRNILRSGVDVVTLSDGEHYTKESLRDPLSLIKSILIMQRAHEESLRKAERIQAAWDAKKEAAKAGIKISRRCPAWLKLNDDRKSFSVIPEKVETVKRCFQLRLEGKSIWEIVRTMNAEGHQTLNQYKAGSFGQSSVQDLLKNRSVIGYFTPKGCEEIAGYYPAIIDETTFYKVQQLSYARHGRKPASAKPLSVNLFKGVIRCSECGHALIITGFSDTRNGIYRCPLRNENRCSAKGLSRKQTDGTLLTLLSRLDRFDSDTTNTIDMLRLHREHISSNIEKLVQLSLEIEDLNAITNKLKQLKNELSQVDADIEKETQRLKSIDVGCLSDCDLTTKAGRIEAQLIIKSAVKEVVLNTAKRRCKVTFHNGRAITLPITETPSEDVTEAIQSLSEVTERGLIDVDEVII

SEQ ID NO: 25662 - DNA, 50 bp, Escherichia coli; identical to SEQ ID NO: 24522
  source 1..50: mol_type = genomic DNA

SEQ ID NO: 25663 - DNA, 40 bp, Escherichia coli; identical to SEQ ID NO: 5188
  source 1..40: mol_type = genomic DNA

SEQ ID NO: 25664 - DNA, 40 bp, Escherichia coli; identical to SEQ ID NO: 5749
  source 1..40: mol_type = genomic DNA

SEQ ID NO: 25665 - DNA, 50 bp, Escherichia coli; identical to SEQ ID NO: 5750
  source 1..50: mol_type = genomic DNA

SEQ ID NO: 25666 - protein, 507 aa, Escherichia coli
MKRVISYIRFSSEKQAKGDSLRRQSKMVTDWLKAHPEYYLDQDLSFRDLGVSGFTGKHLKGGLGDFLTAIEKGLVKAGDTLLIESLDRLSRQAVDRASELLRNILRSGVDVVTLSDGEHYTKESLRDPLSLIKSILIMQRSHEESLRKSERIQAAWDAKKEAAKAGIKVSKRCPAWLKLNDDRKSFSVIPDKVETVKRCFQLRLEGKSIWEIVRTLNAEGHRSMNQYKPGKFGQTSVQDLLKNRSVIGYFTPKGCEEIAGYYPSVIDETTFYKVQQLSHSRHGRKPVSDKPLSVNLFKGVIRCSECGHALIITGFSDTRNGIYRCPLRNENRCSAKGLSRKQTDGTLLTLLSRLDRFDSDMTNVIDTLKLRREHISSNIEKLVQLSLEIEDLNAITNKLKQLKNELSQVDADIEKETQRLKSIDVGCLSDCDLTTKAGRIEAQLIIKSAVKEVVLNTAKRRCKVTFHNGRIIDLPITETPSEDVTEAIQSLSEVTERGLIDVDEVII

SEQ ID NO: 25667 - DNA, 50 bp, Escherichia coli; identical to SEQ ID NO: 24522
  source 1..50: mol_type = genomic DNA

SEQ ID NO: 25668 - DNA, 40 bp, Escherichia coli; identical to SEQ ID NO: 5188
  source 1..40: mol_type = genomic DNA

SEQ ID NO: 25669 - DNA, 40 bp, Escherichia coli; identical to SEQ ID NO: 5749
  source 1..40: mol_type = genomic DNA

SEQ ID NO: 25670 - DNA, 50 bp, Escherichia coli; identical to SEQ ID NO: 5750
  source 1..50: mol_type = genomic DNA

SEQ ID NO: 25671 - protein, 507 aa, Escherichia coli
MKRVISYIRFSSEKQAKGDSLRRQSKMVTDWLKAHPEYYLDESLTFRDLGVSGFTGKHLKGGLGDFLTAIEKGLVKAGDTLLIESLDRLSRQAVDRASELLRNILRSGVDVVTLSDGEHYTSESLKDPLALIKSILIMQRAHEESLRKSERIQAAWDAKKEAAKAGIKVSKRCPAWLKLNDDRKSFSVIPEKVETVKRCFQLRLEGKSIWEIVRTLNDEGHQTLNQYKAGKFGQTSVQDLLKNRSVIGYFTPKGCEEISGYYPAIIDETTFYKVQQLSHYRYGRKPVSDKPLSVNLFKGVIRCSECGHALIITGFSDTRNGIYRCPLRNENRCSAKGLSRKQTDGTLLALLSRLDRFDSDTTNTIDTLKLHREHISSNIEKLVQLSLEIEDLSAITSKLRQLKGELSQVDADIEKETQRLKSIDVGCLSDCDLTTKAGRIEAQLIIKSAVKEVVLNTAKRRCKVTFHNGKSITLPITENPSEDVTEAIQSLSEVTERGLIDVDEVII

SEQ ID NO: 25672 - DNA, 50 bp, Escherichia coli; identical to SEQ ID NO: 24522
  source 1..50: mol_type = genomic DNA

SEQ ID NO: 25673 - DNA, 40 bp, Escherichia coli; identical to SEQ ID NO: 5188
  source 1..40: mol_type = genomic DNA

SEQ ID NO: 25674 - DNA, 40 bp, Escherichia coli; identical to SEQ ID NO: 5749
  source 1..40: mol_type = genomic DNA

SEQ ID NO: 25675 - DNA, 50 bp, Escherichia coli; identical to SEQ ID NO: 5750
  source 1..50: mol_type = genomic DNA

SEQ ID NO: 25676 - protein, 507 aa, Escherichia coli
MKRVISYIRFSSEKQAKGDSLRRQSKMVTDWLKAHPEYYLDQDLSFRDLGVSGFTGKHLKGGLGDFLTAIEKGLVKAGDTLLIESLDRLSRQAVDRASELLRNILRSGVDVVTLSDGEHYTSESLKDPLALIKSILIMQRAHEESLRKSERIQAAWDAKKEAAKAGIKVSKRCPAWLKLNDDRKSFSVIPEKVETVKRCFQLRLEGKSIWEIVRTLNDEGHQSMSQYKPGKFGQTSVQDLLKNRSVIGYFTPKGCEEIAGYYPAIIDETTFYKVQQLSHSRYGRKPASAKPLSVNLFKGVIRCSECGHALIITGFSDTRSGIYRCPLRNENRCSAKGLSRKQTDGTLLTLLSRLDRFDSDTTNNIDTLKLHREHISSNIEKLVQLSLEIEDLNAITNKLKQLKNELSQVDADIEKETQRLKSIDVGCLSDCDLTTKAGRIEAQLIIKSAVKEVVLNTAKRRCKVTFHNSKSITLPITENPSDNVTEAIQSLSEVTERGLIDVDEVII

SEQ ID NO: 25677 - DNA, 50 bp, Escherichia coli; identical to SEQ ID NO: 24522
  source 1..50: mol_type = genomic DNA

SEQ ID NO: 25678 - DNA, 40 bp, Escherichia coli; identical to SEQ ID NO: 5188
  source 1..40: mol_type = genomic DNA

SEQ ID NO: 25679 - DNA, 40 bp, Escherichia coli; identical to SEQ ID NO: 5749
  source 1..40: mol_type = genomic DNA

SEQ ID NO: 25680 - DNA, 50 bp, Escherichia coli; identical to SEQ ID NO: 5750
  source 1..50: mol_type = genomic DNA

SEQ ID NO: 25681 - protein, 507 aa, Escherichia coli
MKRVISYIRFSSEKQAKGDSLRRQSKMVTDWLKAHPEYYLDQDLSFRDLGVSGFTGKHLKGGLGDFLTAIEKGLVKAGDTLLIESLDRLSRQAVDRASELLRNILRSGVDVVTLSDGEHYTKESLRDPLSLIKSILIMQRSHEESLRKSERIQAAWDAKKEAAKAGIKVSKRCPAWLKLNDDRKSFSVIPEKVETVKRCFQLRLEGKSIWEIVRTLNAEGHQTLNQYKAGKFGQTSVQDLLKNRSVIGYFTPKGCEEISSYYPSVIDETTFYKVQQLSHSRYGRKPVSDKPLSVNLFKGVIRCSECGHALIITGFSDTRNGIYRCPLRNENRCSAKGLSRKQTDGTLLTLLSRLDRFDSDMTNTIDTLKLHREHISSNIEKLVQLSLEIEDLSAITSKLKQLKGELSQVDADIEKETQRLKSIDVGCLSDCDLSTKAGRIEAQLIIKSAVKEVVLNTAKRRCKVTFHNGKVIDLPITENPSEDVTEAIQSLSEVTAKGLIDVDEVII

SEQ ID NO: 25682 - DNA, 50 bp, Escherichia coli; identical to SEQ ID NO: 24522
  source 1..50: mol_type = genomic DNA

SEQ ID NO: 25683 - DNA, 40 bp, Escherichia coli; identical to SEQ ID NO: 5188
  source 1..40: mol_type = genomic DNA

SEQ ID NO: 25684 - DNA, 40 bp, Escherichia coli; identical to SEQ ID NO: 5749
  source 1..40: mol_type = genomic DNA

SEQ ID NO: 25685 - DNA, 50 bp, Escherichia coli; identical to SEQ ID NO: 5750
  source 1..50: mol_type = genomic DNA

SEQ ID NO: 25686 - protein, 507 aa, Escherichia coli
MKRVISYIRFSSEKQAKGDSLRRQSKMVTDWLKAHPEYYLDQDLSFRDLGVSGFTGKHLKGGLGDFLTAIEKGLVKAGDTLLIESLDRLSLQAVDRASELLRNILRSGVDVVTLSDGEHYTKESLRDPLSLIKSILIMQRAHEESLRKAERIQAAWDAKKEAAKAGIKVSKRCPAWLKLNDDRKSFSVIPEKVETVKRCFQLRLEGKSIWEIVRTLNAEGHRSMNQYKPGKFGQTSVQDLLKNRSVIGYFTPKGCEEIAGYYPSVIDETTFYKVQQLSHSRYGRKPASDKPLSVNLFKGVIRCSECGHALIITGFSNTRNGIYRCPLRNENRCSAKGLSRKQTDGTLLTLLSRLDRFDSDTTNTIDTLKLHREHISNNIEKLVQLSLEIEDLSAITSKLKQLKGELSQVDADIEKETQRLKSIDTGSLSDCDLTTKAGRIEAQLIIKSAVKEVVLNTAKRRCKVTFHNGRAITLPITENPSEDVTEAIQSLSEVTERGLIDVDEVII

SEQ ID NO: 25687 - DNA, 50 bp, Escherichia coli; identical to SEQ ID NO: 24522
  source 1..50: mol_type = genomic DNA

SEQ ID NO: 25688 - DNA, 40 bp, Escherichia coli; identical to SEQ ID NO: 5188
  source 1..40: mol_type = genomic DNA

SEQ ID NO: 25689 - DNA, 40 bp, Escherichia coli; identical to SEQ ID NO: 5749
  source 1..40: mol_type = genomic DNA

SEQ ID NO: 25690 - DNA, 50 bp, Escherichia coli; identical to SEQ ID NO: 5750
  source 1..50: mol_type = genomic DNA

SEQ ID NO: 25691 - protein, 507 aa, Escherichia coli; identical to SEQ ID NO: 24551

SEQ ID NO: 25692 - DNA, 50 bp, Escherichia coli; identical to SEQ ID NO: 24522
  source 1..50: mol_type = genomic DNA

SEQ ID NO: 25693 - DNA, 40 bp, Escherichia coli
  source 1..40: mol_type = genomic DNA
cggcgttaatcgggtgattttagacagtcgcccggttcat

SEQ ID NO: 25694 - DNA, 40 bp, Escherichia coli
  source 1..40: mol_type = genomic DNA
cggcgttaatcgggtgattaaagacagtcgcccggttcat

SEQ ID NO: 25695 - DNA, 50 bp, Escherichia coli; identical to SEQ ID NO: 5750
  source 1..50: mol_type = genomic DNA

SEQ ID NO: 25696 - protein, 507 aa, Escherichia coli
MKRVISYIRFSSEKQAKGDSLRRQSKMVNDWLKAHPEYYLDQDLSFRDLGVSGFTGKHLKGGLGDFLTAIEKGLVKAGDTLLIESLDRLSRQDIDIASELLRRILRAGVDVVTLSDGEHYTRESLRDPLALIKSILIMQRAHEESLRKAERIQAAWDAKKEAAKAGIKVSKRCPAWLRLNDDRKSFSVIPDKVETVKRCFQLRLEGKSIWEIVRTLNAEGHQSMSQYKPGKFGQTSVQDLLKNRSVIGYFTPKGCEEISGYYPAIIDETTFYKVQQLSHYRYGRKPVSDKPLSVNLFKGVIRCSECGHALIITGFSDTRNGIYRCPLRNENRCSAKGLSRKQTDGTLLALLSRLDRFDSDTTNTIDTLKLHREHISSNIEKLVQLSLEIEDLNAITSKLKQLKGELSQVDADIEKETQRLKSIDVGCLSDCDLTTKSGRIEAQLIIKSAVKEVVLNTAKRRCKVTFHNGKVIDLPITENPSEDVTEAIQSLSEVTERGLIDVDEVII

SEQ ID NO: 25697 - DNA, 50 bp, Escherichia coli; identical to SEQ ID NO: 24522
  source 1..50: mol_type = genomic DNA

SEQ ID NO: 25698 - DNA, 40 bp, Escherichia coli; identical to SEQ ID NO: 5188
  source 1..40: mol_type = genomic DNA

SEQ ID NO: 25699 - DNA, 40 bp, Escherichia coli; identical to SEQ ID NO: 5749
  source 1..40: mol_type = genomic DNA

SEQ ID NO: 25700 - DNA, 50 bp, Escherichia coli; identical to SEQ ID NO: 5750
  source 1..50: mol_type = genomic DNA

SEQ ID NO: 25701 - protein, 507 aa, Escherichia coli
MKRVISYIRFSSEKQAKGDSLRRQSKMVTDWLKAHPEYYLDQDLSFRDLGVSGFTGKHLKGGLGDFLTAIEKGLVKAGDTLLIESLDRLSRQAVDRASELLRNILRSGVDVVTLSDGEHYTKESLRDPLSLIKSILIMQRAHEESLRKSERIQAAWNRKKELISEGIKISKRCPAWLRLNDDRKSFSVIPDKVETVKRCFQLRLEGKSIWEIVRTLNAEGHRSMNQYKPGKFGQTSVQDLLKNRSVIGYFTPKGCEEIAGYYPAIIDETTFYKVQQLSHSRYGKRSVSDKPLSVNLFKGVIRCSECGHALIITGFSDTRNGIYRCPLRNENRCSAKGLSRKQTDGTLLTLLSRLDRFDSDTTNTIDMLRLHREHISSNIEKLVQLSLEIEDLSAITIKLKQLKGELSQVDADIEKETQRLKSIDVGCLSDCDLTTKAGRIEAQLIIKSAVKEVVLNTAKRRCKVTFHNSKSITLSITENPSDNVTEAIQSLSEVTERGLIDVDEVII

SEQ ID NO: 25702 - DNA, 50 bp, Escherichia coli; identical to SEQ ID NO: 24522
  source 1..50: mol_type = genomic DNA

SEQ ID NO: 25703 - DNA, 40 bp, Escherichia coli; identical to SEQ ID NO: 5188
  source 1..40: mol_type = genomic DNA

SEQ ID NO: 25704 - DNA, 40 bp, Escherichia coli; identical to SEQ ID NO: 5749
  source 1..40: mol_type = genomic DNA

SEQ ID NO: 25705 - DNA, 50 bp, Escherichia coli; identical to SEQ ID NO: 5750
  source 1..50: mol_type = genomic DNA

SEQ ID NO: 25706 - protein, 507 aa, Escherichia coli
MKRVISYIRFSSEKQAKGDSLRRQSKMVTDWLKAHPEYYLDQDLSFRDLGVSGFTGKHLKGGLGDFLTAIEKGLVKAGDTLLIESLDRLSRQDVDQASELLRNILRSGVDVVTLSDGEHYTRESLRDPLALIKSILIMQRAHEESLRKAERIQAAWDAKKEAAKAGIKISKRCPAWLRLNDDRKSFSVIPEKVETVKRCFQLRLEGKSIWEIVRTLNDEGHQTLNQYKAGKFGQTSVQDLLKNRSVIGYFTPKGREEIAGYFPPIIPETDFYKVQQLSHYRYGRKPVSDKPLSVNLFKGVIRCSECGHALIITGFSDTRNGIYRCPLRNENRCNAKGLSRKQTDGTLLALLSRLDRFDSDMTNVIDALKLHREHISNNIEKLVQLSLEIEDLSAITSKLKQLKGELSQVDADIEKETQRLKSIDVGCLSDCDLTTKAGRIEAQLIIKSAVKEVVLNTAKRRCKVTFHNGRAITLPITENPSEDVTEAIQSLSEVTERGLIDVDVVEI

SEQ ID NO: 25707 - DNA, 50 bp, Escherichia coli; identical to SEQ ID NO: 24522
  source 1..50: mol_type = genomic DNA

SEQ ID NO: 25708 - DNA, 40 bp, Escherichia coli; identical to SEQ ID NO: 5188
  source 1..40: mol_type = genomic DNA

SEQ ID NO: 25709 - DNA, 40 bp, Escherichia coli; identical to SEQ ID NO: 5749
  source 1..40: mol_type = genomic DNA

SEQ ID NO: 25710 - DNA, 50 bp, Escherichia coli; identical to SEQ ID NO: 5750
  source 1..50: mol_type = genomic DNA

SEQ ID NO: 25711 - protein, 507 aa, Escherichia coli
MKRVISYIRFSSEKQAKGDSLRRQSKMVNDWLKAHPEYYLDQDLSFRDLGVSGFTGKHLKGGLGDFLTAIEKGLVKAGDTLLIESLDRLSRQAVDRASELLRNILRSGVDVVTLSDGEHYTRESLKDPLSLIKSILIMQRAHEESLRKAERIQAAWDAKKEAAKAGIKISRRCPAWLKLNDDRKSFSVIPEKVETVKRCFQLRLEGKSIWEIVRTLNAEGHQSMSQYKPGKFGQTSVQDLLKNRSVIGYFTPKGCEEISGYYPAIIDETTFYKVQQLSYARYGRKPASDKPMAVNLFKGVIRCSECGHALIITGFSDTRNGIYRCPLRNENRCSAKGLSRKQTDGTLLALLSRLDRFDSDMTNVIDTLKLHREHISSNIEKLVQLSLEIEDLSAITSKLRQLKNELSQVDADIEKETQRLKSIDAGCLSDCDLTTKAGRIEAQLIIKSAVKEVVLNTAKRRCKVTFHNGKIIDLPITENPSEDVTEAIQSLSEVTERGLIDVDVVEI

SEQ ID NO: 25712 - DNA, 50 bp, Escherichia coli; identical to SEQ ID NO: 24522
  source 1..50: mol_type = genomic DNA

SEQ ID NO: 25713 - DNA, 40 bp, Escherichia coli; identical to SEQ ID NO: 5188
  source 1..40: mol_type = genomic DNA

SEQ ID NO: 25714 - DNA, 40 bp, Escherichia coli; identical to SEQ ID NO: 5749
  source 1..40: mol_type = genomic DNA

SEQ ID NO: 25715 - DNA, 50 bp, Escherichia coli; identical to SEQ ID NO: 5750
  source 1..50: mol_type = genomic DNA

SEQ ID NO: 25716 - protein, 507 aa, Escherichia coli; identical to SEQ ID NO: 7526

SEQ ID NO: 25717 - DNA, 50 bp, Escherichia coli; identical to SEQ ID NO: 24522
  source 1..50: mol_type = genomic DNA

SEQ ID NO: 25718 - DNA, 40 bp, Escherichia coli; identical to SEQ ID NO: 5188
  source 1..40: mol_type = genomic DNA

SEQ ID NO: 25719 - DNA, 40 bp, Escherichia coli; identical to SEQ ID NO: 5749
  source 1..40: mol_type = genomic DNA

SEQ ID NO: 25720 - DNA, 50 bp, Escherichia coli; identical to SEQ ID NO: 5750
  source 1..50: mol_type = genomic DNA

SEQ ID NO: 25721 - protein, 507 aa, Escherichia coli
MKRVISYIRFSSEKQSRGDSLRRQSKMVTDWLKAHPEYYLDQDLSFRDLGVSGFTGKHLKGGLGDFLTAIEKGLVKAGDTLLIESLDRLSRQDVDQASELLRNILRSGVDVVTLSDGEHYTRESLKDPLALIKSILIMQRSHEESLRKSERIQAAWNRKKELISEGIKISKRCPAWLKLNDDRKSFSVIPDKVETVKRCFQLRLEGKSIWEIVRTLNAEGHRSMNQYKPGKFGQTSVQDLLKNRSVIGYFTPKGCEEISGYYPAIIDETTFYKVQQLSHYRYGRKPVSDKPLSVNLFKGVIRCSECGHALIITGFSDTRNGIYRCPLRNENRCSAKGLSRKQTDGTLLTLLSRLDRFDSDMTNVIDMLRLHREHISSNIEKLVQLSLEIEDLSAITIKLKQLKGELSQVDADIEKETQRLKSIDTGSLSDCDLTTKAGRIEAQLIIKSAVKEVVLNTAKRRCKVTFHNGKVIGLSITENPSEDVTEAIQSLSEVTERGLIDVDVVEI

SEQ ID NO: 25722 - DNA, 50 bp, Escherichia coli; identical to SEQ ID NO: 24522
  source 1..50: mol_type = genomic DNA

SEQ ID NO: 25723 - DNA, 40 bp, Escherichia coli; identical to SEQ ID NO: 5188
  source 1..40: mol_type = genomic DNA

SEQ ID NO: 25724 - DNA, 40 bp, Escherichia coli; identical to SEQ ID NO: 5749
  source 1..40: mol_type = genomic DNA

SEQ ID NO: 25725 - DNA, 50 bp, Escherichia coli; identical to SEQ ID NO: 5750
  source 1..50: mol_type = genomic DNA

SEQ ID NO: 25726 - protein, 507 aa, Escherichia coli
MKRVISYIRFSSEKQAKGDSLRRQSKMVTDWLKAHPEYYLDQDLSFRDLGVSGFTGKHLKGGLGDFLTAIEKGLVKAGDTLLIESLDRLSRQDIDIASELLRNILRSGVDVVTLSDGEHYTRESLRDPLALIKSILIMQRAHEESLRKAERIQAAWDAKKEAAKAGIKVSKRCPAWLKLNDDRKSFSVIPEKVETVKRCFQLRLEGKSIWEIVRTLNDEGHQSMSQYKPGSFGQTSVQDLLKNRSVIGYFTPKGCEEISGYYPAIIDETTFYKVQQLSHYRYGRKPVSDKPLSVNLFKGVIRCSECGHALIITGFSDTRSGIYRCPLRNENRCSAKGLSRKQTDGTLLTLLSRLDRFDSDTTNTIDTLKLHREHISSNIEKLVQLSLEIEDLSAITSKLKQLKGELSQVDADIEKETQRLKSIDVGCLSDCDLTTKAGRIEAQLIIKSAVKEVVLNTAKRRCKVTFHNGKVIDLPITENPSEDVTEAIQSLSEVIERGLIDADVVEI

SEQ ID NO: 25727 - DNA, 50 bp, Escherichia coli; identical to SEQ ID NO: 24522
  source 1..50: mol_type = genomic DNA

SEQ ID NO: 25728 - DNA, 40 bp, Escherichia coli; identical to SEQ ID NO: 5188
  source 1..40: mol_type = genomic DNA

SEQ ID NO: 25729 - DNA, 40 bp, Escherichia coli; identical to SEQ ID NO: 5749
  source 1..40: mol_type = genomic DNA

SEQ ID NO: 25730 - DNA, 50 bp, Escherichia coli; identical to SEQ ID NO: 5750
  source 1..50: mol_type = genomic DNA

SEQ ID NO: 25731 - protein, 507 aa, Escherichia coli
MKRVISYIRFSSEKQAKGDSLRRQSKMVNDWLKAHPEYYLDQDLSFRDLGVSGFTGKHLKGGLGDFLTAIEKGLVKAGDTLLIESLDRLSRQAVDRASELLRNILRSGVDVVTLSDGEHYTKESLRDPLSLIKSILIMQRAHEESLRKAERIQAAWDAKKEAAKAGIKISRRCPAWLKLNDDRKSFSVIPEKVETVKRCFQLRLEGKSIWEIVRTLNDEGHQSMSQYKPGSFGQSSVQDLLKNRSVIGYFTPKGCEEISGYYPAIIDETTFYKVQQLSHYRYGRKPASAKPLSVNLFKGVIRCSECGHALIITGFSDTRNGIYRCPLRNENRCSAKGLSRKQTDGTLLALLSRLDRFDSDTTNTIDTLKLHREHISSNIEKLVQLSLEIEDLSAITSKLRQLKGELSQVDADIEKETQRLKSIDVGCLSDCDLTTKAGRIEAQLIIKSAVKEVVLNTAKRRCKVTFHNGRAITLPITENPSEDVTEAIQSLSEVTERGLIGVDEVII

SEQ ID NO: 25732 - DNA, 50 bp, Escherichia coli; identical to SEQ ID NO: 24522
  source 1..50: mol_type = genomic DNA

SEQ ID NO: 25733 - DNA, 40 bp, Escherichia coli; identical to SEQ ID NO: 5188
  source 1..40: mol_type = genomic DNA

SEQ ID NO: 25734 - DNA, 40 bp, Escherichia coli; identical to SEQ ID NO: 5749
  source 1..40: mol_type = genomic DNA

SEQ ID NO: 25735 - DNA, 50 bp, Escherichia coli; identical to SEQ ID NO: 5750
  source 1..50: mol_type = genomic DNA

SEQ ID NO: 25736 - protein, 507 aa, Escherichia coli
MKRVISYIRFSSEKQAKGDSLRRQSKMVTDWLKAHPEYYLDQDLSFRDLGVSGFTGKHLKGGLGDFLTAIEKGLVKAGDTLLIESLDRLSRQAVDRASELLRNILRSGVDVVTLSDGEHYTSESLKDPLALIKSILIMQRAHEESLRKSERIQAAWDAKKEAAKAGIKVSKRCPAWLKLNDDRKSFSVIPEKVATVKRCFQLRLEGKSIWEIVRTLNDEGHQTLNQYKPGKFGQTSVQDLLKNRSVIGYFTPKGREEIAGYFPPIIPETDFYKVQQLSYSRYGRKPASDKPLSVNLFKGVIRCSECGHALIITGFSDTRNGIYRCPLRNENRCNAKGLSRKQTDGTLLALLSRLDRFDSDTTNTIDTLKLHREHLSSNIEKLVQLSLEIEDLSAITIKLKQLKGELSQVDADIEKETQRLKSIDVGCLSDCDLTTKAGRIEAQLIIKSAVKEVVLNTAKRRCKVTFHNGKVIDLPITENPSEDVTEAIQSLSEVTAKGLIDVDVVEI

SEQ ID NO: 25737 - DNA, 50 bp, Escherichia coli; identical to SEQ ID NO: 24522
  source 1..50: mol_type = genomic DNA

SEQ ID NO: 25738 - DNA, 40 bp, Escherichia coli; identical to SEQ ID NO: 5188
  source 1..40: mol_type = genomic DNA

SEQ ID NO: 25739 - DNA, 40 bp, Escherichia coli; identical to SEQ ID NO: 5749
  source 1..40: mol_type = genomic DNA

SEQ ID NO: 25740 - DNA, 50 bp, Escherichia coli; identical to SEQ ID NO: 5750
  source 1..50: mol_type = genomic DNA

SEQ ID NO: 25741 - protein, 419 aa, Escherichia coli
MKRVISYIRFSSEKQSRGDSLRRQSKMVTDWLKAHPEYYLDQDLSFRDLGVSGFTGKHLKGGLGDFLTAIEKGLVKAGDTLLIESLDRLSRQNVDRASELLRNILRSGVDVVTLSDGEHYTRESLKDPLALIKSILIMQRSHEESLRKSERIQGAWNRKKELISEGIKISKRCPAWLKLNDDRKSFSVIPEKVETVKRCFQLRLEGKSIWEIVRTLNDEGHQTLNQYKAGKFGQTSVQDLLKNRSVIGYFTPKGCEEISGYYPAIIDETIFYKVQQLSYSRYGRKPASDKPLSVNLFKGVIRCSECGHALIITGFSDTRNGIYRCPLRNENRCSAKGLSRKQTDGTLLTLLSRLDRFDSDTTNIIDMLRLHREHISSNIEKLVQLSLEIEDLSAAYFHERRSLNNFHRDRVITFEQIAE

SEQ ID NO: 25742 - DNA, 50 bp, Escherichia coli; identical to SEQ ID NO: 24522
  source 1..50: mol_type = genomic DNA

SEQ ID NO: 25743 - DNA, 40 bp, Escherichia coli; identical to SEQ ID NO: 5188
  source 1..40: mol_type = genomic DNA

SEQ ID NO: 25744 - DNA, 40 bp, Escherichia coli; identical to SEQ ID NO: 5749
  source 1..40: mol_type = genomic DNA

SEQ ID NO: 25745 - DNA, 50 bp, Escherichia coli; identical to SEQ ID NO: 5750
  source 1..50: mol_type = genomic DNA

SEQ ID NO: 25746 - protein, 507 aa, Escherichia coli
MKRVISYIRFSSEKQSRGDSLRRQSKMVTDWLKAHPEYHLDQDLSFRDLGVSGFTGKHLKGGLGDFLTAIEKGLVKAGDTLLIESLDRLSRQNVDRASELLRNILRSGVDVVTLSDGEHYTRESLKDPLALIKSILIMQRSHEESLRKSERIQAAWNRKKELISEGIKISKRCPAWLKLNDDRKSFSVIPEKVETVKRCFQLRLEGKSIWEIVRTLNAEGHQTLNQYKAGSFGQTSVQDLLKNRSVIGYFTPKGCEEISGYFPPIIPETDFYKVQQLSYSRYGRKPASDKPLSVNLFKGVIRCSECGHALIITGFSDTRSGIYRCPLRNENRCSAKGLSRKQTDGTLLTLLSRLDRFDSDTTNTIDMLRLHREHISSNIEKLVQLSLEIEDLSAITSKLKQLKGELSQVDADIEKETQRLKSIDVGCLSDCDLTTKAGRIEAQLIIKSAVKEVVLNTAKRRCKVTFHNSKSITLSITENPSEDVTEAIQSLSEVTERGLIDVDVVEI

SEQ ID NO: 25747 - DNA, 50 bp, Escherichia coli; identical to SEQ ID NO: 24522
  source 1..50: mol_type = genomic DNA

SEQ ID NO: 25748 - DNA, 40 bp, Escherichia coli; identical to SEQ ID NO: 5188
  source 1..40: mol_type = genomic DNA

SEQ ID NO: 25749 - DNA, 40 bp, Escherichia coli; identical to SEQ ID NO: 5749
  source 1..40: mol_type = genomic DNA

SEQ ID NO: 25750 - DNA, 50 bp, Escherichia coli; identical to SEQ ID NO: 5750
  source 1..50: mol_type = genomic DNA

SEQ ID NO: 25751 - protein, 507 aa, Escherichia coli
MKRVISYIRFSSEKQSRGDSLRRQSKMVTDWLKAHPEYHLDQDLSFRDLGVSGFTGKHLKGGLGDFLTAIKKGLVKAGDTLLIESLDRLSRQDIDIASELLRNILRSGVDVVTLSDGEHYTRESLKDPLALIKSILIMQRAHEESLRKAERIQAAWDAKKEAAKAGIKISRRCPAWLKLNDDRKSFSVIPEKVETVKRCFQLRLEGKSIWEIVRTLNAEGHQTLNQYKAGKFGQTSVQDLLKNRSVIGYFTPKGCEEISGYYPAIIDETTFYKVQQLSYARYGRKPASDKPLSVNLFKGVIRCSECGHALIITGFSDTRSGIYRCPLRNENRCSAKGLSRKQTDGTLLTLLSRLDRFDSDTANIIDMLRLHREHISSNIEKLVQLSLEIEDLNAITSKLKQLKGELSQVDADIEKETQRLKSIDVGCLSDCDLTTKAGRIEAQLIIKSAVKEVVLNTAKRRCKVTFHNGRAITLPITENPSEDVTEAIQSLSEVTERGLIDVDEVII

SEQ ID NO: 25752 - DNA, 50 bp, Escherichia coli; identical to SEQ ID NO: 24522
  source 1..50: mol_type = genomic DNA

SEQ ID NO: 25753 - DNA, 40 bp, Escherichia coli; identical to SEQ ID NO: 5188
  source 1..40: mol_type = genomic DNA

SEQ ID NO: 25754 - DNA, 40 bp, Escherichia coli; identical to SEQ ID NO: 5749
  source 1..40: mol_type = genomic DNA

SEQ ID NO: 25755 - DNA, 50 bp, Escherichia coli; identical to SEQ ID NO: 5750
  source 1..50: mol_type = genomic DNA

SEQ ID NO: 25756 - protein, 507 aa, Escherichia coli
MKRVISYIRFSSEKQAKGDSLRRQSKMVTDWLKAHPEYYLDQDLSFRDLGVSGFTGKHLKGGLGDFLTAIEKGLVKAGDTLLIESLDRLSRQDVDQASELLRNILRSGVDVVTLSDGEHYTRESLRDPLALIKSILIMQRAHEESLRKAERIQAAWDAKKEAAKAGIKVSKRCPAWLKLNDDRKSFSVIPEKVETVKRCFQLRLEGKSIWEIVRTLNDEGHQTLNQYKAGKFGQTSVQDLLKNRSVIGYFTPKGCEEISGYYPAIIDETTFYKVQQLSYARYGRKPASDKPLSVNLFKGVIRCSECGHALIITGFSDTRSGIYRCPLRNENRCNAKGLSRKQTDSTLLALLSRLDRFDSDMTNTVDTLKLHREHISNNIEKLVQLSLEIEDLSAITSKLKQLKGELSQVDADIEKETQRLKSIDVGCLSDCDLTTKAGRIEAQLIIKSAVKEVVLNTAKRRCKVTFHNGKVIDLPITENPSEDVTEAIQSLSEVTERGLIDVDEVII

SEQ ID NO: 25757 - DNA, 50 bp, Escherichia coli; identical to SEQ ID NO: 24522
  source 1..50: mol_type = genomic DNA

SEQ ID NO: 25758 - DNA, 40 bp, Escherichia coli; identical to SEQ ID NO: 5188
  source 1..40: mol_type = genomic DNA

SEQ ID NO: 25759 - DNA, 40 bp, Escherichia coli; identical to SEQ ID NO: 5749
  source 1..40: mol_type = genomic DNA

SEQ ID NO: 25760 - DNA, 50 bp, Escherichia coli; identical to SEQ ID NO: 5750
  source 1..50: mol_type = genomic DNA

SEQ ID NO: 25761 - protein, 507 aa, Escherichia coli
MKRVISYIRFSSEKQAKGDSLRRQSKMVTDWLKAHPEYYLDQDLSFRDLGVSGFTGKHLKGGLGDFLTAIEKGLVKAGDTLLIESLDRLSRQAVDRASELLRNILRSGVDVVTLSDGEHYTKESLRDPLSLIKSILIMQRAHEESLRKAERIQAAWDAKKEAAKAGIKISRRCPAWLRLNDDRKSFSVIPDKVETVKRCFQLRLEGKSIWEIVRTMNAEGRQTLNQYEAGSFGQSSVQDLLKNRSVIGYFTPKGCEEIAGYYPAIIDETTFYKVQQLSYARYGRKPASDKPLSVNLFKGVIRCSECGHALIITGFSDTRSGIYRCPLRNENRCSAKGLSRKQTDGTLLTLLSRLDRFDSDTTNTIDMLRLHREHISSNIEKLVQLSLEIEDLNAITNKLKQLKNELSQVDADIEKETQRLKSIDAGCLSDCDLTTKAGRIEAQLIIKSAVKEVVLNTAKRRCKVTFHNGKIIDLPITENPSEDVTEAIQSLSEVTERGLIDVDVVEI

SEQ ID NO: 25762 - DNA, 50 bp, Escherichia coli; identical to SEQ ID NO: 24522
  source 1..50: mol_type = genomic DNA

SEQ ID NO: 25763 - DNA, 40 bp, Escherichia coli; identical to SEQ ID NO: 5188
  source 1..40: mol_type = genomic DNA

SEQ ID NO: 25764 - DNA, 40 bp, Escherichia coli; identical to SEQ ID NO: 5749
  source 1..40: mol_type = genomic DNA

SEQ ID NO: 25765 - DNA, 50 bp, Escherichia coli; identical to SEQ ID NO: 5750
  source 1..50: mol_type = genomic DNA

SEQ ID NO: 25766 - protein, 507 aa, Escherichia coli
MKRVISYIRFSSEKQAKGDSLRRQSKMVTDWLKAHPEYYLDESLTFRDLGVSGFTGKHLKGGLGDFLTAIEKGLVKAGDTLLIESLDRLSRQAVDRASELLRNILRSGVDVVTLSDGEHYTRESLKDPLSLIKSILIMQRAHEESLRKSERIQAAWDAKKEAAKAGIKISRRCPAWLKLNDDRKSFSVIPEKVETVKRCFQLRLEGKSIWEIVRTLNDECHQSMNQYKPGKFGQTSVQDLLKNRSVIGYFTPKGREEIAGYFPSIIHETDFYKVQQLSHSRYGRKPVSAKPLSVNLFKGVIRCSECGHALIITGFSDTRNGIYRCPLRNENRCSAKGLSRKQTDGTLLALLSRLDRFDSDTTNTIDTLKLHREHISSNIEKLVQLSLEIEDLSAITSKLRQLKGELSQVDADIEKETQRLKSIDVGCLSDCDLTTKAGRIEAQLIIKSAVKEVVLNTAKRRCKVTFHNGRAITLPITENPSEDVTEAIQSLSEVTERGLIGVDEVII

SEQ ID NO: 25767 - DNA, 50 bp, Escherichia coli; identical to SEQ ID NO: 24522
  source 1..50: mol_type = genomic DNA

SEQ ID NO: 25768 - DNA, 40 bp, Escherichia coli; identical to SEQ ID NO: 5188
  source 1..40: mol_type = genomic DNA

SEQ ID NO: 25769 - DNA, 40 bp, Escherichia coli; identical to SEQ ID NO: 5749
  source 1..40: mol_type = genomic DNA

SEQ ID NO: 25770 - DNA, 50 bp, Escherichia coli; identical to SEQ ID NO: 5750
  source 1..50: mol_type = genomic DNA

SEQ ID NO: 25771 - protein, 507 aa, Escherichia coli
MKRVISYIRFSSEKQAKGDSLRRQSKMVTDWLKAHPEYYLDQDLSFRDLGVSGFTGKHLKGGLGDFLTAIEKGLVKAGDTLLIESLDRLSRQDIDIASELLRRILRAGVDVVTLSDGEHYTKESLRDPLALIKSILIMQRAHEESLRKSERIQAAWDAKKEAAKAGIKVSKRCPAWLKLNDDRKSFSVIPEKVETVKRCFQLRLEGKSIWEIVRTLNDEGHQSMSQYKPGKFGQTSVQDLLKNRSVIGYFTPKGCEEISGYYPAIIDETTFYKVQQLSHSRYGRKPVSAKPLSVNLFKGVIRCSECGHALIITGFSDTRNGIYRCPLRNENRCSAKGLSRKQTDGTLLTLLSRLDRFDSDMTNTVDTLKLHREHISNNIEKLVQLSLEIEDLSAITIKLKQLKGELSQVDADIEKETQRLKSIDVGCLSDCDLTTKAGRIEAQLIIKSAVKEVVLNTAKRRCKVTFHNSKSITLPITENPSEDVTEAIQSLSEVTERGLIDVDEVII

SEQ ID NO: 25772 - DNA, 50 bp, Escherichia coli; identical to SEQ ID NO: 24522
  source 1..50: mol_type = genomic DNA

SEQ ID NO: 25773 - DNA, 40 bp, Escherichia coli; identical to SEQ ID NO: 5188
  source 1..40: mol_type = genomic DNA

SEQ ID NO: 25774 - DNA, 40 bp, Escherichia coli; identical to SEQ ID NO: 5749
  source 1..40: mol_type = genomic DNA

SEQ ID NO: 25775 - DNA, 50 bp, Escherichia coli; identical to SEQ ID NO: 5750
  source 1..50: mol_type = genomic DNA

SEQ ID NO: 25776 - protein, 488 aa, Escherichia coli
MKRVISYIRFSSEKQAKGDSLRRQSKMVTDWLKAHPEYYLDQDLSFRDLGVSGFTGKHLKGGLGDFLTAIEKGLVKAGDTLLIESLDRLSRQDVDQASELLRNILRSGVDVVTLSDGEHYTRESLKDPLALIKSILIMQRAHEESLRKAERIQAAWDAKKEAAKAGIKISRRCPAWLRLNDDRKTFSVIPEKVATVKRCFQLRLEGKSIWEIVRTLNAEGHQTLNQYKAGSFGQSSVQDLLKNRSVIGYFTPKGCEEISSYYPSVIDETTFYKVQQLSHSRYGRKPVSDKPLSVNLFKGVIRCSECGHALIITGFSDTRNGIYRCPLRNENRCSAKGLSRKQTDGTLLTLLSRLDRFDSDMTNTIDTLKLHREHISSNIEKLVQLSLEIEDLSAITSKLKQLKGELSQVDADIEKETQRLKSIDVGCLSDCDLTTKAGRIEAQLIIKSAVKEVVLNTAKRRCKVTFHNSKSITLPITENPSEDVTEAI

SEQ ID NO: 25777 - DNA, 50 bp, Escherichia coli; identical to SEQ ID NO: 24522
  source 1..50: mol_type = genomic DNA

SEQ ID NO: 25778 - DNA, 40 bp, Escherichia coli; identical to SEQ ID NO: 5188
  source 1..40: mol_type = genomic DNA

SEQ ID NO: 25779 - DNA, 40 bp, Escherichia coli; identical to SEQ ID NO: 5749
  source 1..40: mol_type = genomic DNA

SEQ ID NO: 25780 - DNA, 50 bp, Escherichia coli; identical to SEQ ID NO: 5750
  source 1..50: mol_type = genomic DNA

SEQ ID NO: 25781 - protein, 507 aa, Escherichia coli
MKRVISYIRFSSEKQAKGDSLRRQSKMVTDWLKAHPEYYLDQDLSFRDLGVSGFTGKHLKGGLGDFLTAIEKGLVKAGDTLLIESLDRLSRQAVDRASELLRNILRSGVDVVTLSDGEHYTRESLRDPLSLIKSILIMQRSHEESLRKSERIQAAWDAKKEAAKAGIKVSKRCPAWLRLNDDRKSFSVIPDKVETVKRCFQLRLEGKSIWEIVRTLNAEGHRSMNQYKPGKFGQTSVQDLLKNRSVIGYFTPKGCEEIAGYYPSVIDETTFYKVQQLSHSRYGRKPASAKPLSVNLFKGVIRCSECGHALIITGFSDTRNGIYRCPLRNENRCSAKGLSRKQTDGTLLTLLSRLDRFDSDMTNTIDTLKLHREHISSNIEKLVQLSLEIEDLNAITNKLKQLKNELSQVDADIEKETQRLKSIDTGSLSDCDLSTKAGRIEAQLIIKSAVKEVVLNTAKRRCKVTFHNGKSITLPITENPSEDVTEAIQSLSEVTERGLIDVDVVEI

SEQ ID NO: 25782 - DNA, 50 bp, Escherichia coli; identical to SEQ ID NO: 24522
  source 1..50: mol_type = genomic DNA

SEQ ID NO: 25783 - DNA, 40 bp, Escherichia coli; identical to SEQ ID NO: 5188
  source 1..40: mol_type = genomic DNA

SEQ ID NO: 25784 - DNA, 40 bp, Escherichia coli; identical to SEQ ID NO: 5749
  source 1..40: mol_type = genomic DNA

SEQ ID NO: 25785 - DNA, 50 bp, Escherichia coli; identical to SEQ ID NO: 5750
  source 1..50: mol_type = genomic DNA

SEQ ID NO: 25786 - protein, 507 aa, Escherichia coli
MKRVISYFRFSSEKQAKGDSLRRQSKMVTDWLKAHPEYYLDESLTFRDLGVSGFTGKHLKGGLGDFLTAIEKGLVKAGDTLLIESLDRLSRQAVDRASELLRNILRSGVDVVTLSDGEHYTKESLRDPLSLIKSILIMQRAHEESLRKSERIQAAWNRKKELISEGIKISKRCPAWLKLNDDRKSFSVIPEKVETVKRCFQLRLEGKSIWDIVRTLNDEGHLSLNQYKAGKFGQTSVQDLLKNRSVIGYFTPKGCEEISGYYPAIIDETTFYKVQQLSHYRYGRKPVSDKPLSVNLFKGVIRCSECGHALIITGFSDTRNGIYRCPLRNENRCSAKGLSRKQTDGTLLALLSRLDRFDSDTTNTIDTLKLHREHISSNIEKLVQLSLEIEDLNAITNKLKQLKNELSQVDADIEKETQRLKSIDVGCLSDCDLTTKAGRIEAQLIIKSAVKEVVLNTAKRRCKVTFHNGRAITLPITENPSEDVTEAIQSLSEVTERGLIDVDVVAI

SEQ ID NO: 25787 - DNA, 50 bp, Escherichia coli; identical to SEQ ID NO: 24522
  source 1..50: mol_type = genomic DNA

SEQ ID NO: 25788 - DNA, 40 bp, Escherichia coli; identical to SEQ ID NO: 5188
  source 1..40: mol_type = genomic DNA

SEQ ID NO: 25789 - DNA, 40 bp, Escherichia coli; identical to SEQ ID NO: 5749
  source 1..40: mol_type = genomic DNA

SEQ ID NO: 25790 - DNA, 50 bp, Escherichia coli; identical to SEQ ID NO: 5750
  source 1..50: mol_type = genomic DNA

SEQ ID NO: 25791 - protein, 507 aa, Escherichia coli
MKRVISYIRFSSEKQAKGDSLRRQSKMVTDWLKAHPEYYLDQDLSFRDLGVSGFTGKHLKGGLGDFLTAIEKGLVKAGDTLLIESLDRLSRQAVDRASELLRNILRSGVDVVTLSDGEHYTSESLKDPLALIKSILIMQRAHEESLRKAERIQAAWDAKKEAAKAGIKISKRCPAWLKLNDDRKSFSIIPEKVETVKRCFQLRLEGKSIWAIVKALNDEGHQTLNQYKAGKFGQTSVQDLLKNRSVIGYFTPKGCEEIAGYYPAIIDETTFYKVQQLSHSRYGRKPVSAKPLSVNLFKGVIRCSECGHALIITGFSDTRNGIYRCPLRNENRCSAKGLSRKQTDGTLLTLLSRLDRFDSDTTNTIDTLKLHREHISSNIEKLVQLSLEIEDLSAITSKLKQLKGELSQVDADIEKETQRLKSIDVGCLSDCDLTTKAGRIEAQLIIKSAVKEVVLNTAKRRCKVTFHNGKVIDLSITENPSEDVTEAIQSLSEVTERGLIDVDVVEI

SEQ ID NO: 25792 - DNA, 50 bp, Escherichia coli; identical to SEQ ID NO: 24522
  source 1..50: mol_type = genomic DNA

SEQ ID NO: 25793 - DNA, 40 bp, Escherichia coli; identical to SEQ ID NO: 5188
  source 1..40: mol_type = genomic DNA

SEQ ID NO: 25794 - DNA, 40 bp, Escherichia coli; identical to SEQ ID NO: 5749
  source 1..40: mol_type = genomic DNA

SEQ ID NO: 25795 - DNA, 50 bp, Escherichia coli; identical to SEQ ID NO: 5750
  source 1..50: mol_type = genomic DNA

SEQ ID NO: 25796 - protein, 507 aa, Escherichia coli
MKRVISYIRFSSEKQAKGDSLRRQSKMVTDWLKAHPEYYLDQDLSFRDLGVSGFTGKHLKGGLGDFLTAIEKGLVKAGDTLLIESLDRLSRQAVDRASELLRNILRSGVDVVTLSDGEHYTKESLRDPLSLIKSILIMQRSHEESLRKSERIQAAWDAKKEAAKAGIKVSKRCPAWLKLNDDRKSFSVIPDKVETVKRCFQLRLEGKSIWEIVRTLNAEGHRSMNQYKPGKFGQTSVQDLLKNRSVIGYFTPKGCEEIAGYYPSVIDETTFYKVQQLSHSRHGRKPVSDKPLSVNLFKGVIRCSECGHALIITGFSDTRNGIYRCPLRNENRCSAKGLSRKQTDGTLLTLLSRLDRFDSDTTNTIDMLKLHREHISSNIEKLVQLSLEIEDLNAITNKLKQLKNELSQVDADIEKETQRLKSIDTGSLSDCDLSTKAGRIESQLIIKSAVKEVVLNTAKRRCKVTFHNGKSIILSITENPSEDVTEAIQSLSEVTERGLIDVDEVII

SEQ ID NO: 25797 - DNA, 50 bp, Escherichia coli; identical to SEQ ID NO: 24522
  source 1..50: mol_type = genomic DNA

SEQ ID NO: 25798 - DNA, 40 bp, Escherichia coli; identical to SEQ ID NO: 21333
  source 1..40: mol_type = genomic DNA

SEQ ID NO: 25799 - DNA, 40 bp, Escherichia coli; identical to SEQ ID NO: 24744
  source 1..40: mol_type = genomic DNA

SEQ ID NO: 25800 - DNA, 50 bp, Escherichia coli; identical to SEQ ID NO: 5750
  source 1..50: mol_type = genomic DNA

SEQ ID NO: 25801 - protein, 452 aa, Listeria monocytogenes
MKAAIYIRVSTQEQIENYSIQAQTEKLTALCRSKDWDVYDIFIDGGYSGSNMNRPALNEMLSKLHEIDAVVVYRLDRLSRSQRDTITLIEEYFLKNNVEFVSLSETLDTSSPFGRAMIGILSVFAQLERETIRDRMVMGKIKRIEAGLPLTTAKGRTFGYDVIDTKLYINEEEAKQLQMIYDIFEEEKSITSLQKRLKNLGFKVKSYSSYNNWLTNDLYCGYVSYADKVHVRGIHEPIISEEQFYRVQEIFSRMGKNPNMNKESASLLNNLVVCSKCGLGFVHRRKDTVSRGKKYHYRYYSCKTYKHTHELEKCGNKIWRADILEELIIDRVNNYSFASRNVDKEDELDNLNEKLKIEHSKKKRLFDLYISGSYEVSELDAMMTDIDAQINYYEAQIEANEELKKNKKIQENLADLATVDFDSLEFREKQLYLKSLINKIYIDGEQVTIEWL

SEQ ID NO: 25802 - DNA, 50 bp, Listeria monocytogenes
  source 1..50: mol_type = genomic DNA
tttagtatctcgttttctctcgttggaagaagaagaaatgagatgccaaa

SEQ ID NO: 25803 - DNA, 40 bp, Listeria monocytogenes; identical to SEQ ID NO: 1298
  source 1..40: mol_type = genomic DNA

SEQ ID NO: 25804 - DNA, 40 bp, Listeria monocytogenes
  source 1..40: mol_type = genomic DNA
tttcggatcaagctatgagatacgcaaagagggaactaaa

SEQ ID NO: 25805 - DNA, 50 bp, Listeria monocytogenes
  source 1..50: mol_type = genomic DNA
tttaaaatcaagggctcattttttataagatgatgatgatggatgccaaa

SEQ ID NO: 25806 - protein, 525 aa, Chryseobacterium culicis
MQAVYLYIRVSTDEQAVKGYSQRSQLDRLVHYCKDHNLIVTKTIFEDYSAKTFNRPEWNKLFAELKLTKNQSALILFTYWDRFSRNIMDAYKMLERLQNMKVSIQAIEQQIDFSIPESKIMLAMYWATSEVENDKRSRNVRLGMQKARLEGRWINKAPLGYRNKITSDGKKYIEIYEPEAYVIREAFIAIVRQNKYCLTEIYKDAVSNGLNCSRSAFYRLVRNPIYCGKIKIPAFEDKAERIVEGTHERLIPVVLFDQVQRIIKGADFNHPKKLTSKRIVNENLIFRGVLQCPNCGNTLTGSGSQGHTKKYYYYHCVGHCSYRIRADAINLSFLSFLKNNRVVEPFLELANSISKEIYGEEHHDYIQKKEEIKKEMEKLIDRGFNAQKLFSNGNIDYDDYILIRSSCQESLKDNTDKLRRQALKIVAEKHTEKGTDYIINHLGEFYENSNTITKQRIIRLFFPEKVKVLEGNIEKMLSESVKTIFGLTASASKIKEIHGQQTEQAIVEFFKELYFLGYEQNLKNI

SEQ ID NO: 25807 - DNA, 50 bp, Chryseobacterium culicis
  source 1..50: mol_type = genomic DNA
ttgtcctaatggtgtcattaagtgaacttggaaggattatcttcgaaccg

SEQ ID NO: 25808 - DNA, 40 bp, Chryseobacterium culicis
  source 1..40: mol_type = genomic DNA
aaagttgtctctttaagtgagcgcgaaaggattcgaacct

SEQ ID NO: 25809 - DNA, 40 bp, Chryseobacterium culicis
  source 1..40: mol_type = genomic DNA
aaagttgtctctttaagtgatcgcgaaaggattcgaacct

SEQ ID NO: 25810 - DNA, 50 bp, Chryseobacterium culicis
  source 1..50: mol_type = genomic DNA
ttctaataattctatcatcaagtcatcttggaaggaaagcttttaaagcc

SEQ ID NO: 25811 - protein, 493 aa, Ruminococcus torques
MKTKYCYGYVRVSTSGQEELSPDSQAKLLKDFAKKNDMIILQIFYELGISGRKADKRPEFQKMIALAKSDKHPVDCIIVWKFSRFARNQEESIVYKSLLKKKHNVDVLSVSEPLVDGPFGSLIERIIEWMDEYYSVRLSGEVTRGMTEKAKRGGYQARPPLGYKIQERGKPPVIVPEEAEIIKIIFDKYVNEHTGIFDIARYLNLCGFKTSHNKPFERRSIEYILQNPTYCGMIRWNRTVSETNEIRPESEWIVSDGQQPAIISKELFDKAQIRYKSEYKPSGARPSSTYKHWLSGLMKCPVCGRTMIAKTVNNQKSYCYFTCYGYSKGKCLAKTSVSSLRLEPAVLASIKEVLDTGNIIYRHVEPVQETSVDLNVIITEQLRKNAEKFDRIREAYRNGVDTLDEYKENKRMVQEEKEMLEKQLADIKPAEPTIDTSKIAMLEKVRNVYEIIESDSVDPVTKNEILKSVIEKIIYDRSKDELKVYYYYAPESQ

SEQ ID NO: 25812 - DNA, 50 bp, Ruminococcus torques
  source 1..50: mol_type = genomic DNA
ttttgtaggttataacaaaaaggtcaaccttttcgtaacaacatacaaat

SEQ ID NO: 25813 - DNA, 40 bp, Ruminococcus torques
  source 1..40: mol_type = genomic DNA
ccttcgacccccattgtgtcatccaattcggacagctcac

SEQ ID NO: 25814 - DNA, 40 bp, Ruminococcus torques
  source 1..40: mol_type = genomic DNA
ccttcgacccccattgtgtattccaattcggacagctcac

SEQ ID NO: 25815 - DNA, 50 bp, Ruminococcus torques
  source 1..50: mol_type = genomic DNA
gtttctagatgagaacaaaaaggtataccgtttgataaaagtatactgat

SEQ ID NO: 25816 - protein, 518 aa, Escherichia coli
MPKAISYIRFSTKIQSVGDSTKRQSKYINDWLKRNPDYYLDESLRFQDLGISGFSGANAKSGAFAEFLAAVDSGYIEAGSVLLVESLDRVSRQDIDTAGEQLRKILRAGVEVVTLVDNEWYTKESLKDSLSMIKAMLVMERAHEESAMKSTRLRSVWAAKRERAAKGEIMSKRCAAWLKVSEDRSHFEFIPENVKAVQRVFQLRLEGLSHVKIAKQMNDEGFSTLNQFKSVTGGWSQSSVTELLSNRSVIGFKVPSKSMAVKGVSEIPNYYPSIITDEQFYAVQQLKQGSGRRPSSEKPLLTNLFKGVLRCSECGFIMVVAGVTAKRSGIYKCSMKSEGRCNSVGFSRLQTDKALVQGLLYNTNRLLLNRDNGSAIGALQSELEQLQKQRERLIKLAMLADDTESMAKDLKALNSQIKDAEKAVSEVHQREQSSQLETISHLDLTVKKDRIEAQIIIKRIVKEIRINTAQKKCDVLLHNGLKLLNFPLDRVVDGEIFLEVLPVLDCDEFDFDTYRMIE

SEQ ID NO: 25817 - DNA, 50 bp, Escherichia coli
  source 1..50: mol_type = genomic DNA
gagtgtatcattagaaaggttatttaaggaatataccctcttatgataca

SEQ ID NO: 25818 - DNA, 40 bp, Escherichia coli
  source 1..40: mol_type = genomic DNA
catgaaccgggcggctgtctaaaatcacccgattaacgcc

SEQ ID NO: 25819 - DNA, 40 bp, Escherichia coli
  source 1..40: mol_type = genomic DNA
catgaaccgggcggctgtcacaaatcacccgattaacgcc

SEQ ID NO: 25820 - DNA, 50 bp, Escherichia coli
  source 1..50: mol_type = genomic DNA
gagtgtatacagataaatgtatttacataaatatacatatatatgtaaaa

SEQ ID NO: 25821 - protein, 473 aa, Mesobacillus jeotgali
MTVGIYIRVSTQEQAQEGYSIAAQKERLLAFCAAQGWTEYRFYVDEGVSAKDTNRPQLNLLFDHIKTGQINMILVYRLDRFTRRVVDLHNMLEEMEQYKCAFKSATEPYDTSTAMGRMFIGLVALLAQWETENLSERIKMALDKKVSDGERVGNIPFGFNLSENETLVKNIKQAAVVLEMIKMVKDGKSASQIAAYLTRTNNDRVRWHAQGVLRVLRNPALYGATRWNGKVFEGTHVEEAIISKAEFNKLQQMLDDRSVHRLREVESTYLFQGVMICPDCDNPLSVNRYVRKRKDGSQYQGALYKCQNCYREGRQMISLGEQRILEALYSYMKNFTLDNIELPDTTDNEYQELINQLRQVEKKREKYQRAWAADLMTDDEFNKLMSETRKIYEELKGLISSYDVPSPVDPEAIKDIVYTFNQSFFYLTQEEKRLFVSQFIRKIEFKLISQSPKRPDKAKKGKDQVIITNVEFY

SEQ ID NO: 25822 - DNA, 50 bp, Mesobacillus jeotgali
  source 1..50: mol_type = genomic DNA
attagtatctacgtaacgttaccagttgataacgttatgtatatacaact

SEQ ID NO: 25823 - DNA, 40 bp, Mesobacillus jeotgali
  source 1..40: mol_type = genomic DNA
tgtcgttttaccgctccctgttggaccggtaaaaatgatc

SEQ ID NO: 25824 - DNA, 40 bp, Mesobacillus jeotgali
  source 1..40: mol_type = genomic DNA
tgtcgttttaccgctcccttgtggaccggtaaaaatgatc

SEQ ID NO: 25825 - DNA, 50 bp, Mesobacillus jeotgali
  source 1..50: mol_type = genomic DNA
attagtttcctcttaactgtaccatgttattacgttttctttatatatgc

SEQ ID NO: 25826 - protein, 536 aa, Akkermansia muciniphila; identical to SEQ ID NO: 2966

SEQ ID NO: 25827 - DNA, 50 bp, Akkermansia muciniphila
  source 1..50: mol_type = genomic DNA
ttacttctttatcgcacatcagtaaatgctcatgtacggtaaagtatcac

SEQ ID NO: 25828 - DNA, 40 bp, Akkermansia muciniphila
  source 1..40: mol_type = genomic DNA
aaaccatcatcatggcgacaatgcgcaaggcatctattcc

SEQ ID NO: 25829 - DNA, 40 bp, Akkermansia muciniphila
  source 1..40: mol_type = genomic DNA
aaaccatcatcatggcgactatgcgcaaggcatctattcc

SEQ ID NO: 25830 - DNA, 50 bp, Akkermansia muciniphila
  source 1..50: mol_type = genomic DNA
ttacctctttgtcctaattcattatatgtccatgtatgtttaactttcac

SEQ ID NO: 25831 - protein, 665 aa, Vibrio parahaemolyticus
MIKNDEGFMRTPKIHVYARVSTLGQVEGGLSLGLQTDHDMINEYCQRYGVELGKVYSDHGRSAFHQKNLAGKLGDFLTDMADKNNLDVQAGDYLLVRALDRISRANLDDAFWLYLQIMRSGVSILTTMDNREYKPNDSVSQILATLSFDLAGEESRKKQAITLAAMRKRIKQYQTGERAPCGNPYNVSTGLPFYAYAKDNICYIDEQKFQLAKDICQMALDGKGNVTCRNYLRKNGVELTVDSVASIFKSECLYGDRQITLLDLDATNRHPEKKKIYSTFILKDYFPAACTKDEFHRIRAIKDSYKIHDNRRVSYSILGGISRLYCKDTVAIGSRENGGIYKCASPECACGFYARQQLLDHLVLSCLCEHQIVAVEPDKKKIESIQQQIGAYQHQLSTLKKIMFDNPLAFDLTDQDRLSELSTKIQELNDQLTIEQENHAHSSSFISLDDVKNWREKKEAYINGSDEDKLEAREVVQRLVKEIRIVEDTVTIKTIDNKVHWYYIPTPSNRRKKAYVKLLVSDQALDMRSINEALDKVCFTEEDIKNGKHHYPLEAYAPDLVTIAIKSPPKEKNEFELLLETVTEPFVFKRRVLLSMGLSANQYQRHASVEKAIESGFHAVSVDYTSKNYKYPTDIIVSPREITTDDIQRLLSIRKISKVAYLSGS

SEQ ID NO: 25832 - DNA, 50 bp, Vibrio parahaemolyticus
  source 1..50: mol_type = genomic DNA
atgatgatttaagcttgataagtattgcctaattaaagtctaatcatgct

SEQ ID NO: 25833 - DNA, 40 bp, Vibrio parahaemolyticus; identical to SEQ ID NO: 21933
  source 1..40: mol_type = genomic DNA

SEQ ID NO: 25834 - DNA, 40 bp, Vibrio parahaemolyticus
  source 1..40: mol_type = genomic DNA
tttagcagcgcgctcaacgggaacggcgcttccttcttcg

SEQ ID NO: 25835 - DNA, 50 bp, Vibrio parahaemolyticus
  source 1..50: mol_type = genomic DNA
attattgttgaaaattgataagtagggcctaattaaactaaagagcatct

SEQ ID NO: 25836 - protein, 477 aa, Bacillus thuringiensis
MRCAIYARVSTEEQAEEGYSISAQKKKLTAYCEAQDWDVVGYYVDEGISAKNTNRPELIRLIDHIKKGLIDCVLVYRLDRLTRSVLDLYTLLDVFEKYDCKFKSATEVYDTTTAIGRLFITIIAALAQWERENIGERVRVGQQEKIRQGKYTSGRKPYGYNADHKEGVLTIIEEEAKVVRSIFNDYLKGHSAQRICKKLNNIGTSGRDYWNEKAVIYILENPLYVGTLRWRKETEHYFEIPNSVPAIIEKDLFNSVQKLRAARRESHPRSAYGSYIFSGIIKCPRCGRSLVGNYVTSKKKDGTVTKYKQYFCRGRKLNVCNMSSMSERKLEKTIIPYILSLHIHATDEDVSVGQNNTEDEIIQIKNELKIIEKRRKKWQYAWANEHLKDEEFTELMKEESDRERVLTEELYKLKPAENKKLKNDELIEILNDMKLNWNNLNDEEKKILMQIILKRIIVERSNEWQAYELKIVEMEFN

SEQ ID NO: 25837 - DNA, 50 bp, Bacillus thuringiensis
  source 1..50: mol_type = genomic DNA
tttatgtattaagggaggttttgcccgaaaaacctctcataacacataaa

SEQ ID NO: 25838 - DNA, 40 bp, Bacillus thuringiensis
  source 1..40: mol_type = genomic DNA
tttcgttccttcttttctgcctaagaaactagagccatgc

SEQ ID NO: 25839 - DNA, 40 bp, Bacillus thuringiensis
  source 1..40: mol_type = genomic DNA
tttcgttccttcttttctgaataagaaactagagccatgc

SEQ ID NO: 25840 - DNA, 50 bp, Bacillus thuringiensis
  source 1..50: mol_type = genomic DNA
tttttgaagatctaaaggtcttggaagaaaaaactccatgtaaacatata

SEQ ID NO: 25841 - protein, 571 aa, Pseudoclostridium thermosuccinogenes
MHEVEVIKANRKISDRTAGKVADILRVAPYARVSTDSEEQLNSYKSQVMYYTDLVKKRKDWVLVDIYADEAITGTQVTKRENFQRMINDCMDGKIDMIITKSISRFARNTLDTLKYVRMLKERNIAVFFEDENINTLTMDGELLLVILSSVAQQEVENISANVKKGLKMKMKRGELVGFQSCLGYDYNPNDKSISINEAEADVVRYIFNRYIDGAGAYVIAKELTSIGYKTKNGNTEWHDTAVLGIIKNEKYKGDVLQGKTFTVDPISKRRLDNYGEEDQFYIKNHHEPIISEEIFEKAQAILERRGAKRRGVEKGKREKYSRQYAFSSKLECAFCGSNLSRRNWHSGSDHEKVIWQCVTATKKGKKYCPPSKAIEEKILESAFVESYKLLCQNNSDVLDELIERMESVLSKNDFQKQLVRVENEIHAIEQKRNRLVDMRLEETIDKATYEKKYSELESILEGLLTEREQLEQSSKEEINLEKRIAHFRKVLENNEVLKNFDRCVFESIVEKVIIGEIDEQGNANPYKLTFVYKTGYSNEVQSKMHKQIKKKKNDKGNLHSYSSPNTCGVR

SEQ ID NO: 25842 - DNA, 50 bp, Pseudoclostridium thermosuccinogenes
  source 1..50: mol_type = genomic DNA
tgcattcctattcctcacccaacacatgtggagtgcgtaataggaatgca

SEQ ID NO: 25843 - DNA, 40 bp, Pseudoclostridium thermosuccinogenes
  source 1..40: mol_type = genomic DNA
tatgttcccgttcacgccgcatgtggagtgcgtagtattg

SEQ ID NO: 25844 - DNA, 40 bp, Pseudoclostridium thermosuccinogenes
  source 1..40: mol_type = genomic DNA
tatgttcccgttcacgccggctgtggagtgcgtagtattg

SEQ ID NO: 25845 - DNA, 50 bp, Pseudoclostridium thermosuccinogenes
  source 1..50: mol_type = genomic DNA
ataaagcctgagcttcaccccacagctgtggtgtgcagcccaggagtgcc

SEQ ID NO: 25846 - protein, 546 aa, Shewanella benthica
MTDFIGRDAIPYARFSSNQQQHGMSLERQSNAFDSFVKKSKANPRYDLAMDDKGKSAYKGQHILENGALGNFIYKLEGGDLKLPTSPKPLLVVEEVDRLTRLEPDDGQELLLRLMRYVDICVVDPSGSSYQLFARKGQGSDIGSIILLTIKIYSAHDHSKKLSKRVGIAHAKSLSEAVVSGKALRYGTYPFWLRKNGDKYELVLKWVEILNEVYVMLSDGIAPADIANTLNEKGYKVPRTQRDHKKEVLEHETNRWNTNRVRVLYSSRTPIGKMKPVNHQTEIDLYPPAISEDLYFKAIAVVNRRKRGSGNKIGRVKSLFAGFTYCYACRKRMHTDTRLRNGISDVRMRCSSRASATLIDRDCDCGYISMDFEERLLILLIDKVALSDLLVAPVDNQVSILSSKISICEQEISEFNKLLKTSIAPALYQGLAVHQDKLKELEAKLVLITPINNNVITENYEEIAELAQASLDPKNETERARMNVLINSIVNRVELYKKVKQSSIIIVNFKSGIRRMYTQSRNVPDWNIIELEPALEQQHQIEHSVT

SEQ ID NO: 25847 - DNA, 50 bp, Shewanella benthica
  source 1..50: mol_type = genomic DNA
ttgaagggataatgtaatatgtttgtacacatattccattgaccccacaa

SEQ ID NO: 25848 - DNA, 40 bp, Shewanella benthica
  source 1..40: mol_type = genomic DNA
ttcaggagttcatatgtttgtcgtaatctttggccgtcca

SEQ ID NO: 25849 - DNA, 40 bp, Shewanella benthica
  source 1..40: mol_type = genomic DNA
ttcaggagttcatatgtttaccgtaatctttggccgtcca

SEQ ID NO: 25850 - DNA, 50 bp, Shewanella benthica
  source 1..50: mol_type = genomic DNA
ttgaaggctattatgaacatgtttacacacataaactggaaaacctagaa

SEQ ID NO: 25851 - protein, 481 aa, Streptococcus pyogenes
MITTNKVAIYVRVSTTNQAEEGYSIEEQKDKLSSYCNIKDWSVYKIYTDGGFSGSNTKRPALEQLIKDAKKKLFDTVLVYKLDRLSRSQKDTLYLIEDVFLENKIDFVSLLENFDTSTPFGKAVVGILSVFAQLEREQIKERMQLGKLGRAKSGKSMMWARTSYGYDYHRETGTMTINPVQSLAIKFIFEQYLSGRSITKLRDDLNDKYPKDIDWNYRAVRMILANPVYCGYNQYKGQVYPGNHEPIISEEDFNKTQEELKIRQNTAAEKFNPRPFQAKYMLSGIAQCGYCGAPLTITLGTIRKDGSRNIRYQCKNRFPRTTRGVTTYNDNKKCDSRFYEKADVEENVLNQISKLQEDTSYLDELFSDSEDNGIDRDSYQKQIEELTAKLSRLNDLYIDDRITLEELQRRSAEFTLMRATLEAELENDQALKQQERKDDMREILNRGDVLSMDYEGQKVVVRALINKVQVTSEEIVIKWKI

SEQ ID NO: 25852 - DNA, 50 bp, Streptococcus pyogenes
  source 1..50: mol_type = genomic DNA
ctaagaattttactatcctacatctcaatcaatgtatctaaaactctttg

SEQ ID NO: 25853 - DNA, 40 bp, Streptococcus pyogenes
  source 1..40: mol_type = genomic DNA
ctctagaacgagttttatgtcagatagtttaaacgcctct

SEQ ID NO: 25854 - DNA, 40 bp, Streptococcus pyogenes
  source 1..40: mol_type = genomic DNA
ctctagaacgagttttatgtgagatagtttaaacgcctct

SEQ ID NO: 25855 - DNA, 50 bp, Streptococcus pyogenes
  source 1..50: mol_type = genomic DNA
ccaagaatgacagctgcctacatctgaaacatggtaagaacgactctctg

SEQ ID NO: 25856 - protein, 544 aa, Nitrosospira multiformis
MRKAYSYIRMSTDKQLSGDSLRRQREASEKYAKAHGLELIETLDGKDLRDIGVSGFKGANSRRGVLSVFLEHLNDGKIDANSILLIESFDRLSRADVLDAFSLFTNILNKGIEIITLSDNQRYTRDSVRVNPGQLFLTIGIMTRANEESVTKSKRGLSVWNNKRDNAQKKPITSRCPAWLTYSSESEKFEVIEERARVVRLIFELCAKTSGTWSISRYLNRHNIPVFGDAQFWQKSYVNKILSNRAVLGEFQPNSRESGQRIPVGKVIENYYPAIISATEFHLAWAARDRRNKTGSGRKGINFSNLFSGLVYCGNCGSKMSVRNRGVPPKGGKWLVCQNHLAGAGCEMREWKLPLVEDAIFKHLYEVDFSELLGNKSAGFDIEKELFALQVEQKELESKMDQAIEMSAAQELNEQSRFRYVKLINQLESDINEKKKCISSKEKELEVFKSQQSLLHTKELKETLLLLEKNKDDYYFRSSVNQLLTRTIARIDLITDHGGPLPWEIEPDDKIVGNFRALYPKLSSLSIDELVLQRVFLDYITLIC

SEQ ID NO: 25857 - DNA, 50 bp, Nitrosospira multiformis
  source 1..50: mol_type = genomic DNA
tgtcatataataggacatagtgtcaggacattgtgtcctattatctatta

SEQ ID NO: 25858 - DNA, 40 bp, Nitrosospira multiformis
  source 1..40: mol_type = genomic DNA
accgggagggccgaccatcaggagactatgactgcctgcc

SEQ ID NO: 25859 - DNA, 40 bp, Nitrosospira multiformis; identical to SEQ ID NO: 25858
  source 1..40: mol_type = genomic DNA

SEQ ID NO: 25860 - DNA, 50 bp, Nitrosospira multiformis
  source 1..50: mol_type = genomic DNA
agccatctactttcagagagtgccagcacattgtgtggaactatctgtaa

SEQ ID NO: 25861 - protein, 466 aa, Micrococcus luteus
MKAVIYARVSKDRRQLERSVDEQVAECREFCTAQGWEVASVHVDNDRSASRYSTKDRPAWDVLMGELSRYDVLVTWEASRATRNLEVYAELRRRCRDEGVLWAYSGRVYDLSRSDDAFMTGLEMLTAERSSDDTAKRIQRTVRSQAKAGKPHGRIPFGYAREYDPTTGALVRQVPHETEAPLIREMARRVLDGESLYSISKDFSQRDVPRMRLNPWDTVRIKRVLTNPTIAGKRVYRGEIIGDADWEGIITPEEFEALKGVFSAPRYQALSHHGSEPRHLLSGLARCGVCGSKMKRVPASGRNAARYECSAHHTAIRQTWADDLVNAVMVARLRQPDALEVANRPAGEGVVDLARELRTLEQRLEGIYAEAAAGGLSPRGLATVEARIMADIDEKRGQIARAATPAVPTIADPAALADGWAEADMLLKRSIVAALVNIEIDPAPKPGSKVFDPERIRITWKGGDDE

SEQ ID NO: 25862 - DNA, 50 bp, Micrococcus luteus
  source 1..50: mol_type = genomic DNA
acacctcttagtgaaattgactggggccgaggttgtcaagtaaggtgtga

SEQ ID NO: 25863 - DNA, 40 bp, Micrococcus luteus
  source 1..40: mol_type = genomic DNA
acctgtctgccgtgtccggggccaacgtggccatgatcct

SEQ ID NO: 25864 - DNA, 40 bp, Micrococcus luteus
  source 1..40: mol_type = genomic DNA
acctgtctgccgtgtccggatccaacgtggccatgatcct

SEQ ID NO: 25865 - DNA, 50 bp, Micrococcus luteus
  source 1..50: mol_type = genomic DNA
acacctctaggtataactgcctggatcagaagtgggcttccaatgtgtgg

SEQ ID NO: 25866 - protein, 466 aa, Micrococcus luteus
MKAVIYARVSKDRRQLERSVDEQVAECREFCTAQGWEVASVHVDNDRSASRYSMKDRPAWDVLMGELSRYDVLVTWEASRATRNLEVYAELRRRCRDEGVLWAYSGRVYDLSRSDDAFMTGLEMLTAERSSDDTAKRIQRTVRSQAKAGKPHGRIPFGYAREYDPTTGALVRQVPHETEAPLIREMTRRVLDGESLYSISKDLSQRNVPRMRLNPWDTVRIKRVLTNPTIAGKRVYRGEVIGDADWEGIITPEEFEALKGVFSAPRYQALSHHGSEPRHLLSGVARCGVCGSKMKRVPASGRNAARYECSTHHTAIRQTWADDLVNAVMVARLRQPDALEVSNRPAGEGVVDLARELRTLEQRLEGIYAEAAAGELSARGLTTVEARILADMDEKRAQIARAATPTVPTIADPGALADGWAEADMLLKRSIVAALVNVAVHPTRKPGSKVFDPERIRITWKGSDDD

SEQ ID NO: 25867 - DNA, 50 bp, Micrococcus luteus; identical to SEQ ID NO: 25862
  source 1..50: mol_type = genomic DNA

SEQ ID NO: 25868 - DNA, 40 bp, Micrococcus luteus; identical to SEQ ID NO: 25863
  source 1..40: mol_type = genomic DNA

SEQ ID NO: 25869 - DNA, 40 bp, Micrococcus luteus; identical to SEQ ID NO: 25864
  source 1..40: mol_type = genomic DNA

SEQ ID NO: 25870 - DNA, 50 bp, Micrococcus luteus; identical to SEQ ID NO: 25865
  source 1..50: mol_type = genomic DNA

SEQ ID NO: 25871 - protein, 499 aa, Enterobacter hormaechei
MQKQNGLAFSYIRFSSKKQEQGDSVRRQTELAEKYAQANNLILSEKNFQDLGISAFKEGNRASLADMLQAIEQGSISPGSTIIIESLDRLSRRGIDVTQQIIKQILQHQVYIASLVDGLLLNRESVNDLVSVIRIALAADLAHKESEKKSQRLRETKGQQRQRALNGEVINKSLPFWLERKDNAYVFSDRLDAVKRIIELKKKGLGNNKIAKTLNDEEFAPLRSAGWNHTTVAKTIKSVALYGAYQTSETTKDRKVILLDIVEDYYPAVISKEEFMLLQSDQKQNKPGYKSEKNAFTGLLKHECGGALVRKFHTVSGKVYEYHVCANARDGKCSVTQNFKNIETAMFKILRELKMEKKTSLDATLLQERSDVQEKIQDLNNMLLSMKKVPASVLQTIGSLEDKLQALDQAITEQNNRVMNEQSVDLNLLQEVQDPVELNMMLKRVIREITVFNLKKSWRIKVSYINGHSQSFRWDSKNISFKSDTEKLLDFMNSEREEE

SEQ ID NO: 25872 - DNA, 50 bp, Enterobacter hormaechei
  source 1..50: mol_type = genomic DNA
attttgtcgctatgaaactgcatagtgatattgttgcaaagaagcaaaat

SEQ ID NO: 25873 - DNA, 40 bp, Enterobacter hormaechei; identical to SEQ ID NO: 4963
  source 1..40: mol_type = genomic DNA

SEQ ID NO: 25874 - DNA, 40 bp, Enterobacter hormaechei
  source 1..40: mol_type = genomic DNA
cttactgccaaactgcatattgacgttgctggtaactaac

SEQ ID NO: 25875 - DNA, 50 bp, Enterobacter hormaechei
  source 1..50: mol_type = genomic DNA
attttgtgtgtctaaaattctattttgttattgttgatatcaataaaaat

SEQ ID NO: 25876 - protein, 499 aa, Enterobacter hormaechei
MQKQNGLAFSYIRFSSKKQEQGDSVRRQTELAEKYAQANNLILSEKNFQDLGISAFKEGNRASLADMLQAIEQGSISPGSTIIIESLDRLSRRGIDVTQQIIKQILQHQVYIASLVDGLLLNRESVNDLVSVIRIALAADLAHKESEKKSQRLRETKGQQRQRALNGEVINKSLPFWLERKDNAYVFSDRLDAVKRIIELKKKGLGNNKIAKTLNDEEFAPLRSAGWNHTTVAKTIKSVALYGAYQTTETTKDRKVILLDIVEDYYPAVISKEEFMLLQSDQKQNKPGYKSEKNAFTGLLKHECGGALVRKFHTVSGKVYEYHVCANARDGKCSVTQNFKNIETAMFKILRELKMEKKTSLDATLLQERSDVQEKIQDLNNMLLSMKKVPASVLQTIGSLEDKLQALDQAITEQNNRVMNEQSVDLNLLQEVQDPVELNMMLKRVIREITVFNLKKSWRIKVSYINGHSQSFRWDSKNISFKSDTEKLLDFMNSEREEE

SEQ ID NO: 25877 - DNA, 50 bp, Enterobacter hormaechei; identical to SEQ ID NO: 25872
  source 1..50: mol_type = genomic DNA

SEQ ID NO: 25878 - DNA, 40 bp, Enterobacter hormaechei; identical to SEQ ID NO: 4963
  source 1..40: mol_type = genomic DNA

SEQ ID NO: 25879 - DNA, 40 bp, Enterobacter hormaechei; identical to SEQ ID NO: 25874
  source 1..40: mol_type = genomic DNA

SEQ ID NO: 25880 - DNA, 50 bp, Enterobacter hormaechei; identical to SEQ ID NO: 25875
  source 1..50: mol_type = genomic DNA

SEQ ID NO: 25881 - protein, 499 aa, Enterobacter hormaechei
MQKQNGLAFSYIRFSSKKQEQGDSVRRQTELAEKYAQANNLILSEKNFQDLGISAFKEGNRASLADMLQAIEQGSISPGSTIIIESLDRLSRRGIDVTQQIIKQILQHQVYIASLVDGLLLNRESVNDLVSVIRIALAADLAHKESEKKSQRLRETKGQQRQRALNGEVINKSLPFWLERKDNAYVFSDRLDAVKRIIELKKKGLGNNKIAKTLNDEEFAPLRSAGWNHTTVAKTIKSVALYGAYQTSETTKDRKVILLDIVEDYYPAVISKEEFMLLQSDQKQNKPGYKSEKNAFTGLLKHECGGALVRKFHTVSGKVYEYHVCANARDGKCSVTQNFKNIETAMFKILRELKMEKKTSLDATLLQERSDVQEKIQDLNNMLLSMKKVPASVLQTIGSLEDKLQALDQAITEQNNRVMNEQSVDLNLLQEVQDPVELNMMLKRVIREITVFNLKKSWRIKVSYINGHSQSFRWNGKEISFKSDTEKLLDFMNSEREEE

SEQ ID NO: 25882 - DNA, 50 bp, Enterobacter hormaechei; identical to SEQ ID NO: 25872
  source 1..50: mol_type = genomic DNA

SEQ ID NO: 25883 - DNA, 40 bp, Enterobacter hormaechei; identical to SEQ ID NO: 4963
  source 1..40: mol_type = genomic DNA

SEQ ID NO: 25884 - DNA, 40 bp, Enterobacter hormaechei; identical to SEQ ID NO: 25874
  source 1..40: mol_type = genomic DNA

SEQ ID NO: 25885 - DNA, 50 bp, Enterobacter hormaechei; identical to SEQ ID NO: 25875
  source 1..50: mol_type = genomic DNA

SEQ ID NO: 25886 - protein, 499 aa, Enterobacter hormaechei; identical to SEQ ID NO: 25876

SEQ ID NO: 25887 - DNA, 50 bp, Enterobacter hormaechei
  source 1..50: mol_type = genomic DNA
attttgtcgctatgaaacttcatagtgatattgttgcaaagaagcaaaat

SEQ ID NO: 25888 - DNA, 40 bp, Enterobacter hormaechei; identical to SEQ ID NO: 4963
  source 1..40: mol_type = genomic DNA

SEQ ID NO: 25889 - DNA, 40 bp, Enterobacter hormaechei; identical to SEQ ID NO: 25874
  source 1..40: mol_type = genomic DNA

SEQ ID NO: 25890 - DNA, 50 bp, Enterobacter hormaechei; identical to SEQ ID NO: 25875
  source 1..50: mol_type = genomic DNA

SEQ ID NO: 25891 - protein, 536 aa, Pseudomonas lurida
MSDTRALPRAFSDVFKIDEPIHVYSYIRFSTKAQSLGFSEQRQLEQINQFFEQYPAANQVERFEDLGVSAFKGKNLKTGKLADFLNRLKANEIKDNALLLVESFDRISRMGGYDALEIIISIIQSDCAIYTLFDNRLYSKRKKDSSADISLIQNILERASDESRSKSERSKDAKTRNLKRAENGEIINKRGPFWLTYTDGKFEFNEHAHAVKRATELIFDVGCLATATQINKEDHSKKYSVGIISKILRQKALYGSYVAYDLDDNGKRTIIKQEIKNYYPALISESEFNLIGAKLEERHTPALAGRHPRDFNNILRGISYCECGSTLRSHSSDGIKKQYHYLICTASETKNCPITPGRIGRYSYQLVSSIFLDYQHSIQMQEMISTGKLTEKAEKQLKDVQGELLGKEQALKNTMAVLDKASSAAYEKLISHINTISFEIDALNTKKTMLEREVLESKLTIKSNVLNHELIRLLITPSGRIKINNFLKSKKVKVICKQINKSYFNISIYLGDDLIDTIKTSKTGDVVESLNGPLLR

SEQ ID NO: 25892 - DNA, 50 bp, Pseudomonas lurida
  source 1..50: mol_type = genomic DNA
ttttgacgaatttacttagttttggtcatgagacacaatattcgtcaaat

SEQ ID NO: 25893 - DNA, 40 bp, Pseudomonas lurida
  source 1..40: mol_type = genomic DNA
gacctcgcaaaccgtctcggtggtgacacgcgagcagatg

SEQ ID NO: 25894 - DNA, 40 bp, Pseudomonas lurida
  source 1..40: mol_type = genomic DNA
gacctcgcaaaccgtctcgtaggtgacacgcgagcagatg

SEQ ID NO: 25895 - DNA, 50 bp, Pseudomonas lurida
  source 1..50: mol_type = genomic DNA
ttttgtagatatgacatggttttgtagatgggatacagttttggtcagat

SEQ ID NO: 25896 - protein, 503 aa, Bacillus siamensis
MVELQNRIQHVAIYLRKSRNKEGEETEETLKKHRKRLIDIANKNKWDYELFQEVGNSMNDNRPEYQKLLSKLSEGIFDAVLSVNLARVTRDDAETPKFMSLLRQEDILFITDSERIYDLEVQEDWQALKFTGFVNNWEYENIKAQLRKGKKDSAKMGRWSNGVPNYGLVYNRFDRSLEIDQQKADAVKLAFQLVIDGLGVDKVAKELNRLGYKTNRGRYFSGNAITRMIRAEIYKSVIISNRVKGRNLYEGKLRPKDQWIIAENAAPPIIDEETWNMANEALDQRKLLSPRGKQKKHPLSNLIKCGLCGRTHTVSRRRDRNDALAIQPCNKTDPLGKNKCNNRGIKHDTMISLVIEAIHEKHHEISSELIKFEEDTEANDIKQIKINKLQEQINKSKKALNILQIQLEEELINISSFKERRKIRQVELNKLEKELTELLEETKEDALRSKKSFANKLDFFLENWHTIDGADLNHELMSFINKIIWYAPRDSELPPQLKFEWRV

SEQ ID NO: 25897 - DNA, 50 bp, Bacillus siamensis
  source 1..50: mol_type = genomic DNA
ggtacgggtagcttagcgaacatgtcattgatgccatgtccactaaacta

SEQ ID NO: 25898 - DNA, 40 bp, Bacillus siamensis
  source 1..40: mol_type = genomic DNA
gcatcggctattcgacttgtcactggtgtcacgtcatggc

SEQ ID NO: 25899 - DNA, 40 bp, Bacillus siamensis
  source 1..40: mol_type = genomic DNA
gcatcggctattcgacttgaaactggtgtcacgtcatggc

SEQ ID NO: 25900 - DNA, 50 bp, Bacillus siamensis
  source 1..50: mol_type = genomic DNA
ggtacaggaaagccagagaacattaaacagatgcaacccaaataaaacta

SEQ ID NO: 25901 - protein, 559 aa, Pseudomonas aeruginosa
MRKVYCYVRFSSKKQQLGDSIERQQKLIERYLTEHNAEIAEQFSDLGISAFRGKNVKVGALSRFLERVKSGEISHGDTLIVESLDRISRQKELNTLEILISILNAGVIIYTLADGRIYNAKTEDQANLVFQINFIISRAYDESLNKQKRSISAWTRKHEEARKAKTVMTRKLPYWLKVVENGGETRIEVIEERAREVRKAFELAKFKLGAQAIASRLNKDGAQKRWTLIAVRHLLTSKSVYGSFEAFKTKAQSGTLEKNQAYEEIEGYFPAVIEKEEYYNVQSCLQKNKETYATRGRASKGFRNIFKGIIKCIDCDSYMHQNFLKRKGKEYMYLVCHKSLVNACPAGKKVIVPYRHILEPFLLFFKNYGIDELFSEPSDTQSLNQRLTAIREERSDKKGALQRMSDDIEKNNGEIPKTILALIGKIESQLSSLDEEENRTIAQIESLRVSKSVKEEITKSDIDELLETEEGRLKFNSLLSERKIELLVSREFEEEYSNLFILFKEKGFSENIKFNRKEAIFPFMGVYNFNRKTYSDGFGGEPKPNEQVDYEKFRIDWSL

SEQ ID NO: 25902 - DNA, 50 bp, Pseudomonas aeruginosa
  source 1..50: mol_type = genomic DNA
tttttgataaatcgcttgttaagcgcgcttaactgttgtattctcaaaaa

SEQ ID NO: 25903 - DNA, 40 bp, Pseudomonas aeruginosa; identical to SEQ ID NO: 21753
  source 1..40: mol_type = genomic DNA

SEQ ID NO: 25904 - DNA, 40 bp, Pseudomonas aeruginosa
  source 1..40: mol_type = genomic DNA
ggtcggcctgccggaaaccatggtgcgcgagagcaaggac

SEQ ID NO: 25905 - DNA, 50 bp, Pseudomonas aeruginosa
  source 1..50: mol_type = genomic DNA
tattagatataataatttttaagcatggtaaactatgtttctgtaaaaaa

SEQ ID NO: 25906 - protein, 525 aa, Aeromonas allosaccharophila
MTAFSYIRFSSKEQASGDSFARQMEASRDWCKQRGIELSEKNYADLGISAFREKTRASLADMLEAIELGSIREGDHIILENLDRLSRQGIDATQEIIKSILREGVKIVSLQDDLELDRSSLNDLVSVIRIALSADLAHKESLKKSERVSAAKASQREQAKQGKAINKRLPYWLEKDGDGYQFNDGVDAVKLMIQLRTDGLGFHKIAARLNASEHKPRWAVHWSDTTIRNILSSPALYGRYQFRNGDGVDDYYPALVSYAEFKAFQSTYTASAGGQEHHNHLFGLVRCGACGAAMSKKVSKRKVAGAMKYYKGWICTKTLSGACAQKTPMMDLDDLVIKAVKRLKVSDSKKASREANQLDREIDTKKARLNEITQELVSGSSSVNLLNVAASTIEKQLKELMAQRKESVRTSHSEIQTLYGLRDDAERFNIALRRVVDRIKVFHKGDSTWHVAIHQRNGHLISVAAFRKNQRSPWEYMFGNTAEIVAISANTELDSWEADEVSANPEDWETGITNPEYEHTEVCED

SEQ ID NO: 25907 - DNA, 50 bp, Aeromonas allosaccharophila
  source 1..50: mol_type = genomic DNA
atgtttcccactaaaatcagttaacggtggtatactgctattggtagaga

SEQ ID NO: 25908 - DNA, 40 bp, Aeromonas allosaccharophila
  source 1..40: mol_type = genomic DNA
tcggcgggggccagattgactgtgatgtgtttgctcggga

SEQ ID NO: 25909 - DNA, 40 bp, Aeromonas allosaccharophila
  source 1..40: mol_type = genomic DNA
tcggcgggggccagattgagagtgatgtgtttgctcggga

SEQ ID NO: 25910 - DNA, 50 bp, Aeromonas allosaccharophila
  source 1..50: mol_type = genomic DNA
agctgtatcaagaaaatcagttaagagttgtcctctgaaactggtagaga

SEQ ID NO: 25911 - protein, 543 aa, Bacillus atrophaeus
MSLIGKINALIYARVSTTDQANKGFSIDSQIERCKERAIKKFGYKESEIIVLVEPGGMGDDPNRPALNHALYLLERGLGKKFIVLHPDRLTRDNTLQGVVSRRIWGMGVDIEFIEFEVNPHDPESMLMYNIQGSIAQYNKAKIHANSKRGRLAKAKKGELPSFKRLYGYKFNTKTDLPEYHEDEKEILLEMKDMLINKKMSSNDIAKELSRRGVAAPNGKTWYQSTVSRMLQNEDYTGNYYYGKSKVVQLNGKKKQVPTPKEEWILIKIPAMWDHQTREQIIKQMKLNFKGRSRSSRDYLLKGKAKCGRCGGACGSGITSKTKSGVYKYYSCRNKNVKGYQNGKKICTCKGKNWRVDIVDDAFWKWFKKLLSNPKEFLEQFLVETSNEKKIEELENKKEKLDKQLEDIDSEISNYVILFGKGKINEDMFDKITQPLELNKEHIKNEIEILNSHLSANKQDNDKNQKLIEYINSFSEMITKDISMHEKRQFLDFFIEKVTLFDDDHMEIVWKGAGLNDSDQVDFLNSEQGGEFSNSHKRLNHIQ

SEQ ID NO: 25912 - DNA, 50 bp, Bacillus atrophaeus
  source 1..50: mol_type = genomic DNA
cgcataaaagattaaaccatattcaagaacaaggttttaatttttatgcc

SEQ ID NO: 25913 - DNA, 40 bp, Bacillus atrophaeus
  source 1..40: mol_type = genomic DNA
agcaatagacacgcttgtaaagcatatggaagacaaacag

SEQ ID NO: 25914 - DNA, 40 bp, Bacillus atrophaeus
  source 1..40: mol_type = genomic DNA
agcaatagacacgcttgtaatgcatatggaagacaaacag

SEQ ID NO: 25915 - DNA, 50 bp, Bacillus atrophaeus; identical to SEQ ID NO: 985
  source 1..50: mol_type = genomic DNA

SEQ ID NO: 25916 - protein, 559 aa, Bacillus subtilis
MLILKGDQKLSTDNIMHLIGKINALIYARVSTTDQANKGFSIESQIERCKERAISKFGYKESEIIALVEPGGMGDDPNRPALNHALYLLEKGLGKKFIVLHPDRLTRDNTLQGVVSRRIWGMGVDIEFIEFEVNPHDPESMLMYNIQGSIAQYNKAKIHANSKRGRLAKAKKGEFPSFKRLYGYKFNTVTDLPEYNEEEKEILLEMKDMLLNKKMSSNEIAKELSRRGVAAPNGKTWYQATVSRMLQNEDYTGDFYYGKSKVVQINGKKKQVPTNKDEWILIKIPPMWDKATREQIIERLKSNFKGRSRATKDYLLKNKAKCGRCGGACGSGITSKTKSGVYKYYSCRAKTAKGYQNGKKVVSCEGKNWRVDIVDEVFWNWFIKLMKNPEKFLESFLEEASDQKKIDELKAKANRLEKQLGEIDEEIANYVILFGKGKIKESMFDQLSQPLEQNKEHIENEIKIINSQLAANKQTEDKKQKMIEYIGSFSKMIKNEITIEEKRQFLDFFIEKVTLFDDDHMEVVWKSSSLNNENSHVDFLNGEQGGEFINSHKRLNHIQ

SEQ ID NO: 25917 - DNA, 50 bp, Bacillus subtilis
  source 1..50: mol_type = genomic DNA
cgcataaaagactaaaccatattcaagaacaaggttttaacttttatgcc

SEQ ID NO: 25918 - DNA, 40 bp, Bacillus subtilis
  source 1..40: mol_type = genomic DNA
agcgatcgacacacttgtcaagcatatggaagacaaacag

SEQ ID NO: 25919 - DNA, 40 bp, Bacillus subtilis
  source 1..40: mol_type = genomic DNA
agcgatcgacacacttgtcatgcatatggaagacaaacag

SEQ ID NO: 25920 - DNA, 50 bp, Bacillus subtilis; identical to SEQ ID NO: 985
  source 1..50: mol_type = genomic DNA

SEQ ID NO: 25921 - protein, 559 aa, Bacillus subtilis
MLILKGDQKLSTDNIMHLIGKINALIYARVSTTDQANKGFSIESQIERCKERAISKFGYKESEIIALVEPGGMGDDPNRPALNHALYLLEKGLGKKFIVLHPDRLTRDNTLQGVVSRRIWGMGVDIEFIEFEVNPHDPESMLMYNIQGSIAQYNKAKIHANSKRGRLAKAKKGEFPSFKRLYGYKFNTVTDLPEYNEEEKEILLEMKDMLLNKKMSSNEIAKELSRRGVAAPNGKTWYQATVSRMLQNEDYTGDFYYGKSKVVQINGKKKQVPTNKDEWILIKIPPMWDKATREQIIERLKSNFKGRSRATKDYLLKNKAKCGRCGGACGSGITSKTKSGVYKYYSCRAKTAKGYQNGKKVVSCEGKNWRVDIVDEVFWNWFIKLMKNPEKFLESFLEEASDQKKIDELKAKASRLEKQLGEIDEEIANYVILFGKGKIKESMFDQLSQPLEQNKEHIENEIKIINSQLAANKQTEDKKQKMIEYIGSFSKMIKNEITIEEKRQFLDFFIEKVTLFDDDHMEVVWKSSSLNNENSHVDFLNGEQGGEFINSHKRLNHIQ

SEQ ID NO: 25922 - DNA, 50 bp, Bacillus subtilis; identical to SEQ ID NO: 25917
  source 1..50: mol_type = genomic DNA

SEQ ID NO: 25923 - DNA, 40 bp, Bacillus subtilis; identical to SEQ ID NO: 25918
  source 1..40: mol_type = genomic DNA

SEQ ID NO: 25924 - DNA, 40 bp, Bacillus subtilis; identical to SEQ ID NO: 25919
  source 1..40: mol_type = genomic DNA

SEQ ID NO: 25925 - DNA, 50 bp, Bacillus subtilis; identical to SEQ ID NO: 985
  source 1..50: mol_type = genomic DNA

SEQ ID NO: 25926 - protein, 559 aa, Bacillus safensis
MLILKKDERLSSEEIMNLIGKINGLIYVRVSTADQAEKGYSIESQIEMCKDRAIKKFGYKENELIVLVEPGGMGDDPNRPALNHALHLLEKGLGKKIFVLHPDRLTRDNTLQGIVSRKIWSMGVDIEFIEFEVDPTNPESMLMYNIQGSIAQYNKAKILANSKRGRTAKAKKGEFPSFKRLYGYTFNKETDKPEINEEEKAVLIQMKDMLLYEGMSSNEIAKHLSKIGVPAPEGETWHQASVSRMFNNLDYTGDFYYGKTKVVQVNGEKKQVPRPREEWILIKIPQIWSHETRDMILEALKKNTRNSGRKSNDYLLKNIVKCGRCGGSCGSGITSKTKSGIYKYYSCSNKRRKSYINGLKIINCEGKNWRVDIVDEVLWKWVVKLLRNPEFFVEEFTNKTGTQQKIEQITASIGDNEKRLSQVEQEITNYVLLFGKGKIDEAMFDNLTSSLNERKDQLRQDLILLSNTLESLKETSDKKGKIMKYIKSINKLLESKMETRDKRKVISLLIEKVILNEDDTMQIILKNDSSKKTKPLNGLEMTNKETTSNNPHKNQDLIQ

SEQ ID NO: 25927 - DNA, 50 bp, Bacillus safensis
  source 1..50: mol_type = genomic DNA
cacataaaaaccaagaccttattcaagaacatagtttaggtttttatgcg

SEQ ID NO: 25928 - DNA, 40 bp, Bacillus safensis
  source 1..40: mol_type = genomic DNA
ggcgattgatacccttgtaaaacatatggaggacaaacag

SEQ ID NO: 25929 - DNA, 40 bp, Bacillus safensis
  source 1..40: mol_type = genomic DNA
ggcgattgatacccttgtaatacatatggaggacaaacag

SEQ ID NO: 25930 - DNA, 50 bp, Bacillus safensis; identical to SEQ ID NO: 985
  source 1..50: mol_type = genomic DNA

SEQ ID NO: 25931 - protein, 539 aa, Salmonella enterica; identical to SEQ ID NO: 3641

SEQ ID NO: 25932 - DNA, 50 bp, Salmonella enterica
  source 1..50: mol_type = genomic DNA
ttacttctttatcacacataagcaaatgctcatgtgccataaagtaacac

SEQ ID NO: 25933 - DNA, 40 bp, Salmonella enterica; identical to SEQ ID NO: 22633
  source 1..40: mol_type = genomic DNA

SEQ ID NO: 25934 - DNA, 40 bp, Salmonella enterica
  source 1..40: mol_type = genomic DNA
aggcgacaagcggtggaattatacgcagcggttcaagcaa

SEQ ID NO: 25935 - DNA, 50 bp, Salmonella enterica
  source 1..50: mol_type = genomic DNA
ttactactttagtacagaaaatcatatgctcttgtggagttttataaaac

SEQ ID NO: 25936 - protein, 539 aa, Escherichia coli; identical to SEQ ID NO: 3641

SEQ ID NO: 25937 - DNA, 50 bp, Escherichia coli; identical to SEQ ID NO: 25932
  source 1..50: mol_type = genomic DNA

SEQ ID NO: 25938 - DNA, 40 bp, Escherichia coli
  source 1..40: mol_type = genomic DNA
ccgcaacaacccgtggcataacgtcaacggcagcaacttc

SEQ ID NO: 25939 - DNA, 40 bp, Escherichia coli
  source 1..40: mol_type = genomic DNA
ccgcaacaacccgtggcattacgtcaacggcagcaacttc

SEQ ID NO: 25940 - DNA, 50 bp, Escherichia coli; identical to SEQ ID NO: 25935
  source 1..50: mol_type = genomic DNA

SEQ ID NO: 25941 - protein, 539 aa, Ruminococcus gnavus; identical to SEQ ID NO: 3641

SEQ ID NO: 25942 - DNA, 50 bp, Ruminococcus gnavus; identical to SEQ ID NO: 25932
  source 1..50: mol_type = genomic DNA

SEQ ID NO: 25943 - DNA, 40 bp, Ruminococcus gnavus
  source 1..40: mol_type = genomic DNA
aaatgataatcccggtgcaaaatcacagggtatcaagcac

SEQ ID NO: 25944 - DNA, 40 bp, Ruminococcus gnavus
  source 1..40: mol_type = genomic DNA
aaatgataatcccggtgcataatcacagggtatcaagcac

SEQ ID NO: 25945 - DNA, 50 bp, Ruminococcus gnavus; identical to SEQ ID NO: 25935
  source 1..50: mol_type = genomic DNA

SEQ ID NO: 25946 - protein, 544 aa, Streptomyces halstedii
MTAPAPIPATLQGSPSEEEGEPWLGYIRVSTWKEEKISPELQETAIRAWAARTGKRLLEPLIIDLDMTGRNFKRRIMGGIKRVEAGEARGIAVWKYSRFGRTRDGVPLNLKRLEDAGGQLVSATEEADARTATGRLQRGILFEFAAYESDVRGEQWKETHDYRRYKLHLPACGKRRFGYIWTPRRVPDPTSPTGFRLQEETYKADPVTGPVMADAYRAYVDGSAFYALVANLNDAGHRTLRGGVWTVQTLIRYMDSGFCAGLLRIHDPACHCPPEKRSNCSAPHLFIPGAQEELIDAELWQLYRERREQIKKTPPRARRALYPLTNLVRCGGCRGTAPVQSAQRLRNGQLTNVQGYSYACGKRGTTGTKGCPGVWAVRTLIEDQVRTWLRDEVAEEVDATPAIPVQRAPEADLRVAAALERARLEAEATKLASGLTNLRAQRALDPDEFGPGEYEAIRDKIRAQQTANRTAMERVATIESTPVRSDYALLMIGLLDAWEDMNEAERNGLLRQLVRRVVLVRTEGAATIAVHPAWEPDPWATPIK

SEQ ID NO: 25947 - DNA, 50 bp, Streptomyces halstedii
  source 1..50: mol_type = genomic DNA
gagaatgttttgtacacagtgacatcgaatagtgtgtgtaaaacatcctg

SEQ ID NO: 25948 - DNA, 40 bp, Streptomyces halstedii
  source 1..40: mol_type = genomic DNA
cgggatgctgactgttacttccgcaaatgttaacgggctc

SEQ ID NO: 25949 - DNA, 40 bp, Streptomyces halstedii
  source 1..40: mol_type = genomic DNA
cgggatgctgactgttactagcgcaaatgttaacgggctc

SEQ ID NO: 25950 - DNA, 50 bp, Streptomyces halstedii
  source 1..50: mol_type = genomic DNA
gagaatctaggttctacagttacaaggaacagaattctgccaacaacctg

SEQ ID NO: 25951 - protein, 552 aa, Anaerobutyricum hallii
MMKKGKIKVYIYTRVSTAIQIDGYSLDAQKSRMKAYAEFNGYEIVGEYEDAGKSGKSIEGRVEFNRMMEDIKSGKDGVSYVLVFKLSRFGRNAADVLSTLQVMQDFGVNLICVEDGIDSSKDAGKLMISVLSAVAEIERENIRVQTMEGRIQKAREGKWNGGFAPYGYQLEKGQLIINEEEAAAIRVIFDQYVHTDTGANGLAKYLATHGIHKIQRQNGKNPLFDAALIRRILKNPVYCGKIAYGRRRTEKVHGTRNDYRLVEQDDYLLVDGLHEGIVSEELWHEAQVKLLAQAEKYEHVNRGKDTKIHLLSGIVKCPVCGVGMYGNKSIKHKADGSKYKDFYYYGCKHRTMTHGHKCDFKKQINEELLDSAVAEVIVKLVSNPKFAAMMQEKISMKVDTSAIEQEIAAHEKQLRQSYSVKARLMDEIDSLDPDDKHYMKRKADLDDRLYKMYDKIEDTENQLVAARAKKMAIEAEKLTGDNIYKVLIFFDKLYSIMDDQEKRQLMESLLSEVQIYEERQPNGQWLKSIKFKLPIIAEDMSLSLDNDAHIET

SEQ ID NO: 25952 - DNA, 50 bp, Anaerobutyricum hallii
  source 1..50: mol_type = genomic DNA
agtttggacaacgatgcacatattgagacggtatgtttattgtccaaact

SEQ ID NO: 25953 - DNA, 40 bp, Anaerobutyricum hallii
  source 1..40: mol_type = genomic DNA
cccgaacacggtgtcggtagagacggttgtcttgctttcc

SEQ ID NO: 25954 - DNA, 40 bp, Anaerobutyricum hallii
  source 1..40: mol_type = genomic DNA
cccgaacacggtgtcggtattgacggttgtcttgctttcc

SEQ ID NO: 25955 - DNA, 50 bp, Anaerobutyricum hallii
  source 1..50: mol_type = genomic DNA
agttttgagagttcttcacatattttcactacttgtcttttgtccaaaat

SEQ ID NO: 25956 - protein, 551 aa, Coprococcus comes
MEREKIKVYIYTRVSTAMQIDGYSLDAQKSRMKAFAEFNDYEIVGEYEDAGKSGKSIEGRLEFNRMMEDIKTGKDGVSFVLVFKLSRFGRNAADVLSTLQVMQDFGVNLICVEDGIDSSKDAGKLMISVLSAVAEIERENIRVQTMEGRIQKAREGKWNGGFAPYGYSLEKGQLFINEEEAEAICVIFDQYVHTDIGANGLAKYLENHGIRKIPRQNGKNPLFDAALIRRILKNPVYCGKIAYGRRRTEKVHGTRNDYKLVEQDDYLLVDGLHEGIVSEELWHEAQVKLLAQAKKYEKVNHGKDNKIHLLSGIVKCPVCGAGMYGNKSIKHKSDGTKYKDFFYYGCKHRTMTRGHKCDYKKQVNEELLDDAVAEVIVKLVSNPKFAAMMQEKINMKVDTSVIEQEIAAHEKQLRQSYSTKTRLMEEIDSLDPDDKHYIKRKADLNDRLYKMYDKIEDTENLLIAARAKKMSIEAEKLTGDNIYKVLIYFDKLYAVMNEQEKRQVMESLISEIQIYPERQENGQWLKSIKFKLPIIEEDMNISLDNDTHIET

SEQ ID NO: 25957 - DNA, 50 bp, Coprococcus comes
  source 1..50: mol_type = genomic DNA
agtttggacaatgatacacatattgagacggtatgtttattgtccaaact

SEQ ID NO: 25958 - DNA, 40 bp, Coprococcus comes
  source 1..40: mol_type = genomic DNA
tccgatgagtgtgcatgtcgagacggttgtccttttgtcc

SEQ ID NO: 25959 - DNA, 40 bp, Coprococcus comes
  source 1..40: mol_type = genomic DNA
tccgatgagtgtgcatgtcttgacggttgtccttttgtcc

SEQ ID NO: 25960 - DNA, 50 bp, Coprococcus comes; identical to SEQ ID NO: 25955
  source 1..50: mol_type = genomic DNA

SEQ ID NO: 25961 - protein, 488 aa, Yersinia pseudotuberculosis
MPQQNNGIAYSYVRFSSKRQEQGDSVRRQTEMAEKYALEKGLTLSSKNFQDLGISAFKEGKRPSLVDMLDTIENGQITAGSTIIIEALDRLSRRGIDATLETVKDILRKDVQVVSLSDGLLLTKNSLNDLQSIIRIAVAADLAHKESERKSSRLRETKGQQRQAALAGKAINKILPFWLQRASERYEFSDKAHIAREIIRLKQEGKGSNMIAKTLNKQGVAGIRSSQWNHASITKMLKHPALYGAYQTGETTKERELIKLDLIENYYPALISKEDWLLIQSDQSKSTRGRRTTDNPYSGLLRCGCGGALVKRQTTVKNKLYVYHGCLNAKDGRCEQNISIKGLDLALKTILGRLEFKKRPTPDQSIHQERKQLEDRISNLNSKLLTLDDIPVSVIKTIGTLEERLKTVTDLILQNEREQRGIDAVQSETLSSITDGLELNLLLKRVLKSITVSASGNGWAVRVLHLSGHKQNFLMVDGKIKFLSDTLV

SEQ ID NO: 25962 - DNA, 50 bp, Yersinia pseudotuberculosis
  source 1..50: mol_type = genomic DNA
aattttcacatatgaaactacattgtgatattgttacttaatagcaaagg

SEQ ID NO: 25963 - DNA, 40 bp, Yersinia pseudotuberculosis; identical to SEQ ID NO: 5808
  source 1..40: mol_type = genomic DNA

SEQ ID NO: 25964 - DNA, 40 bp, Yersinia pseudotuberculosis; identical to SEQ ID NO: 20974
  source 1..40: mol_type = genomic DNA

SEQ ID NO: 25965 - DNA, 50 bp, Yersinia pseudotuberculosis
  source 1..50: mol_type = genomic DNA
aagtttcactatgaaaactaatttttgagaatgtaattttttggaaaatg

SEQ ID NO: 25966 - protein, 502 aa, Yersinia pseudotuberculosis
MPQQNNGIAYSYVRFSSKRQEQGDSVRRQTEMAEKYALEKGLTLSSKNFQDLGISAFKEGKRPSLVDMLDTIENGQITAGSTIIIEALDRLSRRGIDATLETVKDILRKDVQVVSLSDGLLLTKNSLNDLQSIIRIAVAADLAHKESERKSSRLRETKGQQRQAALAGKAINKILPFWLQRASERYEFSDKAHIAREIIRLKQEGKGSNMIAKTLNKQGVAGIRSSQWNHASITKMLKHPALYGAYQTGETTKERELIKLDLIENYYPALISKEDWLLIQSDQSKSTRGRRTTDNPYSGLLRCGCGGALVKRQTTVKNKLYVYHGCLNAKDGRCEQNISIKGLDLALKTILGRLEFKKRPTPDQSIHQERKQLEDRISNLNSKLLTLDDIPVSVIKTIGTLEERLKTVTDLILQNEREQRGIDAVQSETLSSITDGLELNLLLKRVLKSITVSASGNGWAVRVLHLSGHKQNFLMVDGKIKFLSDTIALQKLLASFKKTTEE

SEQ ID NO: 25967 - DNA, 50 bp, Yersinia pseudotuberculosis; identical to SEQ ID NO: 25962
  source 1..50: mol_type = genomic DNA

SEQ ID NO: 25968 - DNA, 40 bp, Yersinia pseudotuberculosis; identical to SEQ ID NO: 5808
  source 1..40: mol_type = genomic DNA

SEQ ID NO: 25969 - DNA, 40 bp, Yersinia pseudotuberculosis; identical to SEQ ID NO: 20974
  source 1..40: mol_type = genomic DNA

SEQ ID NO: 25970 - DNA, 50 bp, Yersinia pseudotuberculosis; identical to SEQ ID NO: 25965
  source 1..50: mol_type = genomic DNA

SEQ ID NO: 25971 - protein, 502 aa, Yersinia enterocolitica
MPQQNNGIAYSYVRFSSKRQEQGDSVRRQTEMAEKYALEKGLTLSSKNFQDLGISAFKEGKRPSLVDMLDTIENGQITAGSTIIIEALDRLSRRGIDATLETVKDILRKDVQVVSLSDGLLLTKNSLNDLQSIIRIAVAADLAHKESERKSSRLRETKGQQRQAALAGKAINKILPFWLQRASERYEFSDKAHIAREIIRLKQEGKGSNMIAKTLNKQGVAGIRSSQWNHASITKMLKHPALYGAYQTGETTKERELIKLDLIENYYPALISKEDWLLIQSDQSKSTRGRRTTDNPYSGLLRCGCGGALVKRQTTVKNKLYVYHGCLNAKDGRCEQNISIKGLDLALKTILGRLEFKKRPTPDQSIHQERKQLEDRISNLNNKLLTLDDIPVSVIKTIGTLEERLKTVTDLILQNEREQRGIDAVQSETLSSITDGLELNLLLKRVLKSITVSASGNGWAVKVLHLSGHKQNFLMVDGKIKFLSDTIALQKLLASFKKTTEE

SEQ ID NO: 25972 - DNA, 50 bp, Yersinia enterocolitica; identical to SEQ ID NO: 25962
  source 1..50: mol_type = genomic DNA

SEQ ID NO: 25973 - DNA, 40 bp, Yersinia enterocolitica; identical to SEQ ID NO: 5808
  source 1..40: mol_type = genomic DNA

SEQ ID NO: 25974 - DNA, 40 bp, Yersinia enterocolitica; identical to SEQ ID NO: 20974
  source 1..40: mol_type = genomic DNA

SEQ ID NO: 25975 - DNA, 50 bp, Yersinia enterocolitica; identical to SEQ ID NO: 25965
  source 1..50: mol_type = genomic DNA

SEQ ID NO: 25976 - protein, 502 aa, Yersinia massiliensis
MPQQNNGIAYSYVRFSSKRQEQGDSVRRQTEMAEKYALEKGLTLSSKNFQDLGISAFKEGKRPSLVDMLDTIENGQITAGSTIIIEALDRLSRRGIDATLETVKDILRKDVQVVSLSDGLLLTKNSLNDLQSIIRIAVAADLAHKESERKSSRLRETKGQQRQAALAGKAINKILPFWLQRASERYEFSDKAHIAREIIRLKQEGKGSNMIAKTLNKQGVAGIRSSQWNHASITKMLKHPALYGAYQTGETTKERELIKLDLIENYYPALISKEDWLLIQSDQSKSTRGRRTTDNPYSGLLRCGCGGALVKRQTTVKNKLYVYHGCLNAKDGRCEQNISIKGLDQTLKTILGRLEFKKRPTPDQSIHQERKQLEDRISNLNNKLLTLDDIPVSVIKTIGTLEERLKIVTDLILQNEREQRGIDAVQSETLSSITDGLELNLLLKRVLKSITVSASGNGWAVKVLHLSGHKQNFLMVDGKIKFLSDTIALQKLLASFKESAEE

SEQ ID NO: 25977 - DNA, 50 bp, Yersinia massiliensis; identical to SEQ ID NO: 25962
  source 1..50: mol_type = genomic DNA

SEQ ID NO: 25978 - DNA, 40 bp, Yersinia massiliensis; identical to SEQ ID NO: 5808
  source 1..40: mol_type = genomic DNA

SEQ ID NO: 25979 - DNA, 40 bp, Yersinia massiliensis; identical to SEQ ID NO: 20974
  source 1..40: mol_type = genomic DNA

SEQ ID NO: 25980 - DNA, 50 bp, Yersinia massiliensis; identical to SEQ ID NO: 25965
  source 1..50: mol_type = genomic DNA

SEQ ID NO: 25981 - protein, 502 aa, Yersinia frederiksenii
MPQQNNGIAYSYVRFSSKRQEQGDSVRRQTEMAEKYALEKGLTLSSKNFQDLGISAFKEGKRPSLVDMLDTIENGQITAGSTIIIEALDRLSRRGIDATLETVKDILRKDVQVVSLSDGLLLTKNSLNDLQSIIRIAVAADLAHKESERKSSRLRETKGQQRQAALAGKAINKILPFWLQRASERYEFSDKAHIAREIIRLKQEGKGSNMIAKTLNKQGVAGIRSSQWNHASITKMLKHPALYGAYQTGETTKERELIKLDLIENYYPALISKEDWLLIQSDQSKSTRGRRTTDNPYSGLLRCGCGGALVKRQTTVKNKLYVYHGCLNAKDGRCEQNISIKGLDQTLKTILGRLEFKKRPTPDQSIHQERKQLEDRISNLNNKLLTLDDIPVSVIKTIGTLEERLKTVTDLILQNEREQRGIDAVQSETLSSITDGLELNLLLKRVLKSITVSASGNGWAVKVLHLSGHKQNFLMVDGKIKFLSDTITLQKLLASFKESAEE

SEQ ID NO: 25982 - DNA, 50 bp, Yersinia frederiksenii; identical to SEQ ID NO: 25962
  source 1..50: mol_type = genomic DNA

SEQ ID NO: 25983 - DNA, 40 bp, Yersinia frederiksenii; identical to SEQ ID NO: 5808
  source 1..40: mol_type = genomic DNA

SEQ ID NO: 25984 - DNA, 40 bp, Yersinia frederiksenii; identical to SEQ ID NO: 20974
  source 1..40: mol_type = genomic DNA

SEQ ID NO: 25985 - DNA, 50 bp, Yersinia frederiksenii; identical to SEQ ID NO: 25965
  source 1..50: mol_type = genomic DNA

SEQ ID NO: 25986 - protein, 502 aa, Yersinia enterocolitica
MPQQNNGIAYSYVRFSSKRQEQGDSVRRQTEMAEKYALEKGLTLSSKNFQDLGISAFKEGKRPSLVDMLDTIENGQITAGSTIIIEALDRLSRRGIDATLETVKDILRKDVQVVSLSDGLLLTKNSLNDLQSIIRIAVAADLAHKESERKSSRLRETKGQQRQAALAGKAINKILPFWLQRASERYEFSDKAHIAREIIRLKQEGKGSNMIAKTLNKQGVAGIRSSQWNHASITKMLKHPALYGAYQTGETTKERELIKLDLIENYYPALISKEDWLLIQSDQSKSTRGRRTTDNPYSGLLRCGCGGALVKRQTTVKNKLYVYHGCLNAKDGRCEQNISIKGLDQALKTILGRLEFKKRPTPDQSIHQERKQLEDRISNLNNKLLTLDDIPVSVIKTIGTLEERLKTVTDLILQNEREQRGIDAVQRETLSSITDGLELNLLLKRVLKSITVSASGNGWAVKVLHLSGHKQNFLMVDGKIKFLSDTIALQKLLASFKESAEE

SEQ ID NO: 25987 - DNA, 50 bp, Yersinia enterocolitica; identical to SEQ ID NO: 25962
  source 1..50: mol_type = genomic DNA

SEQ ID NO: 25988 - DNA, 40 bp, Yersinia enterocolitica; identical to SEQ ID NO: 5808
  source 1..40: mol_type = genomic DNA

SEQ ID NO: 25989 - DNA, 40 bp, Yersinia enterocolitica; identical to SEQ ID NO: 20974
  source 1..40: mol_type = genomic DNA

SEQ ID NO: 25990 - DNA, 50 bp, Yersinia enterocolitica; identical to SEQ ID NO: 25965
  source 1..50: mol_type = genomic DNA

SEQ ID NO: 25991 - protein, 516 aa, Bacillus paranthracis; identical to SEQ ID NO: 6231

SEQ ID NO: 25992 - DNA, 50 bp, Bacillus paranthracis
  source 1..50: mol_type = genomic DNA
cgtgtacatggtggagtattaaactgttttaactctctaccatatacact

SEQ ID NO: 25993 - DNA, 40 bp, Bacillus paranthracis; identical to SEQ ID NO: 6233
  source 1..40: mol_type = genomic DNA

SEQ ID NO: 25994 - DNA, 40 bp, Bacillus paranthracis
  source 1..40: mol_type = genomic DNA
tgtactgtggcgattgtacacattcacttccccataccca

SEQ ID NO: 25995 - DNA, 50 bp, Bacillus paranthracis
  source 1..50: mol_type = genomic DNA
tatatacatatatgaatattatacacttttatatatgtattatatacaca

SEQ ID NO: 25996 - protein, 542 aa, Pseudomonas kunmingensis
MIQWLSWLARNQHPMPTAFSYVRFSSAKQARGSSLERQQTRVAQWLASHPDYTLSLTSFEDLGRSGWKGEHLENGFGKLLAAVEAGVIQPGDCILVEAIDRTGRLEPLEMLPLLGRILQAGVMIVTLDDALTYDQKSANSNHLFLLVAKVQQAYIYSERLSDLINAAYDKKKRAAKEGKAVKRHTPMWIDKEGKLIESVAPLVRQAFEDYAAGLGERRICRRLRESGHELLQTINGTTVKRWLTNTTAIGNWGEIPNVYEPVVPKELFYRVQEQLSRNKDQKRSAPTAYLLTGLVKCGHCGRNFNVKKHPNTGATMQCTSRARLTLDGCSNSKSIPKQLLEHIRVKTSLPYVERALAGQLLTEHQKRKIEIEGELEDLSKRIGNLANTIAAIGLVPEIQEQLEQLQAQRKQLQDERLILDRSTDDAVSTNTIINVEHDYLANDPIKLNALLQQAEYSITCFSNGEIWVSGDEHPWKYKGYDRSAKSYVYEDLGQEYRLLMLRPEHQELLDRVNKQPLPEPTPEFNDLLSLIARGHRRRGDDA

SEQ ID NO: 25997 - DNA, 50 bp, Pseudomonas kunmingensis
  source 1..50: mol_type = genomic DNA
cgttgtgtatctgcacctatgttcgagaagaccggggcaatgatacaatg

SEQ ID NO: 25998 - DNA, 40 bp, Pseudomonas kunmingensis
  source 1..40: mol_type = genomic DNA
cgtggcgcatgcgtccttcgagcatgtaggtgatggtttc

SEQ ID NO: 25999 - DNA, 40 bp, Pseudomonas kunmingensis
  source 1..40: mol_type = genomic DNA
cgtggcgcatgcgtccttcatgcatgtaggtgatggtttc

SEQ ID NO: 26000 - DNA, 50 bp, Pseudomonas kunmingensis
  source 1..50: mol_type = genomic DNA
agttatttaaaggcacttatgttgatgaagaccaggatttaaattcattg

SEQ ID NO: 26001 - protein, 530 aa, Tyzzerella nexilis
MMYQMGVYCRLSKDDGENKVSESIENQMKLIREYVTKSEDLEIADIYIDDGYSGLYFANRPEFQRMMEDIYKGKIQGVITKDISRLGREHIETSNYIERVFPSLGVRYIAILDGVDSVHHSNEELAQFKTLFNDMYSRDISKKIRGALTAQKKRGQFMSGFAPYGYVKDPADKHHFLVDEEAAKVVRRIFYMSLEGYSRDGIAKKLNQEGILTPSEYKRKVQGLKYANALEKAGAKGWAYPTINVILRNRVYTGAMVQHKSEKISYKVEKYQYIPEEQQYIVEGMHEAIISKDTFEQVQKLMKKRTRTPGFNSEVRKVNPYAGIIVCGDCGYNFQRVTCRDGYECGTYHKKGNTVCYSHFIKKEVLDSIVKNEIQRQAELALKESDTDEILKAADRKKEVQRRCAEANQKIERLQKELVAVQKYKKKTYENYVDGVLDKEEYLSYKAEYEKQDKEIRAKIQLAEQEKDSFGEAEESYENWIEKFIKYGTLSEVTREIVTELIEKIVVNGDKSIDIVFKYQSPYSKEKNAV

SEQ ID NO: 26002 - DNA, 50 bp, Tyzzerella nexilis; identical to SEQ ID NO: 9917
  source 1..50: mol_type = genomic DNA

SEQ ID NO: 26003 - DNA, 40 bp, Tyzzerella nexilis
  source 1..40: mol_type = genomic DNA
tgggaatacatatggttcccatgacggaacgagcttactg

SEQ ID NO: 26004 - DNA, 40 bp, Tyzzerella nexilis
  source 1..40: mol_type = genomic DNA
tgggaatacatatggttcctgtgacggaacgagcttactg

SEQ ID NO: 26005 - DNA, 50 bp, Tyzzerella nexilis
  source 1..50: mol_type = genomic DNA
tctttcaccataggataaagaaaatgagaaccatgtgtgacattgaaaac

SEQ ID NO: 26006 - protein, 530 aa, Dorea longicatena; identical to SEQ ID NO: 9916

SEQ ID NO: 26007 - DNA, 50 bp, Dorea longicatena; identical to SEQ ID NO: 9917
  source 1..50: mol_type = genomic DNA

SEQ ID NO: 26008 - DNA, 40 bp, Dorea longicatena
  source 1..40: mol_type = genomic DNA
tggaaatacatacggcggacatgacgggacgacacttctg

SEQ ID NO: 26009 - DNA, 40 bp, Dorea longicatena
  source 1..40: mol_type = genomic DNA
tggaaatacatacggcggatgtgacgggacgacacttctg

SEQ ID NO: 26010 - DNA, 50 bp, Dorea longicatena; identical to SEQ ID NO: 26005
  source 1..50: mol_type = genomic DNA

SEQ ID NO: 26011 - protein, 529 aa, Vibrio lentus
MTDFIVYGRVSTKTQLNDGKLGKEIQLSPVQKIVDDHNGRIVSQYFDEGLSAYKGEHMADGAGLKEICEDVRNGRYKKGTVLLMYSLDRFSRQEPDEATHYFTGLKMKEVSIWTYIDGLQKYDNEWSLFEAIIKLKAAHEESAKKAARLRDTWNKKFELLASGQAVKMTAYPFWIAFDEAARKYVYNDFAEIAVTVLNDYLNGVSRSLIVKRLNASHTPFYTKSKHPTKPQLWTRDHLKKLFNNTAVYGQFESKRNTVVIENVFPPLITKEQYETIQSMKRVRKAKQSDNYPNLFNGLLKCGYCGGSLTRRKSSNGSYSYLCVSAERCSRKKSIAAKLLDPKVLKYLQDLDWSFMNNDQDKKPFLEENIAQKQKDIAAIEGQLDSNFDEYLLQLRRKHVDERAALVLELEQYQVTQQSYDFDAQILLNAANDMRLKASKAMQLLIERIEVFTSGQIDLGVDPMDKKQVEQWKKRNKDAIYCDVYFHKWNEGKQESRMIGISHDYVADMTGTPLIIDKRAFDAFKKFKSS

SEQ ID NO: 26012 - DNA, 50 bp, Vibrio lentus
  source 1..50: mol_type = genomic DNA
caaatcacaacagggtaaacgttctctaatgcctaccccgttaggaatca

SEQ ID NO: 26013 - DNA, 40 bp, Vibrio lentus
  source 1..40: mol_type = genomic DNA
aacaattagggccacattatctaatgtggcccctagaaat

SEQ ID NO: 26014 - DNA, 40 bp, Vibrio lentus
  source 1..40: mol_type = genomic DNA
aacaattagggccacattacataatgtggcccctagaaat

SEQ ID NO: 26015 - DNA, 50 bp, Vibrio lentus
  source 1..50: mol_type = genomic DNA
caaagcacatgtttgtaaaagtaacatgatgttgacccaaataggaatct

SEQ ID NO: 26016 - protein, 458 aa, Staphylococcus epidermidis
MNYERSYLRSCQVSTLEQKEHGYSIEEQERKLKSFCEINDWSVSDVFIDAGFSGAKRERPELQRMMKDIKRFDLVLVYKLDRLTRNVRDLLDLLEIFEQNNVAFRSATEVYDTSTAMGRLFVTLVGAMAEWERETIRERVMMGKRAAIKQGMILTPPPFYYDRVDNTYIPNDYKKVVLWAYDEVLKGVSSKAIARKLNDSDIPPPNGKKWEDRTITRALRSPIARGHYTWGDVFIENSHEPIITEEMYQQIKERLEERINTKIVSHVSVFRGKFICPKCGGTLTLNTVTRKRKKGYVTYKTYYCNTCKTRKQSFGFAENEALRVFRDYLSKLDLEKYKVKTKQKDDVVTIDIDKIMEQRKRYHKLYAKGLMQEEELFELIKETDETIAEYEKQKELVPRKTLDIDKIKKFKNVLLESWEIFSLEDKADFIKMAIKSINIEYVKLKNRHSIKINDIEFY

SEQ ID NO: 26017 - DNA, 50 bp, Staphylococcus epidermidis
  source 1..50: mol_type = genomic DNA
gtacggaagtatagacactcgattaatatttaatgtgtatacttccatat

SEQ ID NO: 26018 - DNA, 40 bp, Staphylococcus epidermidis
  source 1..40: mol_type = genomic DNA
gtatggtggtacatgcattaatatcggatgtatacctact

SEQ ID NO: 26019 - DNA, 40 bp, Staphylococcus epidermidis
  source 1..40: mol_type = genomic DNA
gtatggtggtacatgcattcttatcggatgtatacctact

SEQ ID NO: 26020 - DNA, 50 bp, Staphylococcus epidermidis
  source 1..50: mol_type = genomic DNA
aaaaggaagaattgacagtagattcttctataatggaaatgcttccagat

SEQ ID NO: 26021 - protein, 458 aa, Staphylococcus epidermidis
MNYERSYLRSCQVSTLEQKEHGYSIEEQERKLKSFCEINDWSISDVFIDAGFSGAKRDRPELQRMMKDIKRFDLVLVYKLDRLTRNVRDLLDLLEIFEQNNVAFRSATEVYDTSTAMGRLFVTLVGAMAEWERETIRERVMMGKRAAIKQGMILTPPPFYYDRVDNTYIPNDYKKVVLWAYDEVLKGVSSKGIARKLNDSDIPPPNGKRWEDRTITRALRSPITRGHYTWGDVFIENSHEPIITEEMYQQIKERLEERINTKIVSHVSVFRGKFICPRCGGTLTMNTATRKRKKGYVTYKTYYCNTCKGKKESFGFAENEALRVFHDHLSKLDLDKYEVKTKQKDDVVTIDIDKVMEQRKRYHKLYAKGLMQEEELFELIKETDETIAEYEKQKELVPRKTLDVDKIKKFKNVLLESWKIFSLEDKADFIKMVIKSIDIDYVKLKNRHSIEIKEIEFY

SEQ ID NO: 26022 - DNA, 50 bp, Staphylococcus epidermidis
  source 1..50: mol_type = genomic DNA
gtacggaagtatagacactcgattaatgtatagtgtgtgtacttccatat

SEQ ID NO: 26023 - DNA, 40 bp, Staphylococcus epidermidis; identical to SEQ ID NO: 26018
  source 1..40: mol_type = genomic DNA

SEQ ID NO: 26024 - DNA, 40 bp, Staphylococcus epidermidis; identical to SEQ ID NO: 26019
  source 1..40: mol_type = genomic DNA

SEQ ID NO: 26025 - DNA, 50 bp, Staphylococcus epidermidis; identical to SEQ ID NO: 26020
  source 1..50: mol_type = genomic DNA

SEQ ID NO: 26026 - protein, 458 aa, Staphylococcus epidermidis; identical to SEQ ID NO: 26021

SEQ ID NO: 26027 - DNA, 50 bp, Staphylococcus epidermidis; identical to SEQ ID NO: 26022
  source 1..50: mol_type = genomic DNA

SEQ ID NO: 26028 - DNA, 40 bp, Staphylococcus epidermidis
  source 1..40: mol_type = genomic DNA
gtatggcggtacatgcattaatatcggatgtataccgact

SEQ ID NO: 26029 - DNA, 40 bp, Staphylococcus epidermidis
  source 1..40: mol_type = genomic DNA
gtatggcggtacatgcattcttatcggatgtataccgact

SEQ ID NO: 26030 - DNA, 50 bp, Staphylococcus epidermidis; identical to SEQ ID NO: 26020
  source 1..50: mol_type = genomic DNA

SEQ ID NO: 26031 - protein, 452 aa, Listeria monocytogenes
MKAAIYIRVSTQEQVENYSIQAQTEKLTALCRSKDWDVYDTFIDGGYSGSNMNRPALNEMLSKLHEIDAVVVYRLDRLSRSQKDTITLIEEYFLKNNVEFVSLSETLDTSSPFGRAMIGILSVFAQLERETIRDRMVMGQIKRVESGLPLTTAKGRTFGYNVVDAKLYINEEEAKHLQLIYDIFEEEKSITFLQKKLKELGFKVKSYSSYNKWLMNDLYIGYVSYSDKVHVKGIHEPIISEDQFYRVQEIFSRIGKNPNMNKESSSLLNNLIVCEKCGLGYVHRAKDTVSRGKKYHYRYYSCKTYKHTHELEKCGNKIWRADKLEEIIISRVKNYSFATRNLDKEDELDSITEKLKTEHSKKKRLFDLYMNGSYEVAELDKLMADIDAQINYYNSQIEANEELKRNKKVQESLAELATVDFDSLEFREKQIYLKSIINKIYINDEQVTIEWI

SEQ ID NO: 26032 - DNA, 50 bp, Listeria monocytogenes
  source 1..50: mol_type = genomic DNA
tttagtctctcgatttctctcgctggacggagacgaatcgagaaactaaa

SEQ ID NO: 26033 - DNA, 40 bp, Listeria monocytogenes; identical to SEQ ID NO: 1298
  source 1..40: mol_type = genomic DNA

SEQ ID NO: 26034 - DNA, 40 bp, Listeria monocytogenes; identical to SEQ ID NO: 24374
  source 1..40: mol_type = genomic DNA

SEQ ID NO: 26035 - DNA, 50 bp, Listeria monocytogenes
  source 1..50: mol_type = genomic DNA
tatactctcccacctcctcttcctagaaggagactagacatgaaacaata

SEQ ID NO: 26036 - protein, 452 aa, Listeria monocytogenes
MKAAIYIRVSTQEQVENYSIQAQTEKLTALCRSKDWDVYDTFIDGGYSGSNMNRPALNEMLSKLHEIDAVVVYRLDRLSRSQKDTITLIEEYFLKNNVEFVSLSETLDTSSPFGRAMIGILSVFAQLERETIRDRMVMGKIKRVESGLPLTTAKGRTFGYDVVDTKLYVNKEEAQHLQLIYDIFEEEKSITFLQKRLKKLGFKVKSYSSYNKWLMNDLYIGYVSYGDKVHVKGVHEAIISEEQFYRVQEIFSRMGKNPNMNKESSSLLNNLIVCEKCGLGYVHRAKDTVSRGKKYHYRYYSCKTYKHTHELEKCGNKIWRADKLEEIIISRVKNYSFATRNLDKEDELDSITEKLKTEHSKKKRLFDLYMNGSYEVAELDKLMADIDAQINYYNSQIEANEELKRNKKVQESLAELATVDFDSLEFREKQIYLKSIINKIYINDEQVTIEWI

SEQ ID NO: 26037 - DNA, 50 bp, Listeria monocytogenes; identical to SEQ ID NO: 26032
  source 1..50: mol_type = genomic DNA

SEQ ID NO: 26038 - DNA, 40 bp, Listeria monocytogenes; identical to SEQ ID NO: 7828
  source 1..40: mol_type = genomic DNA

SEQ ID NO: 26039 - DNA, 40 bp, Listeria monocytogenes
  source 1..40: mol_type = genomic DNA
tttcggatcaagctatgaaagacgcaaagagggaactaaa

SEQ ID NO: 26040 - DNA, 50 bp, Listeria monocytogenes; identical to SEQ ID NO: 26035
  source 1..50: mol_type = genomic DNA

SEQ ID NO: 26041 - protein, 452 aa, Listeria monocytogenes
MKAAIYIRVSTQEQVENYSIQAQTEKLTALCRSKDWDVYDTFIDGGYSGSNMNRPALNEMLSKLHEIDAVVVYRLDRLSRSQKDTITLIEEYFLKNNVEFVSLSETLDTSSPFGRAMIGILSVFAQLERETIRDRMVMGKIKRVESGLPLTTAKGRTYGYDVVDTKLYINEEEAQHLQLIYDIFEEEKSITFLQKRLKKLGFKVKSYSSYNKWLMNDLYIGYVSYSDKVHAKGIHEPIISEDQFYRVQEIFSRMGKNPNMNRDSASLLNNLIVCEKCGLSFVHRVKDTVSRGKKYRYRYYSCKTYKHTHELEKCGNKIWRADKLEEIVIDRVKNYSFATRNLDKEDELDSITEKLKTEHSKKKRLFDLYMNGSYEVAELDKMMSDIDAQINYYNSQIEANEELKRNKKVQESLEELATVDFDSLEFREKQIYLKSIINKIYISDEQVTIEWI

SEQ ID NO: 26042 - DNA, 50 bp, Listeria monocytogenes; identical to SEQ ID NO: 26032
  source 1..50: mol_type = genomic DNA

SEQ ID NO: 26043 - DNA, 40 bp, Listeria monocytogenes; identical to SEQ ID NO: 1298
  source 1..40: mol_type = genomic DNA

SEQ ID NO: 26044 - DNA, 40 bp, Listeria monocytogenes; identical to SEQ ID NO: 24374
  source 1..40: mol_type = genomic DNA

SEQ ID NO: 26045 - DNA, 50 bp, Listeria monocytogenes; identical to SEQ ID NO: 26035
  source 1..50: mol_type = genomic DNA

SEQ ID NO: 26046 - protein, 557 aa, Bacillus weihaiensis
MNNLKVAVYTRVSTKHEAQISSMKNQKDYYSKYCEKEGYDMVALYADEGLSATSANRKEFLEMLTDAGLEITRDLETNEIIRFKASKRKPKFERIITKDITRFARNVNSVEIVRALCDKKVYIYFENMDLNTEKDNWEFEFNLFMTFSQQESIDRSKKVSFAYRERMKKNIYHMSTPLYGYAYDEEKGEYVIDEIEGKVVKEIFNFYVNDGLGTKAIALKLNERGLKTKRGKEWRGSTIKDMIKNEKYKGQVVFNKYTNTGVTSGKRKIKRDPSEWKYVDDAIVSIIDKEQWEKAQEIMATRTKETPSGSKIGSKKVKNIFFNKIKCSNCIVDYTRVSGTKKRKNGEKVTEYTYYCKNRRMFGSCDMRGISHKVLEREVNKLANGKLHEILNLNLNEERERANSIFEKLYDKRKNAEESKMLIEDQIQNISNQVTKLFNSFLNDDSSEYVVKAAKEKISQLEEEKEKLEKQLFSFDFLEIDRVENKVRERLEIIQRLSKRKTYEFDEVLETIKRIIVHPNKHIEFYINSPTIVTFVLEGNLDNIEDQYITLIHSVDY

SEQ ID NO: 26047 - DNA, 50 bp, Bacillus weihaiensis
  source 1..50: mol_type = genomic DNA
tacttgttttgggtttgtgacaccaatatagtgtacctcaaaaacaagtt

SEQ ID NO: 26048 - DNA, 40 bp, Bacillus weihaiensis
  source 1..40: mol_type = genomic DNA
agggtgtgaaggtttagtaaatatggttcaagcacaagtt

SEQ ID NO: 26049 - DNA, 40 bp, Bacillus weihaiensis
  source 1..40: mol_type = genomic DNA
agggtgtgaaggtttagtacatatggttcaagcacaagtt

SEQ ID NO: 26050 - DNA, 50 bp, Bacillus weihaiensis
  source 1..50: mol_type = genomic DNA
tgctgttttcttttgtcttacacccatttattgttctagcaaaacaagtt

SEQ ID NO: 26051 - protein, 490 aa, Fusobacterium nucleatum
MINVVGYARYSSDNQREESIVAQERAIREFCQKNNYNLIKVYKDEAISGTSIKDRTEFLELIEDSKKKEFQCVVVHKFDRFARNRYDHAIYEKKLNDNGVKLLSVLEQLNDSPESVILKSVLTGMNEYYSLNLSREVKKGLNENALNCIHNGGIPPLGYNLDEDRRYIINEIEAETVRIIYKLYIEGIGYASIAEQLNQMGRLNKLGKPFRKTSIRDILLNEKYTGVFVYGKKDGHGKLTGNEVKIEGGIPQIISKEDFEKIQIKMKNRKTGSRATAHETYYLTGVCTCGECGGRYSGGYRSKQRDGSITYGYTCINRKTKVNDCRNKPIRKEILEEFVFKTIKKEIFTEKRIKSIASKVEKSVNEKILKKAQEVKKLESEIQKIKDKIDRLLEIFLDNKISKEVFEKKNNELERELFLLTQEKNKISASKKINRESIEAFIRNFKANFNKENIKKAIIETFVKEIKVYETYVEIVLRLFPMYIDRNGGD

SEQ ID NO: 26052 - DNA, 50 bp, Fusobacterium nucleatum
  source 1..50: mol_type = genomic DNA
tatattgatagaaatggtggagatgaggctaaacttttgttagcaatata

SEQ ID NO: 26053 - DNA, 40 bp, Fusobacterium nucleatum
  source 1..40: mol_type = genomic DNA
ttgatattttggtggagatgacgagagtcgaactcgtgtc

SEQ ID NO: 26054 - DNA, 40 bp, Fusobacterium nucleatum; identical to SEQ ID NO: 26053
  source 1..40: mol_type = genomic DNA

SEQ ID NO: 26055 - DNA, 50 bp, Fusobacterium nucleatum
  source 1..50: mol_type = genomic DNA
tatcttgattttcatggtggttatgagcacaaatttcattaaactatata

SEQ ID NO: 26056 - protein, 503 aa, Serratia quinivorans
MPQRNNGIAYSYVRFSSKRQELGDSLRRQTEMAEEYAIKNGLKLSSKNFQDLGISAFREGKRASLVDMLAAIEEGQITAGSTIIIEALDRLSRRGIDATLETVKEILRKDVQVVSLSDGLLLTKNSLNDLQSVIRIAVAADLAHKESERKAIRLRETKGQQRQAALSGKPINKILPFWLQRTETGYAFSDKAGVARQIVQLKQEGKGSNMIAKALNKLGIAGVRTAQWNHASITKMLKNPALYGAYQTGETTKDRELIKLELVEAYYPALINKEEWLLLQSDQSKSKRGRRSADNPYSGLLRCECGGALVKRKHTVKEKLYVYHGCLNAKDGRCTQNISIKGLDGALTTILGRLEFKKKQTLDQSIHQERQQLEARINDLNSKLQVLDDIPLSVIKSIGTMESRLKEITDQIAKDEREQRGIEAVKSEKLSSITDGLELNLLLKRVLKNITVIRSGNGWAVKVLHLSGHKQNFLMVDGEIKFLSDTIALQNLLAGFREATENN

SEQ ID NO: 26057 - DNA, 50 bp, Serratia quinivorans
  source 1..50: mol_type = genomic DNA
aaatttaacatatgaaacaacactgtgatattgttacttaatagcaaagg

SEQ ID NO: 26058 - DNA, 40 bp, Serratia quinivorans
  source 1..40: mol_type = genomic DNA
cttactgccaaactgcatagtaatgttgttagtgcttaac

SEQ ID NO: 26059 - DNA, 40 bp, Serratia quinivorans
  source 1..40: mol_type = genomic DNA
cttactgccaaactgcataaaaatgttgttagtgcttaac

SEQ ID NO: 26060 - DNA, 50 bp, Serratia quinivorans; identical to SEQ ID NO: 5810
  source 1..50: mol_type = genomic DNA

SEQ ID NO: 26061 - protein, 502 aa, Yersinia enterocolitica
MPQQNNGIAYSYVRFSSKRQEQGDSVRRQTEMAEKYALEKGLTLSSKNFQDLGISAFKEGKRPSLVDMLDTIENGQITAGSTIIIEALDRLSRRGIDATLETVKDILRKDVQVVSLSDGLLLTKNSLNDLQSIIRIAVAADLAHKESERKSSRLRETKGQQRQAALAGKAINKILPFWLQRASERYEFSDKVNIAREIIRLKQEGKGSNMIAKTLNKQGVAGIRSPQWNHASITKMLKHPALYGAYQTGETTKERELIKLDLIENYYPALISKEDWLLIQSDQSKSTRGRRTIDNPYSGLLRCGCGGALVKRQTTVKNKLYIYHGCLNAKDGRCEQNISIKGLDQALKKILGRLEFKKKPTPDQSIHHERKQLEDRINNLNNKLLTLDDIPVSVIKTIGILEERLKTVTTLILQNEREQRGIDAVQSETLSSITDGLELNLLLKRVLKSITVRASGNGWAVKVLHLSGHKQNFLMIDGKIKFLSDTIALQKLLASFKEPAEE

SEQ ID NO: 26062 - DNA, 50 bp, Yersinia enterocolitica
  source 1..50: mol_type = genomic DNA
cattttcacatatgaaactacattgtgatattgttacttaatagcaaagg

SEQ ID NO: 26063 - DNA, 40 bp, Yersinia enterocolitica; identical to SEQ ID NO: 5808
  source 1..40: mol_type = genomic DNA

SEQ ID NO: 26064 - DNA, 40 bp, Yersinia enterocolitica; identical to SEQ ID NO: 5809
  source 1..40: mol_type = genomic DNA

SEQ ID NO: 26065 - DNA, 50 bp, Yersinia enterocolitica; identical to SEQ ID NO: 5810
  source 1..50: mol_type = genomic DNA

SEQ ID NO: 26066 - protein, 655 aa, Photobacterium phosphoreum
MALIPYARVSSGKQIDGLSMSLQNDSCLLDNLATQYKTTISPLFYQDAGVSSFKGKNAKDGELSKLLSDIDNGLISASDIIVMRSLDRLSRQKLTASEVLYNRIISTGVCIHTTIDNHLYKADDPMSSILATLALKTANEESAKKSHLTNRYASHRIQQAKNGDKLDGFSYDVAIGRHPFWIVIDKATKTVRPHPDNWNHARHMIALALDGHGVTVVMRYAHSVGLPLSYSACAKMFNSRAVYGTLEITHNNEQHVLTNYYPALCTEAEYFQIRAIKDSLTKVSNNQRRQVSILSGIQKMYCGCCGSVLCIARNVVQKTEYYRCANKLVKCYPLIKQEHLDRIVLSAMSSKILSQTITESKDNPRLLGLELELDTKNNEYKKQQTMLFENIELFDDTMKSLLAAKKQVIAELELQIEQLKLDDAKSSAIHNVDLSQYNYAMELYTQHINSLERYVNGDNDLKTEIRHVVTKLVDRITVDHRHMITIQFKDGDIQRYMLLQRKDGKRIHQKYYSHIQLVSENDYDALIAVYPEFVSVTSTNSLIDSHMTFVEDVVNPIQLGSVYIKPETKQDAFFSLLTENVYEWKRASVMKTGATTTQWQDYKSIDTLKYGWSKADVELTTKYYTKRHTTLIYNTNTLDLDLAAIKLDVLKVTLK

SEQ ID NO: 26067 - DNA, 50 bp, Photobacterium phosphoreum
  source 1..50: mol_type = genomic DNA
attttagaacaagttgttttcgcgtcaacaaaagtgaagtatactcactc

SEQ ID NO: 26068 - DNA, 40 bp, Photobacterium phosphoreum
  source 1..40: mol_type = genomic DNA
tgtacaactatctttcgcgtcaccaaacaacatttggcta

SEQ ID NO: 26069 - DNA, 40 bp, Photobacterium phosphoreum
  source 1..40: mol_type = genomic DNA
tgtacaactatctttcgcgaaaccaaacaacatttggcta

SEQ ID NO: 26070 - DNA, 50 bp, Photobacterium phosphoreum
  source 1..50: mol_type = genomic DNA
atttcagaaccattttgcttcacgaaaacaaaggtgatctgtactgaacc

SEQ ID NO: 26071 - protein, 499 aa, Acutalibacter muris
MIDAIYTRQSVDRADSISIESQMEFCQYETRGGEYRYYSDRGFSGKNTDRPDFQRMMNDIKNGEIKRVIVYKLDRISRSILDFTSMMEEFHKYGVEFVSTTEKFDTSSPMGRAMLNICIVFAQLERETIQKRVADAYASRSKHGFFMGGPVPYGYSIEPYVIDGIKTSRYVISPEEAEVVRVIYQMYAQPQVSFGDIMRYLGDNKIRTRRGKGWNRTRIAEIVKNPIYLQADLDIYEFYKGQGTLIVNDPSDFIGTNGCYLYETQETKRKTLSLEGQTLVLAPHEGIIPSDIWLAARKKCLNNRNVGIPTKVKNSWLLGKAKCGKCGHALSIRYSKKNGVRYFMCGYHLNARGCDGFGTLRAPELEKFVLDAIRERLKSFETLTSSTESRVSPKLNGLRVKEHQLSEEMNTLLEKVIQADGALMSLINQRASDLDAQLKEVQKEIREITTATPATDVKTLTGYFSKWDELSIDDKRSVVDLLIAQVKATKDSVEIVWKI

SEQ ID NO: 26072 - DNA, 50 bp, Acutalibacter muris
  source 1..50: mol_type = genomic DNA
gtacttcatagtgattgtagtgctttgccattacattcactatgaagttg

SEQ ID NO: 26073 - DNA, 40 bp, Acutalibacter muris
  source 1..40: mol_type = genomic DNA
atcggttcgcttaaaggctttgccgtttgttagcagtttt

SEQ ID NO: 26074 - DNA, 40 bp, Acutalibacter muris
  source 1..40: mol_type = genomic DNA
atcggttcgcttaaaggctctgccgtttgttagcagtttt

SEQ ID NO: 26075 - DNA, 50 bp, Acutalibacter muris
  source 1..50: mol_type = genomic DNA
taatttcatgaaaattgtagtgttctgcagttatattttttataaatttg

SEQ ID NO: 26076 - protein, 570 aa, Serratia proteamaculans
MNVMKAYLYCRISSGKQKDGYGIQRQSDAVLEYLSNSKEAEKLGYKLSPDHYEMLDPDLGKSGYHGYQFTKGALGRFKQRVADGEIACGALVIENVDRFSRAEEYTASEEFNFLIQRGIDIHEVETGIVYSSKISGTLSKLSHAIERAHGESERKSRMASKSWSNRHKKALEQGIALKTNHPRWLRIVDDHYEVLKEQLAIYIIIFERFLEGHGIAVLLDYLNENGILNNGKRWTRTSLHHILRDRRLIGYNKDNRIYPIAINEQMFKRVQDHFDSQDGSTKRRTTRKMRNVFNGMTKCGVCKSAMIANKNPHGKHHLYCVKKRGDKHACSASACRYEYVEKEVLKHLHNIDWNSVYSNKNKVSVDVQGKNTQLIDLARRIDELQKEMTGADHDMVLALVRSLKVLRKEHQELKDELTIISTDVKPKFNFDISEVIEQKNVSLRQEINVLIKKTVHKIFVQKFSGHIYVNVEYYNTVLSHMLVLENLTGKLLANIAIIDTSNELRISSNGFSIWHDKTKDIWNVSDFKAIGSRNFFLALNHMSQFVDREVIDDLFDMWEMKSLGSVENMV

SEQ ID NO: 26077 - DNA, 50 bp, Serratia proteamaculans
  source 1..50: mol_type = genomic DNA
aagaatattttagttcttgattgcttgtaattgtgtgctaaaatattctc

SEQ ID NO: 26078 - DNA, 40 bp, Serratia proteamaculans
  source 1..40: mol_type = genomic DNA
aagatacataaacgactggttatagccgaagatgcggcca

SEQ ID NO: 26079 - DNA, 40 bp, Serratia proteamaculans
  source 1..40: mol_type = genomic DNA
aagatacataaacgactggtaatagccgaagatgcggcca

SEQ ID NO: 26080 - DNA, 50 bp, Serratia proteamaculans
  source 1..50: mol_type = genomic DNA
aagaatattacaattcttcttttctagctattttgaaatgtaatattgtt

SEQ ID NO: 26081 - protein, 509 aa, Escherichia coli
MRRAISYIRFSSERQLKGDSVRRQSKLVTDWLDKNPEFYLDSSLSFKDLGKSAFSGKHLKGGLGDFLTAIEKGLVKAGDTLLIESLDRLSRQDIDIASELLRRILRAGVDVVTLSDGEHYTRESLRDPLALIKSILIMQRAHEESLRKSERVQAAWNRKKELISEGIKVSRRCPAWLKLNDDRRTFTIIPDKVEVVKRAFDLRLQGLSFWAITRTLNDEGHLSLNQYTPKQKRWSDTAVKKLLRNRAVIGCFTPAGREEVQGYYPAIISESLFYRVQQLNTGQYGRASVSSNPLSVNLFRGIIKCSECGATIVLGGYALKRFGMYRCPNRSANRCSAKAISRKQTDATILYMLALCDRFETENTDTIDSLKLQREDLQRKISKMAELAIELDDMTIITEKLRDMKNALSKLNHDIEEETQRIKAITTGSLKDIDRTTKEGMVETQLLIKGVLKEIVIDAAKRRCKVTFHNGKAITLPITENPSEDVTEAIQSLSEVTERGLIDVDEVIV

SEQ ID NO: 26082 - DNA, 50 bp, Escherichia coli; identical to SEQ ID NO: 1887
  source 1..50: mol_type = genomic DNA

SEQ ID NO: 26083 - DNA, 40 bp, Escherichia coli; identical to SEQ ID NO: 5293
  source 1..40: mol_type = genomic DNA

SEQ ID NO: 26084 - DNA, 40 bp, Escherichia coli
  source 1..40: mol_type = genomic DNA
gtggtccggtattgtcttctgcattacatttttattttcg

SEQ ID NO: 26085 - DNA, 50 bp, Escherichia coli
  source 1..50: mol_type = genomic DNA
ttttctattttttcaacaaatatctgaaccatgagacagtaaacacatta

SEQ ID NO: 26086 - protein, 509 aa, Escherichia coli
MRRAISYIRFSSERQLKGDSVRRQSKLVTDWLDKNPEFYLDSSLSFKDLGKSAFSGKHLKGGLGDFLTAIEKGLVKAGDTLLIESLDRLSRQDIDIASELLRRILRAGVDVVTLSDGEHYTKESLKDPLSLIKSILIMQRAHEESLRKSERVQAAWNRKKELISEGIKVSRRCPAWLRLNDDRRTFTIIPDKVEVVKRAFDLRLQGLSFWAITRTLNDEGHLSLNQYTPKQKGWSDTAVKKLLRNRAVIGCFTPAGREEVQGYYPAIISESLFYRVQQLNTGQYGRASVSSNPLSVNLFRGIIKCSECGATIVLGGYALKRFGMYRCPNRSANRCSAKAISRKQTDATILYMLALCDRFETENTDTIDGLKIQREDLQRKISKMAELAIELDDMTIITEKLRDMKNALSKLNHDIEEETKRIKAITTGSLKDIDRTTKEGMIETQLLIKGVLKEIVIDAAKRRCKVTFHNGRAITLPITETPSEDVTEAIQSLSEVTERGLIDVDEVII

SEQ ID NO: 26087 - DNA, 50 bp, Escherichia coli; identical to SEQ ID NO: 1892
  source 1..50: mol_type = genomic DNA

SEQ ID NO: 26088 - DNA, 40 bp, Escherichia coli; identical to SEQ ID NO: 5293
  source 1..40: mol_type = genomic DNA

SEQ ID NO: 26089 - DNA, 40 bp, Escherichia coli; identical to SEQ ID NO: 26084
  source 1..40: mol_type = genomic DNA

SEQ ID NO: 26090 - DNA, 50 bp, Escherichia coli; identical to SEQ ID NO: 26085
  source 1..50: mol_type = genomic DNA

SEQ ID NO: 26091 - protein, 509 aa, Escherichia coli
MRRAISYIRFSSERQLKGDSVRRQSKLVTDWLDKNPEFYLDSSLSFKDLGKSAFSGKHLKGGLGDFLTAIEKGLVKAGDTLLIESLDRLSRQDIDIASELLRRILRAGVDVVTLSDGEHYTRESLKDPLSLIKSILIMQRAHEESLRKSERVQAAWNRKKELISEGIKVSRRCPAWLRLNDDRRTFTIIPDKVEVVKRAFDLRLQGLSFWAITRTLNDEGHLSLNQYTPKQKGWSDTAVKKLLRNRAVIGCFTPAGREEVQGYYPAIISESLFYRVQQLNTGQYGRASVSSNPLSVNLFRGIIKCSECGATIVLGGYALKRFGMYRCPNRSANRCSAKAISRKQTDATILYMLALCDRFETENTGTIDSLKLQREDLQRKISKMAELAIELDDMTIITEKLRDMKNALSKLNHDIEEETKRIKAITTGSLKDIDRTTKEGMIETQLLIKGVLKEIVIDAAKRRCKVTFHNGKSIDLPITENPSEDVTEAIQSLSEVTERGLIDVDEVII

SEQ ID NO: 26092 - DNA, 50 bp, Escherichia coli; identical to SEQ ID NO: 1887
  source 1..50: mol_type = genomic DNA

SEQ ID NO: 26093 - DNA, 40 bp, Escherichia coli; identical to SEQ ID NO: 5293
  source 1..40: mol_type = genomic DNA

SEQ ID NO: 26094 - DNA, 40 bp, Escherichia coli; identical to SEQ ID NO: 26084
  source 1..40: mol_type = genomic DNA

SEQ ID NO: 26095 - DNA, 50 bp, Escherichia coli; identical to SEQ ID NO: 26085
  source 1..50: mol_type = genomic DNA

SEQ ID NO: 26096 - protein, 509 aa, Escherichia coli
MRRAISYIRFSSERQLKGDSVRRQSKLVTDWLDKNPEFYLDSSLSFKDLGKSAFSGKHLKGGLGDFLTAIEKGLVKAGDTLLIESLDRLSRQDIDIASELLRRILRAGVDIVTLSDGEHYTRESLKDPLSLIKSILIMQRAHEESLRKSERVQAAWNRKKELISEGIKVSRRCPAWLRLNDDRRTFTIIPDKVEVVKRAFDLRLQGLSFWAITRTLNDEGHLSLNQYTPKQKGWSDTAVKKLLRNRAVIGCFTPAGREEVQGYYPAIISESLFYRVQQLNTGQYGRASVSSNPLSVNLFRGIIKCSECGATIVLGGYALKRFGMYRCPNRSANRCSAKAISRKQTDATILYMLALCDRFETENTDTIDSLKLQREDLQRKISKMAELAIELDDMTIITEKLRDMKNALSKLNHDIEEETKRIKAITTGSLKDIDRTTKEGMIETQLLIKGVLKEIVIDAAKRRCKVTFHNGRAITLPITENPSEDVTEAIQSLSEVTERGLIDVDEVII

SEQ ID NO: 26097 - DNA, 50 bp, Escherichia coli; identical to SEQ ID NO: 1887
  source 1..50: mol_type = genomic DNA

SEQ ID NO: 26098 - DNA, 40 bp, Escherichia coli; identical to SEQ ID NO: 5293
  source 1..40: mol_type = genomic DNA

SEQ ID NO: 26099 - DNA, 40 bp, Escherichia coli; identical to SEQ ID NO: 26084
  source 1..40: mol_type = genomic DNA

SEQ ID NO: 26100 - DNA, 50 bp, Escherichia coli; identical to SEQ ID NO: 26085
  source 1..50: mol_type = genomic DNA

SEQ ID NO: 26101 - protein, 509 aa, Escherichia coli
MRRAISYIRFSSERQLKGDSVRRQSKLVTDWLDKNPEFYLDSSLSFKDLGKSAFSGKHLKGGLGDFLTAIEKGLVKAGDTLLIESLDRLSRQDIDIASELLRRILRAGVDVVTLSDGEHYTRESLKDPLSLIKSILIMQRAHEESLRKSERVQAAWNRKKELISEGIKVSRRCPAWLRLNDDRRTFTIIPDKVEVVKRAFDLRLQGLSFWAITRTLNDEGHLSLNQYTPKQKGWSDTAVKKLLRNRAVIGCFTPAGREEVQGYYPAIISESLFYRVQQLNTGQYGRASVSSNPLSVNLFRGIIKCSECGATIVLGGYALKRFGMYRCPNRSANRCSAKAISRKQTDATILYMLALCDRFETENTDTIDSLKLQREDLQRKISKMAELAIELDDMTIITEKLRDMKNALSKLNHDIEEETQRIKAITTGSLKDIDRTTKEGMIETQLLIKGVLKEIVIDAAKRRCKVTFHNGKVIDLPITENPSDNVTEAIQSLSEVTERGLIDVDVVEI

SEQ ID NO: 26102 - DNA, 50 bp, Escherichia coli; identical to SEQ ID NO: 1887
  source 1..50: mol_type = genomic DNA

SEQ ID NO: 26103 - DNA, 40 bp, Escherichia coli; identical to SEQ ID NO: 5293
  source 1..40: mol_type = genomic DNA

SEQ ID NO: 26104 - DNA, 40 bp, Escherichia coli; identical to SEQ ID NO: 26084
  source 1..40: mol_type = genomic DNA

SEQ ID NO: 26105 - DNA, 50 bp, Escherichia coli; identical to SEQ ID NO: 26085
  source 1..50: mol_type = genomic DNA

SEQ ID NO: 26106 - protein, 509 aa, Escherichia coli
MRRAISYIRFSSERQLKGDSVRRQSKLVTDWLDKNPEFYLDSSLSFKDLGKSAFSGKHLKGGLGDFLTAIEKGLVKAGDTLLIESLDRLSRQDIDIASELLRRILRAGVDIVTLSDGEHYTRESLKDPLSLIKSILIMQRAHEESLRKSERVQAAWNRKKELISEGIKVSRRCPAWLRLNDDRRTFTIIPDKVEVVKRAFDLRLQGLSFWAITRTLNDEGHLSLNQYTPKQKGWSDTAVKKLLRNRAVIGCFTPAGREEVQGYYPAIISESLFYRVQQLNTGQYGRASVSSNPLSVNLFRGIIKCSECGATIVLGGYALKRFGMYRCPNRSANRCSAKAISRKQTDATILYMLALCDRFETENTDTIDSLKLQREDLQRKISKMAELAIELDDMTIITEKLRDMKNALSKLNHDIEEETKRIKAITTGSLKDIDRTTKEGMIETQLLIKGVLKEIVIDAAKRRCKVTFHNSKSITLSITENPSEDVTEAIQSLSEVTERGLIDVDEVII

SEQ ID NO: 26107 - DNA, 50 bp, Escherichia coli; identical to SEQ ID NO: 1887
  source 1..50: mol_type = genomic DNA

SEQ ID NO: 26108 - DNA, 40 bp, Escherichia coli; identical to SEQ ID NO: 5293
  source 1..40: mol_type = genomic DNA

SEQ ID NO: 26109 - DNA, 40 bp, Escherichia coli; identical to SEQ ID NO: 26084
  source 1..40: mol_type = genomic DNA

SEQ ID NO: 26110 - DNA, 50 bp, Escherichia coli; identical to SEQ ID NO: 26085
  source 1..50: mol_type = genomic DNA

SEQ ID NO: 26111 - protein, 509 aa, Escherichia coli
MRRAISYIRFSSERQLKGDSVRRQSKLVTDWLDKNPEFYLDSSLSFKDLGKSAFSGKHLKGGLGDFLTAIEKGLVKAGDTLLIESLDRLSRQDIDIASELLRRILRAGVDIVTLSDGEHYTRESLKDPLSLIKSILIMQRAHEESLRKSERVQAAWNRKKELISEGIKVSRRCPAWLRLNDDRRTFTIIPDKVEVVKRAFDLRLQGLSFWAITRTLNDEGHLSLNQYTPKQKGWSDTAVKKLLRNRAVIGCFTPAGREEVQGYYPAIISESLFYRVQQLNTGQYGRASVSSNPLSVNLFRGIIKCSECGATIVLGGYALKRFGMYRCPNRSANRCSAKAISRKQTDATILYMLALCDRFETENTDTIDSLKLQREDLQRKISKMAELAIELDDMTIITEKLRDMKNALSKLNHDIEEETKRIKAITTGSLKDIDRTTKEGMIETQLLIKGVLKEIVIDAAKRRCKVTFHNSKSITLPITENPSEDVTEAIQSLSEVTERGLIDVDEVII

SEQ ID NO: 26112 - DNA, 50 bp, Escherichia coli; identical to SEQ ID NO: 1887
  source 1..50: mol_type = genomic DNA

SEQ ID NO: 26113 - DNA, 40 bp, Escherichia coli; identical to SEQ ID NO: 5293
  source 1..40: mol_type = genomic DNA

SEQ ID NO: 26114 - DNA, 40 bp, Escherichia coli; identical to SEQ ID NO: 26084
  source 1..40: mol_type = genomic DNA

SEQ ID NO: 26115 - DNA, 50 bp, Escherichia coli; identical to SEQ ID NO: 26085
  source 1..50: mol_type = genomic DNA

SEQ ID NO: 26116 - protein, 509 aa, Escherichia coli
MRRAISYIRFSSERQLKGDSVRRQSKLVTDWLDKNPEFYLDSSLSFKDLGKSAFSGKHLKGGLGDFLTAIEKGLVKAGDTLLIESLDRLSRQDIDIASELLRRILRAGVDVVTLSDGEHYTRESLKDPLSLIKSILIMQRAHEESLRKSERVQAAWNRKKELISEGIKVSRRCPAWLRLNDDRRTFTIIPDKVEVVKRAFDLRLQGLSFWAITRTLNDEGHLSLNQYTPKQKGWSDTAVKKLLRNRAVIGCFTPAGREEVQGYYPAIISESLFYRVQQLNTGQYGRASVSSNPLSVNLFRGIIKCSECGATIVLGGYALKRFGMYRCPNRSANRCSAKAISRKQTDATILYMLALCDRFETENTDTIDSLRLQREDLQRKISKMAELAIELDDMTIITEKLRDMKNALSKLNHDIEEETQRIKAITTGSLKDIDRTTKEGMIETQLLIKGVLKEIVIDTAKRRCKVTFHNGRAITLPITENPSEDVTEAIQSLSEVIERGLIDVDEVII

SEQ ID NO: 26117 - DNA, 50 bp, Escherichia coli; identical to SEQ ID NO: 1887
  source 1..50: mol_type = genomic DNA

SEQ ID NO: 26118 - DNA, 40 bp, Escherichia coli; identical to SEQ ID NO: 5293
  source 1..40: mol_type = genomic DNA

SEQ ID NO: 26119 - DNA, 40 bp, Escherichia coli; identical to SEQ ID NO: 26084
  source 1..40: mol_type = genomic DNA

SEQ ID NO: 26120 - DNA, 50 bp, Escherichia coli; identical to SEQ ID NO: 26085
  source 1..50: mol_type = genomic DNA

SEQ ID NO: 26121 - protein, 509 aa, Escherichia coli; identical to SEQ ID NO: 1886

SEQ ID NO: 26122 - DNA, 50 bp, Escherichia coli; identical to SEQ ID NO: 1887
  source 1..50: mol_type = genomic DNA

SEQ ID NO: 26123 - DNA, 40 bp, Escherichia coli; identical to SEQ ID NO: 5293
  source 1..40: mol_type = genomic DNA

SEQ ID NO: 26124 - DNA, 40 bp, Escherichia coli; identical to SEQ ID NO: 26084
  source 1..40: mol_type = genomic DNA

SEQ ID NO: 26125 - DNA, 50 bp, Escherichia coli; identical to SEQ ID NO: 26085
  source 1..50: mol_type = genomic DNA

SEQ ID NO: 26126 - protein, 509 aa, Escherichia coli
MRRAISYIRFSSERQLKGDSVRRQSKLVTDWLDKNPEFYLDSSLSFKDLGKSAFSGKHLKGGLGDFLTAIEKGLVKAGDTLLIESLDRLSRQDIDIASELLRRILRAGVDVVTLSDGEHYTRESLKDPLSLIKSILIMQRAHEESLRKSERVQAAWNRKKELISEGIKVSRRCPAWLRLNDDRRTFTIIPDKVEVVKRAFDLRLQGLSFWAITRTLNDEGHLSLNQYTPKQKGWSDTAVKKLLRNRAVIGCFTPAGREEVQGYYPAIISESLFYRVQQLNTGQYGRASVSSNPLSVNLFRGIIKCSECGATIVLGGYALKRFGMYRCPNRSANRCSAKAISRKQTDATILYMLALCDRFETENTDTIDSLKLQREDLQRKISKMAELAIELDDMTIITEKLRDMKNALSKLNHDIEEETKRIKAITTGSLKDIDRTTKEGMIETQLLIKGVLKEIVIDAARRRCKVTFHNGKSIDLPITENPSEDVTEAIQSLSEVTERGLIDVDVVAI

SEQ ID NO: 26127 - DNA, 50 bp, Escherichia coli; identical to SEQ ID NO: 1887
  source 1..50: mol_type = genomic DNA

SEQ ID NO: 26128 - DNA, 40 bp, Escherichia coli; identical to SEQ ID NO: 5293
  source 1..40: mol_type = genomic DNA

SEQ ID NO: 26129 - DNA, 40 bp, Escherichia coli; identical to SEQ ID NO: 26084
  source 1..40: mol_type = genomic DNA

SEQ ID NO: 26130 - DNA, 50 bp, Escherichia coli; identical to SEQ ID NO: 26085
  source 1..50: mol_type = genomic DNA

SEQ ID NO: 26131 - protein, 509 aa, Escherichia coli
MRRAISYIRFSSERQLKGDSVRRQSKLVTDWLDKNPEFYLDSSLSFKDLGKSAFSGKHLKGGLGDFLTAIEKGLVKAGDTLLIESLDRLSRQDIDIASELLRRILRAGVDVVTLSDGEHYTKESLKDPLSLIKSILIMQRAHEESLRKSERVQAAWNRKKELISEGIKVSRRCPAWLRLNDDRRTFTIIPDKVEVVKRAFDLRLQGLSFWAITRTLNDEGHLSLNQYTPKQKGWSDTAVKKLLRNRAVIGCFTPAGREEVQGYYPAIISESLFYRVQQLNTGQYGRASVSSNPLSVNLFRGIIKCSECGATIVLGGYALKRFGMYRCPNRSANRCSAKAISRKQTDATILYMLALCDRFETENTDTIDGLKIQREDLQRKISKMAELAIELDDMTIITEKLRDMKNALSKLNHDIEEETKRIKAITTGSLKDIDRTTKEGMIETQLLIKGVLKEIFIDAAKRRCKVTFHNGRAITLPITETPSEDVTEAIQSLSEVTERGLIDVDEVII

SEQ ID NO: 26132 - DNA, 50 bp, Escherichia coli; identical to SEQ ID NO: 1892
  source 1..50: mol_type = genomic DNA

SEQ ID NO: 26133 - DNA, 40 bp, Escherichia coli; identical to SEQ ID NO: 5293
  source 1..40: mol_type = genomic DNA

SEQ ID NO: 26134 - DNA, 40 bp, Escherichia coli; identical to SEQ ID NO: 26084
  source 1..40: mol_type = genomic DNA

SEQ ID NO: 26135 - DNA, 50 bp, Escherichia coli; identical to SEQ ID NO: 26085
  source 1..50: mol_type = genomic DNA

SEQ ID NO: 26136 - protein, 509 aa, Escherichia coli
MRRAISYIRFSSERQLKGDSVRRQSKLVTDWLDKNPEFYLDSSLSFKDLGKSAFSGKHLKGGLGDFLTAIEKGLVKAGDTLLIESLDRLSRQDIDIASELLRRILRAGVDVVTLSDGEHYTKESLKDPLSLIKSILIMQRAHEESLRKSERVQAAWNRKKELISEGIKISRRCPAWLKLNDDRRTFTIIPDKVEVVKRAFDLRLQGLSFWAITRTLNDEGHLSLNQYTPKQKGWSDTAVKKLLRNRAVIGCFTPAGREEVQGYYPAIISESLFYRVQQLNTGQYGRASVSSNPLSVNLFRGIIKCSECGATIVLGGYALKRFGMYRCPNRSANRCSAKAISRKQTDATILYMLALCDRFETENTDTIDSLKLQREDLQRKISKMAELAIELDDMTIITEKLRDMKNALSKLNHDIEEETKRIKAITTGSLKDIDRTTKEGMIETQLLIKGVLKEIVIDAAKRRCKVTFHNGRIIDLPITENPSEDVTEAIQSLSEVTERGLIDVDVVAI

SEQ ID NO: 26137 - DNA, 50 bp, Escherichia coli; identical to SEQ ID NO: 1887
  source 1..50: mol_type = genomic DNA

SEQ ID NO: 26138 - DNA, 40 bp, Escherichia coli; identical to SEQ ID NO: 5293
  source 1..40: mol_type = genomic DNA

SEQ ID NO: 26139 - DNA, 40 bp, Escherichia coli; identical to SEQ ID NO: 26084
  source 1..40: mol_type = genomic DNA

SEQ ID NO: 26140 - DNA, 50 bp, Escherichia coli; identical to SEQ ID NO: 26085
  source 1..50: mol_type = genomic DNA

SEQ ID NO: 26141 - protein, 509 aa, Escherichia coli
MRRAISYIRFSSERQLKGDSVRRQSKLVTDWLDKNPEFYLDSSLSFKDLGKSAFSGKHLKGGLGDFLTAIEKGLVKAGDTLLIESLDRLSRQDIDIASELLRRILRAGVDVVTLSDGEHYTRESLKDPLSLIKSILIMQRAHEESLRKSERVQAAWNRKKELISEGIKVSRRCPAWLRLNDDRRTFTIIPDKVEVVKRAFDLRLQGLSFWAITRTLNDEGHLSLNQYTPKQKGWSDTAVKKLLRNRAVIGCFTPAGREEVQGYYPAIISESLFYRVQQLNTGQYGRASVSSNPLSVNLFRGIIKCSECGATIVLGGYALKRFGMYRCPNRSANRCSAKAISRKQTDATILYMLALCDRFETENIGTIDSLKLQREDLQRKISKMAELAIELDDMTIITEKLRDMKNALSKLNHDIEEETKRIKAITTGSLKDIDRTTKEGMIETQLLIKGVLKEIVIDAAKRRCKVTFHNGKSIDLPITENPSEDVTEAIQSLSEVTERGLIDVDVVAI

SEQ ID NO: 26142 - DNA, 50 bp, Escherichia coli; identical to SEQ ID NO: 1887
  source 1..50: mol_type = genomic DNA

SEQ ID NO: 26143 - DNA, 40 bp, Escherichia coli; identical to SEQ ID NO: 5293
  source 1..40: mol_type = genomic DNA

SEQ ID NO: 26144 - DNA, 40 bp, Escherichia coli; identical to SEQ ID NO: 26084
  source 1..40: mol_type = genomic DNA

SEQ ID NO: 26145 - DNA, 50 bp, Escherichia coli; identical to SEQ ID NO: 26085
  source 1..50: mol_type = genomic DNA

SEQ ID NO: 26146 - protein, 509 aa, Escherichia coli
MRRAISYIRFSSERQLKGDSVRRQSKLVTDWLDKNPEFYLDSSLSFKDLGKSAFSGKHLKGGLGDFLTAIEKGLVKAGDTLLIESLDRLSRQDIDIASELLRRILRAGVDVVTLSDGEHYTRESLKDPLSLIKSILIMQRAHEESLRKSERVQAAWNRKKELISEGIKVSRRCPAWLRLNDDRRTFTIIPDKVEVVKRAFDLRLQGLSFWAITRTLNDEGHLSLNQYTPKQKGWSDTAVKKLLRNRAVIGCFTPAGREEVQGYYPAIISESLFYRVQQLNTGQYGRASVSSNPLSVNLFRGIIKCSECGATIVLGGYALKRFGMYRCPNRSANRCSAKAISRKQTDATILYMLALCDRFETENTDTIDSLRLQREDLQRKISKMAELAIELDDMTIITEKLRDMKNALSKLNHDIEEETQRIKAITTGSLKDIDRTTKEGMIETQLLIKGVLKEIVIDAAKRRCKVTFHNGRAITLPITENPSEDVTEAIQSLSEVTERGLIAVDEVII

SEQ ID NO: 26147 - DNA, 50 bp, Escherichia coli; identical to SEQ ID NO: 1887
  source 1..50: mol_type = genomic DNA

SEQ ID NO: 26148 - DNA, 40 bp, Escherichia coli; identical to SEQ ID NO: 5293
  source 1..40: mol_type = genomic DNA

SEQ ID NO: 26149 - DNA, 40 bp, Escherichia coli; identical to SEQ ID NO: 26084
  source 1..40: mol_type = genomic DNA

SEQ ID NO: 26150 - DNA, 50 bp, Escherichia coli; identical to SEQ ID NO: 26085
  source 1..50: mol_type = genomic DNA

SEQ ID NO: 26151 - protein, 509 aa, Escherichia coli
MRRAISYIRFSSERQLKGDSVRRQSKLVTDWLDKNPEFYLDSSLSFKDLGKSAFSGKHLKGGLGDFLTAIEKGLVKAGDTLLIESLDRLSRQDIDIASELLRRILRAGVDVVTLSDGEHYTRESLKDPLSLIKSILIMQRAHEESLRKSERVQAAWNRKKELISEGIKVSRRCPAWLRLNDDRRTFTIIPDKVEVVKRAFDLRLQGLSFWAITRTLNDEGHLSLNQYTPKQKGWSDTAVKKLLRNRAVIGCFTPAGREEVQGYYPAIISESLFYRVQQLNTGQYGRASVSSNPLSVNLFRGIIKCSECGATIVLGGYALKRFGMYRCPNRSANRCSAKAISRKQTDATILYMLALCDRFETENTDTIDSLRLQREDLQRKISKMAELAIELDDMTIITEKLRDMKNALSKLNHDIEEETQRIKAITTGSLKDIDRTTKEGMIETQLLIKGVLKEIVIDAAKRRCKVTFHNGKSITLPITENPSEDVTEAIQSLSEVTERGLIDVDEVIV

SEQ ID NO: 26152 - DNA, 50 bp, Escherichia coli; identical to SEQ ID NO: 1887
  source 1..50: mol_type = genomic DNA

SEQ ID NO: 26153 - DNA, 40 bp, Escherichia coli; identical to SEQ ID NO: 5293
  source 1..40: mol_type = genomic DNA

SEQ ID NO: 26154 - DNA, 40 bp, Escherichia coli; identical to SEQ ID NO: 26084
  source 1..40: mol_type = genomic DNA

SEQ ID NO: 26155 - DNA, 50 bp, Escherichia coli; identical to SEQ ID NO: 26085
  source 1..50: mol_type = genomic DNA

SEQ ID NO: 26156 - protein, 509 aa, Escherichia coli
MRRAISYIRFSSERQLKGDSVRRQSKLVTDWLDKNPEFYLDSSLSFKDLGKSAFSGKHLKGGLGDFLTAIEKGLVKAGDTLLIESLDRLSRQDIDIASELLRRILRAGVDVVTLSDGEHYTRESLKDPLSLIKSILIMQRAHEESLRKSERVQAAWNRKKELISEGIKVSRRCPAWLRLNDDRRTFTIIPDKVEVVKRAFDLRLQGLSFWAITRTLNDEGHLSLNQYTPKQKGWSDTAVKKLLRNRAVIGCFTPAGREEVQGYYPAIISESLFYRVQQLNTGQYGRASVSSNPLSVNLFRGIIKCSECGATIVLGGYALKRFGMYRCPNRSANRCSAKAISRKQTDATILYMLALCDRFETENTDTIDGLKIQREDLQRKISKMAELAIELDDMTIITEKLRDMKNALSKLNHDIEEETKRIKAITTGSLKDIDRTTKEGMIETQLLIKGVLKEIVIDAAKRRCKVTFHNGRAITLPITETPSEDVTEAIQSLSEVTERGLIDVDEVII

SEQ ID NO: 26157 - DNA, 50 bp, Escherichia coli; identical to SEQ ID NO: 1892
  source 1..50: mol_type = genomic DNA

SEQ ID NO: 26158 - DNA, 40 bp, Escherichia coli; identical to SEQ ID NO: 5293
  source 1..40: mol_type = genomic DNA

SEQ ID NO: 26159 - DNA, 40 bp, Escherichia coli; identical to SEQ ID NO: 26084
  source 1..40: mol_type = genomic DNA

SEQ ID NO: 26160 - DNA, 50 bp, Escherichia coli; identical to SEQ ID NO: 26085
  source 1..50: mol_type = genomic DNA

SEQ ID NO: 26161 - protein, 509 aa, Escherichia coli; identical to SEQ ID NO: 11051

SEQ ID NO: 26162 - DNA, 50 bp, Escherichia coli; identical to SEQ ID NO: 1887
  source 1..50: mol_type = genomic DNA

SEQ ID NO: 26163 - DNA, 40 bp, Escherichia coli; identical to SEQ ID NO: 5293
  source 1..40: mol_type = genomic DNA

SEQ ID NO: 26164 - DNA, 40 bp, Escherichia coli; identical to SEQ ID NO: 26084
  source 1..40: mol_type = genomic DNA

SEQ ID NO: 26165 - DNA, 50 bp, Escherichia coli; identical to SEQ ID NO: 26085
  source 1..50: mol_type = genomic DNA

SEQ ID NO: 26166 - protein, 509 aa, Escherichia coli
MRRAISYIRFSSERQLKGDSVRRQSKLVTDWLDKNPEFYLDSSLSFKDLGKSAFSGKHLKGGLGDFLTAIEKGLVKAGDTLLIESLDRLSRQDIDIASELLRRILRAGVDVVTLSDGEHYTRESLKDPLSLIKSILIMQRAHEESLRKSERVQAAWNRKKELISEGIKVSRRCPAWLRLNDDRRTFTIIPDKVEVVKRAFDLRLQGLSFWAITRTLNDEGHLSLNQYTPKQKGWSDTAVKKLLRNRAVIGCFTPAGREEVQGYYPAIISESLFYRVQQLNTGQYGRASVSSNPLSVNLFRGIIKCSECGATIVLGGYALKRFGMYRCPNRSANRCSAKAISRKQTDATILYMLALCDRFETENTGTIDSLKLQREDLQRKISKMAELAIELDDMTIITEKLRDMKNALSKLNHDIEEETKRIKAITTGSLKDIDRTTKEGMIETQLLIKGVLKEIVIDAAKRRCKVTFHNGKSIDLPITENPSEDVTEAIQSLSEVTERGLIDVDVVAI

SEQ ID NO: 26167 - DNA, 50 bp, Escherichia coli; identical to SEQ ID NO: 1887
  source 1..50: mol_type = genomic DNA

SEQ ID NO: 26168 - DNA, 40 bp, Escherichia coli; identical to SEQ ID NO: 5293
  source 1..40: mol_type = genomic DNA

SEQ ID NO: 26169 - DNA, 40 bp, Escherichia coli; identical to SEQ ID NO: 26084
  source 1..40: mol_type = genomic DNA

SEQ ID NO: 26170 - DNA, 50 bp, Escherichia coli; identical to SEQ ID NO: 26085
  source 1..50: mol_type = genomic DNA

SEQ ID NO: 26171 - protein, 509 aa, Escherichia coli
MRRAISYIRFSSERQLKGDSVRRQSKLVTDWLDKNPEFYLDSSLSFKDLGKSAFSGKHLKGGLGDFLTAIEKGLVKAGDTLLIESLDRLSRQDIDIASELLRRILRAGVDVVTLSDGEHYTKESLKDPLSLIKSILIMQRAHEESLRKSERVQAAWNRKKELISEGIKISRRCPAWLKLNDDRRTFTIIPDKVEVVKRAFDLRLQGLSFWAITRTLNDEGHLSLNQYTPKQKGWSDTAVKKLLRNRAVIGCFTPAGREEVQGYYPAIISESLFYRVQQLNTGQYGRASVSSNPLSVNLFRGIIKCSECGATIVLGGYALKRFGMYRCPNRSANRCSAKAISRKQTDATILYMLALCDRFETENTDTIDSLKLQREDLQRKISKMAELAIELDDMTIITEKLRDMKNALSKLNHDIEEETKRIKAITTGSLKDIDRTTKEGMIETQLLIKGVLKEIVIDAAKRRCKVTFHNGKVIDLPITEDPSEDVTEAIQSLSEVTERGLIDVDEVII

SEQ ID NO: 26172 - DNA, 50 bp, Escherichia coli; identical to SEQ ID NO: 1887
  source 1..50: mol_type = genomic DNA

SEQ ID NO: 26173 - DNA, 40 bp, Escherichia coli; identical to SEQ ID NO: 5293
  source 1..40: mol_type = genomic DNA

SEQ ID NO: 26174 - DNA, 40 bp, Escherichia coli; identical to SEQ ID NO: 26084
  source 1..40: mol_type = genomic DNA

SEQ ID NO: 26175 - DNA, 50 bp, Escherichia coli; identical to SEQ ID NO: 26085
  source 1..50: mol_type = genomic DNA

SEQ ID NO: 26176 - protein, 509 aa, Escherichia coli
MRRAISYIRFSSERQLKGDSVRRQSKLVTDWLDKNPEFYLDSSLSFKDLGKSAFSGKHLKGGLGDFLTAIEKGLVKAGDTLLIESLDRLSRQDIDIASELLRRILRAGVDIVTLSDGEHYTRESLKDPLALIKSILIMQRAHEESLRKSERVQAAWNRKKELISEGIKVSRRCPAWLRLNDDRRTFTIIPDKVEVVKRAFDMRLQGLSFWAITRTLNDEGHLSLNQYTPKQKGWSDTAVKKLLRNRAVIGCFTPAGREEVQGYYPAIISESLFYRVQQLNTGQYGRASVSSNPLSVNLFRGIIKCSECGATIVLGGYALKRFGMYRCPNRSANRCSAKAISRKQTDATILYMLALCDRFETENTDTIDSLRLQREDLQRKISKMAELAIELDDMTIITEKLRDMKNALSKLNHDIEEETQRIKAITTGSLKDIDRTTKEGMIETQLLIKGVLKEIVIDAAKRRCKVTFHNGRAITLPITENPSEDVTEAIQSLSEVTERGLIDVDVVEI

SEQ ID NO: 26177 - DNA, 50 bp, Escherichia coli; identical to SEQ ID NO: 1887
  source 1..50: mol_type = genomic DNA

SEQ ID NO: 26178 - DNA, 40 bp, Escherichia coli; identical to SEQ ID NO: 5293
  source 1..40: mol_type = genomic DNA

SEQ ID NO: 26179 - DNA, 40 bp, Escherichia coli; identical to SEQ ID NO: 26084
  source 1..40: mol_type = genomic DNA

SEQ ID NO: 26180 - DNA, 50 bp, Escherichia coli; identical to SEQ ID NO: 26085
  source 1..50: mol_type = genomic DNA

SEQ ID NO: 26181 - protein, 509 aa, Escherichia coli
MRRAISYIRFSSERQLKGDSVRRQSKLVTDWLDKNPEFYLDSSLSFKDLGKSAFSGKHLKGGLGDFLTAIEKGLVKAGDTLLIESLDRLSRQDIDIASELLRRILRAGVDVVTLSDGEHYTRESLKDPLSLIKSILIMQRAHEESLRKSERVQAAWNRKKELISEGIKVSRRCPAWLRLNDDRRTFTIIPDKVEVVKRAFDLRLQGLSFWAITRTLNDEGHLSLNQYTPKQKGWSDTAVKKLLRNRAVIGCFTPAGREEVQGYYPAIISESLFYRVQQLNTGQYGRASVSSNPLSVNLFRGIIKCSECGATIVLGGYALKRFGMYRCPNRSANRCSAKAISRKQTDATILYMLALCDRFETENTDTIDSLRLQREDLQRKISKMAELAIELDDMTIITEKLRDMKNALSKLNHDIEEETQRIKAITTGSLKDIDRTTKEGMIETQLLIKGVLKEIVIDAAKRRCKVTFHNGRAITLPITENPSEDVTEAIQSLSEVTERGLIDVDEVII

SEQ ID NO: 26182 - DNA, 50 bp, Escherichia coli; identical to SEQ ID NO: 1887
  source 1..50: mol_type = genomic DNA

SEQ ID NO: 26183 - DNA, 40 bp, Escherichia coli; identical to SEQ ID NO: 5293
  source 1..40: mol_type = genomic DNA

SEQ ID NO: 26184 - DNA, 40 bp, Escherichia coli; identical to SEQ ID NO: 26084
  source 1..40: mol_type = genomic DNA

SEQ ID NO: 26185 - DNA, 50 bp, Escherichia coli; identical to SEQ ID NO: 26085
  source 1..50: mol_type = genomic DNA

SEQ ID NO: 26186 - protein, 452 aa, Listeria monocytogenes
MKAAIYIRVSTQEQIENYSIQAQTEKLTALCRSKDWDVYDIFIDGGYSGSNMNRPALNEMLSKLHEIDAVVVYRLDRLSRSQRDTITLIEEYFLKNNVEFVSLSETLDTSSPFGRAMIGILSVFAQLERETIRDRMVMGKIKRVESGLPLTTAKGRTYGYDVVDTKLYINEEEAQHLQLIYDIFEEEKSITFLQKRVKELGFKVKSYSSYNKWLMNDLYIGYVSYSDKVHVKGIHEPIISEDQFYRVQEIFSRMGKNPNMNKESSSLLNNLIVCEKCGLGYVHRAKDTVSRGKKYHYRYYSCKTYKHTHELEKCGNKIWRADKLEEIIISRVKNYSFATRNLDKEDELDSITEKLKTEHSKKKRLFDLYINGSYEVAELDKMMADIDAQINYYDSQIEANKELKRNKKVQESLAELATVDFDSLEFREKQIYLKSIINKIYIDGEQVTIEWI

SEQ ID NO: 26187 - DNA, 50 bp, Listeria monocytogenes
  source 1..50: mol_type = genomic DNA
tttagtacctcgatttctctctctggacggagaataaacgagaaactaaa

SEQ ID NO: 26188 - DNA, 40 bp, Listeria monocytogenes; identical to SEQ ID NO: 1298
  source 1..40: mol_type = genomic DNA

SEQ ID NO: 26189 - DNA, 40 bp, Listeria monocytogenes
  source 1..40: mol_type = genomic DNA
tttcggatcaagctatgagtcacgcaaagagggaactaaa

SEQ ID NO: 26190 - DNA, 50 bp, Listeria monocytogenes
  source 1..50: mol_type = genomic DNA
taaattatcctcttttctttcttttcaaggacaatataacataaactaaa

SEQ ID NO: 26191 - protein, 452 aa, Listeria seeligeri; identical to SEQ ID NO: 26186

SEQ ID NO: 26192 - DNA, 50 bp, Listeria seeligeri; identical to SEQ ID NO: 26187
  source 1..50: mol_type = genomic DNA

SEQ ID NO: 26193 - DNA, 40 bp, Listeria seeligeri; identical to SEQ ID NO: 21013
  source 1..40: mol_type = genomic DNA

SEQ ID NO: 26194 - DNA, 40 bp, Listeria seeligeri; identical to SEQ ID NO: 21014
  source 1..40: mol_type = genomic DNA

SEQ ID NO: 26195 - DNA, 50 bp, Listeria seeligeri; identical to SEQ ID NO: 26190
  source 1..50: mol_type = genomic DNA

SEQ ID NO: 26196 - protein, 452 aa, Listeria seeligeri
MKAAIYIRVSTQEQIENYSIQAQTEKLTALCRSKDWGVYDIFIDGGYSGSNMNRPALNEMLSKLHEIDAVVVYRLDRLSRSQRDTITLIEEYFLKNNVEFVSLSETLDTSSPFGRAMIGILSVFAQLERETIRDRMVMGKIKRVESGLPLTTAKGRTYGYDVVDTKLYINEEEAQHLQLIYDIFEEEKSITFLQKRVKELGFKVKSYSSYNKWLMNDLYIGYVSYSDKVHVKGIHEPIISEDQFYRVQEIFSRMGKNPNMNKESSSLLNNLIVCEKCGLGYVHRAKDTVSRGKKYHYRYYSCKTYKHTHELEKCGNKIWRADKLEEIIISRVKNYSFATRNLDKEDELDSITEKLKTEHSKKKRLFDLYINGSYEVAELDKMMADIDAQINYYDSQIEANKELKRNKKVQESLAELATVDFDSLEFREKQIYLKSIINKIYIDGEQVTIEWI

SEQ ID NO: 26197 - DNA, 50 bp, Listeria seeligeri; identical to SEQ ID NO: 26187
  source 1..50: mol_type = genomic DNA

SEQ ID NO: 26198 - DNA, 40 bp, Listeria seeligeri; identical to SEQ ID NO: 21013
  source 1..40: mol_type = genomic DNA

SEQ ID NO: 26199 - DNA, 40 bp, Listeria seeligeri; identical to SEQ ID NO: 21014
  source 1..40: mol_type = genomic DNA

SEQ ID NO: 26200 - DNA, 50 bp, Listeria seeligeri; identical to SEQ ID NO: 26190
  source 1..50: mol_type = genomic DNA

SEQ ID NO: 26201 - protein, 678 aa, Vibrio splendidus
MSSNLSNTTTPKIYSYTRVSTLEQKKGSGVAMQINDKVLEALALEHQLPLAEETYQDLGKSAFHGQHLKHELGTFLQAIKDGVIAKGSIIVVYSLDRLSRLEIGHAKQTYLDLTNNGVSVYSIVDNHLYRAHNAADDIIATITFERAHNESKNKSSRMIDAAKQSLKRWKETGEPQSSLGRSPFWIDQPTHEFNINAAGVKKAIEMKIAGYGDLKIKKYLDNHFEYKPTRTKGKVKQSNTWDYIVISQLWSRRSLTGEKSYTIEGFTHVMENYYPALIDDDTFRRLQVKNTKKQGRDTSSGKIPLLKSLARCGTCGGAMVFVDKGESRINYVCNLAMKGEHAREVYNVNMLDLLTLEVCKDAYLSESSKSHNIHAEQQKLKLETELFEQQESRDNLRDYYKATPSKTLLDLIVDSESKIIELEAKLDAINTNTVELNADELSNLPEVYTESIRTDYLNPTRHEIRNNLRRFISSITLNRSEEPCPDAKTKVANCIDITWHFKNAQKRRLAMLPYQFTKAEEGDKTLYLPYAYMYGSKSNIKVEDGDQFLSNIFNKLHSLDLTRFLYPSRGRYQWSNLNLECGNTYWAPLDRAVFIEKGMEHIAFTERGTPNEAGHAANYLSLMFNYPSSDGGAYDYPDSKFIELACKFGFVEEHDFSLFLQDNQFNQELYSSLDFLMS

SEQ ID NO: 26202 - DNA, 50 bp, Vibrio splendidus
  source 1..50: mol_type = genomic DNA
ccaagaattttgttagtgttatagttcgctaataaaaaacagtttccttc

SEQ ID NO: 26203 - DNA, 40 bp, Vibrio splendidus
  source 1..40: mol_type = genomic DNA
tgaagaatatttgctgtggttcgataaaaaagggttcccc

SEQ ID NO: 26204 - DNA, 40 bp, Vibrio splendidus
  source 1..40: mol_type = genomic DNA
tgaagaatatttgctgtggcgcgataaaaaagggttcccc

SEQ ID NO: 26205 - DNA, 50 bp, Vibrio splendidus
  source 1..50: mol_type = genomic DNA
caaagagttaagagaatgatagagcgctataataaatttccttttcattc

SEQ ID NO: 26206 - protein, 480 aa, Romboutsia ilealis
MKKNVVLLRVSTDMQDFDAQKNGIDRYVKENNIVVHKTIEEKGVSGYKTKLEDREGLQELIQMALNDELNSIIVFNQDRLGRRLEILSFMTIMNEQNVKVYSVTEGILNEDNDTSELIQAIKFWTANYESKKTSLRVKNGKRATIEKNAYSGGVANFGYKVVDRKLVIDEEESEVVKFIYENYIDYGCKRTLELLEEKNILKRGEKWTKPKVFSILKNNIYRGKKQYQDELLDFPELQIISDAMFQKAQERAKSRNTRGTRRYTNRTDILFEGLLFHKCEDGLERKLNIDYVNTTAGRVHTYRCKHCKEIRAQITKNFNSAKIEPILIENIKSVMNSISIKELEQKYNEEITKSTRTIAKNIDIINKLIDKKKKAIDSAMKEIEKIFMGESNIDINIPSNMIKKIEGEIKELEEQLKVHQKELQDLGNTTSNAMYLLDRYKNFEYLFDNSTNEERKVILQDLVNKIVINKDEINIQLNIY

SEQ ID NO: 26207 - DNA, 50 bp, Romboutsia ilealis
  source 1..50: mol_type = genomic DNA
tgtgggtttatgttatcattcgcatcacctaataatacttaaaaccacta

SEQ ID NO: 26208 - DNA, 40 bp, Romboutsia ilealis
  source 1..40: mol_type = genomic DNA
aaatggaacaccatttgaatctgaaggatatattccaaat

SEQ ID NO: 26209 - DNA, 40 bp, Romboutsia ilealis
  source 1..40: mol_type = genomic DNA
aaatggaacaccatttgaagatgaaggatatattccaaat

SEQ ID NO: 26210 - DNA, 50 bp, Romboutsia ilealis
  source 1..50: mol_type = genomic DNA
tgaaaatttaactaacctttctcagaaccttataaagcaagaaaccacta

SEQ ID NO: 26211 - protein, 530 aa, Vibrio alginolyticus
MNKTKVYSYIRFSTSRQESGDSVRRQLEIARNYSEKVGGVYQDRSFSDMGISAFKQKERDGLQMMLDMVEDGSIEKGSHIVIERLDRLSRQGISVTQQLITQIVQHGVLLYVAGDNMLLERDSLNDLSIVIRVAVAADLAYKESLQKSQRIKASKIAKKKDGLDGRVTKKVCPFWLKFDEKKQEYVFSDKLPTIQRIIELRQQGFGENKMAQHLNDENVPPPRAAKWSPTSLRKLYTHPAIYGAWQTTEKTEDGKYINSDLIENYYPALLTYEEFMLMNPKSKATTAKDSGLNPFKGLLRCAKCGATMSRQTSKMRNGEKYVAYRCTNAGKGIYCDAVGYRDMDKYLVAACKRLKIKKTLSSDNREKESQLRALEAKLESLQQAILTQTDITALISTSQIVERQINELKATIKPAATVTVNELYSHRDNPQSFNLLARSLIQKVEVEVKAKNRHTKTLFAKFYQHNGYVITLTVLPSGDAFYSTTDLSPIIDNEDYEEPESTEIEEHDDSIANPDYDSSSWSKPVTQRNR

SEQ ID NO: 26212 - DNA, 50 bp, Vibrio alginolyticus
  source 1..50: mol_type = genomic DNA
gatatgctatcttagaactatacagtaatattgttggtaaatagcatatc

SEQ ID NO: 26213 - DNA, 40 bp, Vibrio alginolyticus
  source 1..40: mol_type = genomic DNA
cttagcgccgaattgttgagtaatattcgctgtggagatc

SEQ ID NO: 26214 - DNA, 40 bp, Vibrio alginolyticus
  source 1..40: mol_type = genomic DNA
cttagcgccgaattgttgaaaaatattcgctgtggagatc

SEQ ID NO: 26215 - DNA, 50 bp, Vibrio alginolyticus
  source 1..50: mol_type = genomic DNA
gttatcctaggaatggcctgcaaaaaaatactgctgacaaatagcatatc

SEQ ID NO: 26216 - protein, 530 aa, Vibrio alginolyticus
MNKTKVYSYIRFSTSRQESGDSVRRQLEIARNYSEKVGGVYQDRSFSDMGISAFKQKERDGLQMMLDMVEDGSIEKGSHIVIERLDRLSRQGISVTQQLITQIVQHGVLLYVAGDNMLLERDSLNDLSIVIRVAVAADLAYKESLQKSQRIKASKIAKKKDGLDGRVTKKVCPFWLKFDEKKQEYVFSDKLPTIQRIIELRQQGFGENKMAQHLNDENVPPPRAAKWSPTSLRKLYTHPAIYGAWQTTEKTEDGKYINSDLIENYYPALLTYEEFMLMNPKSKATTAKDSGLNPFKGLLRCAKCGATMSRQTSKMRNGEKYVAYRCTNAGKGIYCDAVGYRDMDKYLVAACKRLKIKKTLSSDNREKESQLRALEAKLESLQQAILTQTDITALISTSQIVERQINELKATIKPAATVTVDELYSHRDNPQSFNLLARSLIQKVEVEVKAKNRHTKTLFAKFYQHNGYVITLTVLPSGDAFYSTTDLSPIIDNEDYEEPESTEIEEHDDSIANPDYDSSSWSKPVTQRNR

SEQ ID NO: 26217 - DNA, 50 bp, Vibrio alginolyticus; identical to SEQ ID NO: 26212
  source 1..50: mol_type = genomic DNA

SEQ ID NO: 26218 - DNA, 40 bp, Vibrio alginolyticus; identical to SEQ ID NO: 26213
  source 1..40: mol_type = genomic DNA

SEQ ID NO: 26219 - DNA, 40 bp, Vibrio alginolyticus; identical to SEQ ID NO: 26214
  source 1..40: mol_type = genomic DNA

SEQ ID NO: 26220 - DNA, 50 bp, Vibrio alginolyticus; identical to SEQ ID NO: 26215
  source 1..50: mol_type = genomic DNA

SEQ ID NO: 26221 - protein, 484 aa, Streptococcus agalactiae; identical to SEQ ID NO: 3001

SEQ ID NO: 26222 - DNA, 50 bp, Streptococcus agalactiae; identical to SEQ ID NO: 3002
  source 1..50: mol_type = genomic DNA

SEQ ID NO: 26223 - DNA, 40 bp, Streptococcus agalactiae; identical to SEQ ID NO: 22358
  source 1..40: mol_type = genomic DNA

SEQ ID NO: 26224 - DNA, 40 bp, Streptococcus agalactiae
  source 1..40: mol_type = genomic DNA
aaccaatgctaccaaacattataaaagtgtaaatgcttta

SEQ ID NO: 26225 - DNA, 50 bp, Streptococcus agalactiae
  source 1..50: mol_type = genomic DNA
gcttgagtcagatttaacaaacattataaaatcatatgtatcacacatat

SEQ ID NO: 26226 - protein, 558 aa, Agrobacterium tumefaciens
MTLAYSYARISSKKQLGGDGLRRQVEAAEKYALEHGLEIDTSLSDVASGFHQDHVKFGALGGFLELVKTGKIAEGSVLIVESLDRLSRADVITAQQQLLGIIQTGIEVVTLVDGYRYSRNKDFSQLIISLMSMARAYDESQVKSVRGKAYLAQLHSDVKAGIKARVHHLPSWLEQTQIGASKEYEFTLRASASTIRKIFELYDAGYGIAKIAIWLNDNGVLTLQESRRDNPDPSKIWRRKVVGEILNSVAVRGDLAIGDAVVEGYYPAAVDPVTWWRVNDRYNNKSKKATNGRTGLGYTNLFAGISKCFHCRGPARVIGGGSGHRYITCEKIKETGVACTGEGRYGKTSLRYDVLEKAVLDNVATYCHLPETPTVSADDLRRRMNEVRDGIADIDKRISNIIAMAEVADHPDDRTDLMTRLKALRSDKSRQSTELERMAVEIRDIETVRDDFTTIHKTIEDERLKWGSLTGDDLYSSRQLVASKLREIVSVVSIDVLDQLAYVAVGGATRGWTLDRDGRVVGKFDFSHLPLETLQKITSGVGLKASSEMIKRVKAAGA

SEQ ID NO: 26227 - DNA, 50 bp, Agrobacterium tumefaciens
  source 1..50: mol_type = genomic DNA
aaattgacaagagttaccttgatgaatatcaaaggtacacttgtcagttt

SEQ ID NO: 26228 - DNA, 40 bp, Agrobacterium tumefaciens
  source 1..40: mol_type = genomic DNA
aaaaaggatgtccttgatgaatctcaatctgccgcaattt

SEQ ID NO: 26229 - DNA, 40 bp, Agrobacterium tumefaciens; identical to SEQ ID NO: 26228
  source 1..40: mol_type = genomic DNA

SEQ ID NO: 26230 - DNA, 50 bp, Agrobacterium tumefaciens
  source 1..50: mol_type = genomic DNA
aaattgacacctgacacatttattaattttaaaggtactgtttttacttt

SEQ ID NO: 26231 - protein, 503 aa, Clostridium perfringens
MKRIAIYSRKSVFIEGSISIETQINMCKEYMISKFPDATFEIFEDEGFSGGNTNRPAFQKMLKLAELKEIDIVVCYKIDRIARNTLDFLNILEIFKKNNVELVSITEGFDPNTQMGKVMLTLLASFAEMERTNIQQRVKDSMFSLAQKGNWTGGAPPLGFKVKESGGIEIDNKNLILDVFNMKFKKYKNTEIIEYIESKYNHRFVNTTLASMLRKPVYAKSSKEISTYLKTKGYKILREENNSNSYYTYKNNNQDYAIVNNDIEGLIDPYVWISINKAMDDNSNGETNRFSEKFWLTKTLRCKYCGKTYFGQTKIVKSKYTNKDGVSKEYIGTYEYYMCRDMLKGRLKTCENTKRLKKVDLEKKIEELIYILKDRSIFEKKYYKKEVDNPAKELKELESNMKKLDKTINNLTDKIALLSNDAAMILIDKIETLVKEKKVLKDKMIKIELESLDNIDGKEEFIYENILEFNTNLSVDQKRNIAINIFKEIVYDYKTDKFEVFFN

SEQ ID NO: 26232 - DNA, 50 bp, Clostridium perfringens
  source 1..50: mol_type = genomic DNA
tttgttcaacttagaagtgtagcacttccaccaatgtttattttaacaaa

SEQ ID NO: 26233 - DNA, 40 bp, Clostridium perfringens; identical to SEQ ID NO: 6243
  source 1..40: mol_type = genomic DNA

SEQ ID NO: 26234 - DNA, 40 bp, Clostridium perfringens
  source 1..40: mol_type = genomic DNA
tttcatatccattgaaacaaatccaccagtagcgtggaag

SEQ ID NO: 26235 - DNA, 50 bp, Clostridium perfringens
  source 1..50: mol_type = genomic DNA
tttgttccatatcaaagaatatcaaatccacacattttattttcagcaaa

SEQ ID NO: 26236 - protein, 531 aa, Yersinia aleksiciae
MRIPVLYIRVSSSKQVQDGGGLDDQLSAGESYIKSIPDLDYGRIQILRDEGISSFKGGNLEEGMPLREFVEQRLTKKDGDNYALIVYSVDRISRMNPWASSQFIGQTIMSGVHIHDISSRQILRQDDHIGSIISTLNLMRANSESALKSKRRLDSIESSIAESLKTGEALKGKLPKWLYIEDKKYKVKEDLAKTISDAVDMYIGGHTSGEIVKKLNESGRLYGDKEWSGPFLIKLIKSPTIMGTYTRIKDGVPLSYHNFYPAIVSNEKFEKVNALIKSVGAHITKHRVDKGRVSNLFSGFFLCAECGGVININRHSTIVKYFTCSNNYRRKLCTAKKGNYLSVERAVLEHIKGLDLSSLLTNSVDTSEIDLEITQVRNNIHSLEESISRRKKDGKLIPVEIFEALADSREKLSNLKESLPQVPLVDNISIGYVDSILDDVHPSRGLIHRGISDIVKNIKVYRVGQFIILSISYERIPDVHVIIIDNSSGKVLSAVSQTDKIVELYGIEDYKSIVGDFIDKLPNNYLRFNRK

SEQ ID NO: 26237 - DNA, 50 bp, Yersinia aleksiciae
  source 1..50: mol_type = genomic DNA
ttagatgtatctcaaactttagtcgtgataaactccagtgaaacatcaaa

SEQ ID NO: 26238 - DNA, 40 bp, Yersinia aleksiciae
  source 1..40: mol_type = genomic DNA
tgcggacttaaccttagtggtgacgacggtgtcatcaata

SEQ ID NO: 26239 - DNA, 40 bp, Yersinia aleksiciae
  source 1..40: mol_type = genomic DNA
tgcggacttaaccttagtgcagacgacggtgtcatcaata

SEQ ID NO: 26240 - DNA, 50 bp, Yersinia aleksiciae
  source 1..50: mol_type = genomic DNA
ttaaatgcataactaactttcctccaaataagccccaaacaaacaagaaa

SEQ ID NO: 26241 - protein, 531 aa, Yersinia enterocolitica; identical to SEQ ID NO: 26236

SEQ ID NO: 26242 - DNA, 50 bp, Yersinia enterocolitica; identical to SEQ ID NO: 26237
  source 1..50: mol_type = genomic DNA

SEQ ID NO: 26243 - DNA, 40 bp, Yersinia enterocolitica
  source 1..40: mol_type = genomic DNA
cgctgatttcactttagtcgtgaccacagtgtcatccaga

SEQ ID NO: 26244 - DNA, 40 bp, Yersinia enterocolitica
  source 1..40: mol_type = genomic DNA
cgctgatttcactttagtccagaccacagtgtcatccaga

SEQ ID NO: 26245 - DNA, 50 bp, Yersinia enterocolitica; identical to SEQ ID NO: 26240
  source 1..50: mol_type = genomic DNA

SEQ ID NO: 26246 - protein, 507 aa, Escherichia coli
MKRVISYIRFSSERQAKGDSLRRQSKMVNDWLKAHPEYYLDQDLSFRDLGVSGFTGKHLKGGLGDFLTAIEKGLVKAGDTLLIESLDRLSRQAVDRASELLRNILRSGVDVVTLSDGEHYTSESLKDPLALIKSILIMQRAHEESLRKSERIQAAWDAKKEAAKAGIKVSKRCPAWLKLNDDRKSFSVIPEKVETVKRCFQLRLEGKSIWEIVRTLNDEGRQTLNQYKPGKFGQTSVQDLLKNRSVIGYFTPKGREEIAGYFPSIIHETDFYKVQQLSYARHGRKPASAKPLSVNLFKGVIRCSECGHALIITGFSDTRSGIYRCPLRNENRCSAKGLSRKQTDGTLLTLLSRLDRFDSDTTNTIDTLKLHREHISSNIEKLVQLSLEIEDLSAITSKLKQLKNELSQVDADIEKETQRLKSIDVGCLSDCDLTTKAGRIEAQLIIKSAVKEVVLNTAKRRCKVTFHNGKVIGLSITENPSEDVTEAIQSLSEVTERGLIDVDVVEI

SEQ ID NO: 26247 - DNA, 50 bp, Escherichia coli
  source 1..50: mol_type = genomic DNA
tagtgtatttagaccttgatgattttaattaggcacgtttaaatacacta

SEQ ID NO: 26248 - DNA, 40 bp, Escherichia coli; identical to SEQ ID NO: 5188
  source 1..40: mol_type = genomic DNA

SEQ ID NO: 26249 - DNA, 40 bp, Escherichia coli
  source 1..40: mol_type = genomic DNA
cggcgttaatcgggtgattccagacagccgcccggttcat

SEQ ID NO: 26250 - DNA, 50 bp, Escherichia coli
  source 1..50: mol_type = genomic DNA
aagtgtattttacacttgaactttccagataggaagagtccaatacaata

SEQ ID NO: 26251 - protein, 500 aa, Anoxybacillus caldiproteolyticus
MLTTKTALKVAIYVRKSREDEEGAEETLYNQRETLIRLAESKGYNYDIFQEVESSVKWHRPELTKMIEGILQGKYSRVLVTHVDRLSRDERDLAELKEIFTEHEVIIETPDNVIDFSDENQELWFGFTSVLSAYEYKRIRQRLIQGKYNAVAIKNRWIGSVTPLGYTWDKNIKKLIVNPDEAKIVRKMVDLALLGYSSRQIADKLNKLGYRTRKGNPFRTDKVLRTLQNRVYLGEAKYNSKRLKKTAVAENCHEPLMTGDEFNQIQSLLKSRRSKENLYSLGVKSCVNKLLVCGVCGKGLTIQKNNKVKKSGKDASFYQIRPCLHHLDLETKCYNKGCKVDKVENAVKEALIQYKGELEKSLINLLAKDTSDIEKRFNETLESLQSDLVNQEKKEKRLKDLYIDGDIDKEEYQKRKKQIDDTITALQNEIAVTKSKLKTLDATAQISRVKNILSMIDNFEEMELEEQNATLKLLISKIVFTKTPETNNQPKIEIHWREAF

SEQ ID NO: 26252 - DNA, 50 bp, Anoxybacillus caldiproteolyticus
  source 1..50: mol_type = genomic DNA
aagggtgtactgtatgtattccatttatgaaaaacacatagtacatccca

SEQ ID NO: 26253 - DNA, 40 bp, Anoxybacillus caldiproteolyticus
  source 1..40: mol_type = genomic DNA
gacttgggcttgaactgttttgataaacgcttcgcaccct

SEQ ID NO: 26254 - DNA, 40 bp, Anoxybacillus caldiproteolyticus
  source 1..40: mol_type = genomic DNA
gacttgggcttgaactgttatgataaacgcttcgcaccct

SEQ ID NO: 26255 - DNA, 50 bp, Anoxybacillus caldiproteolyticus
  source 1..50: mol_type = genomic DNA
tagaaattataatgtgtattacatatatgaataatatataataaatccca

SEQ ID NO: 26256 - protein, 542 aa, Pseudomonas fluorescens
MHSLHGVQSIMPVKNTLPRAFSDVFRDDETINVYSYIRFSSKAQSLGFGEIRQLEQLNRFFEQYPTARQVERYEDLGVSAFRGKNLKSGQLAKFVGRIKSKEILPNALLLVESFDRISRMGGYDALELIISIIQSDCAIYTLFDNRLYSKRKKDSSVDISLIQNILERANDESKSKSERISDAKARNLEKGENGGIITKRCPFWISFVDDKFVLNEHAKAVKRMTELCFDFGFQSIAKELNKENHTKKYTDSTIGKVLHKHAIYGSFLAMKNDENGNRTIVNKEIRNYYPAIISESEFHRISEKLKERQDPSLAGRKAQEFRNILRGLVFCKCGSTFRFHAQKGLYVDLVCHSSTLGQCKYALPGKGIRHRYARIEEIFLAYQSLIPFHKIIVKNEDIKALEKEHQEILGQIIIKEKALANNFSILEKSSDSAQKYITNRIDEVSQELDKLKADEHKLNLKINSLHLATKSDLKSIEIYRLLITEKGRIRINNFLHSQKIKLIITPVKKKFFALDIYHDDKHIDTIDVTPDGYTAHHKPHLK

SEQ ID NO: 26257 - DNA, 50 bp, Pseudomonas fluorescens
  source 1..50: mol_type = genomic DNA
tttttacaaattccgccattgattgcaatgacaggaggcttttgtataaa

SEQ ID NO: 26258 - DNA, 40 bp, Pseudomonas fluorescens
  source 1..40: mol_type = genomic DNA
ttcgagcatgccgatcacggcattcattggcgtacggatc

SEQ ID NO: 26259 - DNA, 40 bp, Pseudomonas fluorescens
  source 1..40: mol_type = genomic DNA
ttcgagcatgccgatcacgctattcattggcgtacggatc

SEQ ID NO: 26260 - DNA, 50 bp, Pseudomonas fluorescens
  source 1..50: mol_type = genomic DNA
tttatacaacataaaacattcactcttatgacagtatacatctgaataaa

SEQ ID NO: 26261 - protein, 535 aa, Flavonifractor sp An10
MKQPYNTALYMRLSRDDENYGDSVSIETQRTILQQYAKEHGLSVYGEYVDDGWSGTNFERPSFQRMMDDVEAGKVNCIITKDLSRFGREHVMMDYYLEFVFPEKQIRYIAVAENEDTEKGLSDFVPFKNLFNEWFAKDTSRKVKTALRAKFAAGERTFAYAPLGYIRHPEVKNTLAIDEETRWIIEKIFDLAFHGAGAAKITKTLIAEKVPTAGWLNYQRYGTFANVYAHAPEEKSYAWTIAQVKSILQDETYIGNSVHNKQTNISYKNKKKVRKPKEEWIRVENTHEAIISRDVFEQVQKQIASRRRQQKDATTQIFAGLVKCADCGWSMRFGTNRQNKTPYSHFTCSQYGQMGTQCSAHYIRYDTLYVYVLSRIQYWSHRAQLSEEKLLQQILKNGDRERMTAAKRQESELKRAEKRKAEVDGKFVRMYEDWSAGRITEYNFNLLTKKYQTEQLELEEKISCLQAELSAEQQTALDAEKWVALIKQYANPTELTAELLNTLIEKIVIHEATKGEDSMREQEIEIYYRFIGKID

SEQ ID NO: 26262 - DNA, 50 bp, Flavonifractor sp An10
  source 1..50: mol_type = genomic DNA
ccatatctttaactttgggaaaccggagtttcccatagttaaggatatca

SEQ ID NO: 26263 - DNA, 40 bp, Flavonifractor sp An10
  source 1..40: mol_type = genomic DNA
ggtcagcaagtgggagagaggcatgtcctacccggacatc

SEQ ID NO: 26264 - DNA, 40 bp, Flavonifractor sp An10
  source 1..40: mol_type = genomic DNA
ggtcagcaagtgggagagatacatgtcctacccggacatc

SEQ ID NO: 26265 - DNA, 50 bp, Flavonifractor sp An10
  source 1..50: mol_type = genomic DNA
acatattttaatggttgagaaaaataagtttctgctgaaataggatataa

SEQ ID NO: 26266 - protein, 575 aa, Bacteroides vulgatus; identical to SEQ ID NO: 13316

SEQ ID NO: 26267 - DNA, 50 bp, Bacteroides vulgatus; identical to SEQ ID NO: 13317
  source 1..50: mol_type = genomic DNA

SEQ ID NO: 26268 - DNA, 40 bp, Bacteroides vulgatus
  source 1..40: mol_type = genomic DNA
gccaggttgttgtctatcggtaattcaccatcatccaagt

SEQ ID NO: 26269 - DNA, 40 bp, Bacteroides vulgatus
  source 1..40: mol_type = genomic DNA
gccaggttgttgtctatcgtaaattcaccatcatccaagt

SEQ ID NO: 26270 - DNA, 50 bp, Bacteroides vulgatus
  source 1..50: mol_type = genomic DNA
agtagttcctcaaaatgttaaatatagagttaacatataactccacaatt

SEQ ID NO: 26271 - protein, 596 aa, Burkholderia pseudomallei
MPVAYSYIRFSTPDQIKGDSLRRQLEASARYAADHGLTLDDSLNVRDLGVSAFTGSNFERGALGQFVTAINEGRVAPDSYLLVESLDRLSRLPVTEALAVFQTIINLGVTIVTLVDSTVYSKDRLRNDWTPLLVALVSMSRAHEESAVKSRRVKAAWDAKKERVKTKKEVMSGRCPWWLKPSADNSRYEIIEEKAETVRLIFNLAKDGLGGEAIAKQLNVRNVPTAQHAKRWQNSTVQFNLRNIAVVGVLQLDQDSNGRTTTNTFVEDYYPPVIDKALFYEVQALRAERNRNKNTMSAGRKGQCYNIFQGTAKCGYCGSPMHLRRKPGMNSGFLYCSKSLQGGGCVGVSYNIRNLEAEFIEFTRELDLSHVLGDTSADNACSEKKASLSASNAMLEEAQTKMANLLDAIEAGGDMPILIQRLRDVEAQVNDLKKQRLALQSEVEILSNTSRDEQVSLEMLSQLMEQLGSKESDLEEKLRLRFRMLGEVQKVVRRLDLFPGGPMLAQDEIDALRSQLQSGGFDNGRIDDYLTQLPIKPDRSARYFIAHLRNGISRTVRQGQVIETDSARSQKVRSAIHGVVNEAANRDDETLLPSGR

SEQ ID NO: 26272 - DNA, 50 bp, Burkholderia pseudomallei
  source 1..50: mol_type = genomic DNA
tgatgtcaaattagccaaaatatcaagattggatggtcaatttgacaacc

SEQ ID NO: 26273 - DNA, 40 bp, Burkholderia pseudomallei
  source 1..40: mol_type = genomic DNA
gtactacgcgcatccgcgcaatcagttctggcggctcttg

SEQ ID NO: 26274 - DNA, 40 bp, Burkholderia pseudomallei
  source 1..40: mol_type = genomic DNA
gtactacgcgcatccgcgcagtcagttctggcggctcttg

SEQ ID NO: 26275 - DNA, 50 bp, Burkholderia pseudomallei
  source 1..50: mol_type = genomic DNA
tcctgtgaaaagggacaaaaaatcaggagtgaatgagacctttgagaacc

SEQ ID NO: 26276 - protein, 521 aa, Streptococcus agalactiae
MKKVITIEPAKQVTHKVDLPSFTKRRVAGYARVSTDHEDQTTSYEAQMTYYTDYINSRSDWEFVKMYSDEGISGTNTKKRLGFQEMVEDALVGKVDLILTKSVSRFARNTVDSLSTVRKLKEAGVEIYFEKENIWTFDSKGELLITIMSSLAQEESRSISENVTWGRRRQLAEGQVTFSYSQVLGFKKSDTGGFEIDQEEAKIVRYIFHQVLLGNNPNKIARELTAQGIPTPQGKRKWSYGTVKRMLRNEKYKGDALLQKSFTTDFLTKSTKPNEGELPQYYVENNHEAIIKREVFDLVQVELDKLEKKRQTNNIFTGRLFCGDCGSAFGSKVWHSTSKYKRTIYQCNAKYKGEHKCQTPHVTEEEIKGWFLSAMNQLLSNREEIVANTELLIDLAKDTSPLENKIDDLEQQLETIRQDIEDLVDRNARKAQNQDLYQEQYDTLVTAYQERQKELQEATSSLEEQKSKQLSLDGFIQQLKQQEDLITDFNQELWQTSVERLDIKEGKKISLTFKNGVRIDL

SEQ ID NO: 26277 - DNA, 50 bp, Streptococcus agalactiae
  source 1..50: mol_type = genomic DNA
tgtatgattaaattgatagcaacagaaatcggaataaggaaattgataca

SEQ ID NO: 26278 - DNA, 40 bp, Streptococcus agalactiae; identical to SEQ ID NO: 21358
  source 1..40: mol_type = genomic DNA

SEQ ID NO: 26279 - DNA, 40 bp, Streptococcus agalactiae; identical to SEQ ID NO: 21358
  source 1..40: mol_type = genomic DNA

SEQ ID NO: 26280 - DNA, 50 bp, Streptococcus agalactiae
  source 1..50: mol_type = genomic DNA
ggaatgatgttagcgatagtcacagaaaccagaatagtaccattgataat

SEQ ID NO: 26281 - protein, 521 aa, Streptococcus dysgalactiae
MKKVITIEPAKQVTHKVYLPSFTKRRVAGYARVSTDHEDQTTSYEAQMTYYTNYINSRSDWEFVKMYSDEGISGTNTKKRLGFQEMVEDALDGKIDLILTKSVSRFARNTVDSLSTVRKLKEAGVEIYFEKENIWTFDSKGELLITIMSSLAQEESRSISENVTWGRRRQLAEGQVTFSYSQVLGFRKSDMGGFEIDQEEAKIVRYIFHQVLLGNNPNKIARELTAQGIPTPQGKRQWSYGTVKRMLRNEKYKGDALLQKSFTTDFLTKSTKPNEGELPQYYVKNNHEAIIKREVFDLVQVELDKLEKRRQTSNIFTGRLFCGDCGSAFGSKVWHSNSKYKRTIYQCNAKYKGEHKCQIPHVTEEEIKGWFLSAMNQLIDNREEIIANTELLIDMAKDTSSLEARNDDLEHHLETIRQDIGDLVDRNARKAQNQELYQEQYDTLVTTYQEKQKELQETRSALEEQKSKRLSLDGFIQQLKEQDDIITDFNQELWQTSVERLDIKEDKKISLTFKNGVKIDL

SEQ ID NO: 26282 - DNA, 50 bp, Streptococcus dysgalactiae; identical to SEQ ID NO: 18077
  source 1..50: mol_type = genomic DNA

SEQ ID NO: 26283 - DNA, 40 bp, Streptococcus dysgalactiae
  source 1..40: mol_type = genomic DNA
cattaacgtttttgcaacagatatggatggcgctttttta

SEQ ID NO: 26284 - DNA, 40 bp, Streptococcus dysgalactiae; identical to SEQ ID NO: 26283
  source 1..40: mol_type = genomic DNA

SEQ ID NO: 26285 - DNA, 50 bp, Streptococcus dysgalactiae; identical to SEQ ID NO: 26280
  source 1..50: mol_type = genomic DNA

SEQ ID NO: 26286 - protein, 521 aa, Streptococcus suis; identical to SEQ ID NO: 14436

SEQ ID NO: 26287 - DNA, 50 bp, Streptococcus suis; identical to SEQ ID NO: 14437
  source 1..50: mol_type = genomic DNA

SEQ ID NO: 26288 - DNA, 40 bp, Streptococcus suis
  source 1..40: mol_type = genomic DNA
agttcgattaattgcaacagacatggatgggaccttttta

SEQ ID NO: 26289 - DNA, 40 bp, Streptococcus suis; identical to SEQ ID NO: 26288
  source 1..40: mol_type = genomic DNA

SEQ ID NO: 26290 - DNA, 50 bp, Streptococcus suis; identical to SEQ ID NO: 26280
  source 1..50: mol_type = genomic DNA

SEQ ID NO: 26291 - protein, 524 aa, Vibrio parahaemolyticus
MKTAYSYIRFSSKAQELGDSLRRQLDDTRRYCTEHNLKLSETSYQDLGISAFKDRDRASLEDMLSAIKNGSIQHGSVIILESVDRLSRAGIDKTQEIVKSILRHDVEIVSLHDGLHLTKDSLNDLIAVIRLAASADLAHQESVKKAERVKAAKKRQKDDARQGKAIKKRLVWWLSRESDTYKLNENAQYVRKMIKLRQQGAGYHKIAMKLNELGIQTRYGKTWSDTAVREMLSHDALYGGYQVGTVKDGKFIKEELIHNYYPPLISYSEFKELQSEYVNRTGGHKKHNHLSGLVRCGHCGSAMQKKLSKRTTKKRTIEYKQWICVASVSGGCEFKNGIRDLDEHIFKVAKNLVIENSATISEAEDTAIARVDELQSRLIMQKDKLANADGVTFDLILEATERTKAELDSASSHLAQLQANSRDITTEDVDRLAEYSDDAVRFNLHLKKLIQRIVVSKKGDNLWHVKLFQRNQHTVNLTVFRETQRSAFKYYLSGSEDRASLIEDAKRGFAEMHEWEKDYCDEVT

SEQ ID NO: 26292 - DNA, 50 bp, Vibrio parahaemolyticus
  source 1..50: mol_type = genomic DNA
gtttctcactttacaagattaactgtgataaacttcttgaactagacaac

SEQ ID NO: 26293 - DNA, 40 bp, Vibrio parahaemolyticus; identical to SEQ ID NO: 8018
  source 1..40: mol_type = genomic DNA

SEQ ID NO: 26294 - DNA, 40 bp, Vibrio parahaemolyticus
  source 1..40: mol_type = genomic DNA
cgccggggccaaattgaccttaatgcgcttggctggaaac

SEQ ID NO: 26295 - DNA, 50 bp, Vibrio parahaemolyticus
  source 1..50: mol_type = genomic DNA
acttaacacttcaaaacatcacctttgatagacttcttattctaaacaac

SEQ ID NO: 26296 - protein, 524 aa, Vibrio campbellii; identical to SEQ ID NO: 26291

SEQ ID NO: 26297 - DNA, 50 bp, Vibrio campbellii; identical to SEQ ID NO: 26292
  source 1..50: mol_type = genomic DNA

SEQ ID NO: 26298 - DNA, 40 bp, Vibrio campbellii
  source 1..40: mol_type = genomic DNA
cgcaggtgccaaattgaccgtgattcgttttgcaggaaac

SEQ ID NO: 26299 - DNA, 40 bp, Vibrio campbellii
  source 1..40: mol_type = genomic DNA
cgcaggtgccaaattgaccttgattcgttttgcaggaaac

SEQ ID NO: 26300 - DNA, 50 bp, Vibrio campbellii; identical to SEQ ID NO: 26295
  source 1..50: mol_type = genomic DNA

SEQ ID NO: 26301 - protein, 556 aa, Ruminococcus callidus
MAMMNEMEYRTIGKALAGGYRAAVYCRLSKDDDLQGESASIANQRDMLEKYCEKQGWEVVAVYQDDGFTGLNMERPDLQRMLRAIERRQINLVITKDLSRLGRNYLQTGHLIEDFFPRNGVRYIAMNDGIDTLRDNNDIAPFKNILNEMYSKDISKKVHSSYLLKAQKGQFTGCLAPFGYRKDPEDKNHLLIDEETAPIVRLIFGYALNGHGPNYIRRRLEEEKIPCPTWWNRERGLRNTRTKWEKKDPENGRYMWDFSVIKDLLMNPVYTGAIASQKKDYRFKIGTIGEKKPEDWIVVEGQHEPLIDRMSFDIVQNKLKSRQRPGQTNEISLFAGLLKCGECGKSLTVRYTNAKHPQQIYSCKTYNAFGKNHCTQHRIDYDTLYSHVLRKIRECARAALMDGEAVADRLTNTCEAEQREQREAMERSLTRDEERIEVLDKMVMRLYEDMIAGRISEQNFNTMLEKTQTEQTELKAKVSEGRKRLSDEVQLANDAKQWVEAIQEYANITELDAATLNRLIKEIVVHERIDEDKTRHISIEIHFNLKPIPEVEQVTA

SEQ ID NO: 26302 - DNA, 50 bp, Ruminococcus callidus; identical to SEQ ID NO: 13042
  source 1..50: mol_type = genomic DNA

SEQ ID NO: 26303 - DNA, 40 bp, Ruminococcus callidus
  source 1..40: mol_type = genomic DNA
aaagtcgcagggtatgaaacagctcatggctggtttggca

SEQ ID NO: 26304 - DNA, 40 bp, Ruminococcus callidus
  source 1..40: mol_type = genomic DNA
aaagtcgcagggtatgaaaatgctcatggctggtttggca

SEQ ID NO: 26305 - DNA, 50 bp, Ruminococcus callidus
  source 1..50: mol_type = genomic DNA
ttttacaaaccaacagctagaataatgttcctagcttaagagttggaaca

SEQ ID NO: 26306 - protein, 480 aa, Streptococcus mutans
MIATNKVAIYIRVSTTNQAEEGYSIEEQQEKLKAYCAIKDWSIYNVYIDGGFTGSNTDRPELKRLVREAKNKKFDTVLVYKLDRLSRSQKDTLYLIEEVFTKNNIAFLSLLENFDTSSAFGKAMIGILSVFAQLEREQIKERMQLGKVGRAKSGKSMMWAKPSYGYIYHQETGEMTVDEYESIAIKFIFSSYLAGRSITKLRDDLNKKYPKKIAWNYKMVRHILDNPVYCGNIRFKSEIYSGNHEAIISKEDFEKVQEELAIRQRTAAENSNPRPFQAKYMLSGIVQCGYCKAPLKIIMGAIRKDGTRFIRYECYQRHPRKIKGVTVYNDNKKCNSGYYDKKELEQYVLKEVSKLQEDKEYLESLFNVPDKSIERDKIQGQVNILENKISRLNDLYVDDRISLNELKIKSDNFLKMKAVLETELENDPAINQQKKKENMKKILKTKDILSINYEQQKAVIKALITKVQVTAENIIIKWKI

SEQ ID NO: 26307 - DNA, 50 bp, Streptococcus mutans
  source 1..50: mol_type = genomic DNA
tataaagaattttactatctaacatttctataagcgtaaaagctttaatt

SEQ ID NO: 26308 - DNA, 40 bp, Streptococcus mutans
  source 1..40: mol_type = genomic DNA
attgccaaagtcactaaactttctataagcgtaaaagctc

SEQ ID NO: 26309 - DNA, 40 bp, Streptococcus mutans
  source 1..40: mol_type = genomic DNA
attgccaaagtcactaaacagtctataagcgtaaaagctc

SEQ ID NO: 26310 - DNA, 50 bp, Streptococcus mutans
  source 1..50: mol_type = genomic DNA
aatagagaacaagtctatctgacaagtctatatgttatatctctttatta

SEQ ID NO: 26311 - protein, 540 aa, Cronobacter sakazakii
MPKAISYIRFSSRIQASGDSTKRQNKYINEWLKNNPDYHLDESLRFQDLGISGYSGANAKSGAFGEFLAAVESGVIEAGSVLLVESLDRVSRQDIDTARERLRKILLAGVDVVTLADNSWYKKESLNDPLSLIKAVLIMQRANEESATKSKRLRSAWDAKREEAAKGKIMSRRCVAWLRVSDDMSHFELIPDNVKAVQRVFQLRLEGLPFVRIARQMNEEGFYTLNQRNPVKGAWSHTTVKALLDNRSVIGFKVPSNCTVTKGVKEIPNYYPAVISEEHFYAVQQLKQGAGRRPSSEKPLLTNLFKGVMRCAECGFVTIVNCATEKWHGVYRCSMRYEGRCHAKSINRRLADKALVQGLLYNTNRLSLNRDNGSAIGSLQSELEQLQKQRERLIKLAMLADDTESMAKDLKALNSQIKDAEKAISDVHQREQSTQLETISHLDLTVKKDRIEAQIIIKRIVKEIRLNTAGKKCDVFLHNGLKLLNFPLDRVVDGAQWLEVLPLIDGDEFDFEGFTTKPRHIALEEAPNWVKEMEEQSNQP

SEQ ID NO: 26312 - DNA, 50 bp, Cronobacter sakazakii
  source 1..50: mol_type = genomic DNA
gttagtgattagagaattgtaattaggaccacgcatctcttatgataaac

SEQ ID NO: 26313 - DNA, 40 bp, Cronobacter sakazakii
  source 1..40: mol_type = genomic DNA
gttagtgtgaagcgtggagagcaccagatgcccggtctgc

SEQ ID NO: 26314 - DNA, 40 bp, Cronobacter sakazakii
  source 1..40: mol_type = genomic DNA
gttagtgtgaagcgtggagttcaccagatgcccggtctgc

SEQ ID NO: 26315 - DNA, 50 bp, Cronobacter sakazakii
  source 1..50: mol_type = genomic DNA
gttagtgcaaaagtaattgtaatttttaccactacttttaattgaagaac

SEQ ID NO: 26316 - protein, 520 aa, Citrobacter sp 92
MKKAVYCYARVSSRGQAKDGYGMSRQQEMLRDYVAAYDDSQHNRGYELGDISWLYAEGVSAYSGKNIEDGSVLKTFIDDVLQKKITNSVLVIENLDRFSRAAPNRAAGLFLSLINAGCDIHEVETEMIHHQYSDLNIISGGLQRAHNESKRKARLSIKNWDERIKNTIDGTSVLTHRVPSWIEVKNNKYVLKKGESEKYNLIFKMYADGFGPAAIRDELKKRGMQINEREPTINHLMKIIKDQRLIGRFNSTGRKILDGMSIYPVVVEPELFEAVNDLRKQRNPLGKINVKANNLFAGLCICMNCGRYVQVNSVDKKGDTYFRCGGSLVKIDKCKERGFKYKIVENALLEHLRNFDFSMLRSDDNDIQVKINYLSMELVSNEKYSNEILADLEKEDIPDPNDRRILKNIQRRISEIRNEITILKQLNIGYETFNDLKDSYTDDLLDPKNTKLRLDFNVKVKRVIKNIKMKRYDNTIMLVVSYVGVNEKQAMVINSKTGEVVFMAVQNDDLKSIEYLINNG

SEQ ID NO: 26317 - DNA, 50 bp, Citrobacter sp 92; identical to SEQ ID NO: 14297
  source 1..50: mol_type = genomic DNA

SEQ ID NO: 26318 - DNA, 40 bp, Citrobacter sp 92
  source 1..40: mol_type = genomic DNA
ggcaataatgccgatcaccaccatcagttcaataagggta

SEQ ID NO: 26319 - DNA, 40 bp, Citrobacter sp 92
  source 1..40: mol_type = genomic DNA
ggcaataatgccgatcacccacatcagttcaataagggta

SEQ ID NO: 26320 - DNA, 50 bp, Citrobacter sp 92
  source 1..50: mol_type = genomic DNA
tacagcaatgttgagttgataatacacattttaagaaataaaattctgtt

SEQ ID NO: 26321 - protein, 520 aa, Citrobacter koseri
MKKAVYCYARVSSRGQAKDGYGMSRQQEMLRDYVAAYDDSQHNRGYELGNISWLYAEGVSAYSGKNIEDGSVLKTFIDDVLQKKITNSVLVIENLDRFSRAAPNRAAGLFLSLINAGCDIHEVETEMIHHQYSDLNIISGGLQRAHNESKRKARLSIKNWDERIKNTIDGTSVLTHRVPSWIEVKNNKYVLKKGESEKYNLIFKMYADGFGPAAIRDELKKRGMQINEREPTINHLMKIIKDQRLIGRFNSTGRKILDGMSIYPVVVEPELFEAVNDLRKQRNPLGKINVKANNLFAGLCICMNCGRYVQVNSVDKKGDTYFRCGGSLVKIDKCKERGFKYKIVENALLEHLRNFDFSMLRSDDNDIQVKINYLSMELVSNEKYSNEILADLEKEDIPDPNDRRILKNIQRRISEIRNEITILKQSNIGYETFNDLKDSYTDDLLDPKNTKLRLDFNVKVKRVIKNIKMKRYDNTIMLVVSYVGVNEKQAMVINSKTGEVVFMAVQNDDLKSIEYLINND

SEQ ID NO: 26322 - DNA, 50 bp, Citrobacter koseri; identical to SEQ ID NO: 14297
  source 1..50: mol_type = genomic DNA

SEQ ID NO: 26323 - DNA, 40 bp, Citrobacter koseri; identical to SEQ ID NO: 6228
  source 1..40: mol_type = genomic DNA

SEQ ID NO: 26324 - DNA, 40 bp, Citrobacter koseri
  source 1..40: mol_type = genomic DNA
ggcgataatgccgatcacccacatcagttcgataagcgta

SEQ ID NO: 26325 - DNA, 50 bp, Citrobacter koseri; identical to SEQ ID NO: 26320
  source 1..50: mol_type = genomic DNA

SEQ ID NO: 26326 - protein, 520 aa, Citrobacter sp FDAARGOS 156
MKKAVYCYARVSSRGQAKDGYGMSRQQEMLRDYVAAYDDSQHNRGYELGDISWLYAEGVSAYSGKNIEDGSVLKTFIDDVLQKKITNSVLVIENLDRFSRAAPNRAAGLFLSLINAGCDIHEVETEMIHHQYSDLNIISGGLQRAHNESKRKARLSIKNWDERIKNTIDGTSVLTHRVPSWIEVKNNKYVLKKGESEKYNLIFKMYADGFGPAAIRDELKKRGMQINEREPTINHLMKIIKDQRLIGRFNSTGRKILDGMSIYPVVVEPELFEAVNDLRKQRNPLGKINVKANNLFAGLCICMNCGRYVQVNSVDKKGDTYFRCGGSLVKIDKCKERGFKYKIVENALLEHLRNFDFSMLRSDDNDIQVKINYLSMELVSNEKYSNEILADLEKEDIPDPNDRRILKNIQRRISEIRNEITILKQSNIGYETFNDLKDSYTDDLLDPKNTKLRLDFNVKVKRVIKNIKMKRYDNTIMLVVSYVGVNEKQAMVINSKTGEVVFMAVQNDDLKSIEYLINND

SEQ ID NO: 26327 - DNA, 50 bp, Citrobacter sp FDAARGOS 156; identical to SEQ ID NO: 14297
  source 1..50: mol_type = genomic DNA

SEQ ID NO: 26328 - DNA, 40 bp, Citrobacter sp FDAARGOS 156
  source 1..40: mol_type = genomic DNA
ggcaatgatgccaatgaccaccatcagttcgataagcgtg

SEQ ID NO: 26329 - DNA, 40 bp, Citrobacter sp FDAARGOS 156
  source 1..40: mol_type = genomic DNA
ggcaatgatgccaatgacccacatcagttcgataagcgtg

SEQ ID NO: 26330 - DNA, 50 bp, Citrobacter sp FDAARGOS 156; identical to SEQ ID NO: 26320
  source 1..50: mol_type = genomic DNA

SEQ ID NO: 26331 - protein, 520 aa, Citrobacter koseri; identical to SEQ ID NO: 26326

SEQ ID NO: 26332 - DNA, 50 bp, Citrobacter koseri; identical to SEQ ID NO: 14297
  source 1..50: mol_type = genomic DNA

SEQ ID NO: 26333 - DNA, 40 bp, Citrobacter koseri; identical to SEQ ID NO: 6228
  source 1..40: mol_type = genomic DNA

SEQ ID NO: 26334 - DNA, 40 bp, Citrobacter koseri; identical to SEQ ID NO: 26324
  source 1..40: mol_type = genomic DNA

SEQ ID NO: 26335 - DNA, 50 bp, Citrobacter koseri; identical to SEQ ID NO: 26320
  source 1..50: mol_type = genomic DNA

SEQ ID NO: 26336 - protein, 520 aa, Klebsiella pneumoniae
MKKAVYCYARVSSRGQAKDGYGMSRQQEMLRDYVAAYDDSQHNRGYELGDISWLYAEGVSAYSGKNIEDGSVLKTFIDDVLQKKITNSVLVIENLDRFSRAAPNRAAGLFLSLINAGCDIHEVETEMIHHQYSDLNIISGGLQRAHNESKRKARLSIKNWDERIKNTIDGTSVLTHRVPSWIEVKNNKYVLKKGESEKYNLIFKMYADGFGPAAIRDELKKRGMQINEREPTINHLMKIIKDQRLIGRFNSTGRKILDGMSIYPVVVEPELFEAVNDLRKQRNPLGKINVKANNLFAGLCICMNCGRYVQVNSVDKKGDTYFRCGGSLVKIDKCKERGFKYKIVENALLEHLRNFDFSMLRSDDNDIQVKINYLSMELVSNEKYSNEILADLEKEDIPDPNDRRILKNIQRRISEIRNEITILKQSNIGYETFNDLKDSYTDDLLDPKNTKLRLDFNVKVKRVIKNIKMKRYDNTIMLVVSYVGVNEKQAMVINSKTGEVVFMAVQNDDLKSIEYLINNG

SEQ ID NO: 26337 - DNA, 50 bp, Klebsiella pneumoniae; identical to SEQ ID NO: 14297
  source 1..50: mol_type = genomic DNA

SEQ ID NO: 26338 - DNA, 40 bp, Klebsiella pneumoniae; identical to SEQ ID NO: 20073
  source 1..40: mol_type = genomic DNA

SEQ ID NO: 26339 - DNA, 40 bp, Klebsiella pneumoniae
  source 1..40: mol_type = genomic DNA
ggcgatgattccgataacccacatcagttcaatcagggta

SEQ ID NO: 26340 - DNA, 50 bp, Klebsiella pneumoniae; identical to SEQ ID NO: 26320
  source 1..50: mol_type = genomic DNA

SEQ ID NO: 26341 - protein, 544 aa, Alteromonas mediterranea
MSDTHIRKAYLYSRVSRASQATDGMGIERQVESSLKFLAMHPEYEVDHSTFIQDSGVSAYSGDNISDSAGLGGFLRAVRDGLVERGSLLVIEAPDRLTRLGIRKGQRLFDELAEYGIDVGLVRFGVIIKHDEENDFTSSLIVSIGLYLGHLESKQKSERICATMQKRRNLMREGELTYTPNSPKWLQASPDGKSFEIAPFGKIVQKMFQWRLEGIGTSKISERLNSEGHLDSKGNKFTAPKINQYLRAKSVIGHYQPHTSKKVNGKVKREPEGPPIVDFYPRLIEDSVFYEVQELMDNAKGGPKEKYVNYLRELVQCPCEGCGHSFMHVAVSGGKYQYLRCTTQYKKELTSCEAKPVNFKLVESEILPALRVLDFMSIYKQSPINNGLSKQLKEDIKELTQSIKTDREALGFLKGASRSAVEAVITENERKLSEMQVKGITDDVTVNPKDIETAQLHIRDNPLDSPEKRMEFNNSLKRLIDKLVITPKNWTIHFKGVDLKLTLAFGLQNADEILKTFYRERNRLSEEGLTPQEIHKITGLEVAN

SEQ ID NO: 26342 - DNA, 50 bp, Alteromonas mediterranea
  source 1..50: mol_type = genomic DNA
atcgttatctatgagatgaccgttggaattattatagtttaacaaaattg

SEQ ID NO: 26343 - DNA, 40 bp, Alteromonas mediterranea
  source 1..40: mol_type = genomic DNA
atcaccggcaataaccgttggtgtgataaacgacaagcga

SEQ ID NO: 26344 - DNA, 40 bp, Alteromonas mediterranea
  source 1..40: mol_type = genomic DNA
atcaccggcaataaccgtttatgtgataaacgacaagcga

SEQ ID NO: 26345 - DNA, 50 bp, Alteromonas mediterranea
  source 1..50: mol_type = genomic DNA
atttttatcatcaaaattaacatttaaaatattatattttgaaataattg

SEQ ID NO: 26346 - protein, 522 aa, Vibrio parahaemolyticus
MRFSRPEQAKGTSIERQSNFAEQYALEHGLELDKSLTMMDKGLSAFHGVHKTKGAFGQFLAAVTAGKVPSGSVLVVESLDRLSREDPLIAQAALTDLILSGITVVTAADNQVYSREEVQQNPFKLIMSLVVMIRANEESETKQRRSNAFLKSALNQYQANGKIRRLGSDPSWLDFNKDNDTYSFNERVEVIRRILNLYNQGIGSLKIARQLTEENIPTLSGKRSAWGQTTVANIVKSHALYGMKRINVQGVEYDLEDFYPALITKSKWLALQQHRTKRSKSMHGRGEVVHLITGHGKGFTTCGYCGGGLGAQTQKQYKRSGEYSRTVTRLHCLTHKETSSCCSSVFLEPIESAVLFAACIGVEPQSLVPTVNNVNYSALIDEVENKVKHIVEQVTAGAPWGLFKDAHDKLKLEKQKLIKERDSQKPDVNQSDVQKWVNKLVELADKARANDKEARLKCRTLINSICKSIVIKLRGHDLKSEPVVTITFVTDEQFEFKVGKNGAVQFVDNGMAVNRRLKPLLT

SEQ ID NO: 26347 - DNA, 50 bp, Vibrio parahaemolyticus
  source 1..50: mol_type = genomic DNA
tagttatgcactgtacatttgctttctgtctaatgtatagtgaaaactta

SEQ ID NO: 26348 - DNA, 40 bp, Vibrio parahaemolyticus; identical to SEQ ID NO: 7098
  source 1..40: mol_type = genomic DNA

SEQ ID NO: 26349 - DNA, 40 bp, Vibrio parahaemolyticus
  source 1..40: mol_type = genomic DNA
gaaataaccaaaagagccgtaagtccaatggatgtcttgc

SEQ ID NO: 26350 - DNA, 50 bp, Vibrio parahaemolyticus
  source 1..50: mol_type = genomic DNA
tagttatgtacagtacaaatacattatgtctaatatttcaagaacagttt

SEQ ID NO: 26351 - protein, 471 aa, Listeria monocytogenes; identical to SEQ ID NO: 14516

SEQ ID NO: 26352 - DNA, 50 bp, Listeria monocytogenes
  source 1..50: mol_type = genomic DNA
tatagtttttttgtcaaatacggtgatgtgtactttacaaaaacactatt

SEQ ID NO: 26353 - DNA, 40 bp, Listeria monocytogenes; identical to SEQ ID NO: 7183
  source 1..40: mol_type = genomic DNA

SEQ ID NO: 26354 - DNA, 40 bp, Listeria monocytogenes
  source 1..40: mol_type = genomic DNA
ttcaatgttactgtatcctactgtgtacctatagcccatc

SEQ ID NO: 26355 - DNA, 50 bp, Listeria monocytogenes
  source 1..50: mol_type = genomic DNA
tatagttttgctgtcaaacaaagtactctttattttccctcaccactgtc

SEQ ID NO: 26356 - protein, 525 aa, Eubacterium callanderi
MANVTVIPATRNIHTGIRKDAVTKRKTAGYARVSTDSEEQLTSYEAQVDYYTSYIQSRPEWEFVKVYTDEGISATDTRHRDGFNEMIKDALDGKIDLIVTKSVSRFARNTVDSLSTVRKLKERGVEVYFQKENIFTFDSKGELLITIMSSLAQEESRSISENVTWGKRKRFADGKVSLAYSTFLGYKKGEDGQMEIVPEEAETVRLIYRMFMQGKTPYAIAKYLTEQEIPTPTGKSGWRHRTVENILTNEKYKGDARLQKCYTVDFLSKKRKANEGEVPQYYVEGSHDAIISPSEWQLVQLEMEHRRAAGRSNCCSPFSAKLKCGDCGAYFGSKVWHSNSKYKRTVWQCNAKFKGEHKCTTPHLYEQRIQELFLEALSSLMENRDSLIDDCRAVMHVLGDCEAINREMEEVRSEMEVTTGLIQKLIDENATRKMDQNDYRKRYDGYVSRYAALESRMDGLEKERKEREFKYDIFSGFLFELGEIHELPLAFDDRLFYQLVDYATVYSDGRVVFTFRNGTEITTEM

SEQ ID NO: 26357 - DNA, 50 bp, Eubacterium callanderi
  source 1..50: mol_type = genomic DNA
ttgtatcaatttggacacgcaatatggcttgcgtaccataaattgataca

SEQ ID NO: 26358 - DNA, 40 bp, Eubacterium callanderi
  source 1..40: mol_type = genomic DNA
ggcagccggatattccacatgaccatattattctgctttg

SEQ ID NO: 26359 - DNA, 40 bp, Eubacterium callanderi
  source 1..40: mol_type = genomic DNA
ggcagccggatattccacaaaaccatattattctgctttg

SEQ ID NO: 26360 - DNA, 50 bp, Eubacterium callanderi
  source 1..50: mol_type = genomic DNA
ttgtatcaaaagaaaaactaaataaatattgagttcatgttaatgataga

SEQ ID NO: 26361 - protein, 510 aa, Halobacillus kuroshimensis
MELYGEKDGETIKYDEYPYLLYVRVSTDKDEQKDSVPNQIDICRYWIEKNNFEWNENSILKDDGLSGTYFLERKAMQLILKKARNREIKMVVFKSIHRLARDLKDALEIKEVLIGHGVRVVTMEENYDSHLEGKNDMKFEMYSMFAAQYPKTLSVSISASLAAKVRRGDHIGKIPFGYDRINHKLVIKEAEAEVIRKIFNWYTKDKIGFKSITNKLNEGVENGTILPPKESSYWGVTSVQRIIKSPIFCGTFILNKYTNIKVDGRKKQIKNPREKWNVFEDHHPAIVSKKQWNEANNKDITKFNTKISEWNEFRGLMKCSECGSNIVTMVSYKRRKSDDHKTTFRYLKCSAYRRGGKAACVNHTPITYEDFREFILNSLIKKWNQVELDFENNLGKNTKSLISNLNQQKIQLEKKKNRLVDMYLNEMLDKEDYLKRKSGFEIEIEKVENELYLNSSIEHKQVQIRTVKEAFSSLKKTDQDLTSVFKEIIDNISIAQNGEIEITYRIDPSL

SEQ ID NO: 26362 - DNA, 50 bp, Halobacillus kuroshimensis
  source 1..50: mol_type = genomic DNA
ggtttgcaaaaggtacgcatttcaaatgaaatggaacccaattgcaaacc

SEQ ID NO: 26363 - DNA, 40 bp, Halobacillus kuroshimensis
  source 1..40: mol_type = genomic DNA
tgtgcggaaccacatttcaaatgccatgcagaagctagga

SEQ ID NO: 26364 - DNA, 40 bp, Halobacillus kuroshimensis
  source 1..40: mol_type = genomic DNA
tgtgcggaaccacatttcagttgccatgcagaagctagga

SEQ ID NO: 26365 - DNA, 50 bp, Halobacillus kuroshimensis
  source 1..50: mol_type = genomic DNA
cgtttccaatataaatgcctttcagttgcaatggaaactcactgcattac

SEQ ID NO: 26366 - protein, 550 aa, Leclercia adecarboxylata
MKIKTAFCYCRVSSGRQKTEKGGFGMSRQQALLTTYVEDYDDKDGLGYSINVDHMVFLKAEGVSGFSGKNIEQGSVLHTFITDYKSGKIKNAVLVIENIDRFSRANPNEAAELFLGLINKGCDVHEIDTETVHHRCSDLNQISAGLTRSHKESLRKQKLSIKNWDERFDQTVKKQVPLTGRCPSWLKVENGQYKEVQESIKPIRLIFEWYNNGFGQAYIRDRLNSEGYSYNGKTWSNWSVHRVLKDERVTGKHRTQSLIRNNFDRIMMYPIIINELEFKKAEQRLTKPGRDKKINRRANTIFSGMLVCGLCKKGHILISNDNGKRFGRCSHAIAGNRRCVANGFKYNVVENTLLKHLRHLDFGSLSHSSYAEKLDSLNGELIHYTNYISNVQKIVDSEDIPNERDYKLLKNLELKIRALQSEVDDIRALENVSESYENIVKTINDELSDVHHIDARQSFNIKVRRVIREIQIFKIQRTIVLVSVSFYVSNDVQWLTISLRDGELLSNTYIENKMVFVTIGDKTLTYDNEADQYYLNSKVISSKDIYALFD

SEQ ID NO: 26367 - DNA, 50 bp, Leclercia adecarboxylata
  source 1..50: mol_type = genomic DNA
aactacgaaataacttaactcatcaccattatccgtgttaatctatagtg

SEQ ID NO: 26368 - DNA, 40 bp, Leclercia adecarboxylata
  source 1..40: mol_type = genomic DNA
agccacgatgccgataactaccattaattcgatgagggta

SEQ ID NO: 26369 - DNA, 40 bp, Leclercia adecarboxylata
  source 1..40: mol_type = genomic DNA
agccacgatgccgataacttacattaattcgatgagggta

SEQ ID NO: 26370 - DNA, 50 bp, Leclercia adecarboxylata
  source 1..50: mol_type = genomic DNA
aattatgaaagcacttaacttatttatactaactgtgggagtatatagtg

SEQ ID NO: 26371 - protein, 502 aa, Glutamicibacter arilaitensis
MGNNQHGRAQVGLYARISEDASGDAVGVQRQLEDARAMASASGWDIAGEWMDNDVSALNGAPRPGYRALMAAAELGKIQKIVVFHTSRLWRNRLERAEGIKVLAEARVSIAAVKGPELDLGSAYGRGLAGLIGEFDTLESEVKGERVRAAAEKRARAGRASGPVAYGWVREPVSGPENFRDVIDPHAADVVRHIVKQLLSGVPLHALARELNAAGEPTPSAYVEARRVKNGRDPARSRARIEEAWGPGTVKKLALRPSNVALRIHHRGRATETYFDAAWDPLITREQYEAVRAMFKPGAVIGRRGDRQYLLTGGVGYCEVCGGILRTAMKGKPGHKTRLYVCESGCVGRKITNVDELVRAVVSARLASDDLADLLSTKQPDDAPRRERMAEIRVRLDEAAESFGSGNITLQQLETISARLRPELEALEAAAPEARGVPIGLGADIAAAGTPERIAELWGGWTVPQRRALIEALGLRVIIKPAKGGPGFKPEGVGIEWKGSAV

SEQ ID NO: 26372 - DNA, 50 bp, Glutamicibacter arilaitensis
  source 1..50: mol_type = genomic DNA
gttgtccgtcctatgcctcccgggaagctgtaagtgactatactggcaat

SEQ ID NO: 26373 - DNA, 40 bp, Glutamicibacter arilaitensis
  source 1..40: mol_type = genomic DNA
gttgccaacgcctccggggaagaggctgtcgccgctgaag

SEQ ID NO: 26374 - DNA, 40 bp, Glutamicibacter arilaitensis
  source 1..40: mol_type = genomic DNA
gttgccaacgcctccggggtagaggctgtcgccgctgaag

SEQ ID NO: 26375 - DNA, 50 bp, Glutamicibacter arilaitensis
  source 1..50: mol_type = genomic DNA
attctcctgcctcagcctcccgagtagctgaaattgcagctactggctaa

SEQ ID NO: 26376 - protein, 496 aa, Klebsiella aerogenes
MSKTAYSYIRFSSKKQEQGDSVRRQTELAEKYAADNGLILSEKNFQDLGVSAFKEGSNRPSLADMLSAIEQGAIEQNSTIIIESLDRLSRRGIDVTQQIIKSILQHNVRIASLVDGLLLTKESVNDLVSVIRIALAADLAHKESEKKSQRLRETKGQQRKAALEGKVINKILPFWLARKDNRYVFSDKVDAARRIIELKKKGLGTNKIAKALNDEGFQPLRAAGWNHTTVMKTIKSVALYGAYQTTETTKDRKVINLDIVEDYYPALLTKDEFMLMQSDQRQNKPGFKSEQNAFAGLLKHSCGAALLRKYHRAHGKIYQYHVCANARDGKCESTKAIKNLEDGLKMILKNLKLETRTVLDNSIVQERNETSDRISELNSMLTTMTKIPMSVLQTIGNLEEKLQELDKQINEQQSNIRAENSVDINLLRDIEDPVELNLMLKRLIKEITVSETGKRWRIKVKYLNGHSQGFVWNGSKMSFITDTKKILDIHNDYDPD

SEQ ID NO: 26377 - DNA, 50 bp, Klebsiella aerogenes
  source 1..50: mol_type = genomic DNA
aaattgttgcaacgaaacaacgttgtgatattgttgctaaggagcaaaat

SEQ ID NO: 26378 - DNA, 40 bp, Klebsiella aerogenes; identical to SEQ ID NO: 4188
  source 1..40: mol_type = genomic DNA

SEQ ID NO: 26379 - DNA, 40 bp, Klebsiella aerogenes; identical to SEQ ID NO: 4189
  source 1..40: mol_type = genomic DNA

SEQ ID NO: 26380 - DNA, 50 bp, Klebsiella aerogenes
  source 1..50: mol_type = genomic DNA
aaaagatttttgtcaaacaatgttgagtttttgttgctaacgaacaaaaa

SEQ ID NO: 26381 - protein, 536 aa, Faecalibacterium prausnitzii
MLRQTNQQPITALYPRLSHEDELQGESNSISNQKRILETYAKQNGFSNLRWYTDDGYSGANFQRPGFQAMLADIEAGKVGTVIVKDMSRLGRNYLQVGMYTEMIFPQKGVRFIAINDGVDSAQGDNDFAPLRNIFNEWLVRDTSKKIKAVKRSKGMSGKPITSKPVYGYLMDEDENFIIDEEAAPVVKQIYNFCLAGNGPTKIARMLTEQQIPTPGTLEYRRTGSTRRYHPGYECKWATNTVVHILENREYTGCLVNFKTEKLSYKVKHSVENSPEKQVIFENHHEPIIDTQTWERVQELRKQRKRPNRYDEVGLFSGILFCADCGSVMYQQRYQTDKRKQDCYICGNYKKRTHDCTAHFIRTDLLTAGVLSNLRKVTSYAAKHEARFMKLLIEQNEDGGKRRNAAKKKELEAAEKRIAELSAIFKRLYEDSVTGRISDERFTELSADYEAEQRELKERAAAIQAELSKAQEATVNAEKFMNVVRRHTSFEELTPTLLREFVEKIVVHECSYDENKTRRQDIEIYYSFVGKVDLPE

SEQ ID NO: 26382 - DNA, 50 bp, Faecalibacterium prausnitzii
  source 1..50: mol_type = genomic DNA
ttgcttctttatcacacatcaataaatgctcatatacggtaaagaagcaa

SEQ ID NO: 26383 - DNA, 40 bp, Faecalibacterium prausnitzii
  source 1..40: mol_type = genomic DNA
gaactacaagcccgatattaaaaagaccgtcaccaagcgc

SEQ ID NO: 26384 - DNA, 40 bp, Faecalibacterium prausnitzii; identical to SEQ ID NO: 26383
  source 1..40: mol_type = genomic DNA

SEQ ID NO: 26385 - DNA, 50 bp, Faecalibacterium prausnitzii
  source 1..50: mol_type = genomic DNA
ttgcttttctatatatcatcatcaaatgcacatataccaaaaacaagcat

SEQ ID NO: 26386 - protein, 542 aa, Pseudomonas haemolytica
MHSLHGVQSIMPVKNTLPRAFSDVFRDDETINVYSYIRFSSKAQSLGFGEIRQLEQLNRFFEQYPTARQVERYEDLGVSAFRGKNLKSGQLAKFVGRIKSKEILPNALLLVESFDRISRMGGYDALELIISIIQSDCAIYTLFDNRLYSKRKKDSSVDISLIQNILERANDESKSKSERISDAKARNLEKGENGGIITKRCPFWISFVDDKFVLNEHAKAVKRMTELCFDFGFQSIAKELNKENHPKKYTDSTIGKVLHKHAIYGSFLAMKNDENGNRTIVNKEIRNYYPAIISESEFHRISEKLKERQDPSLAGRKAQEFRNILRGLVFCKCGSTFRFHAQKSLYVDLVCHSSTLGQCKYALPGKGIRHRYARIEEIFLAYQSLIPFHKIIVKNEDIKALEKEHQEILGQIIIKEKALANNFSILEKSSDSAQKYITNRINEVSQELDKLKADEHRLNLKINSLHLATKSDLKSIEIFRLLITEKGRIRINNFLHSQKIKLIITPVQKKYFALDIYHDDKHIDTIDVTPDGYTAHHKPHLK

SEQ ID NO: 26387 - DNA, 50 bp, Pseudomonas haemolytica
  source 1..50: mol_type = genomic DNA
tttcttcaaatttggcctatcattgcaatgacaggaggcttttgtataaa

SEQ ID NO: 26388 - DNA, 40 bp, Pseudomonas haemolytica
  source 1..40: mol_type = genomic DNA
ttcgagcatgccgatcacggcgttcatcggcgtgcgaatc

SEQ ID NO: 26389 - DNA, 40 bp, Pseudomonas haemolytica
  source 1..40: mol_type = genomic DNA
ttcgagcatgccgatcacggagttcatcggcgtgcgaatc

SEQ ID NO: 26390 - DNA, 50 bp, Pseudomonas haemolytica
  source 1..50: mol_type = genomic DNA
tttcttcatggtctgcctaggagtgaaatcactgggttgtgtggtataca

SEQ ID NO: 26391 - protein, 532 aa, Pseudomonas fluorescens
MTEPKPLPRAFSDVFRDDETINVYSYIRFSSKAQSLGFGEVRQLEQINRFFEQYPIARLVERYEDLGVSAFKGKNLKSGQLARFVERIKSKEILPNSLLLVESFDRISRMGGYDALELIISIIQSDCAIYTLFDNRLYSKRKKDSSVDISLIQNILERANDESRAKSERILDAKKRNREKGENGGVITKQCPFWISFVDNKFVLNEHSNAVRRMTELCYEMGFQSIAQQLNRENHPRKYTSSTVSKVLHKHAIYGSFLALKLDENGVRNVFNKEIKNYYPSVISESEFHRISAKLQERLDPKFSGRKAEDFRNIFRGLAFCKCGSTFRFHKQKNHYVDLVCQASTFNNCEYALEKKGVRHRYFLIEDLFMMYHKQIPFETILVKSDDIKMLEKEQQENAGLIIAKEKALANNFSILEKSSENSQKYILSRIDEVSLELDELKKNQYELSLRINNLHITDKTSVHTHDVYKLLLSENGRIKIDNFLHSQKVKLIITPVKKKHFSIDIFHADRLIDTIDVANDEYTARLKSHLE

SEQ ID NO: 26392 - DNA, 50 bp, Pseudomonas fluorescens
  source 1..50: mol_type = genomic DNA
tttctacaatctgcgccagtgattgcaatcatagacgttgattgtagaaa

SEQ ID NO: 26393 - DNA, 40 bp, Pseudomonas fluorescens
  source 1..40: mol_type = genomic DNA
aatccgcacaccgatgaacgcggtgatcggcatgctggaa

SEQ ID NO: 26394 - DNA, 40 bp, Pseudomonas fluorescens
  source 1..40: mol_type = genomic DNA
aatccgcacaccgatgaactcggtgatcggcatgctggaa

SEQ ID NO: 26395 - DNA, 50 bp, Pseudomonas fluorescens
  source 1..50: mol_type = genomic DNA
tgtataccacacaacccagtgatttcactcctaggcagaccatgaagaaa

SEQ ID NO: 26396 - protein, 667 aa, Elizabethkingia anophelis; identical to SEQ ID NO: 24111

SEQ ID NO: 26397 - DNA, 50 bp, Elizabethkingia anophelis
  source 1..50: mol_type = genomic DNA
cacatttaaaacaattacttgatgttattgtatagaatgtggtgtatatg

SEQ ID NO: 26398 - DNA, 40 bp, Elizabethkingia anophelis
  source 1..40: mol_type = genomic DNA
caccacacaatatcagatgtcgctctggtgggcggaggta

SEQ ID NO: 26399 - DNA, 40 bp, Elizabethkingia anophelis
  source 1..40: mol_type = genomic DNA
caccacacaatatcagatgtagctctggtgggcggaggta

SEQ ID NO: 26400 - DNA, 50 bp, Elizabethkingia anophelis
  source 1..50: mol_type = genomic DNA
cacatatacataatttacataatctaagtgtgtgtatgtatgtgtatatg

SEQ ID NO: 26401 - protein, 540 aa, Enterocloster bolteae
MKQPYNTTIYNTALYMRLSRDDENYGDSVSIETQRTILQQYAKEQGLHVVGEYVDDGWSGTNFERPDFQRMMDDVEAGKVNCIVTKDLSRFGREHVMMDYYLEFLFPEKRVRYIAVAENEDTEKGLSDFVPFKNLFNEWFAKDTSRKVKAAFKAKFATGQRIGAYAPIGYRKHPEIKNKLIIDEETRWIVEKIFDLAFHGRGAASITSILIAEKVPTPGFINFQRDGTFANIYAGAPEEKSYAWTIAQVKSIMKDETYIGHTIHYRETNISFKNKRRVRKPQSEWVRVENTQEPIISEQVFRQVQEQIANRRRKCKDGTTQIFSGLVKCADCGWSLSYGENRQNSKPYGHYHCSKYGQGTRQCSMHYIRYDVLYAYVLSRLQYWSGLVQHDEERLLKRLLNATDKGQAAARKKQAAELKKAEKRKAEVDTLFARMYEDWAAGRITEYNFSMLSGKYQSEQAELDEKIERLQSAIATESQNAADAEKWIALMKECVNPTELTAELLNTLIEKIVVHEAVKGEDGSREQEVEIFYRFIGKID

SEQ ID NO: 26402 - DNA, 50 bp, Enterocloster bolteae
  source 1..50: mol_type = genomic DNA
caatctctttaactatgtgataccggggtatcacaaaattaaagatacta

SEQ ID NO: 26403 - DNA, 40 bp, Enterocloster bolteae
  source 1..40: mol_type = genomic DNA
ggtttccaaatgggagtcgggacaatcctatccggagatg

SEQ ID NO: 26404 - DNA, 40 bp, Enterocloster bolteae
  source 1..40: mol_type = genomic DNA
ggtttccaaatgggagtcgttacaatcctatccggagatg

SEQ ID NO: 26405 - DNA, 50 bp, Enterocloster bolteae
  source 1..50: mol_type = genomic DNA
cattctcttcccacattttatgacttgatatcacaatttacaacatttta

SEQ ID NO: 26406 - protein, 550 aa, Vibrio owensii
MTTAYLLQYSRVSSSSQLDGDGLLHQQLPSEVLQELCTEHSLKLYPEIFSDKAVSAFKVNAAERPSFSQLLSLIESTQVDNQSVLVLYNLDRLSRENISTALSTLLRVLDSCRIYISQEKRLFDKDDPNLMVNLMMALISLSRANEESETKRKRSNDAIAHTIQKHLDGVRGKKGGVFWHYAGCYPAWYDLEEGELLPNQTSIDAIRDFIGRIINGESLNQAWLHIRANYPAPKKHKNGWSKMTMSELHKDKALLGQYSLKGQDIPNYYEPIIDEKTYYQFVNARGKRNFVLSDANKDKTSIFSGYGISHCRCCGSAMTIHRTKGYNYLRCASVGRCLPCDNPVTVSEKALLEALNTNLMKTVGLVQDEPTDSNLPMLEANLKAASDAHLKMQQDYMDTQASFLIPMIQSKQTEIDTLMVQIEEEKKRTHTFVPDVPSEIPTDRDKLRKLYRDTLTGLKFWKLGGDDSILKSSKDSNSYVSILDDHDIRPSLSSPHLANLPTKGTLVSVYTVYGISFSMVLWQGRVIWTGQLTESDGFDEENSLKDVIWG

SEQ ID NO: 26407 - DNA, 50 bp, Vibrio owensii
  source 1..50: mol_type = genomic DNA
tttagtcacttatcggtttttagctgggttaaaatgtaaagtgactaaca

SEQ ID NO: 26408 - DNA, 40 bp, Vibrio owensii
  source 1..40: mol_type = genomic DNA
ctttgtacgcagtgcaacgtgggaaaatatggcgacagaa

SEQ ID NO: 26409 - DNA, 40 bp, Vibrio owensii
  source 1..40: mol_type = genomic DNA
ctttgtacgcagtgcaacgccggaaaatatggcgacagaa

SEQ ID NO: 26410 - DNA, 50 bp, Vibrio owensii
  source 1..50: mol_type = genomic DNA
ttaagtcacacccagatttttggcccagagaaattgtgagataacgaaca

SEQ ID NO: 26411 - protein, 529 aa, Pseudomonas aeruginosa
MTNRPKAYSYVRFSTPEQAKGDGRRRQYKAAIEYADKHDLELVKDGNYAFLDAGVSAYRGNNINRVSSSLGRFYEYVKEGKIEPGSYLLVESLDRLSREQVTEALVRFLDLLNSGIIVVTFGDGTVYKKSAEPMQLVMSISHMSRAHSESSVKGQRVSDAWQQKQALARSEGVPLGAACPQWLSFDGEAYKVIPERVCVVKRVFELTVQGYGQRAIVKIFNNEGVPVFGSEKRNKSGLWGSSSIAKILGNRSVLGEYQPTVWAEGRRRISGEPIKDFYPAVVDEELYYAALEGRSSRNVSRATKTSSNFNVWAKVAQCAYCKSPMHLVNKGKPPKGRKYLRCSRSTKGACINRSIRLDQSEIVFKEILAKLNLASLIKDNAQVLRKRIVELDGRLESAKVKLLEVSNLLECHPSRTLAQTAVNVEGEITQLESERDECKATLASEHITDKNELFRRLDLDSYEGRFLANQQIQRLKVRVLLKHDEIRVQYSVFVGDLPKFFYMCEHGEECLFVPISSELLRASIRQDDM

SEQ ID NO: 26412 - DNA, 50 bp, Pseudomonas aeruginosa
  source 1..50: mol_type = genomic DNA
accggtgtactgtttcacaacactaacaggttgtgctacaatacacccat

SEQ ID NO: 26413 - DNA, 40 bp, Pseudomonas aeruginosa
  source 1..40: mol_type = genomic DNA
ctccgggggggtatagggtaatgcttccgggccgccggcg

SEQ ID NO: 26414 - DNA, 40 bp, Pseudomonas aeruginosa
  source 1..40: mol_type = genomic DNA
ctccgggggggtatagggttctgcttccgggccgccggcg

SEQ ID NO: 26415 - DNA, 50 bp, Pseudomonas aeruginosa
  source 1..50: mol_type = genomic DNA
tcgggcgtattaacttatcacacttccaggttgtgcctgtgtgcagccaa

SEQ ID NO: 26416 - protein, 601 aa, Serratia grimesii
MLSGQQTWVNEMEQDRKTKLYSYIRWSSDRQAKGTSLERQTAKAREFALLHDLEMVELLDAGLSGYRGKNSTEGALGGFIQAVESGVIPNNSYLFVENLDRLSRQDILTANKLFSHLLELGLTVVTGMDGKIYTRRSVTANPTDLMLSILLFSRANEESQTKSKRVKANAAALVKRHNSGLPTTIKSAGSHVWWVDASGHHTESVKPHPVYWHAARQIIDLYLAGYTTYKICDYLDERYLPPPVKLNKSSVVTGDRRWSYQLIRRMKTSEALIGRRTLVLDKTTTPPTTATLEGYYPALCSQSEYARLVDLTENNRISTGKKKKRITLLSGLGIARCGHCGGAMTFFISLGKIRYMCASGRDHVSDCKAWSVRGDIFEHTAIHALVRGYASLMTRDKSAGEDLQDDIRGQQESLQAIENQISNITDAITIGGNMVALVERMRALETSKQAIILEIERLNHRQLMAGSQQDNIERLSDFIGLLSNDLLEDVTHPHRANIREAMRTVISSARVTKRQNNSLSIVFDIHDGTRHTFEGGEERNTYIEFVQDLDTDGNPITYPDTEEVRAWRKKREELESKLFAAVSASLEALPPIDPSKFWSKR

SEQ ID NO: 26417 - DNA, 50 bp, Serratia grimesii
  source 1..50: mol_type = genomic DNA
taagttatctaaaaatcattagtgttcactggtgtaaaatagattacaat

SEQ ID NO: 26418 - DNA, 40 bp, Serratia grimesii; identical to SEQ ID NO: 5898
  source 1..40: mol_type = genomic DNA

SEQ ID NO: 26419 - DNA, 40 bp, Serratia grimesii; identical to SEQ ID NO: 5898
  source 1..40: mol_type = genomic DNA

SEQ ID NO: 26420 - DNA, 50 bp, Serratia grimesii; identical to SEQ ID NO: 5900
  source 1..50: mol_type = genomic DNA

SEQ ID NO: 26421 - protein, 485 aa, Lactococcus cremoris
MTKKVAIYTRVSTTNQAEEGFSIDEQIDRLTKYAEAMGWQVSDTYTDAGFSGAKLERPAMQRLINDIENKAFDTVLVYKLDRLSRSVRDTLYLVKDVFTKNKIDFISLNESIDTSSAMGSLFLTILSAINEFERENIKERMTMGKLGRAKSGKSMMWTKTAFGYYHNRKTGILEIVPLQATIVEQIFTDYLSGISLTKLRDKLNEAGHIGKDIPWSYRTLRQTLDNPVYCGYIKFKDSLFEGMHKPIIPYETYLKVQKELEKRQQQTYERNNNPRPFQAKYMLSGMARCGYCGAPLKIVLGHKRKDGSRTMKYHCANRFPRKTKGITVYNDNKKCDSGNYDLSNLENTVIDNLIGFQENNDSLLKIINGNNQPILDTSSFKKQISQIDKKIQKNSDLYLNDFITMDELKDRTDSLQAEKKLLKAKISENKFNDSTDVFELVKTQLGSIPINELSYDNKKKIVNNLVSKVDVTADNVDIIFKFQLA

SEQ ID NO: 26422 - DNA, 50 bp, Lactococcus cremoris
  source 1..50: mol_type = genomic DNA
ttgcgagtttttatttcgtttatttcaattaaggtaactaaaaaactcct

SEQ ID NO: 26423 - DNA, 40 bp, Lactococcus cremoris
  source 1..40: mol_type = genomic DNA
tgccaacacaattaacatctcaatcaaggtaaatgctttt

SEQ ID NO: 26424 - DNA, 40 bp, Lactococcus cremoris
  source 1..40: mol_type = genomic DNA
tgccaacacaattaacatcaaaatcaaggtaaatgctttt

SEQ ID NO: 26425 - DNA, 50 bp, Lactococcus cremoris
  source 1..50: mol_type = genomic DNA
ttgcaagtttctatttgatttactaaaattgagttacggttacaattccc

SEQ ID NO: 26426 - protein, 541 aa, Klebsiella pneumoniae
MPKAISYIRFSSKTQASGDSTKRQNKYIYEWLKNNPDYQLDESLRFQDLGISGYSGANAKSGAFGEFLAAVESGVIQAGSVLLVESLDRVSRQDIDTARERLRKILLAGVDVVTLADNSWYKKESLNDPLSLIKAVLIMQRANEESATKSKRLRSAWDAKREDAAKGKIMSRRCVAWLRVSGDMSHFELIPDNVKAVQRVFQLRLEGLPFVRIARQMNEEGFYTLNQRNPVKGAWSHTTVKALLDNRSVIGFKVPSNCTVTQGVKEIPNYYPAVISEEQFYAVQQLKQGAGRRPSSEKPLLTNLFKGVMRCGECGFVTVVNCATEKWHGVYRCSMRYEGRCDAKSINRRLADKALVQGLLYNTNRLSLNRDNGSAIGSLQSELEQLQKQRERLIKLSMLTDDVESMAKELKLLNSRIVDAEKAVSEVHQREQSSQLETISHLDLTVKKDRIEAQIIIKRIVKEIRLNTAGKKCDVLLHNGLKLLNFPLDRVVDGAQWIEILPLIDGDEFDFEGFTTKPRHIALEEAPEWVKEMEVQPNQPL

SEQ ID NO: 26427 - DNA, 50 bp, Klebsiella pneumoniae
  source 1..50: mol_type = genomic DNA
gtaagtcattagagagttgtaattaggactacacatctcttatgataaac

SEQ ID NO: 26428 - DNA, 40 bp, Klebsiella pneumoniae
  source 1..40: mol_type = genomic DNA
attggtgtgcagggtggatagcaccagatgaccggtctgg

SEQ ID NO: 26429 - DNA, 40 bp, Klebsiella pneumoniae
  source 1..40: mol_type = genomic DNA
attggtgtgcagggtggattgcaccagatgaccggtctgg

SEQ ID NO: 26430 - DNA, 50 bp, Klebsiella pneumoniae
  source 1..50: mol_type = genomic DNA
ataagtcatgatactgttgtcatttggaatacatatacatacatatatac

SEQ ID NO: 26431 - protein, 541 aa, Klebsiella quasipneumoniae
MPKAISYIRFSSKTQASGDSTKRQNKYIYEWLKNNPDYQLDESLRFQDLGISGYSGANAKSGAFGEFLAAVESGVIQAGSVLLVESLDRVSRQDIDTARERLRKILLAGVDVVTLADNSWYKKESLNDPLSLIKAVLIMQRANEESATKSKRLRSAWDAKREDAAKGKIMSRRCVAWLRVSGDMSHFELIPDNVKAVQRVFQLRLEGLPFVRIARQMNEEGFYTLNQRNPVKGAWSHTTVKALLDNRSVIGFKVPSNCTVTQGVKEIPNYYPAVISEEQFYAVQQLKQGAGRRPSSEKPLLTNLFKGVMRCGECGFVTVVNCATEKWHGVYRCSMRYEGRCDAKSINRRLADKALVQGLLYNTNRLSLNRDNGSAIGSLQSELEQLQKQRERLIKLSMLTDDVESMAKELKLLNSRIVDAEKAVSEVHQREQSSQLETISHLDLTVKKDRIEAQIIIKRIVKEIRLYTAGKKCDVLLHNGLKLLNFPLDRVVDGAQWIEILPLIDGDEFDFEGFTTKPRHIALEEAPEWVKEMEVQPNQPL

SEQ ID NO: 26432 - DNA, 50 bp, Klebsiella quasipneumoniae; identical to SEQ ID NO: 26427
  source 1..50: mol_type = genomic DNA

SEQ ID NO: 26433 - DNA, 40 bp, Klebsiella quasipneumoniae
  source 1..40: mol_type = genomic DNA
attggtgtgcagagtagagagcaccagatgacccgtttgg

SEQ ID NO: 26434 - DNA, 40 bp, Klebsiella quasipneumoniae
  source 1..40: mol_type = genomic DNA
attggtgtgcagagtagagtgcaccagatgacccgtttgg

SEQ ID NO: 26435 - DNA, 50 bp, Klebsiella quasipneumoniae; identical to SEQ ID NO: 26430
  source 1..50: mol_type = genomic DNA

SEQ ID NO: 26436 - protein, 541 aa, Enterobacter asburiae; identical to SEQ ID NO: 26431

SEQ ID NO: 26437 - DNA, 50 bp, Enterobacter asburiae; identical to SEQ ID NO: 26427
  source 1..50: mol_type = genomic DNA

SEQ ID NO: 26438 - DNA, 40 bp, Enterobacter asburiae
  source 1..40: mol_type = genomic DNA
gttggtgtgcagcgttgacagcaccagatgaccggtctga

SEQ ID NO: 26439 - DNA, 40 bp, Enterobacter asburiae
  source 1..40: mol_type = genomic DNA
gttggtgtgcagcgttgactgcaccagatgaccggtctga

SEQ ID NO: 26440 - DNA, 50 bp, Enterobacter asburiae; identical to SEQ ID NO: 26430
  source 1..50: mol_type = genomic DNA

SEQ ID NO: 26441 - protein, 538 aa, Bacillus amyloliquefaciens
MNLKSAIEPHGVTNILGYLRKSRQDIEREKRTGEDTLAEQTDLMNRVLMSIELPYELKMEIGSGESIDGRPVFQECLKDLENKKYQAIAVKELARLSRGNYSDAGRIIEIINENRLLIITPYKVFDPRNVMDMKQIRFELFLAREEYEMIRERMTGARYTYAAQGKWVAGKAPYGYRYNKNTRSLEINDEQAENIRLIYDLFLNGLNGLDMSYQAIATHLSKIGIPTPRGKKTWSYFYVKSVLQNELYIGTIKFRTYERNKKGKRIPRPESEHIISENAHSPIITKEMFEKVQDKIGNKPIDPHNPLDFSPSELASICTCSVCGGKLIRNCGKQTYKKKDGTESVYVKEFLKCQKDYCMSVKYRDVEEAILEVLKQFQALDKKQIEIYFEKAMKQKEQGKTSGINEKTVQQIEQKIKELKNRMNFVYEKYEQGIYTDEMFLERKRLIENEQEELIKTKKEIQSIPDREDVPSKEIKDHMLNVLNQYNFETDKSKKNKLLRSIFEKVEVKVIEKGKGTKPAKFMIIPYFRFNTLFKKTL

SEQ ID NO: 26442 - DNA, 50 bp, Bacillus amyloliquefaciens
  source 1..50: mol_type = genomic DNA
ttgtaggtaggatataaatcctacctatatgttttttatcctacctacaa

SEQ ID NO: 26443 - DNA, 40 bp, Bacillus amyloliquefaciens
  source 1..40: mol_type = genomic DNA
cgccgccataaggacagggctgtcagtcatcgcatttgcg

SEQ ID NO: 26444 - DNA, 40 bp, Bacillus amyloliquefaciens
  source 1..40: mol_type = genomic DNA
cgccgccataaggacagggatgtcagtcatcgcatttgcg

SEQ ID NO: 26445 - DNA, 50 bp, Bacillus amyloliquefaciens
  source 1..50: mol_type = genomic DNA
atgtatgtataccatatatcatacatatatgatgttatatatgcataaaa

SEQ ID NO: 26446 - protein, 538 aa, Bacillus velezensis
MNLKSAIEPHGVTNILGYLRKSRQDIEREKRTGEDTLAEQTDLMNRVLMSIELPYELKMEIGSGESIDGRPVFQECLKDLENKKYQAIAVKELARLSRGNYSDAGRIIEIINENRLLIITPYKVFDPRNVMDMKQIRFELFLAREEYEMIRERMTGARYTYAAQGKWVAGKAPYGYRYNKNTRCLEINDEQAENIRLIYDLFLNGLNGLDMSYQAIATHLSKIGIPTPRGKKTWSYFYVKSVLQNELYIGTIKFRTYERNKKGKRIPRPESEHIISENAHSPIITKEMFEKVQDKIGNKPIDPHNPLDFSPSELASVCTCSVCGGKLIRNCGKQTYKKKDGTESVYVKEFLKCQKDYCMSVKYRDVEEAILEVLKQFQTLDKKQIEIYFEKAMKQKEQGKTSGINEKTVQQIEQKIKELKNRMNFIYEKYEQGIYTDEMFLERKRLIENEQEELIKTKKEIQSIPDREDVPSKEIKDHMLNVLNQYNFETDKSKKNKLLRSIFEKVEVKVIEKGKGTKPAKFMIIPYFRFNTLFKKTL

SEQ ID NO: 26447 - DNA, 50 bp, Bacillus velezensis
  source 1..50: mol_type = genomic DNA
ttgtaggtaagatataaatcctacctatatgttttttatcctacctacaa

SEQ ID NO: 26448 - DNA, 40 bp, Bacillus velezensis
  source 1..40: mol_type = genomic DNA
cgcagccataaggacagggctgtcagtcatcgcatttgcg

SEQ ID NO: 26449 - DNA, 40 bp, Bacillus velezensis
  source 1..40: mol_type = genomic DNA
cgcagccataaggacagggatgtcagtcatcgcatttgcg

SEQ ID NO: 26450 - DNA, 50 bp, Bacillus velezensis; identical to SEQ ID NO: 26445
  source 1..50: mol_type = genomic DNA

SEQ ID NO: 26451 - protein, 503 aa, Enterocloster clostridioformis
MDNRIDAIYARQSVDKKDSISIESQIEFCKYELKGSNCKEYKDKGYSGKNTERPEFQQLMRDIESGLVRKVVVYKLDRISRSILDFAKMMDYFQKYEVEFVSSTEKFDTSTPMGRAMLNICIVFAQLERETIQKRVQDAWHSRCQRGFKMGGKTPYGFRTEPYVMDGVRTKKLVIEPAEAAFVRQMYEMYADPQVSLHDITKKLTADGMRTYHGRPLSRATLSVILRNPIYVMADLNIYEFYKSQGTDIYNNAADFAGTNGCYYYQGKGNTEDKHKHLQGQTLVLAPHEGFIPSELWLKCRKKLLASHTYQPARKARNTWTAGKIKCGKCGYALMSAHSNGILYMRCTVHADSGACPGCGCVKLHELEAVVYGAMVKKLKDFKTLTGRKKAAKISPKLTAKRLELAQVESEIEKLLDTLTGASPVLLSYVNSRIEELDAKRQSISNEIAKLSADAVPAEKIESISGYLDDWENVSFEDKRQVVDALITVIRATNEKVEIEWKI

SEQ ID NO: 26452 - DNA, 50 bp, Enterocloster clostridioformis
  source 1..50: mol_type = genomic DNA
ttttgtgctcttgtccagaatagtgaaacattatggacaaggacacaaaa

SEQ ID NO: 26453 - DNA, 40 bp, Enterocloster clostridioformis
  source 1..40: mol_type = genomic DNA
gcaggtgggaatgtacacagaaattatgttcccgaacatg

SEQ ID NO: 26454 - DNA, 40 bp, Enterocloster clostridioformis
  source 1..40: mol_type = genomic DNA
gcaggtgggaatgtacacaaaaattatgttcccgaacatg

SEQ ID NO: 26455 - DNA, 50 bp, Enterocloster clostridioformis
  source 1..50: mol_type = genomic DNA
ctttcttcatgcttgcagaatagtaaaagtttatggctcagggcacacaa

SEQ ID NO: 26456 - protein, 553 aa, Ardenticatenaceae bacterium
MSKPKSSKRTRFAIYTRYSSELQNDLSLEAQENRCRQSITERGGAIVNVFSDGARSGWSLEREGFMKLCREAERGKFDAVMFWKFDRLARNHEHAVMIKMLLRHEYGLKLYCVEGFSEDEDDSPYTAMMEQMLAVFSAFYSKNLSSETKRGKRQRVLNGHFNGSIPPLGYHLVTLAEATAETPAGLYIIPRLAAIVRRAYRMYATGKHSDYTIAKWMNSRKEIQKLRQGKKPIAKAMVRDMLQNRIYTGRVPYAETLYSGSLGQGKKSNRKRKEWFEGKHEGFVSDDLFEKCQEVRQSLTKTRRPPEVMRTYILHDRVFCARCTARKPTTLEDANYGKMRPSWDPKRDKGWYRCVARDRGYLDCEQPLIETATVDEQVVAQLSQLIIPEGFRERVEQAVRSNVENDEALKRMGEIEEAVKRVDFSWEKGFLTPKDYIEKRNQLQREIESLRPVDYDDLIEAADLLENFSSYWEACTAVEKPEEARKELLAKIVDRIFIYDDTVIAIALHGDYAVVLDHGEVAPDEIVEKLRSETTRGTSDEACTSCAQSGSDG

SEQ ID NO: 26457 - DNA, 50 bp, Ardenticatenaceae bacterium
  source 1..50: mol_type = genomic DNA
cctgtgcccagagcgggagcgacgggcttggaggcacctctgggcacagg

SEQ ID NO: 26458 - DNA, 40 bp, Ardenticatenaceae bacterium
  source 1..40: mol_type = genomic DNA
tacgcgcacgggagcgacggggatcgaacccgcgatctct

SEQ ID NO: 26459 - DNA, 40 bp, Ardenticatenaceae bacterium
  source 1..40: mol_type = genomic DNA
tacgcgcacgggagcgacggtgatcgaacccgcgatctct

SEQ ID NO: 26460 - DNA, 50 bp, Ardenticatenaceae bacterium
  source 1..50: mol_type = genomic DNA
cctgtcccgggctcgggagcggcggtggtggcggcggcagtgggaacacg

SEQ ID NO: 26461 - protein, 503 aa, Klebsiella oxytoca
MIEAFSYVRFSTKSQATGTSLERQLNASRLFCTQHALRLSNQSYHDLGISGFKNVRRPELEQMFEAIQTGVIPAGSFILIEAIDRLSRKGISHTQDILKKILQHDIKVAFVGEDAKTLQGQVLNKDSLNDLSSVIMVALAADLAHKESLRKSKLVRESKAIAREKAQNGVILPGKSMFWLDYDKEQRHYVLNDRATIAKEIIELRLLGHGPRKIAKILNERQIPGPTGKEWYQPSIKRIITSPVLYGAYQSHQVIEGNYIPVALVENYYPALIDYNLFSQIQFDNKHASKGRPSRVNPFGGVFYCECGNAICFKKSYSKTAKEDKNEYHYHYCIAAREGRCKNTKAIPNFTPILINLLDKLEIKSTSTKNIRTESIISKRNKIEQLNEMLLKLDSPPVSVIKTISNLEKELQTLLEQPEITAPKQEDIVVLSTIKDPLKYNMHLKRLVKRITVYQINGPKNLRIKVDKTDGHHQNFLIQNEKTIFKSDTERLKKLLAGFKDGF

SEQ ID NO: 26462 - DNA, 50 bp, Klebsiella oxytoca
  source 1..50: mol_type = genomic DNA
ttttgtcttaatgatactgttactcagataacagtatcatttaaacaaac

SEQ ID NO: 26463 - DNA, 40 bp, Klebsiella oxytoca; identical to SEQ ID NO: 683
  source 1..40: mol_type = genomic DNA

SEQ ID NO: 26464 - DNA, 40 bp, Klebsiella oxytoca; identical to SEQ ID NO: 683
  source 1..40: mol_type = genomic DNA

SEQ ID NO: 26465 - DNA, 50 bp, Klebsiella oxytoca
  source 1..50: mol_type = genomic DNA
ttttgtattatttttacttttaatcagaaaaacataccatgtgaacaaag

SEQ ID NO: 26466 - protein, 525 aa, Enterocloster clostridioformis
MLDPNGIYFAYLRKSREDREAELHGYGETLKRHQRMLEDLAEYHNIKIAKFYSEVVSGETIASRPQMLAMLDDIESLSPDGVLVVEIERLARGDTRDQGLVLETFKYSGTRIITPMKIYDPMDERDEEYAEFGLFMSRREYKTINRRLRNGKIASFNEGKWTGNKAPFGYERVKLSGEKGFTLKIIPENADVVRLIFQLFIYGSNASNNIPVGTSKICRILDNLHISPPIGETWQPCTIRQILSNPTYIGKVHMGRRSTQKKTLNGVVKISRPINKNAKIADGLHPAIIDDALFLKAQEKRKANYQKPFFEGIKNPLAGLIYCSVCGKSMYRRPAGKRCKEDMIQCTTHGCPTSASYYHYIEEKLLVSLNKWLEDYRIQVKDISPENYAQQLNLLQSQLNAAQNESETSKKQLSKAMDLLEKDIYSVEMFQQRASELNEKIALSSRSISDLSVKIDSIRTKAVQKEEVIARWERILSLYPQVDDPAVKNALMKELLTRIEYSKPHKGNRQNGGMDQFTLKLFPRL

SEQ ID NO: 26467 - DNA, 50 bp, Enterocloster clostridioformis
  source 1..50: mol_type = genomic DNA
tacgtatagagattgtgtacacattcgtatgcacacaatctctatacgta

SEQ ID NO: 26468 - DNA, 40 bp, Enterocloster clostridioformis
  source 1..40: mol_type = genomic DNA
gatttccagatgcgcaagctcctccgtaccaatgtcggtc

SEQ ID NO: 26469 - DNA, 40 bp, Enterocloster clostridioformis
  source 1..40: mol_type = genomic DNA
gatttccagatgcgcaagcatctccgtaccaatgtcggtc

SEQ ID NO: 26470 - DNA, 50 bp, Enterocloster clostridioformis
  source 1..50: mol_type = genomic DNA
aatgtatagtgtgtgtatatatatatatatacacacacattatatatgta

SEQ ID NO: 26471 - protein, 525 aa, Enterocloster bolteae
MLDPNGIYFAYLRKSREDREAELHGYGETLKRHQRMLEDLAKYHKIKIAKFYSEVVSGETIASRPQMLAMLDDIESLSPDGVLVVEIERLARGDTRDQGLVLETFKYSGTRIITPMKIYDPTDERDEEYAEFGLFMSRREYKTINRRLRDGKIASFNEGKWTGNKAPFGYERVKLAGEKGFTLKIVPEDADVVRLIFQLFIYGSNASNNIPVGTSKICRILDNLHISPPIGETWQPCTIRQILSNPTYIGKVHMGRRSTQKKTLNGVVKISRPINKNAKIADGLHPAIIDDALFLKAQEKRKANYQKPFFEGIKNPLAGLIYCSVCGKSMYRRPAGKRCKEDMIQCTTHGCPTSASYYHYIEEKLLVSLNKWLEDYRIQVKDISPENYAQQLNLLQSQLNAAQNESETSKKQLSKAMDLLEKDIYSVEMFQQRASELNEKIALSSRSISDLSVKIDSIRTKAVQKEEVIARWERILSLYPQVDDPAVKNALMKELLTRIEYSKPHKGNRQNGGMDQFTLKLFPRL

SEQ ID NO: 26472 - DNA, 50 bp, Enterocloster bolteae; identical to SEQ ID NO: 26467
  source 1..50: mol_type = genomic DNA

SEQ ID NO: 26473 - DNA, 40 bp, Enterocloster bolteae
  source 1..40: mol_type = genomic DNA
gatttccagatgtgcaagttcctccgtaccgatatcggtc

SEQ ID NO: 26474 - DNA, 40 bp, Enterocloster bolteae
  source 1..40: mol_type = genomic DNA
gatttccagatgtgcaagtatctccgtaccgatatcggtc

SEQ ID NO: 26475 - DNA, 50 bp, Enterocloster bolteae; identical to SEQ ID NO: 26470
  source 1..50: mol_type = genomic DNA

SEQ ID NO: 26476 - protein, 541 aa, Eisenbergiella tayi
MRIYIYSRKSVYTGKGESVENQIEMCREYISTKIPESDNAEIVVYEDEGFSAKNTDRPQFQQMLRDIKLNKPEYVVCYRLDRISRNVSDFSSLIEDLNSYNISFICIKEEFDTSKPMGKAMMYIASVFAQLERETIAERVRDNMLMLARTGRWLGGTTPTGFTSEKIQEIIIDGKIKTSCKLKDNPEELKTIDCILEKFLELRSISGVSKYLIKQGIKSRTGKMFSLLGIKEILQNPVYCIADEDAWEYFTEHHSDVCFEKTDCSNKYALLAYNKRDYRKKSAPRQDMDKWIVAIGKHKGRISGKKWVAIQNILKDNIPTGKKPAIMHNDYSLLSGLIFCDKCQSRMFAKQRSGKGGNRELYDYICNNKLRGGLDLCDCQNLNGQQADDIVCEYLMQYTDENSGIYKLLEKLKRDLQGQTQKSPIAVIDDKIKKCNSEIDNLINTLSHGNLGAAFIERVNARITELDKELASMKEEKARLQKDVNIIADREIQVDMLSTALSSFKDNFHTLTIEEKRTLIKLMVKKIVWDGKDLHIFIDGE

SEQ ID NO: 26477 - DNA, 50 bp, Eisenbergiella tayi; identical to SEQ ID NO: 1642
  source 1..50: mol_type = genomic DNA

SEQ ID NO: 26478 - DNA, 40 bp, Eisenbergiella tayi
  source 1..40: mol_type = genomic DNA
tgtcccctgcaacggaagatttcctaccatcatttccatc

SEQ ID NO: 26479 - DNA, 40 bp, Eisenbergiella tayi
  source 1..40: mol_type = genomic DNA
tgtcccctgcaacggaagaaatcctaccatcatttccatc

SEQ ID NO: 26480 - DNA, 50 bp, Eisenbergiella tayi
  source 1..50: mol_type = genomic DNA
agttgccgtaaggaagctggccaaaacccaccaaaaccaagatggcaaca

SEQ ID NO: 26481 - protein, 541 aa, Clostridium symbiosum
MKIYIYSRKSVYTGKGESVENQIEMCREYISTKIPESDNAEIAVYEDEGFSAKNTDRPQFQQMLRDIRLNKPEYVVCYRLDRISRNVSDFSSLIEDLNSYNISFICIKEEFDTSKPMGKAMMYIASVFAQLERETIAERVRDNMLMLARTGRWLGGTTPTGFTSEKIQEIIIDGKIKTSCKLKDNPEELKTIDCILEKFLELRSISGVSKYLIKQGIKSRTGKMFSLLGIKEILQNPVYCIADEDAWEYFTEHHSDVCFEKTDCSNKYGLLAYNKRDYRKKSAPRQDMDKWIVAIGKHKGRISGKKWVAIQNILKDNIPTGKKPAIMHNDYSLLSGLIFCDKCKSRMFAKQRSGKGGNRELYDYICNNKLRGGLDLCDCQNLNGQQADDIVCEYLMQYTDENSGIYKLLEKLKRDLQGQTQKSPVAVIDDKIKKCNSEIDNLINTLSHGNLGAAFIERVNARITELDKELASMKEEKARLQKDVNIIADREIQVDMLSTALSSFKDNFHTLTIEEKRTLIKLMVKKIVWDGKDLHIFIDGE

SEQ ID NO: 26482 - DNA, 50 bp, Clostridium symbiosum; identical to SEQ ID NO: 1642
  source 1..50: mol_type = genomic DNA

SEQ ID NO: 26483 - DNA, 40 bp, Clostridium symbiosum
  source 1..40: mol_type = genomic DNA
tgtgccgtgcaacgggaggttcccgacgctgattgcaata

SEQ ID NO: 26484 - DNA, 40 bp, Clostridium symbiosum
  source 1..40: mol_type = genomic DNA
tgtgccgtgcaacgggaggaacccgacgctgattgcaata

SEQ ID NO: 26485 - DNA, 50 bp, Clostridium symbiosum; identical to SEQ ID NO: 26480
  source 1..50: mol_type = genomic DNA

SEQ ID NO: 26486 - protein, 541 aa, Clostridium symbiosum
MKIYIYSRKSVYTGKGESVENQIEMCREYISTKIPESDNAEIAVYEDEGFSAKNTDRPQFQQMLRDIRLNKPEYVVCYRLDRISRNVSDFSSLIEDLNSYNISFVCIKEEFDTSKPMGKAMMYIASVFAQLERETIAERVRDNMLMLARTGRWLGGTTPTGFTSEKIQEIIIDGKIKTSCKLKDNPEELKTIDCILEKFLELRSISGVSKYLIKQGIKSRTGKMFSLLGIKEILQNPVYCIADEDAWEYFTEHHSDVCFEKTDCSNKYGLLAYNKRDYRKKSAPRQDMDKWIVAIGKHKGRISGKKWVAIQNILKDNIPTGKKPAIMHNDYSLLSGLIFCDKCKSRMFAKQRSGKGGNRELYDYICNNKLRGGLDLCDCQNLNGQQADDIVCEYLMQYTDENSGIYKLLEKLKRDLQGQTQKSPVAVIDDKIKKCNSEIDNLINTLSHGNLGAAFIERVNARITELDKELASMKEEKARLQKDVNIIADREIQVDMLSTALSSFKDNFHTLTIEEKRTLIKLMVKKIVWDGKDLHIFIDGE

SEQ ID NO: 26487 - DNA, 50 bp, Clostridium symbiosum; identical to SEQ ID NO: 1642
  source 1..50: mol_type = genomic DNA

SEQ ID NO: 26488 - DNA, 40 bp, Clostridium symbiosum; identical to SEQ ID NO: 26483
  source 1..40: mol_type = genomic DNA

SEQ ID NO: 26489 - DNA, 40 bp, Clostridium symbiosum; identical to SEQ ID NO: 26484
  source 1..40: mol_type = genomic DNA

SEQ ID NO: 26490 - DNA, 50 bp, Clostridium symbiosum; identical to SEQ ID NO: 26480
  source 1..50: mol_type = genomic DNA

SEQ ID NO: 26491 - protein, 541 aa, Enterocloster citroniae
MKIYIYSRKSVYTGKGESVENQIEMCREYISTKIPESDNAEIVVYEDEGFSAKNTDRPQFQQMLRDIKLNKPEYIVCYRLDRISRNVSDFSSLIEDLNSYNISFICIKEEFDTSKPMGKAMMYIASVFAQLERETIAERVRDNMLMLARTGRWLGGTTPTGFTSEKIQEIIIDGKIKTSCKLKDNPEELKTIDCILEKFLELRSISGVSKYLIKQGIKSRTGKMFSLLGIKEILQNPVYCIADEDAWEYFTEHHSDVCFEKTDCSNKYGLLAYNKRDYRKKSAPRQDMDKWIVAIGKHKGRISGKKWVAIQNILKDNIPTGKKPAIMHNDYSLLSGLIFCDKCQSRMFAKQRSGKGGNRELYDYICNNKLRGGLDLCDCQNLNGQQADDIVCEYLMQYTDENSGIYKLLEKLKRDLQGQTQKSPVAVIDDKIKKCNSEIDNLINTLSHGNLGAAFIERVNARITELDKELASMKEEKARLQKDVNIIADREIQVDMLSTALSSFKDNFHTLTIEEKRTLIKLMVKKIVWDGKDLHIFIDGE

SEQ ID NO: 26492 - DNA, 50 bp, Enterocloster citroniae; identical to SEQ ID NO: 1642
  source 1..50: mol_type = genomic DNA

SEQ ID NO: 26493 - DNA, 40 bp, Enterocloster citroniae
  source 1..40: mol_type = genomic DNA
tgtgccctgcaacggaaggttccccaccctgatcgccatt

SEQ ID NO: 26494 - DNA, 40 bp, Enterocloster citroniae
  source 1..40: mol_type = genomic DNA
tgtgccctgcaacggaaggaaccccaccctgatcgccatt

SEQ ID NO: 26495 - DNA, 50 bp, Enterocloster citroniae; identical to SEQ ID NO: 26480
  source 1..50: mol_type = genomic DNA

SEQ ID NO: 26496 - protein, 541 aa, Enterocloster citroniae
MKIFIYSRKSVYTGKGESVENQIEMCREYISTKIPESDNAEIVVYEDEGFSAKNTDRPQFQQLLRDIKLNKPEYVVCYRLDRISRNVSDFSSLIEDLNSYNISFICIKEEFDTSKPMGKAMMYIASVFAQLERETIAERVRDNMLMLARTGRWLGGTTPTGFTSEKIQEIIIDGKIKTSCKLKDNPEELKTIDCILEKFLELRSISGVSKYLIKQGIKSRTGKMFSLLGIKEILQNPVYCIADEDAWEYFTEHHSDVCFEKTDCSNKYGLLAYNKRDYRKKSAPRQDMDKWIVAIGKHKGRISGKKWVAIQNILKDNIPTGKKPAIMHNDYSLLSGLIFCDKCQSRMFAKQRSGKGGNRELYDYICNNKLRGGLDLCDCQNLNGQQADDIVCEYLMQYTDENSGIYKLLEKLKRDLQGQTQKSPVAVIDDKIKKCNSEIDNLINTLSHGNLGAAFIERVNSRITELDKELASMKEEKARLQKDVNIIADREIQVDMLSTALSSFKDNFHTLTIEEKRTLIKLMVKKIVWDGKDLHIFIDGE

SEQ ID NO: 26497 - DNA, 50 bp, Enterocloster citroniae; identical to SEQ ID NO: 1642
  source 1..50: mol_type = genomic DNA

SEQ ID NO: 26498 - DNA, 40 bp, Enterocloster citroniae; identical to SEQ ID NO: 26493
  source 1..40: mol_type = genomic DNA

SEQ ID NO: 26499 - DNA, 40 bp, Enterocloster citroniae; identical to SEQ ID NO: 26494
  source 1..40: mol_type = genomic DNA

SEQ ID NO: 26500 - DNA, 50 bp, Enterocloster citroniae; identical to SEQ ID NO: 26480
  source 1..50: mol_type = genomic DNA

SEQ ID NO: 26501 - protein, 471 aa, Streptococcus agalactiae; identical to SEQ ID NO: 2876

SEQ ID NO: 26502 - DNA, 50 bp, Streptococcus agalactiae; identical to SEQ ID NO: 2872
  source 1..50: mol_type = genomic DNA

SEQ ID NO: 26503 - DNA, 40 bp, Streptococcus agalactiae
  source 1..40: mol_type = genomic DNA
ccaaccaatattgttgtacaagccatgtgaatatctcctt

SEQ ID NO: 26504 - DNA, 40 bp, Streptococcus agalactiae; identical to SEQ ID NO: 26503
  source 1..40: mol_type = genomic DNA

SEQ ID NO: 26505 - DNA, 50 bp, Streptococcus agalactiae
  source 1..50: mol_type = genomic DNA
aaacaacatacctgattactgtacaagaataatgcaatacattatcatgg

SEQ ID NO: 26506 - protein, 471 aa, Streptococcus agalactiae
MRKVAIYSRVSTINQAEEGYSITGQIDSLTKYCDAMGWVIYKNYSDAGYSGGKLERPAILELIEDGKNNKFDTVLVYKLDRLSRNVKDTLYLIKDIFTKNNIHFVSIKENIDTSSAMGNLFLTLLSAIAEFEREQIKERMQFGVMNRAKSGKTTAWKTPPYGYSYDKKNKVLLLNEFEATNVKQIFNMIVAGHSIMSITNYAKEHFAGNTWTHVKIRRILENETYKGLVKYREQTFAGSHDAIIDEELFTKAQLALDKRTNSQNNTRPFQGKYMLSHIAKCGYCGAPLKVCTGRPRADGTRRQTYICVNKTESGAKRGVNNYNNNKICYSGRYEKSCIEKYVINELSKIQHDKEYLEKMKNNSKKVDVSSLKKEIKSIDKKINRLNDLYVNDFISLPKLTEEIKKLNKLKEGYHKTIKLNYVENKNEDIISTLVNNIDISKSSYDVQSRIVKQLVDRVEVTTDNIDIIFNF

SEQ ID NO: 26507 - DNA, 50 bp, Streptococcus agalactiae
  source 1..50: mol_type = genomic DNA
aaacgacaaccaatattgttgtacatgaaaaacgctgttttttatcattc

SEQ ID NO: 26508 - DNA, 40 bp, Streptococcus agalactiae; identical to SEQ ID NO: 26503
  source 1..40: mol_type = genomic DNA

SEQ ID NO: 26509 - DNA, 40 bp, Streptococcus agalactiae; identical to SEQ ID NO: 26503
  source 1..40: mol_type = genomic DNA

SEQ ID NO: 26510 - DNA, 50 bp, Streptococcus agalactiae; identical to SEQ ID NO: 26505
  source 1..50: mol_type = genomic DNA

SEQ ID NO: 26511 - protein, 471 aa, Streptococcus agalactiae; identical to SEQ ID NO: 2871

SEQ ID NO: 26512 - DNA, 50 bp, Streptococcus agalactiae; identical to SEQ ID NO: 2872
  source 1..50: mol_type = genomic DNA

SEQ ID NO: 26513 - DNA, 40 bp, Streptococcus agalactiae; identical to SEQ ID NO: 26503
  source 1..40: mol_type = genomic DNA

SEQ ID NO: 26514 - DNA, 40 bp, Streptococcus agalactiae; identical to SEQ ID NO: 26503
  source 1..40: mol_type = genomic DNA

SEQ ID NO: 26515 - DNA, 50 bp, Streptococcus agalactiae; identical to SEQ ID NO: 26505
  source 1..50: mol_type = genomic DNA

SEQ ID NO: 26516 - protein, 471 aa, Streptococcus agalactiae
MRKVAIYSRVSTINQAEEGYSITGQIDSLTKYCDAMGWVIYKNYSDAGYSGGKLERPAISELIEDGKNNKFDTVLVYKLDRLSRNVKDTLYLIKDIFTKNNIHFVSIKENIDTSSAMGNLFLTLLSAIAEFEREQIKERMQFGVMNRAKSGKTTAWKTPPYGYTYDKENKVLLLNEFEATNVKQIFNMIVAGHSIMSITNYAKEHFAGNTWTHVKIRRILENETYKGLVKYREQTFAGNHDAIIDEELFTKAQLALDKRTNSQNNTRPFQGKYMLSHIAKCGYCGAPLKVCTGRPRVDGTRRQTYVCVNKTESGAKRGVNNYNNNKVCNSGRYEKSCVEKYVINELSKIQHDKEYLEKMKNNSKKVDVSSLKKEIQSIDKKINRLNDLYVNDFISLSKLTEEIKKLNKLKEGYHKTIKLNYVENKNEDVISILVNNIDISKSSYDVQSRIVKQLVDRVEVTTDNIDIIFNF

SEQ ID NO: 26517 - DNA, 50 bp, Streptococcus agalactiae; identical to SEQ ID NO: 2872
  source 1..50: mol_type = genomic DNA

SEQ ID NO: 26518 - DNA, 40 bp, Streptococcus agalactiae; identical to SEQ ID NO: 26503
  source 1..40: mol_type = genomic DNA

SEQ ID NO: 26519 - DNA, 40 bp, Streptococcus agalactiae; identical to SEQ ID NO: 26503
  source 1..40: mol_type = genomic DNA

SEQ ID NO: 26520 - DNA, 50 bp, Streptococcus agalactiae; identical to SEQ ID NO: 26505
  source 1..50: mol_type = genomic DNA

SEQ ID NO: 26521 - protein, 473 aa, Bacillus thuringiensis
MTVGIYIRVSTQEQASEGHSIDSQKERLASYCNIQGWEDYRFYVEEGISGKSTNRPKLQLLMDHIEKSQINSLLVYRLDRLTRSVIDLHKLLNFLNLHNCALKSATETYDTTTANGRMFMGIVALLAQWESENMSERIKLNLEHKVLVEGERVGAVPYGFDLSDDEKLIKNEKSPILLDMVKKVESGWSANRVANYLNLTNNDRNWTANAIFRLLRNPAIYGATKWNDKIAEKTHEGIIDKERFVRLQQIFSDRSIHHRRDVKSTYIFQGVLHCPNCSNKLSVNRFNRKRKDGSEYHGVIYRCQPCAKQNKMNFTIGEARFSKALIEYMARVEFQPQEEEITSTKSGRDIHQSQLQQIERKRGKYQKAWASDLISDTEFEKLMNETRYAYDECKKKLHECEEPIKQDIERLKEIVFVFNETFNDLTQDEKKEFISRFIRNIRYTTQEQQPIRTDQSKSRKGKPKVIITEVEFY

SEQ ID NO: 26522 - DNA, 50 bp, Bacillus thuringiensis
  source 1..50: mol_type = genomic DNA
agttgtatttatactactagctctgtagctaacgttatataaatacactt

SEQ ID NO: 26523 - DNA, 40 bp, Bacillus thuringiensis
  source 1..40: mol_type = genomic DNA
cgtcgtcttcccagatccagtcggtccagtaaacacaagt

SEQ ID NO: 26524 - DNA, 40 bp, Bacillus thuringiensis
  source 1..40: mol_type = genomic DNA
cgtcgtcttcccagatccaatcggtccagtaaacacaagt

SEQ ID NO: 26525 - DNA, 50 bp, Bacillus thuringiensis; identical to SEQ ID NO: 5915
  source 1..50: mol_type = genomic DNA

SEQ ID NO: 26526 - protein, 557 aa, Pseudomonas putida
MPKAYAYVRWSTASQGEEGRDSHDRQTTPLQAFTEVTGVPVVETVIDKGISAFRGANARIGQLKGLLDRIESGEIEHGDYIIVESIDRLTRQKLTDSVDLIQSILKKGVRLHTVFDNKTYSYDDPSRDLETLILVGVIAKRAHEESDTKSKRLKSVWVKKRDTAETNVIGKRCPYGFRFDEQSQSFVIVEEEAQEIRQIFELLKHVGVLESVKQVNKNSKRRWTRTSVLHLINSKSPIGVLRLQRRNENGTKAFDRYVPDYFPKIIDEIEFSAAVAAMKTRLNGRKYGRRTPHHYNIFRHCIQCEEHKCGMIFNLQILGTEKKRYAYLVCSNRAERVCECNNRIRFELVFGTFLAFVRQLSENRYIDERTDKKRKDFTWFSQDQYKQMDTVNDAFSRFFSVRDTSAPKEEIRAKKAKLTTEKTTLEMLEASLAQFDGIIPNTFIRRVADSEARITVLESEIQKLEGTLAIEAETLEITTYEDIIALYETEEGRLKLNTFFITRGITFDVKIDKETNLVGMDIRIKGEKDFNLYTHQFFKQKAPLTPFGIPDLSHIIK

SEQ ID NO: 26527 - DNA, 50 bp, Pseudomonas putida
  source 1..50: mol_type = genomic DNA
ttattagaaaacgctagaccgctggaccacggtaagctattttctaataa

SEQ ID NO: 26528 - DNA, 40 bp, Pseudomonas putida
  source 1..40: mol_type = genomic DNA
gctgtccaggttgcccgaggaaatcggcgccatcgacaac

SEQ ID NO: 26529 - DNA, 40 bp, Pseudomonas putida
  source 1..40: mol_type = genomic DNA
gctgtccaggttgcccgagcaaatcggcgccatcgacaac

SEQ ID NO: 26530 - DNA, 50 bp, Pseudomonas putida
  source 1..50: mol_type = genomic DNA
tacttagcagtactgagacctctgcaccacagctaggaatattctaatag

SEQ ID NO: 26531 - protein, 557 aa, Pseudomonas fluorescens
MPKAYAYVRWSTASQGEEGRDSHDRQTTPLQAFTEVTGVPVVETVIDKGISAFRGANARIGQLKGLLDRIESGEIEHGDYIIVESIDRLTRQKLTDSVDLIQSILKKGVRLHTVFDNKTYSYDDPSRDLETLILVGVIAKRAHEESDTKSKRLKSVWVKKRDTAETNVIGKRCPYGFRFDEQSQSFVIVEEEAQEIRQIFELLKHVGVLESVKQVNKNSKRRWTRTSVLHLINSKSPIGVLRLQRRNENGTKAFDRYVPDYFPKIIDEIEFSAAVAAMKTRLNGRKYGRRTPHHYNIFRHCIQCEEHKCGMIFNLQILGTEKKRYAYLVCSNRAERVCECNNRIRFELVFGTFLAFVRQLSENRYIDERTDKKRKDFTWFSQDQYKQMDTVNDAFSRFFSVRDTSAPKEEIRAKKAKLTTEKTTLEMLEASLAQFDGIIPNTFIRRVADSEARITVLESEIQKLEGTLAIEAETLEITTYEDIIVLYETEEGRLKLNTFFITRGITFDVKIDKETNLVGMDIRIKGEKDFNLYTHQFFKQKAPLTPFGIPDLSHIIK

SEQ ID NO: 26532 - DNA, 50 bp, Pseudomonas fluorescens; identical to SEQ ID NO: 26527
  source 1..50: mol_type = genomic DNA

SEQ ID NO: 26533 - DNA, 40 bp, Pseudomonas fluorescens
  source 1..40: mol_type = genomic DNA
gctgagcattgccccggatgaaatgggcgtgatcaacagc

SEQ ID NO: 26534 - DNA, 40 bp, Pseudomonas fluorescens
  source 1..40: mol_type = genomic DNA
gctgagcattgccccggatcaaatgggcgtgatcaacagc

SEQ ID NO: 26535 - DNA, 50 bp, Pseudomonas fluorescens; identical to SEQ ID NO: 26530
  source 1..50: mol_type = genomic DNA

SEQ ID NO: 26536 - protein, 503 aa, Aeromonas dhakensis
MGREEHTTLKSTAYSYIRLSSRQQILGDGQRRQLEAALTYCRDNNLTLSQKTFKDLGVSAYKEVDRPSLSDLHQCIANGTIKAGDVIILEKLDRLSRKGISATQRMLQEILNQGVEVVSLMDGMRLDRNSLDDLTSVIRIAIAADLANQESSTKSKRVQANKDQMRERIKAGIPIPQKLPFWLSFVDGKYVFNEKQQILERIIDLKKSGTSLMKIAGILNEENVKSPNVRGIWSPSTLRDVLRNPILYGAHQLTVKVKGKYIPSELVKGYYPAVMTYSEFTQLNNKAIVRPAGTSETNHISGLVYCGVCGNKMSNKSRTTSKGKVNYYYCRQSMVKACGFRTHIRDLHKMVIKNISHLTVTKPTQSVDINALLLELDQVESRVKDLTAEFSNLNSALPVSAISAAISSMEERKKELNAKIREASTIEPDALQSVMKHVDDPKKFNIDLKKIIKRIEVSPYGEHQKIKVIRFDNHSIMWRTGGWIKGVSDTEKTLNMVMELLEE

SEQ ID NO: 26537 - DNA, 50 bp, Aeromonas dhakensis
  source 1..50: mol_type = genomic DNA
ttgtgttcttttgattgttatcgcaaggtgttacaatcaaaaacacacac

SEQ ID NO: 26538 - DNA, 40 bp, Aeromonas dhakensis
  source 1..40: mol_type = genomic DNA
ctgcgaagcccgctatcgcaagggattccacgcccacgag

SEQ ID NO: 26539 - DNA, 40 bp, Aeromonas dhakensis
  source 1..40: mol_type = genomic DNA
ctgcgaagcccgctatcgcatgggattccacgcccacgag

SEQ ID NO: 26540 - DNA, 50 bp, Aeromonas dhakensis
  source 1..50: mol_type = genomic DNA
ttgtgttataatcgtggttactgcattattttacacacatgcacacacac

SEQ ID NO: 26541 - protein, 518 aa, Brevibacillus brevis
MVTHLKNLDIAIYLRKSRKDIETEREAALRGEEYDTLTKHRKELLAYARKNEHNIVDIFEEVVSGEYIAERPEMQALLQKVKDLNYDGILVMDLDRFGRGDKMDQGRIERTFKESQTLILTPQETLDLNEESGEFTVEVKTFLARMEYKQIKKRLQGGRRRGTTSGRDQSTKPPYGYRKDDSLRLVIHEEEAKIVRMIFQWCVDVGMGRSAIAQRLMDLEILSPTGLPQWQHVTIGRILKNPKYKGDQVFGRTKWSKNEDGTYSYTKVHDIEQMAYLEGAHEPIVDPDLWEKAQEALSRRREAPVKKNHDILNPFAGILKCKKCGKAMLANKPTNRPNKYLSCYTTRCDTKMIALYKVEEVFLRQLETIFDHLRATAKKRRSQPDDAALDLAKKKVLRIKEDIKKTNLRKTNLHDLLEDGTYDKDTFLERSRLLQEQLKQLDNELEAAEKQVELEAGRLNQALKVLPMIKKALTEYKSAGSIKEQNALLKEIVREIKYRRETDWTGQYQFEIEIHLYD

SEQ ID NO: 26542 - DNA, 50 bp, Brevibacillus brevis
  source 1..50: mol_type = genomic DNA
tgtacatatcatttaacgtaagacttattctatgttaaatgatatgtact

SEQ ID NO: 26543 - DNA, 40 bp, Brevibacillus brevis
  source 1..40: mol_type = genomic DNA
tgtaacggggtcacggattttattcatgttgcaataagct

SEQ ID NO: 26544 - DNA, 40 bp, Brevibacillus brevis
  source 1..40: mol_type = genomic DNA
tgtaacggggtcacggattacattcatgttgcaataagct

SEQ ID NO: 26545 - DNA, 50 bp, Brevibacillus brevis
  source 1..50: mol_type = genomic DNA
tttacatttttttaaaaataagacacattctttatttcttaatatctata

SEQ ID NO: 26546 - protein, 544 aa, Intestinibacillus massiliensis
MNVLKIRNEMRSGKSIFDLPLRVTFYARVSTDKDEQLNSLENQVQYYTELIQSKPNWTYVEGYIDEGISGTSTKKRDSFNRMISDAKAGRFDFIITKEISRFSRSTLDSIQYTQELLEHDVGVLFQNDNINTLDSDSEFRLVVMAGVAQDEVRKLSERLKFGFRQAIKNGHVLGNDKLWGYYKKDCVLTINEEEARVIRRIFDLYANQQMGIRRISQTLFDEGFTSRKGNAFNVLTIRHILCNPKYKGWYCANKSQTVDYRSKRKVFLDESEWVMYPDPSIPAIVSEELWDRANALYKRRSEQMMSHQSAAEFHNRYPYSGKIICEEHGTSYHRQVLKSAKGEKEVWQCRVYRNRGRAACSAPQLRTTELNQIMAHIFDQLAQNKQAIVDAVVKVIQSVPDEHDYGRDTLRIEEDLSAIHAKKDRLLEMSMAEAITIEEFKCRNDGFNEQIRGLEERLELLKAEEQKGKRSVEQLEQIRTALEQELSFENGINSELVTTILDHIVVKKGSTREEVHLDIHLKFGGPYGVVFDRENSSFRFSRLR

SEQ ID NO: 26547 - DNA, 50 bp, Intestinibacillus massiliensis
  source 1..50: mol_type = genomic DNA
ttcctcctttcgtttcagccgtttaagaagggatgaagcggaaggagaga

SEQ ID NO: 26548 - DNA, 40 bp, Intestinibacillus massiliensis
  source 1..40: mol_type = genomic DNA
gctggtggcgcacatcgtcaagaaatactacgccatgccc

SEQ ID NO: 26549 - DNA, 40 bp, Intestinibacillus massiliensis
  source 1..40: mol_type = genomic DNA
gctggtggcgcacatcgtcgcgaaatactacgccatgccc

SEQ ID NO: 26550 - DNA, 50 bp, Intestinibacillus massiliensis
  source 1..50: mol_type = genomic DNA
ttcctgctttttgtgcaaacctttgcaaaaggaagacaggaaaggagaaa

SEQ ID NO: 26551 - protein, 515 aa, Bacillus cereus
MKTAIYLRKSRADLEAEARGEGETLAKHRTTLLKIAKEMNLNVLSVREEIVSGESLVKRPEMLALLEEIEDNKYDAVLCMDMDRLGRGGMKEQGIILETFKRSNTKIMTPRKTYDLNDEWDEEYSEFEAFMARKELKIITRRMQRGRVASVEAGNYLGTHAPFGYDIHRLNKRERTLTINSEEASVVRMIFDWYANEDMGANAIRSKLNDLGYKSKLGNEWNPYSILDILKNNVYIGKVTWQKRKEVKRPDAVKRSCARQDKSDWIIADGKHEPIIPESLFEQVQEKLNSRYHVPYNTNGIKNPLAGIIKCSKCGYSMVQRYPKNRKETMDCKHRGCENKSSYTELIEKRLLEALKEWYINYKADFEKHKQDDKLKETQVIQMNVAALRKLDKELVDVQKQKNNLHDLLERGVYTVDMFLERSNVISDRITEITSTVENLKKEIKTEIKKEKVKKDTIPQVEHVLDLYFKTDDPKKKNSLLKSVLEKAVYKKEKWQRLDDFELVLYPKLPQDGDI

SEQ ID NO: 26552 - DNA, 50 bp, Bacillus cereus
  source 1..50: mol_type = genomic DNA
ctttgtcgtcaccttgttggtgtaatgaggttgacgccaacatggtagca

SEQ ID NO: 26553 - DNA, 40 bp, Bacillus cereus
  source 1..40: mol_type = genomic DNA
ttttgttgccattaggcgcattagatttaccccattaagc

SEQ ID NO: 26554 - DNA, 40 bp, Bacillus cereus
  source 1..40: mol_type = genomic DNA
ttttgttgccattaggcgctatagatttaccccattaagc

SEQ ID NO: 26555 - DNA, 50 bp, Bacillus cereus
  source 1..50: mol_type = genomic DNA
ctttgtcctacacatttttgtgtatagatgttgtctgggtgatggaaggg

SEQ ID NO: 26556 - protein, 566 aa, Mycobacteroides abscessus
MSNNTFATTESTTAVKIAVSYLRVSTKEQAERDGEPDGYSIPAQRDANQRKATSINAVVQMEFVDRGASARSADRPQLQEMLRYLENNHVDYVIVHKVDRLARSRADDVEISLAIKKAGAELVSATENIDETPSGMLLHDIMSSIGAFYSRNLAVEVLKGMDQKAKTGGTPGMAPIGYLNIPKLNANGSQVRTVEVDPVRGPLIAWAFQAYATGNWTVTALTEELNTRGLTTRPNSRTPGRPVSRSSVHQFLINPYYKGIVTYRKATYDGRHEPLTDAVTWARVQEILRDHAVGEKQREHPHYLKSSVYCGSCGSRLVVTIAKNRHGTVYPYFMCVGRHQKRNTCQQKAKLIPVVEQEVEDEYDRQLVQLKAEERDEIEAMISDGIQDFRRSSETSRKTLTVQKDRLVSERMRLLQAHYGGAIPLDLLKQEQDRIASQLASIEERLASSATEFERFEQLIKRALDLATYAARAYRHAATVKGSDQIRRLFNQAFFTRIRVSDDRATGELAEPFKTLLSPEMAAAAKHHRQTKSASQNATHTLTGAITAENDKPAPRGAGLKEAFLV

SEQ ID NO: 26557 - DNA, 50 bp, Mycobacteroides abscessus
  source 1..50: mol_type = genomic DNA
aggtttgaaagaagcatttttggtacacctccgcgacgccgtttcaaatt

SEQ ID NO: 26558 - DNA, 40 bp, Mycobacteroides abscessus
  source 1..40: mol_type = genomic DNA
acctcgcgaacgagctggtacccccgatgggattcgaacc

SEQ ID NO: 26559 - DNA, 40 bp, Mycobacteroides abscessus; identical to SEQ ID NO: 26558
  source 1..40: mol_type = genomic DNA

SEQ ID NO: 26560 - DNA, 50 bp, Mycobacteroides abscessus
  source 1..50: mol_type = genomic DNA
agctttccacagataatttatggaacacctcagggaacagctttcatatt

SEQ ID NO: 26561 - protein, 556 aa, Anaerobutyricum hallii
MVMMNGMEYTGMDAILAGSFRAAIYCRLSKDDDLDGESASIANQRDMLENYCEKQGWEVVAVYQDDGYTGLNMERPDLKRMLKAIERRQANLVITKDLSRLGRNYLQTGFLIEDFFPRHGVRYIAMNDGIDTMRDNNDIAPFKNILNEMYSKDISKKVHSSYLLKAQKGQFTGCLAPFGYQKDPEDKNHLLIDEETAPIVRRLFAWALEGHGPNYIRRRLEEEKIPCPTYWNRVRGLRNVSTKWEKKDPVNGRYIWDFTVIKDILMNPVYTGAIASQKKEYRFKIGTIGEKKPEEWIVVENQHEPLVDRKTFDIVQRKLKSRQRPRQTGEISLFAGLIKCGECGKSLTIRYTNEKHPKQIYSCKTYNAYGKQHCSQHRVEYDTLYRLVLNKIRECARAALMDGEAVAEKLSDTCEAEQKGQREALERSLAKDEERIDVLEKMVLRLYEDMVAGRISEANFNLLMEKTQKEQAELKTRVEEGRKKLADEIRLACDARQWVEAIQEYADITELDAATLNRLIKEIVVHESIDSDKTRHISIEIHFNLKPIPEVEQVTA

SEQ ID NO: 26562 - DNA, 50 bp, Anaerobutyricum hallii; identical to SEQ ID NO: 15192
  source 1..50: mol_type = genomic DNA

SEQ ID NO: 26563 - DNA, 40 bp, Anaerobutyricum hallii
  source 1..40: mol_type = genomic DNA
aaagtcccagggaatcaagcagctgatggcaggaggcggt

SEQ ID NO: 26564 - DNA, 40 bp, Anaerobutyricum hallii
  source 1..40: mol_type = genomic DNA
aaagtcccagggaatcaagtggctgatggcaggaggcggt

SEQ ID NO: 26565 - DNA, 50 bp, Anaerobutyricum hallii
  source 1..50: mol_type = genomic DNA
tcctacacacccaggtttatggtatggcctatggcttccaggctgcaaac

SEQ ID NO: 26566 - protein, 554 aa, Anaerobutyricum soehngenii
MMNGFEYAGMDAILAGSFRAAIYCRLSKDDDLDGESASIANQRDMLETYCEKQGWEVVAVYQDDGYTGLNMERPDLKRMLKAIERRQINLVVTKDLSRLGRNYLQTGFLIEDFFPRHGVRYIAMNDGIDTMRDNNDIAPFKNILNEMYSKDISKKVHSSYLLKAQKGQFTGCLAPFGYQKDPEDKNHLLIDEETAPIVRRLFAWALEGHGPNYIRRRLEEGKIPCPTYWNRVRGLRNVSTKWEKKDPVNGRYIWDFSVIKDILMNPVYTGAIASQKKEYRFKIGTIGEKKPEEWIVVENQHEPLVDRKTFDIVQRKLKSRQRPRQTGEISLFAGLIKCGECGKSLTIRYTNEKHPKQIYSCKTYNAYGKQHCSQHRVEYDTLYRLVLNKIRECARAALMDGEAVAGKLSDTCEAEQKGQREALERSLAKDEERIDVLEKMVLRLYEDMVAGRISEVNFNLLMEKTQKEQAELKARVEEGRKKLADEIRLACDARQWVEAIQEYADITELDAATLNRLIKEIVVHESIDSDKTRHISIEIHFNLKPIPEVEQVTA

SEQ ID NO: 26567 - DNA, 50 bp, Anaerobutyricum soehngenii; identical to SEQ ID NO: 15192
  source 1..50: mol_type = genomic DNA

SEQ ID NO: 26568 - DNA, 40 bp, Anaerobutyricum soehngenii
  source 1..40: mol_type = genomic DNA
gaaatcccaggggattaagcagctgatggcgggaggcggt

SEQ ID NO: 26569 - DNA, 40 bp, Anaerobutyricum soehngenii
  source 1..40: mol_type = genomic DNA
gaaatcccaggggattaagtggctgatggcgggaggcggt

SEQ ID NO: 26570 - DNA, 50 bp, Anaerobutyricum soehngenii; identical to SEQ ID NO: 26565
  source 1..50: mol_type = genomic DNA

SEQ ID NO: 26571 - protein, 498 aa, Anoxybacillus gonensis
MSRRKVALYIRKSREDAVMSDKEETLQTQEQTLIRLAESRGYKQYDIFKEIESSIRYDRPELIKLMRGIEQGMYSKLLIIHIDRLGRDVGLLDDLKKLCIANDVIIETPDSTINFKDDNHDLMYGFSSVLADFEYKRIRHRLATGKINTVAIRNRWIGSQAPYGYYYCKEEKILKPHPEQSVVFRNMVAMALEGSTFSEIANKLNDLGQFTQHGNRWTAGRIQKLLKNRTYLGEAEYNSTRLNQRAVAKNCHEPLMSYEEYDTIHKLSASRRNYDSRDWGNIKTPLDNLVYCGKCHRKMSIQISKKYSKKRGHWHFYQARRCIHYNPDGTRCTNSGCKIDIIEAVVLEQLEQYKSSLIEKLKSIRENDTSGAEADIRKRLEQLKEDAKKQDVRLKRLTDLYLDAMMDKEEYEQRRKDILEESKAISSEIGYLEAKLVNLDVSNLETKYQKMIDLIDNYKDMPLEEKNKMMRLLIARIELTKENTYSQPKIDIWFMDAV

SEQ ID NO: 26572 - DNA, 50 bp, Anoxybacillus gonensis
  source 1..50: mol_type = genomic DNA
cagagtgtaataagaaatcctcataaattgacatttcttattgcatccca

SEQ ID NO: 26573 - DNA, 40 bp, Anoxybacillus gonensis
  source 1..40: mol_type = genomic DNA
cgcatgcaaatcgccagtaaagtgcaaattaatgtcttcc

SEQ ID NO: 26574 - DNA, 40 bp, Anoxybacillus gonensis
  source 1..40: mol_type = genomic DNA
cgcatgcaaatcgccagtaatgtgcaaattaatgtcttcc

SEQ ID NO: 26575 - DNA, 50 bp, Anoxybacillus gonensis
  source 1..50: mol_type = genomic DNA
cagagtgtataagcaagaccttacatattaacatgttttgatgaaaacca

SEQ ID NO: 26576 - protein, 584 aa, Aeromonas dhakensis
MTQMYSYIRWSSDRQELGTTLQRQITGAKEFAIQQGLELVEVIDAGVSAFKGKNTTDGKLGDFIAAVEAKAIPSDSWLYVENLDRLTRQEVTTAQELFLKLLRLGLTVVTGMDKRVYTIESVNRNPTDLMLSILLFSRANEESKTKQARTIGNVETLIERHKKGEPVNIKSAGKHPFWVDDSGSQYEVIKPHPKYWQIAREALDMFLEGHGIYKVKRYLDDQYPNELNGKEWDYQVIKRMRESRALIGERKLNVQKRTYILENYYPALCKSESEFLRLQELRVQNGHKSKKDPNKDNIKLMSGLSILRCARCKGTMHGYLNKGKPRYICVNGKHKQKGCSAWSVTAPLVEQCIIICLLMEYLDSSRDTSQNVSDIESAIESKQNLLETCSNKVKNLVSLVENGVGNISELSDRLIELGKERDGLIKQISNLSDKKILMEGKGSFEDTMIDFIGMIRWDTFNDITDESRNKIRNNISSIIETAFLDKIDGCLSIKVKCIGSDILYVFTGDMMKPQWKFYTEHYVDGESSLVSTNDDLLSHEKMKTIINTEKEIQNTYQKYFKTVMGLLSTVGYPEINGSAFWPNR

SEQ ID NO: 26577 - DNA, 50 bp, Aeromonas dhakensis
  source 1..50: mol_type = genomic DNA
tagtttacttattgattgttagggcaacccaatgataaaaaaccaatctt

SEQ ID NO: 26578 - DNA, 40 bp, Aeromonas dhakensis
  source 1..40: mol_type = genomic DNA
atcgaccaggtttttggggcaacccaaggagacgaatcct

SEQ ID NO: 26579 - DNA, 40 bp, Aeromonas dhakensis
  source 1..40: mol_type = genomic DNA
atcgaccaggtttttggggttacccaaggagacgaatcct

SEQ ID NO: 26580 - DNA, 50 bp, Aeromonas dhakensis
  source 1..50: mol_type = genomic DNA
caggttgctttttctttgttagggttctccagagatatgaaaccaatttt

SEQ ID NO: 26581 - protein, 518 aa, Pseudomonas putida
MNTGHPVTKRAISYIRFSTGKQTKGSSEWRQDAKVRDWLDSHPDYEPSDLSFEDLGKSGWKGAHIEGGMGELLAAVEWGSIRSGDVVLIEALDRAGRLPLMQMLNKVITPILEAGVSLVTMDDGFTYTAESLDGVHAHVLVAKIQAANQFSERLSERVTKSYKKRREEAAQGKIPKRRTPLWLDGDGKLIEHLAPHIKTAFELYADGFGERRILRRLQETEIPEFQGLYGSTLKRWLQNKIAIGNWGDIVNVYPRVVDPELFYRVQERIAGNKTTRPSSPSKHELTGIVKCAHCGRNYNYHVFKEQPTVLQCSNRFMSTAEKCENSKSVPLGVVQYILLRTSKQARIDAIQKKKLTVNQKRTIVLEGEIASLTQRLQGIARVIAATGDEEELVEQVRLLSAQRKEMRAELAMIAASGDVVSVMDQVKDIQITNDDPMQLGADLQSVGYTIICDMNGGIATSHGDCKEWQYVGYERKRDAYIVKGGEDTTAIPVAPFRETAGTVNIMAALGLELDLTKE

SEQ ID NO: 26582 - DNA, 50 bp, Pseudomonas putida
  source 1..50: mol_type = genomic DNA
ctctacgaaattgcagcttactctatacagtaggctgcaattcggtataa

SEQ ID NO: 26583 - DNA, 40 bp, Pseudomonas putida
  source 1..40: mol_type = genomic DNA
gagcctgataccgttcaccatgcagatggccttcgtggtc

SEQ ID NO: 26584 - DNA, 40 bp, Pseudomonas putida
  source 1..40: mol_type = genomic DNA
gagcctgataccgttcaccaagcagatggccttcgtggtc

SEQ ID NO: 26585 - DNA, 50 bp, Pseudomonas putida
  source 1..50: mol_type = genomic DNA
ctctagttataattaacttactccaaacagtaggctctgaatgtgcacaa

SEQ ID NO: 26586 - protein, 596 aa, Mycobacteroides abscessus; identical to SEQ ID NO: 12486

SEQ ID NO: 26587 - DNA, 50 bp, Mycobacteroides abscessus
  source 1..50: mol_type = genomic DNA
cctagttcgagtacggccagcctggtcggggtcctcggctcatattcaaa

SEQ ID NO: 26588 - DNA, 40 bp, Mycobacteroides abscessus
  source 1..40: mol_type = genomic DNA
tcgctcacctctcagctcagtcggggtggcgggattcgaa

SEQ ID NO: 26589 - DNA, 40 bp, Mycobacteroides abscessus
  source 1..40: mol_type = genomic DNA
tcgctcacctctcagctcagccggggtggcgggattcgaa

SEQ ID NO: 26590 - DNA, 50 bp, Mycobacteroides abscessus
  source 1..50: mol_type = genomic DNA
cctggttccatgctggccagcctggccgtggttctcctgacttttcctca

SEQ ID NO: 26591 - protein, 596 aa, Mycobacteroides abscessus; identical to SEQ ID NO: 12496

SEQ ID NO: 26592 - DNA, 50 bp, Mycobacteroides abscessus; identical to SEQ ID NO: 26587
  source 1..50: mol_type = genomic DNA

SEQ ID NO: 26593 - DNA, 40 bp, Mycobacteroides abscessus; identical to SEQ ID NO: 26588
  source 1..40: mol_type = genomic DNA

SEQ ID NO: 26594 - DNA, 40 bp, Mycobacteroides abscessus; identical to SEQ ID NO: 26589
  source 1..40: mol_type = genomic DNA

SEQ ID NO: 26595 - DNA, 50 bp, Mycobacteroides abscessus; identical to SEQ ID NO: 26590
  source 1..50: mol_type = genomic DNA

SEQ ID NO: 26596 - protein, 510 aa, Pectobacterium polaris
MPQDSNGIAYSYVRFSSKKQASGDSLRRQTEMAEEYASRHMLRLSSKNFQDLGISAFREGKRPSLADMLTAIDEGQITAGSTIIIEALDRLSRRGIDVTLETVKEILRKDVQIVSLSDGLVLTKSSLNELQSVIRIALAADLAYKESERKAQRLRETKGQQRQDALNGIPINKILPFWLKRTETGYTFSDKVETARQIVTLKQEGKGSNMIAKFLNKRGIAGIRTAQWNHASITKMLKNPALYGAYQTGETNKEREMIQLEIVEGYYPALISKDEWLLLQSDQSKSTRGRRSTDNPYSGLLRCGCGGALIKRKSTIRGKLYVYHGCLNAKDGRCSQNLSIKGLDDALATMLGRLEFKKAVTSDRSAYLERQQLENRIANLNKTLQEVDHVPASVIQTIITMEARIKEITQQIETGEREQRGIDAVNNAKLSSITDSLELNLMLKRVLKSITVTRCGLGWAVRVFHLSGHSQSFLLVNGQLKLVSDSIALKRLLAEYMEDDKTSSYEPIYD

SEQ ID NO: 26597 - DNA, 50 bp, Pectobacterium polaris
  source 1..50: mol_type = genomic DNA
atgacaaattattatatatgaaactgcatggtgatattgttacttaatag

SEQ ID NO: 26598 - DNA, 40 bp, Pectobacterium polaris; identical to SEQ ID NO: 20093
  source 1..40: mol_type = genomic DNA

SEQ ID NO: 26599 - DNA, 40 bp, Pectobacterium polaris
  source 1..40: mol_type = genomic DNA
caacggcttgctgccgaacttcatggtgatattgttggta

SEQ ID NO: 26600 - DNA, 50 bp, Pectobacterium polaris
  source 1..50: mol_type = genomic DNA
atgataaaccaagcagaatgaaccttcatggtaatatatgttcttactag

SEQ ID NO: 26601 - protein, 532 aa, Clostridioides difficile
MKAAIYSRKSRFTGKGDSIENQIQLCIDYAKSIGVKDFLIYEDEGFSGSNIDRPQFKKMMQDAKDKKFSYLVCYRLDRISRNVSDFSTLIEKLNELNISFISIKEQFDTSTPMGRAMMFISSVFAQLERETIAERIKDNMYELARSGRWLGGNTPHGFNSEKITFLDENLKERSMYKLQVNDEQMEIVKLIYNKYLELRSLSKLYKYVYNNGIRGPRGGKFDPSSLSRILRNPAYVKANDEILDYLKNSGMDVVGTPDRKCGILTYAKNTANSIAAIAKHHGVIEPEIWLEVQNQLDKNRDKTPRISTGKTALLSGLIKCGKCGSNMRITYKGKKTDKDLKYYYICGTKKTLGSDSCNCKNLNGPLVESLVIDKIKNCKEESIISAFNSNNIKADNVFNVFKSETNLLKNQILDKERLIKNLVIELAKNTGSTASDYIVSQIESLNNEISILKDKINTLESSNINISSDSINIDIIVSNLKRFNDEVDNASLDDKRFLLSTIINSIVWDSSLGNLNIVYMGAEMDNSVSLSN

SEQ ID NO: 26602 - DNA, 50 bp, Clostridioides difficile
  source 1..50: mol_type = genomic DNA
agttgcacttttttagctatagtagaagcaaggtgtataaaagtgcaaca

SEQ ID NO: 26603 - DNA, 40 bp, Clostridioides difficile
  source 1..40: mol_type = genomic DNA
ggttacacatgatattggtgaagcaataagcatatcagat

SEQ ID NO: 26604 - DNA, 40 bp, Clostridioides difficile
  source 1..40: mol_type = genomic DNA
ggttacacatgatattggtctagcaataagcatatcagat

SEQ ID NO: 26605 - DNA, 50 bp, Clostridioides difficile
  source 1..50: mol_type = genomic DNA
ggtgggactgtggcagctataatcctagtaaggtttcctgcggtgcaata

SEQ ID NO: 26606 - protein, 532 aa, Clostridioides difficile; identical to SEQ ID NO: 14751

SEQ ID NO: 26607 - DNA, 50 bp, Clostridioides difficile; identical to SEQ ID NO: 26602
  source 1..50: mol_type = genomic DNA

SEQ ID NO: 26608 - DNA, 40 bp, Clostridioides difficile; identical to SEQ ID NO: 26603
  source 1..40: mol_type = genomic DNA

SEQ ID NO: 26609 - DNA, 40 bp, Clostridioides difficile; identical to SEQ ID NO: 26604
  source 1..40: mol_type = genomic DNA

SEQ ID NO: 26610 - DNA, 50 bp, Clostridioides difficile; identical to SEQ ID NO: 26605
  source 1..50: mol_type = genomic DNA

SEQ ID NO: 26611 - protein, 512 aa, Staphylococcus hominis
MRTNEHNFHNIEEEIKHVAVYLRLSRGEDESELDNHKTRLLNRCELNNWSYELYKEIGSGSTIDDRPVMQKLLTDVEKNLYDAVLVVDLDRLSRGNGTDNDRILYSMKVSETLIVVESPYQVLDANNESDEEIILFKGFFARFEFKQINKRMREGKKLAQSRGQWINSVTPYGYKVNKTTKKLTPSEEEAKVVIMIKDFFFEGKSTSDIAWELNKRKIKPRRATEWRSSSIANILQNEVYIGNIVYNKSVGNKKPSKSKTRVITPYRRLPEEEWRRVYNAHQPLYSREEFDRIKQYFESNVKSHKGSEVRTYALTGLCKTPDGKTLRVTQGKKGTDDDLYLFPKKNKHGDSSIYKGISYNVVYETLKEVIVQVKDYLDSVLDQNENKDLVEELKEELMKKEDELETIQKAKNRIVQGFLIGLYDEQGSIELKVEKEKEIDEKEKEIEAIKMKIDNAKTVNNSIKKTKIERLLSDVQSAESEKEINRFYKTLIKEIIVDRTDENEAKIKVNFL

SEQ ID NO: 26612 - DNA, 50 bp, Staphylococcus hominis
  source 1..50: mol_type = genomic DNA
attactttatttagtctatctttaggtggaactggactgaattaagtcaa

SEQ ID NO: 26613 - DNA, 40 bp, Staphylococcus hominis
  source 1..40: mol_type = genomic DNA
ggatgtgcaactggcacatggtatcgagctggggaaggat

SEQ ID NO: 26614 - DNA, 40 bp, Staphylococcus hominis
  source 1..40: mol_type = genomic DNA
ggatgtgcaactggcacatactatcgagctggggaaggat

SEQ ID NO: 26615 - DNA, 50 bp, Staphylococcus hominis
  source 1..50: mol_type = genomic DNA
attagttaagttacacattatttaactggaactggattgaatagagtgaa

SEQ ID NO: 26616 - protein, 591 aa, Nocardia terpenica
MLAQQRLRAVVGARVSVVQGPQKVSHIAQHATGVRWTEDNGADVVGTFQDLDVSATVSPFDRPDLGKWFKVDLRGTWDAMVFSKIDRAFRSISDAVEVAKWCKENGKMLVFAEDGLKLDYRTADSSTFEGMMAELFIFLGAFFGQLELARFRSRAKDAHSVLRYTDRWASGVAPLGFMTIDHPSGKGKTLTTDPEGKDILYAMAGKLLAGWSYSAIAVWLNESGIRTRAQRERAEKHAKLKAQGKTVRGNADMPWTVFTVKSALTGVNTQGYKVRADGTPQLMPDGSLIRVGPPTFDDDTWAQIQAASALRTKEPRAKTKTANKYLGIAYHSCGASLVQTFDTRPGARGTPRRVGYYRCGRTPRRCPNTTIRLDQLDTVVESVFLGTYGNVEVATRVFVPGEDYSHELETVNATIARLRRESDAGLIVGAADEAEYMDRMTALIARRTDLEAKPNRPARWESRGTGKTYAEVWANPETDRQQVLKDAGVKIIIATTKPLVMEVVLATPDMKVGRARTKMHAIFDTMEQSGVEGMILSASGEMPAPVEGYIWLQPKEGVWVLTSEALMAAASERRQLKLEEQHVEEWDWDGE

SEQ ID NO: 26617 - DNA, 50 bp, Nocardia terpenica
  source 1..50: mol_type = genomic DNA
tgtaggtactgtagtagtaattgcttccagaggctcgtacactaccttca

SEQ ID NO: 26618 - DNA, 40 bp, Nocardia terpenica
  source 1..40: mol_type = genomic DNA
tcatggtctgtttgaccgcttccagaggcgctgacacgat

SEQ ID NO: 26619 - DNA, 40 bp, Nocardia terpenica
  source 1..40: mol_type = genomic DNA
tcatggtctgtttgaccgcaaccagaggcgctgacacgat

SEQ ID NO: 26620 - DNA, 50 bp, Nocardia terpenica
  source 1..50: mol_type = genomic DNA
ggtagctactatcttaggcactggaaccagaggctttgctccaacctcca

SEQ ID NO: 26621 - protein, 584 aa, Anaerobutyricum hallii
MGEKKRVRMLLRVSSNQQLEEDGDLGIQRQLVKEFIAQHEEWHLDSKEYFEGSNSGYSNAVENRDILQQALRDAQRNEYDILAVYKDDRIGRRMWEIGAYVMQLKSYGVDIYTVKDGCISPESDDIMGQMMLALRYGNAQKSSSDTGMRVKDTAQKLVQQGKFVGGKAPYGYKLELSGEISKHGRALHHLVIIPERAKAVKHIYELSLDKEYGSSKIARELNLDEEYKELAPSEVWRGGTVTSILTNPIYAGYTAYKRREKKENGKSKRLDSSEWILSEEPNPEIQIISPDDWNLVQIKRKQRGMKYRTAPQNKGVKVIARNEGMLPLIDVIYCGYCGCKCTNGSRYNYWTIKDTGERRASRQAIYKCQDAWQGVPHYKVYQFKAERIEKIVFQAIAEYIDKLQENEDIFEQISENGRKAKKEKAKELSREQERLKHIQQKISVMEDKIPEAMLGEYPVPVDKLVELIEKQKQEKEQQEKVIAEKQKELDGADVSFNEWDSLRMQIPTWKDVFLNADNPTKRVLVNKLIEKISVKEDEVVIRFKININEIRSKALKKSGSIVPENKLEDKSVILDSLKIYPNPE

SEQ ID NO: 26622 - DNA, 50 bp, Anaerobutyricum hallii
  source 1..50: mol_type = genomic DNA
ccccgaatgaacgatggtttcgacgtatcggagccattgttcattcatgg

SEQ ID NO: 26623 - DNA, 40 bp, Anaerobutyricum hallii
  source 1..40: mol_type = genomic DNA
acagggtttacactgaatggtatcggggaaagggaaaaga

SEQ ID NO: 26624 - DNA, 40 bp, Anaerobutyricum hallii
  source 1..40: mol_type = genomic DNA
acagggtttacactgaatgacatcggggaaagggaaaaga

SEQ ID NO: 26625 - DNA, 50 bp, Anaerobutyricum hallii
  source 1..50: mol_type = genomic DNA
ccccaaatgactcatggtctccacacatagcagtcaaaatgctttcagtg

SEQ ID NO: 26626 - protein, 463 aa, Geobacillus thermoleovorans
MRVAIYVRVSTDEQAKEGFSIPAQRERLRAFCESQGWEVVQEYIEEGWSAKDLNRPQMQRLLKDIKKGNIDIVLVYRLDRLTRSVLDLYLLLQTFEKYNVAFRSATEVYDTSTAMGRLFITLVAALAQWERENLAERVKFGIEQMIDEGKKPGGHSPYGYKFDKDFNCTIIEDEANTVRMIYRMYCDGYGYRSIADRLNELGIKPRIAKEWNHNSVRDILTNDIYIGTYRWGNKVVLNNHPPIISESLFRKAQKEREKRGVDRTRVGKFLLTGLLYCGNCDGHKMQGSFDKREQKTYYRCLKCNRITNEKNILEPLLDEIQLLITSKEYFMSKFSDQYDQQEVVDVSALTKELEKIKKQKEKWYDLYMDDRNPIPKEELFAKINELNKKEEEIYSKLSEVELEDKEPVEEKYNRLSKMLDFKKQFEQANFFTKKELLLSIFEKIVIYREKGKFKKITLDYTLK

SEQ ID NO: 26627 - DNA, 50 bp, Geobacillus thermoleovorans
  source 1..50: mol_type = genomic DNA
acctgtgtaagagttaattttgcgcatgcaaacttaacttttatacaggt

SEQ ID NO: 26628 - DNA, 40 bp, Geobacillus thermoleovorans
  source 1..40: mol_type = genomic DNA
cccggtcatcaactttgcccaactgacccagacggacgga

SEQ ID NO: 26629 - DNA, 40 bp, Geobacillus thermoleovorans
  source 1..40: mol_type = genomic DNA
cccggtcatcaactttgccttactgacccagacggacgga

SEQ ID NO: 26630 - DNA, 50 bp, Geobacillus thermoleovorans
  source 1..50: mol_type = genomic DNA
agctgtgtatgctctgattttgcttttgaatttttattacatatgcatgt

SEQ ID NO: 26631 - protein, 484 aa, Mycobacteroides chelonae
MTGETQRQIRAGCYLRISSDPRDRREGVDRQREDTSALCEVKGWEAARYYIDNDRSASNGKDRPEWDRLLADIKAGDIDAIAAWDQDRGWRMMSELEELRRFFKSLGRRVQFATTGQGDIDLYSPTGVLAVQIKTAVSEHEIAMMRVRMLRAARQKAEQGKPKWRKAFGYLPDMRPKHEDDGCRELDPVTAPLVRQAYAAVLAGGSLMDITRDWNAREVYGLNGQPWTAATLSLFLRAPRNAGLRAHNREIVGPGTWAPLVDESTWRAAQAVLNSPGRAPGRKSVRKHLLTGVMLCGRCARELNSRLSGKWAMQAHSGPRAHSIVYACKTCRGCSIHAEHVEPMLYQLVSGRLARPDAVDLLKAEQHDAAEAEAQRTERMTLLARLDEIADERADGVLTGKQAQRATERIQAKLDDIERCQQDGERLRVFDGIPLGRPEVVAAIEGLSADRFRAVLDVLCVVTVLPVGKGGKAFKPERVQVVWR

SEQ ID NO: 26632 - DNA, 50 bp, Mycobacteroides chelonae
  source 1..50: mol_type = genomic DNA
aagagttgtttccgcagtcgatagtgttattgactgcgcgaagtacacta

SEQ ID NO: 26633 - DNA, 40 bp, Mycobacteroides chelonae
  source 1..40: mol_type = genomic DNA
gaaggttttcagtagatggtgtttgcggcacaacgccttc

SEQ ID NO: 26634 - DNA, 40 bp, Mycobacteroides chelonae
  source 1..40: mol_type = genomic DNA
gaaggttttcagtagatgggatttgcggcacaacgccttc

SEQ ID NO: 26635 - DNA, 50 bp, Mycobacteroides chelonae
  source 1..50: mol_type = genomic DNA
aagaattgtgcttacagcagaaaggatcattaactgattttataacactt

SEQ ID NO: 26636 - protein, 485 aa, Mycobacteroides abscessus
MVGGTQQRVRAGCYLRISSDPRDRREGVDRQREDTSALCEVKGWEAARYYIDNDRSASNGKDRPEWDRLLADIESGDIDAIAAWDQDRGWRMMSELEELRRFFKSLGRRVQFATTGQGDIDLYSPTGVLAVQIKTAVSEHEIAMMKVRMLRAARHKAEQGKPKWRKAFGYIPETRPKHEDDGRRELDPVTAPLVQQAYAAILAGGSLMDITRDWNAREVYGLNGQPWTAATLSLFLRAPRNAGLRAHNGEIVGPGTWEPLVDEATWRAAQAVMNAPGRAPGRKSVRKHLLTGVMSCGKCVRELDSRLSGRWAMQAHGAGPRAHSIVYACKTCRGCSIRAEHVEPLLYQLISARLARPDAVDLLKAEQHDAAEAEALRLERMTLLARLDEVADERADGLIDGRGYRRATERIQAKLDDIERRQQDGERLRVFDGIPLGKPEVTDAVEKLSADRFRAVLDVLCTITVLPVGKGGKAFKPERVQVDWR

SEQ ID NO: 26637 - DNA, 50 bp, Mycobacteroides abscessus
  source 1..50: mol_type = genomic DNA
aagagttgttttcgcagtcgatagtgttattgactgcgcaaagtacacta

SEQ ID NO: 26638 - DNA, 40 bp, Mycobacteroides abscessus
  source 1..40: mol_type = genomic DNA
gaaggtcttcaggagatgatgcttgcggcacagggccttc

SEQ ID NO: 26639 - DNA, 40 bp, Mycobacteroides abscessus
  source 1..40: mol_type = genomic DNA
gaaggtcttcaggagatgagacttgcggcacagggccttc

SEQ ID NO: 26640 - DNA, 50 bp, Mycobacteroides abscessus; identical to SEQ ID NO: 26635
  source 1..50: mol_type = genomic DNA

SEQ ID NO: 26641 - protein, 595 aa, Enterocloster bolteae
MRKTRRIDVDTRGVAIYARKSRITNKGDSIGVQFKQCAEYAKKELRLDDDFTFMEYEDKGLSGYFSDRPDFQRMLRDVQDGKIRAIVCYKLDRVGRKTTDLLRLMDFLEKYNVDLLICSNGINTASGFSKIFIQIFAVIAEFERDTLTERITDNMMELAKDGRWLGGNTPMGFTTQRVTTGSGKGKSAYSYLVSIPEEKKMVQRLYTLFRTNRSIQKTAKQMNLEGYRTPSGAEFNASTTRLVLRNPIYCTADRRSYDYFIDHEGNVFGDLLDFDGQHGLSAYNKTDQEKFEDSDSTFISPKFVQTVESKPISEWIIAVGKHEGVISSEHWIETQELLDAIAEKYNRPHRKTNALLAGLIHCPCCGKRLNVISESDRWTNGKPRFKYVCPGYRKKTCNFKAVDGVLLDEFIVQQLSDMSDEDSERFKEILEIKIEEVLEQSSTTQEYALLKKKREKLQTDIVAQTRNMREVDESIRCYLQDDIHVMSEELRETERMLFKLEESRKNSMVAVRDLEQTKERLLSFAEYAKDAQPEVLVTLIQTIVERIYIVDKDDERFCHIFIKGCTDEDYTGFFQTAGYIEQKTTPACDSEQYCI

SEQ ID NO: 26642 - DNA, 50 bp, Enterocloster bolteae
  source 1..50: mol_type = genomic DNA
cgtgtgattcagaacagtattgtatttgcaatggtattttcaatcacaca

SEQ ID NO: 26643 - DNA, 40 bp, Enterocloster bolteae
  source 1..40: mol_type = genomic DNA
ttttcgcgaatacagcgtattacctctataccatccacat

SEQ ID NO: 26644 - DNA, 40 bp, Enterocloster bolteae
  source 1..40: mol_type = genomic DNA
ttttcgcgaatacagcgtataacctctataccatccacat

SEQ ID NO: 26645 - DNA, 50 bp, Enterocloster bolteae
  source 1..50: mol_type = genomic DNA
cgtgtgagtgtatggagttttttatatgtaaaggtgatatgaatcagcca

SEQ ID NO: 26646 - protein, 467 aa, Streptococcus agalactiae
MKEFNVAVFFEEENINTLTMDGELLLTILSSVAQQEVENISANVKKGLRMKMERGEMVGFQGCLGYDYDPETKSISINEKEAEIVRYIFRRYIEGVGGMVISRELEEQGYLSPRGNKRWTETTVLGIIKNEKYKGDLMMGKTYTVDPISKRRLDNFGEQDKFYIENHHEPIISEEDFEKAQGIRLRRSKNRNTVANNGGKREKYSRKYAFSSMLECGFCGHNLSRRNWHSSSEYTKVIWQCVNATKNGKKYCPHSKGIEEEAIEKAFMESYRQVCHNNVEITNEFLKTVEEELKDNSLAKDLKKITNQLDKILKKEKDLVELRLNESISMDIYQDKYNEIAISKEKLLAEKRTLEVTLTDEKALKKRLEGFKKLLESNKYLEEFDRSVFESIVDKIIIGGTNDEGEIDPAMITIIYKTGKKDSQDGRLFKSRRKNAKEVNEETDNKLYPHSSDEVNNLYSYPIDNTL

SEQ ID NO: 26647 - DNA, 50 bp, Streptococcus agalactiae
  source 1..50: mol_type = genomic DNA
tttgtatcaacgctatgcactccacatgttttgcaagtgtggtataatag

SEQ ID NO: 26648 - DNA, 40 bp, Streptococcus agalactiae
  source 1..40: mol_type = genomic DNA
agcagagccacacactccacatgatgtgtcattgggaata

SEQ ID NO: 26649 - DNA, 40 bp, Streptococcus agalactiae
  source 1..40: mol_type = genomic DNA
agcagagccacacactccatctgatgtgtcattgggaata

SEQ ID NO: 26650 - DNA, 50 bp, Streptococcus agalactiae
  source 1..50: mol_type = genomic DNA
tatgcatcataataatacaccccatctatgtagcaattactatgtaatag

SEQ ID NO: 26651 - protein, 643 aa, Blautia faecis
MNAGYVRLSRDDDKRNYVSIENQKLIINQYAADHGMVIDRWYEDDGVSGYIFDRPGFQQMMADLDKDIDTVYVKDFSRLGRHNAKVLLLLDEFQERGKHLIVIDDNYDSFDSSDDTIGIKTWFNERYVKDTSKKIKRAIGARQKEGTLMTKPPFGYCRDTKDKSIIKIVPKEAEFVKMVYDLYISGSGYRKIANHLTDQGIPTPSMVQREREIEEGRVSKKKVATSWSDSMVKELLDNDFYIGTFRLRKRARNTVHGKDKRVPKEEQCIFEDHHPAIIDKATFSLVQELKEKRNRTNYRGSRGEWIGSEIPNPFGSCLFCKDCGSRLTPIKRQTSSRERKYYICTTYNTKGRRYCEKAHLIEENDLMEDVLNYIKLCREALCEVISTYDMRDFEAEKKTLAEKRQDLQEEIQNRKNQLKVLLTQKIKDLSIASENEDLIHETYDSMQKDLLAQIHGLEIQEKELNETTIETPDVKDKLRNALDVVDKIIAGGTLDRRDIELLIERIDVDKEGMPEITLKYGLSDLINYSPADEMNRRENTVIALVMKLIIEDERGYTSAKYLSEHITALGFKKTKQSILPYINLMKELGILEDTDNPLKPYNIVKTKKEIAVLMHQYLPDLPAQMTSEQLSNNYLHCNSGDRW

SEQ ID NO: 26652 - DNA, 50 bp, Blautia faecis
  source 1..50: mol_type = genomic DNA
atttacattgtaatagtggcgacaggtggcattcatatatcaatgtaaat

SEQ ID NO: 26653 - DNA, 40 bp, Blautia faecis
  source 1..40: mol_type = genomic DNA
agttcttggtggtcgtaagggtggtatgccagaaatggta

SEQ ID NO: 26654 - DNA, 40 bp, Blautia faecis
  source 1..40: mol_type = genomic DNA
agttcttggtggtcgtaagtgtggtatgccagaaatggta

SEQ ID NO: 26655 - DNA, 50 bp, Blautia faecis
  source 1..50: mol_type = genomic DNA
atttcaagtctataaggtgcgacatgttgcattcagcttagaaattaaat

SEQ ID NO: 26656 - protein, 520 aa, Mycolicibacterium smegmatis
MSSTRLRALVGARVSVVQGPQKVSHVAQKAAGEQWAAQHGHRVVGTIQDLGVSASVSPFDRPDLGPWLDSERVDDWDVLVFSKLDRLFRSTRDCVKFAEWAEQHRKILVFAEDGLTLNYRNPDKGSIEQMMAELFVYLGSFFAQLELNRFKSRAKDSHRVLRGMDRWASGVPPLGFKVVDHPSGKGKGLATDPAGKAILEDMAAKLIDGWSFIRIAQHLNEKRVPTNLDKARMAKGKEPNPNPWNVGTVIESLTSERTQGIKMTKVGKKFVPVLDENGEPIRMAPPTFEPGYWKQIQEAAARRQQNRRTPTETANPMLGVGYCGKCGASLAQQFSRKRRANGETVEYRYYRCGRTPVNCQGVFVRAEEADAFLEEAFLWAHGDDPVTRRKFIPGEDRTEELEQTNRTIEALREDRALGLFSSDADQAKYRQQMAALVAKRDRLSAQPHRPARWEIEETGQTFAEVWEESDHRQLLADAGVRFVLTSGTPREWAVETLNMRPDHPVFLEPSDDVLDSPGSG

SEQ ID NO: 26657 - DNA, 50 bp, Mycolicibacterium smegmatis
  source 1..50: mol_type = genomic DNA
cttctcataggtgcattgctcgatcagtccagaagtatacacttgaaacc

SEQ ID NO: 26658 - DNA, 40 bp, Mycolicibacterium smegmatis
  source 1..40: mol_type = genomic DNA
ggtcggcatgctgctcgatcagcagatcccgatggagacc

SEQ ID NO: 26659 - DNA, 40 bp, Mycolicibacterium smegmatis
  source 1..40: mol_type = genomic DNA
ggtcggcatgctgctcgatacgcagatcccgatggagacc

SEQ ID NO: 26660 - DNA, 50 bp, Mycolicibacterium smegmatis
  source 1..50: mol_type = genomic DNA
cttctcatctatttatttctttatacatccagacttcatcacatgaagcc

SEQ ID NO: 26661 - protein, 491 aa, Clostridium thermobutyricum
MNIAIYSRKSIETDTGQSIENQINMCKNYFSTQYPDANFLIFSDYGFSGGNTNRPDFQKMLNLAKRKQIDIIGVYKLDRVARNITDFFNIYSDLEKHNVKLVSITEGFDASTPIGRMMMTMLAGFADMERENIRQRVKDNMLELAKLGRWSGGRTPFGYDAISTIENGKRVAYLQLQEDKKEIIKEIFKLGSNNVSPYNISKKVNLHSRNIVRIIENPVYMISDELSIKYLSTKGFKVYGSPNGKGFLRYNSGENNIIAVSKHEGLIQSTVWIKAYTMIINRNLSRKTHISQQTYLAHLVKCSCGGNMFVGKSTTLGFVFRCQAHYKDKEVCEFKSIQTHLVEAGAIKNLKYLLSEDKPLIKYNNSKQLTRLNQDILKLKKDINKVTKDIDTLTSNLLLISGPAITIVNEKINKLILKRNDLNMNLMSKEEALYESTSYLENDENKKDKLKDALKDFENPNLTIQEKQQTAQSLFKEIIIYPDGKAEYFFL

SEQ ID NO: 26662 - DNA, 50 bp, Clostridium thermobutyricum
  source 1..50: mol_type = genomic DNA
aaacgctaattaatacatataggacctcctatgtgtttatattagcaata

SEQ ID NO: 26663 - DNA, 40 bp, Clostridium thermobutyricum
  source 1..40: mol_type = genomic DNA
taacgctgatgcaattgcgcctcctaaagcttctgcatca

SEQ ID NO: 26664 - DNA, 40 bp, Clostridium thermobutyricum
  source 1..40: mol_type = genomic DNA
taacgctgatgcaattgcgattcctaaagcttctgcatca

SEQ ID NO: 26665 - DNA, 50 bp, Clostridium thermobutyricum
  source 1..50: mol_type = genomic DNA
aaacatttacaaatacatatagaaatttctatatgtaacatttatatata

SEQ ID NO: 26666 - protein, 474 aa, Streptomyces scabiei
MSEINSAPNSPLRVCPYARISDTDEERAPGIDRQLRTVHPLIASRGAVQTRDYTDNDKSAYKPEVFRDDFEAWLQDFIDDKNDGIAAWDLDRVFRQNTDLERVIKAYCDAHFKQKRSKPVLWLPSMTLDLTDPDGQTIARMLVAVANQSSAKTVKRVTDFYRDEALKGNIFSNYPAFYRNKDGSINAEKAVITFKAIEDVFAGVRPTAIADEWRTKGITTARGGRVSGETVRRILIDPGIAGLAVYRKELLIGTDGEPIKRRDGGLTDEATWRAVCKELETKPGRRRKPTRALLSKFLRCGLCGSRMVRTRKTDTFFMYACQSVDAGGCARVAISGPKLDKQITALVLAYLNQPIDAAEEKPFEGQARLDEVTAKIAELMTAYRTGAMSGSIVFPSIKELEDEQKVLQGQAAKHVRMKRKVTTAADEWDDIGLERQQAIIGEVFEVIVIMPASNPKSGVYEAERAKPVWRSPEK

SEQ ID NO: 26667 - DNA, 50 bp, Streptomyces scabiei
  source 1..50: mol_type = genomic DNA
ggggtagttgtaaccgcattgagacctctgaatatttcaataactaccca

SEQ ID NO: 26668 - DNA, 40 bp, Streptomyces scabiei
  source 1..40: mol_type = genomic DNA
cgtccagtgcgcgttcagcccgctgggattgggcagcacc

SEQ ID NO: 26669 - DNA, 40 bp, Streptomyces scabiei
  source 1..40: mol_type = genomic DNA
cgtccagtgcgcgttcagcatgctgggattgggcagcacc

SEQ ID NO: 26670 - DNA, 50 bp, Streptomyces scabiei
  source 1..50: mol_type = genomic DNA
tgtgcagttctaaaggcattgtggattctcaaaaattactaaactaccca

SEQ ID NO: 26671 - protein, 474 aa, Streptomyces scabiei; identical to SEQ ID NO: 26666

SEQ ID NO: 26672 - DNA, 50 bp, Streptomyces scabiei; identical to SEQ ID NO: 26667
  source 1..50: mol_type = genomic DNA

SEQ ID NO: 26673 - DNA, 40 bp, Streptomyces scabiei
  source 1..40: mol_type = genomic DNA
cgtcgagtgcgcgttcagcccgctgggattgggcagcacc

SEQ ID NO: 26674 - DNA, 40 bp, Streptomyces scabiei
  source 1..40: mol_type = genomic DNA
cgtcgagtgcgcgttcagcatgctgggattgggcagcacc

SEQ ID NO: 26675 - DNA, 50 bp, Streptomyces scabiei; identical to SEQ ID NO: 26670
  source 1..50: mol_type = genomic DNA

SEQ ID NO: 26676 - protein, 471 aa, Listeria monocytogenes
MTVGIYIRVSTDEQVKEGFSISAQKEKLKAYCTAQGWEDFKFYVDEGKSAKDMHRPLLQEMITHIKKGLIDTVLVYKLDRLTRSVVDLHNLLSIFDEYNCAFKSATEVYDTSSAMGRFFITIISSVAQFERENTSERVSFGMAEKVRQGEYIPLAPFGYVKGPDGKLIVNEAEKEIFLHVVNMVSTGYSLRQTCEYLTNIGLKTRRSNDVWKVSTLIWMLKNPAVYGAIKWNNEIYENKHEPLIDKATFNKLANILSIRSKSTTSRRGHVHHVFKGRLICPQCGKRLSGLRTKYVNKNKETFYNNNYRCATCKEHRRPAIQISEQKIEKAFIDYISNYTLNKADISSKKIDNNLRKQEMIQKEIVSLQRKREKFQKAWAADLMSDDEFSKLMIDTKMEIDVAEDRKKEYDVSLFVSPEDIAKRNNILRELKINWTSLSPTEKTDFISMFIEGIEYVKNDENKAVITKIRFL

SEQ ID NO: 26677 - DNA, 50 bp, Listeria monocytogenes; identical to SEQ ID NO: 14542
  source 1..50: mol_type = genomic DNA

SEQ ID NO: 26678 - DNA, 40 bp, Listeria monocytogenes; identical to SEQ ID NO: 7183
  source 1..40: mol_type = genomic DNA

SEQ ID NO: 26679 - DNA, 40 bp, Listeria monocytogenes
  source 1..40: mol_type = genomic DNA
ttcaatgttactgtatcctattgtgtacctatagcccatc

SEQ ID NO: 26680 - DNA, 50 bp, Listeria monocytogenes
  source 1..50: mol_type = genomic DNA
aatagatttattcactaatacagtattgggttttgtttattaacacttta

SEQ ID NO: 26681 - protein, 584 aa, Cronobacter sakazakii
MTKHQIHVYTRISKTSQQEGSGLDEQLSRIDAYIKSKPEFLGSEITYWQDVGVSAFKNKNIHDGQLAEFIKQVESGFIGSGHALVIYSLDRLSRRSSWDEDTIQKLVKNGVDIHDVSTPVVLKRDDPFSKIIMELIVARGNNESRVKSERSIAGWEKRLKETREQGKVFTRKLPRWLSTDKNGYVVITEQAELIKRIFLEYTNGLSSPMIARRLNEEGIKSTGRSMWRPNTITKLIKDERLRGYLRRSTDQTLIPDIFPVVIDEEIFVLANRILKNNASGIKGRPRENNITREVNNILTGIVRCGKCGARVTTSKNSRGVRYVVCLNRRNYEICGQKSIKLDEFEKIVISHAQQVDMSKVFSYDKVDTSHESTLNSELSNLEIDEKNCIIDIEARKKAKKTASLVLANTLVEIQDRIEEIKQQLLELKIKDPLPEIQHFSIDDLINPSNIELRMSLRKFLTQAVDKITFRSLDNNILIEIKYYNNVYRHILITDKKVKEVLHEVDIVKNGDVINYTTNGFLITENERENTCIFHGIYNVHYKDYFLLANYIGSLKNKHWIVDKMYETENMSIVMANEKQKSHFN

SEQ ID NO: 26682 - DNA, 50 bp, Cronobacter sakazakii
  source 1..50: mol_type = genomic DNA
aagtgtgaaaatttcactattaccgtggtaatgtgatacaattcacacat

SEQ ID NO: 26683 - DNA, 40 bp, Cronobacter sakazakii
  source 1..40: mol_type = genomic DNA
ctggcgcaacgccgataccgtcgtaattggccgggcgcag

SEQ ID NO: 26684 - DNA, 40 bp, Cronobacter sakazakii
  source 1..40: mol_type = genomic DNA
ctggcgcaacgccgataccttcgtaattggccgggcgcag

SEQ ID NO: 26685 - DNA, 50 bp, Cronobacter sakazakii
  source 1..50: mol_type = genomic DNA
aagtgtgaaagcttcacttccattttggttctgtgactttcttcacttat

SEQ ID NO: 26686 - protein, 584 aa, Klebsiella pneumoniae
MTKHQIHVYTRISKTSQQEGSGLDEQLSRIDAYIKSKPEFLGSEITYWQDVGVSAFKNKNIHDGQLAEFIKQVESGSIGSGHALVIYSLDRLSRRSSWDEDTIQKLVKNGVDIHDVSTPVVLKRDDPFSKIIMELIVARGNNESRIKSERSIAGWEKRLKETREQGKVFTRKLPRWLSTDENGYVVITEQAELIKRIFLEYTNGLSSPMIARRLNEEGIKSTGRSMWRPNTITKLIKDERLRGYLRRSTDQALIPDIFPVVIDEEIFVLANRILKNNASGIKGRPRENNITREVNNILTGIVRCGKCGARVTTSKNSRGVRYVVCLNRRNYEICGQKSIKLDEFEKIVISHAQQVDMSKVFSYDKVDTSHESTLNSELSNLEIDEKNCIIDIEARKKAKKTASLVLANTLVEIQDRIEEIKQQLLELKIKDPLPEIQHFSIDDLINPSNIELRMSLRKFLTQAVDKITFRSLDNNILIEIKYYNNVYRHILITDKKVKEVLHEVDIVKNGDVINYTTNGFLITENERENTCIFHGIYNVHYKDYFLLANYIGSLKNKHWIVDKMYETENMSIVMANEKQKSHFN

SEQ ID NO: 26687 - DNA, 50 bp, Klebsiella pneumoniae; identical to SEQ ID NO: 26682
  source 1..50: mol_type = genomic DNA

SEQ ID NO: 26688 - DNA, 40 bp, Klebsiella pneumoniae; identical to SEQ ID NO: 23063
  source 1..40: mol_type = genomic DNA

SEQ ID NO: 26689 - DNA, 40 bp, Klebsiella pneumoniae
  source 1..40: mol_type = genomic DNA
gtggcgcaatgccgataccttggtcatcggccgcgcgcag

SEQ ID NO: 26690 - DNA, 50 bp, Klebsiella pneumoniae; identical to SEQ ID NO: 26685
  source 1..50: mol_type = genomic DNA

SEQ ID NO: 26691 - protein, 507 aa, Escherichia coli
MKRAISYIRFSSEKQSRGDSLRRQSKMVTDWLKAHPEYHLDQDLSFRDLGVSGFTGKHLQGGLGDFLTAIEKGLVKAGDTLLIESLDRLSRQDVDQASELLRNILRSGVDVVTLSDGEHYTKESLKDPLALIKSILIMQRSHEESLRKSERIQAAWNRKKELISEGIKISKRCPAWLKLNDDRKSFSVIPEKVETVKRCFQLRLEGKSIWEIVRTLNDEGHQTLNQYKAGKFGQTSVQDLLKNRSVIGYFTPKGCEEIAGYFPSIIPETDFYKVQQLSYSRYGRKPASDKPLSVNLFKGVIRCSECGHALIITGFSDTRSGIYRCPSRNENRCNAKGLSRKQTDGALLALLSRLDRFDSDMTNTLDTLKLHREHISNNIEKLVQLSLEIEDLSAITSKLKQLKGELSQVDADIEKETQRLKSIDVGCLSDCDLTTKAGRIEAQLIIKSAVKEVVLNTAKRRCKVTFHNGKVIDLPITENPSEDVTEAIQSLSEVTERGLIDVDEVIV

SEQ ID NO: 26692 - DNA, 50 bp, Escherichia coli
  source 1..50: mol_type = genomic DNA
agatgtatttagaccttgatgatttttattagacacgtttaaatacacca

SEQ ID NO: 26693 - DNA, 40 bp, Escherichia coli; identical to SEQ ID NO: 5188
  source 1..40: mol_type = genomic DNA

SEQ ID NO: 26694 - DNA, 40 bp, Escherichia coli; identical to SEQ ID NO: 21859
  source 1..40: mol_type = genomic DNA

SEQ ID NO: 26695 - DNA, 50 bp, Escherichia coli
  source 1..50: mol_type = genomic DNA
ataagtagtccctggtgcatgatttgtattagaaactctcaaatacaact

SEQ ID NO: 26696 - protein, 485 aa, Streptococcus agalactiae
MYKIGIYMRLSKEDYEKNEESNSIKNQRQLILSYIDKNFSDFCVDNKIEYIDDGYSGMNTNRPAFERLMEDIRDLNTNCIIVKDLSRFSRDYIETGNYLENIFPFLGIRFISINDGFDSKDNCNGTIEIDTQFKSLLYDYYSKELSEKIKLTLNSLKTKGKIINEAPFGYVKDPKNKYKIIKDDISAKVVRKAFDMILEGHSQGSIAKNFNKEKYLTGSERKRVLRGESLENYKKILWTTGQISRILRNESYTGTFLYNKTYKTPIRKSIPRPKEEWGRIENAFEPIISKEEFNKVQDILNQRSFPTHNDARDVDSPLRLKVRCGVCGHKMKFDYRVVVGKNEKKYDCRFRCRVCSLNSKSNSISSKTVESYVLESLKRRGVKLEERKTIKSKKIDQGKVNALKFEIQKNYELYLDSKLTREEFLEIKNNINEKLSSLKEESETKDKLENITMCNKDLKLTNEIVENNIKEIIVDASKNIEIIYK

SEQ ID NO: 26697 - DNA, 50 bp, Streptococcus agalactiae
  source 1..50: mol_type = genomic DNA
ttaagcaataacttgacacaatagggggagaatagtataatggtgacaga

SEQ ID NO: 26698 - DNA, 40 bp, Streptococcus agalactiae
  source 1..40: mol_type = genomic DNA
tgtaggaccaactggcgcaggtaaaacgacaattgttaat

SEQ ID NO: 26699 - DNA, 40 bp, Streptococcus agalactiae
  source 1..40: mol_type = genomic DNA
tgtaggaccaactggcgcatataaaacgacaattgttaat

SEQ ID NO: 26700 - DNA, 50 bp, Streptococcus agalactiae
  source 1..50: mol_type = genomic DNA
taaaggaattgtaagcaagaagggtagcagaataattctcaggtgacaga

SEQ ID NO: 26701 - protein, 489 aa, Clostridium perfringens
MKRVAKFIRTSTLDQHTSIDNQSEILDNWIAQNNCILYKTYNDEGISGTKKKFRVQWLQMLEDAKNKEFDILICKSYSRFGRNQIETLQAIKELKENNIRIVFLEDGLDSSKEDSKFGLMAWLSEEESKRTSKRIKGVFSHFKEVGKIYNCIAPFGYDYDVNKKNFVVNKNESEVVNRVFKLYLLGNGTNKIANILESEGVPTKNGGKWRGNTIKNMIRNEVYLGTLVQNKSSNIEVTNSKRNFHNEDEYIKHLNNHEAIVNEETFIKANEIFKKNSYKVKNRSVGVRASNKSLFSNLLRCGSCNSSMSIRRKSKRKPFYNCIEYERLGLKCGHNSNFIQEEFLIEYIEQKLNELIENNFENIKIIEKNDIKKTLENDLKNIQKKIDEQISLANNLLKLYNNKMINDIQFKLQNESISNMLNSLIENKKIIEEKINNLPKKNNEFKKDVNNVVSLPIAQWSNAMLKKIIDKITVGVDGTIKIDWKINKM

SEQ ID NO: 26702 - DNA, 50 bp, Clostridium perfringens
  source 1..50: mol_type = genomic DNA
agacctatatagttatataaaacaactgcaacatgtatctatataggtct

SEQ ID NO: 26703 - DNA, 40 bp, Clostridium perfringens; identical to SEQ ID NO: 6113
  source 1..40: mol_type = genomic DNA

SEQ ID NO: 26704 - DNA, 40 bp, Clostridium perfringens
  source 1..40: mol_type = genomic DNA
tgaacctgctaataaagaatctgcaacctgtataggtctt

SEQ ID NO: 26705 - DNA, 50 bp, Clostridium perfringens
  source 1..50: mol_type = genomic DNA
aaacctataaataaatagaaaacatcagcaacatttttttctataccaga

SEQ ID NO: 26706 - protein, 619 aa, Marinobacterium georgiense
MKKAYLYSRVSKEKQAKFGKGLLRQTELAKEFLAQYPEYEIADIFEDAGTSAFYPKNVKKDAGLGGFLQVVREGKIEPDSLLVVEAVDRISRLGIRKGQKIFDELRDHKINVAIVKFNLVLWWWEDNDLANSIQITSGLYLGRLESEQKSKRILKTFEFYLDETRKRKRLFKKGVKPTWLELNEDESGFICPPENRAIIEHIFKMKLHDKLGVRRIVHYLNREGIKPFSDSEVWTYTAVSNLLRNIAVCGIYQPVTRAREEHARNDPELLEQIESGMRIDIPNGEPIDNYYPQIIDLDTFHATQGTFQKRASTVKLKGRKGSFKNLFRHLTFCRKCGSVYNIKAKYLCCMNPKHPCTNSYIIYDKFEEKILTYFKSKEFLEDIQNIDEKPSEVNNLKNKANNLKQIQKNLEIALETAKDIGFISRTVERINQIAEEIEDINLQIAEDTNRLNRVRIFNIDNSFNLDDPLNREKFNLIIRNEIEYIQFYNKYIFIRIKDADYEIVTHEYLPDLLLKKYDNPHANGLERSPARRPVDLDNIHITNTDKFLEKYKRVIDTRITKYIFQRQIDEGLTRKQTTRLLTKQDLSLSLEEIDDIRKTMNSDKMAELTRKELEQQKAS

SEQ ID NO: 26707 - DNA, 50 bp, Marinobacterium georgiense
  source 1..50: mol_type = genomic DNA
tttggcttttttgatccccctacatttgtagacaggatgattcttctatt

SEQ ID NO: 26708 - DNA, 40 bp, Marinobacterium georgiense
  source 1..40: mol_type = genomic DNA
cagcgatgtttcagcaacatttgtcgaaagtacaatgcgg

SEQ ID NO: 26709 - DNA, 40 bp, Marinobacterium georgiense
  source 1..40: mol_type = genomic DNA
cagcgatgtttcagcaacatgtgtcgaaagtacaatgcgg

SEQ ID NO: 26710 - DNA, 50 bp, Marinobacterium georgiense
  source 1..50: mol_type = genomic DNA
tttgcccttccatctcttcttacatgtgaagacagcatttatcctctttt

SEQ ID NO: 26711 - protein, 499 aa, Bacillus cereus
MEFVAIYMRLSRDSTQNGIEESLENHRLALTRICKTNGWKHDIYEEIASGVSPEREQLNLLLSRLNDYTAILTMDVDRIGRDPEHNEKVLKMLILNGIKIITPSGEYDFANENSQMLYRMQSMLSSFEYSAIRKRLGRGKFLEASKGNWVMNNIPLGYLKNPETKRLEIDENESKIIRYIFEKTIEGYSVNKISQDLDAFGWRSKKGKVLSTAHISQMRRNPLYYGVVRYERKNELGRVLEDCWVEDAHPGIVTKEEFLRCQELIKNNNNKKFKTHGKVKHILQGLIYCAKCGRKRYICVDRKDVPYIKADGAKIENVRCSDAGMALKPVTDAVIEDVKKLKPELEEEIIKLKKRDITKSEKEISNKLIETEANKDKLNKKKKNLVEMRMNGEITKDEFLQFKDGLEEQIRHTDDMIQLLQMKLNNLSNTEDEVKKLEKVIWTIDNLDNLSVEKINSFLRSIIKKVLFSRNIESNPNTTKRDDVEPTVDIEWIEGIPIL

SEQ ID NO: 26712 - DNA, 50 bp, Bacillus cereus
  source 1..50: mol_type = genomic DNA
gtgtagtaaaaaataaatttcataaaagtgaagttttatttttactacaa

SEQ ID NO: 26713 - DNA, 40 bp, Bacillus cereus; identical to SEQ ID NO: 4253
  source 1..40: mol_type = genomic DNA

SEQ ID NO: 26714 - DNA, 40 bp, Bacillus cereus
  source 1..40: mol_type = genomic DNA
aaccgttgggaaaatcacaattatgaaggttttagatgga

SEQ ID NO: 26715 - DNA, 50 bp, Bacillus cereus
  source 1..50: mol_type = genomic DNA
ttgtattaagtaataagcttcataataatgcagtttgcatttttaaacaa

SEQ ID NO: 26716 - protein, 558 aa, Corynebacterium sp ATCC 6931; identical to SEQ ID NO: 24361

SEQ ID NO: 26717 - DNA, 50 bp, Corynebacterium sp ATCC 6931
  source 1..50: mol_type = genomic DNA
agttgtaaataattaccaattgcatatgcgaatgtgagatagttatagcc

SEQ ID NO: 26718 - DNA, 40 bp, Corynebacterium sp ATCC 6931
  source 1..40: mol_type = genomic DNA
cggcatgtcaaccgtggaatacgctttgggaacaatcgct

SEQ ID NO: 26719 - DNA, 40 bp, Corynebacterium sp ATCC 6931
  source 1..40: mol_type = genomic DNA
cggcatgtcaaccgtggaacccgctttgggaacaatcgct

SEQ ID NO: 26720 - DNA, 50 bp, Corynebacterium sp ATCC 6931
  source 1..50: mol_type = genomic DNA
cgttttacaatggcaccaattccacccatgagtgtggagtccttatagcc

SEQ ID NO: 26721 - protein, 447 aa, Brevibacillus brevis; identical to SEQ ID NO: 17091

SEQ ID NO: 26722 - DNA, 50 bp, Brevibacillus brevis; identical to SEQ ID NO: 17092
  source 1..50: mol_type = genomic DNA

SEQ ID NO: 26723 - DNA, 40 bp, Brevibacillus brevis
  source 1..40: mol_type = genomic DNA
ctctgttttgcctgctccacaaactgcccaaatcaaatat

SEQ ID NO: 26724 - DNA, 40 bp, Brevibacillus brevis
  source 1..40: mol_type = genomic DNA
ctctgttttgcctgctccaataactgcccaaatcaaatat

SEQ ID NO: 26725 - DNA, 50 bp, Brevibacillus brevis
  source 1..50: mol_type = genomic DNA
tttttgtattttttatgagcaaatattaaaaccaatggaatagactagaa

SEQ ID NO: 26726 - protein, 526 aa, Klebsiella oxytoca
MYRKFIMRTAYAYIRFSSEKQSAGDSVRRQQSLIDSWVKNNPDYILSQKTYKDEGLSAFTGKHAAGDLGRLMNDISNGSITAGDVILIESLDRLSRENISTATDRLKAILIHGVNVVTLTDQKQYTPESLNSPMDLIMSILTAQRAHEESQSKSKRMREVWAKKRTEAEESGKVITKSCPRWLTVNSDRTGFEPIPEHVESIRLMFEMRLSGKGFAGIAQALNESGRLTLTGRSKGWNQSSVQQLLSNKALIGYKIPSRKAVVNYIEIPDYFPSVIPLEQFQQVQLIGADKQGQRAANDRPMNVNLFRGVMKCAECGATVIVSGVDDKRAGYYSCSFRRLGRCNTSKPMNRGMVDEALIKGLLYSLDRLTTQGQGENPLMKLEAKRADLTERSQKLLAALEIADDVSAIATRLKAVTDEIRAIETQIKTCRDLEQVHTVQSVQGMDLTVKSQREEVQLLVKKTFREISLDGIRKTVNVYLHNGLTLLNVPVNQIVDAGEWIELLPVIGGDTVDFKDISFKAPRYLD

SEQ ID NO: 26727 - DNA, 50 bp, Klebsiella oxytoca
  source 1..50: mol_type = genomic DNA
acttattgtgaacattggtcatggttacatgattagtatgcaaatcaaga

SEQ ID NO: 26728 - DNA, 40 bp, Klebsiella oxytoca
  source 1..40: mol_type = genomic DNA
gtacgaatgttggtcatggtcaggttgatgatcgccagct

SEQ ID NO: 26729 - DNA, 40 bp, Klebsiella oxytoca
  source 1..40: mol_type = genomic DNA
gtacgaatgttggtcatgggtaggttgatgatcgccagct

SEQ ID NO: 26730 - DNA, 50 bp, Klebsiella oxytoca
  source 1..50: mol_type = genomic DNA
tcttactgttgtggtatgtcataggttaaagattagggaggaaatcatga

SEQ ID NO: 26731 - protein, 542 aa, Ruminococcus callidus
MIPKQTEYKVGMYLRLSNEDERAGESLSIENQRKILSNYISEQGWTLYDEYVDDGISGTTFDRPGVQRMLDDAKNGRINLILCKDLSRFGRNYIQVGQYTDYIFPMYNIRFIALTDNVDTANSESTGMDMMPIMNVFNEWHAANTSKKLRAVINSNAKAGKYRTTYCAYGYFKGDDEKNTPVIDPQTAPVVRRIFEMRAEGKKPKQIADALNAEQIPTPMDYLYQRENKVNPHVSVHLWSSSIVLRILGNPIYIGTLALMKTTTVSYKNHKRIRKDSSEWLMRENNHEPIIPMELWEKVREIEASVSRGKRDKIGELAPLSGLLYCDSCGSKMRQVGSANRKYMAYMCGYHNRFGKGCCTTHYIRRPLIEQYLLMDIQDMIEKAADEEKAKEEFLKRKHGVLDAQNSSDKKRMQKATSRIAELDNLIQTVYEDKVIGKIPEEVCISLLEKYQAEKKSLQAECAECKKRSEMQKQDEKDVDEFIARLKSYAGATELTRQMCLDLIEYVTVDDLNKDDKSRPREIHVYYKLIDKELADKHNALM

SEQ ID NO: 26732 - DNA, 50 bp, Ruminococcus callidus
  source 1..50: mol_type = genomic DNA
ttatatccattttgtcgttctataacgatagagcaaacaaatggatataa

SEQ ID NO: 26733 - DNA, 40 bp, Ruminococcus callidus
  source 1..40: mol_type = genomic DNA
ttcatagatgccatcaattaccacaggagaagtataaaat

SEQ ID NO: 26734 - DNA, 40 bp, Ruminococcus callidus
  source 1..40: mol_type = genomic DNA
ttcatagatgccatcaatttacacaggagaagtataaaat

SEQ ID NO: 26735 - DNA, 50 bp, Ruminococcus callidus
  source 1..50: mol_type = genomic DNA
ttatatatatagatacattatatatagatagatacattatatcgatataa

SEQ ID NO: 26736 - protein, 510 aa, Bacillus amyloliquefaciens
MALHENSKIAVYSRKSREDRDSEDTLAKHRNELEYLIKRENFKNVQWFEEVVSGETIDERPMFSMLLPRIENGEFDAVCAVAMDRLSRGSQIDSGRILEAFKQSGTLFITPKKIYDLSIEGDEMLSEFESIIARSEYRAIKRRTINGKKNATREGRLHSGSVPYGYKWDKNLKAAVVVEEKKKIYRMMIKWFLEEEYSCTVIAEMLTELKVPSPSGRSIWYGEVVSEILSNDFHRGYVWFGKYKKSKSNNSIVQNKNLDELLIAKGHHETMKTDEEHALILNRIEKLRTYKLAGRRLNMNTHRLSGIVRCPYCHKAQAIEQPKGRRKHVRKCLRKSAERTKECEETKGIHEEVLFQSIMKEIKKYNESLFSPTEQDVNDDSYTAQLIGLREKAVKKAKGRIERIKEMYLDGDISKTEYKEKLKISQETLQKAENDLAELIASTEFQNALSAETKKEKWSHHKVQEMIESTDGMSNSEINLILKMLISHITYTVEDLGDGTKNLNIKVYYN

SEQ ID NO: 26737 - DNA, 50 bp, Bacillus amyloliquefaciens
  source 1..50: mol_type = genomic DNA
tgtcgtactcaatcaataatcgtcacaagcattatagtttaagtacaaca

SEQ ID NO: 26738 - DNA, 40 bp, Bacillus amyloliquefaciens
  source 1..40: mol_type = genomic DNA
ggtcattccaatgatcgttacaactgatccggttacgaca

SEQ ID NO: 26739 - DNA, 40 bp, Bacillus amyloliquefaciens
  source 1..40: mol_type = genomic DNA
ggtcattccaatgatcgttttaactgatccggttacgaca

SEQ ID NO: 26740 - DNA, 50 bp, Bacillus amyloliquefaciens; identical to SEQ ID NO: 5975
  source 1..50: mol_type = genomic DNA

SEQ ID NO: 26741 - protein, 497 aa, Symmachiella dynata
MNVVIWTRVSSREQKEGYSIDAQLRVTREKAQRLGWNVVREFELDESAKRGAERKIFNEMLRWLAKNAKREKIKAILCHKLDRACRNMRDAVRLQELEDACGVQLSFVENEFGPGAAGTFSFNVMAAVAQYYSDNLREEVIKGLDEKVRQGWPTGLAPYGYINVDDRDEPIVPHPEKSKTLIRIFDLYSSGSHTFKSLADRLASEGHEFRDSQSRFNRTALSHILNNRFYIGELHRNGHVFEGRYQRVIHRATFDACQDILSGRKRRTGTYHLPLAGGLFRCEYCGQSITGERIRRKLKGGGIREHIYYRCCNNNRGPDHPKVRWKARDLEEAIAEDLEKMRMPTLEVADWFRKELWAAVHDLTGYRRQQATSFAKRKTELANMQDRLLNAYLAGTIDEEAYKAKSNELKAETASADESLDKLGDVDPARGELAVTLFDWTQKAAEIWRGSNNTVRRDILDAVCLNRVVSDVNLVLEKRKPFDTLAERPDLENSRGD

SEQ ID NO: 26742 - DNA, 50 bp, Symmachiella dynata
  source 1..50: mol_type = genomic DNA
cgccgaaaggccggatttagagaatagtcggggtgactggcgttcgtttg

SEQ ID NO: 26743 - DNA, 40 bp, Symmachiella dynata
  source 1..40: mol_type = genomic DNA
ctcagcaatcatttagaagaagtcggggtgacaggatttg

SEQ ID NO: 26744 - DNA, 40 bp, Symmachiella dynata
  source 1..40: mol_type = genomic DNA
ctcagcaatcatttagaaggggtcggggtgacaggatttg

SEQ ID NO: 26745 - DNA, 50 bp, Symmachiella dynata
  source 1..50: mol_type = genomic DNA
ccccaaaagcagacattaaggcaaggatctgggtgaatgtagtttatttg

SEQ ID NO: 26746 - protein, 613 aa, Vibrio alginolyticus; identical to SEQ ID NO: 10001

SEQ ID NO: 26747 - DNA, 50 bp, Vibrio alginolyticus; identical to SEQ ID NO: 10002
  source 1..50: mol_type = genomic DNA

SEQ ID NO: 26748 - DNA, 40 bp, Vibrio alginolyticus
  source 1..40: mol_type = genomic DNA
gaagaatacttactgtggtttgataaaaagggctggccaa

SEQ ID NO: 26749 - DNA, 40 bp, Vibrio alginolyticus
  source 1..40: mol_type = genomic DNA
gaagaatacttactgtggttggataaaaagggctggccaa

SEQ ID NO: 26750 - DNA, 50 bp, Vibrio alginolyticus
  source 1..50: mol_type = genomic DNA
tgaagaatgctttcatcttttatatgcccaaaaatgttttcttgccttct

SEQ ID NO: 26751 - protein, 547 aa, Clostridium symbiosum
MKKQTKCYIYTRVSTSMQVDGYSLDAQRDKLRKYAEYEDMVIVGEYSDEGFSGKNIQGRHEFQRMLADIEAGKDGVSFVLVFKLSRFGRNAADVLNSLQLMQDFGVNLICVEDGIDSSKDSGKLMISVLSAVAEIERENIRTQTMAGREQKAREGKWNGGFAPYGYKLENGQMLIADDEVEVIRIIYDRYIHTNDGVSGVAKYLNTHGYTKKLRQNGTIPGFSANFVKDVLDNPVYMGKIAYGRRKTEKKLGTRNEMHIVEQSEFPIYEGQHEAIVSEEDWNLAHEKRKANAYRREKIHDTEHAHILSGILRCPCCGKGMYGNISKAHSKDNKTRYYYYCKNTVTPTGHSCTFRTNIEQTEINDMVADIISAMVRNPRFSEAIKAKIGSAVDTSDMEKQLEVLQGQLRQTLGTKARLERQMDSLDVGDPYYDRKILDLQRRYDEQYEKIEEIEIQMDDVKSQIRSIRQEKISGDNIYRLLLAFDEVYGAATEVERKEFMRAFIEKIELYPQKRKDGCWIKSISFNFPVPLNGQEVTELPLENETTIE

SEQ ID NO: 26752 - DNA, 50 bp, Clostridium symbiosum
  source 1..50: mol_type = genomic DNA
cccttggaaaatgagacaactattgagacggttgttcaactttccaaggg

SEQ ID NO: 26753 - DNA, 40 bp, Clostridium symbiosum
  source 1..40: mol_type = genomic DNA
tcctatgagtgggcatgtcgagtcggtaataatgatgcgg

SEQ ID NO: 26754 - DNA, 40 bp, Clostridium symbiosum
  source 1..40: mol_type = genomic DNA
tcctatgagtgggcatgtcgggtcggtaataatgatgcgg

SEQ ID NO: 26755 - DNA, 50 bp, Clostridium symbiosum
  source 1..50: mol_type = genomic DNA
caattgccaaaagtgtcatctattggcactattgtttccagttccaaggg

SEQ ID NO: 26756 - protein, 471 aa, Listeria monocytogenes
MTVGIYIRVSTEEQVKEGFSISAQKEKLKAYCTAQGWEDFKFYVDEGKSAKDMHRPLLQEMITHIKKGLIDTVLVYKLDRLTRSVVDLHNLLSIFDEYNCAFKSATEVYDTSSAMGRFFITIISSVAQFERENTSERVSFGMAEKVRQGEYIPLAPFGYVKGSDGKLIINEAEKEIFLHVVNMVSTGYSLRQTCEYLTNIGLKTRRSNDVWKVSTLIWMLKNPAVYGAIKWNNEIYENTHEPLIDKATFDKLANILSIRSKSTTSRRGHVHHVFKGRLICPQCGKRLSGLRTKYVNKNKETFYNNNYRCATCKEHRRPAIQISEQKIEKAFIDYISNYTLNKANISSKKLDNNLRKQEMIQKEIISLQRKREKFQKAWAADLMNDDEFSKLMIDTKMEIDAAEDRKKEYDVSLFASPEDIAKRNNILRELKINWTSLSPTEKTDFISMFIEGIEYVKDAENKAVITKIRFL

SEQ ID NO: 26757 - DNA, 50 bp, Listeria monocytogenes
  source 1..50: mol_type = genomic DNA
tataggttttttgtaaaatacagggatgtgtactttacaaaaacactatt

SEQ ID NO: 26758 - DNA, 40 bp, Listeria monocytogenes; identical to SEQ ID NO: 7183
  source 1..40: mol_type = genomic DNA

SEQ ID NO: 26759 - DNA, 40 bp, Listeria monocytogenes
  source 1..40: mol_type = genomic DNA
ttcaatgttactgtatccttatgtgtacctatagcccatc

SEQ ID NO: 26760 - DNA, 50 bp, Listeria monocytogenes
  source 1..50: mol_type = genomic DNA
tataggtatagggagaaatataggtatgtattctttatacccacatttat

SEQ ID NO: 26761 - protein, 471 aa, Listeria monocytogenes
MTVGIYIRVSTEEQVKEGFSISAQKEKLKAYCTAQGWEDFKFYVDEGKSAKDMHRPLLQEMITHIKKGLIDTVLVYKLDRLTRSVVDLHNLLSIFDEYNCAFKSATEVYDTSSAMGRFFITIISSVAQFERENTSERVSFGMAEKVRQGEYIPLAPFGYVKGPDGKLIINEAEKEIFLHVVNMVSTGYSLRQTCEYLTNIGLKTRRSNDVWKVSTLIWMLKNPAVYGAIKWNNEIYENTHEPLIDKATFDKLANILSIRSKSTTSRRGHVHHVFKGRLICPQCGKRLSGLRTKYVNKNKETFYNNNYRCATCKEHRRPAIQISEQKIEKAFIDYISNYTLNKANISSKKLDNNLRKQEMIQKEIISLQRKREKFQKAWAAELMNDDEFSKLMIDTKMEIDAAEDRKKEYDVSLFASPEDIAKRNNILRELKINWTSLSPTEKTDFISMFIEGIEYVKDAENKAVITKIRFL

SEQ ID NO: 26762 - DNA, 50 bp, Listeria monocytogenes
  source 1..50: mol_type = genomic DNA
tataggttttttgtaaaatacagggatgtctactttacaaaaacactatt

SEQ ID NO: 26763 - DNA, 40 bp, Listeria monocytogenes; identical to SEQ ID NO: 7183
  source 1..40: mol_type = genomic DNA

SEQ ID NO: 26764 - DNA, 40 bp, Listeria monocytogenes; identical to SEQ ID NO: 26759
  source 1..40: mol_type = genomic DNA

SEQ ID NO: 26765 - DNA, 50 bp, Listeria monocytogenes; identical to SEQ ID NO: 26760
  source 1..50: mol_type = genomic DNA

SEQ ID NO: 26766 - protein, 536 aa, Blautia wexlerae
MLRQTNQQPITALYPRLSHEDELQGESNSISNQKRILETYAKQNGFSNLRWYTDDGYSGANFQRPGFQAMLADIEAGKVGTVIVKDMSRLGRNYLQVGMYTEMIFPQKGVRFIAINDGVDSAQGDNDFAPLRNIFNEWLVRDTSKKIKAVKRSKGMSGKPITSKPVYGYLMDEDENFIIDEEASPVVKQIYNLCLAGNGPTKIARMLTEQQIPTPGTLEYRRTGSTRRYHPGYECKWATNTVVHILENREYTGCLVNFKTEKLSYKVKHSVENPEEKQAIFENHHEPIIDTQTWERVQELRKQRKRPNRYDEVGLFSGILFCADCGSVMYQQRYQTDKRKQDCYICGNYKKRTHDCTAHFIRTDLLTAGVLSNLRKVTSYAAKHEARFIKLLIEQNEDGGKRRNAAKKKELEAAEKRIAELSAIFKRLYEDSVTGRISDERFTELSADYEAEQRELKEKAAAIQAELSKAQEATVNAEKFMNVVRRHTSFEELTPTLLREFVEKIVVHECSYDENKTRRQDIEIYYSFVGKVDLPE

SEQ ID NO: 26767 - DNA, 50 bp, Blautia wexlerae
  source 1..50: mol_type = genomic DNA
ttacttctttatcgcacatcagtaaatgctcatgtacagtaaagaagcaa

SEQ ID NO: 26768 - DNA, 40 bp, Blautia wexlerae
  source 1..40: mol_type = genomic DNA
agtgaatgaaccgtaacataatcggcagggcttgtcacaa

SEQ ID NO: 26769 - DNA, 40 bp, Blautia wexlerae; identical to SEQ ID NO: 26768
  source 1..40: mol_type = genomic DNA

SEQ ID NO: 26770 - DNA, 50 bp, Blautia wexlerae
  source 1..50: mol_type = genomic DNA
tgactgctgtcaggaacaactgtaaaagctcatctagaaagaaggagcaa

SEQ ID NO: 26771 - protein, 516 aa, Mediterraneibacter faecis
MSYCIYLRKSRKDLEAEQHGEGETLARHERALLSLAKKNNLIISNIYREVVSGETIAARPVMQQLLHEVEQNLWDGVLVMEVERLARGDTIDQGVVQRAFQYSNTLIITPSKTYDPANEFDEEYFEFGLFMSRREYKTIKRRMQNGRYAAISEGKWPYNSAPYGFRRMKLEKEKGWTLAFDENEAPVVRLIFSMFTGPERVGIRSITRTLNSYGTKPRNSKLWSESTVRGILSNVVYDQCVKIGERKVVRTVENGVLTTTRPRTSDYTIVSGRHPRLIDHDVFAEAQSYLGCGSPKPAGSNIIKNPLAGIIVCSECKKKMIRRPPSGTASRVPYDLMLCSTYDCPTIGSPLDLVEREVYNALSDWVEGYRLSGQIPSKSLIPEKEVLLESAQQTLDQLLRQKGTMYDLLEQGVYSTEVFLERSDSLQNRISEAESNVTQLKLELDKERQREANIEQFLPACEDLLSCYWDLSIPERNRLLKLLIESIEYKKLTKNKRGHLNEPNFELTIKPRIPRK

SEQ ID NO: 26772 - DNA, 50 bp, Mediterraneibacter faecis; identical to SEQ ID NO: 17137
  source 1..50: mol_type = genomic DNA

SEQ ID NO: 26773 - DNA, 40 bp, Mediterraneibacter faecis
  source 1..40: mol_type = genomic DNA
catctccatatgggcaagttcttctgtaccaatatcggtc

SEQ ID NO: 26774 - DNA, 40 bp, Mediterraneibacter faecis
  source 1..40: mol_type = genomic DNA
catctccatatgggcaagtagttctgtaccaatatcggtc

SEQ ID NO: 26775 - DNA, 50 bp, Mediterraneibacter faecis
  source 1..50: mol_type = genomic DNA
aatatccaaaatgtcctatattatagtttatcttaaacacatttgaaatg

SEQ ID NO: 26776 - protein, 552 aa, Pseudarthrobacter phenanthrenivorans
MTTIADDPATSLIDPPNTAAAAVSYLRVSTREQAEKGGTDEGFSIPAQREATRRKAEQLGAGIVEEFVDAGASAKSSDRPELMRMIQYVKTNKVAYCIVHKVDRLARNRADDVSIHLALQQCGVMLVSASENIDETPSGMLLHGIMSTIAEFYSRNLATEVAKGMTQKAIGGGTNGRAPIGYLNVRKRDELGREVRTIELDPERAPMIEWAFKAYASGNWSVSQLHDELTSRGLRSLPTPKRPAKPLAVSTIHRLLTNPYYKGDVVYRGTRYKGNHPALVPAEVWYQVQSVLTAHQCAVEATQVHGHYLKGTIHCGQCGSRLIVSNAKNRHGNVYCYFVCSGRHSKRTDCTRQAMLIEDVAKLVEDYYTRVQITPAQQDALAGMLHHEFDRLMAAETEELERLTANRDRLEGEQDRLMQAHYADAIPLSVLKREQDRIVAELDQVTRRIDAHFGDYADARAHLDDALGLLANCADIYARCDDTNRRLCNQAFFTKVYIDEDNELRVEHNRPFEMLLDPQVNANALTWAADTNKTRTSTNVSVGKGSSLVRGV

SEQ ID NO: 26777 - DNA, 50 bp, Pseudarthrobacter phenanthrenivorans
  source 1..50: mol_type = genomic DNA
gggttcgagccttgtgcgtggggtggacctccgtagagagtttgagaacc

SEQ ID NO: 26778 - DNA, 40 bp, Pseudarthrobacter phenanthrenivorans
  source 1..40: mol_type = genomic DNA
ttccggcggattgtccggtggagctgaggggactcgaacc

SEQ ID NO: 26779 - DNA, 40 bp, Pseudarthrobacter phenanthrenivorans
  source 1..40: mol_type = genomic DNA
ttccggcggattgtccggttgagctgaggggactcgaacc

SEQ ID NO: 26780 - DNA, 50 bp, Pseudarthrobacter phenanthrenivorans
  source 1..50: mol_type = genomic DNA
gagttccagagacttgctgggagttgacctccgtggtggtgctgagagtc

SEQ ID NO: 26781 - protein, 525 aa, Rothia dentocariosa
MKLHSEYNDNQRVVAYYRYSSSSQNEASIEQQREMVQRWAKSQGLVVVNEYEDAAKTGTNADRPGYQLMLRELPKIKPAYVAVWKNDRLARDRAELLLVKQAIRSVGARVHYIEGISPTDSPDSVLMEGVADAFAEYYSLQLSANIRRGQRYNAERALSNGHKIFGFTVDQDKRYIPDPETAPIVTQIFHDYASGVSMQKICNQLNAQGIRTTRGYRFTPKNLNKMLKNRAYIGEYAYGGHVHEDGMPRLVDDLTFNEVQRRFAINKRRGAKTKAELAAQGENAPDYWLTGRAYCLTCGGPMEGVSGTSKTGKTYRYYYCLNQRKKKCSAKTVRKDEIEVRIEEIVASFLADPEMLASLAVDLADHYQQTHGRGDDILKALEARRADVEKKLANFVKAISQGIFNETTAEAMRSLEEQKRELDAAIQAEHVKATLYEDEASIGAFYKRFAEATIDTPETRDQLFEYFVDKVFIGREQIVIASYFHDSAAPIEFEDLEEALTSGHRAGEVRTYARKQEFDTSPSGG

SEQ ID NO: 26782 - DNA, 50 bp, Rothia dentocariosa
  source 1..50: mol_type = genomic DNA
gagttcgacacttccccctcaggtggagctcagggggcacgtgtcgaact

SEQ ID NO: 26783 - DNA, 40 bp, Rothia dentocariosa
  source 1..40: mol_type = genomic DNA
cctttttaagggcttttgtggagatgcggggaatcgaacc

SEQ ID NO: 26784 - DNA, 40 bp, Rothia dentocariosa; identical to SEQ ID NO: 26783
  source 1..40: mol_type = genomic DNA

SEQ ID NO: 26785 - DNA, 50 bp, Rothia dentocariosa
  source 1..50: mol_type = genomic DNA
gagtttgactcagtagcctgaggtggagttcaggggcttgatgttaaaaa

SEQ ID NO: 26786 - protein, 462 aa, Rhodococcus fascians
MRAILYTRVSSDPSGRGRSVHEQEVECRAVCEREGWDVAEVLTDNDIGASRWSGKKRPAYRELDRVLQSGDVLVTWEASRAQRDLKAYVELRDLCAARGVQWSYSGRTYDLTRGDDRFTTGLDALLSEKEAELTRERVLRGVRANATAGKPHGKLPFGYRIVRDPDTGESLGRIPDEATAPVVREIVRRLLEGEALYAICKDFDHRDIPGPRPRRDGQPVKWNPITMRKIAESPTYAALRVHKGVVTGPATWEPLISRADHDAILALLADPNRRMSPGPKPAWLLTGIGYCGACGAHIRRIKNRGHHSYTCNAQFCVSRKTNDVDRLVSEALIRRLEKPDLIDIINAATDDGSDALVEARALRARLDSFTDKAADGELSASALARVEAKLLPQIDAAERRARSLTMPPIVAAFAGPDAREKWNVADFEHKRALVRALVKVEIMPVGKGRRSFDPDAVRLTFI

SEQ ID NO: 26787 - DNA, 50 bp, Rhodococcus fascians
  source 1..50: mol_type = genomic DNA
ttcactgcatttcattccatatatggggaaactgtcgtaactacaccgta

SEQ ID NO: 26788 - DNA, 40 bp, Rhodococcus fascians
  source 1..40: mol_type = genomic DNA
gcatctgaccgcggtgtcgggtgcgaacttctcgatcctg

SEQ ID NO: 26789 - DNA, 40 bp, Rhodococcus fascians
  source 1..40: mol_type = genomic DNA
gcatctgaccgcggtgtcgtatgcgaacttctcgatcctg

SEQ ID NO: 26790 - DNA, 50 bp, Rhodococcus fascians
  source 1..50: mol_type = genomic DNA
ttcacttcagattcttcagtgtgttaggagactgtcagatctacattgca

SEQ ID NO: 26791 - protein, 536 aa, Pseudomonas aeruginosa
MTKKCFPYVRFSSTRQEDGSTRTRQNELIEAFVAKHGLEVDRHLEDAGTSAFHSKHAGSEGVLGQFLKEVRKGEIEKGSYLLIENFDRLSRDKIVRSNKIFTDLLFSGIKIVILDKNKIYDADNLDFGDWITALVEFERANAESQRKSDFSSKAWKLNRDKMHNGEIVTKKVPNWLKVENNTFIIDEVKIDRIRTLFRLSLSKGLQEATKEYNTLYGEKLAIHQAQYLLGNRKLIGEHQPQKIHYNENGRLIRKDEGNPIPDYYPQVIDEDLFLKVQSVITSRKPFSGRYSAQRYNVFRDLIFCRFCGGTIRYMNKGERDYFICTNSMTGKCGLKGQQSIRGKKVFSRFFKFTNGINIGTLLEENTNADEIKNELMKLENQKTKISNRLDGFKSQIKKMILEGETIPETYNEIIVDLENSIIKLDDEIEIKNKELNKIISSFKSFYDLKEIDIEKIIYDKSQEAIEKRVQYNNELKNIIKKIQIDYLNDILHVEFSNGVNRHILNDELANEYNKDEIENAWASVVKSIANKTNPQS

SEQ ID NO: 26792 - DNA, 50 bp, Pseudomonas aeruginosa
  source 1..50: mol_type = genomic DNA
atggaaccttttgcagagcatatccagccgtgctatgttattggttccat

SEQ ID NO: 26793 - DNA, 40 bp, Pseudomonas aeruginosa; identical to SEQ ID NO: 24423
  source 1..40: mol_type = genomic DNA

SEQ ID NO: 26794 - DNA, 40 bp, Pseudomonas aeruginosa
  source 1..40: mol_type = genomic DNA
ccgcgcatagcagtagatgatgccatgctcgcaaccacgg

SEQ ID NO: 26795 - DNA, 50 bp, Pseudomonas aeruginosa
  source 1..50: mol_type = genomic DNA
atgtaacctagtcaagggaatgtcatgccatgccataacctttgctctat

SEQ ID NO: 26796 - protein, 465 aa, Lachnospiraceae bacterium
MKGNAGDTIVKKIDLSPELVRVALYIRVSGEEQKIKGLSLEAQQERLEAYARERGWVIVGIYIDAAKTARKNIHKRTDFQRMMDSVKRDEVDILLFCRLDRWFRSVADYYKIMEVLEAHNCDWKTTDEEYDTTTANGRLYINVKLSIAQNEADIDGERIDVVFDSKIAHGTVVSGSAPFGFRVNAGKRLEVVPEDAAIVQDAFNYFETSISQRATVRYIRETYGVNWCDATFRRMLKEKLYTGVYDRGGRFNDHFCPAIISKQQFDRVQALLERNARSVPSGKVYIFTSILTCAECGHKLVGYKSSDYYYYRCNQHFQRGRCSHNHSAREDVVEKWLFEHLAEELERYQLEWEVAAAKKKASVARTDKAALKRKLTKLKELYVNDLIDIEDYKRDYQIYTAALKQIPEPSIEPPPDFAAVRRLLDNDFKTIYENLTREEKRTLWRSVIKEIRIDNDQNITGVVFG

SEQ ID NO: 26797 - DNA, 50 bp, Lachnospiraceae bacterium
  source 1..50: mol_type = genomic DNA
tgttatactaatgtgacactacccgtgggctgtgttaagttagtacaaat

SEQ ID NO: 26798 - DNA, 40 bp, Lachnospiraceae bacterium
  source 1..40: mol_type = genomic DNA
ctttttatccaacgctcccgtaggctcatcacataaaatg

SEQ ID NO: 26799 - DNA, 40 bp, Lachnospiraceae bacterium
  source 1..40: mol_type = genomic DNA
ctttttatccaacgctcccctaggctcatcacataaaatg

SEQ ID NO: 26800 - DNA, 50 bp, Lachnospiraceae bacterium
  source 1..50: mol_type = genomic DNA
gattacacttgcatgccactacgcctgggttttgtatttttagtacagat

SEQ ID NO: 26801 - protein, 512 aa, Staphylococcus aureus; identical to SEQ ID NO: 21606

SEQ ID NO: 26802 - DNA, 50 bp, Staphylococcus aureus
  source 1..50: mol_type = genomic DNA
aatactttatttagtctatctctaggtggaactgtactgaattaagtcaa

SEQ ID NO: 26803 - DNA, 40 bp, Staphylococcus aureus
  source 1..40: mol_type = genomic DNA
ggatgtgcaacaggtacttggtatcgcgctggtgaagggc

SEQ ID NO: 26804 - DNA, 40 bp, Staphylococcus aureus
  source 1..40: mol_type = genomic DNA
ggatgtgcaacaggtacttattatcgcgctggtgaagggc

SEQ ID NO: 26805 - DNA, 50 bp, Staphylococcus aureus
  source 1..50: mol_type = genomic DNA
aaaattttgcaggaacaatctctaatttgaattgaattaatttaattcaa

SEQ ID NO: 26806 - protein, 512 aa, Staphylococcus lugdunensis; identical to SEQ ID NO: 21606

SEQ ID NO: 26807 - DNA, 50 bp, Staphylococcus lugdunensis; identical to SEQ ID NO: 26802
  source 1..50: mol_type = genomic DNA

SEQ ID NO: 26808 - DNA, 40 bp, Staphylococcus lugdunensis
  source 1..40: mol_type = genomic DNA
ggctgtgcaacagggacttggtatagagcaggcgagggat

SEQ ID NO: 26809 - DNA, 40 bp, Staphylococcus lugdunensis
  source 1..40: mol_type = genomic DNA
ggctgtgcaacagggacttattatagagcaggcgagggat

SEQ ID NO: 26810 - DNA, 50 bp, Staphylococcus lugdunensis; identical to SEQ ID NO: 26805
  source 1..50: mol_type = genomic DNA

SEQ ID NO: 26811 - protein, 495 aa, Klebsiella michiganensis
MKQNGQAYSYIRFSSKKQEQGDSVRRQTELAEQYAHANNLILSDKNFQDLGISAFKEGSRPSLSDMLEAIEKGQIEQGSTIIIESLDRLSRRGIDVTQQIIKSILQHNVFIASLVDGLLLNRESVNDLVSVIRIALAADLAYKESEKKSQRLRETKGQQRQRALNGEVINKILPFWLERKQDKIVFSDRLDTVKRIIELRRKGLGTNKIARTLNDEGHKPLRSAGWNHTTVGKTINSVALYGAYQTSETTKDRKVILLDIIENYYPAVISKDEFILLQSDQKQNKPGYKSEHNAFAGILKHECGGALVRKFHVVSGKTYQYHICANARDGKCHVTKNFKNIEVALYRIMKELKVEKNTNFDQTLLAERDAIKTKIQRLNDALMEFSESPRTVIQTIHNLEKKGEELEAKIKIQNSMIISEQAFDFNLLQEIQNPQELNMVLKRIIENITVYNIGKIWRIKVLYRNRHVQSFIWDGEKTSFVSDTKKILDLAKSWI

SEQ ID NO: 26812 - DNA, 50 bp, Klebsiella michiganensis
  source 1..50: mol_type = genomic DNA
tattcccccctttgaaactgcatggtaatattgttgcaaagaagcaaaat

SEQ ID NO: 26813 - DNA, 40 bp, Klebsiella michiganensis; identical to SEQ ID NO: 4508
  source 1..40: mol_type = genomic DNA

SEQ ID NO: 26814 - DNA, 40 bp, Klebsiella michiganensis
  source 1..40: mol_type = genomic DNA
cttactgccgaactgcatgaagacgttgctggatactagc

SEQ ID NO: 26815 - DNA, 50 bp, Klebsiella michiganensis
  source 1..50: mol_type = genomic DNA
ttttccccccagaaaatctgtatgaatatattgttggtcagttgtcacat

SEQ ID NO: 26816 - protein, 560 aa, Pseudomonas tolaasii
MPKVFSYVRFSSAKQSAGDSKARQIKSAKAFADEHGYELADPTDYLFFDAGRSAYKGRHLDDTGELARFLAFVEDGTVPTGSILVIESLDRLSRERVRDALPRFLDLLAKGINVYTSTDKRLYTSDYNEIDLIVSIITMSRAHEESATKGSRVSSAWRNKHKDARETGKPLGKLRPLWLDVTPDGYLLNPDHAKVVQRIFDLSAQGHGSRVIAANLNQEGIPAFSAGRKNFSGLWGFSTIRHILESRTTLGEYQPHIFIDGVRTPSGDPIKSYFPPVITEEQFYLAAAARASRRLHKITKVTKNFNVLAGIFFCQKCGGAMHLQGFKDRKYFKCANKQKGLCDTGVIGSERSELVFQEVLAKVDSLSLVRSSSGSLTKKLQVSDGRIEELRAKQANAEASHQEFPSRITAKLLQQIEVDLEALVADRNAIAQNLATDQVVSKSDFFEKLDLTSYEGRVAANNLVKRLDVRISVSKLGRLDEVYRVLISSTLAFLISHHERKLTIRSMDARILDKQVMHGEITQEQREQLEHIRDAGESEGAIKRAAALFKWEQSASTTTE

SEQ ID NO: 26817 - DNA, 50 bp, Pseudomonas tolaasii
  source 1..50: mol_type = genomic DNA
agtagctttttgttgcgtaacatcaagaagtgttgccacaattacctaca

SEQ ID NO: 26818 - DNA, 40 bp, Pseudomonas tolaasii
  source 1..40: mol_type = genomic DNA
cggcagcgggcagaaattcaagaagtgctgttccagctac

SEQ ID NO: 26819 - DNA, 40 bp, Pseudomonas tolaasii
  source 1..40: mol_type = genomic DNA
cggcagcgggcagaaattctggaagtgctgttccagctac

SEQ ID NO: 26820 - DNA, 50 bp, Pseudomonas tolaasii
  source 1..50: mol_type = genomic DNA
aatagctatattgtttctcacaactggaagtgttccgagcttttcctaca

SEQ ID NO: 26821 - protein, 560 aa, Pseudomonas tolaasii
MPKVFSYVRFSSAKQSAGDSKARQIKSAKAFADEHGYELADPTDYLFFDAGRSAYKGRHLDDTGELARFLAFVEDGTVPTGSILVIESLDRLSRERVRDALPRFLDLLAKGINVYTSTDKRLYTSDYNEIDLIVSIITMSRAHEESATKGSRVSSAWRNKHKDARETGKPLGKLRPLWLDVTPDGYVLNPDHAKVVQRIFDLSAQGHGSRVIAANLNQEGIPAFSAGRKNFSGLWGFSTIRHILESRTALGEYQPHIFIDGVRTPSGDPIKSYFPPVITEEQFYLAAAARASRRLHKITKVTKNFNVLAGIFFCQKCGGAMHLQGFKDRKYFKCANKQKGLCDTGVIGSERAELVFQEVLAKVDSLSLVRSSSGSLTKKLHVSDGRIEELRAKQANAEASHQEFPSRITAKLLQQIEVDLEALIADRDAVAQNLATDQVVSKSDFFEKLDLASYGGRVAANNLVKRLDVRISVSKLGRLDEVYRVLISSTLAFLISHHERKLTIRSMDARILDKQVMHGEITQEQREQLEHIRDAGESEGAIKRAAALFKWEQSASTTTE

SEQ ID NO: 26822 - DNA, 50 bp, Pseudomonas tolaasii; identical to SEQ ID NO: 26817
  source 1..50: mol_type = genomic DNA

SEQ ID NO: 26823 - DNA, 40 bp, Pseudomonas tolaasii; identical to SEQ ID NO: 26818
  source 1..40: mol_type = genomic DNA

SEQ ID NO: 26824 - DNA, 40 bp, Pseudomonas tolaasii; identical to SEQ ID NO: 26819
  source 1..40: mol_type = genomic DNA

SEQ ID NO: 26825 - DNA, 50 bp, Pseudomonas tolaasii; identical to SEQ ID NO: 26820
  source 1..50: mol_type = genomic DNA

SEQ ID NO: 26826 - protein, 546 aa, Clostridium botulinum
MLCYNNVKRKYVISRKKGGTYMEVVGSYNYSYTQNQNAIKDVAIYLRKSRGEEEDLEKHRMALVDMCKIKGWRYTEYSEVGTADSLVFRPQMRKLLSDIENELFDAVVVIDMDRLSRGDGEEQAKIKNIIRRSGTYIVTPQKMYDLNNESDDMYSDFEGLMARVEYKQIKKRFRRGKRQGARRGDWTNGTPPFPYVYQQWHDEKTGEMHINEKGLVVNREKYEIYRFMIDKVLLERITPNNIAWELNRRGIPSPRGGRWYGVTVQRILVDETHLGKIISNKTSGDGHKIKKSKDSKDVVYHPREEWIIVENCHEAVKTQEEHDKLLLFFARETKAPKRTATKISPLSGLLKCKKCSHTIQTLYRSDRKGEEYIKPCWYRDELGNKCKNKGAKADIVHKAIREQLALYEQELRIALQQDGDIDSDKSILREINMTLKELTRLEKKICKIDELVEDEYYTPQEARKRKETLKVKIDETETRLNLLQIKLNNSEKTTNQERLTIIERFKKAVAQENLTADELNEWYKSIISHIVWEKTEDELLIDVNFL

SEQ ID NO: 26827 - DNA, 50 bp, Clostridium botulinum
  source 1..50: mol_type = genomic DNA
tgggtacagaattaaatatgacaccaatgacatgttgacttatgtaccca

SEQ ID NO: 26828 - DNA, 40 bp, Clostridium botulinum
  source 1..40: mol_type = genomic DNA
tctttccataacatggcaccaatgacaggtagaataacct

SEQ ID NO: 26829 - DNA, 40 bp, Clostridium botulinum
  source 1..40: mol_type = genomic DNA
tctttccataacatggcactaatgacaggtagaataacct

SEQ ID NO: 26830 - DNA, 50 bp, Clostridium botulinum
  source 1..50: mol_type = genomic DNA
tgggtaaggtaccaagtatgacactaataacctggtggtatatgaagcct

SEQ ID NO: 26831 - protein, 547 aa, Zobellia nedashkovskayae
MLAIYCRISQKKDDGKDRSIDYQKNEGVKLANSLNLEYKLYIDEGVSGTWEITKRPAFFELLKDLTDKKNVITTVFALDASRLYRSDQTRLTFLASIKKRNINLYFNTGIFDWSDPYMDFMGKVLSATDVLHVDITRLKVRGVLIERAKKGKVQGILPYGYCRDENEMMDIEPVEAELVKRIFKLSLQGWGYRKITDQFNDEDIPTRYNQYGGTLTYRKKGSNGLKSVDKKDIRWNHTNIRNILRNRVYLGERFWGGVKQPCPAIIDIETFNKVKYRVNSGLKKSGKDSSYKYLLNNLCKCGLCGKRFTGRKSGNYRHYRCTSILFQKVDKCGNGYMDVVALESFIWERFFYSHELYKLVETHLKNNGTRDKVKEIKEHIQSIERANNALRSERTKAIQLTLKGVFAESDIKSELIRIDASVNDNDIKLDRANEQLLNYLNSSDNLNDLKKDLSNIKKDIGFDIRQQLVEKYIKEIEVIKTPAFFEIVITFNIADMRKEYYKMEHDYTLAFITGELGKNLHPIKWLSANLKPAKLEKAKMLQETIKD

SEQ ID NO: 26832 - DNA, 50 bp, Zobellia nedashkovskayae
  source 1..50: mol_type = genomic DNA
tttatcatattgtataaagtcactacggtaatatacactaatatgataat

SEQ ID NO: 26833 - DNA, 40 bp, Zobellia nedashkovskayae
  source 1..40: mol_type = genomic DNA
ttttggagtggacgcgacaacgatcacagtagaagtaaat

SEQ ID NO: 26834 - DNA, 40 bp, Zobellia nedashkovskayae
  source 1..40: mol_type = genomic DNA
ttttggagtggacgcgacatggatcacagtagaagtaaat

SEQ ID NO: 26835 - DNA, 50 bp, Zobellia nedashkovskayae
  source 1..50: mol_type = genomic DNA
tttgtaatgacttataaagtgacttgagaaaaatactttcttatcacaat

SEQ ID NO: 26836 - protein, 549 aa, Pelosinus fermentans
MKTAYNVGIYCRLSREDLKNGKRDVSMSIKNQQAMLEAYANEKEWTVYKAYIDDDITGTTFNRPGFQQMMSDIESGLINCVITKDLSRLGRNYIEAGRHRELFNEYGVRYIAIHDNHDSLNDDYNNIATPIKEIMNEMYAADISRKTRSTKKLMANQGKFSNSRTPYGYWKSKEDKHVLAVDENVAHNVVRIFEMYLSGKTARSIADVFNHENILTANEYFYNTIGKPNPYKNNKNKWGSATIMQIIKNPAYYGAMANGKRAVKSFKNKSIVRKDVDEWIIIENTHKPLISKELWLEAQQISKRNNKQTVRRSSNGEVSLFAGIIKCADCGGNLVFNRRVLKSYTKEFFRCSTYTEKGKDVCPMHCIDYATLYQAVLASVQEYAVLAVEDEKKLINKILKTNDEFKNKNMQRYEKIIRESKNRIKEIDGLLQNLYEDKISGEVTADFFKRMSKKYGDEQARLITDVEQLEIDLNEYKRVEQDLTGWVDRVKECLTIDSLTRAIVVELIDRIEVSETYDMNGEKFLDINISYKFSLKNSNREPQKINRAV

SEQ ID NO: 26837 - DNA, 50 bp, Pelosinus fermentans
  source 1..50: mol_type = genomic DNA
aaagatattagtgaaatggcggagaggaagagaacgtcactaatacttta

SEQ ID NO: 26838 - DNA, 40 bp, Pelosinus fermentans
  source 1..40: mol_type = genomic DNA
gattgactttatggcggagagggtgggattcgaacccacg

SEQ ID NO: 26839 - DNA, 40 bp, Pelosinus fermentans; identical to SEQ ID NO: 26838
  source 1..40: mol_type = genomic DNA

SEQ ID NO: 26840 - DNA, 50 bp, Pelosinus fermentans
  source 1..50: mol_type = genomic DNA
aaagatattcactgaatagtagagaggaacagattgaaaaacttactata

SEQ ID NO: 26841 - protein, 492 aa, Fusobacterium hwasookii
MKRAVAYCRFSSSNQREESIDAQVRAIKEYCDKNKLKLLKIYKDEAISGTSTKDREMFLEMILDCKKNLFDCVIVHKYDRFARNRYDHALYEKILNDNNVKLISVLEQLVDDSPESVILKSVLAGMNEYYSKNLSREVKKGKKENALKAIHNGGIPPLGYDLDVNKKYIVNKKEAEAVKLIFELALDGVGYVSIADILNKRGYKNKRGKEFKKISIRDTLLNIKYIGTYYYGLKDGHGRLQKEPIIIENSHEAIIDKDIFYKVQSKMKKNLKGPRNRNGQLYFLTGYCVCGECGGPFSGGYRSVNRNGSVSYGYYCQKKKRKETKCNNKAIRKELLETFIFDIIKKEVFNDEKVEKIIKDIISFSENKKLIREEEIKEYTKEIEKLQKITLKLLEKNLEGNILDEIFNIKNNELKEKIQVLREKIYSIKNITKINEKELRKYLIKFKESANEQAKRKVVEAFVQEIRVYRDKIKIVLRKFPKDLDMVKIGGD

SEQ ID NO: 26842 - DNA, 50 bp, Fusobacterium hwasookii
  source 1..50: mol_type = genomic DNA
gatatggttaagattggtggagatgaagaaataaaaattataaccatagg

SEQ ID NO: 26843 - DNA, 40 bp, Fusobacterium hwasookii
  source 1..40: mol_type = genomic DNA
tgatagtaatggtggagatgacgagagtcgaactcgtgtc

SEQ ID NO: 26844 - DNA, 40 bp, Fusobacterium hwasookii
  source 1..40: mol_type = genomic DNA
tgatagtaatggtggagattgcgagagtcgaactcgtgtc

SEQ ID NO: 26845 - DNA, 50 bp, Fusobacterium hwasookii
  source 1..50: mol_type = genomic DNA
aaaatatttttaactggttgattttgagaaataaaatactaatccttagg

SEQ ID NO: 26846 - protein, 492 aa, Fusobacterium nucleatum
MKRAVAYCRFSSSNQREESIDAQVRAIKEYCDKNKLKLLKIYKDEAISGTSTKDREMFLEMILDCKKNLFDCVIVHKYDRFARNRYDHALYEKILNDNNVKLISVLEQLVDDSPESVILKSVLAGMNEYYSKNLSREVKKGKKENALKAIHNGGIPPLGYDLDKNKKYVINKKEAEAVKLIFELALDGVGYVSIADILNKRGYKNKRGKEFKKISIRDTLLNIKYIGTYYYGLKDGHGRLQKEPIIIENSHEAIIDKDIFYKVQSKMKKNLKGPRNRNGQLYFLTGYCVCGECGGPFSGGYRSVNRNGSVSYGYYCQKKKRKETKCNNKAIRKELLETFIFDIIKKEVFNDEKVEKIIKDIISFSENKKIIREEEIKEYTKEIEKLQKITLKLLEKNLEGNILDEIFNIKNNELKEKIQVLREKIYSVKNITKINEKELRKYLIKFKESANEQAKRKVVEAFVQEIRVYRDKIKIVLRKFPKDLDMVKIGGD

SEQ ID NO: 26847 - DNA, 50 bp, Fusobacterium nucleatum; identical to SEQ ID NO: 26842
  source 1..50: mol_type = genomic DNA

SEQ ID NO: 26848 - DNA, 40 bp, Fusobacterium nucleatum; identical to SEQ ID NO: 22143
  source 1..40: mol_type = genomic DNA

SEQ ID NO: 26849 - DNA, 40 bp, Fusobacterium nucleatum
  source 1..40: mol_type = genomic DNA
tgatagaaatggtggagattgcgagagtcgaactcgtgtc

SEQ ID NO: 26850 - DNA, 50 bp, Fusobacterium nucleatum; identical to SEQ ID NO: 26845
  source 1..50: mol_type = genomic DNA

SEQ ID NO: 26851 - protein, 492 aa, Fusobacterium nucleatum; identical to SEQ ID NO: 3441

SEQ ID NO: 26852 - DNA, 50 bp, Fusobacterium nucleatum; identical to SEQ ID NO: 26842
  source 1..50: mol_type = genomic DNA

SEQ ID NO: 26853 - DNA, 40 bp, Fusobacterium nucleatum; identical to SEQ ID NO: 22143
  source 1..40: mol_type = genomic DNA

SEQ ID NO: 26854 - DNA, 40 bp, Fusobacterium nucleatum; identical to SEQ ID NO: 26849
  source 1..40: mol_type = genomic DNA

SEQ ID NO: 26855 - DNA, 50 bp, Fusobacterium nucleatum; identical to SEQ ID NO: 26845
  source 1..50: mol_type = genomic DNA

SEQ ID NO: 26856 - protein, 553 aa, Streptococcus suis
MDDGYSGTNFQRPSFQNMIKDIESGLINCVITKDLSRLGRNYLDCGLYLEVFFPEHNVRYIAVNDGVDTLNKSAMDITPFRNILNEMYAADISVKIKSAYRARFQQGKFMGTTAPYGYIKDPADHNHLLIDDKVAHVVKEIFDLALKGNGVAKICRHLNKQHILRPAAYAAERGETGFERHFEGNEDKRYIWSGNSVRSILRSPIYAGNLVGYKRIAANMKSKKRPSKLPEEWEVIPNTHEGIVTQEEFDIVQQLITSRRLPQNKGGFVNIFAGVIKCVDCGCALRAMNVHRRKRPEIIDCVQYSCNNYARNGRSECSAHNIEARDLFNAVLADINCFADMAVNDEKAVRAIEKRLTETDQSRAKALEKERKKLNKRLAELDRLFSSLYEDKVMERITERNFEMMSGKYQKEQLEIEARLKEVTETLNESYEKSRGIRDFLALIRNYQGLKELDATVINALIDKILVSEREKIADGTVKQEIKIYYKFIGFVDELHIIPTKRWAAMPAKNCTVCGVEYVPGSGASRYCPACAKKIRREKSNESKRRSREQKRI

SEQ ID NO: 26857 - DNA, 50 bp, Streptococcus suis
  source 1..50: mol_type = genomic DNA
gcaggagcagagaacagaaaaggatattctttcttttttcagttggtaca

SEQ ID NO: 26858 - DNA, 40 bp, Streptococcus suis
  source 1..40: mol_type = genomic DNA
gaaataaagcacacaacggtagcatgtatgaactgtccgc

SEQ ID NO: 26859 - DNA, 40 bp, Streptococcus suis
  source 1..40: mol_type = genomic DNA
gaaataaagcacacaacggctgcatgtatgaactgtccgc

SEQ ID NO: 26860 - DNA, 50 bp, Streptococcus suis
  source 1..50: mol_type = genomic DNA
tgaggagagcaccacagaaaaggtcttttttttttttcttttttggaaca

SEQ ID NO: 26861 - protein, 463 aa, Staphylococcus epidermidis
MKVAIYTRVSTAEQNLNGFSIHEQRKKLISFCEINEWKEYEVFTDGGFSGGSIKRPALQDLLNRLTQFDLILVYKLDRLTRNVRDLLEMLERFEKCNVSFKSATEVFDTTTAIGKLFITIVGAMAEWERETIRERSLFGSRAAVESGKYIREQPFVYDNIEGKLVPNENTKYIEYIVKKFKEGNSANEIARLLNSKKKPSKIKNWNRQTIIRLIKNPVLRGHTKFGDIFMENTHEPVLSDDDYHKVINAIENKTHKSKSKHNAIFRGVLKCPQCNGNLHLYAGTIHPKNGKSYNVRRYTCDKCHRDKYSRNISFNESEIENKFIEELEKMDLTRFEIHKPKKVEINIEGDKKRIKEQRTKLLRAYTMGYVEEEEFKIIMEETQRQLEDIKREENKETVQEIDEKQIKSIGNFIIEGWKTLTIEEKERLILSSIDKIDIEFIPREKNNNSNTNTVNIRKVHFIF

SEQ ID NO: 26862 - DNA, 50 bp, Staphylococcus epidermidis
  source 1..50: mol_type = genomic DNA
aatgtgtgttatgtaactatagccgtagttcctgttacataacgcacata

SEQ ID NO: 26863 - DNA, 40 bp, Staphylococcus epidermidis; identical to SEQ ID NO: 5678
  source 1..40: mol_type = genomic DNA

SEQ ID NO: 26864 - DNA, 40 bp, Staphylococcus epidermidis
  source 1..40: mol_type = genomic DNA
cataaatggaacaactaatagtgcaccggttcctcccata

SEQ ID NO: 26865 - DNA, 50 bp, Staphylococcus epidermidis
  source 1..50: mol_type = genomic DNA
gatgtgtgtcctcacacaagagctagagtttctgtttccccacgccctca

SEQ ID NO: 26866 - protein, 571 aa, Aeromonas hydrophila
MSRPPKAYSYIRFSTTKQAQGDSYRRQIQQAIDYCTEHNLQLDEKAIEDFGVSAFRGSNRIDGALGRFIEAVKGGAIEKGSYLLVESMDRLSRQTILKALSQFIEILNAGIVIVTLSDGEIFRVTDDGKDFDFAKLIISIVYMARANDESEMKSLRSRAAWSNGRKAARESNKVMKNARLPSWLTREGERIVPIPERTAIVSEMFEMAQSGCGYEQIAKVFLEKGYKTFGKEADWRPAGIQAVIKSRAVIGEFQPHVIENGERVPDGEPILGYYPTIVSPAVFEEVQHLIGKRSKHSGSYRKGTYSNLFSGVLRCQCGESLRYGNKGRAGSPRYYLMCPKHNTHGCSMPHLLYNKVEPQLLQAVSLLAVVMEQRKTTTEKMMALKDELAILRRELELEVKRRKKAAQSMLDNDNDADFRELFIQCKANCQALEEQISQLENELMSRELSEKTLSQNLNSEDLDSTDQRQRFNGQLKAVLREIQFSYDGYDLAAVFKDIDGEFMLEQAFEPKLVGSTVRDRDGMTLIKTIAEAPYIDANWVKEEIDEYESFQKESDSEFDDDFEDLSSEESK

SEQ ID NO: 26867 - DNA, 50 bp, Aeromonas hydrophila
  source 1..50: mol_type = genomic DNA
tgtggcacattcaataaaaacagctcgcagttcttgggggaaatgccgta

SEQ ID NO: 26868 - DNA, 40 bp, Aeromonas hydrophila; identical to SEQ ID NO: 20238
  source 1..40: mol_type = genomic DNA

SEQ ID NO: 26869 - DNA, 40 bp, Aeromonas hydrophila
  source 1..40: mol_type = genomic DNA
gcgggctttcttgatggtgttgcagttcttgatgccatag

SEQ ID NO: 26870 - DNA, 50 bp, Aeromonas hydrophila
  source 1..50: mol_type = genomic DNA
tttggtacaacaggtaagaagagcttaaagtccttgacctttatgacgta

SEQ ID NO: 26871 - protein, 599 aa, Vibrio parahaemolyticus
MKKAYSYIRYSSPQQASGDSYRRQLAATQAYCDANGYELDTELSIYKELGVSGFKGDQEHLKQFINDCETGKVKKGSLLVVENLDRLSRQAINVAMRQFLSLLEYVDIYTLQDKKHYSNNDGRDSENQLLDIMTSLIIMSRAHEESLTKQKRLKESWANQRKNAHKVKMSGCYPHWLVRSDDKTEFFVKEDRAQIIKDMLDMCINGLGATQIVRTLNQNIERYPPPSQKKEFWVRSTVKRLLSDRRLLGEHQLYKGHHAKREPVGEPIKDYFPQVIDEKTFVNAQISLKSRKIGAGKVKADSFSNIFRGFLRCGHCDSPVEYVNKAAKQASTLYLTCSNAKRGGDCNHSKHYRYLPLEHMLIHLSTANGFLPKPEKPSDLEQQLEIIKEKKEQANEKLSVLLEKNFTAPIILEKIEELTNDVEQYSYQIAEIEDKLLSIKPDYTYEDLYLDAVLESDLLKKFSNRSMFNSYLRKKIDSAYLYSIGLFPCIAFKMNNKSVHVLVLDERYNFGGCSLPNEKDKLIRLNGEEIEAIDEMIWKMFGNAIDFINGIDEENEELNKIIRKISLLMSKFIMDNKNKELISEFNSFLNTSIEKSYQN

SEQ ID NO: 26872 - DNA, 50 bp, Vibrio parahaemolyticus
  source 1..50: mol_type = genomic DNA
tagtagtgttattgacacaagtttataaacatatgttaatatcactactc

SEQ ID NO: 26873 - DNA, 40 bp, Vibrio parahaemolyticus
  source 1..40: mol_type = genomic DNA
tctaggtggtttggcaatcatccatatggcaccaccatgt

SEQ ID NO: 26874 - DNA, 40 bp, Vibrio parahaemolyticus
  source 1..40: mol_type = genomic DNA
tctaggtggtttggcaatctaccatatggcaccaccatgt

SEQ ID NO: 26875 - DNA, 50 bp, Vibrio parahaemolyticus
  source 1..50: mol_type = genomic DNA
tggtagtgtttaatacacaattgataaaacatatgtgtttccaattcctt

SEQ ID NO: 26876 - protein, 599 aa, Vibrio parahaemolyticus
MKKAYSYIRYSSPQQASGDSYRRQLAATQAYCDANGYELDTELSIYKELGVSGFKGDQEHLKQFINDCETGKVKKGSLLVVENLDRLSRQAINVAMRQFLSLLEYVDIYTLQDKKHYSNNDGRDSENQLLDIMTSLIIMSRAHEESLTKQKRLKESWANQRKNAHKVKMSGCYPHWLVRSDDKTEFFVKEDRAQIIKDMLDMCINGLGATQIVRTLNQNIERYPPPSQKKEFWVRSTVKRLLSDRRLLGEHQLYKGHHAKREPVGEPIKDYFPQVIDEKTFVNAQISLKSRKIGAGKVKADSFSNIFRGFLRCGHCDSPVEYVNKAAKQASTLYLTCSNAKRGGDCNHSKHYRYLPLEHMLIHLSTANGFLPKPEKPSDLEQQLEIIKEKKEQANEKLSVLLEKNFTAPIILEKIEELTNDVEQYSYQIAEIEDKLLSIKPDYTYEDLYHDAVLESDLLKKFSNRSMFNSYLRKKIDSAYLYSIGLFPCIAFKMNNKSVHVLVLDERYNFGGCSLPNEKDKLIRLNGEEIEAIDEMIWKMFGNAIDFINGIDEENEELNKIIRKISLLMSKFIMDNKNKELISEFNSFLNTSIEKSYQN

SEQ ID NO: 26877 - DNA, 50 bp, Vibrio parahaemolyticus; identical to SEQ ID NO: 26872
  source 1..50: mol_type = genomic DNA

SEQ ID NO: 26878 - DNA, 40 bp, Vibrio parahaemolyticus; identical to SEQ ID NO: 26873
  source 1..40: mol_type = genomic DNA

SEQ ID NO: 26879 - DNA, 40 bp, Vibrio parahaemolyticus; identical to SEQ ID NO: 26874
  source 1..40: mol_type = genomic DNA

SEQ ID NO: 26880 - DNA, 50 bp, Vibrio parahaemolyticus; identical to SEQ ID NO: 26875
  source 1..50: mol_type = genomic DNA

SEQ ID NO: 26881 - protein, 599 aa, Vibrio parahaemolyticus
MKKAYSYIRYSSPQQASGDSYRRQLAATQAYCDANGYELDTELSIYKELGVSGFKGDQEHLKQFINDCETGKVKKGSLLVVENLDRLSRQAINVAMRQFLSLLEYVDIYTLQDKKHYSNNDGRDSENQLLDIMTSLIIMSRAHEESLTKQKRLKESWANQRKNAHKVKMSGCYPHWLVRSDDKTEFFVKEDRAQIIKDMLDMCINGLGATQIVRSLNQNIERYPPPSQKKDFWVRSTVKRLLSDRRLLGEHQLYKGHHAKREPVGEPIKGYFPQIVDEKTFANVQISLKSRKIGAGKVKADSFSNIFRGFLRCGHCDSPVEYVNKAAKQASTLYLTCSNAKRGGDCNHSKHYRYLPLEHMLIHLSTANGFLPKPEKPSDLEQQLEIIKEKKEQANKKLSVLLEKNFTAPIILEKIEELTNDVEQYSYQIAEIEDKLLSIKPNYTYEDLYHDAVLEIDLLKKFSNRSMFNNYLRKKIDSAYLYSIGLFPCIAFKMNNKSVHVLVLDERYNFGGCSLPNEKDKLIRLNGEGIEAIDEMIWKMFGNAIDFINGIDEENEDLNKIIRKISLLMSKFIMDNKNQELISEFNSLLNTSIEKSYQN

SEQ ID NO: 26882 - DNA, 50 bp, Vibrio parahaemolyticus; identical to SEQ ID NO: 26872
  source 1..50: mol_type = genomic DNA

SEQ ID NO: 26883 - DNA, 40 bp, Vibrio parahaemolyticus; identical to SEQ ID NO: 23313
  source 1..40: mol_type = genomic DNA

SEQ ID NO: 26884 - DNA, 40 bp, Vibrio parahaemolyticus
  source 1..40: mol_type = genomic DNA
acatggtggtgccatatggtagattgccaaaccacctaga

SEQ ID NO: 26885 - DNA, 50 bp, Vibrio parahaemolyticus; identical to SEQ ID NO: 26875
  source 1..50: mol_type = genomic DNA

SEQ ID NO: 26886 - protein, 599 aa, Vibrio vulnificus
MKKAYSYIRYSSPQQASGDSYRRQLAATQAYCDANGYELDTELSIYKELGVSGFKGDQEHLKQFINDCETGKVKKGSLLVVENLDRLSRQAINVAMRQFLSLLEYVDIYTLQDKKHYSNNDGRDSENQLLDIMTSLIIMSRAHEESLTKQKRLKESWANQRKNAHKIKMSGCYPHWLVRSDDKTEFYVKEDRAQIIVDMFDMCINGLGATQIVRSLNNNIEKYPPPSTKKEFWVRSTVKRLLSDRRLLGEHQLYKGHHAKREPVGEPIKDYFPQVIDEKTFVNAQISLKSRKIGAGKVKADSFSNIFRGFLRCGHCDSPVEYVNKAAKQASTLYLTCSNAKRGGDCNHSKHYRYLPLEHMLIHLSTANGFLPKPEKPSDLEQQLEIIKEKKEQANEKLSVLLEKNFTAPIILEKIEELTNDVEQYSYQIAEIEDKLLSIKPDYTYEDLYHDAVLESDLLKKFSNRSMFNSYLRKKIDSAYLYSIGLFPCIAFKMNNKSVHVLVLDERYNFGGCSLPNEKDKLIRLNGEEIEAIDEMIWKMFGNAIDFINGIDEENEELNKIIRKISLLMSKFIMDNKNKELISEFNSFLNTSIEKSYQN

SEQ ID NO: 26887 - DNA, 50 bp, Vibrio vulnificus; identical to SEQ ID NO: 26872
  source 1..50: mol_type = genomic DNA

SEQ ID NO: 26888 - DNA, 40 bp, Vibrio vulnificus
  source 1..40: mol_type = genomic DNA
acacggaggcgccatgtgaatcagcgccaaaccgccgagc

SEQ ID NO: 26889 - DNA, 40 bp, Vibrio vulnificus
  source 1..40: mol_type = genomic DNA
acacggaggcgccatgtgatacagcgccaaaccgccgagc

SEQ ID NO: 26890 - DNA, 50 bp, Vibrio vulnificus; identical to SEQ ID NO: 26875
  source 1..50: mol_type = genomic DNA

SEQ ID NO: 26891 - protein, 599 aa, Vibrio vulnificus; identical to SEQ ID NO: 26886

SEQ ID NO: 26892 - DNA, 50 bp, Vibrio vulnificus; identical to SEQ ID NO: 26872
  source 1..50: mol_type = genomic DNA

SEQ ID NO: 26893 - DNA, 40 bp, Vibrio vulnificus
  source 1..40: mol_type = genomic DNA
gctcggcggtttggctctgattcacatggcgcctccgtgt

SEQ ID NO: 26894 - DNA, 40 bp, Vibrio vulnificus
  source 1..40: mol_type = genomic DNA
gctcggcggtttggctctgtatcacatggcgcctccgtgt

SEQ ID NO: 26895 - DNA, 50 bp, Vibrio vulnificus; identical to SEQ ID NO: 26875
  source 1..50: mol_type = genomic DNA

SEQ ID NO: 26896 - protein, 524 aa, Vibrio parahaemolyticus; identical to SEQ ID NO: 8016

SEQ ID NO: 26897 - DNA, 50 bp, Vibrio parahaemolyticus
  source 1..50: mol_type = genomic DNA
agttttctacttataaagttaactgtgataaactttttgaaatagacaac

SEQ ID NO: 26898 - DNA, 40 bp, Vibrio parahaemolyticus; identical to SEQ ID NO: 8018
  source 1..40: mol_type = genomic DNA

SEQ ID NO: 26899 - DNA, 40 bp, Vibrio parahaemolyticus
  source 1..40: mol_type = genomic DNA
cgccggggccaaattgaccacaatgcgcttggctggaaac

SEQ ID NO: 26900 - DNA, 50 bp, Vibrio parahaemolyticus
  source 1..50: mol_type = genomic DNA
atttttttatattaaaagttaactactttaactatttatatatataaaac

SEQ ID NO: 26901 - protein, 500 aa, Vibrio fluvialis
MSGKIHPIIRVSTEKQLQGHGLESQHRAISDWISRHPEYEFGTSLELDGYSAYKGQHVEKLKAFVAMLPAGDTILMTEISRLSRLPIRQSYELLYWILDRGVNIGFVTLDQVLTNSELDDSLYLRLSILFQNAKSESEIKSFRIRNVFADRIKRIEKGTHIKTTGLPAWVEVQNNAYHVHEYHAQTLRLMFERKLETGTYEVCKWLQENRKVFPRLSGWSASRVQAILKNRAVLGDYTPFTTYHEEGRAKRKALTPIPSVYPQVIDESLFARVQQSFNQQPAGRKPRAPNPLAGIFVCPECGGSTSINRVADRVYYRCERVRDRRGCTAKSIRQKRVLDAVDALIAQVDLSRVLQPQTSPEAIHEHIADLTKKIENLVNLVAQGVELPEVGAQLQQLEQQRSALRQQLIAHKQVITPDFKKDKNKALRLLFNYITLIPDHIYEYPNPDTGEPTSRAVDTLRFQLVDVNNWGMHEVKVPVDRLQESKNLVNDLLDTLQKAL

SEQ ID NO: 26902 - DNA, 50 bp, Vibrio fluvialis
  source 1..50: mol_type = genomic DNA
tagtgggtatttaactctcttacgtctgtaggagtgttaattacccacta

SEQ ID NO: 26903 - DNA, 40 bp, Vibrio fluvialis
  source 1..40: mol_type = genomic DNA
gcgagtggtaatacgtacatcgcttggcacgccaccacag

SEQ ID NO: 26904 - DNA, 40 bp, Vibrio fluvialis
  source 1..40: mol_type = genomic DNA
gcgagtggtaatacgtacaaagcttggcacgccaccacag

SEQ ID NO: 26905 - DNA, 50 bp, Vibrio fluvialis
  source 1..50: mol_type = genomic DNA
gattcttttagcacctctctttagaatgtaggagtgcttattacccactg

SEQ ID NO: 26906 - protein, 621 aa, Vibrio fluvialis
MGYFMNKVKAYSYIRYSSPQQAKGDSFRRQFAKTQEYCEKNGYDLDTELNVYTELGKSAFKGEEQENLKRFIEDCKSGIVEKGSLLIVENLDRLSRDTINKAMRQFLHLLDYVNIYTLQDEKFYTSNEDVDNDSQVFDIITSLLIMSRAHEESQTKRKRLRESWEAKRQQINKKKFATSYPHWLNLSDDWESFTLKSDAVRSIKKIFELCISGNGYNQILRYLNDRLDLYPTPSKRSKSGLWVRSTIQLLLSDRRLIGEMQMYKGAYKNRKPYGDPIPDYYPQVIDEKTFLKAQIAMKERNIGAGKTGTYRFSNIFRGFLHCTECGNVMEFVDKGNTKKRSQKYLTCTNAKRGGECTSNKHFRYDELESMLLYLISENGFLPKPAEPNDLKLQLQKITQQHDDADKKLNILLEQDFSAPAIMKKMEQLNHDVALYKQQIKDLELKIKSTSTTNYDYDQLVHDIQQEPDEDVKFSNRAKLNGFLQENITNAIIYENHCPIVVFTMKDNTAHSLIMDKKYNFGGCTLPNNQDSFKRINGEGHEQIDKGIWMMQQHFLDLLITTKGISFTDKEQDQLEHLLNEMNNTLSSIIISSKPEKFDDLISLTEKAYLLIEKKSLFNQLR

SEQ ID NO: 26907 - DNA, 50 bp, Vibrio fluvialis
  source 1..50: mol_type = genomic DNA
aggtggggatattgacaagcgcataagtatttatgttataatccccatca

SEQ ID NO: 26908 - DNA, 40 bp, Vibrio fluvialis
  source 1..40: mol_type = genomic DNA
ctctggcgcgtacgcgtagaagtggccaaagccaccaccc

SEQ ID NO: 26909 - DNA, 40 bp, Vibrio fluvialis
  source 1..40: mol_type = genomic DNA
ctctggcgcgtacgcgtagatgtggccaaagccaccaccc

SEQ ID NO: 26910 - DNA, 50 bp, Vibrio fluvialis
  source 1..50: mol_type = genomic DNA
atgtggggagaagcacacatgcatatgtgtttatatattcttccacagcc

SEQ ID NO: 26911 - protein, 506 aa, Lysinibacillus sphaericus
MYKPFSQADYKPSDKPKALYLRKSKKSKGMTEAETIESHLKRLTDFCKEQGWNDYVIYNDYVAKSTDLNREEYKKMLKACLDGKHDLIIVVEESRLYRTVYEQTNVYEELKGTEIAILSIREGYIFPNDRNQFLTNIIRGAMNQQELENFAYRMNVKVLASAKEGIYVNKPPFGYFKDKEKLIPHPFESKTFRFIVDKVLEGYVIAEIIGQLNQLGYTTKSGKKWKDVGTITRMLDNRVYLGESHYYSKMFGEDVIVRDTHQPLLTIEEFQEVHNMIKSRSRNPQGIRYTKINTVLDRLVVCGMCGNRLPIHKSWTNKEGVTSYQIGKCQKVIGEFNEKKCPNRSISMKELLPHFYIAVESYKEALREEIKSVDIDTTNDKKISVMNQIKDIKSRMAEIQTEIQNAKSYLIKGILSEADYVGLVPPLEKDAKELNVKLEDNERLLASLNDYDRSSVIQNAVDSLNNIENESIENQNRIYRLLFEHLELVNTVAEFEIRLKEKDVSN

SEQ ID NO: 26912 - DNA, 50 bp, Lysinibacillus sphaericus
  source 1..50: mol_type = genomic DNA
aactttacattaaggtgttttatcaggagaataagtatgttattataagg

SEQ ID NO: 26913 - DNA, 40 bp, Lysinibacillus sphaericus
  source 1..40: mol_type = genomic DNA
ggcatgggatggcgttatcgagtgattttgtcatacaagg

SEQ ID NO: 26914 - DNA, 40 bp, Lysinibacillus sphaericus
  source 1..40: mol_type = genomic DNA
ggcatgggatggcgttatcaagtgattttgtcatacaagg

SEQ ID NO: 26915 - DNA, 50 bp, Lysinibacillus sphaericus
  source 1..50: mol_type = genomic DNA
aattttacatttatgtgtttactcaagagaaaaacacatctacaaaaagg

SEQ ID NO: 26916 - protein, 515 aa, Bacillus tropicus
MKTAIYLRKSRADLEAEARGEGETLAKHRTTLLKIAKEMNLNVLSVREEIVSGESLVKRPEMLALLEEIEDNKYDVVLCMDMDRLGRGGMKEQGIILETFKRSNTKIMTPRKTYDLNDEWDEEYSEFEAFMARKELKIITRRMQRGRVASVEAGNYLGTHAPFGYDIHRLNKRERTLTINPEEASVVRMIFDWYANEDMGASAIRSKLNDLGYKSKLGNDWNPYSILDILKNNVYIGKVTWQKRKEVKRPDAVKRSCARQDKSDWIIADGKHEPIIPESLFEQVQEKLNSRYHVPYNTNGIKNPLAGIIKCSKCGYSMVQRYPKNRKETMDCKHRGCENKSSYTELIEKRLLEALKEWYINYKADFEKHKQGEKLKETQVIQMNEVALRKLEKELVDVQKQKNNLHDLLERGVYTVDIFLERSNVVSDRINEITSTMENLKKEIKTEIKKEKVKKDTIPQVEHVLDLYFKTDDPKKKNSLLKSVLEKAVYKKEKWQRLDDFELVLYPKLPQDGDI

SEQ ID NO: 26917 - DNA, 50 bp, Bacillus tropicus
  source 1..50: mol_type = genomic DNA
accttgttggtgtaattagatttacgccaacaggatgacaacacaagtaa

SEQ ID NO: 26918 - DNA, 40 bp, Bacillus tropicus
  source 1..40: mol_type = genomic DNA
attaggcgcatgaggttgactccattaagccctaaagcat

SEQ ID NO: 26919 - DNA, 40 bp, Bacillus tropicus
  source 1..40: mol_type = genomic DNA
attaggcgcatgaggttgacgccattaagccctaaagcat

SEQ ID NO: 26920 - DNA, 50 bp, Bacillus tropicus
  source 1..50: mol_type = genomic DNA
accttgctatgagcattaaaattacgccaacagaataatgacactatttt

SEQ ID NO: 26921 - protein, 539 aa, Nonlabens ulvanivorans
MQKYFVSIFKIVVKHMKDQTIFDQFAKKGKGQKLRTDGKAVIYTRVSTKEQAENNASLETQLKYCKELANKKGLEVSEYFGGTYESAKSDERKEFQKMLNYVKRRSNVGYIIVYSYDRFSRTGANGAYISDQLKRQGIVTISATQEVDTSTSAGSFQQNLYYMFSQFDNELRRDKSVSGMQEKLRKGHWTGAYPFGYTNANPGKGKTPKFVITKEGKLLKQAFLWKANSNMSHVEIANKLQEKGLKINDKRLSVLFRNPFYCGLIVNSLIPGEVIEGNHQPMITKELFLKIHNLLNTGTETRKYCVDDENLPLKTFLKSTTCGTPYTGFIVKKKGLYYYKNRRKGSKENRSAKKLHQEFLELLETYKLKDKKFVAPLKEMVYDTFVSMNEEAIKETKELSSGIVAIEMKLDRLEERYVFEEINKSQYDRFRTKLVAEINQKKKNLSKHSFDSSNLKKSINIALKYALNLPLLWSSGGDIEVKRKLQYMVFPDGLGYDFKNKRVQTFRVNSIFAQIACLSDTLGGEIKKGTFKIILKIPF

SEQ ID NO: 26922 - DNA, 50 bp, Nonlabens ulvanivorans
  source 1..50: mol_type = genomic DNA
aatattgaaaattcccttttagtgacctcaaagggacagagttcaaactt

SEQ ID NO: 26923 - DNA, 40 bp, Nonlabens ulvanivorans
  source 1..40: mol_type = genomic DNA
acccttgttatatctagtgacctcgacaggattcaaacct

SEQ ID NO: 26924 - DNA, 40 bp, Nonlabens ulvanivorans
  source 1..40: mol_type = genomic DNA
acccttgttatatctagtggtctcgacaggattcaaacct

SEQ ID NO: 26925 - DNA, 50 bp, Nonlabens ulvanivorans
  source 1..50: mol_type = genomic DNA
agtttagatgattacattttagtggtctaagagggaaacagttcaatttt

SEQ ID NO: 26926 - protein, 534 aa, Pseudomonas syringae group genomosp 3
MKQAISYIRFSSARQEGGSSVERQEGMIAKWLLDHQDYELSKLNYSDLGKSGFHGEHVKEGGNFGKLLKAVMDGYIKRDDVVLVEAIDRTGRLPALQMLSDVIAPILRAGVSIITLDDNTTYTEASVGGPHLFMLVAKIQAAHEYSRTLSRRVEDSYKKRRKDAKEKGVAPKRMTPVWLNSDGTVREDVAPWIKTAFELYVSGVGKSTIAKRLRESGVERLAKASGPGVEGWLRNKAVIGKWETLIGTPEHHVIDDVYPLIIEPSLFYKAQVHAEKMKTQRPVKTANHFLVGLVRCGECEKNYIVQNLHGKPHSMRCRTRQSQNDCTNSHCVPKPVLDAIYRYTSVTAAVEAVQQQQMGVNEKEIVTREAELLTLAKRVEGLAEAVKQAGPMHELIEALKQSRIEREAAENALVILRSTVISPAGTGWNEMGKVWKLEADDAQRLAAMLRMVGYHITVQTTGEITSSHSDVLYRYIGVDRALDKYKLLVNGKLTLIPKGYVDDYPYHEPFQEVEGEATMDEADKENLLLQYQSS

SEQ ID NO: 26927 - DNA, 50 bp, Pseudomonas syringae group genomosp 3; identical to SEQ ID NO: 18802
  source 1..50: mol_type = genomic DNA

SEQ ID NO: 26928 - DNA, 40 bp, Pseudomonas syringae group genomosp 3
  source 1..40: mol_type = genomic DNA
catgccaataaggccttgatcccagcctttgataacgcgc

SEQ ID NO: 26929 - DNA, 40 bp, Pseudomonas syringae group genomosp 3
  source 1..40: mol_type = genomic DNA
catgccaataaggccttgactccagcctttgataacgcgc

SEQ ID NO: 26930 - DNA, 50 bp, Pseudomonas syringae group genomosp 3
  source 1..50: mol_type = genomic DNA
tagtgttactggcaacaagcttagctccaatatttttacatttatccttg

SEQ ID NO: 26931 - protein, 520 aa, Klebsiella quasipneumoniae
MKKAVYCYARVSSRGQAKDGYGMSRQQTMLRDYVAAYDDSQHSRGYELGDITWLYAEGVSAYSGKNIEDGSVLKTFIDDVLQKKITNSVLVIENLDRFSRAAPNRAAGLFLSLINAGCDIHEVETEMIHHQYSDLNIISGGLQRAHNESKRKARLSIKNWDERIKNTIDGTSVLTHRVPSWIEVKNNKYVIKKGESEKYNLIFKMYADGFGPAAIRDELKNRRMQINEREPTIHHLMKIIKDQRLIGRFNSTGRKVLDGMPIYPVVVEPELFELVNDLRKQRNPLGKINVKANNLFAGLCICMNCGRYVQINSIDKKGNTYFRCGGSLVKIDKCKERGFKYKIVENALLEHLRNFDFSMLRREDNEIQVKINYLSMELVANENYSNEILADLEKEDIPDPHDRRILKNIQRRISEIRTEITTLKQSNIGYETFNDLKDSYTDDLLDPKNTKLRLDFNVKVKRVIKNIKMKRYDDTIMLVVSYVGVNEKQAMVINSKTGEVVFMAVQNDDLKSIEYLINND

SEQ ID NO: 26932 - DNA, 50 bp, Klebsiella quasipneumoniae
  source 1..50: mol_type = genomic DNA
aaaagtaatttgctgttaatcatcaccatgatatactgctttttactgtt

SEQ ID NO: 26933 - DNA, 40 bp, Klebsiella quasipneumoniae; identical to SEQ ID NO: 20068
  source 1..40: mol_type = genomic DNA

SEQ ID NO: 26934 - DNA, 40 bp, Klebsiella quasipneumoniae
  source 1..40: mol_type = genomic DNA
ggcgatgatgccgatgaccatcatcagttcaatcagggta

SEQ ID NO: 26935 - DNA, 50 bp, Klebsiella quasipneumoniae
  source 1..50: mol_type = genomic DNA
aaaagtaacattttgtaatttatcatcagtatatgtttgtttttactttt

SEQ ID NO: 26936 - protein, 520 aa, Raoultella ornithinolytica
MKKAVYCYARVSSRGQAKDGYGMSRQQAMLRDYVAAYDDSQHNRGYELGGISWLYAEGVSAYSGKNIEDGSVLKTFIDDVLQKKIINSVLVIENLDRFSRAAPNRAAGLFLSLINAGCDIHEVETDMIHHQYSDLNIISGGLQRAHNESKRKARLSIKNWDERIKNTIDGTAVLTHRVPSWIEVKNNKYVIKKGESEKYNLIFRMYADGFGPAAIRDELKNRRMQINEREPTINHLMKIIKDQRLIGRFNSTGRKVLDGMSIYPIVVEPELFESVNDLRKQRNPLGKINVKANNLFAGLCICMNCGRYVQVNSVDKKGDTYFRCGGSLVKIDKCKERGFKYKIVENALLKHLRNFDFSMLRGEDNEIKVKINYLSMELVSKEKYRNEILADLEKEDIPDPNDRRILKNIQRRISEIRTEITTLKQSNIGYETFNDLKDSYTDGLLDPKNTKLRIDFNVKVKRVIKNIKMKRYDNTIMLVVSYVGVNEKQAIVINNKTEEVVFMAVQNDDLKSVEYLISND

SEQ ID NO: 26937 - DNA, 50 bp, Raoultella ornithinolytica
  source 1..50: mol_type = genomic DNA
aaaagtaattcgttgttaatcatcaccatgatatactgttttttactgtt

SEQ ID NO: 26938 - DNA, 40 bp, Raoultella ornithinolytica
  source 1..40: mol_type = genomic DNA
ggcgataatgccgatgaccaccatcagttcgatcagggta

SEQ ID NO: 26939 - DNA, 40 bp, Raoultella ornithinolytica
  source 1..40: mol_type = genomic DNA
ggcgataatgccgatgaccatcatcagttcgatcagggta

SEQ ID NO: 26940 - DNA, 50 bp, Raoultella ornithinolytica; identical to SEQ ID NO: 26935
  source 1..50: mol_type = genomic DNA

SEQ ID NO: 26941 - protein, 520 aa, Cronobacter sakazakii
MKKAVYCYARVSSRGQAKDGYGMSRQQTMLRDYVAAYDDSQHSRGYELGDITWLYAEGVSAYSGKNIEDGSVLKTFINDVLQKKITNSVLVIENLDRFSRAAPNRAAGLFLSLINAGCDIHEVEAEMIHHQYSDLNIISGGLQRAHNESKRKARLSIKNWDERIKNTIDGTSVLTHRVPSWIEVKNNKYVIKKGESEKYNLIFNMYADGFGPAAIRDELKNRRMQINEREPTIHHLMKIIKDQRLIGRFNSTGRKVLDGMPIYPVVVEPELFELVNDLRKQRNPLGKINVKANNLFAGLCICMNCGRYVQINSVDKKGNTYFRCGGSLVKIDKCKERGFKYKIVENALLEHLRNFDFSMLRREDNEIQVKINYLSMELVANENYSNEILADLEKEDIPDPHDRRILKNIQRRISEIRTEITTLKQSHIGYETFNDLKDSYTDDLLDPKNTKLRLDFNVKVKRVIKNIKMKRYDDTIMLVVSYVGVNEKQAMVINSKTGEVVFMAVQNDDLKSIEYLINND

SEQ ID NO: 26942 - DNA, 50 bp, Cronobacter sakazakii; identical to SEQ ID NO: 26932
  source 1..50: mol_type = genomic DNA

SEQ ID NO: 26943 - DNA, 40 bp, Cronobacter sakazakii; identical to SEQ ID NO: 5718
  source 1..40: mol_type = genomic DNA

SEQ ID NO: 26944 - DNA, 40 bp, Cronobacter sakazakii
  source 1..40: mol_type = genomic DNA
ggcgatgatgccgatcaccatcatcagttcaatgagtgta

SEQ ID NO: 26945 - DNA, 50 bp, Cronobacter sakazakii; identical to SEQ ID NO: 26935
  source 1..50: mol_type = genomic DNA

SEQ ID NO: 26946 - protein, 520 aa, Klebsiella quasipneumoniae
MKKAVYCYARVSSRGQAKDGYGMSRQQTMLRDYVAAYDDSQHSRGYELGDITWLYAEGVSAYSGKNIEDGSVLKTFIDDVLQKKITNSVLVIENLDRFSRAAPNRAAGLFLSLINAGCDIHEVETEMIHHQYSDLNIISGGLQRAHNESKRKARLSIKNWDERIKNTIDGTSVLTHRVPSWIEVKNNKYVIKKGESEKYNLIFKMYADGFGPAAIRDELKNRRMQINEREPTIHHLMKIIKDKRLIGRFNSTGRKVLDGMPIYPVVVEPELFELVNDLRKQRNPLGKINVKANNLFAGLCICMNCGRYVQINSVDKKGNTYFRCGGSLVKIDKCKERGFKYKIVENALLEHLRNFDFSMLRREDNEIQVKINYLSMELVSNENYSNEILADLEKEDIPDPHDRRILKNIQRRISEIRTEITTLKQSNIGYETFNDLKDSYTDDLLDPKNTKLRLDFNVKVKRVIKNIKMKRYDDTIMLVVSYVGVNEKQAMVINSKTGEVVFMAVQNDDLKSIEYLINND

SEQ ID NO: 26947 - DNA, 50 bp, Klebsiella quasipneumoniae
  source 1..50: mol_type = genomic DNA
aaaagtaatttgctgttaatcatcaccatgatatacttctttttactgtt

SEQ ID NO: 26948 - DNA, 40 bp, Klebsiella quasipneumoniae; identical to SEQ ID NO: 20068
  source 1..40: mol_type = genomic DNA

SEQ ID NO: 26949 - DNA, 40 bp, Klebsiella quasipneumoniae; identical to SEQ ID NO: 26934
  source 1..40: mol_type = genomic DNA

SEQ ID NO: 26950 - DNA, 50 bp, Klebsiella quasipneumoniae; identical to SEQ ID NO: 26935
  source 1..50: mol_type = genomic DNA

SEQ ID NO: 26951 - protein, 520 aa, Raoultella ornithinolytica; identical to SEQ ID NO: 26946

SEQ ID NO: 26952 - DNA, 50 bp, Raoultella ornithinolytica; identical to SEQ ID NO: 26932
  source 1..50: mol_type = genomic DNA

SEQ ID NO: 26953 - DNA, 40 bp, Raoultella ornithinolytica; identical to SEQ ID NO: 26938
  source 1..40: mol_type = genomic DNA

SEQ ID NO: 26954 - DNA, 40 bp, Raoultella ornithinolytica; identical to SEQ ID NO: 26939
  source 1..40: mol_type = genomic DNA

SEQ ID NO: 26955 - DNA, 50 bp, Raoultella ornithinolytica; identical to SEQ ID NO: 26935
  source 1..50: mol_type = genomic DNA

SEQ ID NO: 26956 - protein, 520 aa, Enterobacter cloacae; identical to SEQ ID NO: 26946

SEQ ID NO: 26957 - DNA, 50 bp, Enterobacter cloacae; identical to SEQ ID NO: 26947
  source 1..50: mol_type = genomic DNA

SEQ ID NO: 26958 - DNA, 40 bp, Enterobacter cloacae; identical to SEQ ID NO: 24483
  source 1..40: mol_type = genomic DNA

SEQ ID NO: 26959 - DNA, 40 bp, Enterobacter cloacae
  source 1..40: mol_type = genomic DNA
ggcaataatgccgattaccatcatcagctcaatgagcgtg

SEQ ID NO: 26960 - DNA, 50 bp, Enterobacter cloacae; identical to SEQ ID NO: 26935
  source 1..50: mol_type = genomic DNA

SEQ ID NO: 26961 - protein, 520 aa, Klebsiella pneumoniae
MKKAVYCYARVSSRGQAKDGYGMSRQQTMLRDYVAAYDDSQHSRGYELGDITWLYAEGVSAYSGKNIEDGSVLKTFIDDVLQKKITNSVLVIENLDRFSRAAPNRAAGLFLSLINAGCDIHEVETEMIHHQYSDLNIISGGLQRAHNESKRKARLSIKNWDERIKNTIDGTSVLTHRVPSWIEVKNNKYVIKKGESEKYNLIFKMYADGFGPAAIRDELKNRRMQINEREPTIHHLMKIIKDKRLIGRFNSTGRKVLDGMPIYPVVVEPELFELVNDLRKQRNPLGKINVKANNLFAGLCICMNCGRYVQINSVDKKGNTYFRCGGSLVKIDKCKERGFKYKIVENALLEHLRNFDFSMLRREDNEIQVKINHLSMELVSNENYSNEILADLEKEDIPDPHDRRILKNIQRRISEIRTEITTLKQSNIGYETFNDLKDSYTDDLLDPKNTKLRLDFNVKVKRVIKNIKMKRYDDTIMLVVSYVGVNEKQAMVINSKTGEVVFMAVQNDDLKSIEYLINND

SEQ ID NO: 26962 - DNA, 50 bp, Klebsiella pneumoniae; identical to SEQ ID NO: 26932
  source 1..50: mol_type = genomic DNA

SEQ ID NO: 26963 - DNA, 40 bp, Klebsiella pneumoniae; identical to SEQ ID NO: 20073
  source 1..40: mol_type = genomic DNA

SEQ ID NO: 26964 - DNA, 40 bp, Klebsiella pneumoniae
  source 1..40: mol_type = genomic DNA
ggcgatgattccgataaccatcatcagttcaatcagggta

SEQ ID NO: 26965 - DNA, 50 bp, Klebsiella pneumoniae; identical to SEQ ID NO: 26935
  source 1..50: mol_type = genomic DNA

SEQ ID NO: 26966 - protein, 520 aa, Klebsiella pneumoniae
MKKAVYCYARVSSRGQAKDGYGMSRQQTMLRDYVAAYDDSQHSRGYELGDITWLYAEGVSAYSGKNIEDGSVLKTFIDDVLQKKITNSVLVIENLDRFSRAAPNRAAGLFLSLINAGCDIHEVETEMIHHQYSDLNIISGGLQRAHNESKRKARLSIKNWDERIKNTIDGTSVLTHRVPSWIEVKNNKYVIKKGESEKYNLIFKMYADGFGPAAIRDELKNRRMQINEREPTIHHLMKIIKDKRLIGRFNSTGRKVLDGMPIYPVVVEPELFELVNDLRKQRNPLGKINVKANNLFAGLCICMNCGRYVQINSVDKKGNTYFRCGGSLVKIDKCKERGFKYKIVENALLEHLRNFDFSMLRREDNEIQVKINYLSMELVSNENYSNEILADLEKEDIPDPHDRRILKNIQRRISEIRTEITTLKQSNIGYETFNDLKDSYTDDLLDPKNTKLRLDFNVKVKRVIKNIKMKHYDDTIMLVVSYVGVNEKQAMVINSKTGEVVFMAVQNDDLKSIEYLINND

SEQ ID NO: 26967 - DNA, 50 bp, Klebsiella pneumoniae; identical to SEQ ID NO: 26947
  source 1..50: mol_type = genomic DNA

SEQ ID NO: 26968 - DNA, 40 bp, Klebsiella pneumoniae; identical to SEQ ID NO: 20073
  source 1..40: mol_type = genomic DNA

SEQ ID NO: 26969 - DNA, 40 bp, Klebsiella pneumoniae; identical to SEQ ID NO: 26964
  source 1..40: mol_type = genomic DNA

SEQ ID NO: 26970 - DNA, 50 bp, Klebsiella pneumoniae; identical to SEQ ID NO: 26935
  source 1..50: mol_type = genomic DNA

SEQ ID NO: 26971 - protein, 520 aa, Klebsiella aerogenes; identical to SEQ ID NO: 26946

SEQ ID NO: 26972 - DNA, 50 bp, Klebsiella aerogenes; identical to SEQ ID NO: 26947
  source 1..50: mol_type = genomic DNA

SEQ ID NO: 26973 - DNA, 40 bp, Klebsiella aerogenes; identical to SEQ ID NO: 19968
  source 1..40: mol_type = genomic DNA

SEQ ID NO: 26974 - DNA, 40 bp, Klebsiella aerogenes
  source 1..40: mol_type = genomic DNA
ggcgataatgccgataaccatcattaattcgatcagggta

SEQ ID NO: 26975 - DNA, 50 bp, Klebsiella aerogenes; identical to SEQ ID NO: 26935
  source 1..50: mol_type = genomic DNA

SEQ ID NO: 26976 - protein, 522 aa, Vibrio parahaemolyticus
MRFSRPEQAKGTSIERQSSFAEQYALAHGLELDKSLTMMDKGLSAFHGMHRTKGAFGQFLAAVAAGKVPSGSVLVVESLDRLSREDPLIAQAALTDLILSGITVVTAADNQVYSREEIQQNPFKLIMSLVVMIRANEESETKQRRSNAFLKSALNQYQANGNIRRLGADPSWLDFNKDDNTYSFNARVDVIRRILSLYNQGIGSLKIARQLTEESIPTLSGKRNAWGQTTVANIVKSHALYGMKRINVQGVDYDLEDFYPALITKSKWLALQQHRSKRSKTMHGRGEVVHLITGHGKGFTTCGYCSGGLGAQTQKQYKRSGEYSRTVTRLHCLTHKETSSCCSSVFLQPIESAVLFAVCIGVEPQSLVPTVNNVNYSALIDEVENKVKHIVEQVTAGAPWDLFKDAHDRLKLEKQKLIKERDSQKPDVNQSDVQKWVNKLVELADKARANDKEARLKCRTLINSICKSIVIKLRGHDLKSEPVVTITFVTDEQFEFKVGKNGAVQFVDNGMAVNRRLKPLLA

SEQ ID NO: 26977 - DNA, 50 bp, Vibrio parahaemolyticus
  source 1..50: mol_type = genomic DNA
tagttatgcactgtacattttctttctgtctaatgtatagtgataactta

SEQ ID NO: 26978 - DNA, 40 bp, Vibrio parahaemolyticus; identical to SEQ ID NO: 7098
  source 1..40: mol_type = genomic DNA

SEQ ID NO: 26979 - DNA, 40 bp, Vibrio parahaemolyticus; identical to SEQ ID NO: 26349
  source 1..40: mol_type = genomic DNA

SEQ ID NO: 26980 - DNA, 50 bp, Vibrio parahaemolyticus
  source 1..50: mol_type = genomic DNA
tacctattaaagaaacattttatttatctataatgtagaaacacaactta

SEQ ID NO: 26981 - protein, 586 aa, Pseudomonas orientalis
MPKIWPYIRFSSEEQKRGDSLRRQKELIARFAARPEIVAEGAQIDESLNLNDLGVSGYTGKNLLKGRFKAFLDAVDSEVVKAGDYLAVEALNRITRLNPLESLPIILRLVQEKDVRIAITSSSQIYRRGDDISALYIAIGELQRGYKESQEKGMRVKEAWNSKKRRAADFGEIATSRVPLWLSVDSIKLGSGDIKRVIKEIDARVAVVKEIFRLSDSNIGAVATARILTERGVPTFTREHARKNSNYGDFWQVTYVRKILSNRAVLGNYQPMQWLEVGGKRTRVNHGREIEGYFPQIITRELFDRVQIKKDARKIEGQGNKGLRFSNLFTKIAFCSACGAVAHHVNKGKDTKKGGRYLVCYRAKYGSCSYKSWKYEKVEAMILSYLAEADIKSIMRDEDKVELLVNERYKIESEQVAIGEMLDNFKRDFKELKGRVSNVERELAIENEARLADIKSQLHALDARILEAIEQQKADLKNEVRALQELDGVADENKVFEIRSKINARLKLIVESIILNFDLQVAEVRFKSGIVRHVHERGVFANILPPATPEQSAEDMREIEEWASLSNEEKKAKWANDDFKIVPLKI

SEQ ID NO: 26982 - DNA, 50 bp, Pseudomonas orientalis
  source 1..50: mol_type = genomic DNA
tgggtccaatgctacctttaaagaaggatttagattaccattggacccat

SEQ ID NO: 26983 - DNA, 40 bp, Pseudomonas orientalis
  source 1..40: mol_type = genomic DNA
gccgggcgggccgctgaacagcaggttatgcgcgcctgcc

SEQ ID NO: 26984 - DNA, 40 bp, Pseudomonas orientalis
  source 1..40: mol_type = genomic DNA
gccgggcgggccgctgaacctcaggttatgcgcgcctgcc

SEQ ID NO: 26985 - DNA, 50 bp, Pseudomonas orientalis
  source 1..50: mol_type = genomic DNA
tgggaccaattcttcctttaatgtctgatagaatttagctgtgaatccat

SEQ ID NO: 26986 - protein, 522 aa, Blautia massiliensis
MELLNVCIYLRKSRADREAEARGEGETLARHERILLDLAKKRSYNVGAIYKEIVSGETISARPVMQQLLREVESGMWDGVLVVEVERLARGDTIDQGVVARSFQYSNTLIITPLKTYDPNNEYDEEYFEFGLFMSRREYKTIRRRLTAGRESSAKEGKYCGSKPPYGYSRVKLVGEKGWTLQPVPDQAEIVKLIFNLYVHGVSGERIGMAKICRKLNDSGVKTMDGGLWTISRVQAILRNPVYEGMIRWNSRKAVKHIKDGQITISRPFAQDYILVKGRHPAIVSRELFQQAQDIVNKNPARPLNSLHVLRNPLAGIVRCGKCDHVMTRKSPNGRQGDLIRCPYSSCSNISSKLPLVEKALLDGIQELVDGYRLNNSVSDQEYSLSISEREKMIQGKLKEIDILKKRKQRQYDLLEQGIYSTEEFLERSRATAAELSACDAVILSLKQEIEHEQELQFQRSSFIPKCEDLLANYWTWDTSTKNRFLRELIEKAVYTKNAKNTWKNGDDISFTLDIYPKIQQK

SEQ ID NO: 26987 - DNA, 50 bp, Blautia massiliensis
  source 1..50: mol_type = genomic DNA
tgtgggtagcctttatgtacctacacattggcacataaatgatgatacaa

SEQ ID NO: 26988 - DNA, 40 bp, Blautia massiliensis
  source 1..40: mol_type = genomic DNA
aaacgacatgattgccagaacattggcacgtatcgtgtcc

SEQ ID NO: 26989 - DNA, 40 bp, Blautia massiliensis
  source 1..40: mol_type = genomic DNA
aaacgacatgattgccagaagattggcacgtatcgtgtcc

SEQ ID NO: 26990 - DNA, 50 bp, Blautia massiliensis
  source 1..50: mol_type = genomic DNA
tgtgagtagggtaaatgttcttacagattgatacacgaattatgtttcat

SEQ ID NO: 26991 - protein, 530 aa, Bacillus velezensis
MKTCIYARRSTLKQGQAETIENQIKICERKAKELGLTIVDIKTDSASGTDDNNRPEVKELLKGAINKEYDCVIMKGISRIYRKTSKGLELIEKLDRHGVRVITVEEHFDSHARENRNGIGNLDTSRITMYLMFAEKESQKLAERIKFTQIEKAYAGEWNQASNAPIGYTYDSTTKKLSIDNSKSYVVRKIFKLYEQGMGMKAIAHYLNGDNPDKKTYPSSKGGRWSEYTVGYILKNRAYVGDVVYNKRSKKERPYKAPEALGKTSDDICIINDYNKEEDWIIAENAHEPLIERELFDKIQTMISTKSRRKGIRSNTSLFAGIAKCAKCGTGMTFKRGRKNSLGQVVSKDNYYCMNYIRYGKQYCDSHHVGARELQEAIFSDLEHILNSKDKLQRVLDKNKIVMSLDEKKAKERIVGIQKEMDSLIKKMDKLLEKNLAGDISDTQYKTFNEKYSAELDNLTEELKKAKLIIANMSEQADNEMRFRQKLSNAIGIRNKTIEEQRHILLGLIDSIVINGNDIEDISYKFERVD

SEQ ID NO: 26992 - DNA, 50 bp, Bacillus velezensis
  source 1..50: mol_type = genomic DNA
tttttctatagtgtttaacaaggaacgccttgtataacactatagaacct

SEQ ID NO: 26993 - DNA, 40 bp, Bacillus velezensis
  source 1..40: mol_type = genomic DNA
tccgtcggccattaccggcacgccttgctctgtatagact

SEQ ID NO: 26994 - DNA, 40 bp, Bacillus velezensis
  source 1..40: mol_type = genomic DNA
tccgtcggccattaccggcaagccttgctctgtatagact

SEQ ID NO: 26995 - DNA, 50 bp, Bacillus velezensis
  source 1..50: mol_type = genomic DNA
tttatatattaactttgccatgtaaagcattttatattttcatacaacct

SEQ ID NO: 26996 - protein, 509 aa, Caldibacillus debilis
MELTPIEFKKDTEKIIPYSEYPYAVYVRISTDKEEQMTSPENQIEICRNWLEKNNYEWNDGSVLYDEQSGTVLIDRAAMQLILEKARRREIKMVVFKSISRLARDLKDALDIKETLISHGVRLVTIEEGYDSLYEGKNDMKFEIFSLFAAQYPKTLSVSISAALAAKVRRGEAIGPAPFGYKIEGENLVINEEEAPTIRQIFKWYVEDGYGFKSITKMLNEEMIKGNVSRPRKKDKWQVTSVQRIIKNPTYAGYFVHGRYTTVKQNGRKKFIENPREKWMVYENHHPAIIPKEMWEAANNKRMKKVKTKVTPWNEFRGIAKCSECGSNMVIIQTGNKKNKGGHWNYIKCSSYRRAGQYGCVNHAPILYEDFRELIIKRLKRKGKNIKLKLESGIVQKRKNEIAALEKEKLSLEQKRKRLIDLYLEDGLISKEEFQEKRKQYEDRIREIEDRIFLLSQEQNTTKEIKTIEDAFQQLENIDQDLYHVFKTLIDQIIVHPDGKIEILYKFKV

SEQ ID NO: 26997 - DNA, 50 bp, Caldibacillus debilis
  source 1..50: mol_type = genomic DNA
gttttgcaaagggtacgcatggcaaatgcgatgcataccctttgcaaaga

SEQ ID NO: 26998 - DNA, 40 bp, Caldibacillus debilis
  source 1..40: mol_type = genomic DNA
ggttcgaaatcatatctcaaatgccatgcaaaaacttggc

SEQ ID NO: 26999 - DNA, 40 bp, Caldibacillus debilis
  source 1..40: mol_type = genomic DNA
ggttcgaaatcatatctcatatgccatgcaaaaacttggc

SEQ ID NO: 27000 - DNA, 50 bp, Caldibacillus debilis
  source 1..50: mol_type = genomic DNA
tttttgaaattcataagcatgaaataagcaatcaatacaatttgcaaaga

SEQ ID NO: 27001 - protein, 464 aa, Enterococcus hirae
MKRAALYIRVSTPEQEKHGYSIQAQTEKLTAYAKAKDYSIYKIYTDAAQSGAKLERPALQEMIEDIENKKIDVVIVYKLDRISRSQKNTMYLIEDIFLKNNVDFISMQESFDTTTSFGRAMIGILSVFAQLERDNITERMSMGRLERVKKGYYMGGGNIPFGYEYNELTNVLEPVEPQANIVKRMFELASLEQSMTGIANILLKEYPQFRTSINDTTIRRRLVNPVYLGKQKFNGEYHQANHRAIISEEVFYKVQNILATRAHGNAFRRSYLLSGLIYCGVCGNRYSAYESRSKHNGIIYKNKYYRCNARTWKYKKKTGHSCSNRSIKCEELEKHVIEIVKNYAYSYEKKQQKQVINIEPLKQEIKKLQIKQSKLLDLYLADKLNTNLYENKNEELDSHIKELQKQLERLQIKKAKKDIAAPIQIIKNTDFDHSTPEKIKKLLHSVIARIEVTPTDILVFFYNS

SEQ ID NO: 27002 - DNA, 50 bp, Enterococcus hirae
  source 1..50: mol_type = genomic DNA
tcatagactatttaaacaatcacttgagaatatgataaaatagtctatga

SEQ ID NO: 27003 - DNA, 40 bp, Enterococcus hirae
  source 1..40: mol_type = genomic DNA
catcgttcctgcaatcacttggatattcgcaggatggcgt

SEQ ID NO: 27004 - DNA, 40 bp, Enterococcus hirae; identical to SEQ ID NO: 27003
  source 1..40: mol_type = genomic DNA

SEQ ID NO: 27005 - DNA, 50 bp, Enterococcus hirae
  source 1..50: mol_type = genomic DNA
tgaaagagttcagaaaatatcacttgaaaatatgttgctttagtatatta

SEQ ID NO: 27006 - protein, 452 aa, Listeria monocytogenes
MKAAIYIRVSTQEQVENYSIQAQTEKLTALCRSKDWDVYDIFIDGGYSGSNMNRPALNEMLSKLHEIDAVVVYRLDRLSRSQRDTITLIEEYFLKNNVEFVSLSETLDTSSPFGRAMIGILSVFAQLERETIRDRMVMGKIKRIEAGLPLTTAKGRTFGYDVIDTKLYINEEEAKQLQLIYDIFEEEQSITFLQKRLKKLGFKVRTYNRYNNWLTNDLYCGYVSYKDKVHVKGIHEPIISEEQFYRVQEIFTRMGKNPNMNRDSASLLNNLVVCSKCGLGFVHRRKDTMSRGKKYHYRYYSCKTYKHTHELEKCGNKIWRADKLEELIIDRVNNYSFASRNIDKEDELDSLNEKLKIEHTKKKRLFDLYISGSYEVSELDAMMSDIDAQINYYEAQIEANEELKKNKKIQENLADLATVDFNSLEFREKQLYLKSLINKIYIDDEQVTIEWL

SEQ ID NO: 27007 - DNA, 50 bp, Listeria monocytogenes
  source 1..50: mol_type = genomic DNA
tttagtacctcgttatctctcgctggagggagaggaaatgggatacaaaa

SEQ ID NO: 27008 - DNA, 40 bp, Listeria monocytogenes; identical to SEQ ID NO: 7733
  source 1..40: mol_type = genomic DNA

SEQ ID NO: 27009 - DNA, 40 bp, Listeria monocytogenes
  source 1..40: mol_type = genomic DNA
tttcggttcaagctatgaggtacgcaaagagggaactaaa

SEQ ID NO: 27010 - DNA, 50 bp, Listeria monocytogenes
  source 1..50: mol_type = genomic DNA
tttagtactttataatgtctccctgtaggtggaataaaggagatagaaca

SEQ ID NO: 27011 - protein, 452 aa, Listeria monocytogenes; identical to SEQ ID NO: 27006

SEQ ID NO: 27012 - DNA, 50 bp, Listeria monocytogenes; identical to SEQ ID NO: 27007
  source 1..50: mol_type = genomic DNA

SEQ ID NO: 27013 - DNA, 40 bp, Listeria monocytogenes; identical to SEQ ID NO: 1298
  source 1..40: mol_type = genomic DNA

SEQ ID NO: 27014 - DNA, 40 bp, Listeria monocytogenes
  source 1..40: mol_type = genomic DNA
tttcggatcaagctatgaggtacgcaaagagggaactaaa

SEQ ID NO: 27015 - DNA, 50 bp, Listeria monocytogenes; identical to SEQ ID NO: 27010
  source 1..50: mol_type = genomic DNA

SEQ ID NO: 27016 - protein, 452 aa, Listeria monocytogenes
MKAAIYIRVSTQEQIENYSIQAQTEKLTALCRSKDWDVYDIFIDGGYSGSNMNRPALNEMLSKLHEIDAVVVYRLDRLSRSQRDTITLIEEYFLKNNVEFVSLSETLDTSSPFGRAMIGILSVFAQLERETIRDRMVMGKIKRIEAGLPLTTAKGRTFGYDVIDTKLYINEEEAKQLRLIYDIFEEEQSITFLQKRLKKLGFKVRTYNRYNNWLTNDLYCGYVSYKDKVHVKGIHEPIISEEQFYRVQEIFSRMGKNPNMNRDSASLLNNLVVCGKCGLGFVHRRKDTVSRGKKYHYRYYSCKTYKHTHELEKCGNKIWRADKLEELIIDRVNNYSFASRNVDKEDELDSLNEKLKIEHTKKKRLFDLYISGSYEVSELDSMMSDIDAQINYYEAQIEANEELKKNKKIQENLADLATVDFNSLEFREKQLYLKSLINKIYIDDEQVTIEWL

SEQ ID NO: 27017 - DNA, 50 bp, Listeria monocytogenes
  source 1..50: mol_type = genomic DNA
tttagtacctcgttatctctcgctggagggagaagaaacgggataccaaa

SEQ ID NO: 27018 - DNA, 40 bp, Listeria monocytogenes; identical to SEQ ID NO: 1298
  source 1..40: mol_type = genomic DNA

SEQ ID NO: 27019 - DNA, 40 bp, Listeria monocytogenes; identical to SEQ ID NO: 27014
  source 1..40: mol_type = genomic DNA

SEQ ID NO: 27020 - DNA, 50 bp, Listeria monocytogenes; identical to SEQ ID NO: 27010
  source 1..50: mol_type = genomic DNA

SEQ ID NO: 27021 - protein, 452 aa, Listeria monocytogenes; identical to SEQ ID NO: 27016

SEQ ID NO: 27022 - DNA, 50 bp, Listeria monocytogenes; identical to SEQ ID NO: 27017
  source 1..50: mol_type = genomic DNA

SEQ ID NO: 27023 - DNA, 40 bp, Listeria monocytogenes; identical to SEQ ID NO: 7828
  source 1..40: mol_type = genomic DNA

SEQ ID NO: 27024 - DNA, 40 bp, Listeria monocytogenes
  source 1..40: mol_type = genomic DNA
tttcggatcaagctatgaagtacgcaaagagggaactaaa

SEQ ID NO: 27025 - DNA, 50 bp, Listeria monocytogenes; identical to SEQ ID NO: 27010
  source 1..50: mol_type = genomic DNA

SEQ ID NO: 27026 - protein, 452 aa, Listeria monocytogenes; identical to SEQ ID NO: 27016

SEQ ID NO: 27027 - DNA, 50 bp, Listeria monocytogenes; identical to SEQ ID NO: 27007
  source 1..50: mol_type = genomic DNA

SEQ ID NO: 27028 - DNA, 40 bp, Listeria monocytogenes; identical to SEQ ID NO: 7733
  source 1..40: mol_type = genomic DNA

SEQ ID NO: 27029 - DNA, 40 bp, Listeria monocytogenes; identical to SEQ ID NO: 27009
  source 1..40: mol_type = genomic DNA

SEQ ID NO: 27030 - DNA, 50 bp, Listeria monocytogenes; identical to SEQ ID NO: 27010
  source 1..50: mol_type = genomic DNA

SEQ ID NO: 27031 - protein, 530 aa, Faecalibacterium prausnitzii
MEQYLIYLRKSRSDLEAEAHGEGETLSRHEHTLLELAKRQHLNVTDIYREVVSGDTIAARPMMQRVLSEVEQGVWSGVLVMEVERLARGDTIDQGIIAQTFKFSGTKIITPIKTYDPDNEFDEEYFEFGLFMSRREYKIINRRLQRGRLASAKEGKWPSGLAPFGYRRVKLKNEKGCSLEPIEEQAAIVRMIFDLYTVGLQDEDGSARPLSLGSIATRLNDMHIPSPSGSQWARITIRGIIKNPTYIGMVRWGSRETKKKVVDGKVVSVRGPADPEKECVFKGIHPPLIPKETFELANDKLTRSENTSTHKEKVVRNPLAGLLVCSECGRQMMRMINPVHPDMPVVRCPRRGCPNCSSYLPIVEERVIQGLSEWMKGYELEWSSAAASSSVSSVGVREKALASAEAELRKLQQQLERTHDFLEQGIYDTNTFLSRSRMLSDKIAAAKDSVARCSRELTEEKLRETSRREIIPKVKNLLDVYPLLETAEEKNALLKEVLEKVVYQKLNEKRKKSPDGFTIEIYPRIPKSEK

SEQ ID NO: 27032 - DNA, 50 bp, Faecalibacterium prausnitzii
  source 1..50: mol_type = genomic DNA
tatagttatcctgtttagccatactcattaggacaaacaggataactata

SEQ ID NO: 27033 - DNA, 40 bp, Faecalibacterium prausnitzii; identical to SEQ ID NO: 21563
  source 1..40: mol_type = genomic DNA

SEQ ID NO: 27034 - DNA, 40 bp, Faecalibacterium prausnitzii; identical to SEQ ID NO: 21563
  source 1..40: mol_type = genomic DNA

SEQ ID NO: 27035 - DNA, 50 bp, Faecalibacterium prausnitzii
  source 1..50: mol_type = genomic DNA
cattgttatgactcatagtcataatcattatgataacatgaataacaaca

SEQ ID NO: 27036 - protein, 618 aa, Clostridium scindens; identical to SEQ ID NO: 11111

SEQ ID NO: 27037 - DNA, 50 bp, Clostridium scindens
  source 1..50: mol_type = genomic DNA
aaaactgcggaaactcaagaaaatctcaaatcttgagtttctgcaaaatg

SEQ ID NO: 27038 - DNA, 40 bp, Clostridium scindens
  source 1..40: mol_type = genomic DNA
ggaaaagtaaccccaaaatctcaaatctcttgcacttgcg

SEQ ID NO: 27039 - DNA, 40 bp, Clostridium scindens
  source 1..40: mol_type = genomic DNA
ggaaaagtaaccccaaaatgtcaaatctcttgcacttgcg

SEQ ID NO: 27040 - DNA, 50 bp, Clostridium scindens
  source 1..50: mol_type = genomic DNA
aaaactgccttcccaaaagtgaatgtcaatccttaaatatgtgtaaaatg

SEQ ID NO: 27041 - protein, 477 aa, Mycobacterium attenuatum
MATTLSPQVTRAVIYARVSSDRAKGRSVVEQEAECRAECDRRGWPVADVLTDNDRSATRFATKDRPEYERLRTILQPGDVLVVWEASRAGRSLDHYVDLRRLCSERGVLLSYSGKLFDMDDGDDRFTTGLDALIAEREAEDIRKRIVRSHRANLAAGKPHGRVPYGYKIVRDPETGKATGRVPDTARAPLVAEAARRVLDGHSLESTVRWIAAKDPDPRWNAAKLRRILLNATNAGFRTQSAKVNGKRGPQKIVKEGTWTPILTPEQHDDLVALFTARKTGPRGPEPVYLLSGIADCAVCGDKIWRGKAGRKKDGSLYEVYKCRKGCVGRNLGQVDDVILAVVDGILTTPEALEALAVPRAEPDSTAKANLEELKRQLQAVEDQLTDGKMPADVGARVATRLAERIDALEKVTAPVFTEPIVREIATAPDPLALWRSFSLPRKREFIRAVMTIEIERVTSRWHAKEHGIIITPRQNR

SEQ ID NO: 27042 - DNA, 50 bp, Mycobacterium attenuatum
  source 1..50: mol_type = genomic DNA
acgggttttgcaccaaatactgtttaaaactcgtatagtctcttagtatg

SEQ ID NO: 27043 - DNA, 40 bp, Mycobacterium attenuatum
  source 1..40: mol_type = genomic DNA
gactgatcgaacgcgtgcttgagggcaccgctaaggtatc

SEQ ID NO: 27044 - DNA, 40 bp, Mycobacterium attenuatum
  source 1..40: mol_type = genomic DNA
gactgatcgaacgcgtgctctagggcaccgctaaggtatc

SEQ ID NO: 27045 - DNA, 50 bp, Mycobacterium attenuatum
  source 1..50: mol_type = genomic DNA
acacgttttgtttgaaataattatctatactcatatgttttcttaatttg

SEQ ID NO: 27046 - protein, 460 aa, Bacillus cereus
MKCAIYRRVSTDEQAEKGFSLENQLLRLQAFAESQGWEVVHDYMDDGYSGKNMNRPQIKRMLHDLKSNKFDIVLVYRLDRFTRSVKDLNDLLEVFKEHEVDFKSATESIDTATATGRMILNMMVSTAQWERETISERVKDVVRKKKDLGLISTGYPPYGYAMNDGVISQVPHEVEIVKFVFEKAKVYGFQKISKLLNEQGLVTRNGTKWLISTASRIAHNPFYSGEMRYKRDGETSTVPINVEGYEPVITKEEHKEVLKAIKKRNRNQTRAKSNEVYPFSGIVLCPECGHPMKGTRVSSRGYYYKYYRCDRASDHFCNGKLIRYEKLDKAFAEYIHDAFQIDRIEIKEETNTKDIQREIKRCKSKIERLKDLYVDGDISKKKYKNDVGELNEKIYDLEQKLLSAENKISHDHIRENLKRLSEFWGLIDDNTKMESIRGVFDTITVEIQGNDVVITDHTLL

SEQ ID NO: 27047 - DNA, 50 bp, Bacillus cereus
  source 1..50: mol_type = genomic DNA
gttttgcctaaaggagcatttacacttgaaggtgctatgttaggcaaaaa

SEQ ID NO: 27048 - DNA, 40 bp, Bacillus cereus; identical to SEQ ID NO: 8898
  source 1..40: mol_type = genomic DNA

SEQ ID NO: 27049 - DNA, 40 bp, Bacillus cereus; identical to SEQ ID NO: 8898
  source 1..40: mol_type = genomic DNA

SEQ ID NO: 27050 - DNA, 50 bp, Bacillus cereus
  source 1..50: mol_type = genomic DNA
gcttggcctgtcttagcaattccacttgtaggtgcaaacttaggagaaag

SEQ ID NO: 27051 - protein, 591 aa, Mycobacteroides abscessus
MARKNIQYRTGNEGISYLRVSSKGQVETEYDAEGMSLPAQRRRCAARAHEKKLVLVDELIDPGITATNIEDRKSYQELIKRLKADESIAFVMVYTVNRLHRNWTEGGLMLMQLRSMGVRLISAMEDIDDSTATGRMLLGMLFTTAGYQSEASSEDLQYKMTQKAIIGGTPGYVPIGYQNVSEQFEGRKVNTVAVDPERGHYIPMAFEWFATGHYTYVELRNKLTEAGFRTRPNRRYPSGQISIHSIETMLRNRYYLGYVTWNGQEYKGRHEPLVTQGLFDQVQAVLAAMPGAGTRQRRYNHLLKGIIWCERCSRRLVVMRGRSKSGEFYFYFVCRGRQSKVCDLPYIRASQAEHAVAEHYRTVTLGEDFKSQISELFAGAVNQCRASRRGNRSQMKKRLTELDRQEDRYIEMALDPDWPKEKITAKLRQLRDERKRLTQELAAGEQTIAQAFTNVSHVLDYLDKPYEMYRESGNRYKAALNRSIFNRLYLNVDGDQPNTPPDGSRTVYVASDELSEPFEEIIELRRNWHARQTTGGEGIQALHRHHYTRKNNNSAPVRDAAADVPRPVDTAVSLLEQAFYSPRCSNSDTLA

SEQ ID NO: 27052 - DNA, 50 bp, Mycobacteroides abscessus
  source 1..50: mol_type = genomic DNA
gttcaaatagcgacactttggcggacgtacttaagccttacttgaacatc

SEQ ID NO: 27053 - DNA, 40 bp, Mycobacteroides abscessus
  source 1..40: mol_type = genomic DNA
tgcggtcctgcagtggcggaggataggggatttgaacccc

SEQ ID NO: 27054 - DNA, 40 bp, Mycobacteroides abscessus
  source 1..40: mol_type = genomic DNA
tgcggtcctgcagtggcgggtgataggggatttgaacccc

SEQ ID NO: 27055 - DNA, 50 bp, Mycobacteroides abscessus
  source 1..50: mol_type = genomic DNA
cttcaaataggatatgtgtggctggtgtaattgaacagtagtttaacatc

SEQ ID NO: 27056 - protein, 584 aa, Yersinia enterocolitica
MTKKNVHVYTRISKATQQEGSGLDEQLSRIEKYIRDNQQLFNLENITYWQDVGLSAYKNKNIKDGQLGVFLEKIASGEIGVGDVLIIYSLDRLSRRSSWDETSIQMIVHSGVIIHDISTPIVLDRNDPMSKIIMELIISRGNNESKIKSERSISGWQKRLTDTLATGAVFTKKLPRWLGADPAGGYVVLPDQIDIIKRIFTEYVNGLSSPMIAKRLNEEGIKSTGRSLWRPNTITKLIKDERLQGMLRRSDVTNIPNVFPVVIDAEIFRQANNILSSNNLGIKGRPRENNNTREVVNVITGLVRCGTCGSKVSTSTNGRGVRYIKCRNRLNFLMCGQKSIRLENLEQIAINHSKQVDMNKVFDYKKNDKSLEATLSSELSSLESEEQECLSQIHERKKEKKRVSLVLATTLTEIQDRIDEVKQELSNINSNDVAPDISSIDTTALMDASNVDLRMSFRKYLVMAINTISYRTLGDNILIEFNYKNNVYRHIIITDKKVENILHEVSITSNADSITYSTKEFSLIEDLVNETCSITGLDSVNHIDYFLLANYIGSIDKQWLVDYMYHPEFMNIVMSNVQTTEPLI

SEQ ID NO: 27057 - DNA, 50 bp, Yersinia enterocolitica
  source 1..50: mol_type = genomic DNA
atgtgtgaaacattgacaaataccgtggtattggtgtagttttaacacat

SEQ ID NO: 27058 - DNA, 40 bp, Yersinia enterocolitica
  source 1..40: mol_type = genomic DNA
gtggcgcaatgccgataccgtggtgataggccgtgctcaa

SEQ ID NO: 27059 - DNA, 40 bp, Yersinia enterocolitica
  source 1..40: mol_type = genomic DNA
gtggcgcaatgccgatacctgggtgataggccgtgctcaa

SEQ ID NO: 27060 - DNA, 50 bp, Yersinia enterocolitica
  source 1..50: mol_type = genomic DNA
atgtgtaaaattcagataattacttgagtattagttctaatttaaaatat

SEQ ID NO: 27061 - protein, 539 aa, Solobacterium sp
MKQPNNTAIYMRLSRDDENYGDSVSIETQRTILRQFAEDNDLHIVDEYIDDGYSGTTFNRPAFQRMIEDIESGKVNTVCTKDLSRFGREHVMMDYFLEFFFPEKKVRYIAVSDNEDTERGLSDLVPVKNIFNEWFAKDTSKKVKNALRAKHLAGERTFAYAPLGYKRDPEKKNSIIIDEETRWIIEKIFSMAAHGAGSAKITKTLIEEKVPTPGYLLYQKYGKFANIYEGATEEKSYSWTIAIVKSILKNETYIGNTIHNQQTNISYKNKKKVRKPKEEWIRVENTHEGIIDKDIFYQVQEQIESRKRKMKDADTQIFAGLLKCADCGWALSYGVNRSNKTPWAYYNCTQYRQFGTKLHRCTSHYIRYDVLYSYVLSRIRYWAKQAEIDEEGFLEKLLKTSDSERARGLRKQTAELRKAEKRKDELDRLFTKLYEDWSAERINEYNFNMLTQRYQAEQEEVDEKIKAIRSELNTEKQTAEDTRKWIELIRKYTDPTELTAELLNTLIEKIVVHEATDDEFGFRTQEIEIYFRFVGRIDE

SEQ ID NO: 27062 - DNA, 50 bp, Solobacterium sp
  source 1..50: mol_type = genomic DNA
cagtatccttaagtgagggaaaacggagttatctcacagttaaagaaact

SEQ ID NO: 27063 - DNA, 40 bp, Solobacterium sp
  source 1..40: mol_type = genomic DNA
gatatcaaactgggagaccggtaaatcctatccggatatt

SEQ ID NO: 27064 - DNA, 40 bp, Solobacterium sp
  source 1..40: mol_type = genomic DNA
gatatcaaactgggagacctgtaaatcctatccggatatt

SEQ ID NO: 27065 - DNA, 50 bp, Solobacterium sp
  source 1..50: mol_type = genomic DNA
cagttgccttaaaaaagcaaaaactgaggtttctcagaaaataagaaatt

SEQ ID NO: 27066 - protein, 636 aa, Pseudomonas fluorescens
MDDTTPLPARKILYKYIRFSSIQQAKGSSFARQNARLEKYAEDNNFEIDDSLDLRDFAKSGFHGINKEIDQGLGRFIAAIEKGLIPTDGSAYLAVEQFDRISREDIDKAQDLFKSILRKNVNIITLMDGRIYTKKSLSNFMEVLYSLFLMEQAHQESLKKSDRIKGSYVIKLKKLKELAAEQKEILEDWEKTKSGKKPELEPLINQIQFSSQVPCWIDQKIEIISGRKFRKFVVNEEKAKIVRYALSLLNDDNGYLNVSAQLNKENIPRLDFNTNRKRSTRKDIWTNRAVNEFVNSDSIFGELAVHNNFFVDKEFDYEGIKASKKVMTRTHLENIANYYPAIVDKKLIMGLRARANAKKKGRVAGRTTTNNLFQNMLFCGKCGDSMHLRQSKRETKKGTYQRFYVTCYAAAHKACDAKMFPYTQLEEQLVKYLINPVNTAELNEEGKVIEEKRKEKLLVLKGEIQDIQSRIDEFTQEITKNRSIKPSIALSIISEFENDKALKQSKISELEMQTEKLHDALQVGDISNFDLVGDDGRNGFKVAIKQRYAGFIIYTNEQILFAIEKTGATTIFKLQNKSRWGTVLKAEKGDIFEKQVQAIKFLRDRAADYKEGKLYELIQTFKATNIDIFEGQYIED

SEQ ID NO: 27067 - DNA, 50 bp, Pseudomonas fluorescens
  source 1..50: mol_type = genomic DNA
ggttgcttaattgccagtagtgggctatgattgttggcaattcagcaacc

SEQ ID NO: 27068 - DNA, 40 bp, Pseudomonas fluorescens
  source 1..40: mol_type = genomic DNA
tggctgttaccagagcgagctgccgattcttgagcaaatc

SEQ ID NO: 27069 - DNA, 40 bp, Pseudomonas fluorescens
  source 1..40: mol_type = genomic DNA
tggctgttaccagagcgaggcgccgattcttgagcaaatc

SEQ ID NO: 27070 - DNA, 50 bp, Pseudomonas fluorescens
  source 1..50: mol_type = genomic DNA
ggtttcttaggttgctttattgaggcatgattgcttcttcttcagaaatc

SEQ ID NO: 27071 - protein, 678 aa, Vibrio alginolyticus
MRTTPKIYNYARVSTTKQTKGVGLETQQQRSVLENLSQEHNLPIHDENFVDQGLSAYHGKHKDGAFGVVLSRIESGEIASGSILVVFSLDRLSRETVNVAMEQFLSIINRGVRVYTHIDCKMFDSESQNQTADLIGSLITMQRANEESETKSKRIIAAQKIALKRWKDTGKPQGALGRSPFWIDQPTNTLNINAEGVKKAVEMKLAGYGDLKIKQYLDANFEYKQTRTKGTVKQSNTWDYTAISQLWANRSLIGEKNFHIEGVSHVFENYYPPIIDEATFRKLKMCKSEKRGRNTSSGKIPLLKGIARCGICGGAMVFVDKGDNRVNYVCNLAMKGEHDREVYNVNMLDLLTLEICKDAYLAESDKANNTFVENEKIKIETELVEEREVLDELVARFKAKKSNTILDLIGDSENQIDVLEAKLDAINNADVVLNADELVSLPEIFTDDVRTDYLHPERYTIRNNLYRFISSITLNRVVEHCSDAKIKSANCIDITWHFKNGQKRRLAMLPYQYLKADDGRKSLYLPFVYMYGSKSNIKVDDGGQFLSSIFEKLHAFDLTKCLYPSRGCYQWSKLSLECGKTYWAPLDKAMFMEKGMEVIADTVRDNGGTNKVDGVTTNYLSLMFNYPSSEEFSYDYPDSTFVELACKFGFVADRDFSLFLQDNNFNRELYSSLDFLMS

SEQ ID NO: 27072 - DNA, 50 bp, Vibrio alginolyticus; identical to SEQ ID NO: 19302
  source 1..50: mol_type = genomic DNA

SEQ ID NO: 27073 - DNA, 40 bp, Vibrio alginolyticus; identical to SEQ ID NO: 26748
  source 1..40: mol_type = genomic DNA

SEQ ID NO: 27074 - DNA, 40 bp, Vibrio alginolyticus; identical to SEQ ID NO: 26748
  source 1..40: mol_type = genomic DNA

SEQ ID NO: 27075 - DNA, 50 bp, Vibrio alginolyticus
  source 1..50: mol_type = genomic DNA
agaatcaacattcatttatttgatttaccaataaaaagtacttcccatca

SEQ ID NO: 27076 - protein, 562 aa, Vibrio harveyi; identical to SEQ ID NO: 23906

SEQ ID NO: 27077 - DNA, 50 bp, Vibrio harveyi
  source 1..50: mol_type = genomic DNA
ttcctgttaatcttgcgtagtactgtgattttatgtatgattaacaggaa

SEQ ID NO: 27078 - DNA, 40 bp, Vibrio harveyi
  source 1..40: mol_type = genomic DNA
agcaggagccaaattgaccgtaattcgttttgctggaaac

SEQ ID NO: 27079 - DNA, 40 bp, Vibrio harveyi
  source 1..40: mol_type = genomic DNA
agcaggagccaaattgacctaaattcgttttgctggaaac

SEQ ID NO: 27080 - DNA, 50 bp, Vibrio harveyi
  source 1..50: mol_type = genomic DNA
ttccagttactgaagataagtagttagtttttttttttttttaacagcaa

SEQ ID NO: 27081 - protein, 577 aa, Bacteroides pectinophilus
MKKQQKCYIYTRVSTSMQVEGYSLDAQKDKLKKYADYQEMSIVGEYSDEGKSGKSVEGRPQFKQMLADIESGKDNVDYVLVFKLSRFGRNAADVLSSLQKMQDYGVNLICVEDGIDSSKDAGKLMISVLSAVAEIERENILVQTMEGRRQKAREGRWNGGFAPYGYQLVNGELIIAVDEAEIIHIIYDKFVNTTMGMAAIAAFLNNSGYKKKLRQNNTIEGFSTSFVKGVLDNPIYCGKLAFGRRKNEKIPGTRNEYHIVKQKEYMLNDGIHEAIISEEMWNQAHKKRQETGVLQVKTHSLEHEHILSGIIKCPVCGSGMYGNVNRKKHPDGGYYKDYFYYACKHRKLVDGHRCTYKRQWNEDRINAAVEEIIRKFVKNPKFEQEIRKQIGSSIDTSELDREYDGLKDRLSQTTGAKNRLADQMDHLSVSDKNYDKKYNDMQERLDKLYDEITDIENAMEEVETRLYNIRQDKISEDNVYQFLLFFDKLYDKFTDLEKKTFLRSFLSDVFIYEEEQKDGRILKGLRFKFPIYMNGRNVLGVDWDNESTDDMWLAPNWKTQLYEGGRVISRRFRTAGT

SEQ ID NO: 27082 - DNA, 50 bp, Bacteroides pectinophilus
  source 1..50: mol_type = genomic DNA
ttcatacaacgtcacttccggatgatgagggagaatataagatgataaaa

SEQ ID NO: 27083 - DNA, 40 bp, Bacteroides pectinophilus
  source 1..40: mol_type = genomic DNA
gtgaattctgggatagcgtatgagtttccccacaatagcc

SEQ ID NO: 27084 - DNA, 40 bp, Bacteroides pectinophilus
  source 1..40: mol_type = genomic DNA
gtgaattctgggatagcgtaggagtttccccacaatagcc

SEQ ID NO: 27085 - DNA, 50 bp, Bacteroides pectinophilus
  source 1..50: mol_type = genomic DNA
tgtaaacaaattttctcccggaagaggagggagactttactatcatggaa

SEQ ID NO: 27086 - protein, 541 aa, Sphingobium xenophagum
MDALLYIRWSSQEQNKGDSHRRQLRLGEDAAKLRGWNIVETLIEDGRSAYHGRNRDVGGKLAEIEDRARLGNLNGWVLLVEQLDRLSRQQPIQTLNLITSLTGAGITIFETSTGRKWDNDSVRSSWTDLLEAFIRAGLAFDESDKKSKRIKSAWMATRERGATKDGQADPRIMPGWMEVVEGRYKIIEARAQWIRSIFRWCIEGVSLTGIARRLNADSKSRWTAGSWAAPNISQLIRARNVLGEYLPQTKDQTGKRVPAGDWTKCYPAIIDEPTWQAAQAALQRRASASPSARNRRINILAGMVICGACFGPLFLGTHNKSARRLICRNRHQNSGCDARTTYHYPNLERGVLDYVLHIAVPEQTGPGSSAGLITNLELSLQERKARLEKLVDSYSRTGSAAMERGILSLEREILVGEDDLARLRRQEREAANRPAPTELLKRASELRGKMIDDDSRSHMNQLLRSLVTSIVMNPANMEATVILLGGLAAIRLDKHGNKIAGADAKAMLLDPEGRAQTIAATIGSDVPHRMMLDQWEARADV

SEQ ID NO: 27087 - DNA, 50 bp, Sphingobium xenophagum
  source 1..50: mol_type = genomic DNA
atatcaataccgttattataatggtgccagtgctataagagcattgcgtt

SEQ ID NO: 27088 - DNA, 40 bp, Sphingobium xenophagum
  source 1..40: mol_type = genomic DNA
aacctctgtattataatgatgccacgccatgatggcggcg

SEQ ID NO: 27089 - DNA, 40 bp, Sphingobium xenophagum
  source 1..40: mol_type = genomic DNA
aacctctgtattataatgaaaccacgccatgatggcggcg

SEQ ID NO: 27090 - DNA, 50 bp, Sphingobium xenophagum
  source 1..50: mol_type = genomic DNA
atatcaataccaaatttgtaatggaaccagtgcaattaactgagaaaatt

SEQ ID NO: 27091 - protein, 644 aa, Escherichia coli
MLRPICYERVSSIQQIEGGGGLDDQRSALEGYLDKNAGLFENDRLFIQDRGVSAFKNSNISSESQLGIFLQDVQNRKYGEGDALIVMSLDRISRRSSWAEDTIRFIVNSGIEVHDISASTVLRKDDPHSKLIMELIQMRSHNESLMKSVRAKAAWDRKIIEAVQNGTVISNKMPMWLKNVDNRYQVIQEKADLIIRCFEWYRDGFSTGEIVKRIADPKWQMVTVSRLVRDRRLLGEHKCYNDEVIHNVYPKVIDDDLFLTANRMMDRVMLEKNKPAEDLLLESDVVQEIFQLYESGLGSGAIVKRLPKGWSTVNVLRVLRDKNVVTQKIIDNLTFERVNQKLSMNGVANRIRKDITIAQDDYITNLFPKILKCGYCGGNVAIHYNHVRTKYVICRNREERKICDAKSIQYIRIEKNILKCVKNVDFQKLMIESTGSETSVLDGLHEELSSLRREENSYSDKINERKLAGKRVGIHLNDGLTEVQDRIEEIEKEIINAQTVREIPKFDFDMDEVLDPMNIELRAKVRKQLRLVLKAVKYWMFDKRIFIQLEYFNDVLSHMLVIDNKRGGGDVIYEMSIEERKGERIYTVHENGHAVFIASVTIGTDIWSLALSRTRTIDSIGNYLSLLAREGFEIFVNEDQIDWF

SEQ ID NO: 27092 - DNA, 50 bp, Escherichia coli
  source 1..50: mol_type = genomic DNA
tcccattgattgtggtgtgtgtcctttcgtatactatgggaacattttga

SEQ ID NO: 27093 - DNA, 40 bp, Escherichia coli
  source 1..40: mol_type = genomic DNA
tattcatggtatgccgtcctttcgttttttagcacaggtt

SEQ ID NO: 27094 - DNA, 40 bp, Escherichia coli
  source 1..40: mol_type = genomic DNA
tattcatggtatgccgtccgttcgttttttagcacaggtt

SEQ ID NO: 27095 - DNA, 50 bp, Escherichia coli
  source 1..50: mol_type = genomic DNA
ttcttttgagaagtgtctgtgtccgttcatgtcctttgcccactttttga

SEQ ID NO: 27096 - protein, 598 aa, Vibrio fluvialis
MKQPMIYSYRRISSKKQEIGRGMDMQDDTDTLKRLEVELKLPISERRLDDVSKSAFHGHNIKDGDLGWFLDAVKEGKVARGSCLVVYSLDRFSRQRIEKATNDFTSILKEGVMIYSILERTLFGDPNKSNEINASEQNLANMVFARAYNESSTKSSRAKDRMALAVRDFKEGKRKDGRVISIKVVGNDVWWIDNSDGTIRKRKSTSSDGRSACYFELAREILLKRIDGWSVYRIVNWLNDTTRDRYLPSPTNRIDKKESRFGLWTRDMINRISEPRKSKVPGSHIKARPILGEKLIGDEVLEGYYPPLLTESEYSQLIRMIKTRARPKSRSKQGESLFSGINVFCANCGDRVTRTTETGGILNYRCGSANCNKNWSKRGAELEKAILDVCVDKVWKPQRKTTQTDQVKVIEGELVRVRAEIEDIKQLLVGRSSRTFAERVFSLEDEEESLLNELEKAKIVQQGVFAQDTRMLSERWSEVNTKVLDFNNDLERIKFRDLIHDSCERIDIGRPLDSDRYRIAVLIKFIDGEWRHIVLGRREVLAVNGSDFYKLEEDAFQRLASIEAGFNIYAPSSQVDDWLKDEFSDFSKDSSYKKRASK

SEQ ID NO: 27097 - DNA, 50 bp, Vibrio fluvialis
  source 1..50: mol_type = genomic DNA
atcttctatcatgcaagttttggctggcctaatgttgcatgatgatggtt

SEQ ID NO: 27098 - DNA, 40 bp, Vibrio fluvialis
  source 1..40: mol_type = genomic DNA
atcttctaatgctcccggttggccataagcaccattgtta

SEQ ID NO: 27099 - DNA, 40 bp, Vibrio fluvialis
  source 1..40: mol_type = genomic DNA
atcttctaatgctcccggttagccataagcaccattgtta

SEQ ID NO: 27100 - DNA, 50 bp, Vibrio fluvialis
  source 1..50: mol_type = genomic DNA
atgttttaagagccaagtatgggctagcctaatggtttagaattattgta

SEQ ID NO: 27101 - protein, 475 aa, Paenarthrobacter nicotinovorans
MTTCAVYLRISKDKGLGTDDEGLAVDRQRKDIHKLLKSKGWNVGTEYLDNDVSASGKVKRPAYERMLADFEAGSIDAIAAWDLDRLWRVPMEFEHLLNLSEKQGLKLATVGGDADLATDSGQLFARIKVAVAQSELTRRSARQKAKFAQDREAGKDHWRKRRPFGLTLEGKLVPEEAEALKDIAEIILSDGTITAGVSLLKERGLKTTFGQEWQRQPLRRTLLNPRIAGFLEHEGEIVKAQWEAVLERDTWEAVVAKLNTKNRPKPKTTKHEYMLSGLLTCGECGDKCYGRQTKRKRKSGVTKIGYIYRCNNLCTSKELKKTDDLVILRTLEAVLTTDHQEIQQDKGTLQSLREARAHELKRWADWLEQAAEQDLRPSEIKPHRAKHESKLRDIENQIAQLEKVTLVRLPTLDEALESTADDQGEIVRVFNWDALSLEKRRHLVSLMWDSVTLKRTGRGARWSDDNIVFVERKAV

SEQ ID NO: 27102 - DNA, 50 bp, Paenarthrobacter nicotinovorans
  source 1..50: mol_type = genomic DNA
gaagcaccatatgtaactgccaattggtaggtagtgccatatagtgcttc

SEQ ID NO: 27103 - DNA, 40 bp, Paenarthrobacter nicotinovorans
  source 1..40: mol_type = genomic DNA
ggtggacggcaacaccaactggtacacagtgcagtcgttc

SEQ ID NO: 27104 - DNA, 40 bp, Paenarthrobacter nicotinovorans
  source 1..40: mol_type = genomic DNA
ggtggacggcaacaccaacgagtacacagtgcagtcgttc

SEQ ID NO: 27105 - DNA, 50 bp, Paenarthrobacter nicotinovorans
  source 1..50: mol_type = genomic DNA
caagaaccagaaaaaaatcccaatgaatagctagggcaaagtaggccttc

SEQ ID NO: 27106 - protein, 523 aa, Schaalia turicensis
MSRTVTAIPATKKLRSAAASSGVPAHRRVAAYARVSTEMEEQTSSYEAQIDYYTTYIHSRNDWQFAGMYCDEGISGTSMKRREGFQTMIDDALAGKIDLILTKSVSRFARNTVDSLTTVRKLKDAGVEVYFQKENIYTFDAKGELLITIMSSLAQEESRSISENVTWGHRKRFQDGKVMVPYKSLLGYKKGADGSLVIDETQAPTVRLIYQLFLDGMAISEIKTELAARKILTPRGKEVWSTSTVRSILSNEKYKGDALLQKTFTTDFLTKKMKVNEGEVPQYYVTGNHEPIIAPRIWDQVQYELATRHGNISSAKVGLFSTRLKCARCGVWYGRKTWASNTKYKYTVWQCNHKYTDEHPCSSATVKDEQIKDSFVQALNQLIARRPQQSQLPQVLGDMFGTSRLEEQAAACQTKIVELTEQIEALIAENQRCALNQDAYQARYTELDTIYRKTLARKTSLEADIAANTAKHAAITTALGDLTGEPVSEFHPAQWSALIDHAIVDEDTIRFVFRVGEEVSVQL

SEQ ID NO: 27107 - DNA, 50 bp, Schaalia turicensis
  source 1..50: mol_type = genomic DNA
cttatcattttcgacgtctaagtggatacttagacgtcgaaaatgataaa

SEQ ID NO: 27108 - DNA, 40 bp, Schaalia turicensis
  source 1..40: mol_type = genomic DNA
cgaaaaccgggggttatcagagcggatgacgggaatcgaa

SEQ ID NO: 27109 - DNA, 40 bp, Schaalia turicensis
  source 1..40: mol_type = genomic DNA
cgaaaaccgggggttatcaacgcggatgacgggaatcgaa

SEQ ID NO: 27110 - DNA, 50 bp, Schaalia turicensis
  source 1..50: mol_type = genomic DNA
cttattatgaccattggctaagtgactcctgagcagtaaacaattataaa

SEQ ID NO: 27111 - protein, 576 aa, Agrobacterium larrymoorei
MKPKAYSYVRMSTDVQLKGDSLRRQTEESKRYCEENGLELVEDFKLQDIGVSAYRGKNVTQGELGRFLSLAENGMIPEGSFLIVESLDRISREKPQTAVALFLQILESGVDIVTLTDRRVYKSGSADVADILLSVVIMARAYEESRTKGLRVGAAWENKRNNIRETKLTQVAPAWLSLSEDRRTFNAIPERVAVLQAIFNNADNGKGSYQIARKLNLDKIPTFAPSKGWHESYVSKLLTNRAVLGEFQPHRYIEGKRTPAGEPITDYFPAVVSLDQFERIQAGRAVRKNRGSGRKGRNNVNLFSGVATCGYCNGRMMILDKGSGPKGGIYIRCENARRGNECLAAAWPLKHLETAFLTFVKELDLPSLIVDSSAKADRLIAEGRLAAISNELTKKKKMRESAFDLLSDESVGTDFVREKLADLASEIQRIEKEQVELKFQTMQEFARQDHSDLNIQKLVEAISAGPKENLDSRIGIADWIRRNVPKMMVYPDGHAGPQREIDRMASSLDPHVADLLNTSISFARRNEALVDGSHRRFVVGFGGHRFRAVEVDRNDPTKQIVMAFSNDENWGIERGG

SEQ ID NO: 27112 - DNA, 50 bp, Agrobacterium larrymoorei
  source 1..50: mol_type = genomic DNA
ttttcaataatccgccacagcatccagatgttgaggtggattaatttata

SEQ ID NO: 27113 - DNA, 40 bp, Agrobacterium larrymoorei
  source 1..40: mol_type = genomic DNA
gcccggtaaggtcggtatccagatcgtcgggttgccggat

SEQ ID NO: 27114 - DNA, 40 bp, Agrobacterium larrymoorei
  source 1..40: mol_type = genomic DNA
gcccggtaaggtcggtatcaagatcgtcgggttgccggat

SEQ ID NO: 27115 - DNA, 50 bp, Agrobacterium larrymoorei
  source 1..50: mol_type = genomic DNA
tttgtattactttgccatagcaccaagcatttgaaggtttataatttata

SEQ ID NO: 27116 - protein, 570 aa, Shewanella amazonensis
MSTSTSTPPQVVSYSRYSTKKQSKGFSLERQDENLKRWSDANGIPISELSFADLGISAFSGTAVREGLANMLEAVRQGAVPQGWWIAFERIDRLSRRGITETRRLIDQILQHGVNIVCIGEGIELRPDDDANDELKGSLMVAIHAHLAREQSAKASERIRSTAAAKRRRARETGAPIKKRLPYWLELSPDGSKYQFKAGRIETVRYIVKRRLEGRGFHGICAELNEMNTPPLTRMSKQWNDMAVAATVRNVALFGQYQPAITSEVEKVDSDRRRKMVRVAIPDGEPLDNYFPAVVDRATWDQIQSDSRTKMKAGRRGDNPVSGLTFCRHCGGTLPMKPASKISTNGTRHTYRYWTCRGAVDGKCDHGKGIKDLDQFVIKACRRIVPRTLGQGGGGQDPAAAFEYQSLLERRGKVTAQIATLDAAMADPELGAAALKHIARQIDVATANLEQVDAEIAAVEARQKADHDTTPEAVERLKQLEGDPVAYNLHLKTLVHRIVAGAVRLDDGEWSDVALLFRFTVELLNGQRIDVTVSRRNRWDKNPVEFYSHSEDATAGDVEQLYPWETEQDD

SEQ ID NO: 27117 - DNA, 50 bp, Shewanella amazonensis
  source 1..50: mol_type = genomic DNA
attcataccaatataaagtacattataatgtaattgacattgcacaaccc

SEQ ID NO: 27118 - DNA, 40 bp, Shewanella amazonensis
  source 1..40: mol_type = genomic DNA
ggtattggaaaacgctatcatgctgttgctggcactggac

SEQ ID NO: 27119 - DNA, 40 bp, Shewanella amazonensis
  source 1..40: mol_type = genomic DNA
ggtattggaaaacgctatcctgctgttgctggcactggac

SEQ ID NO: 27120 - DNA, 50 bp, Shewanella amazonensis
  source 1..50: mol_type = genomic DNA
attcttaactttacaaagtgcattctcatctcatttaatagtcacaacac

SEQ ID NO: 27121 - protein, 567 aa, Shewanella amazonensis
MSTSTPPQVVSYSRYSTKKQSKGFSLERQDENLKRWSDANGIPISELSFADLGISAFSGTAVREGLANMLEAVRQGAVPQGWWIAFERIDRLSRRGITETRRLIDQILQHGVNIVCIGEGIELRPDDDANDELKGSLMVAIHAHLAREQSAKASERIRSTAAAKRRRARETGAPIKKRLPYWLELSPDGSKYQFKAGRIETVRYIVKRRLEGRGFHGICAELNAMNTPPLTRMSKQWNDMAVAATVRNVALFGQYQPAITNEVEKVDSDGRRKMVRVAIPDGAPLDSYFPAVVDRATWDAIQSDSRTKMKAGRRGDNPVSGLTFCRHCGGTLPMKPASKTSTNGTRHTYRYWTCRGAVDGKCSHGKGIKDLDQFVIKACRRIVPRTLGQGGGGQDPAAAFEYQSLLERRGKVTTQIATLDAAMADPELGAAALKHIARQIDVATANLEQVDFEIAAVEARQKADQDTTPEAVERLKQLEGDPAAYNLHLKTLVQRIVAGAVQLDDGEWSDVALLFRFTVELLNGQRIDVTVSRRNRWDKNPVEFYSHSEDATTGDVELYPWETEGQD

SEQ ID NO: 27122 - DNA, 50 bp, Shewanella amazonensis
  source 1..50: mol_type = genomic DNA
attcataccaatataaagtacattataatgtaattgatattgcacaaccc

SEQ ID NO: 27123 - DNA, 40 bp, Shewanella amazonensis
  source 1..40: mol_type = genomic DNA
ggtgtttgaaaacgctatcatgctgttgctggcactggac

SEQ ID NO: 27124 - DNA, 40 bp, Shewanella amazonensis
  source 1..40: mol_type = genomic DNA
ggtgtttgaaaacgctatcctgctgttgctggcactggac

SEQ ID NO: 27125 - DNA, 50 bp, Shewanella amazonensis; identical to SEQ ID NO: 27120
  source 1..50: mol_type = genomic DNA

SEQ ID NO: 27126 - protein, 540 aa, Drancourtella sp An57
MLRQTTQQLITALYPRLSHEDELSGESNSISNQKRILEAYAKQNGFTNLKWYTDDGFSGANFQRPGFQSMLADIEAGLVGTVIVKDMSRLGRNYLQVGMYTEMIFPQKNVRFIAINDGVDSAQGENDFAPLRNIFNEWLVRDTSKKIRAVKRSKGMSGKPVTSKPVYGYLMDEDENFIIDEEAAPVVKQIYSLCLAGNGPTKIARMLTEQQIPTPGTLEYRRTGSTRRYHPGYECKWAANTVVHILENREYTGCLVNFKTTTQSYKCSKIIYNSEDKQAVFENHHEIIIDRDTWERVQELRKQRKRPNRYDEVGLFSGILFCADCGSVMYQQRYQTDKRKQDCYICGSYKKRTADCTAHFIRTDLLTEGVTENLRKVTSYAAKHETRFMKLLTEQTEDGSKRRNAAKKKELEAAEKRIGELSAIFKRLYEDSVAGRISDERFTELSADYEAEQKELKERAAVLQGELSRTLEATANAEKFMKVVRKYTSFEELTPTLLREFVEKIVIHESEALDGKRRGKLRRQEIEIYYSFVGKVELPD

SEQ ID NO: 27127 - DNA, 50 bp, Drancourtella sp An57
  source 1..50: mol_type = genomic DNA
ttacttctttatctcacatgagcaaatgctcatgtacggtaaagaagcgg

SEQ ID NO: 27128 - DNA, 40 bp, Drancourtella sp An57
  source 1..40: mol_type = genomic DNA
tcgtgacagcacttctgcaaaatcatagggctggtcgtat

SEQ ID NO: 27129 - DNA, 40 bp, Drancourtella sp An57
  source 1..40: mol_type = genomic DNA
tcgtgacagcacttctgcaagatcatagggctggtcgtat

SEQ ID NO: 27130 - DNA, 50 bp, Drancourtella sp An57
  source 1..50: mol_type = genomic DNA
tcacctcctaatacagcatgagcaagtgggaatgtatagccaagaagcag

SEQ ID NO: 27131 - protein, 533 aa, Pseudomonas aeruginosa
MTKKCFPYVRFSSTRQEDGSTRTRQNELIEAFVAKHGLEVDRHLEDAGTSAFHGKHAGSDGVLGQFLKEVRKGEIEKGSYLLIENFDRLSRDKIVRSNKIFTDLLFSGIKIVILDKNKIYDADNLDFGDWITALVEFERANAESQRKSDFSSKAWKLNRDKMHNGEIVTKKVPTWLKVENNTFIIDEVKIDRIRTLFRLSLSKGLQEATKEYNALYGEKLAIHQAQYLLGNRKLIGEHQPQKIHYNENGRLIRKDEGNPIPDYYPQVIDEELFLKVQSVITSRKPFSGRYSAQRYNVFRDLIFCRFCGGTIRYMNKGERDYFICTNSMTGKCGLKGQQSIRGKKVFGRFFKFTNGINIGTLLEENTNADEIKNELMKLENQKTKISNRLDDFKSQIKKMILDGEAIPETYNEIIVDLENSIIKLDDEIEIKNKELNKIISSFKSFYDLKEIDIEKIIYDKSQEAIEKRVQYNNELKNIIKKIQIDYLNDILHVEFSNGVNRHILNDELANEYNKDEIENSWASVVKSIAQKTN

SEQ ID NO: 27132 - DNA, 50 bp, Pseudomonas aeruginosa
  source 1..50: mol_type = genomic DNA
atggaaccttttgcagagcatacccagacatgctatgttattggttccac

SEQ ID NO: 27133 - DNA, 40 bp, Pseudomonas aeruginosa
  source 1..40: mol_type = genomic DNA
ccgcgcatagcagtatatgcagccatgctcgcaaccacgg

SEQ ID NO: 27134 - DNA, 40 bp, Pseudomonas aeruginosa
  source 1..40: mol_type = genomic DNA
ccgcgcatagcagtatatgctgccatgctcgcaaccacgg

SEQ ID NO: 27135 - DNA, 50 bp, Pseudomonas aeruginosa
  source 1..50: mol_type = genomic DNA
atggaacgtaggatagaatgttccctgacatcttttttagatggttctac

SEQ ID NO: 27136 - protein, 547 aa, Escherichia coli
MKLLVTYIRWSTKEQDSGDSLRRQTNLIDAFYSKHKNDYYLLPAHRYVDKGKSGFHQQHKAQGSDFRRMFENVMSGAIPEGSLIVVENFDRFSRADIDTAIDDVRQILRKGVSILTLGDGELYDKSALTDPVKLIKHIIIAERAHQESLVKQKRIAQVWNHKTQLARELKKPMGKQAPGWLELSEDGSHYIVDEDKASLVNIIYDKRLSGMSMFAICKWLNEQGYPTINQRKVRISKTKKPDGNWSALSVKHILTSRSVLGYLPAKISSEDRKTMLREEIEGFYPQIVTDSKFYAVQQLLEETGKGKTSSGEHWLYVNILKGLIRCKCGLVMTPTGIRKPVYQGTYRCNGNKESRCSYGTVSRKLLDTQLCSRLFSKLSQLHDEATDTAKLDELQRRLNTVDGELEKLTETLIQLPNITQIQEALRVKQEEKDELIVQLSREKARVKSVSSLDLSGLDMESVEGRTEAQIIIKRLVKEIVISGNEKLVDIYLHNGNMIRGFPLDGKDDHTLTLEEATDEMQSLDDMLIFGEPVTRIYPAGDMEEVDA

SEQ ID NO: 27137 - DNA, 50 bp, Escherichia coli
  source 1..50: mol_type = genomic DNA
ttgaatgtacgtgtttagctatgtaaaagtactagtattcttgccttaac

SEQ ID NO: 27138 - DNA, 40 bp, Escherichia coli
  source 1..40: mol_type = genomic DNA
atgtccgtacatggaataataaagcaccagaactttagcc

SEQ ID NO: 27139 - DNA, 40 bp, Escherichia coli
  source 1..40: mol_type = genomic DNA
atgtccgtacatggaataatcaagcaccagaactttagcc

SEQ ID NO: 27140 - DNA, 50 bp, Escherichia coli
  source 1..50: mol_type = genomic DNA
tcaaatgtattctcttagcaattttcaagtacaatatacaatgcctttat

SEQ ID NO: 27141 - protein, 547 aa, Escherichia coli
MKLLATYIRWSTREQDSGDSLRRQTNLIDAFYAKHKDDYYLLPAHRYVDKGKSGFHQQHKAQGSDFRRMFENVMSGAIPEGSLIVVENFDRFSRADIDTAIDDVRQILRKGVSILTLGDGELYDKSALTDPVKLIKHIIIAERAHQESLVKQKRIAQVWNHKTQLARELKKPMGKQAPGWLELSEDGSHYIVDEDKASLVNIIYDKRLSGMSMFAICKWLNEQGYPTINQRKVRISKTKKPDGNWSALSVKHILTSRSVLGYLPAKISSEDRKTVLREEIEGFYPQIVTDSKFYAVQQLLEETGKGKTSSGEHWLYVNILKGLIRCRCGLVMTPTGIRKPVYQGTYRCNGNKESRCNYGTVSRKLLDTQLCSRLFSKLSQLHDEATDTAKLDELQRRLNTVDGELEKLTETLIQLPNITQIQEALRVKQGEKDELIVQLSREKARVKSVSSLDLSGLDMESVEGRTEAQIIIKRLVKEIVVSGNEKLVDIYLHNGNMIRGFPLDGKDDHTLTLEEATDEMQSLDDMLIFGEPVTRIYPAGDMEEVDA

SEQ ID NO: 27142 - DNA, 50 bp, Escherichia coli; identical to SEQ ID NO: 27137
  source 1..50: mol_type = genomic DNA

SEQ ID NO: 27143 - DNA, 40 bp, Escherichia coli; identical to SEQ ID NO: 27138
  source 1..40: mol_type = genomic DNA

SEQ ID NO: 27144 - DNA, 40 bp, Escherichia coli; identical to SEQ ID NO: 27139
  source 1..40: mol_type = genomic DNA

SEQ ID NO: 27145 - DNA, 50 bp, Escherichia coli; identical to SEQ ID NO: 27140
  source 1..50: mol_type = genomic DNA

SEQ ID NO: 27146 - protein, 547 aa, Escherichia coli
MKLLVTYIRWSTREQDSGDSLRRQTNLIDAFYAKHKDDYYLLPAHRYVDKGKSGFHQQHKAQGSDFRRMFENVMSGAIPEGSLIVVENFDRFSRADIDTAIDDVRQILRKGVSILTLGDGELYDKSALTDPVKLIKHIIIAERAHQESLVKQKRIAQVWNHKTQLARELKKPMGKQAPGWLELSEDGSHYIVDEDKASLVNIIYDKRLSGMSMFAICKWLNEQGYPTINQRKVRISKTKKPDGNWSALSVKHILTSRSVLGYLPAKISSEDRKTVLREEIEGFYPQIVTDSKFYAVQQLLEETGKGKTSSGEHWLYVNILKGLIRCKCGLVMTPTGIRKPVYQGTYRCNGNKESRCNYGTVSRKLLDTQLCSRLFSKLSQLHDEATDTAKLDELQRRLNTVDSELEKLTETLIQLPNITQIQEALRVKQEEKDELIVQLSREKARVKSVSSLDLSGLDMESVEGRTEAQIIIKRLVKEIVVSGNERLVDIYLHNGNMIRGFPLDGKDDHTLTLEEATDEMQSLDDMLIFGEPVTRIYPAGDMEEVDA

SEQ ID NO: 27147 - DNA, 50 bp, Escherichia coli; identical to SEQ ID NO: 27137
  source 1..50: mol_type = genomic DNA

SEQ ID NO: 27148 - DNA, 40 bp, Escherichia coli; identical to SEQ ID NO: 27138
  source 1..40: mol_type = genomic DNA

SEQ ID NO: 27149 - DNA, 40 bp, Escherichia coli; identical to SEQ ID NO: 27139
  source 1..40: mol_type = genomic DNA

SEQ ID NO: 27150 - DNA, 50 bp, Escherichia coli; identical to SEQ ID NO: 27140
  source 1..50: mol_type = genomic DNA

SEQ ID NO: 27151 - protein, 547 aa, Escherichia coli; identical to SEQ ID NO: 16491

SEQ ID NO: 27152 - DNA, 50 bp, Escherichia coli; identical to SEQ ID NO: 27137
  source 1..50: mol_type = genomic DNA

SEQ ID NO: 27153 - DNA, 40 bp, Escherichia coli; identical to SEQ ID NO: 27138
  source 1..40: mol_type = genomic DNA

SEQ ID NO: 27154 - DNA, 40 bp, Escherichia coli; identical to SEQ ID NO: 27139
  source 1..40: mol_type = genomic DNA

SEQ ID NO: 27155 - DNA, 50 bp, Escherichia coli; identical to SEQ ID NO: 27140
  source 1..50: mol_type = genomic DNA

SEQ ID NO: 27156 - protein, 523 aa, Vibrio cyclitrophicus
MRFSRPEQAKGTSIERQSHFAEQYALEHGFELDKSLTMMDKGLSAFHGIHKKKGAFGQFLAAVSAGKVKSGSVLVVESLDRLSREDPLIAQSALSDLILSGITVVTAADNQVYSREEIQQNPFKLIMSLVVMIRANEESETKQRRSNAFLKSALNQYQTNGKVRRLGADPSWLDFNKDDDTYSFNERIEVIRQILGLYNQGFGSLKIARQLTEESILTLSGKRNAWGQTTVANIVKSHALYGMKRINVQGVDYDLEDFYPALITKSKWLALQQHRTKRSKSMHGRGETVHLITGHGKGFTTCGYCGGGLGAQTQKQYKRSGEYSKTVTRLHCLTHKETSSCCSSVFLEPIENAVLFAACIGVEPQSLVPTANNVNYSALIDEIENKVKHIVEQVTAGAPWDLFKDAHDRLTLEKQKLIKERDSQKPDVNQSDVQKWVEKLIELADKARADNKEARLKCRTLISSVCKSIVIQLRGHDLKSEPLITITFVTDEQFEFKVGKDGAVRFVDNDMAVNRRLKPLLTE

SEQ ID NO: 27157 - DNA, 50 bp, Vibrio cyclitrophicus
  source 1..50: mol_type = genomic DNA
tagttatgcactgtacatttgctctctgtctaatgtatagtgctaactta

SEQ ID NO: 27158 - DNA, 40 bp, Vibrio cyclitrophicus; identical to SEQ ID NO: 8008
  source 1..40: mol_type = genomic DNA

SEQ ID NO: 27159 - DNA, 40 bp, Vibrio cyclitrophicus
  source 1..40: mol_type = genomic DNA
aaaatagccgaatgcgccgagtgtccagtggatgtcttgc

SEQ ID NO: 27160 - DNA, 50 bp, Vibrio cyclitrophicus
  source 1..50: mol_type = genomic DNA
tagttttggggaaaatatttgcttagtgtctattttcttcccctaaacta

SEQ ID NO: 27161 - protein, 495 aa, Citrobacter freundii
MKQNGQAYSYIRFSSKKQEQGDSVRRQTELAEQYAHANNLILSDKNFQDLGISAFKEGNRPSLGDMLEAIEKGQIEQGSTIIIESLDRLSRQGIDVTQQIIKSILQHNVFIASLVDGLLLNKESVNDLVSVIRIALAADLAYKESEKKSQRLRETKRQQRQRALNGEVINKILPFWLERKEDKFHFSDRVDSVKRIIQLRREGFGTNKIAKALNDEGHRPLRSTGWNHTTVGKTINSVALYGAYQTSETTKDRKVILLDIIENYYPAVISKEEFMLLQSDQKQNKPGYKSEHNAFAGILKHECGGSLVRKFHVTSGKTYQYHVCANARDGKCSITKNFKNIEVALYRIMRKLKLEKRSNLDGALLVERDTIKLKIQELNDMLLTESKIPTSVIQTINNLEDKLHELEEKIKQQNSMIISERAFDLNLLQEIKDPQELNMMLKRVIEQITVYNIGKKWRIKVLYRNKHIQSFLWDGEKISFITDTKEILDLVNSWV

SEQ ID NO: 27162 - DNA, 50 bp, Citrobacter freundii
  source 1..50: mol_type = genomic DNA
catttccccctttgaaactatattgtgatattgttgcaaagaagcaaaat

SEQ ID NO: 27163 - DNA, 40 bp, Citrobacter freundii; identical to SEQ ID NO: 8058
  source 1..40: mol_type = genomic DNA

SEQ ID NO: 27164 - DNA, 40 bp, Citrobacter freundii
  source 1..40: mol_type = genomic DNA
cttactgccgaactgcatgaggacgttgctggaaactaac

SEQ ID NO: 27165 - DNA, 50 bp, Citrobacter freundii
  source 1..50: mol_type = genomic DNA
ccttacctcacataatattatattagtatattgtttttacgcagtaaaat

SEQ ID NO: 27166 - protein, 570 aa, Serratia proteamaculans
MNVMKAYLYCRISSGKQKDGYGIQRQSDAVLEYLSNSKEAEKLGYKLSPDHYEMLDPDLGKSGYHGYQFTKGALGRFKQRVADGEIACGALVIENVDRFSRAEEYTASEEFNFLIQRGIDIHEVETGIVYSSKISGTLSKLSHAIERAHGESERKSRMASKSWSNRHKKALEQGIALKTNHPRWLRIVDDHYEVLKEQLAIYIIIFERFLEGHGIAVLLDYLNENGILNNGKRWTRTSLHRILRDRRLIGYNKDNRIYPIAINEQMFKRVQDHFDSQDGSTKRRTTRKMRNVFNGMTKCGVCKSAMIANKNPHGKHHLYCVKKRGDKHACSASACRYEYVEKEVLKHLHNIDWNSVYSNKNKVSVDVQGKNTQLIDLARRVDELQKEMTGADHDMVLALVRSLKILRKEHQELKDELTIISTDVKPKFNFDISEVIEQKNVSLRQEINVLIKKTVHKIFVQKFSGHIYVNVEYYNTVLSHMLVLENLTGKLLANIAIIDTSNELRISSNGFSIWHDKTKDIWNVSDFKAIGSRDFFLALNHMSQFVDREVIDDLFDMWEMKSLGSVENMV

SEQ ID NO: 27167 - DNA, 50 bp, Serratia proteamaculans
  source 1..50: mol_type = genomic DNA
tagaatattttagttcttgattgcttgtagttatgtgctaaaatattctc

SEQ ID NO: 27168 - DNA, 40 bp, Serratia proteamaculans; identical to SEQ ID NO: 26078
  source 1..40: mol_type = genomic DNA

SEQ ID NO: 27169 - DNA, 40 bp, Serratia proteamaculans; identical to SEQ ID NO: 26078
  source 1..40: mol_type = genomic DNA

SEQ ID NO: 27170 - DNA, 50 bp, Serratia proteamaculans
  source 1..50: mol_type = genomic DNA
tacattattgtatttcctgattgattgcattcatttatcataatattttc

SEQ ID NO: 27171 - protein, 578 aa, Faecalibacterium prausnitzii
MSNDASLDINQKSNPVQTVAPPKEDNNMLRATDKITALYCRLSVEDTKEKGGKDDPSNSIQHQQIMLMEYAKSQHFPNPTYFIDDGYSGVEFNNRPGFQRMLAEIEAGHVEVVITKDLSRLGRNSSLTGLYINYTFPQYGVRYIAINDHFDTIDPNSTDNDIAGIKNWFNEFFAKDTSRKIRAVNKAKGERGERLTTNIPYGYKRNPDDPKAWIVDEEAAQVVKRIFALCMEGKGPSQIAALLEKEMVLNPTAYKQREGRKTPHQAPENEYRWHESTVAYILEYMEYTGCTVNFKTYTNSIWDKKQRENPMENRKIFYNTHPAIISLEVFDKVQEIRQQRHRRTATGKSNMFSGLVFCNDCKQKLYYSTTSYFEKRQDFFICSTHRANKDKCSGHYIRAVVLEQIVWKHIQEVVSVVTRYEAYFRSEMEQKLRMQSEESLRLSQKRLAQAEKRIGELDRLFIRIYEDNVAGRLDDEHFAMMSKNYTEEQKDLKAEVKGLQQQIHEQEQQAENIEQFVQRVKRNSTLTELTPYALRELVKAVYVDAPDKSSGKRRQKVHIEYDLVGYIPVDELLKAEQA

SEQ ID NO: 27172 - DNA, 50 bp, Faecalibacterium prausnitzii
  source 1..50: mol_type = genomic DNA
ttactgtcttaccagcagggagcttcgggcgtgtgccgataagacagtaa

SEQ ID NO: 27173 - DNA, 40 bp, Faecalibacterium prausnitzii
  source 1..40: mol_type = genomic DNA
catgaaaaaatccccgctttccggcggggatcttttgcaa

SEQ ID NO: 27174 - DNA, 40 bp, Faecalibacterium prausnitzii
  source 1..40: mol_type = genomic DNA
catgaaaaaatccccgcttatcggcggggatcttttgcaa

SEQ ID NO: 27175 - DNA, 50 bp, Faecalibacterium prausnitzii
  source 1..50: mol_type = genomic DNA
ttcttgtctcacaatcaggaagatataggcatgtggacaccagagagtaa

SEQ ID NO: 27176 - protein, 505 aa, Hungatella hathewayi
MNTLALYTRASNEDENLGESATIQNQRDLLYHYIRSKQEFKDWNVLEFQDDGWSGTTFDRPGIGKLLKLAGKEVQCIIVKDFSRFGRNLIEVGNYLDQIFPFLGVRFIAVNEGYDSNDNAGRTIGLDVSLKAMVYEMYSRDLSKKISSVKEEQMKSGHYAGSFAFYGYQKSKDSKSGLEIDPEAAGIVKRIFSLAASGVKTLQIAVLLNKEGILPPLSYRKQKKMDEHFQCPTATEHNIWTQARIAAIIRDERYTGVLVSKKKQRIDISTKKIKLNDRKEWIRVENAMDAIVTREEFGQAQEALVRRGNRNKVTPSEPFRGLLKCGICGKALDRIDCKNPYFRCVTGRFEPDSLCAEIRIERKELEQTVLSALKYQIQLMQENKPSDKSGSETTIRQNLEKIDGQMGKYKSNQMIQFERFAGGLIDREQFIMEKKKIAEQISALQAEKEELFRQLQNVEQLAQVEEHDLGRYAFVETLSRELLVALIQEIRIQSDHVIEINWNFR

SEQ ID NO: 27177 - DNA, 50 bp, Hungatella hathewayi
  source 1..50: mol_type = genomic DNA
tttatgtatgtcttgacacaagcaaacgcctgagttataataagcataac

SEQ ID NO: 27178 - DNA, 40 bp, Hungatella hathewayi
  source 1..40: mol_type = genomic DNA
tatcctcggattcccggcaaatgagatcgtagtgccgatc

SEQ ID NO: 27179 - DNA, 40 bp, Hungatella hathewayi
  source 1..40: mol_type = genomic DNA
tatcctcggattcccggcaattgagatcgtagtgccgatc

SEQ ID NO: 27180 - DNA, 50 bp, Hungatella hathewayi
  source 1..50: mol_type = genomic DNA
tttatgtatgacaccaatcaatcaatggttttagttctattaagtataac

SEQ ID NO: 27181 - protein, 505 aa, Hungatella hathewayi; identical to SEQ ID NO: 27176

SEQ ID NO: 27182 - DNA, 50 bp, Hungatella hathewayi; identical to SEQ ID NO: 27177
  source 1..50: mol_type = genomic DNA

SEQ ID NO: 27183 - DNA, 40 bp, Hungatella hathewayi
  source 1..40: mol_type = genomic DNA
tattctcggctttccggctaatgagatcgtggtgccgatc

SEQ ID NO: 27184 - DNA, 40 bp, Hungatella hathewayi
  source 1..40: mol_type = genomic DNA
tattctcggctttccggctattgagatcgtggtgccgatc

SEQ ID NO: 27185 - DNA, 50 bp, Hungatella hathewayi; identical to SEQ ID NO: 27180
  source 1..50: mol_type = genomic DNA

SEQ ID NO: 27186 - protein, 504 aa, Microbacterium hominis
MTKSELVDLYLRLSVDREGKDSLERQEADLRAWAERSGLTVRKVWRDAGISGYKDVARADFDAAISAVSNGEVGTLAVWKLDRLSRKGAGQVGLVLDAVEKPGGRIFFLQDNLDSSVSGHRMVIVVVSEQARAESANTVLRVKAKIAADAAKGVPKKGTRPFGWESDGITIRESEALHVREAVRAYLSGERSLIQTAHLWNELGILTDGMQRPRRGRGGEEARMPRPYWTATTVRNVLWRERNAGLLVHHGAIMPESRIQPIITTAELEELRSRAKAGTPVSERAQSFLGGILRCACGAPMHHSVAYSQRKGGPRNTYAVYACSQKLYDRTQKHATVQAHIADQKVSLDVLAALALGVVKEDEAPAYAERYREIVHRLTLIDEQEARAEDALVEGLGDAKRLKGKLAALKAERAELHEERKRAEADRAGANVFRVIAKMREVIDAVAWSPDTPLSEIEEWALEEVSKAWDGVPIVDRQALIRARFRVSVRLGGRGAERITTSPR

SEQ ID NO: 27187 - DNA, 50 bp, Microbacterium hominis
  source 1..50: mol_type = genomic DNA
cataggtgacttgcaactaggggtcagacccttgtagtttgtcacctatg

SEQ ID NO: 27188 - DNA, 40 bp, Microbacterium hominis
  source 1..40: mol_type = genomic DNA
catcagcgtgaccagcacccagccgggaacgtctcccgtc

SEQ ID NO: 27189 - DNA, 40 bp, Microbacterium hominis
  source 1..40: mol_type = genomic DNA
catcagcgtgaccagcacctagccgggaacgtctcccgtc

SEQ ID NO: 27190 - DNA, 50 bp, Microbacterium hominis
  source 1..50: mol_type = genomic DNA
ccgaggtgatcaccaacaatgagttacacccttgtacaacagaacctgtg

SEQ ID NO: 27191 - protein, 494 aa, Bacillus cereus
MKEIMNVAIYLRLSRDEENKGIDSILANHREKLIQFCQQSNWKYEIFQEIASSRTIELREQLVDMLEHVKQNHYDAVVVMDVDRLSRNEFDAPQIFKILSDSNTAIVTPGKTYDWSKDEDNLLLGIQSLVAAQEYKQIKKRMTAGKRSASEKGLWVHGIPPFGYDKDPETRKLVPNEDAKHVQFIFNSIVNHGKTVSDVYHELNKMGVKTKNNSTFAFNSVIRIINNEAYKGTIVSNKYLDKNTMRPKNEWYYVKNVHPAIVDEATWEKANKIVNTYSFSAPRSRNKIYPTTKLIFCGNCGRVQGAQMAGTGKMYLKVCQRCKNRTFLYEPILKFIKERVKKRIPDVLKQITEIEQKDNSAEIEYKKQQIQKRIGIAQKAIEKIKEAYELDEYTIADFKERKAKREDEIKQLKAELLQIKLQNPKDKIADLTEIKKRIEHLIQTWQCLDGEGLTDEEVNRNLHFIIERIEWTYGKTDETPHLNIVWKTDESYAK

SEQ ID NO: 27192 - DNA, 50 bp, Bacillus cereus
  source 1..50: mol_type = genomic DNA
acatagtctctaaattcgtaacaaacaagacctgaatttagggactattt

SEQ ID NO: 27193 - DNA, 40 bp, Bacillus cereus; identical to SEQ ID NO: 22328
  source 1..40: mol_type = genomic DNA

SEQ ID NO: 27194 - DNA, 40 bp, Bacillus cereus
  source 1..40: mol_type = genomic DNA
actcgtgtttactggaccgcatggatctgggaagacgacg

SEQ ID NO: 27195 - DNA, 50 bp, Bacillus cereus
  source 1..50: mol_type = genomic DNA
acatagcctacgtgttcgtgacaacaatgatctggtcaattggaattgtt

SEQ ID NO: 27196 - protein, 558 aa, Clostridium butyricum
MIRPDKKVGSYIMKENLIKVACYCRVSTKAEEQEQSFEAQQKYFKEKLNAKNGYNLVKIYADKGVSGTDFSKRIEFNKMLEECGIIKKEVKARETEIRKKYISVDYVADANVKPKFTLIYVKDSSRFARNTEVSRIISRLRDKGVYVYFEDLNKSTENPNEKMLIDFMFSMAEQESISRSTKVRFGNKQSAKDGKVRSIRLYGYKYNKEENSLRIIEEEAKTVKLIFKLRLDGYGGRAIVSELKKLGIKNRKGNDWGANTINRMLQNPTYCGKVVRNRWYSSRMYGKDIVALNDSSEWIMSDTDKVDKIINEEIYNQVQELIENNRVKVGRQRGVYHGYSELSRKIKCEQCGKYYVRNTDKGRIFYNCSTKKQHGVNKCSSRNIQQREIEELIEQYLHDGEYRKLTENSINLLIEKEKNKKATLYIGNNKEEIERINGEIVERKNRLSKLIDVFLDDDAEGATEIFKDKKKELTDRIHDLELELNKLTIGDKEREQQLNNMNEYIKILEEAYRIIPDEISMEDFINEYLYEIRVLEDGGLELVTYTHKGFEEIMSLMD

SEQ ID NO: 27197 - DNA, 50 bp, Clostridium butyricum
  source 1..50: mol_type = genomic DNA
accatgattatgtacctatatattataatattatgatacattgtcatgct

SEQ ID NO: 27198 - DNA, 40 bp, Clostridium butyricum
  source 1..40: mol_type = genomic DNA
agctggaaaacataatattatactgtatggagaaccggga

SEQ ID NO: 27199 - DNA, 40 bp, Clostridium butyricum
  source 1..40: mol_type = genomic DNA
agctggaaaacataatattgaactgtatggagaaccggga

SEQ ID NO: 27200 - DNA, 50 bp, Clostridium butyricum
  source 1..50: mol_type = genomic DNA
tacatgattctacatcactttattgaaatatcatgacagcctggcatggt

SEQ ID NO: 27201 - protein, 583 aa, Pseudomonas koreensis
MSAKAYSYIRFSSPEQAKGDSYRRQKDAAVRYCQEHGLELATTTEYTFLDKGRSAYSGRNLDDEGQLRRFLDLVENGTIESGSYLLVESLDRLSREKVTTALPRFMDLLNRGIRVVTLSDGRLYTEEFNELDLIISIVHMSRAHNESAIKGDRVSAAWANKRVLARSDKTPLGKACPYWLELVDGRYQPITNRVETVRLIFELAIQGYGQGSIPRILNERGIPVFGSRNRNHSGAWGSSSVSKLLNNRALLGEYQPTHMVDGRRVPDGEPVTGFFPPVIEESVFYQAQAVRAERRVHRAGNQSDRFNVFQGIAKCGACGDAMHLVNKGRPPKGATYLQCHSARKGVCKNGYVRVERAERALREVLAKVDSLSLVQASEGQTAKELAALKGKTQEVNERLTKAIGFLSEAPSRALAVLVQTLEGELAELKKEEQKCQELLAVNQVTSKKDFFAKLDLVSFEGRHAANSLLKRLAIVVTMSIAKEHQSYSAIKDGILQLQIMQYLEGIVILAANEGVLDLQILQGELSPTERAAWLQWFEIRRNGLPAGAIEQIRARLQNIDLSKVRFKGLPDEFKKVIPVRNPE

SEQ ID NO: 27202 - DNA, 50 bp, Pseudomonas koreensis
  source 1..50: mol_type = genomic DNA
ggttttgtatcattacacaacctgttcaagttatgttaggttacaaaaca

SEQ ID NO: 27203 - DNA, 40 bp, Pseudomonas koreensis
  source 1..40: mol_type = genomic DNA
agcgggggcgcacaacttgttgttcagcgggcctccggga

SEQ ID NO: 27204 - DNA, 40 bp, Pseudomonas koreensis; identical to SEQ ID NO: 27203
  source 1..40: mol_type = genomic DNA

SEQ ID NO: 27205 - DNA, 50 bp, Pseudomonas koreensis
  source 1..50: mol_type = genomic DNA
atttttgtacagctagacaatgtgtttaagataagtgttactacaaaaga

SEQ ID NO: 27206 - protein, 583 aa, Pseudomonas putida
MSAKAYSYIRFSSPEQAKGDSYRRQKDAAVRYCLEHGLELATTKEYTFLDKGRSAYSGRNLDDEGQLRRFLDLVENGTIESGSYLLVESLDRLSREKVTTALPRFMDLLNRGIRVVTLSDGRLYTEEFNELDLIISIVHMSRAHNESAIKGDRVSAAWANKRVLARSDKKPLGRACPYWLELVDGHYQPIANRVETVRLIFELAIQGYGQGSIPRLLNERGIPVFGSRNRNHSGAWGSSSVSKLLNNRALLGEYQPTHMVDGKRVNDGEPVTGFFPPVIEESVFYQAQAARAERRVHRAGNQSDRFNVFQGIAKCGACGDAMHLVNKGRPPKGATYLQCHSARKGVCKNGYVRVERAERALREVLAKVDSLSLVQASEGQTAKELAALKGKTQEVNERLAKAIGLMTEAPSRALAVLVQTLEGELAELKKEEQKCQELLAVNQVISKKDFFAKLDLVSFGGRHAANSLLKRLSIVVTMSISKAHQSYSAIKDGIPQLQIMQYLEAMVIIAANESVLDLQVLQGELSPTERAAWLQWFEIRRNGLPAGAFERIKAKLRNIDLSKVRFKGLPDQFKKVIPVRNPE

SEQ ID NO: 27207 - DNA, 50 bp, Pseudomonas putida
  source 1..50: mol_type = genomic DNA
tgttttgtatcattacacaacctgctcaagttatgttaggttacaaaaca

SEQ ID NO: 27208 - DNA, 40 bp, Pseudomonas putida
  source 1..40: mol_type = genomic DNA
ggctggggcgcacaacctgctattcaccgggccacccggc

SEQ ID NO: 27209 - DNA, 40 bp, Pseudomonas putida
  source 1..40: mol_type = genomic DNA
ggctggggcgcacaacctgttattcaccgggccacccggc

SEQ ID NO: 27210 - DNA, 50 bp, Pseudomonas putida; identical to SEQ ID NO: 27205
  source 1..50: mol_type = genomic DNA

SEQ ID NO: 27211 - protein, 549 aa, Anaerotruncus colihominis
MTTTKNYPDNITALYARLSQEDALDGESNSIANQKKILLKYAKDNGFPNPTFFIDDGVSGVTFDRPGWNEMIRLSEAGKVKTVIVKDMSRMGRDYLKVGYYTESFFAERDIRYIAINDGVDSEKGDNEFTPFRNLFNDFYARDTSKKIRTVMRSKGNAGEHLCTNPPYGYRKYPDDKKKWIVDEEAAAVVKKIFDLCIAGKGPMQIAKALTADKVLTVKAYYAKRDGKAMPDNLYRWDYKSIAGILERPEYTGCTVNFKTYSKSHKLKKRLQNAPENYRIFPNTQPAIIEEQVFERVQELRANKRRPTKTGRQGLFSGLLYCADCGEKLYFCTTNSFTPKQEHYVCSNYKSNTGTCSAHFIREETLKLFVLQRIFDVTAMFFDDIQSFQNMVYQQRFEEAEKAVKWQKKELEQARKRIAELDRIFKRIYEDDINGTISHERFLKLSAEYEAEQKELTEFVKLEQAAVDTYEQDRTDFDSFAAVIRKYVGIRELTPTIVNEFVKKIIVHAPDKSSGHRRQKIEIVWNFIGELEQDEDKQTVERQRKSRTA

SEQ ID NO: 27212 - DNA, 50 bp, Anaerotruncus colihominis
  source 1..50: mol_type = genomic DNA
ttacttccttatgggcgtgtgccattagctgaatgccgataaggaagttt

SEQ ID NO: 27213 - DNA, 40 bp, Anaerotruncus colihominis
  source 1..40: mol_type = genomic DNA
ggcaaaaaggctcccgcccttgggcgggagcctttttgct

SEQ ID NO: 27214 - DNA, 40 bp, Anaerotruncus colihominis
  source 1..40: mol_type = genomic DNA
ggcaaaaaggctcccgcccgggggcgggagcctttttgct

SEQ ID NO: 27215 - DNA, 50 bp, Anaerotruncus colihominis
  source 1..50: mol_type = genomic DNA
tttcttaatagtcgccgtttcccaggagctcaaggctcaggtggaagttt

SEQ ID NO: 27216 - protein, 465 aa, Staphylococcus epidermidis
MKVAIYTRVSSYEQATEGYSIHEQERKLKAFCEVQNWHDFKVFTDAGVSGGSMNRPALKRIMDNLEYYDLVLVYKLDRLTRNVKDLLEMLETFEKYNVAFKSATEVFDTTTAIGKLFITMVGAMAEWERATIRERALFGSRAAVREGNYIREAPFCYDNVDGKLVPNKHKWVIDYLVEQFKHGVSGNEIARQMNVKKVNVPKIKKWNRTSIIRLMKNPVLRGHTKYGDMYIENTHEPVLSESDYKRITDVIENKTHRSKVKHHAIFRGVLTCPQCHNKLHLYAGKITDKKGYSYEVRRYKCDTCSKDKNVQTISFNESEIEDKFIELLKTYDMNKFKVDIVEESTPKLDYDIDKIMKQREKLTRSWSLGYIEDDEYFSLMDETKEILDEVERAGTEVESTQTVTNEQLNMIDNILIKGWSKLNVEQKEELILSTVKEIAFDFVPRKYNENGKVNTLNIREITFKF

SEQ ID NO: 27217 - DNA, 50 bp, Staphylococcus epidermidis
  source 1..50: mol_type = genomic DNA
aatggtagtagtgttacagggtaggtggtgcttgtaacactatttttatg

SEQ ID NO: 27218 - DNA, 40 bp, Staphylococcus epidermidis; identical to SEQ ID NO: 5678
  source 1..40: mol_type = genomic DNA

SEQ ID NO: 27219 - DNA, 40 bp, Staphylococcus epidermidis
  source 1..40: mol_type = genomic DNA
cataaatggaacaactaattttgcaccggttcctcccata

SEQ ID NO: 27220 - DNA, 50 bp, Staphylococcus epidermidis
  source 1..50: mol_type = genomic DNA
actggtagtaacactacagagtttttggtgtttgtggccttaattttttt

SEQ ID NO: 27221 - protein, 436 aa, Clostridium innocuum
MKVFGYARRSSSEKSKSNYSIESQKRVCNELAARDNRTIEKWYIDEGYSGTTLKRPHMQEMLKAIATANQEIIIYVWLASRLSRNANHCNSLRYVFSKYNVTVISDNRDWASLEDIALHPDKTIGPRIITLSDETEVHRDRKRTRIGLTTSAYKGNYTKGGKTPPTGYLFKNNPGENARGRKVEIDATYVETMLYILTQVHDHKRSLDSLAIELDFKQACGVHWSYTKIYKAVTDPIIYGRLLTSYVDIQDHSPAYCSQKYYEEIQKILHGRRKEYHYKYLFKNLIKCGDCDCWCSEIPTIHYPRNGNKKGRRVYKYYYCPCCKQRINEQVLLHKMIHHINAILDETTNFDVVEDISRRIGKLEKRLEFLDIEYEEGYLDDDSYIEERKKLLSKKRNLDKDMKRLRNKAIKKFNEYTYSEQKQIIKRSFFCISVDL

SEQ ID NO: 27222 - DNA, 50 bp, Clostridium innocuum
  source 1..50: mol_type = genomic DNA
tcgctttatcatccgttctccctccattatgagtaagatttctgctcaga

SEQ ID NO: 27223 - DNA, 40 bp, Clostridium innocuum
  source 1..40: mol_type = genomic DNA
cgattctcatcacccgctccatataccaaacaagtcgata

SEQ ID NO: 27224 - DNA, 40 bp, Clostridium innocuum; identical to SEQ ID NO: 27223
  source 1..40: mol_type = genomic DNA

SEQ ID NO: 27225 - DNA, 50 bp, Clostridium innocuum
  source 1..50: mol_type = genomic DNA
gggctttggcaacagttctccctacatgatgagaaaggaggttgctcaaa

SEQ ID NO: 27226 - protein, 453 aa, Clostridium scindens
MMGKIIRCAIYDRVSTDIQVQQGLSLDTQKELLTEYAKSHGYEIVDYYIDEGLTARKKLQNRKDFMRLLDDIKANKIDIVLVTKLDRWFRNVKDYHNTQAILEEHNCNWKTILEDYDTSTADGQLKINIMLAVAQNESDRTSERIKVVFEHKKRNQEHLNGPIPFGYKNVDKHLAKDEATKSITDDIFRYYFTCYSKRATIFYSLEKYGDRSPSKYQVDRMLTSEVYAGMRYGRPGYCEPYITPEQHEKILRICQSKTYPGTKVPYLFSQLVKCPHCGATMTGYTKRHTCKDGSRTEHKRYRCEKKLTKHTGPCISESVVEEYMLAHVYPELQHCIYEVKSLQQKAAKKKDSTYRIKAELDRLNILFQKGRITMEYYDEQYEKLEKTLEKERQDSKIITVESYRPIETKLNGNWRDVYERLDYSHKKTFWKSIIEEIYIDKDTHKICGFKFLL

SEQ ID NO: 27227 - DNA, 50 bp, Clostridium scindens
  source 1..50: mol_type = genomic DNA
tggtgtagtaaactatataattcagttgaattatgatgaatactacacca

SEQ ID NO: 27228 - DNA, 40 bp, Clostridium scindens
  source 1..40: mol_type = genomic DNA
agggcaggctgactttacggttgaattcgagccaggcgcg

SEQ ID NO: 27229 - DNA, 40 bp, Clostridium scindens
  source 1..40: mol_type = genomic DNA
agggcaggctgactttacgcgtgaattcgagccaggcgcg

SEQ ID NO: 27230 - DNA, 50 bp, Clostridium scindens
  source 1..50: mol_type = genomic DNA
tggtctatttctgcatagaaatgacgtgaaatgtgatacacactaaaaca

SEQ ID NO: 27231 - protein, 532 aa, Vibrio sp F13
MRISEELQALYNSTFGQGETGTVTAKATVHSYIRFSSSIQEQGDSITRQVAATKQWAASKGLEVSEQSFSDLGISGYKQNAKRDGLDQLLEAIETDAIKRGDWVSIEKFDRLSRQGIRHTTKLIERILDSDVNLVAVHDNLELTKDSLDDPVKVIQIAVYADTAHKQSEEKSYRVRAAKASQREAALSGEVTKRRLPWWISRDNDKYVLNENAEHVKAMIEMRLAGNGWRSIAKHFNEQQVLSRTGKKWSDNAIKCMITNRAVYGSYEMTDGNIVDNYYDAICSYSDWKILNSKYQNYAGGKSKTNAISGLVRCSCGSAMSLKMQSRTTKTTTHHYRTWICRASTAGACDNTGSVRDLDVIIKNVCGKLKYKKLGKAAKNNSVEIERTRDRLDEIRALMTDVNSAISVSELAVMAGSLQSELTKLLAQELEETTRDELKQLKTIADDTQWNVKAKQLIRSCTVTRKSKNVWHIKIIQKNSYVVNATIMRESQRKEIKVFYGNKEAQVDFRDEVTKTLFDGEEIGSYVNHETN

SEQ ID NO: 27232 - DNA, 50 bp, Vibrio sp F13
  source 1..50: mol_type = genomic DNA
gattgaactaaagcgaattatacagtaatgtaattcgaatgtgatataac

SEQ ID NO: 27233 - DNA, 40 bp, Vibrio sp F13
  source 1..40: mol_type = genomic DNA
ggctggggcgagattaaccgtgattcttttcgatggaaac

SEQ ID NO: 27234 - DNA, 40 bp, Vibrio sp F13
  source 1..40: mol_type = genomic DNA
ggctggggcgagattaacctagattcttttcgatggaaac

SEQ ID NO: 27235 - DNA, 50 bp, Vibrio sp F13
  source 1..50: mol_type = genomic DNA
gattgatcggtgtagaaatagacatagatgtaaatgcagatatatataac

SEQ ID NO: 27236 - protein, 485 aa, Streptococcus agalactiae
MYKIGIYMRLSKEDYEKNEESNSIKNQRQLILSYIDKNFSDFCVDNKIEYIDDGYSGMNTNRPAFERLMEDIRDLNINCIIVKDLSRFSRDYIETGNYLENIFPFLGIRFISINDGFDSKDNCNGTIEIDTQFKSLLYDYYSKELSEKIKLTLNSLKSKGKIINEAPFGYVKDPKNKYKIIKDDISAKVVRKVFDMILEGHSQGSIAKNFNKEKYLTGSERKRVLRGESLENYKKILWTTGQISRILRNESYTGTFLYNKTYKTPIRKSIPRPKEEWGRIENAFEPIIFKEEFNKVQDILNQRSFPAHNDARDVDSPLRLKVRCGVCGHKMKFDYRAVVGKNEKKYDCRFRCRVCSLNSKSNSISSKTVESYVLESLKRRGVKLEERKTIKSKKVDQGKVNALKFEIQKNYELYLDSKLTREEFLVIKNNINEQLSSLKKESETKDKLENITMCNTDLKLTNEIVEDNIKEIIVDASKNIEIVYK

SEQ ID NO: 27237 - DNA, 50 bp, Streptococcus agalactiae
  source 1..50: mol_type = genomic DNA
gcaataacttgacacaatagggtaaatctacacttttgcacattgtagga

SEQ ID NO: 27238 - DNA, 40 bp, Streptococcus agalactiae
  source 1..40: mol_type = genomic DNA
ggaccaactggcgcaggtaaaacgacaattgttaatttat

SEQ ID NO: 27239 - DNA, 40 bp, Streptococcus agalactiae
  source 1..40: mol_type = genomic DNA
ggaccaactggcgcaggtagaacgacaattgttaatttat

SEQ ID NO: 27240 - DNA, 50 bp, Streptococcus agalactiae
  source 1..50: mol_type = genomic DNA
gcaataattaggtgtaaaatagttgatccaaactttgaaggattgtagaa

SEQ ID NO: 27241 - protein, 574 aa, Rhodococcus erythropolis
MNEASAQMSDNVAGDYGKVAVSYIRVSTKEQAERDGDPEGYSIPAQREANRRKAAAKEAMIVEEFVERGESAKHADSRPELQRLLRYLKDHRVDYVIVHKVDRLARNRLDDTQIHWAIKQAGAELVSATENIDETPSGMLLHGIMSSIAEFYSRNLASEVHKGMEQKAKTGGTPGRAPLGYLNVRKVNSEGVEVRTVEVDPARADHITWAFSAYATGAWTLKTMAAELEHRGLTTRPPPKLPGRPIKYNSLYRILTTPYYKGEVVYRGVSYPGRHRPLIDEVTWSRVQDVLTSHATGEKQREFPHYLKSSVFCGKCSSRLIITNAKNPSGKIYPYFVCLGRHQKTNNCQQKAVLIRVVEELVEDHYRTVQLDRRLADQIEAMVHDDLQSFRQAADTERRALSTQKERLESERMRLLQAHYAGAVPVDLLKQEQDRIARSLAGIEQRLDASAMQFDAFDASLRRAIDYAVNCSVGYRHAGSLPGGSQVRRLFNQAFFVKILVDEDTVRVELAEPFRTLLGAEAAIAARRHAQVAAADSEVDVVDAAPESAPSATDESENEKPTTRVVGLKLATLV

SEQ ID NO: 27242 - DNA, 50 bp, Rhodococcus erythropolis
  source 1..50: mol_type = genomic DNA
ggtttgaaattggctactttggtgctcctacgtgaatccgtttcgaacaa

SEQ ID NO: 27243 - DNA, 40 bp, Rhodococcus erythropolis
  source 1..40: mol_type = genomic DNA
tgaatcaaatcttgtggtgcccccggcaggattcgaacct

SEQ ID NO: 27244 - DNA, 40 bp, Rhodococcus erythropolis
  source 1..40: mol_type = genomic DNA
tgaatcaaatcttgtggtgggcccggcaggattcgaacct

SEQ ID NO: 27245 - DNA, 50 bp, Rhodococcus erythropolis
  source 1..50: mol_type = genomic DNA
ggtctgaaacaagaagctctggagggtctaagggaagcaggttagaacaa

SEQ ID NO: 27246 - protein, 495 aa, Klebsiella michiganensis
MKQNGQAYSYIRFSSKKQEQGDSVRRQTELAEQYANANNLILSDKNFQDLGISAFKEGSRPSLGDMLEAIEKGQIEQGSTIIIESLDRLSRRGIDVTQQIIKSILQHNVFIASLVDGLLLNRESVNDLVSVIRIALAADLAYKESEKKSQRLRETKGQQRQRALNGEVINKILPFWLERKQDKIVFSDRLDTVKRIIELRRKGLGTNKIARTLNDEGHKPLRSAGWNHTTVGKTINSVALYGAYQTSETTKDRKVILLDIIENYYPAVISKDEFILLQSDQKQNKPGYKSEHNAFAGILKHECGGALVRKFHVVSGKTYQYHVCANARDGKCHVTKNFKNIEVALYRIMKELKVEKNTNFDQTLLAERDTIKAKIQRLNDVLMEFSESPRSVIQTIHNLEKKVEELEAKIKMQNNMLISEQAFDFNLLQEIQQPQELNMMLKRIIENITIYNIGKKWRIKVLYRNRNVQSFIWDGEKTSFISDTKKILDLANSWI

SEQ ID NO: 27247 - DNA, 50 bp, Klebsiella michiganensis
  source 1..50: mol_type = genomic DNA
tattcccctctttgaaactgcatggtaatattgttgcaaagaagcaaaat

SEQ ID NO: 27248 - DNA, 40 bp, Klebsiella michiganensis; identical to SEQ ID NO: 4508
  source 1..40: mol_type = genomic DNA

SEQ ID NO: 27249 - DNA, 40 bp, Klebsiella michiganensis; identical to SEQ ID NO: 26814
  source 1..40: mol_type = genomic DNA

SEQ ID NO: 27250 - DNA, 50 bp, Klebsiella michiganensis
  source 1..50: mol_type = genomic DNA
tattcccatgacaaaaactccattaatataattttggaacaaagtgaaaa

SEQ ID NO: 27251 - protein, 495 aa, Raoultella ornithinolytica
MKQNGQAYSYIRFSSKKQEQGDSVRRQTELAEQYAHANNLILSDKNFQDLGISAFKEGNRPSLGDMLEAIEKGQIEQGSTIIIESLDRLSRRGIDVTQQIIKSILQHNVFIASLVDGLLLNRESVNDLVSVIRIALAADLAYKESEKKSQRLRETKGQQRQRALNGEVINKILPFWLERKQDKIVFSDRLDTVKRIIELRRKGLGTNKIARTLNDEGHKPLRSAGWNHTTVGKTINSVALYGAYQTSETTKDRKVILLDIIENYYPAVISKDEFILLQSDQKQNKPGYKSEHNAFAGILKHECGGALVRKFHVVSGKTYQYHVCANARDGKCHVTKNFKNIEVALFRIMKELKVEKNTNFDQTLLAERDAIKAKIQRLNDVLIEFSEPPRSVIQTIHNLEKKVEELEAKIKIQNSMIISEQAFDFNLLQEIQQPQELNMMLKRIIENITIYNIGKKWRIKVLYRNRHVQSFIWDGEKTSFISDTKKILDLANSWI

SEQ ID NO: 27252 - DNA, 50 bp, Raoultella ornithinolytica; identical to SEQ ID NO: 27247
  source 1..50: mol_type = genomic DNA

SEQ ID NO: 27253 - DNA, 40 bp, Raoultella ornithinolytica; identical to SEQ ID NO: 4188
  source 1..40: mol_type = genomic DNA

SEQ ID NO: 27254 - DNA, 40 bp, Raoultella ornithinolytica
  source 1..40: mol_type = genomic DNA
cttactgccaaactgcatgaagacgttgctggatactagc

SEQ ID NO: 27255 - DNA, 50 bp, Raoultella ornithinolytica; identical to SEQ ID NO: 27250
  source 1..50: mol_type = genomic DNA

SEQ ID NO: 27256 - protein, 495 aa, Klebsiella pneumoniae
MKQNGQAYSYIRFSSKKQEQGDSVRRQTELAEQYAHANNLILSDKNFQDLGISAFKEGNRPSLGDMLEAIEKGQIEQGSTIIIESLDRLSRRGIDVTQQIIKSILQHNVFIASLVDGLLLNRESVNDLVSVIRIALAADLAYKESEKKSQRLRETKGQQRQRALNGEVINKILPFWLERKQDKIVFSDRLDTVKRIIELRRKGLGTNKIARTLNDEGHKPLRSAGWNHTTVGKTINSVALYGAYQTSETTKDRKVILLDIIENYYPAVISKDEFILLQSDQKQNKPGYKSEHNAFAGILKHECGGALVRKFHVVSGKTYQYHVCANARDGKCHVTKNFKNIEVALFRIMKELKVEKNTNFDQTLLAERDAIKANIQRLNDVLIEFSEPPRSVIQTIHNLEKKVEELEAKIKMQNSMIISEQAFDFNLLQEIQQPQELNMMLKRIIENITIYNIGKKWRIKVLYRNRHVQSFIWDGEKTSFISDTKKILDLANSWI

SEQ ID NO: 27257 - DNA, 50 bp, Klebsiella pneumoniae; identical to SEQ ID NO: 27247
  source 1..50: mol_type = genomic DNA

SEQ ID NO: 27258 - DNA, 40 bp, Klebsiella pneumoniae; identical to SEQ ID NO: 1418
  source 1..40: mol_type = genomic DNA

SEQ ID NO: 27259 - DNA, 40 bp, Klebsiella pneumoniae; identical to SEQ ID NO: 7439
  source 1..40: mol_type = genomic DNA

SEQ ID NO: 27260 - DNA, 50 bp, Klebsiella pneumoniae; identical to SEQ ID NO: 27250
  source 1..50: mol_type = genomic DNA

SEQ ID NO: 27261 - protein, 495 aa, Klebsiella aerogenes
MKQNGQAYSYIRFSSKKQEQGDSVRRQTELAEQYAHANNLILSDKNFQDLGISAFKEGNRPSLGDMLEAIEKGQIEQGSTIIIESLDRLSRRGIDVTQQIIKSILQHNVFIASLVDGLLLNRESVNDLVSVIRIALAADLAYKESEKKSQRLRETKGQQRQRALNGEVINKILPFWLERKQDKIVFSDRLDTVKRIIELRRKGLGTNKIARTLNDEGHKPLRSAGWNHTTVGKTINSVALYGAYQTSETTKDRKVILLDIIENYYPAVISKDEFILLQSDQKQNKPGYKSEHNAFAGILKHECGGALVRKFHVVSGKTYQYHICANARDGKCHVTKNFKNIEVALFRIMKELKVEKNTNFDQTLLAERDAIKANIQRLNDVLIEFSEPPRSVIQTIHNLEKKVEELEAKIKMQNSMIISEQAFDFNLLQEIQQPQELNMMLKRIIENITIYNIGKKWRIKVLYRNRHVQSFIWDGEKTSFISDTKKILDLANSWI

SEQ ID NO: 27262 - DNA, 50 bp, Klebsiella aerogenes; identical to SEQ ID NO: 27247
  source 1..50: mol_type = genomic DNA

SEQ ID NO: 27263 - DNA, 40 bp, Klebsiella aerogenes; identical to SEQ ID NO: 4188
  source 1..40: mol_type = genomic DNA

SEQ ID NO: 27264 - DNA, 40 bp, Klebsiella aerogenes; identical to SEQ ID NO: 27254
  source 1..40: mol_type = genomic DNA

SEQ ID NO: 27265 - DNA, 50 bp, Klebsiella aerogenes; identical to SEQ ID NO: 27250
  source 1..50: mol_type = genomic DNA

SEQ ID NO: 27266 - protein, 495 aa, Klebsiella pneumoniae; identical to SEQ ID NO: 27261

SEQ ID NO: 27267 - DNA, 50 bp, Klebsiella pneumoniae; identical to SEQ ID NO: 27247
  source 1..50: mol_type = genomic DNA

SEQ ID NO: 27268 - DNA, 40 bp, Klebsiella pneumoniae; identical to SEQ ID NO: 1418
  source 1..40: mol_type = genomic DNA

SEQ ID NO: 27269 - DNA, 40 bp, Klebsiella pneumoniae; identical to SEQ ID NO: 7439
  source 1..40: mol_type = genomic DNA

SEQ ID NO: 27270 - DNA, 50 bp, Klebsiella pneumoniae; identical to SEQ ID NO: 27250
  source 1..50: mol_type = genomic DNA

SEQ ID NO: 27271 - protein, 495 aa, Klebsiella pneumoniae; identical to SEQ ID NO: 27251

SEQ ID NO: 27272 - DNA, 50 bp, Klebsiella pneumoniae; identical to SEQ ID NO: 27247
  source 1..50: mol_type = genomic DNA

SEQ ID NO: 27273 - DNA, 40 bp, Klebsiella pneumoniae; identical to SEQ ID NO: 1418
  source 1..40: mol_type = genomic DNA

SEQ ID NO: 27274 - DNA, 40 bp, Klebsiella pneumoniae; identical to SEQ ID NO: 7439
  source 1..40: mol_type = genomic DNA

SEQ ID NO: 27275 - DNA, 50 bp, Klebsiella pneumoniae; identical to SEQ ID NO: 27250
  source 1..50: mol_type = genomic DNA

SEQ ID NO: 27276 - protein, 495 aa, Klebsiella pneumoniae; identical to SEQ ID NO: 27251

SEQ ID NO: 27277 - DNA, 50 bp, Klebsiella pneumoniae; identical to SEQ ID NO: 27247
  source 1..50: mol_type = genomic DNA

SEQ ID NO: 27278 - DNA, 40 bp, Klebsiella pneumoniae; identical to SEQ ID NO: 1423
  source 1..40: mol_type = genomic DNA

SEQ ID NO: 27279 - DNA, 40 bp, Klebsiella pneumoniae
  source 1..40: mol_type = genomic DNA
cttgctgccaaactgcatgaaaacgttgctggatactagc

SEQ ID NO: 27280 - DNA, 50 bp, Klebsiella pneumoniae; identical to SEQ ID NO: 27250
  source 1..50: mol_type = genomic DNA

SEQ ID NO: 27281 - protein, 495 aa, Klebsiella pneumoniae; identical to SEQ ID NO: 27261

SEQ ID NO: 27282 - DNA, 50 bp, Klebsiella pneumoniae; identical to SEQ ID NO: 27247
  source 1..50: mol_type = genomic DNA

SEQ ID NO: 27283 - DNA, 40 bp, Klebsiella pneumoniae; identical to SEQ ID NO: 1423
  source 1..40: mol_type = genomic DNA

SEQ ID NO: 27284 - DNA, 40 bp, Klebsiella pneumoniae; identical to SEQ ID NO: 27279
  source 1..40: mol_type = genomic DNA

SEQ ID NO: 27285 - DNA, 50 bp, Klebsiella pneumoniae; identical to SEQ ID NO: 27250
  source 1..50: mol_type = genomic DNA

SEQ ID NO: 27286 - protein, 495 aa, Klebsiella oxytoca
MKQNGQAYSYIRFSSKKQEQGDSVRRQTELAEQYAHANNLILSDKNFQDLGISAFKEGSRPSLGDMLEAIEKGQIEQGSTIIIESLDRLSRRGIDVTQQIIKSILQHNVFIASLVDGLLLNRESVNDLVSVIRIALAADLAYKESEKKSQRLRETKGQQRQRALNGEVINKILPFWLERKQDKIVFSDRLDTVKRIIELRRKGLGTNKIARTLNDEGHKPLRSAGWNHTTVGKTINSVALYGAYQTSETTKDRKVILLDIIENYYPAVISKDEFILLQSDQKQNKPGYKSEHNAFAGILKHECGGALVRKFHVVSGKTYQYHVCANARDGKCHVTKNFKNIEVALYRIMKELKVEKNTNFDQTLLAERDTIKAKIQRLNDVLMEFSESPRSVIQTIHNLEKKVEELEAKIKMQNNMLISEQAFDFNLLQEIQQPQELNMMLKRIIENITIYNIGKKWRIKVLYRNRNVQSFIWDGEKTSFISDTKKILDLANSWI

SEQ ID NO: 27287 - DNA, 50 bp, Klebsiella oxytoca; identical to SEQ ID NO: 27247
  source 1..50: mol_type = genomic DNA

SEQ ID NO: 27288 - DNA, 40 bp, Klebsiella oxytoca; identical to SEQ ID NO: 4508
  source 1..40: mol_type = genomic DNA

SEQ ID NO: 27289 - DNA, 40 bp, Klebsiella oxytoca; identical to SEQ ID NO: 26814
  source 1..40: mol_type = genomic DNA

SEQ ID NO: 27290 - DNA, 50 bp, Klebsiella oxytoca; identical to SEQ ID NO: 27250
  source 1..50: mol_type = genomic DNA

SEQ ID NO: 27291 - protein, 495 aa, Klebsiella oxytoca
MKQNGQAYSYIRFSSKKQEQGDSVRRQTELAEQYAHANNLILSDKNFQDLGISAFKEGSRPSLGDMLEAIEKGQIEQGSTIIIESLDRLSRRGIDVTQQIIKSILQHNVFIASLVDGLLLNRESVNDLVSVIRIALAADLAYKESEKKSQRLRETKGQQRQRALNGEVINKILPFWLERKQDKIVFSDRLDTVRRIIELRRKGLGTNKIARTLNDEGHKPLRSAGWNHTTVGKTINSVALYGAYQTSETTKDRKVILLDIIENYYPAVISKDEFILLQSDQKQNKPGYKSEHNAFAGILKHECGGALVRKFHVVSGKTYQYHVCANARDGKCHVTKNFKNIEVALYRIMKELKVEKNTNFDQTLLAERDTIKAKIQRLNDVLMEFSESPRSVIQTIHNLEKKVEELEAKIKMQNNMLISEQAFDFNLLQEIQQPQELNMMLKRIIENITIYNIGKKWRIKVLYRNRNVQSFIWDGEKTSFISDTKKILDLANSWI

SEQ ID NO: 27292 - DNA, 50 bp, Klebsiella oxytoca; identical to SEQ ID NO: 27247
  source 1..50: mol_type = genomic DNA

SEQ ID NO: 27293 - DNA, 40 bp, Klebsiella oxytoca; identical to SEQ ID NO: 4508
  source 1..40: mol_type = genomic DNA

SEQ ID NO: 27294 - DNA, 40 bp, Klebsiella oxytoca; identical to SEQ ID NO: 26814
  source 1..40: mol_type = genomic DNA

SEQ ID NO: 27295 - DNA, 50 bp, Klebsiella oxytoca; identical to SEQ ID NO: 27250
  source 1..50: mol_type = genomic DNA

SEQ ID NO: 27296 - protein, 495 aa, Klebsiella oxytoca
MKQNGQAYSYIRFSSKKQEQGDSVRRQTELAEQYAHANNLILSDKNFQDLGISAFKEGSRPSLGDMLEAIEKGQIEQGSTIIIESLDRLSRRGIDVTQQIIKSILQHNVFIASLVDGLLLNRESVNDLVSVIRIALAADLAYKESEKKSQRLRETKGQQRQRALNGEVINKILPFWLERKQDKIVFSDRLDTVKRIIELRRKGLGTNKIARTLNDEGHKPLRSAGWNHTTVGKTINSVALYGAYQTSETTKDRKVILLDIIENYYPAVISKDEFILLQSDQKQNKPGYKSEHNAFAGILKHECGGALVRKFHVVSGKTYQYHVCANARDGKCHVTKNFKNIEVALYRIMKELKVEKNTNFDQTLLAERDAIKAKIQRLNDVLMEFSESPRSVIQTIHNLEKKVEELEAKIKMQNNMLISEQAFDFNLLQEIQQPQELNMMLKRIIENITIYNIGKKWRIKVLYRNRNVQSFIWDGEKTSFISDTKKILDLANSWI

SEQ ID NO: 27297 - DNA, 50 bp, Klebsiella oxytoca; identical to SEQ ID NO: 27247
  source 1..50: mol_type = genomic DNA

SEQ ID NO: 27298 - DNA, 40 bp, Klebsiella oxytoca; identical to SEQ ID NO: 4508
  source 1..40: mol_type = genomic DNA

SEQ ID NO: 27299 - DNA, 40 bp, Klebsiella oxytoca; identical to SEQ ID NO: 26814
  source 1..40: mol_type = genomic DNA

SEQ ID NO: 27300 - DNA, 50 bp, Klebsiella oxytoca; identical to SEQ ID NO: 27250
  source 1..50: mol_type = genomic DNA

SEQ ID NO: 27301 - protein, 495 aa, Klebsiella michiganensis
MKQNGQAYSYIRFSSKKQEQGDSVRRQTELAEQYAHANNLILSDKNFQDLGISAFKEGSRPSLGDMLEAIEKGQIEQGSTIIIESLDRLSRRGIDVTQQIIKSILQHNVFIASLVDGLLLNRESVNDLVSVIRIALAADLAYKESEKKSQRLRETKGQQRQRALNGEVINKILPFWLERKQDKIVFSDRLDTVKRIIELRRKGLGTNKIARTLNDEGHKPLRSAGWNHTTVGKTINSVALYGAYQTSETTKDRKVILLDIIENYYPAVISKDEFILLQSDQKQNKPGYKSEHNAFAGILKHECGGALVRKFHVVSGKTYQYHVCANARDGKCHVTKNFKNIEVALYRIMKELKVEKNTNFDQTLLTEQDAIKAKIQRLNDVLMEFSESPRSVIQTIHNLEKKVEELEAKIKIQNNMIISEQAFDFNLLQEIQQPQELNMMLKRIIENITIYNIGKKWRIKVLYRNRHIQSFIWDGEKTSFISDTKKILDLANSWI

SEQ ID NO: 27302 - DNA, 50 bp, Klebsiella michiganensis; identical to SEQ ID NO: 27247
  source 1..50: mol_type = genomic DNA

SEQ ID NO: 27303 - DNA, 40 bp, Klebsiella michiganensis; identical to SEQ ID NO: 4508
  source 1..40: mol_type = genomic DNA

SEQ ID NO: 27304 - DNA, 40 bp, Klebsiella michiganensis; identical to SEQ ID NO: 26814
  source 1..40: mol_type = genomic DNA

SEQ ID NO: 27305 - DNA, 50 bp, Klebsiella michiganensis; identical to SEQ ID NO: 27250
  source 1..50: mol_type = genomic DNA

SEQ ID NO: 27306 - protein, 495 aa, Klebsiella grimontii
MKQNGQAYSYIRFSSKKQEQGDSVRRQTELAEQYAHANNLILSDKNFQDLGISAFKEGSRPSLGDMLEAIEKGQIEQGSTIIIESLDRLSRRGIDVTQQIIKSILQHNVFIASLVDGLLLNRESVNDLVSVIRIALAADLAYKESEKKSQRLRETKGQQRQRALNGEVINKILPFWLERKQDKIVFSDRLDTVKRIIELRRKGLGTNKIARTLNDEGHKPLRSAGWNHTTVGKTINSVALYGAYQTSETTKDRKVILLDIIENYYPAVISKDEFILLQSDQKQNKPGYKSEHNAFAGILKHECGGALVRKFHVVSVKTYQYHVCANARDGKCHVTKNFKNIEVALYRIMKELKVEKNTNFDQTLLAERDAIKAKIQRLNDVLMEFSESPRSVIQTIHNLEKKVEELEAKIKMQNNMLISEQAFDFNLLQEIQQPQELNMMLKRIIENITIYNIGKKWRIKVLYRNRNVQSFIWDGEKTSFISDTKKILDLANSWI

SEQ ID NO: 27307 - DNA, 50 bp, Klebsiella grimontii; identical to SEQ ID NO: 27247
  source 1..50: mol_type = genomic DNA

SEQ ID NO: 27308 - DNA, 40 bp, Klebsiella grimontii; identical to SEQ ID NO: 4508
  source 1..40: mol_type = genomic DNA

SEQ ID NO: 27309 - DNA, 40 bp, Klebsiella grimontii; identical to SEQ ID NO: 26814
  source 1..40: mol_type = genomic DNA

SEQ ID NO: 27310 - DNA, 50 bp, Klebsiella grimontii; identical to SEQ ID NO: 27250
  source 1..50: mol_type = genomic DNA

SEQ ID NO: 27311 - protein, 495 aa, Klebsiella grimontii; identical to SEQ ID NO: 27251

SEQ ID NO: 27312 - DNA, 50 bp, Klebsiella grimontii; identical to SEQ ID NO: 27247
  source 1..50: mol_type = genomic DNA

SEQ ID NO: 27313 - DNA, 40 bp, Klebsiella grimontii; identical to SEQ ID NO: 4508
  source 1..40: mol_type = genomic DNA

SEQ ID NO: 27314 - DNA, 40 bp, Klebsiella grimontii; identical to SEQ ID NO: 26814
  source 1..40: mol_type = genomic DNA

SEQ ID NO: 27315 - DNA, 50 bp, Klebsiella grimontii; identical to SEQ ID NO: 27250
  source 1..50: mol_type = genomic DNA

SEQ ID NO: 27316 - protein, 531 aa, Priestia megaterium
MKRVWCLYRVSSKKQLHMDDDIPMQKNACHDYVTNKEGWEITRELSEKGISGWKVKAEERDALNIIKKGALNGEFDILLVFMLDRIGRKEDETPLVVNFLNSNGVEVWSTNEGQRKTDTHIDKLLNYISFWQADGESQKTSKRVREAKKQLSEQGYFQGGPIPIGYKIVETNQNHWKNKDRKIKELVPDEVEAGTIETIFHLYVNKHMGYRRIADYLNEKGYRNKNGKLYGISTIQRILSNPIYTGWKRYKGFNGKTGDTQPYNPKLRIISDELFKEAEDIRNKKREKIREQDKAGIPLAGKLMFSGLAYCSYCGAKLSGNYLYRKKQSKDKPQYVNYRYRCPLNKGQLNGEHQKSMWGAKKYDRFAIERIKHVISNLDLESIIDNSTMIKEASTKVKERNVNNIEKELKVRQERLAKLHAEISKAINNESEFTPKQLSSAITNAENDIEQLKKNLNNLKEEIASERENFSEINSIVNVLNNWEHKFDNADDDSKKAMLSKIINKVYFSREGIEIEFNLMLEGILRIQLIK

SEQ ID NO: 27317 - DNA, 50 bp, Priestia megaterium
  source 1..50: mol_type = genomic DNA
tagtgtataaagttattaatagctaaagcatttgaatacattatacacta

SEQ ID NO: 27318 - DNA, 40 bp, Priestia megaterium
  source 1..40: mol_type = genomic DNA
atctccagtaccagaagcaaaagcattcgcaacgttagca

SEQ ID NO: 27319 - DNA, 40 bp, Priestia megaterium
  source 1..40: mol_type = genomic DNA
atctccagtaccagaagcattagcattcgcaacgttagca

SEQ ID NO: 27320 - DNA, 50 bp, Priestia megaterium
  source 1..50: mol_type = genomic DNA
tcctgtatatactcattaatatatttatcaattgagtgttgtattcatta

SEQ ID NO: 27321 - protein, 520 aa, Streptococcus suis
MKKVITIEATPSIIRSSSDDFSLKKRRVAGYARVSTDHEDQATSYESQMRYYSEYINGRDDWEFVKMYSDEGISGTNTKLRTGFKAMVEDALNGKIDLIITKSVSRFARNTVDSLTTVRQLKEVGVEIYFEKENIWTLDSKGELLITIMSSLAQEESRSISENVTWGLRKQFAEGKVHFPYTNVLGFRAGEDGAIVVDQDEAKTVRYIFQQALIGKSPYHIAKDLTEQGIPSPSGKSHWNATTIKRMLRNEKYKGDALLQKTYTIDFLTKKKNINRGELPQYYVENNHEAIVDRETFDAVQQVLDNKGRKSSTTIFSSKLVCGDCGHFFGSKVWHSTSKYRRVIYRCNEKYNGSSKCSTPHVTEEEVKQWFVLAVNQVIDNRFEVIDNLSVLLSIGSLEVIDEQIKILETEAEVVSQLVANLVSENAIIRQDQDKYLKKYNQLTTKYEGIVQDIESLELQRMQKSKRNKELRVFINALEKQEGLLLEFDEFLWETMVEHVTVAGAKEISIKFKNGQIIRV

SEQ ID NO: 27322 - DNA, 50 bp, Streptococcus suis
  source 1..50: mol_type = genomic DNA
tgtattaaaatgagtactaataccgaagtgtgagttctgaaattgataca

SEQ ID NO: 27323 - DNA, 40 bp, Streptococcus suis
  source 1..40: mol_type = genomic DNA
tttggtcctgacccataccgatacagaccatgtgggcgat

SEQ ID NO: 27324 - DNA, 40 bp, Streptococcus suis
  source 1..40: mol_type = genomic DNA
tttggtcctgacccatacccctacagaccatgtgggcgat

SEQ ID NO: 27325 - DNA, 50 bp, Streptococcus suis
  source 1..50: mol_type = genomic DNA
tttaatgaaagtcctaccaaaatcccagtgtgttttttaaaatagataca

SEQ ID NO: 27326 - protein, 520 aa, Streptococcus suis
MKKVITIEATPTIIRSSSDDFTLKKRRVAGYARVSTDHEDQATSYESQMRYYSEYINGRDDWEFVKMYSDEGISGTNTKLRTGFKAMVEDALNGKIDLIITKSVSRFARNTVDSLTTVRQLKEVGVEIFFEKENIWTLDSKGELLITIMSSLAQEESRSISENVTWGLRKQFAEGKVHFPYTNVLGFKAGEDGAIVVDQDEAKTVRYIFQQALIGKSPYHIAKDLSEQGIPSPSGKSHWNATTIKRMLRNEKYKGDALLQKTYTIDFLTKKKNINRGELPQYYVENNHEAIVDRETFDAVQQVLDNKGRKSSTTIFSSKLVCGDCGHFFGSKVWHSTSKYRRVIYQCNEKYKGISKCSTPHVTEEEVKQWFVSAVNQVLDNRLEVIDNLYVLLSIGNLEVIDEQIKVLETEAEVVSQLVANLVSENAIISQDQDKYLKKYNQLTSKYEGILQEIESLELHRMKKSKRNKELQVFINALEKQEGLLLEFDEFLWETMIEHVTVSGAKEIFIKFKNGQIVRV

SEQ ID NO: 27327 - DNA, 50 bp, Streptococcus suis; identical to SEQ ID NO: 27322
  source 1..50: mol_type = genomic DNA

SEQ ID NO: 27328 - DNA, 40 bp, Streptococcus suis
  source 1..40: mol_type = genomic DNA
tttggtcctgacccataccgacgctgaccatgtgggcgat

SEQ ID NO: 27329 - DNA, 40 bp, Streptococcus suis
  source 1..40: mol_type = genomic DNA
tttggtcctgacccatacccccgctgaccatgtgggcgat

SEQ ID NO: 27330 - DNA, 50 bp, Streptococcus suis; identical to SEQ ID NO: 27325
  source 1..50: mol_type = genomic DNA

SEQ ID NO: 27331 - protein, 576 aa, Serratia inhibens
MTTRRPHVYTRISKTTQTEGSGLDEQTARIEQYLKDKRHLFEGDVTYWQDIGLSAYGNKNIQDGQLAEFIKQVDEGRIGQGDALIIYSLDRLSRRSSWDETTIQHLVKKGVEIHDVSTPVVLNREDSMSKIIMELIVTRGNNESKIKSERSSAGWEKRLNDTLKDGRVFTNKLPRWLGSNDDQYVVLKDEAEIIKRIFREYTNGMSSPMIARRLNEEGIKSTGKSLWRPNTITKLIKDERLRGNLVREKITLIPNVFPKVIDDELFVLANRILSTNAVGKKGRPRENNKTREVNNIITGLVRCGKCGSKVTTTKNGRGMRYITCLNRLNYKICGQKSIRLEEVERIVIKHVKLVDMSKVLSISNVDTSSEAQLQAELIELKIEEQSCIVKIEERKILKQRTSLPLANALTDIQDRIEEVTNEILNLQVQEPLPDISSESISALLNASNVELRMSLRKYLVQVVDKLTFINIGDYNIIEVKYNNNVYCHAIITDKKLKVLHEVDITVSGDTTTYNSGEFSIVESENEGVCTFTGIDAVSSTNYFLLANYIGSLPEKQWIVDVMYLQQNINVVLQGHD

SEQ ID NO: 27332 - DNA, 50 bp, Serratia inhibens
  source 1..50: mol_type = genomic DNA
atgtttgcaatgcttgctaataccgtggtgttctgatattattcacacat

SEQ ID NO: 27333 - DNA, 40 bp, Serratia inhibens; identical to SEQ ID NO: 22523
  source 1..40: mol_type = genomic DNA

SEQ ID NO: 27334 - DNA, 40 bp, Serratia inhibens
  source 1..40: mol_type = genomic DNA
atggcgcaacgccgaaaccaaggtcattggccagtcacaa

SEQ ID NO: 27335 - DNA, 50 bp, Serratia inhibens
  source 1..50: mol_type = genomic DNA
atgttttcaatgcctgctatgtgcaaggtgttctgccagccctcatacaa

SEQ ID NO: 27336 - protein, 573 aa, Serratia liquefaciens
MTTRRPHVYTRISKTTQTEGSGLDEQTARIEQYLKDKRHLFEGDVTYWQDIGLSAYGNKNIQDGQLAEFIKQVDEGKIGEGDALIIYSLDRLSRRSSWDETTIQHLVKKGVEIHDVSTPVVLNREDSMSKIIMELIVTRGNNESKIKSERSTAGWEKRLNDTLKDGRVFTNKLPRWLGSNDDQYVVLKDEAEIIKRIFREYTNGMSSPMIARRLNEEGIKSTGKSLWRPNTISKLIKDERLRGNLVREKITLIPNIFPKVIDDELFVLANRILSTNAVGKKGRPRENNVTREVNNIITGLVRCGKCGSKVTTTKNGKGMRYITCLNRLNYKICGQKSIRLEEVERIVINHVKQVDMSKVLSISNVDTSSEAQLQAELIELKIEEQSCIVKIEERKILKQRTSLPLANALTDIQDRIEEVTNEILNLQVQEPLPDISSESISALLNASNVELRMSLRKYLVQVVDKLTFINIGDYNIIEVKYNNNVYCHAIITDKKLKVLHEVDITFSGDTTTYNSGEFSIVESESEGICTFEGIDNVSVTDYFLLANYIGSLPEKQWVVDVMYLQQNMDAVLK

SEQ ID NO: 27337 - DNA, 50 bp, Serratia liquefaciens
  source 1..50: mol_type = genomic DNA
atgtttgcaatgattgctaataccgtggtgttctgatattattcacacat

SEQ ID NO: 27338 - DNA, 40 bp, Serratia liquefaciens
  source 1..40: mol_type = genomic DNA
atggcgcaatgccgaaacggtggttataggccagtcacaa

SEQ ID NO: 27339 - DNA, 40 bp, Serratia liquefaciens
  source 1..40: mol_type = genomic DNA
atggcgcaatgccgaaacgaaggttataggccagtcacaa

SEQ ID NO: 27340 - DNA, 50 bp, Serratia liquefaciens; identical to SEQ ID NO: 27335
  source 1..50: mol_type = genomic DNA

SEQ ID NO: 27341 - protein, 638 aa, Citrobacter freundii
MKPKLYSYVRFSSVKQREGNSLERQQDTALKIAARYNLELDTTAFHDLGMSAFKGKNAHEGKLSEFIKQIGAKVPVGSWLVVENLDRISRDDAWSALDIFKNILSKGIVVVTGMDEKVYKYADVKNNPTDLIISLLMFTRAHDESLTKKNRVEAQARSLIRHNLTREPGTPAKAIESVGQNVWWVDTKSGYVTPHPIYFTAAQKIIELKQNGETLLGIQRYLNEHYPAPKKRVYKDQTGQALAPKTEQWGKHLIRTFLNPTVHGQKTFTLDKRDESGVIIYDSESDEPLKETFIIPDYYPALMSEVDYLTLSKLDRHRAITRNSSKYPAGNPEPEIPLLSGIGILFCGKCGSFMFKSGSSENKYRYICGSKIVQGKPCGKKGFTSYQLEHTVLQLIADHVWNNHQEDKTAWYESEIEKASEAVKKLLKLATLTDDLEELADQINANKQKKITLEREFQQYKISRSEIQTTGWDQFRNFDVHDTKNPDRKRIRLKVKQAIKRIDCYDIDGRHGHFEVTFADETKQRIVIKFNRNRSPGVSYVEAQTVNDHDLLKMQGLVLHSFIDELISPEKFAQHIKDKHEVSILNPTFITRLEDGVNRDEGNELAIKVDSTTSKSYATVNGIKYEINSLEDLETLSK

SEQ ID NO: 27342 - DNA, 50 bp, Citrobacter freundii
  source 1..50: mol_type = genomic DNA
actgtgaataattgactattaggcttgcctaatatataattattcactgt

SEQ ID NO: 27343 - DNA, 40 bp, Citrobacter freundii; identical to SEQ ID NO: 20458
  source 1..40: mol_type = genomic DNA

SEQ ID NO: 27344 - DNA, 40 bp, Citrobacter freundii
  source 1..40: mol_type = genomic DNA
gcatggcgtattagcaggtaagccatcaggcatgccaggg

SEQ ID NO: 27345 - DNA, 50 bp, Citrobacter freundii
  source 1..50: mol_type = genomic DNA
aatgttaataatttactattattcaagcctgaaataatcaacttaacttt

SEQ ID NO: 27346 - protein, 487 aa, Pseudomonas monteilii
MAHWLTQHPDYEPSDLSFEDLGKSGWKGAHIEGGMGELLAAVEAGFIRPGAVVLVEALDRAGRLDVADMLATVITPILRAGVSLYTLDDDVEYTKDSLNGGHIYLLVAKIQAANQFSERLSERVNKSYVRRREEAAQGKIPKRRTPLWLDGDGQLIEHLAPHIKQAFELYADGFGERRILRRLQETGIPEFQGLYGSTLKRWLQNKIAIGNWGDIVNVYPAVVDPELFYRVQERIAGNKTTRPASPSKHALTGIVKCGHCGRNYNYHVFKEQPTVLQCSNRFMTTAEKCENSKSVPLAVVEFVLLKTSQQARVEAIRKKKLTVNQKRVIVIEGEIASITQRLQGLARVIGRIGDEPELVQQFDELSAQRETLQKELESISASGSDVSILDQVQDIQITDADPMQLGADLQTVGYTITCTMDGKLVTTHGEIREWEYVGYQRASDSYVVKEGGQSSAGQFTAIPVAPFRNGSENIMEALGLKLNLIKE

SEQ ID NO: 27347 - DNA, 50 bp, Pseudomonas monteilii
  source 1..50: mol_type = genomic DNA
cgttacgataatgcagctttttctatactttaggctgcaatcctgtagac

SEQ ID NO: 27348 - DNA, 40 bp, Pseudomonas monteilii
  source 1..40: mol_type = genomic DNA
gagcctgattccgttcaccatgcagatggccttcgtggtt

SEQ ID NO: 27349 - DNA, 40 bp, Pseudomonas monteilii
  source 1..40: mol_type = genomic DNA
gagcctgattccgttcacccagcagatggccttcgtggtt

SEQ ID NO: 27350 - DNA, 50 bp, Pseudomonas monteilii
  source 1..50: mol_type = genomic DNA
ggatagaattttctagaattttctcaatgttaggcttttctccagtagac

SEQ ID NO: 27351 - protein, 539 aa, Streptomyces hygroscopicus
MTQLDIPATFRSSPTGEDGEPWLAYIRVSTWKEEKISPELQRDAIMQWAKRTGRCIIAWIEDLDVSGRHFKRKIMQCIERVEAGEARGVAVWRYSRFGRDRTGNAINLARLQQAGGELESATEPVDASTAIGRFQRGMILEFSAFESDRAGEQWRETHDHRRYKLRLPAQGRKRFGYVWHRRYDATTGTLQKERYEPDETVGPVVAELFRDYVAGNGFGVLTGKLNRVGYRTTQGTLWSTETLSRYMDSGFAAGLLFVHAPECRCRKTDGSCSNRVHIQGAHEELIDFDLWQAYQQRRKEVKETAPRSRNGIYELTGLPKCAQCRKGTSLNAIERDGAIVPGFAYRCSARAKSGALACEGVYVHRERVEKEVFDWLKREAAAGIDKAPPTDATPVRDLAAEQAENIRARARAQADVDKQRQALARLRADKNANPDDYGPGEYEDAVAEIRKKQAAAQAILDNIPEVEAPPNRAEFVPLVVGTVEEWPTLDTRERNMIYRKLIRRVALIRNGPGSDNAEIKIHPVWEPDPWPGPQRPTKG

SEQ ID NO: 27352 - DNA, 50 bp, Streptomyces hygroscopicus
  source 1..50: mol_type = genomic DNA
ggaagtgttttggggacgttgatgtgcagcactgtaggtaaaacactctg

SEQ ID NO: 27353 - DNA, 40 bp, Streptomyces hygroscopicus
  source 1..40: mol_type = genomic DNA
ggccgtggccaccttgatgtggaacaacgccgagcatctg

SEQ ID NO: 27354 - DNA, 40 bp, Streptomyces hygroscopicus
  source 1..40: mol_type = genomic DNA
ggccgtggccaccttgatgctgaacaacgccgagcatctg

SEQ ID NO: 27355 - DNA, 50 bp, Streptomyces hygroscopicus
  source 1..50: mol_type = genomic DNA
ggaagtgttggccaggcgtggtggctcacgcctgtaatcccagcactttg

SEQ ID NO: 27356 - protein, 531 aa, Pseudomonas aeruginosa
MTSAHPLPRAFAEVFQGNDRINVYSYIRFSSKAQKLGFSEMRQIDQLNRFFEHYPQARQVERYEDLGVSAFKGKNLKSGQLALFVERIKAKEILPNALLLVESFDRISRMGGYDALELIISIIQADCAIYTLFDNRLYSRRKTDSSADISLIQNILERANDESRSKSERVSDAKARNLLKGENGGIITKRCPFWISFTDGKFVLNEHAQAISRAVELCFDMGFQAIAKTLNDEIHPKKYTESIVGKFLRQPAIYGSFIAMEWDESGKPVQLKKEIKGYYPAVITEAEFHRISVKLQERQDPKLAGRKAAEFKNILRGLVYCACGSGFRYHAQKSGYVDLVCSASLTGRCTSAKPGKGVRYRYARLEEIFLAYQAKIPFHRIIAKTEDIQALEKAHGEISGLLIQKEKALANNFSILEKASESAQKYVLTRIEEVSQELDQLKAKEQEISHRISTLHLASKSTINVMEIYKLLLTEHGRMRVNNFLQGQGVRLNVTPIKKKHYIIDLYLGDIHIDRIQVTPDGYFADKTVNL

SEQ ID NO: 27357 - DNA, 50 bp, Pseudomonas aeruginosa
  source 1..50: mol_type = genomic DNA
tttctacaaatccatccaatgattgcaatgacaggttgatttagtagaaa

SEQ ID NO: 27358 - DNA, 40 bp, Pseudomonas aeruginosa
  source 1..40: mol_type = genomic DNA
ttcgaggatgccgatgaccgcattcatcggcgtacggatc

SEQ ID NO: 27359 - DNA, 40 bp, Pseudomonas aeruginosa
  source 1..40: mol_type = genomic DNA
ttcgaggatgccgatgaccctattcatcggcgtacggatc

SEQ ID NO: 27360 - DNA, 50 bp, Pseudomonas aeruginosa
  source 1..50: mol_type = genomic DNA
tttgtaaaactgggacagatgattctcatctcaggttctgtgagtagaaa

SEQ ID NO: 27361 - protein, 531 aa, Pseudomonas fragi; identical to SEQ ID NO: 27356

SEQ ID NO: 27362 - DNA, 50 bp, Pseudomonas fragi; identical to SEQ ID NO: 27357
  source 1..50: mol_type = genomic DNA

SEQ ID NO: 27363 - DNA, 40 bp, Pseudomonas fragi
  source 1..40: mol_type = genomic DNA
ctccagcatgccgataattgcgttcagcggtgtgcgaatt

SEQ ID NO: 27364 - DNA, 40 bp, Pseudomonas fragi
  source 1..40: mol_type = genomic DNA
ctccagcatgccgataattctgttcagcggtgtgcgaatt

SEQ ID NO: 27365 - DNA, 50 bp, Pseudomonas fragi; identical to SEQ ID NO: 27360
  source 1..50: mol_type = genomic DNA

SEQ ID NO: 27366 - protein, 522 aa, Bacillus thuringiensis
MKLSHILQPNMKAAFYGRHSTDKQDMDMQLNSVMEVIRKYNCIHTHSFLDKAVSARKNKITSRKELENMFEAAKRKEFDFVIVYKSDRLARDPLEHQTIRIVMKTLDIPIIISSTEIVYNTDTDLIVQLMEDGFTKYEVDTIIARTRSGLENKAKQGKWLGGKPPFGYTYDKNSGQFIEHPEELCYVKEIFNLYLNGHGFQHIANTLPSGSRRGKDWGKENVKAIVLNPFYCGLLSWRRQTDGKQNARDIWIEAPNHYVKPIISRTTWESCWRIYSEKRNGNMVPKHYKTSFLLQGLLSCEKCQELMKTKNQQTVSSTNKKYGGKIYFCTNCKLRINADLLHDKVVNQTLTDVKISGFQNVYHAIEQKIQYEIQGLNNDIQKHQRLFENYTIKFHNITEELKQRMKNNDDKRFLKSLAIYRLDVQRKLDGVTQQINDFKQQITLKEKVEKSKETWLHTLNEVFQDDVKLQEISDMDKRRFLLPLIQSVSIKENKKRNEYDISLQLRTDFSKRDVQNQISLIL

SEQ ID NO: 27367 - DNA, 50 bp, Bacillus thuringiensis
  source 1..50: mol_type = genomic DNA
tggttacatccctgctaactaaaccagtataaccgttcatcatctaccct

SEQ ID NO: 27368 - DNA, 40 bp, Bacillus thuringiensis
  source 1..40: mol_type = genomic DNA
tgggtatggggaagtgaatcagtataaccgccatagtaca

SEQ ID NO: 27369 - DNA, 40 bp, Bacillus thuringiensis
  source 1..40: mol_type = genomic DNA
tgggtatggggaagtgaataagtataaccgccatagtaca

SEQ ID NO: 27370 - DNA, 50 bp, Bacillus thuringiensis
  source 1..50: mol_type = genomic DNA
tgctaaaatacaggctatctaaacaagtataaaagtataaaatctccacc

SEQ ID NO: 27371 - protein, 623 aa, Parabacteroides distasonis; identical to SEQ ID NO: 11671

SEQ ID NO: 27372 - DNA, 50 bp, Parabacteroides distasonis; identical to SEQ ID NO: 11672
  source 1..50: mol_type = genomic DNA

SEQ ID NO: 27373 - DNA, 40 bp, Parabacteroides distasonis
  source 1..40: mol_type = genomic DNA
cctgttaaattccggcaactcatccaaaaaaaggacacca

SEQ ID NO: 27374 - DNA, 40 bp, Parabacteroides distasonis
  source 1..40: mol_type = genomic DNA
cctgttaaattccggcaacacatccaaaaaaaggacacca

SEQ ID NO: 27375 - DNA, 50 bp, Parabacteroides distasonis
  source 1..50: mol_type = genomic DNA
caatagaataaccattggaattgcactcttaatgaaatccttttgcattg

SEQ ID NO: 27376 - protein, 504 aa, Mycobacteroides chelonae
MSRKRPRALVGARVSVLSGPQKVSHEAQIDTATKWATARDYPVVGSFEDLGVSASVPPDERPELGPWIRERSHEWEVIIWSKLDRAFRSMRHCSDFIKWAEANKKIVVFAEDGMTLNYLDPSKGIDSILGELFVQMAAAFAQIELNRFKSRAEDMHRAIRPTTRWAAGLPPLGYRVIDHPSGRGKGLAIDPDAANLVREMGDKLVDGWSFVRITEWLNESGKLTSQGRSRKARGLEPKGRWTTTNVIEILTGYRTLGIKTHKGQPVLDDNGEPIQLAPALFTPERWDEVQRAAQLRKGKPRTPSDTSNPMLEVGFCAVCGSSLAQQFSKTRPRKSDGHVTYYRYYRCSRTPINCKEVFVVADNLDELLSEKFLRERGDERVTERVFIPGEDNSYELDSINQRIDQLREDRASGLFPSGEDEAVYRNQIRQLLARRDELTSVPIRQPGYENIELKKTYREVWPSATPEEKRKMLIDAEISIRLGESPGRSLRAELVVNSMPATPD

SEQ ID NO: 27377 - DNA, 50 bp, Mycobacteroides chelonae
  source 1..50: mol_type = genomic DNA
attctcataggtgtacttctcgatcaatagtcacctacactcttgaaata

SEQ ID NO: 27378 - DNA, 40 bp, Mycobacteroides chelonae; identical to SEQ ID NO: 20143
  source 1..40: mol_type = genomic DNA

SEQ ID NO: 27379 - DNA, 40 bp, Mycobacteroides chelonae
  source 1..40: mol_type = genomic DNA
gatcgccatgctcctcgatgcacagatcccgatggaagtg

SEQ ID NO: 27380 - DNA, 50 bp, Mycobacteroides chelonae
  source 1..50: mol_type = genomic DNA
aatctcataccctttccactccctgcatggtcacctcagtcctggacata

SEQ ID NO: 27381 - protein, 504 aa, Mycobacteroides chelonae
MPRKRPRALVGARVSVLSGPQKVSHEAQIDTATKWATAHDYPVVGSFEDLGVSASVPPDERPELGPWIRERSHEWEAIIWSKLDRAFRSMRHCSDFIKWAEANRKIVVFAEDGMTLNYLDPSKGIDSILGELFVQMAAAFAQIELNRFKSRAEDMHRAIRPTTRWAAGLPPLGYRVIDHPSGRGKGLAIDPDAANLVREMADKLVDGWSFVRITEWLNESGKLTSQGRSRKARGLEPKGRWTTTNVIEILTGYRTLGIKTHKGQPVLDVHGEPIQLAPALFTPERWDEVQRAAQLRKGKPRTPSDTSNPMLEVGFCAVCGSSLAQQFSKTRPRKSDGHVTHYRYYRCSRTPINCKEVFVVADNLDELLSEKFLRERGDERVTERVFIPGEDNSYELDSINQRIDQLREDRASGLFPSGEDEAVYRNQIRQLLARRDELTSVPIRQPGYEIIELEKTYREVWPDATPEAKRKMLIDAEISIRLGESPGRSIRAELAVRSADDGEL

SEQ ID NO: 27382 - DNA, 50 bp, Mycobacteroides chelonae; identical to SEQ ID NO: 27377
  source 1..50: mol_type = genomic DNA

SEQ ID NO: 27383 - DNA, 40 bp, Mycobacteroides chelonae; identical to SEQ ID NO: 20143
  source 1..40: mol_type = genomic DNA

SEQ ID NO: 27384 - DNA, 40 bp, Mycobacteroides chelonae; identical to SEQ ID NO: 27379
  source 1..40: mol_type = genomic DNA

SEQ ID NO: 27385 - DNA, 50 bp, Mycobacteroides chelonae; identical to SEQ ID NO: 27380
  source 1..50: mol_type = genomic DNA

SEQ ID NO: 27386 - protein, 579 aa, Parabacteroides merdae; identical to SEQ ID NO: 1996

SEQ ID NO: 27387 - DNA, 50 bp, Parabacteroides merdae; identical to SEQ ID NO: 1997
  source 1..50: mol_type = genomic DNA

SEQ ID NO: 27388 - DNA, 40 bp, Parabacteroides merdae
  source 1..40: mol_type = genomic DNA
gtagtcgcatttgctctttttccgttctatgtgcgcattc

SEQ ID NO: 27389 - DNA, 40 bp, Parabacteroides merdae
  source 1..40: mol_type = genomic DNA
gtagtcgcatttgctctttgtccgttctatgtgcgcattc

SEQ ID NO: 27390 - DNA, 50 bp, Parabacteroides merdae
  source 1..50: mol_type = genomic DNA
aactgtacatatataattgtgtgtgtgtatatatatgtgtatgtatatat

SEQ ID NO: 27391 - protein, 579 aa, Parabacteroides merdae; identical to SEQ ID NO: 1996

SEQ ID NO: 27392 - DNA, 50 bp, Parabacteroides merdae; identical to SEQ ID NO: 1997
  source 1..50: mol_type = genomic DNA

SEQ ID NO: 27393 - DNA, 40 bp, Parabacteroides merdae
  source 1..40: mol_type = genomic DNA
gtagtcgcatttgctctttttccgttctatatgtgcattc

SEQ ID NO: 27394 - DNA, 40 bp, Parabacteroides merdae
  source 1..40: mol_type = genomic DNA
gtagtcgcatttgctctttgtccgttctatatgtgcattc

SEQ ID NO: 27395 - DNA, 50 bp, Parabacteroides merdae; identical to SEQ ID NO: 27390
  source 1..50: mol_type = genomic DNA

SEQ ID NO: 27396 - protein, 607 aa, Salmonella enterica
MKEYSFRIRGVSAFKNSNISSESQLGIFLQDVQNRKYGEGDALIVMSLDRISRRSSWAEDTIRFIVNSGIEVHDISASTVLRKDDPHSKLIMELIQMRSHNESLMKSVRAKAAWDRKIMEAVKNGTVISNKMPIWLKNVDNKYQRIEEKVNLIRHCFEWYKHGLSTGEIIKKIGDPTLQMVTVSRWIRDRRLLGEHVRYNGEVVHNAYPKVIDEDLFITANRMMDRVMLEKRKPADDLLLEPAVVQEIFRLYESGIGTGAIVKHLSKGWSTVNVLRVLRDKGVVKQKIIDNLTFERVNQKLSQNGVANRIRKDITIAQDDYITNLFPKILKCGCCGGNIAIHYNHVRVKYIICRNREEKKICDSKSIQYLRVEKNILQLVKNIDFNKLMSEGILDRGSIIDGIREELATLRKEEQKYIDKIKKRKSEGKLAGIHLSEGLTEIQDRIEELDKEIIKSQDIKEIPKLDFNIEEVLDPMNVELRAKVRKELRLVLKSVKYRVVSKSIFVSLEYYTDVLAHVIVINNQRGGGEVQTEFAIEEYDGYRVYRTDSFVLSYKKGDEVPQFHTYEGVPINNFEYLKLRDLIEEVEGNGIVAGWMYKNYDFVFMNC

SEQ ID NO: 27397 - DNA, 50 bp, Salmonella enterica
  source 1..50: mol_type = genomic DNA
tcccattgatgattttatgcatcctttcgtatactatgggaacattttga

SEQ ID NO: 27398 - DNA, 40 bp, Salmonella enterica
  source 1..40: mol_type = genomic DNA
tattcatgatatgccatcctttcgttttttcgcacatgtt

SEQ ID NO: 27399 - DNA, 40 bp, Salmonella enterica
  source 1..40: mol_type = genomic DNA
tattcatgatatgccatccagtcgttttttcgcacatgtt

SEQ ID NO: 27400 - DNA, 50 bp, Salmonella enterica
  source 1..50: mol_type = genomic DNA
tccactggaacttcttatgaatgaagtcgtatactatgtaaacttttttc

SEQ ID NO: 27401 - protein, 648 aa, Salmonella enterica
MLRPICYERVSSIQQIEGGGGLDDQRSALEGYLDRNADKFNNERIFIQDKGVSAFKNSNISSESQLGIFLQDVQNRKYGEGDALIVMSLDRISRRSSWAEDTIRFIVNSGIEVHDISASTVLRKDDPHSKLIMELIQMRSHNESLMKSVRAKAAWDRKIMEAVKNGTVISNKMPIWLKNVDNKYQRIEEKVNLIRHCFEWYKHGLSTGEIIKKIGDPTLQMVTVSRWIRDRRLLGEHVRYNGEVVHNAYPKVIDEDLFITANRMMDRVMLEKRKPADDLLLEPAVVQEIFRLYESGIGTGAIVKHLSKGWSTVNVLRVLRDKGVVKQKIIDNLTFERVNQKLSQNGVANRIRKDITIAQDDYITNLFPKILKCGCCGGNIAIHYNHVRVKYIICRNREEKKICDSKSIQYLRVEKNILQLVKNIDFNKLMSEGILDRGSIIDGIREELATLRKEEQKYIDKIKKRKSEGKLAGIHLSEGLTEIQDRIEELDKEIIKSQDIKEIPKLDFNIEEVLDPMNVELRAKVRKELRLVLKSVKYRVVSKSIFVSLEYYTDVLAHVIVINNQRGGGEVQTEFAIEEYDGYRVYRTDSFVLSYKKGDEVPQFHTYEGVPINNFEYLKLRDLIEEVEGNGIVAGWMYKNYDFVFMNC

SEQ ID NO: 27402 - DNA, 50 bp, Salmonella enterica; identical to SEQ ID NO: 27397
  source 1..50: mol_type = genomic DNA

SEQ ID NO: 27403 - DNA, 40 bp, Salmonella enterica
  source 1..40: mol_type = genomic DNA
tattcatgatatgccatcctttcgttttttagcacatgtt

SEQ ID NO: 27404 - DNA, 40 bp, Salmonella enterica
  source 1..40: mol_type = genomic DNA
tattcatgatatgccatccagtcgttttttagcacatgtt

SEQ ID NO: 27405 - DNA, 50 bp, Salmonella enterica; identical to SEQ ID NO: 27400
  source 1..50: mol_type = genomic DNA

SEQ ID NO: 27406 - protein, 648 aa, Salmonella enterica; identical to SEQ ID NO: 27401

SEQ ID NO: 27407 - DNA, 50 bp, Salmonella enterica; identical to SEQ ID NO: 27397
  source 1..50: mol_type = genomic DNA

SEQ ID NO: 27408 - DNA, 40 bp, Salmonella enterica; identical to SEQ ID NO: 27398
  source 1..40: mol_type = genomic DNA

SEQ ID NO: 27409 - DNA, 40 bp, Salmonella enterica; identical to SEQ ID NO: 27399
  source 1..40: mol_type = genomic DNA

SEQ ID NO: 27410 - DNA, 50 bp, Salmonella enterica; identical to SEQ ID NO: 27400
  source 1..50: mol_type = genomic DNA

SEQ ID NO: 27411 - protein, 676 aa, Bacteroides thetaiotaomicron
MDKRVIIYCRVSTQQQTTDRQKEELLKFAAENHWNVEEEDIFIDVISGFKKGEFRPEYAKMLERVEHGDIDIILFSEFSRLARNATELLEQIKLFIDRGIHLYFDKQKLWVKDNDKDVGSIILLHVLAVMSSYEIELFVERSLSGKITKVQAGHGGGDERAYGYMHNENKQIVINPIESKIVARIFEMYVGGYSSIQISEILNAEKVPAPYIRKLNEYKKNREAKGLEVKEYKFDTDNLKWRISTINRLMHNELYKGNRRITFYKPDPTNPLPLSERQDREIVYEYSEHMESLRIVSDELFQQAQDKLSKAHYNKNNAVRHENLLKHLMVCGECGANFSVGKSNETSKNYISGGRTYKCYGRVNRKDKPRTCTNGAELRQWKLDGLVLQLSIQMFAEINIQQTNTLRIENIGKEIEELIQIKSSKNTELVEAENLYKKTLKRLIAIEDDEVANNLISDAKHKYDETKNVLRKAMDKLSREITTKRITIDNLKRLNANPLLINKMDEIRKNKDLVKTMIDEYIDKITIFRLHELWLLVVVAYKGGEEMWGTIKCARYKKEEMFYDELHCHYGVEFQGWLLNNTEHCFSYDKSTRTITYHGGSEIYVEFKSGEYDYDTFNQMIQETGWMGCFPFYAYEDSGKDLSAPSNEDFGKSLQENRIDWKAHNEKVLERLLSKS

SEQ ID NO: 27412 - DNA, 50 bp, Bacteroides thetaiotaomicron
  source 1..50: mol_type = genomic DNA
aaggatgtgtttaaatcatagatatgcataggtgcgattaacacatcctg

SEQ ID NO: 27413 - DNA, 40 bp, Bacteroides thetaiotaomicron
  source 1..40: mol_type = genomic DNA
tagtaaatgctctgctgtatgcataggagggtactcctgt

SEQ ID NO: 27414 - DNA, 40 bp, Bacteroides thetaiotaomicron
  source 1..40: mol_type = genomic DNA
tagtaaatgctctgctgtaggcataggagggtactcctgt

SEQ ID NO: 27415 - DNA, 50 bp, Bacteroides thetaiotaomicron
  source 1..50: mol_type = genomic DNA
atggctgtgctttggtcaaagataggccgaggtaggatatttacatcctg

SEQ ID NO: 27416 - protein, 676 aa, Phocaeicola vulgatus
MDKKVLIYCRVSTQQQTTDRQKEELLKFAAENHWNVEEEDIFIDVISGFKKGEFRPEYVKMLERVEYGDIDIILFSEFSRLARNATELLEQIKLFIDKGINLYFDKQKLWVRDSNKDVGSIILLHVLAVMSSYEIELFVERSLSGKITKVQAGHGGGDERAYGYMHNENKQIVINPIESKIVTRIFEMYVGGYSSIQISEILNAEKVPAPYVRKLNEYKKNREAKGLEVKEYKFDTDNLKWRISTINRLMHNELYKGNRRITFYKPDPTNPLPLSERQDREIVYEYSEHVESLRIVSDELFQQAQDKLSKAHYNKNNAVRHENLLKHLMVCGECGANFSVGKSNETSKNYISGGRTYKCYGRVNRKDKPRTCTNGAELRQWKLDGLVLQLSIQMFAEINIQQTNILRIENIGKEIEELIQIKSSKNTELVEAENLYKKTLKRLIAIEDDEVANNLISDAKHKYDETKNVLRKAMDKLSREITTKRITIDNLKRLNANPLLINKMDEIRKNKDLVKTMIDEYIDKITIFRLHELWLLVVVAYKGGEEMWGTIKCARYKKEEMFYDELHCHYGVEFQGWLLNNTEHCFSYDKSTRTITYHGGSEIYVEFKSGEYDYDTFNQMIQKTGWMGCFPFYAYEDSGKDLSAPSNEDFGKSLQENRIDWKAHNEKVLERLLSKS

SEQ ID NO: 27417 - DNA, 50 bp, Phocaeicola vulgatus
  source 1..50: mol_type = genomic DNA
aaggatgtgtttaaatcatagatatgcataggtgcgattgacacatcctg

SEQ ID NO: 27418 - DNA, 40 bp, Phocaeicola vulgatus
  source 1..40: mol_type = genomic DNA
tatgacatgctctgtagtatgcatgggagggtattcctgt

SEQ ID NO: 27419 - DNA, 40 bp, Phocaeicola vulgatus
  source 1..40: mol_type = genomic DNA
tatgacatgctctgtagtaggcatgggagggtattcctgt

SEQ ID NO: 27420 - DNA, 50 bp, Phocaeicola vulgatus; identical to SEQ ID NO: 27415
  source 1..50: mol_type = genomic DNA

SEQ ID NO: 27421 - protein, 571 aa, Aeromonas veronii
MSRPPKAYSYIRFSTTKQAQGDSYRRQIQQAIDYCTEHNLQLDEKAIEDFGVSAFRGSNRIDGALGRFIEAVKGGAIEKGSYLLVESMDRLSRQTILKALSQFIEILNAGIVIVTLSDGEIFRVTDDGKDFDFAKLIISIVYMARANDESEMKSLRSRAAWSNGRKAARESKKVMKNARLPSWLTREGERIVPIPERTAIVSEMFEMAQSGCGYEQIAKVFLEKGYKTFGKEADWRPAGIQAVIKSRAVIGEFQPHVIENGERVPDGEPILGYYPTIVSPAVFEEVQHLIGKRSKHSGSYRKGTYSNLFSGVLRCQCGESLRYGNKGRAGSPRYYLMCPKHNTHGCSMPHLLYSKVEPQLLQAVSLLAVVMEQRKTTTEKMMALKDGLATLRRELELEVKRRKKAAQSMLDNDNDADFRELFIQCKANCQALEEQISQLENELMSRELSEKTLSQNLSSEDLDSTDQRQRFNGQLKAVLREIQFSYDGYDLAAVFKDIDGEFMLEQAFEPKLVGSTVRDRDGMTLIKTIAEAPYIDANWVKDEIDEYESFQKESDSEFDDDFEDLSSEESK

SEQ ID NO: 27422 - DNA, 50 bp, Aeromonas veronii
  source 1..50: mol_type = genomic DNA
caaggctcttctgataaaaacagctcgcagtttttaggagaaatgccgta

SEQ ID NO: 27423 - DNA, 40 bp, Aeromonas veronii; identical to SEQ ID NO: 20238
  source 1..40: mol_type = genomic DNA

SEQ ID NO: 27424 - DNA, 40 bp, Aeromonas veronii
  source 1..40: mol_type = genomic DNA
gcgggctttcttgatggtgtagcagttcttgatgccatag

SEQ ID NO: 27425 - DNA, 50 bp, Aeromonas veronii
  source 1..50: mol_type = genomic DNA
ccagtctttgtggatgaaaatatctagcagtattcatagcaaatgcagta

SEQ ID NO: 27426 - protein, 508 aa, Gordonibacter urolithinfaciens
MDEPDLGVYAMYLRKSRADAEKERQGEDTLAKHERELSAFSAARRYLVDESDVYREVVSGESVADRKEFQRLMQGVTQRRYKGVIVKAIDRLGRGDIMEYGWILSTFQWTRTLIITPDKVYNPNDQADMQSLQLQMLISNGELKAAKARLAAGRAQSVRDGQYIGTIPPYGYDRTVVDRMHTLKPNDRAPIVVVIFELAASGWGASAIANKLNRAGIPAFGGGFWIPSVIKRILRNPIYKGHVRWRYYKTEVVSRDGLAYDKRRVLNIDGDDYIEVRGLHDPIVSDELWERANAALRPSVKLKGGQKITNPLAGLMFCSRCGKAVGRHVTYYRGRPRARYLHSRYHDCPAKSASEEAVMDTLISSLQSAAADLEYLSEHRDEEAERAAAEREALEREIATAYRRADKIVELYTADLIGIDEFRARRSPIDEQIARMRKRAEELDSAEPPDRAAQLVKVREAIGLLEDDIIDAEEKNRMLRLVVERIEYTNEGDKRRRTENLHLDVHLR

SEQ ID NO: 27427 - DNA, 50 bp, Gordonibacter urolithinfaciens
  source 1..50: mol_type = genomic DNA
taaacatgtcatcgacatgcatacgagtacgcacaccgatgacagacttc

SEQ ID NO: 27428 - DNA, 40 bp, Gordonibacter urolithinfaciens
  source 1..40: mol_type = genomic DNA
caagacggggctcgccatggagtacgccgacgtggtgttc

SEQ ID NO: 27429 - DNA, 40 bp, Gordonibacter urolithinfaciens
  source 1..40: mol_type = genomic DNA
caagacggggctcgccatgatgtacgccgacgtggtgttc

SEQ ID NO: 27430 - DNA, 50 bp, Gordonibacter urolithinfaciens
  source 1..50: mol_type = genomic DNA
tgaacatgacatacacacatatacatatacacacagatgtgacagacatc

SEQ ID NO: 27431 - protein, 628 aa, Phocaeicola dorei
MKAAFLIRCSTKNQDLNRQTRDLTRLAKSMGYEYDLENLIYGEKITGKDDVTKKNRDSIDRLLRAAKEQRFDVVLVSEVSRMSRDPASGRIYVRLLINMNIPVYFKDIDLWTINPETGKKVRDAELVIGAAFDAAWKYLKSMKTQIASARRNELDNNRISIGQPYFGYKRYEGIDKSKKNQIVVNEEEAEVVQAVYNEYLKEGATLKSTALAITDKYGEKLNRKFSLGTIEHILTYESYATGIKKVNLKDPDTDEVEVFDVNTPIIIDKELYEAATNKRKKNRVKDEPYPNQQVYLLSKLIKCPDCGYTLTPRRKAGEFGQTYRLVNGKPAVSWLCMSGINNITDCTNRTSIANEKLEPIIWELVKKELIGYANMNDEKREEQIRECEEKIEYQNYSIQNFTKEIDKLKKRLSTAYQFSINAAEMAGDDEDMRTMAMEEFNRTAKGVRQEMKNFEKSIEQAKGELEKLRDLKTFYSQPTLPKDYLEQIEGNFTEKRNLVKQLITKIVPYRITTFKKKERESGVKTCNKMITVKNGAVLLEVYTIGGVYNVFYNANSKFKVKTAYYVHGEYATFQNGIRKYPAYDEGEYFVISNANMVMETDDIDEVVTVNEFVAIAIANNWVIEYQYI

SEQ ID NO: 27432 - DNA, 50 bp, Phocaeicola dorei
  source 1..50: mol_type = genomic DNA
tggttaaagtgtttattctgttgttcaacataaagaaattacttgcatag

SEQ ID NO: 27433 - DNA, 40 bp, Phocaeicola dorei
  source 1..40: mol_type = genomic DNA
tctattaaattccggcaactcgtctagaaagagcaaaccg

SEQ ID NO: 27434 - DNA, 40 bp, Phocaeicola dorei
  source 1..40: mol_type = genomic DNA
tctattaaattccggcaacgagtctagaaagagcaaaccg

SEQ ID NO: 27435 - DNA, 50 bp, Phocaeicola dorei; identical to SEQ ID NO: 6150
  source 1..50: mol_type = genomic DNA

SEQ ID NO: 27436 - protein, 509 aa, Chryseobacterium shandongense
MKIADLYIRVSTDEQADKGYSQRDQEERLRRYCSQNNFTVGNVIYEDHSAKSFNRPEWKKLLTELKKKGSRTNVILFTKWDRFSRNAGDAYQMISILSKLGVDLQAVEQPLDLSIPENKMMLAIYLAAPEVENDRRALNVFYGMRRAVKEGRVMGKAPFGYANKITENGKKYIAIKEPEATKMKWAFNELAKGIYAINSIRTKINESLRKGVSRTSFHIAIRNPIYYGKVFVPKHKDEQACFVDGQHEPLISEELFDRVQEKLDGKKRPKRPNTKITVQENFPLRGFLTCPNCGKTLTASASRGRNNRYYYYHCNSTCGFRERAEIVNKAFEDGLMALEMNTPVKKYLKKLLTENYQNFISDPLKEKKKIADEIDTLNNKLYFARNKFLSEIIDDDEYLEIKRECKERISKLEEELNKSSVPQISNIDKLLEQALKTLQNIGKHYQEGGIETKRAIIGSIFPEKLEFDGKHYRTARINSIAYHIFQINNGLDGVKKKRNDQNDHFSLNV

SEQ ID NO: 27437 - DNA, 50 bp, Chryseobacterium shandongense
  source 1..50: mol_type = genomic DNA
aaatgatcatttctccttgaatgtagtcttaaaagaaaataagtcgaacc

SEQ ID NO: 27438 - DNA, 40 bp, Chryseobacterium shandongense
  source 1..40: mol_type = genomic DNA
aacattcttcctgttatgtagactcacagggattcgaacc

SEQ ID NO: 27439 - DNA, 40 bp, Chryseobacterium shandongense
  source 1..40: mol_type = genomic DNA
aacattcttcctgttatgtctactcacagggattcgaacc

SEQ ID NO: 27440 - DNA, 50 bp, Chryseobacterium shandongense
  source 1..50: mol_type = genomic DNA
gaatgatcatccttcctgaaatttctcttaaaaagcagagaagtagaacc

SEQ ID NO: 27441 - protein, 547 aa, Pseudomonas syringae
MPVAFSYVRYSSLRQADGDSLRRQTAMVAEWLKHHPEYVLSADDAYQDLGRSGFSGAHLDNAFGRLRAAVSTGIIKPGDCILIEAIDRAGRLAPSIMLNLLTEIVNAGVSLISLDDGITYDSDPYKSNNLFLLVAKVQQAYQYSDALSRRVKSAYERKRETARSGGATGRRAPIWIKTEYPNGKKAQPVVSLREDLAPLVAQAFQDYADGLGERRIHHRLRDQHPELAKLSTTSLKRWMRNPTAIGNWNDIPDVYPAVVSKELWYRVQKRLNQKSKPKSAASNHLLVGLVKCAKCRANFHVHITPDNAAMKCGQRHRLGDQGCSNKKSLPMAVLDLIRCQTTFKALQRASLSRNLTASEKRALEIEGELAELNRQAATAAEGAVKYGMTAFGPALDRITAQIGVLEDEKLTLVSKAAPSTDGEMIDLQEELLDVDEMRLNALLQEAEYVMWCDDRTITVEEPSIEFSAERQVITYLGKDRVKGVFRITWNGARIDLPDLLSAPQRAELEQYMAQEARYKSGELERTVMRFNSDTGDMDHVSGPPLKS

SEQ ID NO: 27442 - DNA, 50 bp, Pseudomonas syringae
  source 1..50: mol_type = genomic DNA
aaaacacgcgatgcaactatttgcgcgctataggttgcaatgttatgatt

SEQ ID NO: 27443 - DNA, 40 bp, Pseudomonas syringae
  source 1..40: mol_type = genomic DNA
aatccgcaccccgatgaatgcggtgatcggcatgctggag

SEQ ID NO: 27444 - DNA, 40 bp, Pseudomonas syringae
  source 1..40: mol_type = genomic DNA
aatccgcaccccgatgaattgggtgatcggcatgctggag

SEQ ID NO: 27445 - DNA, 50 bp, Pseudomonas syringae
  source 1..50: mol_type = genomic DNA
aaaacacatgatccaactatatgctgcctataggagaaaaacttcagatt

SEQ ID NO: 27446 - protein, 550 aa, Vibrio alginolyticus
MSKYHLYHRVSTSVQSEEGHGIARQQQGSEIWIENHNKKRIDDGLPTYSRGQIYEDRGRSGYTAANLKKGELGQLMSDIERGFIAKGDIIVIELIDRFSRAKPDFVRKQFEQILSAGVKIAITKWDIVFEEDMQGIEGVSARVLLEISIYLANQESSQKSARIRASNNTMKEQGLKHIAKTPIWLTRSYDRKNHEVIPQNAEIVQKIFELKLKYGWGAIRIMNKLRDLEAEGELKGFVTVGDEPSLVLARYTYNQKGQLVRGALNSPLAESTINAVLRNKNVIGQLGEQKTYYPPIVDEGVYYAVQKNFDTNRGGGGSGKFNNVFRNIATCGWPSDRGNECGYTLAYGRKPGTKPPKGMYLKCNNKKKRHRCKAKNVNYFQAQNIVYGVLKEIKYEISSSIDISALEAQRGEKTEHLKNIRQFLARNPNDTGWLELYDKLRLEEAEIMAQLESAKAKITGTLKELNLDLGNSEGRYKFNQIMKDYKIKIIFYEMQIVIKVGVWNDFEIRIPHDYTERDVSKLTITAKDTMQGIVLRKGKTPSLLLSSRKL

SEQ ID NO: 27447 - DNA, 50 bp, Vibrio alginolyticus
  source 1..50: mol_type = genomic DNA
atgtcgtccatcatctagttgactaaagctaattgtatgatagactgcat

SEQ ID NO: 27448 - DNA, 40 bp, Vibrio alginolyticus; identical to SEQ ID NO: 8223
  source 1..40: mol_type = genomic DNA

SEQ ID NO: 27449 - DNA, 40 bp, Vibrio alginolyticus; identical to SEQ ID NO: 8224
  source 1..40: mol_type = genomic DNA

SEQ ID NO: 27450 - DNA, 50 bp, Vibrio alginolyticus
  source 1..50: mol_type = genomic DNA
atggggtccattccctaattaccattagctaactgaattcaagagtgcat

SEQ ID NO: 27451 - protein, 550 aa, Vibrio diabolicus; identical to SEQ ID NO: 27446

SEQ ID NO: 27452 - DNA, 50 bp, Vibrio diabolicus; identical to SEQ ID NO: 27447
  source 1..50: mol_type = genomic DNA

SEQ ID NO: 27453 - DNA, 40 bp, Vibrio diabolicus; identical to SEQ ID NO: 1343
  source 1..40: mol_type = genomic DNA

SEQ ID NO: 27454 - DNA, 40 bp, Vibrio diabolicus; identical to SEQ ID NO: 1344
  source 1..40: mol_type = genomic DNA

SEQ ID NO: 27455 - DNA, 50 bp, Vibrio diabolicus; identical to SEQ ID NO: 27450
  source 1..50: mol_type = genomic DNA

SEQ ID NO: 27456 - protein, 556 aa, Anaerobutyricum soehngenii
MAMMNEMEYRTIGSALAGGYRAAVYCRLSKDDDLQGESASIANQRDMLEKYCEKQGWEVVAVYQDDGFTGLNMERPDLQRMLRAIERRQINLVITKDLSRLGRNYLQTGHLIEDFFPRNGVRYIAMNDGIDTLRDNNDIAPFKNILNEMYSKDISKKVHSSYLLKAQKGQFTGCLAPFGYRKDPEDKNHLLIDEETAPIVRLIFGYALNGHGPNYIRRRLEEEKIPCPTWWNRERGLRNTRTKWEKKDPENGRYMWDFSVIKDLLMNPVYTGAIASQKKDYRFKIGTIGEKKPEDWIVVEGQHEPLIDRMSFDIVQNKLKSRQRPGQTNEISLFAGLIKCGECGKSLTIRYTNAKHPQQIYSCKTYNAFGKNHCTQHRIDYDTLYSHVLRKIRECARAALMDGEAVADRLTNTCEAEQREQREAMERSLTRDEERIEVLDKMIMRLYEDMIAGRISEQNFNTMLEKTQTEQAELKAKVSEGRKRLSDEVQLANDAKQWVEAIQEYANITELDAATLNRLIKEIVVHERIDEDKTRHISIEIHFNLKPIPEVEQVTA

SEQ ID NO: 27457 - DNA, 50 bp, Anaerobutyricum soehngenii; identical to SEQ ID NO: 9757
  source 1..50: mol_type = genomic DNA

SEQ ID NO: 27458 - DNA, 40 bp, Anaerobutyricum soehngenii; identical to SEQ ID NO: 26568
  source 1..40: mol_type = genomic DNA

SEQ ID NO: 27459 - DNA, 40 bp, Anaerobutyricum soehngenii
  source 1..40: mol_type = genomic DNA
gaaatcccaggggattaagctgctgatggcgggaggcggt

SEQ ID NO: 27460 - DNA, 50 bp, Anaerobutyricum soehngenii
  source 1..50: mol_type = genomic DNA
tgttacacattgaagcgtatagaactgtgcatgcattacgtaagggatca

SEQ ID NO: 27461 - protein, 556 aa, Clostridium innocuum
MAMMNEMEYRTIGSALAGGYRAAVYCRLSKDDDLQGESASIANQRDMLEKYCEKQGWEVVAVYQDDGFTGLNMERPDLQRMLRSIERRQINLVITKDLSRLGRNYLQTGHLIEDFFPRNGVRYIAMNDGIDTLRDNNDIAPFKNILNEMYSKDISKKVHSSYLLKAQKGQFTGCLAPFGYRKDPEDKNHLLIDEETAPIVRLIFGYALNGHGPNYIRRRLEEEKIPCPTWWNRERGLRNTRTKWEKKDPENGRYMWDFSVIKDLLMNPVYTGAIASQKKDYRFKIGTIGEKKPEDWVVVEGQHEPLIDRMSFDIVQNKLKSRQRPGQTNEISLFAGLIKCGECGKSLTIRYTNAKHPQRIYSCKTYNAFGKNHCTQHRIDYDTLYSHVLRKIRECARAALMDGEAVADRLTNTCEAEQREQREAMERSLTRDEERIEVLDKMVMRLYEDMIAGRISEQNFNTMLEKTQTEQTELKTKVSEGRKRLSDEVQLANDAKQWVEAIQEYANITELDAATLNRLIKEIVVHERIDEDKTRHISIEIHFNLKPIPEVEQVTA

SEQ ID NO: 27462 - DNA, 50 bp, Clostridium innocuum; identical to SEQ ID NO: 18702
  source 1..50: mol_type = genomic DNA

SEQ ID NO: 27463 - DNA, 40 bp, Clostridium innocuum
  source 1..40: mol_type = genomic DNA
aaaatcacagggcattaagcagctcatggcgggcggcggc

SEQ ID NO: 27464 - DNA, 40 bp, Clostridium innocuum
  source 1..40: mol_type = genomic DNA
aaaatcacagggcattaagctgctcatggcgggcggcggc

SEQ ID NO: 27465 - DNA, 50 bp, Clostridium innocuum; identical to SEQ ID NO: 27460
  source 1..50: mol_type = genomic DNA

SEQ ID NO: 27466 - protein, 556 aa, Clostridium innocuum
MAMMNEMEYRTIGSALAGGYRAAVYCRLSKDDDLQGESASIANQRDMLEKYCEKQGWEVVAVYQDDGFTGLNMERPDLQRMLRAIERRQINLVITKDLSRLGRNYLQTGHLIEDFFPRNGVRYIAMNDGIDTLRDNNDIAPFKNILNEMYSKDISKKVHSSYLLKAQKGQFTGCLAPFGYRKDPEDRNHLLIDEETAPIVRLIFGYALNGHGPNYIRRRLEEEKIPCPTWWNRERGLRNTRTKWEKKDPENGRYMWDFSVIKDLLMNPVYTGAIASQKKDYRFKIGTIGEKKPEDWIVVEGQHEPLIDRMSFDIVQNKLKSRQRPGQTNEISLFAGLIKCGECGKSLTIRYTNAKHPQQIYSCKTYNAFGKNHCTQHRIDYDTLYSHVLRKIRECARAALMDGEAVADRLTNTCEAEQREQREAMERSLTRDEERIEVLDKMVMRLYEDMIAGRISEQNFSTMLEKTQTEQTELKTKVSEGRKRLSDEVQLANDAKQWVEAIQEYANITELDAATLNRLIKEIVVHERIDEDKTRHISIEIHFNLKPIPEVEQVTA

SEQ ID NO: 27467 - DNA, 50 bp, Clostridium innocuum; identical to SEQ ID NO: 18702
  source 1..50: mol_type = genomic DNA

SEQ ID NO: 27468 - DNA, 40 bp, Clostridium innocuum
  source 1..40: mol_type = genomic DNA
cgatctgggaatgattatgcagctgatagagagtggtgtg

SEQ ID NO: 27469 - DNA, 40 bp, Clostridium innocuum
  source 1..40: mol_type = genomic DNA
cgatctgggaatgattatgctgctgatagagagtggtgtg

SEQ ID NO: 27470 - DNA, 50 bp, Clostridium innocuum; identical to SEQ ID NO: 27460
  source 1..50: mol_type = genomic DNA

SEQ ID NO: 27471 - protein, 556 aa, Clostridium symbiosum
MAMMNEMEYRTIGKALAGGYRAAVYCRLSKDDDLQGESASIANQRDMLEKYCEKQGWEVVAVYQDDGFTGLNMERPDLQRMLRAIERRQINLVITKDLSRLGRNYLQTGHLIEDFFPRSGVRYIAMNDGIDTLRDNNDIAPFKNILNEMYSKDISKKVHSSYLLKAQKGQFTGCLAPFGYRKDPEDKNHLLIDEETAPIVRLIFGYALNGHGPNYIRRRLEEEKIPCPTWWNRERGLRNTRTKWEKKDPENGRYMWDFSVIKDLLMNPVYTGAIASQKKDYRFKIGTIGEKKPEDWIVVEGQHEPLIDRMSFDIVQNKLKSRQRPRQTNEISLFAGLIKCGECGKSLTIRYTNAKHPQQIYSCKTYNAFGKNHCTQHRIDYDTLYSHVLRKIRECARAALMDGEAVADRLTNTCEAEQREQREAMERSLTRDEERIEVLDKMVMRLYEDMIAGRISEQNFSTMLEKTQTEQTELKTKVSEGRKRLSDEVQLANDAKQWVEAIQEYANITELDAATLNRLIKEIVVHERIDEDKTRHISIEIHFNLKPIPEVEQVTA

SEQ ID NO: 27472 - DNA, 50 bp, Clostridium symbiosum; identical to SEQ ID NO: 18702
  source 1..50: mol_type = genomic DNA

SEQ ID NO: 27473 - DNA, 40 bp, Clostridium symbiosum
  source 1..40: mol_type = genomic DNA
caagagccagggaatcaagcagcttgtcgcgggcggaggc

SEQ ID NO: 27474 - DNA, 40 bp, Clostridium symbiosum
  source 1..40: mol_type = genomic DNA
caagagccagggaatcaagctgcttgtcgcgggcggaggc

SEQ ID NO: 27475 - DNA, 50 bp, Clostridium symbiosum; identical to SEQ ID NO: 27460
  source 1..50: mol_type = genomic DNA

SEQ ID NO: 27476 - protein, 556 aa, Bariatricus massiliensis
MAMMNEMEYRTIGKALAGGYRAAVYCRLSKDDDLQGESASIANQRDMLEKYCEKQGWEVVAVYQDDGFTGLNMERPDLQRMLRAIERRQVNLVITKDLSRLGRNYLQTGHLIEDFFPRNGVRYIAMNDGIDTLRDNNDIAPFKNILNEMYSKDISKKVHSSYLLKAQKGQFTGCLAPFGYRKDPEDKNHLLIDEETAPIVRLIFGYALNGHGPNYIRRRLEEEKIPCPTWWNRERGLRNTRTKWEKKDPENGRYMWDFSVIKDLLMNPVYTGAIASQKKDYRFKIGTIGEKKPEDWIVVEGQHEPLIDHMSFDIVQNKLKSRQRPGQTNEISLFAGLIKCGECGKSLTIRYTNAKHPQQIYSCKTYNAFGKNHCTQHRIDYDTLYSHVLRKIRECARAALMDGKAVADRLTNTCEAEQREQREAMERSLTRDEERIEVLDKMVMRLYEDMIAGRISEQNFNTMLEKTQTEQTELKAKVSEGRKRLSDEVQLANDAKQWVEAIQEYANITELDAATLNRLIKEIVVHERIDEDKTRHISIEIHFNLKPIPEVEQVTA

SEQ ID NO: 27477 - DNA, 50 bp, Bariatricus massiliensis; identical to SEQ ID NO: 18702
  source 1..50: mol_type = genomic DNA

SEQ ID NO: 27478 - DNA, 40 bp, Bariatricus massiliensis
  source 1..40: mol_type = genomic DNA
caaaagtcagggtattaagcaactcatggctggcggcggc

SEQ ID NO: 27479 - DNA, 40 bp, Bariatricus massiliensis
  source 1..40: mol_type = genomic DNA
caaaagtcagggtattaagctactcatggctggcggcggc

SEQ ID NO: 27480 - DNA, 50 bp, Bariatricus massiliensis; identical to SEQ ID NO: 27460
  source 1..50: mol_type = genomic DNA

SEQ ID NO: 27481 - protein, 556 aa, Enterocloster bolteae
MAMMNEMEYRTIGSALAGGYRAAVYCRLSKDDDLQGESASIANQRDMLEKYCEKQGWEVVAVYQDDGFTGLNMERPDLQRMLRAIERRQINLVITKDLSRLGRNYLQTGHLIEDFFPRNGVRYIAMNDGIDTLRDNNDIAPFKNILNEMYSKDISKKVHSSYLLKAQKGQFTGCLAPFGYRKDPEDKNHLLIDEETAPIVRLIFGYALNGHGPNYIRRRLEEEKIPCPTWWNRERGLRNTRTKWEKKDPENGRYMWDFSVIKDLLMNPVYTGAIASQKKDYRFKIGTIGEKKPEDWIVVEGQHEPLIDRMSFDIVQNKLKSRQRPGQTNEISLFAGLLKCGECGKSLTIRYTNAKHPQRIYSCKTYNAFGKNHCTQHRIDYDTLYSHVLRKIRECARAALMDGEAVADRLTNTCEAEQREQREAMERSLTRDEERIEVLDKMVMRLYEDMIAGRISEQNFNTMLERTQTEQTELKTKVSEGRKRLSDEVQLANDAKQWVEAIQEYANITELDAATLNRLIKEIVVHERIDENKTRHISIEIHFNLKPIPEVEQVTA

SEQ ID NO: 27482 - DNA, 50 bp, Enterocloster bolteae
  source 1..50: mol_type = genomic DNA
ttttacacctaattgggtatgaaacagttcatggctaattaaagggagca

SEQ ID NO: 27483 - DNA, 40 bp, Enterocloster bolteae
  source 1..40: mol_type = genomic DNA
taaatcccttcagatgagacaattcatggcagatggtatg

SEQ ID NO: 27484 - DNA, 40 bp, Enterocloster bolteae
  source 1..40: mol_type = genomic DNA
taaatcccttcagatgagactattcatggcagatggtatg

SEQ ID NO: 27485 - DNA, 50 bp, Enterocloster bolteae; identical to SEQ ID NO: 27460
  source 1..50: mol_type = genomic DNA

SEQ ID NO: 27486 - protein, 556 aa, Anaerobutyricum hallii; identical to SEQ ID NO: 27461

SEQ ID NO: 27487 - DNA, 50 bp, Anaerobutyricum hallii; identical to SEQ ID NO: 18702
  source 1..50: mol_type = genomic DNA

SEQ ID NO: 27488 - DNA, 40 bp, Anaerobutyricum hallii
  source 1..40: mol_type = genomic DNA
aaaatcccagggaattaaacagctgatgagcggtggtggt

SEQ ID NO: 27489 - DNA, 40 bp, Anaerobutyricum hallii
  source 1..40: mol_type = genomic DNA
aaaatcccagggaattaaactgctgatgagcggtggtggt

SEQ ID NO: 27490 - DNA, 50 bp, Anaerobutyricum hallii; identical to SEQ ID NO: 27460
  source 1..50: mol_type = genomic DNA

SEQ ID NO: 27491 - protein, 556 aa, Faecalibacterium prausnitzii; identical to SEQ ID NO: 18696

SEQ ID NO: 27492 - DNA, 50 bp, Faecalibacterium prausnitzii; identical to SEQ ID NO: 18697
  source 1..50: mol_type = genomic DNA

SEQ ID NO: 27493 - DNA, 40 bp, Faecalibacterium prausnitzii
  source 1..40: mol_type = genomic DNA
caaatcccagggtatgaaacagctgatggctggcggcggc

SEQ ID NO: 27494 - DNA, 40 bp, Faecalibacterium prausnitzii
  source 1..40: mol_type = genomic DNA
caaatcccagggtatgaaactgctgatggctggcggcggc

SEQ ID NO: 27495 - DNA, 50 bp, Faecalibacterium prausnitzii; identical to SEQ ID NO: 27460
  source 1..50: mol_type = genomic DNA

SEQ ID NO: 27496 - protein, 502 aa, Alkalihalobacillus hwajinpoensis
MTMIGIYTRVSTEEQARSGYSLKEQLRACREKAGTNDVIEYVDEGLSGEFLDRPSLTKLRKDVLADVIDVVICLDPDRLSRKLMNQLILSEEIEKKAQLIFVNGEYKRTPEGMLFYQMRGAIAEFEKAKITERMSRGRREKARQGKVLRDFQVYGYSYDKEQEQFKINEYEAKVVKLIFELFTNTNDLVKGINGIAKYLSNQGIPTKRNAKQWHRQVVRQILMNRIYIGEFYQNRWNTEGMLGNKYKQEDERVKMKQRPKEEWIQVPCPAFIDKEQFEHAQILLKQSRRRWSGINKNEYLLSGLVRCSTCGNTMTGRRQKNWGTYVFEYSDVKNTAGAKHKGCGFRIKCEELDQVIWNTIKEWLNHPEKLDELSESEDDSYSYEKAELDRINYELSRVKNGRQRLINFLMEEDVIDEQEIREKLKELKEKELSLNNNKIKIQELLDGVEGNGIKEVLIQKASAHYLSLGSRDLEFGVKRDLIRSVVKEIKVSSDKKVEIYTF

SEQ ID NO: 27497 - DNA, 50 bp, Alkalihalobacillus hwajinpoensis
  source 1..50: mol_type = genomic DNA
atgcccccttctgactttagaatagaaattcttatgtcaaaagtgtagat

SEQ ID NO: 27498 - DNA, 40 bp, Alkalihalobacillus hwajinpoensis
  source 1..40: mol_type = genomic DNA
tgcaagatgcattgagaacgaaattctgatgcacctccgc

SEQ ID NO: 27499 - DNA, 40 bp, Alkalihalobacillus hwajinpoensis
  source 1..40: mol_type = genomic DNA
tgcaagatgcattgagaacctaattctgatgcacctccgc

SEQ ID NO: 27500 - DNA, 50 bp, Alkalihalobacillus hwajinpoensis
  source 1..50: mol_type = genomic DNA
atccccgctttacacataagaaaactgagtcttatggagtgtgtgtggat

SEQ ID NO: 27501 - protein, 461 aa, Staphylococcus aureus; identical to SEQ ID NO: 10486

SEQ ID NO: 27502 - DNA, 50 bp, Staphylococcus aureus; identical to SEQ ID NO: 10502
  source 1..50: mol_type = genomic DNA

SEQ ID NO: 27503 - DNA, 40 bp, Staphylococcus aureus
  source 1..40: mol_type = genomic DNA
aaatggcggatgaggtatcctgttacctcgttcgccaatt

SEQ ID NO: 27504 - DNA, 40 bp, Staphylococcus aureus
  source 1..40: mol_type = genomic DNA
aaatggcggatgaggtatcacgttacctcgttcgccaatt

SEQ ID NO: 27505 - DNA, 50 bp, Staphylococcus aureus
  source 1..50: mol_type = genomic DNA
aattgtgaggtacaaataattaggactatacctaatatgtgcttcataga

SEQ ID NO: 27506 - protein, 461 aa, Staphylococcus aureus; identical to SEQ ID NO: 10486

SEQ ID NO: 27507 - DNA, 50 bp, Staphylococcus aureus; identical to SEQ ID NO: 10502
  source 1..50: mol_type = genomic DNA

SEQ ID NO: 27508 - DNA, 40 bp, Staphylococcus aureus
  source 1..40: mol_type = genomic DNA
aattggcagatgaggtatcctgttacctcgtccgccattt

SEQ ID NO: 27509 - DNA, 40 bp, Staphylococcus aureus
  source 1..40: mol_type = genomic DNA
aattggcagatgaggtatcacgttacctcgtccgccattt

SEQ ID NO: 27510 - DNA, 50 bp, Staphylococcus aureus; identical to SEQ ID NO: 27505
  source 1..50: mol_type = genomic DNA

SEQ ID NO: 27511 - protein, 461 aa, Staphylococcus aureus; identical to SEQ ID NO: 10486

SEQ ID NO: 27512 - DNA, 50 bp, Staphylococcus aureus
  source 1..50: mol_type = genomic DNA
aattggaagttcagaataactatgctgatacctgatacacacttccaaca

SEQ ID NO: 27513 - DNA, 40 bp, Staphylococcus aureus; identical to SEQ ID NO: 27503
  source 1..40: mol_type = genomic DNA

SEQ ID NO: 27514 - DNA, 40 bp, Staphylococcus aureus; identical to SEQ ID NO: 27504
  source 1..40: mol_type = genomic DNA

SEQ ID NO: 27515 - DNA, 50 bp, Staphylococcus aureus; identical to SEQ ID NO: 27505
  source 1..50: mol_type = genomic DNA

SEQ ID NO: 27516 - protein, 461 aa, Staphylococcus argenteus; identical to SEQ ID NO: 10486

SEQ ID NO: 27517 - DNA, 50 bp, Staphylococcus argenteus; identical to SEQ ID NO: 10499
  source 1..50: mol_type = genomic DNA

SEQ ID NO: 27518 - DNA, 40 bp, Staphylococcus argenteus
  source 1..40: mol_type = genomic DNA
aattggcgaacaaggtatcttgatacctcgtccgccaatt

SEQ ID NO: 27519 - DNA, 40 bp, Staphylococcus argenteus
  source 1..40: mol_type = genomic DNA
aattggcgaacaaggtatcacgatacctcgtccgccaatt

SEQ ID NO: 27520 - DNA, 50 bp, Staphylococcus argenteus; identical to SEQ ID NO: 27505
  source 1..50: mol_type = genomic DNA

SEQ ID NO: 27521 - protein, 461 aa, Staphylococcus aureus; identical to SEQ ID NO: 10486

SEQ ID NO: 27522 - DNA, 50 bp, Staphylococcus aureus
  source 1..50: mol_type = genomic DNA
aattggaagttcggaataactatgaagatacctgatacacacttccaaca

SEQ ID NO: 27523 - DNA, 40 bp, Staphylococcus aureus
  source 1..40: mol_type = genomic DNA
taatggcggggttccgattaatgtacccaagccaccaatc

SEQ ID NO: 27524 - DNA, 40 bp, Staphylococcus aureus
  source 1..40: mol_type = genomic DNA
taatggcggggttccgattactgtacccaagccaccaatc

SEQ ID NO: 27525 - DNA, 50 bp, Staphylococcus aureus; identical to SEQ ID NO: 27505
  source 1..50: mol_type = genomic DNA

SEQ ID NO: 27526 - protein, 468 aa, Staphylococcus aureus
  REGION 10..43: note = misc_feature - Xaa can be any naturally occurring amino acid
MSSFDFLTSXXXXXXXXXXXXXXXXXXXXXXXXXXXXXXXXXXWKIHKVYTDAGYSGAKKDRPALQEMLNEIDNFDLVLVYKLDRLTRSVKDLLEILELFENKNVLFRSATEVYDTTSAMGRLFVTLVGAMAEWERTTIQERTAMGRRASARKGLAKTVPPFYYDRVNDKFVPNEYKKVLRFAVEEAKKGTSLREITIKLNNSKYKAPLGKNWHRSVIGNALTSPVARGHLVFGDIFVENTHEAIISEEEYEEIKLRISEKTNSTIVKHNAIFRSKLLCPNCNQKLTLNTVKHTPKNKEVWYSKLYFCSNCKNTKNKNACNIDEGEVLKQFYNYLKQFDLTSYKIENQPKEIEDVGIDIEKLRKERARCQTLFIEGMMDKDEAFPIISRIDKEIHEYEKRKDNDKGKTFNYEKIKNFKYSLLNGWELMEDELKTEFIKMAIKNIHFEYVKGIKGKRQNSLKITGIEFY

SEQ ID NO: 27527 - DNA, 50 bp, Staphylococcus aureus; identical to SEQ ID NO: 27522
  source 1..50: mol_type = genomic DNA

SEQ ID NO: 27528 - DNA, 40 bp, Staphylococcus aureus; identical to SEQ ID NO: 27523
  source 1..40: mol_type = genomic DNA

SEQ ID NO: 27529 - DNA, 40 bp, Staphylococcus aureus; identical to SEQ ID NO: 27524
  source 1..40: mol_type = genomic DNA

SEQ ID NO: 27530 - DNA, 50 bp, Staphylococcus aureus; identical to SEQ ID NO: 27505
  source 1..50: mol_type = genomic DNA

SEQ ID NO: 27531 - protein, 573 aa, Bacteroides finegoldii
MTKKAAIYLRVSSIDQNYERQEIELKALAKCLGYEIKYIFEEKRSAVLKMDTRDELTQMRKLTKNEIDRIFIWDITRLSRRAIDFITLINEFTDKGICLHFKDKNIITLDEDGKQDMFVSMYLYILGLFAQMDAENLKAKMRSGRERGLAIGHAYTGCAPYGYKLINKQLYIDEKEAETVRAIFNNYVDGKSIQHIIDILNSNKIPTRTGILWTRNSIYAIITNPVYKGKPELTSITKRDENKKPLEKITRVFKAPVIIESPIWDEAQVQRKKHKSFIDKSKEREALLRGILQCGNCGKAYCTAINGSGVPTYICSDNRANINQKLNCKNGGVACYFLDSICWQTIKDIYAYKNFQDTFTKEKAKNQQLLQENQTQINNFIDKQIELDKENERVNKGYRIGIYTDSEAIRAKGEINNNKARYEKMIEELKAQNSILTAKIKQDFSHYKIPTVELSYEEKKAVCKELIETAKIYSYPPNNRIVQLQLKMGLIFNIVLNPKRRLYYIIDNSTVTFNNPQSAPIFLREELKDKDFTVTCDNNDYFNEEIFGEYSFAQMWNIMDKYGYIQDYPKVKK

SEQ ID NO: 27532 - DNA, 50 bp, Bacteroides finegoldii
  source 1..50: mol_type = genomic DNA
cgtctatcaattgtttgcggcaattcattacaataaacaattgtaatact

SEQ ID NO: 27533 - DNA, 40 bp, Bacteroides finegoldii
  source 1..40: mol_type = genomic DNA
tgtaattgtatcgggaagttccgattcataatgtgtcacc

SEQ ID NO: 27534 - DNA, 40 bp, Bacteroides finegoldii
  source 1..40: mol_type = genomic DNA
tgtaattgtatcgggaagtaacgattcataatgtgtcacc

SEQ ID NO: 27535 - DNA, 50 bp, Bacteroides finegoldii
  source 1..50: mol_type = genomic DNA
catttattataggcttgctataataaattacagtaaggtattggaataat

SEQ ID NO: 27536 - protein, 495 aa, Curtobacterium flaccumfaciens
MNQPDASKPTAERLPAAIYARISRDKAGAGLGVDRQEADCRALAHRLGWDVVAVFVDNDISAYDRRKVRPQYRAMLEAVRTGQVRGIVAWHPDRLHRRAAELEEFITVAEAHNLQIQTAQAGSYDLATPAGRMVARMLGAAAQHEVDHSRERVQRAKMQAAADGKYRGGIRPFGFEKDGVTVRESEAKVIRESAKAVLAGRTLAALTRELNERGVPTTGRSAEWKYGALRDMLIRPRNAGLLARGLPGKTGQSYAYEEIGPASWEAIIPEDEWRALVSLLTDPARRINTSTEKKWLGSGIYRCGVPVVGEDGAEHACGGVLRATPHGGTAVRKYERRYLYRCSSSAHLTIGQKQTDEHIRNVVAELVRDPRIVAAMSPGNAHLAADRERRVALSARLEAFETDYALGNITGAQLRKFTERVEAELADVDTRLAQGISRSASSPVLRATDPGEAFLEAPLDVQRAVLSTVLRVEVLPATNRGSAWDAERLRITQIE

SEQ ID NO: 27537 - DNA, 50 bp, Curtobacterium flaccumfaciens
  source 1..50: mol_type = genomic DNA
atatgtcaaaaacttggttttgactcgtcaaaaccataaaatagacatat

SEQ ID NO: 27538 - DNA, 40 bp, Curtobacterium flaccumfaciens
  source 1..40: mol_type = genomic DNA
gtccgcgcacggggtggtctcgtcgacgtggcgaccgccg

SEQ ID NO: 27539 - DNA, 40 bp, Curtobacterium flaccumfaciens; identical to SEQ ID NO: 27538
  source 1..40: mol_type = genomic DNA

SEQ ID NO: 27540 - DNA, 50 bp, Curtobacterium flaccumfaciens
  source 1..50: mol_type = genomic DNA
aaatgtcaaatttttagttttttttcctcaaaaccaaattatggccatct

SEQ ID NO: 27541 - protein, 564 aa, Enterobacter kobei; identical to SEQ ID NO: 19231

SEQ ID NO: 27542 - DNA, 50 bp, Enterobacter kobei; identical to SEQ ID NO: 19232
  source 1..50: mol_type = genomic DNA

SEQ ID NO: 27543 - DNA, 40 bp, Enterobacter kobei
  source 1..40: mol_type = genomic DNA
gcgggcttttttgatggtgtcgcaatttttaatgccgtac

SEQ ID NO: 27544 - DNA, 40 bp, Enterobacter kobei
  source 1..40: mol_type = genomic DNA
gcgggcttttttgatggtgttgcaatttttaatgccgtac

SEQ ID NO: 27545 - DNA, 50 bp, Enterobacter kobei
  source 1..50: mol_type = genomic DNA
tgtgaatgtcatcttaaaaatacgttgcatacatcaatgtcaaggctgta

SEQ ID NO: 27546 - protein, 564 aa, Escherichia coli; identical to SEQ ID NO: 19231

SEQ ID NO: 27547 - DNA, 50 bp, Escherichia coli; identical to SEQ ID NO: 19232
  source 1..50: mol_type = genomic DNA

SEQ ID NO: 27548 - DNA, 40 bp, Escherichia coli
  source 1..40: mol_type = genomic DNA
gcgagcctttttaatggtgtcacaatttttgataccgtaa

SEQ ID NO: 27549 - DNA, 40 bp, Escherichia coli
  source 1..40: mol_type = genomic DNA
gcgagcctttttaatggtgttacaatttttgataccgtaa

SEQ ID NO: 27550 - DNA, 50 bp, Escherichia coli; identical to SEQ ID NO: 27545
  source 1..50: mol_type = genomic DNA

SEQ ID NO: 27551 - protein, 564 aa, Citrobacter freundii; identical to SEQ ID NO: 19231

SEQ ID NO: 27552 - DNA, 50 bp, Citrobacter freundii; identical to SEQ ID NO: 19232
  source 1..50: mol_type = genomic DNA

SEQ ID NO: 27553 - DNA, 40 bp, Citrobacter freundii
  source 1..40: mol_type = genomic DNA
tctggcttttttaatcgtgtcgcaattcttaatgccgtag

SEQ ID NO: 27554 - DNA, 40 bp, Citrobacter freundii
  source 1..40: mol_type = genomic DNA
tctggcttttttaatcgtgttgcaattcttaatgccgtag

SEQ ID NO: 27555 - DNA, 50 bp, Citrobacter freundii; identical to SEQ ID NO: 27545
  source 1..50: mol_type = genomic DNA

SEQ ID NO: 27556 - protein, 533 aa, Enterococcus faecalis; identical to SEQ ID NO: 12191

SEQ ID NO: 27557 - DNA, 50 bp, Enterococcus faecalis; identical to SEQ ID NO: 12192
  source 1..50: mol_type = genomic DNA

SEQ ID NO: 27558 - DNA, 40 bp, Enterococcus faecalis
  source 1..40: mol_type = genomic DNA
cccgacgcttgtattagctgatttaaaaggaggaacacct

SEQ ID NO: 27559 - DNA, 40 bp, Enterococcus faecalis
  source 1..40: mol_type = genomic DNA
cccgacgcttgtattagctggtttaaaaggaggaacacct

SEQ ID NO: 27560 - DNA, 50 bp, Enterococcus faecalis
  source 1..50: mol_type = genomic DNA
cagtgtctcctgactacaatctctgggggatagatgatattaatgcaact

SEQ ID NO: 27561 - protein, 516 aa, Bacillus cereus
MYRPESLDVCIYLRKSRKDVEEERRAIEEGSSYNALERHRKRLFAIAKAENHNIIDIFEEVASGESIQERPQMQQLLRKLEGNEIDGVLVIDLDRLGRGDMLDAGMIDRAFRYSSTKIITPTDVYDPDDESWELVFGIKSLISRQELKSITKRLQNGRIDSVKEGKHIGKKPPYGYLKDENLRLYPDPEKAWIVKKIFELMCDGKGRQMIAAELDRLGIDPPVTKRGAWDSSTITSIIKNEVYTGVIVWGKFKHKKRNGKYTRHKNPQEKWIMYENAHEPIISKELFDAANEAHSSRHKPAVITSKKLTNPLAGILKCKLCGYTMLIQTRKDRPHNYLRCNNPACKGKQKQSVFNLVEEKLLYSLQQIVDEYQAQKVEEVEIDDSKLISFKEKAIISKEKELKELQAQKGNLHDLLEQGIYTVEIFLERQKNLVERITSIENDIEVLQKEIETEQIKEHNKTEFIPALKTVIESYHKTTNIELKNQLLKTILSTVTYYRHPDWKTNEFEIQVYFKI

SEQ ID NO: 27562 - DNA, 50 bp, Bacillus cereus
  source 1..50: mol_type = genomic DNA
cgtgtacatggtggagtattaaactggtttaattctctaccatatacact

SEQ ID NO: 27563 - DNA, 40 bp, Bacillus cereus
  source 1..40: mol_type = genomic DNA
ggtactgtggcggttgtactgattcacttccccatatcca

SEQ ID NO: 27564 - DNA, 40 bp, Bacillus cereus
  source 1..40: mol_type = genomic DNA
ggtactgtggcggttgtaccaattcacttccccatatcca

SEQ ID NO: 27565 - DNA, 50 bp, Bacillus cereus
  source 1..50: mol_type = genomic DNA
cctgtgcatgattaaggataacaccaatttgattctaatatatatatatt

SEQ ID NO: 27566 - protein, 545 aa, Neobittarella massiliensis
MPEVLQQMLNYVIAIYIRLSAEDGDLSDEKSESNSVVNQRAYIRRFIELRPEFAGAQILEFCDDGYSGTNMERPAVRRLLEQVRQRKINCIIVKDMSRFGRDYIVVGDYLEQIFPFLDVRFIAINDSYDSKDHKYGSAGLIDVSFRNVIYDLYSKDLSEKVRSTKKQLAEKGYCVAPYAFFGYQKAPGNKHTLLVDEDAAAVVRRVFDLFTSGLSTTDIARKFNTEGVLTPLQRKRLQAVSRKWNCVDQNKNYWTSSMVRKILDDERYTGKAIYGKTTRKKVGSSRVKAVTENQWTVVDGAFPAIITQEVFDTAKSLNRSSHPGSAGESTRVFYRKIRCGHCGLAMERLQSAHPCYVCRTDRYKPDIGCPQDKIGEKELEQAVLASIRTMAQLVRGAVQAKQRQSAKDARHNQRLDRQIKAHQNSIQMRQQEKMAAFEDMVSGKVSSEDYQHKRGRCEKHIQRLEIKIKELEDAKRQAKGEELSAGSILPYTNVRTLTRELVDLLIQNIYIYSSTSIEIVWKCGDEYQRLLADTTKKEAAEHEQG

SEQ ID NO: 27567 - DNA, 50 bp, Neobittarella massiliensis
  source 1..50: mol_type = genomic DNA
tttggttttctcttgacattaggagatgatacagctatacttggactaaa

SEQ ID NO: 27568 - DNA, 40 bp, Neobittarella massiliensis
  source 1..40: mol_type = genomic DNA
ggtacaccacacctatgtggatgtcgacttctcgggcggc

SEQ ID NO: 27569 - DNA, 40 bp, Neobittarella massiliensis
  source 1..40: mol_type = genomic DNA
ggtacaccacacctatgtgtttgtcgacttctcgggcggc

SEQ ID NO: 27570 - DNA, 50 bp, Neobittarella massiliensis
  source 1..50: mol_type = genomic DNA
tttttttttcacatggaattaggatttgctccagaataatttggagtaaa

SEQ ID NO: 27571 - protein, 511 aa, Sphingopyxis macrogoltabida
MKPAILYLRVSSTEQIKGYGPDRQKNLGREYAARMGWQIEQEIADEGRSAFHGANRLEGAALHDFELEARNGLHQGKVLIVENIDRLSRQGAKAAAQLIWALNEHGVDVATYHDGFVYKTGNNGDMMELFSVIIKAQLAHEESANKSRRTKASWDKRHAEIANGSKATMAGRAPAWLTIRDGKYHAIEHRKQVLNEIYDLYIAGLGIYKIVQRLNDRKEPSWPIRKKDGAGGWYMPYVHRLLNNRAVLGEYITLEGECLAADYFPQVITAEKFARAQEVRSTKAKSGGRDYNRSYNLLSGLLSCAVCNGTGCYEHKGSNALPDRPIAMSCKRGAVSNRFHEHDRHHPQRGGLVGGIYLSVAGLPARIIVDLPRDTMFADRQGRAVMLAAWVIVRREIAEQANRSDHVLLNYGRQPGNAARQIGPAIFAGGTKLVIEAGNGRPPLCLFGHAAIFFCLVVKLARREARAALSWGSNSPALIASMIDAMMTGTSATFSTSTAFMPLANSSGLPP

SEQ ID NO: 27572 - DNA, 50 bp, Sphingopyxis macrogoltabida
  source 1..50: mol_type = genomic DNA
tttgtctacagtgttgcaatgaactccttcattgtgtaggttgtagacag

SEQ ID NO: 27573 - DNA, 40 bp, Sphingopyxis macrogoltabida
  source 1..40: mol_type = genomic DNA
ccgcgcctttttcaccgtatcgcagttcgggataccatag

SEQ ID NO: 27574 - DNA, 40 bp, Sphingopyxis macrogoltabida
  source 1..40: mol_type = genomic DNA
ccgcgcctttttcaccgtaatgcagttcgggataccatag

SEQ ID NO: 27575 - DNA, 50 bp, Sphingopyxis macrogoltabida
  source 1..50: mol_type = genomic DNA
tttctctgcgaggctgcaattaacatcttatttgttctggctccatacag

SEQ ID NO: 27576 - protein, 548 aa, Vibrio parahaemolyticus
MDKVIYPYVRFSTKKQEHGHSLSRQITRIKEYAIENGYKVNDSLELRDLGKSGFRGLNAKEGALSVFLRLLEEDKIPKDGSSYLCIEQFDRLSRMPAGDAYEVFRKILKQNVNIITLMDRKVYRKEDLNNMVSILSSLLIMEQAHIESQRKSDLISAVFKDKVKTLKSGGKVQFTYILPGWIDNNGTKKDPDFVLNEKVETVKMIIDMYLGGETMGHIARILNEKQVPQIARKKTKNRTNSWNSAKISHLLTNQTLLGKLYIRTTGDVIEDYYPAVITKDEWDLIQAKKRTQNSTKVAGRRSINIFQGRLFCADCGNKYYFETDDKKGKGGKRYIYHMLKCSGRRFHSCNSESLKYDDFTNPDLFFFRDIGEVDSDDILLVKKEIRDYEKEVESLKLEQSEIEDMFENDEINLRAYSLSISKVTDKIDDIEAKIVLNKQHLSFSSNEYRMEEFDKNNPESVSKAKNFIRKNYAGIIISSEYNIIIALMHSGEMSIRPLPRPYKYPDPIKGYPLLQKIKDNIQEQDRKGLLDGKFKELLDAFNFSDRYV

SEQ ID NO: 27577 - DNA, 50 bp, Vibrio parahaemolyticus
  source 1..50: mol_type = genomic DNA
tttcctgtaatcatcaagttaagagtagccaacttgatgattacagggaa

SEQ ID NO: 27578 - DNA, 40 bp, Vibrio parahaemolyticus; identical to SEQ ID NO: 8078
  source 1..40: mol_type = genomic DNA

SEQ ID NO: 27579 - DNA, 40 bp, Vibrio parahaemolyticus
  source 1..40: mol_type = genomic DNA
cgccggagccaaattgacctgaatgcgcttggctggaaac

SEQ ID NO: 27580 - DNA, 50 bp, Vibrio parahaemolyticus
  source 1..50: mol_type = genomic DNA
gttcctgcatgctctaagttaatgtgagcctacatacttgctacaggtaa

SEQ ID NO: 27581 - protein, 491 aa, Bacillus thuringiensis
MGLAAIYLRLSRNEEQLNIDEILLNHRNALTKLAKQQKLTYDIYQEISSGVNMERPELNLLLSRLDDYDALLVMDIDRISRDNAHAEEIKKMLIIHDIKILTPQGAIDLSQESNEMLFSFQAMMANFEYKQIRKRLGRGRLAAAEQGKWTMSNRVPLGYKKNKEKRLEVVEDEAKIIRFIFQKTLERVSANEIAKQLDILGWRSRQGKVLTSAHISNMRRNVVYYGVVKAGRKVNGRVVDEVFVEDAHEPIVSKQMFLEVQKILEENTTGNFFNKLKATRKLQNLIYCNCCKRKRYIQCDGNGVDYIKSCIYKVDNNKCRDRGYKYEPIEQFVLQKVKEKKPDFEQELQMLKSLDTTEVEKKLSIQRESLEKQINRFNKRQRNLKEMRMDGEISKAEFYEMRDENEEQIKQVKQQMELIDIKLENLSNTDEEQARLQDAIKTLDKLEELKAESCNTFLKKFIKKIWFSSNTEANHDTTRPKEDATIEIEWL

SEQ ID NO: 27582 - DNA, 50 bp, Bacillus thuringiensis
  source 1..50: mol_type = genomic DNA
gccaataaaaatagaaagtttacaaatgttaattttctatttttactcgg

SEQ ID NO: 27583 - DNA, 40 bp, Bacillus thuringiensis; identical to SEQ ID NO: 4253
  source 1..40: mol_type = genomic DNA

SEQ ID NO: 27584 - DNA, 40 bp, Bacillus thuringiensis; identical to SEQ ID NO: 8709
  source 1..40: mol_type = genomic DNA

SEQ ID NO: 27585 - DNA, 50 bp, Bacillus thuringiensis
  source 1..50: mol_type = genomic DNA
tccaataaaactaaaaggttaatttttgtttgttttttgcttttaccctg

SEQ ID NO: 27586 - protein, 491 aa, Bacillus wiedmannii; identical to SEQ ID NO: 27581

SEQ ID NO: 27587 - DNA, 50 bp, Bacillus wiedmannii; identical to SEQ ID NO: 27582
  source 1..50: mol_type = genomic DNA

SEQ ID NO: 27588 - DNA, 40 bp, Bacillus wiedmannii; identical to SEQ ID NO: 4258
  source 1..40: mol_type = genomic DNA

SEQ ID NO: 27589 - DNA, 40 bp, Bacillus wiedmannii; identical to SEQ ID NO: 8764
  source 1..40: mol_type = genomic DNA

SEQ ID NO: 27590 - DNA, 50 bp, Bacillus wiedmannii; identical to SEQ ID NO: 27585
  source 1..50: mol_type = genomic DNA

SEQ ID NO: 27591 - protein, 404 aa, Mycobacterium marinum; identical to SEQ ID NO: 22501

SEQ ID NO: 27592 - DNA, 50 bp, Mycobacterium marinum
  source 1..50: mol_type = genomic DNA
aattgatggtcttgttgtcgcgtggattcaaaactagcagaactcttgat

SEQ ID NO: 27593 - DNA, 40 bp, Mycobacterium marinum
  source 1..40: mol_type = genomic DNA
gaactctgcgagtcgcgtggagtctggcggacttggccgg

SEQ ID NO: 27594 - DNA, 40 bp, Mycobacterium marinum
  source 1..40: mol_type = genomic DNA
gaactctgcgagtcgcgtgatgtctggcggacttggccgg

SEQ ID NO: 27595 - DNA, 50 bp, Mycobacterium marinum
  source 1..50: mol_type = genomic DNA
aattcatggcaaaagtgtcccttgatttaaatactatctcaactttagaa

SEQ ID NO: 27596 - protein, 590 aa, Stenotrophomonas maltophilia
MPQLQIMPKVYSYTRMSTPEQLKGDSRRRQVDAANAYAARRGWVLEDRFDDLGVSAFHGKNHQFGALSHFLGLVDSGAIERGSVLIVESIDRLSRQDIGRALPLLLDLIHRGITVVTLSPEQEYSSQTVGDATNLIGALFIMARAHEESKIKSHRGREAWISKRSEARDAGKIATRRVPGWLVVKDGSIEVDQHRAEVVREIFELARDGWGAYSISRYLNERGEVPWGNKPNAVWRESYIKKLLRSRTVLGEYQPHTVRIEDGRQIRTEDGHAIADYYPKVIDAALFREVAVTLDARRVTGRGRKGQRFGNLFTGLLRCRCGAGYRFVSKGPPPKGGDYLHCSVALAKGNCSMQPLRYGLVEEFLLGQIESLDARRVMSGVLVDQRLSDALDEKRALEEQIDTSRNAIAKLTDFIIQEGTTGGARAVKVRLDDEERILAKATKQLAAIDLRVAEIRMASEGERRSALAQLITQWRSDPTNAPILRRALAEQIRSLVDRMVVSPGTHVLEEVLDGGPNESEDGEAVASSDDWRTTFVVKSEAELRKLFKDRNFEVHIYYRSGAEERVDAMRGPVFRANASRKMKEMRLVNG

SEQ ID NO: 27597 - DNA, 50 bp, Stenotrophomonas maltophilia
  source 1..50: mol_type = genomic DNA
gctccaataaacggctatcatatgaacatgttgtagcctattacaggtcc

SEQ ID NO: 27598 - DNA, 40 bp, Stenotrophomonas maltophilia
  source 1..40: mol_type = genomic DNA
gccagggctgccgatcaacaacagatggtgcccaccggcg

SEQ ID NO: 27599 - DNA, 40 bp, Stenotrophomonas maltophilia
  source 1..40: mol_type = genomic DNA
gccagggctgccgatcaacgtcagatggtgcccaccggcg

SEQ ID NO: 27600 - DNA, 50 bp, Stenotrophomonas maltophilia
  source 1..50: mol_type = genomic DNA
tctccactgggttcccatcagatggtcatgttgtaccttttgacagatca

SEQ ID NO: 27601 - protein, 514 aa, Escherichia coli
MKKVYSYIRFSSTKQAFGDSHRRQSKSIQDWLSSHPDHILDESLSFEDLGRSAFHGDHLKEGGALRAFLEAVKQGLIPSDSVLLVESLDRVSRQSISHAQETIRDILEHGITVVTLSDGETYNRQSLDDSLALIRMIILQERSHNESVIKSDRIKKAWSHKRQQFEQDGTKITGNCPGWLKLNSDGKSFSLIPHHVETIHRIFDEKLSGKSLHAIARDLNLENIPTITNKKVDTGWTPTRVRDLLLKESLIGVAYGVSDYFPPAISKEKFHAVQMIRGQGKGKKPTSQQPSSIDILKGLCKCAECDSTLRQRNTKKTPEGRYPRGYLECRNRLLGRCNSKAFNRSLIEDILIQKVFPTLQYLSLKSNGDNISVTTLKADITSLEKGINNLISLAEKGLGDLDTLAQRITNNRVELESKKKDLRQAEAIQSLRSDNDIQDSDRKTVEGRIKLQLAIKSFVKEIIFDYYKQEITIRLLNGKSFSGISVAREDKDFNHSSMFEVLQKSLLDIDEVHL

SEQ ID NO: 27602 - DNA, 50 bp, Escherichia coli
  source 1..50: mol_type = genomic DNA
agggtgcataagaaagtgaagattattattttcacttcctaaaacacccc

SEQ ID NO: 27603 - DNA, 40 bp, Escherichia coli; identical to SEQ ID NO: 6408
  source 1..40: mol_type = genomic DNA

SEQ ID NO: 27604 - DNA, 40 bp, Escherichia coli
  source 1..40: mol_type = genomic DNA
gtgagtaatgcgtaaaatccttcatgtggatatggactgc

SEQ ID NO: 27605 - DNA, 50 bp, Escherichia coli
  source 1..50: mol_type = genomic DNA
tggttgcataggaatgtgaacatacttaatatcattgaattatacacccc

SEQ ID NO: 27606 - protein, 526 aa, Klebsiella pneumoniae; identical to SEQ ID NO: 6266

SEQ ID NO: 27607 - DNA, 50 bp, Klebsiella pneumoniae
  source 1..50: mol_type = genomic DNA
ggtttgcatacttattgtgaacattggtcatggttacatgattagtatgc

SEQ ID NO: 27608 - DNA, 40 bp, Klebsiella pneumoniae; identical to SEQ ID NO: 6258
  source 1..40: mol_type = genomic DNA

SEQ ID NO: 27609 - DNA, 40 bp, Klebsiella pneumoniae; identical to SEQ ID NO: 6259
  source 1..40: mol_type = genomic DNA

SEQ ID NO: 27610 - DNA, 50 bp, Klebsiella pneumoniae; identical to SEQ ID NO: 6260
  source 1..50: mol_type = genomic DNA

SEQ ID NO: 27611 - protein, 523 aa, Sporanaerobacter acetigenes
MKVALYCRLSEEDKDKINPSDVSESIQNQRALLEGYALANNWQIYDVYSDDDWSGLDADRPDWNRLLKDAEAGKFDTIICKSQSRFTRDMEAVEKYIHKKFIEWGIRFIGLVDNADTSNKGNKKQRQIIGLTNEWYCEDVSDNVKAAFDVKRKSGKFIGSFAAFGYIKDPNDNNKLIVDEEAAKIVRQIYDWYLEGFGIQRITHELNKRQIPNPTIYKKRSGSNYKKTVDNNSLWNRTTVKRILQNPLYAGHMAQGKIKKVSYKSKKFVTIPKDEWIVVKNTHEPIVKESVFLEVQRRFKLRQRSTCEGQAHIFATKVKCLDCRSTMEKGTTSKDKGKYSFLRCKLYLKTPKENKMCTSHYIRLDTLEEVVTNKIKEYINNYLDEDNAVNILKIESEANNKVKSLEKEFDKTDMYLEEQTQLLKSLYIDKVKGIISEEMFVSLNSEFNKRKEFCEQKKKNIEKQIEEISNKANDIGEWTKTVKKYRDFDKLTHTMVNELIDFIEIGEKNKITGEQVVKIHWLF

SEQ ID NO: 27612 - DNA, 50 bp, Sporanaerobacter acetigenes
  source 1..50: mol_type = genomic DNA
ggctgttttaatgatacatttactctcgctaaggtatcataaacacaaca

SEQ ID NO: 27613 - DNA, 40 bp, Sporanaerobacter acetigenes
  source 1..40: mol_type = genomic DNA
atctattggaaccattggacttataaaagccatatccacc

SEQ ID NO: 27614 - DNA, 40 bp, Sporanaerobacter acetigenes
  source 1..40: mol_type = genomic DNA
atctattggaaccattggatttataaaagccatatccacc

SEQ ID NO: 27615 - DNA, 50 bp, Sporanaerobacter acetigenes
  source 1..50: mol_type = genomic DNA
ggctgttttacacttaccttttattttacataagtaaaaggaacacaacc

SEQ ID NO: 27616 - protein, 578 aa, Mesorhizobium opportunistum
MSTDIQLKGDSLRRQTERSKKYAEDHDLQLVEDFRLEDIGVSAFKGDNVSSGELGKFLGAVKAGRIPKGSYLLVESFDRLSRQKLNASVALFFDITSNGINLVTLSDNQLYKAGEAEFTQLIMSIVVMARANEESEIKSQRLSAAWGAKRKAIGDKKLTGLCPAWLELLEDRKSFGVLEDRAQIVRRIFEDSASGQGSFVITRRLNDLGTPAFGRSNGWVQSYVTKILQTRAVLGEFQPHTKQNGKRIPFGDPIPGYYPQIVDEELFLRAQFARGKRRIEGGGRKGEALRNLFTHLARCGYCGAPMHFLNKGFGPGGGTYLKCSQALRGLDCVSTTWRYPDFERSFFLYVKEIDLGEILAASATKSDAIALDDRLTSLKEKRKQLEVQRERTYALINQAISIDFVSAKLKECENELAEVDVQMADVELLLSTIREQQSISPDELHRLIDQLQVTEGPDAFAQRTMLAGRLREIVSDLRLDVEGTKPRLKKAEALFDQAGTDPIERQRSLEVIERTNIEAKRYNRSFSVVLADGVSRRVVLNNDDPTDFVAEVTVDAAGKPVGTDRGLNLQTLFGRASE

SEQ ID NO: 27617 - DNA, 50 bp, Mesorhizobium opportunistum
  source 1..50: mol_type = genomic DNA
ggtcgtttaattagccacaatgttaagataatgaagcttattaaattcaa

SEQ ID NO: 27618 - DNA, 40 bp, Mesorhizobium opportunistum
  source 1..40: mol_type = genomic DNA
gccgggaggcccgaccatcaacagattgtggccaccggcc

SEQ ID NO: 27619 - DNA, 40 bp, Mesorhizobium opportunistum
  source 1..40: mol_type = genomic DNA
gccgggaggcccgaccatcatcagattgtggccaccggcc

SEQ ID NO: 27620 - DNA, 50 bp, Mesorhizobium opportunistum
  source 1..50: mol_type = genomic DNA
gatagtttaggttcccataattttatgataatgttgtaactgaaatacat

SEQ ID NO: 27621 - protein, 503 aa, Klebsiella michiganensis
MIEAFSYVRFSTKSQATGTSLERQLNASRLFCTQHGLRLSNQSYHDLGISGFKNVRRPELEQMFEAIQTGVIPAGSFILIEAIDRLSRKGISHTQDILKKILQHDIKVAFVGEDAKTLQGQVLNKDSLNDLSSVIMVALAADLAHKESLRKSKLVRESKAIAREKAQNGVILPGKSMFWLDYDKEQRHYVLNDRATIAKEIIELRLLGHGPRKIAKILNERQIPGPTGKEWYQPSIKRIITSPVLYGAYQSHQVIEGQYIPVALVENYYPALIDYNLFSQIQFDNKNASKGRPSRVNPFGGVFYCECGNAICFKKSYSKTAKNDKHEYHYHYCIAAREGRCKNTKSIPNLTPILINLLDKLEIKNTSTKNIRSESIITKRNKIEQLNEMLLKLDTPPVSVLKTIGNLEKELQTLLEQPEVIAPRQEDIVVLSTINDPSKYNMHLKRLVKRITVYQINGPKNLRIKVDKTDGHHQNFLIKDGQTIFKSDTERLKKSLAGFKDGF

SEQ ID NO: 27622 - DNA, 50 bp, Klebsiella michiganensis
  source 1..50: mol_type = genomic DNA
ttttgactaaatgaaattgttatacagataacggtttcatttaaacaaat

SEQ ID NO: 27623 - DNA, 40 bp, Klebsiella michiganensis; identical to SEQ ID NO: 683
  source 1..40: mol_type = genomic DNA

SEQ ID NO: 27624 - DNA, 40 bp, Klebsiella michiganensis; identical to SEQ ID NO: 683
  source 1..40: mol_type = genomic DNA

SEQ ID NO: 27625 - DNA, 50 bp, Klebsiella michiganensis
  source 1..50: mol_type = genomic DNA
ttctgactataggtaattgtaatacaaagaacacttataaagaaataaaa

SEQ ID NO: 27626 - protein, 503 aa, Klebsiella grimontii; identical to SEQ ID NO: 27621

SEQ ID NO: 27627 - DNA, 50 bp, Klebsiella grimontii; identical to SEQ ID NO: 27622
  source 1..50: mol_type = genomic DNA

SEQ ID NO: 27628 - DNA, 40 bp, Klebsiella grimontii
  source 1..40: mol_type = genomic DNA
tagcggcaggtatgttaggcagataataattccacctgca

SEQ ID NO: 27629 - DNA, 40 bp, Klebsiella grimontii; identical to SEQ ID NO: 27628
  source 1..40: mol_type = genomic DNA

SEQ ID NO: 27630 - DNA, 50 bp, Klebsiella grimontii; identical to SEQ ID NO: 27625
  source 1..50: mol_type = genomic DNA

SEQ ID NO: 27631 - protein, 628 aa, Flavonifractor plautii
MRKNEKITALYERLSRDDFGKDDDQQRESNSISNQKAMLEDFAARQGFTNIVHFTDDGISGTCFDRPGFLAMMKEVEAGNVEYLCIKDMSRMGRDYLKVGQIMEILRQRGVRLIAINDGVDSARGDDDFTPFRNIMNEYYARDTSRKIRSTFQSKGKSGKHLTGTVIYGYLWNEARDQWLVDPEAADVVKRIFAMTIEGYGPYQIASKLKEEKVLIPSAYLAQHSEGVNKNKTFKDVYGWGSSTICNILEKREYLGHTINFKTRKHFKDKKSHYVPEDEWTIFENTHEPIIDQQIFDLVQKIRGNVRRYPDGWGEAAPLTGLLYCADCGGKMYVHRTNNGKRISQYTCSQYSKVPVGKLCTTQHRINEDVVLSLVSEMLKAIAEYAKHDRAEFVRVVQEAQSSQQTTEVRKQRTRLATAKQRVSELEVLLCKIYEDNILGKLSDSRYATLDAQYEKEQSELTAEISVLEKAVKSYEKHEKDADRFIALIDKYENFDKLTIAMLNEFIEKILVHERDRKGSIQTTQEVEIYFNFVGRFVPPAFGEVELTPEELEEIRKREERKDRLHQNYLKRKASGAQKRYEDKIKKRKKAEIEAKKAAIRAEDIAKGVFVPVSSLPQREPMKGVQTA

SEQ ID NO: 27632 - DNA, 50 bp, Flavonifractor plautii
  source 1..50: mol_type = genomic DNA
aaaagtccttgacaatttgtctctggtgttgtatgctctaaaagacttct

SEQ ID NO: 27633 - DNA, 40 bp, Flavonifractor plautii
  source 1..40: mol_type = genomic DNA
caaatataagctggcggcgggcaaaactgccaagagcata

SEQ ID NO: 27634 - DNA, 40 bp, Flavonifractor plautii
  source 1..40: mol_type = genomic DNA
caaatataagctggcggcgttcaaaactgccaagagcata

SEQ ID NO: 27635 - DNA, 50 bp, Flavonifractor plautii
  source 1..50: mol_type = genomic DNA
aaaaataacatgtcatttgtctcttttcatgtatgcctccacatacttca

SEQ ID NO: 27636 - protein, 553 aa, Gordonia otitidis
MPKPVLRALVGARVSVVQGPQKVSHLAQLETATKWAEAKGYEIVGSFEDLGVSAEKKPEDRPDLGPWLTDEGATKWDVIVWSKMDRAFRSTRHCVDFAQWAEERHKVVAFADDGLTLDYRPKIPGAVKGIDEMMAELFVYLGSFFAQLELNRFKTRAQDSHRALRQMDRWASGVPPLGFKVVDHPTGKGKGLDTDEIGKALIQSMATRLLDGWSFIRIAAWLNEAHTDPRCGRKHVAWCECRDGAALTNMDRSRVAKGNAAKGRPWTVNTVIDALTSPRTQGFKMTGRGKHARVVLDAEGEPIRLAPPTFDIATWKQIQDAAQQRKIGQRTPSKTTNPMLGVGVCGCQGCAACGEGSPCGASLAQQKSRNTTKSGKVNEHRYYRCGRTPLNCNGTVVNADQADATMEQMFLDRWGDAKVTRRVFVQGEDHSAELEQVNATIERLRMESDAGLLTTPGDEAQWLVRMQTQVAKRDQLAATPSRASGWVTEETEQTYREVWATADRRQLLIDHGAKFVLYPADAAGGVRQTAILAPGETGDVPKPRSTDRLFDVS

SEQ ID NO: 27637 - DNA, 50 bp, Gordonia otitidis
  source 1..50: mol_type = genomic DNA
gatttacaacgtgttgacacttctcagcaggtgtagatacgattgcaata

SEQ ID NO: 27638 - DNA, 40 bp, Gordonia otitidis
  source 1..40: mol_type = genomic DNA
caccgggatgttgcttgatcagcagttcccgatggagcgg

SEQ ID NO: 27639 - DNA, 40 bp, Gordonia otitidis
  source 1..40: mol_type = genomic DNA
caccgggatgttgcttgatgggcagttcccgatggagcgg

SEQ ID NO: 27640 - DNA, 50 bp, Gordonia otitidis
  source 1..50: mol_type = genomic DNA
gattttcaaatgcttaataattctgggcatatgcagaaccaactccaata

SEQ ID NO: 27641 - protein, 464 aa, Mycobacterium avium
MENAGRGLAGIYTRISADVNGDALGVQRQEADARNLCASRGWTVVQHFCDNDRSAYNRRKARPAYLAMLNAIKAGEINVIVAWHPDRLHRQMRELVPFIDLINEYGVRVETVTAGHYDLSTPSGRMNARIVGSVAEYESEHKAERVRRKLEANAAEGLNHGGSRPYGWNKDRMSLDPTEVVVVEEAAERVLAGESVKAIARALNAAGRRTATGREWRDVTVRDMLLRPRNAGLRVHHGVVVGRGKWTPILPADVFHQVEAILSNPTRRTNPGRDGRVHLLSVLARCGVCDTPVVVAKSKPYKGKSNAIYRCRSAHVIRDQRSVDELVTRVILARLSLPDAVDLLAEPDQADEAHAAATRVQELHDRLNDAAEAYAAGVITLAQLTTINSAVRPKLDQAQMVAASPDRGRVLGDLVKAIDPATVWERMTPDQRRAVVDMLVEVRIVPTGKGPRFDPKSVKITWKT

SEQ ID NO: 27642 - DNA, 50 bp, Mycobacterium avium
  source 1..50: mol_type = genomic DNA
acctgctacaaacgcaggctcacgcacctcagtatacgatcagcacatgg

SEQ ID NO: 27643 - DNA, 40 bp, Mycobacterium avium
  source 1..40: mol_type = genomic DNA
tcgcgcggcgggcatgacccacctgatggcggtgtcgggc

SEQ ID NO: 27644 - DNA, 40 bp, Mycobacterium avium
  source 1..40: mol_type = genomic DNA
tcgcgcggcgggcatgaccgccctgatggcggtgtcgggc

SEQ ID NO: 27645 - DNA, 50 bp, Mycobacterium avium
  source 1..50: mol_type = genomic DNA
ccttgattcttagccagacacacggctctcaatataaaattagcatatgg

SEQ ID NO: 27646 - protein, 573 aa, Shewanella algae
MTSPKPPIKHPNPSTTRQTPLAHSYIRFSSRAQEKGDSIQRQIASATSWSERNGIPLSDVVYRDLGISAFKKVDRPGLRQLTESIRAGIIKKDDYILLERLDRLSRKDLDIAQEEIKSILRMGVNVVAIEDNLELTPESVNDAQALIRIIILAENAHRQSREKSERIKAAYASARQRARDGEAVRRRLPCWLEVAPDGNTYTFHPLYLPIVQRIIELRHAGRGYSSIAKTLNAEGLPGRIGKSGSGTSKGWTGGSVREIVTSRALYGFYQPHITVEKERDDGTIKRVLQPDGDPIVDHYPTVIVYREWLAIQPTVTAKNRVPAGGYNKTDRLSGVARCGVCGGRVALRIYRRPSKKAEGGTKDYRHWVCVAGYSSGACSVTRAFPDLDQMIIKAIGHLEVVATPAPSTCSTSAVDSIRATIDANKERAEQLKSLLVDPEGGDVGFVYNALSTLQARIKELEQELEQLEKVEVSGDGNTTQADIDRLAGYVDDVELFNHELRKIVKAIRVQHFGKKGFRGVIEQVNGRRVGFVSTAPANPRRGHAKERIEFFARGLGIPEPDVELFPWETEQDD

SEQ ID NO: 27647 - DNA, 50 bp, Shewanella algae
  source 1..50: mol_type = genomic DNA
ttttcccatttctgatgaatcacaaaactgtttccaccaaaatgggaata

SEQ ID NO: 27648 - DNA, 40 bp, Shewanella algae; identical to SEQ ID NO: 23513
  source 1..40: mol_type = genomic DNA

SEQ ID NO: 27649 - DNA, 40 bp, Shewanella algae
  source 1..40: mol_type = genomic DNA
tttgcgagttttgaacacagggcttatcagtagcaggaaa

SEQ ID NO: 27650 - DNA, 50 bp, Shewanella algae
  source 1..50: mol_type = genomic DNA
ttttccctctatagtttaattacaggagtgatttcctgtcaatgggaata

SEQ ID NO: 27651 - protein, 524 aa, Bacillus subtilis
MIKNLENIHHVAIYLRISQEKKGENVETLENHRQILIEFCEEHGFTYEEFGEVISGGKSEITQRVALKRLLDNIEKYDAIACFELTRISRNGLISQTVKQYCIDYDKPILTPYQSYDLANSETDRLLFDVGSMISSHEHSTIGKRSKANKMQMSKAGLHVSGNVPFGYKRNNETKKLEIDEEAAPTIRYIFQLHSEGYGSFKIRDILNNEGYKSATGKAFNLPSIKRIIRNPAYKGTLIFNNRKKIKRNGKFEYDNVETITVENAHPAIIPPDVWDKANQDRESRALKSISIREKPAIKSGVTLLKDLIFCGVCGRKMIIRKDTKSSTGYTLKKCEYLLPNGEKCPNCGKKLDAVIARVLTGLTKYADDLSQMEEQLRKNNASDLNEKNQLKLNQIDKAIIEIEQKQKNLIELAMEGLFSHEEIREKKQELVKRMDELKAKREEVINSINSLSVEEEIELIQEKRKLILSLREDMDQEYGNELLKRFIKKIHFTRVIPEDILKRSTRNSERQNYPFNIKFEFFD

SEQ ID NO: 27652 - DNA, 50 bp, Bacillus subtilis
  source 1..50: mol_type = genomic DNA
ttacttattataaaaaatgacatacctactgtgttttttaaaataagcat

SEQ ID NO: 27653 - DNA, 40 bp, Bacillus subtilis; identical to SEQ ID NO: 648
  source 1..40: mol_type = genomic DNA

SEQ ID NO: 27654 - DNA, 40 bp, Bacillus subtilis
  source 1..40: mol_type = genomic DNA
tacctcaggctatgcggttcatacctttgtcgttgacgca

SEQ ID NO: 27655 - DNA, 50 bp, Bacillus subtilis
  source 1..50: mol_type = genomic DNA
ttacttatttatgcatatgacatacacattgtgtatacactattttcaat

SEQ ID NO: 27656 - protein, 508 aa, Bacillus velezensis
MFFEEKNTEELIRYEDYPYAIYARVSSEKDSQTTSIQNQIDICHHWIEKNNYEWKDEAIQLDDGISGTILLDRKAMQLILNKAKNHKLKMVVFKSISRLARDLKDALDIKEVLLAHGVRVVTLEEGYDSLYEGKNSMKFEMFSMFAAQYPQTISVSASSALAAKARRGEHSGRVPYGYKKNGKFLEIYEEQAKVIRMIFDLYNNHGYGQKRVVHKLNEELLLGNIPKPQQNERWQLSTVQRILQNPIYCGVFIANRYTQVKIGGRKKFIRNPEEKWTIYKDWAPKIITLEDYEKANNKKHVLKKRRFNPKNELRGLMKCGVCGANMVILFSYRRRKKDGVKVEHNYVKCSAYRRGGKNMCISHPPIQYKDLREIVIEKLKEKGRKLKLNVKSDYEEKKKRRIRETKVQIEAAEKKHKRLLELFLEDQMISKAEFQSKRKEIEDQLEQLNDKLFLLEREEEESIDITNIKIAFSLLKKKDQDLYEAFHALIEKLVIHEDGTVDFHYKFQ

SEQ ID NO: 27657 - DNA, 50 bp, Bacillus velezensis; identical to SEQ ID NO: 18607
  source 1..50: mol_type = genomic DNA

SEQ ID NO: 27658 - DNA, 40 bp, Bacillus velezensis
  source 1..40: mol_type = genomic DNA
tgtacggaatcacatttcaaatgccatgcagaagttaggt

SEQ ID NO: 27659 - DNA, 40 bp, Bacillus velezensis; identical to SEQ ID NO: 27658
  source 1..40: mol_type = genomic DNA

SEQ ID NO: 27660 - DNA, 50 bp, Bacillus velezensis
  source 1..50: mol_type = genomic DNA
ttattgcaataaaactggttaacaaaagaaatgcatagtcattgcagaaa

SEQ ID NO: 27661 - protein, 508 aa, Bacillus amyloliquefaciens
MFFEEKNTEELIRYEDYPYAVYARVSSEKDSQTTSIQNQIDICHHWIEKNNYEWKDEAIQLDDGISGTILLDRKAMQLILNKAKNHKLKMVVFKSISRLARDLKDALDIKEVLLAHGVRVVTLEEGYDSLYEGKNSMKFEMFSMFAAQYPQTISVSASSALAAKARRGEHSGRVPYGYKKNGKFLEIYEEQAKVIRMIFDLYNNHGYGQKRVVHKLNEELLLGNIPKPQQNERWQLSTVQRILQNPIYCGVFIANRYTQVKIGGRKKFIRNPEEKWTIYKDWAPKIITLEDYEKANNKKHVLKKRRFNPKNELRGLMKCGVCGANMVILFSYRRRKKDGVKVEHNYVKCSAYRRGGKNMCISHPPIQYKDLREIVIEKLKEKGRKLKLNVKSDYEEKKKRRIRETKVQIEAAEKKHKRLLELFLEDQMISKAEFQSKRKEIEDQLEQLNDKLFLLEREEEESIDITNIKIAFSLLKKKDQDLYEAFHALIEKLVIHEDGTVDFHYKFQ

SEQ ID NO: 27662 - DNA, 50 bp, Bacillus amyloliquefaciens; identical to SEQ ID NO: 18607
  source 1..50: mol_type = genomic DNA

SEQ ID NO: 27663 - DNA, 40 bp, Bacillus amyloliquefaciens; identical to SEQ ID NO: 27658
  source 1..40: mol_type = genomic DNA

SEQ ID NO: 27664 - DNA, 40 bp, Bacillus amyloliquefaciens; identical to SEQ ID NO: 27658
  source 1..40: mol_type = genomic DNA

SEQ ID NO: 27665 - DNA, 50 bp, Bacillus amyloliquefaciens; identical to SEQ ID NO: 27660
  source 1..50: mol_type = genomic DNA

SEQ ID NO: 27666 - protein, 498 aa, Bacillus amyloliquefaciens
MIRYEDYPYAVYARVSSEKDSQTTSIQNQIDICHHWIEKNNYEWKDEAIQLDDGISGTILLDRKAMQLILNKAKNHKLKMVVFKSISRLARDLKDALDIKEVLLAHGVRVVTLEEGYDSLYEGKNSMKFEMFSMFAAQYPQTISVSASSALAAKARRGEHSGRVPYGYKKNGKFLEIYEEQAKVIRMIFDLYNNHGYGQKRVVHKLNEELLLGNIPKPQQNERWQLSTVQRILQNPIYCGVFIANRYTQVKIGGRKKFIRNPEEKWTIYKDWAPKIITLEDYEKANNKKHVLKKRRFNPKNELRGLMKCGVCGANMVILFSYRRRKKDGVKVEHNYVKCSAYRRGGKNMCISHPPIQYKDLREIVIEKLKEKGRKLKLNVKSDYEEKKKRRIRETKVQIEAAEKKHKRLLELFLEDQMISKAEFQSKRKEIEDQLEQLNDKLFLLEREEEESIDITNIKIAFSLLKKKDQDLYEAFHALIEKLVIHEDGTVDFHYKFQ

SEQ ID NO: 27667 - DNA, 50 bp, Bacillus amyloliquefaciens; identical to SEQ ID NO: 18607
  source 1..50: mol_type = genomic DNA

SEQ ID NO: 27668 - DNA, 40 bp, Bacillus amyloliquefaciens; identical to SEQ ID NO: 27658
  source 1..40: mol_type = genomic DNA

SEQ ID NO: 27669 - DNA, 40 bp, Bacillus amyloliquefaciens; identical to SEQ ID NO: 27658
  source 1..40: mol_type = genomic DNA

SEQ ID NO: 27670 - DNA, 50 bp, Bacillus amyloliquefaciens; identical to SEQ ID NO: 27660
  source 1..50: mol_type = genomic DNA

SEQ ID NO: 27671 - protein, 508 aa, Bacillus velezensis
MFFEEKNTEELIRYEDYPYAVYARVSSEKDSQTTSIQNQIDICHHWIEKNNYEWKDEAIQLDDGISGTILLDRKAMQLILNKAKNHKLKMVVFKSISRLARDLKDALDIKEVLLAHGVRVVTLEEGYDSLYEGKNSMKFEMFSMFAAQYPQTISVSASSALAAKARRGEHSGRVPYGYKKNGKFLEIYEEQAKVIRMIFDLYNNHGYGQKRVVHKLNEELLLGNIPKPQQNERWQLSTVQRILQNPIYCGVFIANRYTQVKIGGRKKFIRNPEEKWTIYKDWAPKIITLEDYEKANNKKHVLKKRRFNPKNELRGLMKCGVCGANMVILFSYRRRKKDGVKVEHNYVKCSAYRRGGKNMCISHPPIQYKDLREIVIEKLKEKGRKLKLNVKSDYEEKKKRRIRETKVQIEAAEKKHKRLLELFLEDQMISKAEFQSKRKEIEEQLEQLNDKLFLLEREEEESIDITNIKIAFSLLKKKDQDLYEAFHALIEKLVIHEDGTVDFHYKFQ

SEQ ID NO: 27672 - DNA, 50 bp, Bacillus velezensis; identical to SEQ ID NO: 18607
  source 1..50: mol_type = genomic DNA

SEQ ID NO: 27673 - DNA, 40 bp, Bacillus velezensis; identical to SEQ ID NO: 27658
  source 1..40: mol_type = genomic DNA

SEQ ID NO: 27674 - DNA, 40 bp, Bacillus velezensis; identical to SEQ ID NO: 27658
  source 1..40: mol_type = genomic DNA

SEQ ID NO: 27675 - DNA, 50 bp, Bacillus velezensis; identical to SEQ ID NO: 27660
  source 1..50: mol_type = genomic DNA

SEQ ID NO: 27676 - protein, 508 aa, Bacillus velezensis
MFFEEKNTEELIRYEDYPYAVYARVSSEKDSQTTSIQNQIDICHHWIEKNNYEWKDEAIQLDDGISGTILLDRKAMQLILNKAKNHKLKMVVFKSISRLARDLKDALDIKEVLLAHGVRVVTLEEGYDSLYEGKNSMKFEMFSMFAAQYPQTISVSASSALAAKARRGEHSGRVPYGYKKNGKFLEIYEEQAKVIRMIFDLYNNHGYGQKRVVHKLNEELLLGNIPKPQQNERWQLSTVQRILQNPIYCGVFIANRYTQVKIGGRKKFIRNPEEKWTIYKDWAPKIITLEDYEKANNKKHVLKKRRFNPKNELRGLMKCGVCGANMVILFSYRRRKKDGVKVEHNYVKCSAYRRGGKNMCISHPPIQYKDLREIVIEKLKEKGRKLKLNVKSDYEEKKKRRIRETKIQIEAAEKKHKRLLELFLEDQMISKAEFQAKRKEIEDQLEQLNDKLFLLEREEEESIDITNIKIAFSLLKKKDQDLYEAFHALIEKLVIHEDGTVDFHYKFQ

SEQ ID NO: 27677 - DNA, 50 bp, Bacillus velezensis; identical to SEQ ID NO: 18607
  source 1..50: mol_type = genomic DNA

SEQ ID NO: 27678 - DNA, 40 bp, Bacillus velezensis; identical to SEQ ID NO: 27658
  source 1..40: mol_type = genomic DNA

SEQ ID NO: 27679 - DNA, 40 bp, Bacillus velezensis; identical to SEQ ID NO: 27658
  source 1..40: mol_type = genomic DNA

SEQ ID NO: 27680 - DNA, 50 bp, Bacillus velezensis; identical to SEQ ID NO: 27660
  source 1..50: mol_type = genomic DNA

SEQ ID NO: 27681 - protein, 508 aa, Bacillus siamensis
MFFEEKNTEELIRYEDYPYAVYARVSSEKDSQTTSIQNQIDICHHWIEKNNYEWKDEAIQLDDGISGTILLDRKAMQLILNKAKNHKLKMVVFKSISRLARDLKDALDIKEVLLAHGVRVVTLEEGYDSLYEGKNSMKFEMFSMFAAQYPQTISVSASSALAAKARRGEHSGRVPYGYKKNGKFLEIYEEQAKVIRMIFDLYNNHGYGQKRVVHKLNEELLLGNIPKPQQNERWQLSTVQRILQNPIYCGVFIANRYTQVKIGGRKKFIRNPEEKWTIYKDWAPKIITLEDYEKANNKKHVLKKRRFNPKNELRGLMKCGVCGANMVILFSYRRRKKDGVKVEHNYVKCSAYRRGGKNMCISHPPIQYKDLREIVIEKLKEKGRKLKLNVKSDYEEKKKRRIRETKVQIEAAEKKHKRLLELFLEDQMISKAEFQAKRKEIEDQLEQLNDKLFLLEREEEESIDITNIKIAFSLLKKKDQDLYEAFHALIEKLVIHEDGTVDFHYKFQ

SEQ ID NO: 27682 - DNA, 50 bp, Bacillus siamensis; identical to SEQ ID NO: 18607
  source 1..50: mol_type = genomic DNA

SEQ ID NO: 27683 - DNA, 40 bp, Bacillus siamensis; identical to SEQ ID NO: 27658
  source 1..40: mol_type = genomic DNA

SEQ ID NO: 27684 - DNA, 40 bp, Bacillus siamensis; identical to SEQ ID NO: 27658
  source 1..40: mol_type = genomic DNA

SEQ ID NO: 27685 - DNA, 50 bp, Bacillus siamensis; identical to SEQ ID NO: 27660
  source 1..50: mol_type = genomic DNA

SEQ ID NO: 27686 - protein, 503 aa, Corynebacterium amycolatum
MTTRAAIYLRISLDAAMDGLAIDRQRQDCEALAEQRGWDVVHTYVDQSISASKKDVDRPDYDAMVASFERGEIDAIICWDLDRLTRQPAQLEEWIDRAEEQGLKLVTANGDADLATDGGRMYARIKAAVARGEIERKSMRQSRAQQQRAEQGRWYSGGVRPIGYTSTGEIIPSEAAAVLGMFRAVERGNSMRDIARALSGVDQPGLPDIPTTPRHMYTVITERNARRRAEGQEEKPIPDAQPWAYTSLHSILRNPVYAGYSTYKKAKRKGVKDKYRRVTHIVRDPDTGEPVKGQWEPIVTPDLWWRVQNVLDDPDRLTNKERRNTRRHLGSGLYVCDECGNPVRTHADRYRCAACGLVRTHSVDDFVLAVIRARLGRDDLADLLPTADDDEVNAIDDELAELRAKLARVQADYDEELIEARDLKRARNRYEPQIEKLETRRARLAGASALLDTTGYASPVDAFDNAELAVQRRVINTLCQVRLRRGVRGSKTFNPESVQIVWN

SEQ ID NO: 27687 - DNA, 50 bp, Corynebacterium amycolatum
  source 1..50: mol_type = genomic DNA
ttatttatcgacgacactccgtcgagtttcgtttcaatgtaacctaaatg

SEQ ID NO: 27688 - DNA, 40 bp, Corynebacterium amycolatum
  source 1..40: mol_type = genomic DNA
cacgacggtgacgtggtggagttcaaatttaacgtgtagt

SEQ ID NO: 27689 - DNA, 40 bp, Corynebacterium amycolatum
  source 1..40: mol_type = genomic DNA
cacgacggtgacgtggtggaattcaaatttaacgtgtagt

SEQ ID NO: 27690 - DNA, 50 bp, Corynebacterium amycolatum
  source 1..50: mol_type = genomic DNA
ttatttatatcctgcagtgtctcaaatttcgtctcaaatttacttatatg

SEQ ID NO: 27691 - protein, 566 aa, Anaerotruncus rubiinfantis
MANNEKYTILYGRLSQEDDREGESNSIQNQRLILTRYAEEKGFGNIRFLFDDGFSGTNFNRPSWNEIMELIESGQVETLIVKDMSRLGRDYLQTGFLMEHTFPNNNVRFIAINDAVDTLYGDNDFAPFRNLFNDFYAKDCSKKIRSVKRAQAERGERVGTRPPYGYKKDESNPKKIVPDPEAAEVVRHIFKLCAEGRGPKQIARQLTEEQVINPSNYYFNQTSVALTNLDTTRPYRWRDNSIVNILNDETYLGHTVSMKHTTASYKNKKQIIRPESEWLRFENTHEAIITQDIWDIAHEVRMHKKRPRKNMENPNPYSGLVFCADCGKPLVLHRAHTMDESKNNFACSTYKQYGKETCSAHYIRESQLAAVILDDLKRVTHFARQDEVLFAECINRKNTADTRKKITALQKELELIRKRDLELTALFKRLYEDNVLGRIPDEHYRTLSDEYTAEQKALRERMPKAEVRMDNLKNSLSNVDRFIEKAKKYTDLTELTPELLRMFISKVVVGEKAEKYSRTAPQDIWIYYRDIGMLNDVKEEFDIPSMEEFYGVDDETMFDDELPAAI

SEQ ID NO: 27692 - DNA, 50 bp, Anaerotruncus rubiinfantis
  source 1..50: mol_type = genomic DNA
aagtatctttatgaacacttacctaaatacaagtggtcataaagacaact

SEQ ID NO: 27693 - DNA, 40 bp, Anaerotruncus rubiinfantis
  source 1..40: mol_type = genomic DNA
aacgaaaaagcccgcggccaattggctgcgggctttttct

SEQ ID NO: 27694 - DNA, 40 bp, Anaerotruncus rubiinfantis
  source 1..40: mol_type = genomic DNA
aacgaaaaagcccgcggccgattggctgcgggctttttct

SEQ ID NO: 27695 - DNA, 50 bp, Anaerotruncus rubiinfantis
  source 1..50: mol_type = genomic DNA
caggatattcatttacactttcctgagtactagtgagggtgaagataatt

SEQ ID NO: 27696 - protein, 515 aa, Burkholderia sp IDO3
MQLDSSLTLRDEGLSAFHQRHIKQGALGVFLRAVEDGRIPPGSVLIVEGLDRLSRAEPIQAQAQLAQIVNAGITVVTASDGREYNRERLKAQPMDLVYSLLVMIRAHEESDTKSKRVKAAIRRQCEGWVAGTWHGVVRNGKDPHWVKLGDSGKFELVPERVLAIRTMIDLFTEGYGSVEITRILTERQLFISNAGNYSTHMYRIIRNRALVGEKEISVDGEDFRLTEYYPSLLSKDEFAELQVTMSERGRRKGKGEIPSVLTGLGITTCGYCGAAIVTANSARRLTDPARRLSCASYKYNSGCPIAGTCDSELVERALMHYCSDQFNLSRLLSGDDGIERRTAQLALAKQRLAEIESQIERITDALLSDDGAPPAAFMRRARDLESDLEREKLDVETLEQQIAASSTHELPAAAEAWAELVDGVLALEHSSRMKARQLVADTFRHIVLFQRGFSPIDEVENDKWKRGGTIGLMLVTKRGGTRLLNIDRRTGGWRAEEDIDPTRGPSGSLPLTIEP

SEQ ID NO: 27697 - DNA, 50 bp, Burkholderia sp IDO3
  source 1..50: mol_type = genomic DNA
aatgtcttttgcataacgttcggcaacccgaacgtaaggcaaaatacaat

SEQ ID NO: 27698 - DNA, 40 bp, Burkholderia sp IDO3
  source 1..40: mol_type = genomic DNA
cacgctggtcacgctcggcaacccgaagatcatgctgttt

SEQ ID NO: 27699 - DNA, 40 bp, Burkholderia sp IDO3
  source 1..40: mol_type = genomic DNA
cacgctggtcacgctcggcgacccgaagatcatgctgttt

SEQ ID NO: 27700 - DNA, 50 bp, Burkholderia sp IDO3
  source 1..50: mol_type = genomic DNA
tatgttttttataaaatgtaagaggaccctaatgtacatacaaatacaat

SEQ ID NO: 27701 - protein, 694 aa, Ruminococcus torques
MPKIRDFDRITALYERLSKDDEQQGESNSILNQKRLLEDFARKSGMPNIKHFTDDGYTGRNFNRPGFQAMLAEAEAGKIGTIIVKDMSRFGRNYLEVGFYTEILFPKKQIRFIAINNSVDSDKPQDNDFTPFLNIMNEWYAKDTSNKIKSIFLSRMSDGKRCSGSIPYGFNRLPEDKQTLVVDPVASQVVKHIFELAAEGLTPPAIARQLTEEKVLIPSAYTLQYHPEQCNRKAEYGCTNWNANTVREILSRQEYLGHTVLRKTIGTNFKTDERRFATDEERLVFEDTHEPIVDSELWEQAHRRLKHATRRIKEGTHQEECLLPGLVYCADCGSKMSYQTNYYKSGEPYHSFRCSSYGNRTGNCTIHHISDKVLYQLVLRSIQRLSSHIIADERGFAEELKCKWEAQANGKPQKQKEGLQTINRRLNELDRLIGSLYENFISGLLPEKQYKSLMKKYSVEQDSLESQVSEIQEKLEQTKASSAHIGRFIRIIKKYKQPTELTKEMACELIDKIIVHEAVGKKPNRQQQVDIYYNFIGQFDLPLSEKEIAEARRKAEQEAAEKAKRKKNRQRESNVAHQAKAKAERWAANDGHKYPKRICEQCGKEFYPNSTRQRFCNTDCTKAHQQAEKEKKRFAEKGEHNFRQKVCKICGKPFWPSNGQEVLCSEECKTINRNQRQLAYYHRKQSEQKAGEAI

SEQ ID NO: 27702 - DNA, 50 bp, Ruminococcus torques
  source 1..50: mol_type = genomic DNA
aaatatctcaaaaccacttgacagaacggaaaagaagttttaggatatat

SEQ ID NO: 27703 - DNA, 40 bp, Ruminococcus torques
  source 1..40: mol_type = genomic DNA
catggtggtcaccgatcctaagggagagcttcttcggaaa

SEQ ID NO: 27704 - DNA, 40 bp, Ruminococcus torques
  source 1..40: mol_type = genomic DNA
catggtggtcaccgatcctttgggagagcttcttcggaaa

SEQ ID NO: 27705 - DNA, 50 bp, Ruminococcus torques
  source 1..50: mol_type = genomic DNA
aaatatatctatatcacatgtaatttcctaagagaaatgaaagtatatat

SEQ ID NO: 27706 - protein, 641 aa, Vibrio parahaemolyticus
MIYAYCRVSSGKQLEGLSMSLQGDEALLSKLAKDYNTTVSERVYRDEGKSAYKGEHLRGELGKLLADIDSGVIKDGDIIVMRHLDRLSRLDFSKSMNLFNGILGAGIGIYTTMDSRLYSNKLGNSEQAIYNALAGFAFSTANEESVRKSYYINKNALAQIERFQRGERTACGHAYDIGVGHHPFWVTTRTDDGVGIKNPPVRVHTENYSIAKELVQYALQGNGITRCQQLLEKRGLSYTKQGIRNIFESAALYGCLKISIDDKQGARTEFELDGYYPAVCSKEEFYKLRAERKKRTVSNGNRKEYSLLSGARMLHCGCNQSLNVHHSKNGAKYYICASQNHNMINCYTLDNLVLNALKSKVFNTEIDDTRLKALEAELDVISTAYRKKQKFVFDNIELFGDAIKSELSTMKAGVAKLESKVEAERQAVMSAKPAEILDLSTYDTWVHQISEIVDADSETKRIYSQKIKQLVNDIVLHDDGLVVIEYVDRSKDYYYFPENKRKKQGEFWAVKLLVTDDDTTREMVLADEKMAVFVFSTAEIKARKYVNDISNFKAGLTLFSRKRTTDTAQKRFANQIKEYLGNHGELEYKRSEVVKLGISESRWQKLKDTDLTKYGIGFKSKESEMVNGKSSVSKLAFLMEE

SEQ ID NO: 27707 - DNA, 50 bp, Vibrio parahaemolyticus
  source 1..50: mol_type = genomic DNA
ggttgtcactaaacaaatttagctccattaaacttgttctagttgcaatc

SEQ ID NO: 27708 - DNA, 40 bp, Vibrio parahaemolyticus
  source 1..40: mol_type = genomic DNA
cattacggtcaatttggccccggcggatttacctaaagaa

SEQ ID NO: 27709 - DNA, 40 bp, Vibrio parahaemolyticus
  source 1..40: mol_type = genomic DNA
cattacggtcaatttggccgtggcggatttacctaaagaa

SEQ ID NO: 27710 - DNA, 50 bp, Vibrio parahaemolyticus
  source 1..50: mol_type = genomic DNA
agttgactttgacaagttttagcagtattaaacttgttttagttgtaata

SEQ ID NO: 27711 - protein, 566 aa, Vibrio harveyi
MSKIIYPYIRFSSDKQAAGSSFQRQIERITDYANENGYIVNNSLKLQDLGLSAFTAKHIEKGALGAFLDGIKAGKIEQDGSAYLCIEQLDRLSRENVDDAYQVFRKILKSNVNIITLMDNKIYTKESLTDLMSIMYSLMLMAQANQESAKKSDRVLRAFDKKLDKLNDGKAVQYVGMFPGWIDNKGTKEETNFVINKKAEIVKRAFQLYISGKTMKEIAKLFNDERVPQVAKKRHKNFTNSWSSAKISHLLKNRCVLGDLFIRKTGEVFKNYYPAIISIDDWDIVQSITKTKKTNKSSGRRSINIFTGKMFCASCGQKYYFETDDKITKTGKKLYYMLKCSGRRNLSCFSKSIKYDDFLDSSPNLFGMITQSKKDNSKEIDEIKLKIKEINEITKKLKDKLITLENLNDSNELDFTVYLKESSKIQKQVRENEARIASFKLNISRLSSNNKLDYFDKTDPNSVVKAKKFISDNFAAFVISSDSRFCIALYNDGQVLQFKIKNSKIEKKESQVKNIDNFESFNEFYKLKEQVLETYKNGTMDGRFIEILNATNFWGVETSEKDYSLD

SEQ ID NO: 27712 - DNA, 50 bp, Vibrio harveyi
  source 1..50: mol_type = genomic DNA
ttcctgtaaactttacatagcatagtaaagctatgtatgattaacaggaa

SEQ ID NO: 27713 - DNA, 40 bp, Vibrio harveyi; identical to SEQ ID NO: 27078
  source 1..40: mol_type = genomic DNA

SEQ ID NO: 27714 - DNA, 40 bp, Vibrio harveyi
  source 1..40: mol_type = genomic DNA
agcaggagccaaattgaccaaaattcgttttgctggaaac

SEQ ID NO: 27715 - DNA, 50 bp, Vibrio harveyi
  source 1..50: mol_type = genomic DNA
tttctgtaagttaaattttgctttaaaaagccatgtgccatgaaaaggaa

SEQ ID NO: 27716 - protein, 566 aa, Vibrio kanaloae
MSKIIYPYIRFSSDKQAAGSSFQRQMERITDYANENGYIVNNSLKLQDLGLSAFTAKHIEKGALGAFLEGIKAGKIEQDGSAYLCIEQLDRLSRENVDDAYQVFRKILKSKVNIITLMDNKIYTKESLTDLMSIMYSLMLMAQANQESAKKSYRVLRAFDKKLDKLNDGKTVQYVGMFPGWIDNKGTKEETNFVINKKSEIVQRAFSLYINGTSMGDIARIFNDERVPQVAKKRQKNYTNSWSSAKINHLLKNRCVLGELLIRKTGDIFENYYPAIISVDDWDVVQSMMKTKKIAKSSGRRSINIFTGKMFCACCGQKYYFETDDKNTKTGKKLYYMLKCSGRRSFGCKSKSIKYDDFLDSTPNLFGMITQSKKDNSKEIDEIKLKIKEINEITKKLRDKLITLENLNDSNKLDFTIYLKESSKIQKQVRENDARVASFKLKISRLSSDNKLDYFDKTDPNSVVKAKKFISDNFAAFVISSDSRFCIALYNDGQALQFKIKNSKIEKKESQVKNIDNFESFNEFYKLKEQVLETYKNGTMDGKFIEILSATNFWGIVTSEKDYSLD

SEQ ID NO: 27717 - DNA, 50 bp, Vibrio kanaloae; identical to SEQ ID NO: 27712
  source 1..50: mol_type = genomic DNA

SEQ ID NO: 27718 - DNA, 40 bp, Vibrio kanaloae
  source 1..40: mol_type = genomic DNA
ggcgggggcgaggttgaccgtgattctttttgatgggaat

SEQ ID NO: 27719 - DNA, 40 bp, Vibrio kanaloae
  source 1..40: mol_type = genomic DNA
ggcgggggcgaggttgaccaagattctttttgatgggaat

SEQ ID NO: 27720 - DNA, 50 bp, Vibrio kanaloae; identical to SEQ ID NO: 27715
  source 1..50: mol_type = genomic DNA

SEQ ID NO: 27721 - protein, 460 aa, Anaerobutyricum hallii
MKRKLNNDKTILRVAIYVRVSTEQQAEDGDSIRDQLNSCETYIKAHENMILAGEYIDGGISGQKTKREDFQKLLSDVRANLIDLIIFTRLDRWFRSLRHYLNTQEVLDKHNVSWTAIRQPFFDTSTAQGRTFVNTSMAFAELEAQNASERIKGVFKDKVSHSEAISGRTPIGYSIVDKHLVPDKDAPIVVAIFEHYQAHSSMGETLRYMQDAFGIVRSRSSLKRMLQNKKYIGIFRDNESYCEPIITKELFYDVQRLLKLNIKTCKNRHDYIFSGLIRCVDCGYVMSAASNHNHYVRKSGEEVDHFYSVYRCHANRLHRCVNNKVFFESSIEKELLKRVRPELEQYICDYKLETAPVVQNKARIHKLQTKLSKLKELYLNELITLEEFRTDKADFEYQIEELQKEEQKPVKDLSSLEEFLKLDFENIYSSFTAPEKRRVWRSIIKEIQVNHHKNINIVFL

SEQ ID NO: 27722 - DNA, 50 bp, Anaerobutyricum hallii
  source 1..50: mol_type = genomic DNA
tatagcactaactgatactagccattaggatagtatcagttagtgctata

SEQ ID NO: 27723 - DNA, 40 bp, Anaerobutyricum hallii
  source 1..40: mol_type = genomic DNA
atgataacttcgatatccattaggtttaggtcctgcaata

SEQ ID NO: 27724 - DNA, 40 bp, Anaerobutyricum hallii
  source 1..40: mol_type = genomic DNA
atgataacttcgatatccaccaggtttaggtcctgcaata

SEQ ID NO: 27725 - DNA, 50 bp, Anaerobutyricum hallii
  source 1..50: mol_type = genomic DNA
tatagcactaaatgaataaagccaccaggatgtcatctaatagaactata

SEQ ID NO: 27726 - protein, 554 aa, Lacrimispora sphenoides
MDRLTQAAYEKKNVFARASACYKAALYMRLSKDDDGTGESSSIGTQRKMLRSYAIENDFEIYGEYVDDGYSGTNFDRPSWKRLLKDIDARKVNLVITKDLSRLGRDYIMTGQLTEIYFPSRGIRYIAVNDGYDSDSPWSDIAPFKNIVNEMYARDTSKKIRSAFQTKINEGAFIGNFAPYGYQKDPQNKNHLLVDPVAASIVREIFEWAEQGAAPSQIAEILNKRKVLTPAMYRCAERPYLNLDDYSRRKEWTSGTVCKLLSNPVYLGHIVQGKTVKVSFKSSMTLRKPRNEWVVVKDKHEPLISGETYERVRRRSVSRKSTAVTGFTNVFSGLAKCGDCGRNMSSTGAGGKAKSRKLVCGGYKLYGRKECTNHFMDYELLYYVVLQEIRSLLSFTESEKEEIEETLREPVSPGEMQGEEKAVFSLKNRKKELGHIIEKLYEDRVNERISEDRFYIMLDSFEKEEKKIAESLAMMERPCSLVQESEPASDGLLSSLLEDMSQEKGLSSDLLGKFIDRIEIYQSSEGGEGKAGRKYQTIRIYYKVAPIEDRNGLA

SEQ ID NO: 27727 - DNA, 50 bp, Lacrimispora sphenoides
  source 1..50: mol_type = genomic DNA
gtttagcataaatttccgctgtcatgtgacaaaggaaatctatgcttttt

SEQ ID NO: 27728 - DNA, 40 bp, Lacrimispora sphenoides
  source 1..40: mol_type = genomic DNA
ggaaagcaggcgcttaccatgtgcatggggtttggatgca

SEQ ID NO: 27729 - DNA, 40 bp, Lacrimispora sphenoides
  source 1..40: mol_type = genomic DNA
ggaaagcaggcgcttaccaggtgcatggggtttggatgca

SEQ ID NO: 27730 - DNA, 50 bp, Lacrimispora sphenoides
  source 1..50: mol_type = genomic DNA
gttaagcattttgttcttcaaaaaggtaacaaagaataaatatgcttttt

SEQ ID NO: 27731 - protein, 479 aa, Streptococcus suis
MNKVAIYVRVSTKGQAEEGYSIDEQIAMLTSYCSIHKWTVYETYVDAGFSGATIDRPALSKLSRDAQKKRFNTVLVYDLKRLGRSQRNNIAFIEDILEKNDIGFISLTENFDTSTPLGKAMVGILSAFGQLDRDTIRERMMMGKIGRAKSGKPMMTSTIAFGYTYDKLTSTLNINQAEAIVVKTIFKEYLGGRSLTKLRDYLNENNILRNGKLWNYQGISRILRNPVYMGMIRFRGEVYQGNHEPIIDAETFETTQAELKKRQIETYQFYKNSRPFRAKYMLSGMIRCGYCGAPLEIILGTKRKDGSRYRRYQCVNRFPRTTKGITVYNDGKKCNSKYYEKEDIEVFVLGQVRLLQLNQAKLDKMFETVNEIDVEGIEKQIDQLNNKLKRLNDLYLNDMIYLDELKRQSYALLTQKELLEKELENNPDIQKKIDKENFQRLLDTKDVTTLDYDSQKHILNRLINKVFVKDGHVKIEWKI

SEQ ID NO: 27732 - DNA, 50 bp, Streptococcus suis
  source 1..50: mol_type = genomic DNA
tcaagagttttagatatgcttatctcaatcagtgtatctaaatatgacat

SEQ ID NO: 27733 - DNA, 40 bp, Streptococcus suis; identical to SEQ ID NO: 20418
  source 1..40: mol_type = genomic DNA

SEQ ID NO: 27734 - DNA, 40 bp, Streptococcus suis; identical to SEQ ID NO: 20418
  source 1..40: mol_type = genomic DNA

SEQ ID NO: 27735 - DNA, 50 bp, Streptococcus suis
  source 1..50: mol_type = genomic DNA
tcaggagtttcaagtatgcatatgtcaatatctgtatcaatatgtaatat

SEQ ID NO: 27736 - protein, 577 aa, Butyrivibrio fibrisolvens
MEVEVIKAKTNFDNSAAVGRKDRLRVAAYCRVSTADEEQIKSYDSMVKYYTDLIKKNPDWKFVEVYADKASTGTKAETRENFQRLIADCMAGKIDMVIAKSLSRFARNTLDTLKYVRQLRTKNVAIYFEVEKINTIKDGEFLLTILSSVAQQEVENTSAYVKKGLKMKMKRGELVGFQGCLGYKYDIETKTISVDETEAETVRYMFERYVAGAGSTMIARELNEQGIMTIRGNPWTSSSVMGVINNEKYTGDILLGKTFTVDPITKRRLDNLGEEDRFFIKNHHEPIISHETFEKAQALRERRNGGRQHHVEIGKREKYSRMFAFSSLIECGFCGGHLTRRKWHSSSKYKKTIWQCVTSTKGGKKLCPDSKGIPEQVIEEAFIESYRLLCSDNQEVMNEFLSRIEKTLGDDANEKNYQKAKKEVKQYKEKRKKLLDKYVDDGIDKETYMSMDAEYEVKYAEAQSQLEYYEKQVQGDDSLRKRIEGFRKTLTQNQVLEEFDRAVFESIVEKVIVGGYDDDGNADPYKVTFIYKTGFKDSFDHAKTKFGPKSKKSDENVSSNSSVHQENQCSNHSVDTC

SEQ ID NO: 27737 - DNA, 50 bp, Butyrivibrio fibrisolvens
  source 1..50: mol_type = genomic DNA
agtgctcaaatcatagtgtagacacatgtggagactgtggttctgctaac

SEQ ID NO: 27738 - DNA, 40 bp, Butyrivibrio fibrisolvens
  source 1..40: mol_type = genomic DNA
tcagttcccttgcactgtgcatgttgaaaccgtggtgctc

SEQ ID NO: 27739 - DNA, 40 bp, Butyrivibrio fibrisolvens
  source 1..40: mol_type = genomic DNA
tcagttcccttgcactgtgactgttgaaaccgtggtgctc

SEQ ID NO: 27740 - DNA, 50 bp, Butyrivibrio fibrisolvens
  source 1..50: mol_type = genomic DNA
agagctgaacaaggagtgcagaccactgtgcattctacaaatcagctaat

SEQ ID NO: 27741 - protein, 585 aa, Shewanella algae
MTNNHQTPSPRSTSTTTRTPPQVVSYSRYSTKKQSKGFSLERQDENLKRWSDANGIPISELSFADLGISAFSGTAVREGLANMLEAVRQGAVPQGWWIAFERIDRLSRRGITETRRLIDQILQHGVNIVCIGEGIELRPDDDANDELKGSLMVAIHAHLAREQSAKASERIRSTAAAKRRRARETGAPIKKRLPYWLELSPDGSKYQFKAGRIETVRYIVKRRLEGRGFHGICAELNAMNTPPLTRMSKQWNDMAIAATVRNVALFGQYQPAITNEVEKVDSDGRRKMVRVAIPDGEPLDNYFPAVVDRATWDQIQSDSRTKMKAGRRGDNPVSGLTFCRHCGGTLPMKPASKTSTNGTRHTYRYWTCRGAVDGKCDHGKGIKDLDHFVVKACRRIVPRTLGQGDGGQDPAAAFEYQSLLERRGKVTTQIATLDAAMADPELGAAALKHIARQIDVATANLEQVDAEIATVEARQKADQDTTPEAVEKLKQLEGDPVAYNLHLKTLVHRIVAGAVQLDDGSWSDVALLFRFTVELLNGQRIDVTVSRRNRWDKDPVEFYSHSEDATSTGGEGDLFPWETDDGQDD

SEQ ID NO: 27742 - DNA, 50 bp, Shewanella algae
  source 1..50: mol_type = genomic DNA
attacgaccaatcaaagatacattataatgtaattgatattgcacaaccc

SEQ ID NO: 27743 - DNA, 40 bp, Shewanella algae
  source 1..40: mol_type = genomic DNA
gtccagtgccagcaacagcatgatagcgttttccaatacc

SEQ ID NO: 27744 - DNA, 40 bp, Shewanella algae
  source 1..40: mol_type = genomic DNA
gtccagtgccagcaacagcttgatagcgttttccaatacc

SEQ ID NO: 27745 - DNA, 50 bp, Shewanella algae
  source 1..50: mol_type = genomic DNA
ataactaaccagataatattcattttactgtaattgaagaagaacaaact

SEQ ID NO: 27746 - protein, 585 aa, Shewanella algae
MTNNHQTPSPRSTSTTTRTPPQVVSYSRYSTKKQSKGFSLERQDENLKRWSDANGIPISELSFADLGISAFSGTAVREGLANMLEAVRQGAVPQGWWIAFERIDRLSRRGITETRRLIDQILQHGVNIVCIGEGIELRPDDDANDELKGSLMVAIHAHLAREQSAKASERIRSTAAAKRRRARETGAPIKKRLPYWLELSPDGSKYQFKAGRIETVRYIVKRRLEGRGFHGICAELNAMNTPPLTRMSKQWNDMAIAATVRNVALFGQYQPAITNEVEKVDSDGRRKMVWVAIPDGEPLDNYFPAVVDRATWDQIQSDSRTKMKAGRRGDNPVSGLTFCRHCGGTLPMKPASKTSTNGTRHTYRYWTCRGAVDGKCDHGKGIKDLDHFVVKACRRIVPRTLGQGDGGQDPAAAFEYQSLLERRGKVTTQIATLDAAMADPELGAAALKHIARQIDVATANLEQVDAAIATVEARQKADQDTTPEAVEKLKQLEGDPVAYNLHLKTLVHRIVAGAVQLDDGSWSDVALLFRFTVELLNGQRIDVTVSRRNRWDKDPVEFYSHSEDATSTGGEGDLFPWETDDGQDD

SEQ ID NO: 27747 - DNA, 50 bp, Shewanella algae; identical to SEQ ID NO: 27742
  source 1..50: mol_type = genomic DNA

SEQ ID NO: 27748 - DNA, 40 bp, Shewanella algae; identical to SEQ ID NO: 27118
  source 1..40: mol_type = genomic DNA

SEQ ID NO: 27749 - DNA, 40 bp, Shewanella algae
  source 1..40: mol_type = genomic DNA
ggtattggaaaacgctatcttgctgttgctggcactggac

SEQ ID NO: 27750 - DNA, 50 bp, Shewanella algae; identical to SEQ ID NO: 27745
  source 1..50: mol_type = genomic DNA

SEQ ID NO: 27751 - protein, 475 aa, Bacillus thuringiensis
MYVRVSTDKDEQVSSVENQVDICRYWIEKNGYEWDQNAVYFDDGISGTAWLERHAMQLILQKVRKNELDTVVFKSIHRLARDLKDALEIKEILLGHGVRLVTIEEGYDSYYEGNNDMKFEIYAMFAAQLPKTLSTSISAALSAKVRRGEHTGTIPFGYDRIDKKLIINEEEALLVKEMFDWYEDGRGYRMIANNLNKKGCRTRFGNLWSEASVKTIVTNSLYTGEHVMHKYKTVKVDGKKKTVKNPKEKWLVFENHHDAIISKEQWERINPVSGVKDKKTKSDYRNEFRGIVWCAHCGKRVRAIYAGVRSKYERVYMKCSTYKAYGTCINHIPVRYEDFRNLILERLKQKQEYIETRLVAQIKDKLQEKIAKSKKTIKQLGSKKEKLLELYMDSFIDKETFVNRNRKLEDEMTAQELQLLKLKDKDIQNRETKDIQDAFMLLQEEQDLHKAFQKLIKKIVFYQDGKLDIEYTFDY

SEQ ID NO: 27752 - DNA, 50 bp, Bacillus thuringiensis
  source 1..50: mol_type = genomic DNA
atttttgtagctattgatataatgaacatctgtgaaacgtagactaatgg

SEQ ID NO: 27753 - DNA, 40 bp, Bacillus thuringiensis
  source 1..40: mol_type = genomic DNA
attaaggtggacacggtgggacatcaagtaataactggca

SEQ ID NO: 27754 - DNA, 40 bp, Bacillus thuringiensis; identical to SEQ ID NO: 27753
  source 1..40: mol_type = genomic DNA

SEQ ID NO: 27755 - DNA, 50 bp, Bacillus thuringiensis
  source 1..50: mol_type = genomic DNA
atttttataaacaatgctgtgatggacatctttgtagctaaatctgatgg

SEQ ID NO: 27756 - protein, 518 aa, Klebsiella pneumoniae
MKKAVYCYARVSSRGQAKDGYGMSRQQEMLRDYVAAYDDSLHNRGYELGSVNWLFAEGISAYSGKNIEDGSVLKSFIDDVLDRKIINAVLVIENLDRFSRAEPIKAANLFLNLITAGCDIHEVETETIHHSSSDLSIITGGLQRAHNESKRKARLSIKNWDERIKNAIDGKAVLTNRVPSWLEVKNNGYVIKEGEREKYNLIFQMYADGFGPAAIRDVLKERRMLINDSEPTIAHLNKIIKDERLIGKFNSTGRKKLSGLVIYPVVVDLSLFHIVDQLRKQRNPVGKIHRKANNLFAGLCICMECGRYVQVNSIEANGESYFRCGGSLVKIDRCQERGFKYKFFENALLQHIRNFDFSSLNANESEVQIRVNHLSMELLTHIKYKDEILQDIEKEDIPDPNDRRILKNLQKKIGEIESEISNLKHLSVNVSTFDELKQYSEELRDPKNVDIRLDFNIKIKRVIKNIIIKRYSDAIFLVVNYISINEKQAIVINSKNGEILYMGVQNDDLKTVEHLIGN

SEQ ID NO: 27757 - DNA, 50 bp, Klebsiella pneumoniae
  source 1..50: mol_type = genomic DNA
aacagtaattcactattcatcatcaccatgatatactgcttattactgtt

SEQ ID NO: 27758 - DNA, 40 bp, Klebsiella pneumoniae; identical to SEQ ID NO: 20073
  source 1..40: mol_type = genomic DNA

SEQ ID NO: 27759 - DNA, 40 bp, Klebsiella pneumoniae
  source 1..40: mol_type = genomic DNA
ggcgatgattccgataacctgcatcagttcaatcagggta

SEQ ID NO: 27760 - DNA, 50 bp, Klebsiella pneumoniae
  source 1..50: mol_type = genomic DNA
aaaattaatggctgaatcataatctggatgataaacatggtagtaccatt

SEQ ID NO: 27761 - protein, 512 aa, Clostridium botulinum
MKRIAIYSRKSRETDTGESIKNQIDMCKTYFNREDKDCSFEIFQDEGFSGGNTNRPSFQRMLELAKHRQFDVIAVYKVDRIARNIVDFVNIYDELEKHDVKLVSITEGFDPSTPIGKMMMMLLASFAEMERMNIAERVKDNMKGLAKIGRWSGGTPPTGYRSKTITLNGKKETYLELIPEKKQLLISIFKKAADGYTTYQIGEMFSMSPKTISNIICNPTYVQADSLSANYLKSIGYDIFGELNGNGYLSYNRRPKKKGKKLFNAKGMFTAVSNHEAPIDSKTWIKANNNLKDRATEAKPRISNNSFLAHLVKCSCGSGMYIHTGHKKKDGTKNLYFACSKKKTQNKCTSKWLRIDFAENHILNILKEISFSPKLLENYLKHQNNPVDYTESIKNIKKQIDKNNEKINTLTDKLIFLKGTAIDIVSEKINTIADENYKLSEQLLRLERKKMFSEVDGENVKVLLDNIKKFLQNFDKINTTERQNFAKSIIKKIVWDSSANNNKGKISIEFLE

SEQ ID NO: 27762 - DNA, 50 bp, Clostridium botulinum
  source 1..50: mol_type = genomic DNA
agcatcaattttagatgtaccgcatgtgcaatacatctaaaattactgca

SEQ ID NO: 27763 - DNA, 40 bp, Clostridium botulinum; identical to SEQ ID NO: 1438
  source 1..40: mol_type = genomic DNA

SEQ ID NO: 27764 - DNA, 40 bp, Clostridium botulinum
  source 1..40: mol_type = genomic DNA
cggcggcggttgggccggatctgcagcagctataagcgct

SEQ ID NO: 27765 - DNA, 50 bp, Clostridium botulinum
  source 1..50: mol_type = genomic DNA
agcttcactgagttctcaactgcatctgcaagacatgagctatgactgta

SEQ ID NO: 27766 - protein, 512 aa, Clostridium botulinum
MKRIAIYSRKSRETDTGESIKNQIDMCKTYFNRADEECSFEVFQDEGFSGGNTNRPSFQRMLELAKHKQFDVIAVYKVDRIARNIVDFVNIYDELEKHDVKLVSITEGFDPSTPIGKMMMMLLASFAEMERMNIAERVKDNMKGLAKIGRWSGGTPPTGYRSKTITLNGKKETYLELIPEKKQLLISIFKKAADGYTTYQIGEMFSMSPKTISNIICNPTYVQADSLSANYLKSIGYDIFGELNGNGYLSYNRRPKKKGKKLFNAKGMFTAVSNHEAPIDSKTWIKANNNLKDRATEAKPRISNNSFLAHLVKCSCGSGMYIHTGHKKKDGTKNLYFACSKKKTQNKCTSKWLRIDFAENHILNILKEISFSPKLLENYLKHQNNPVDYTESIKNIKKQIDKNNEKINTLTDKLIFLKGTAIDIVSEKINTIADENYKLSEQLLRLERKKMFSEVDGENVKVLLDNIKKFLQNFDKINTTERQNFAKSIIKKIVWDSSANNNKGKISIEFLE

SEQ ID NO: 27767 - DNA, 50 bp, Clostridium botulinum
  source 1..50: mol_type = genomic DNA
agcatcaattttagatgtaccgcatgtgcaatacatctgaaattactgca

SEQ ID NO: 27768 - DNA, 40 bp, Clostridium botulinum; identical to SEQ ID NO: 1438
  source 1..40: mol_type = genomic DNA

SEQ ID NO: 27769 - DNA, 40 bp, Clostridium botulinum; identical to SEQ ID NO: 27764
  source 1..40: mol_type = genomic DNA

SEQ ID NO: 27770 - DNA, 50 bp, Clostridium botulinum; identical to SEQ ID NO: 27765
  source 1..50: mol_type = genomic DNA

SEQ ID NO: 27771 - protein, 512 aa, Clostridium botulinum; identical to SEQ ID NO: 27766

SEQ ID NO: 27772 - DNA, 50 bp, Clostridium botulinum; identical to SEQ ID NO: 27767
  source 1..50: mol_type = genomic DNA

SEQ ID NO: 27773 - DNA, 40 bp, Clostridium botulinum
  source 1..40: mol_type = genomic DNA
cggtagcggttgggccggatgtgccgcagctataagtgct

SEQ ID NO: 27774 - DNA, 40 bp, Clostridium botulinum
  source 1..40: mol_type = genomic DNA
cggtagcggttgggccggatctgccgcagctataagtgct

SEQ ID NO: 27775 - DNA, 50 bp, Clostridium botulinum; identical to SEQ ID NO: 27765
  source 1..50: mol_type = genomic DNA

SEQ ID NO: 27776 - protein, 592 aa, Pseudomonas juntendi
MPKIWPYIRFSSEEQKKGDSLRRQQDLIDKFAARPEIVAEGATIDTSLDLNDLGVSGYTGKNLLQGRFKTFLDAVDSGIVKPGDYLAVEALNRVTRLNPRASLPILLGLLEKGVKIAITDSSLIYTNTGDITQLYIAIGELQRGYSESQEKGRRVREAWDDKKKRAFATGEIATSRLPLWLRAVKTTEKGMVIRTVEVIPERVAVVKEIYRLSDTNVGAIATARILTEKGIPTFTRENGRKNPNYGDFWQPSYVKKILDNRAVMGHYQPMTWEKLPDNRRRRINHGPEIENYFPEVIAPELFRRVQEKRKGRAIEGQGNKGKKFSNLFTKIAHCSKCGATASHVNKGPNPRKGGRYLVCYRARHGECSYNAWRYDEVETAILKFLAEADIKSIIQDENRAEDLINKKYEVDAQISDIQEMLDAFKADFKRLKGRVTDLERELALENEQSIEALKSQAKKLEQEIFNAFEQQKADIEKDIQVLRNLSHTADETTVFEVRSKINERLKLVVKDILIDFQTKIVEIQFRNGNVRYLSEKASITYSEPTQKDLEDREMMDEVWASMSENERQQIIDHSIPAEIANDSHRLVKFFES

SEQ ID NO: 27777 - DNA, 50 bp, Pseudomonas juntendi
  source 1..50: mol_type = genomic DNA
tgggtccaatggttgcctaaaagaaggaattgagccaccattagacccca

SEQ ID NO: 27778 - DNA, 40 bp, Pseudomonas juntendi
  source 1..40: mol_type = genomic DNA
ccgggcgggccggtgaacaacaggttgtgcgccccggcgg

SEQ ID NO: 27779 - DNA, 40 bp, Pseudomonas juntendi
  source 1..40: mol_type = genomic DNA
ccgggcgggccggtgaacactaggttgtgcgccccggcgg

SEQ ID NO: 27780 - DNA, 50 bp, Pseudomonas juntendi
  source 1..50: mol_type = genomic DNA
ttgtgccaagtggtgcctgcaagactgcgctgagccacccttagccccca

SEQ ID NO: 27781 - protein, 616 aa, Burkholderia pseudomallei
MPTAYSYIRFSTPEQKKGDSLRRQKELSERYAREHGLTLDTSLHLHDLGVSAFDGSNVTRGALGGFLKAVDDGRVVPGSYLLVESLDRLSRDRVKEALNLFLSIQNRGITIVTLSDGRVYDPETDNTADLIVSITIMARAHEESLTKSRRLKAAWTNKRTRLHEKKLTARCPLWMKLNDDRTHFQFIPERASIVREIIALAKNGMGQTIIAKTLNSRSVPSFSGNPKGWHPSYIQKILTSTALYGEYQPGIFESGRVIPHGEPVADYYPALITRVEFYSLQAYRSQNAVGGGKARKGETIPNLLSGLLRCGYCGNPMVIAGAAAKRIRSADGKEVKRPPKKVLVCDGGRRGLGCYAVQWGHKDFETSFLSFCRGIEFERILADVRSGSQESRDLTLDERIRGIEVEISAKDARIKNLMVAIEEGNAPASLVERIRSLEEEVVELARTKTQLSTELNLHRAARQELTSTAETARSMIDTMESMAGDELFRVRAALAAQFRRTIASVTLYPAGRLFTHEQVERQRAALIDAGWLADQVHRYVAETHPTEPRRQGRGNRGRYASRKDIGRFFNIETVNGGFRVVYPDFDDPATARIVAGVDETPVFAVNPEGQPLLATR

SEQ ID NO: 27782 - DNA, 50 bp, Burkholderia pseudomallei
  source 1..50: mol_type = genomic DNA
ttgtgtgttcttcaccacaacatagcaatgaaatggtgatgaacacatat

SEQ ID NO: 27783 - DNA, 40 bp, Burkholderia pseudomallei
  source 1..40: mol_type = genomic DNA
gacgtgcagcccggaaatcgcgacgagatggctcgtgccg

SEQ ID NO: 27784 - DNA, 40 bp, Burkholderia pseudomallei
  source 1..40: mol_type = genomic DNA
gacgtgcagcccggaaatcaagacgagatggctcgtgccg

SEQ ID NO: 27785 - DNA, 50 bp, Burkholderia pseudomallei
  source 1..50: mol_type = genomic DNA
ttgtgtccttgctcccactacttaaaaatgaaatagctttaaagtcacac

SEQ ID NO: 27786 - protein, 514 aa, Shigella flexneri
MRKVYSYIRFSSTKQAFGDSHRRQSKAIQDWLASHPDHILDESLSFEDLGRSAFHGDHLKEGGALRAFLEAVKQGLIPPDSVLLVESLDRVSRQSISHAQETIRAILEQGITVVTLSDGETYNRQSLDDSLALIRMIILQERSHNESVIKSDRIKKVWSHKRQQFEQDGTKITGNCPGWLKLNSDGKSFSLIPHHVETIHRIFDEKLSGKSLHAIARDLNLENIPTITNKKVDTGWTPTRVRDLLLKESLIGVAYGVSDYFPPAISKEKFHAVQMIRGQGKGKKPTSRQPSSIDIFKGICKCAECGSTLRQRNTKKTPEGRYPRGYLECRNRQLGRCNSKAFNRSLIEDILIQKVFPTLQYLSLKSNGDNISVTTLKADITSLEKGINNLISLAERGLGDLDTLAQRITNNRVELESKKKDLRQAEAIQSLRSDNDIQDSDRKTVEGRIKLQLAIKSFIKEMIFDYYKQEITIRLLNGKSFSGISVARENKDFDHSSVFEVLQKSLLDIDEVHL

SEQ ID NO: 27787 - DNA, 50 bp, Shigella flexneri
  source 1..50: mol_type = genomic DNA
agggtgcataagaaagtgaagattatgattttcacttcctaaaacacccc

SEQ ID NO: 27788 - DNA, 40 bp, Shigella flexneri; identical to SEQ ID NO: 6378
  source 1..40: mol_type = genomic DNA

SEQ ID NO: 27789 - DNA, 40 bp, Shigella flexneri; identical to SEQ ID NO: 6379
  source 1..40: mol_type = genomic DNA

SEQ ID NO: 27790 - DNA, 50 bp, Shigella flexneri; identical to SEQ ID NO: 6360
  source 1..50: mol_type = genomic DNA

SEQ ID NO: 27791 - protein, 514 aa, Shigella flexneri; identical to SEQ ID NO: 27786

SEQ ID NO: 27792 - DNA, 50 bp, Shigella flexneri; identical to SEQ ID NO: 27787
  source 1..50: mol_type = genomic DNA

SEQ ID NO: 27793 - DNA, 40 bp, Shigella flexneri; identical to SEQ ID NO: 6368
  source 1..40: mol_type = genomic DNA

SEQ ID NO: 27794 - DNA, 40 bp, Shigella flexneri; identical to SEQ ID NO: 6369
  source 1..40: mol_type = genomic DNA

SEQ ID NO: 27795 - DNA, 50 bp, Shigella flexneri; identical to SEQ ID NO: 6360
  source 1..50: mol_type = genomic DNA

SEQ ID NO: 27796 - protein, 514 aa, Escherichia coli
MKKVYSYIRFSSTKQAFGDSHRRQSKAIQDWLANHPDHILDESLSFEDLGRSAFHGDHLKEGGALRAFLEAVKQGLIPSDSVLLVESLDRVSRQSISHAQETIRGILEQGITVVTLSDGETYNRQSLDDSLALIRMIILQERSHNESVIKSDRIKKAWSHKRQQFEQNGTKITGNCPGWLKLNSDKKSFSLIPHHIETIHRIFDEKLSGKSLHAIARDLNLENIPTITNKRVDTGWTPTRVRDLLLKESLIGVAYGVSDYFPPAISKEKFHAVQMIRGQGKGKKPTSRQPSSIDILKGICKCAECGSTLRQRNTKKTPEGRYPRGYLECRNRQLGRCNSKAFNRSLIEDILIQKVFPTLQYLGLKSNGDNISVTTLKADITSLEKGINNLISLAEKGLGDLDTLAQRITNNRVELESKKKDLRQAEAILSLRSDNDIQDSDRKTVEGRIKLQLAIKSFVKEIIFDYDKQEITIRLLNGKSFSGISVAREDKDFDHSSMFEVLQKSLLDVDGVCL

SEQ ID NO: 27797 - DNA, 50 bp, Escherichia coli
  source 1..50: mol_type = genomic DNA
agggtgcataagaaattgaagattatgattttcacttcctaaaacaccct

SEQ ID NO: 27798 - DNA, 40 bp, Escherichia coli; identical to SEQ ID NO: 6368
  source 1..40: mol_type = genomic DNA

SEQ ID NO: 27799 - DNA, 40 bp, Escherichia coli; identical to SEQ ID NO: 6369
  source 1..40: mol_type = genomic DNA

SEQ ID NO: 27800 - DNA, 50 bp, Escherichia coli; identical to SEQ ID NO: 6360
  source 1..50: mol_type = genomic DNA

SEQ ID NO: 27801 - protein, 514 aa, Escherichia coli; identical to SEQ ID NO: 27796

SEQ ID NO: 27802 - DNA, 50 bp, Escherichia coli; identical to SEQ ID NO: 27797
  source 1..50: mol_type = genomic DNA

SEQ ID NO: 27803 - DNA, 40 bp, Escherichia coli; identical to SEQ ID NO: 6378
  source 1..40: mol_type = genomic DNA

SEQ ID NO: 27804 - DNA, 40 bp, Escherichia coli; identical to SEQ ID NO: 6379
  source 1..40: mol_type = genomic DNA

SEQ ID NO: 27805 - DNA, 50 bp, Escherichia coli; identical to SEQ ID NO: 6360
  source 1..50: mol_type = genomic DNA

SEQ ID NO: 27806 - protein, 514 aa, Escherichia coli; identical to SEQ ID NO: 27786

SEQ ID NO: 27807 - DNA, 50 bp, Escherichia coli; identical to SEQ ID NO: 27787
  source 1..50: mol_type = genomic DNA

SEQ ID NO: 27808 - DNA, 40 bp, Escherichia coli; identical to SEQ ID NO: 6408
  source 1..40: mol_type = genomic DNA

SEQ ID NO: 27809 - DNA, 40 bp, Escherichia coli; identical to SEQ ID NO: 6409
  source 1..40: mol_type = genomic DNA

SEQ ID NO: 27810 - DNA, 50 bp, Escherichia coli; identical to SEQ ID NO: 6360
  source 1..50: mol_type = genomic DNA

SEQ ID NO: 27811 - protein, 514 aa, Escherichia coli
MRKVYSYIRFSSTKQAFGDSHRRQSKAIQDWLASHPDHILDESLSFEDLGRSAFHGDHLKEGGALRAFLEAVKQGLIPPDSVLLVESLDRVSRQSISHAQETIRAILEQGITVVTLSDGETYNRQSLDDSLALIRMIILQERSHNESVIKSDRIKKVWSHKRQQFEQDGTKITGNCPGWLKLNSDGKSFSLIPHHVETIHRIFDEKLSGKSLHAIARDLNLENIPTITNKKVDTGWTPTRVRDLLLKESLIGVAYGVSDYFPPAISKEKFHAVQMIRGQGKGKKPTSRQPSSIDIFKGICKCAECGSTLRQRNTKKTPEGRYPRGYLECRNRQLGRCNSKAFNRSLIEDILIQKVFPTLQYLSLKSNGDNISVTTLKADITSLEKGINNLISLAERGLGDLDALAQRITNNRVELESKKKDLRQAEAIQSLRSDNDIQDSDRKTVEGRIKLQLAIKSFIKEMIFDYYKQEITIRLLNGKSFSGISVARENKDFDHSSVFEVLQKSLLDIDEVHL

SEQ ID NO: 27812 - DNA, 50 bp, Escherichia coli; identical to SEQ ID NO: 27787
  source 1..50: mol_type = genomic DNA

SEQ ID NO: 27813 - DNA, 40 bp, Escherichia coli; identical to SEQ ID NO: 6408
  source 1..40: mol_type = genomic DNA

SEQ ID NO: 27814 - DNA, 40 bp, Escherichia coli; identical to SEQ ID NO: 6409
  source 1..40: mol_type = genomic DNA

SEQ ID NO: 27815 - DNA, 50 bp, Escherichia coli; identical to SEQ ID NO: 6360
  source 1..50: mol_type = genomic DNA

SEQ ID NO: 27816 - protein, 514 aa, Escherichia coli
MRKVYSYIRFSSTKQAFGDSHRRQSKAIQDWLASHPDHILDESLSFEDLGRSAFHGDHLKEGGALRAFLEAVKQGLIPPDSVLLVESLDRVSRQSISHAQETIRAILEQGITVVTLSDGETYNRQSLDDSLALIRMIILQERSHNESVIKSDRIKKVWSHKRQQFEQDGTKITGNCPGWLKLNSDGKSFSLIPHHVETIHRIFDEKLSGKSLHAIARDLNLESIPTITNKKVDTGWTPTRVRDLLLKESLIGVAYGVSDYFPPAISKEKFHAVQMIRGQGKGKKPTSRQPSSIDIFKGICKCAECGSTLRQRNTKKTPEGRYPRGYLECRNRQLGRCNSKAFNRSLIEDILIQKVFPTLQYLSLKSNGDNISVTTLKADITSLEKGINNLISLAERGLGDLDTLAQRITNNRVELESKKKDLRQAEAIQSLRSDNDIQDSDRKTVEGRIKLQLAIKSFIKEMIFDYYKQEITIRLLNGKSFSGISVARENKDFDHSSVFEVLQKSLLDIDEVHL

SEQ ID NO: 27817 - DNA, 50 bp, Escherichia coli; identical to SEQ ID NO: 27787
  source 1..50: mol_type = genomic DNA

SEQ ID NO: 27818 - DNA, 40 bp, Escherichia coli; identical to SEQ ID NO: 6408
  source 1..40: mol_type = genomic DNA

SEQ ID NO: 27819 - DNA, 40 bp, Escherichia coli; identical to SEQ ID NO: 6409
  source 1..40: mol_type = genomic DNA

SEQ ID NO: 27820 - DNA, 50 bp, Escherichia coli; identical to SEQ ID NO: 6360
  source 1..50: mol_type = genomic DNA

SEQ ID NO: 27821 - protein, 514 aa, Escherichia coli
MRKVYSYIRFSSTKQAFGDSHRRQSKAIQDWLASHPDHILDESLSFEDLGRSAFHGDHLKEGGALRAFLEAVKQGQIPPDSVLLVESLDRVSRQSISHAQETIRAILEQGITVVTLSDGETYNRQSLDDSLALIRMIILQERSHNESVIKSDRIKKVWSHKRQQFEQDGTKITGNCPGWLKLNSDGKSFSLIPHHVETIHRIFDEKLSGKSLHAIARDLNLENIPTITNKKVDTGWTPTRVRDLLLKESLIGVAYGVSDYFPPAISKEKFHAVQMIRGQGKGKKPTSRQPSSIDILKGICKCAECGSTLRQRNTKKTPEGRYPRGYLECRNRQLGRCNSKAFNRSLIEDILIQKVFPTLQYLSLKSNGDNISVTTLKADITSLEKGINNLISLAEKGLGDLDTLAQRITNNRVELESKKKDLRQAEAIQSLRSDNDIQDSDRKTVEGRIKLQLAIKSFVKEIIFDYYKQEITIRLLNGKSFSGISVARENKDFDHSSVFEVLQKSLLDIDEVHL

SEQ ID NO: 27822 - DNA, 50 bp, Escherichia coli; identical to SEQ ID NO: 27787
  source 1..50: mol_type = genomic DNA

SEQ ID NO: 27823 - DNA, 40 bp, Escherichia coli; identical to SEQ ID NO: 6373
  source 1..40: mol_type = genomic DNA

SEQ ID NO: 27824 - DNA, 40 bp, Escherichia coli; identical to SEQ ID NO: 6374
  source 1..40: mol_type = genomic DNA

SEQ ID NO: 27825 - DNA, 50 bp, Escherichia coli; identical to SEQ ID NO: 6360
  source 1..50: mol_type = genomic DNA

SEQ ID NO: 27826 - protein, 514 aa, Escherichia coli; identical to SEQ ID NO: 27811

SEQ ID NO: 27827 - DNA, 50 bp, Escherichia coli; identical to SEQ ID NO: 27787
  source 1..50: mol_type = genomic DNA

SEQ ID NO: 27828 - DNA, 40 bp, Escherichia coli; identical to SEQ ID NO: 6368
  source 1..40: mol_type = genomic DNA

SEQ ID NO: 27829 - DNA, 40 bp, Escherichia coli; identical to SEQ ID NO: 6369
  source 1..40: mol_type = genomic DNA

SEQ ID NO: 27830 - DNA, 50 bp, Escherichia coli; identical to SEQ ID NO: 6360
  source 1..50: mol_type = genomic DNA

SEQ ID NO: 27831 - protein, 514 aa, Escherichia coli
MRKVYSYIRFSSTKQAFGDSHRRQSKAIQDWLASHPDHILDESLSFEDLGRSAFHGDHLKEGGALRAFLEAVKQGLIPPDSVLLVESLDRVSRQSISHAQETIRAILEQGITVVTLSDGETYNRQSLDDSLALIRMIILQERSHNESVIKSDRIKKVWSHKRQQFEQDGTKITGNCPGWLKLNSDGKSFSLIPHHVETIHRIFDEKLSGKSLHAIARDLNLENIPTITNKKVDTGWTPTRVRDLLLKESLIGVAYGVSDYFPPAISKEKFHAVQMIRGQGKGKKPTSRQPSSIDIFKGICKCAECGSTLRQRNTKKTPEGRYPRGYLECRNRQLGRCNSKAFNRSLIEDILIQKVFPTLQYLSLKSNGDNISVTTLKADITSLEKGIHNLISLAERGLGDLDTLAQRITNNRVELESKKKDLRQAEAIQSLRSDNDIQDSDRKTVEGRIKLQLAIKSFIKEMIFDYYKQEITIRLLNGKSFSGISVARENKDFDHSSVFEVLQKSLLDIDEVHL

SEQ ID NO: 27832 - DNA, 50 bp, Escherichia coli; identical to SEQ ID NO: 27787
  source 1..50: mol_type = genomic DNA

SEQ ID NO: 27833 - DNA, 40 bp, Escherichia coli; identical to SEQ ID NO: 6373
  source 1..40: mol_type = genomic DNA

SEQ ID NO: 27834 - DNA, 40 bp, Escherichia coli; identical to SEQ ID NO: 6374
  source 1..40: mol_type = genomic DNA

SEQ ID NO: 27835 - DNA, 50 bp, Escherichia coli; identical to SEQ ID NO: 6360
  source 1..50: mol_type = genomic DNA

SEQ ID NO: 27836 - protein, 514 aa, Escherichia coli; identical to SEQ ID NO: 27786

SEQ ID NO: 27837 - DNA, 50 bp, Escherichia coli; identical to SEQ ID NO: 27787
  source 1..50: mol_type = genomic DNA

SEQ ID NO: 27838 - DNA, 40 bp, Escherichia coli; identical to SEQ ID NO: 6373
  source 1..40: mol_type = genomic DNA

SEQ ID NO: 27839 - DNA, 40 bp, Escherichia coli; identical to SEQ ID NO: 6374
  source 1..40: mol_type = genomic DNA

SEQ ID NO: 27840 - DNA, 50 bp, Escherichia coli; identical to SEQ ID NO: 6360
  source 1..50: mol_type = genomic DNA

SEQ ID NO: 27841 - protein, 514 aa, Escherichia coli
MRKVYSYIRFSSTKQAFGDSHRRQSKAIQDWLASHPDHILDESLSFEDLGRSAFHGDHLKEGGALRAFLEAVKQGLIPPDSVLLVESLDRVSRQSISHAQETIRAILEQGITVVTLSDGETYNRQSLDDSLALIRMIILQERSHNESVIKSDRIKKVWSHKRQQFEQDGTKITGNCPGWLKLNSDGKSFSLIPHHVETIHRIFDEKLSGKSLHAIARDLNLENIPTITNKKVDTGWTPTRVRDLLLKESLIGVAYGVSDYFPPAISKEKFHAVQMIRGQGKGRKPTSRQPSSIDILKGICKCAECGSTLRQRNTKKTPEGRYPRGYLECRNRQLGRCNSKAFNRSLIEDILIQKVFPTLQYLSLKSNGDNISVTTLKADISSLEKGINNLISLAERGLGDLDALAQRITNNRVELESKKKDLRQAEAIQSLRSDNDTQDSDRKTVEGRIKLQLAIKSFIKEMIFDYYKQEITIRLLNGKSFSGISVARENKDFDHSSVFEVLQKSLLDIDEVHL

SEQ ID NO: 27842 - DNA, 50 bp, Escherichia coli; identical to SEQ ID NO: 27787
  source 1..50: mol_type = genomic DNA

SEQ ID NO: 27843 - DNA, 40 bp, Escherichia coli; identical to SEQ ID NO: 6378
  source 1..40: mol_type = genomic DNA

SEQ ID NO: 27844 - DNA, 40 bp, Escherichia coli; identical to SEQ ID NO: 6379
  source 1..40: mol_type = genomic DNA

SEQ ID NO: 27845 - DNA, 50 bp, Escherichia coli; identical to SEQ ID NO: 6360
  source 1..50: mol_type = genomic DNA

SEQ ID NO: 27846 - protein, 514 aa, Escherichia coli
MRKVYSYIRFSSTKQAFGDSHRRQSKAIQDWLASHPDHILDESLSFEDLGRSAFHGDHLKEGGALRAFLEAVKQGLIPPDSVLVVESLDRVSRQSISHAQETIRAILEQGITVVTLSDGETYNRQSLDDSLALIRMIILQERSHNESVIKSDRIKKVWSHKRQQFEQDGTKITGNCPGWLKLNSDGKSFSLIPHHVETIHRIFDEKLSGKSLHAIARDLNLENIPTITNKKVDTGWTPTRVRDLLLKESLIGVAYGVSDYFPPAISKEKFHAVQMIRGQGKGKKPTSRQPSSIDIFKGICKCAECGSTLRQRNTKKTPEGRYPRGYLECRNRQLGRCNSKAFNRSLIEDILIQKVFPTLQYLSLKSNGDNISVTTLKADITSLEKGINNLISLAERGLGDLDTLAQRITNNRVELESKKKDLRQAEAIQSLRSDNDIQDSDRKTVEGRIKLQLAIKSFIKEMIFDYYKQEITIRLLNGKSFSGISVARENKDFDHSSVFEVLQKSLLDIDEVHL

SEQ ID NO: 27847 - DNA, 50 bp, Escherichia coli; identical to SEQ ID NO: 27787
  source 1..50: mol_type = genomic DNA

SEQ ID NO: 27848 - DNA, 40 bp, Escherichia coli; identical to SEQ ID NO: 6408
  source 1..40: mol_type = genomic DNA

SEQ ID NO: 27849 - DNA, 40 bp, Escherichia coli; identical to SEQ ID NO: 6409
  source 1..40: mol_type = genomic DNA

SEQ ID NO: 27850 - DNA, 50 bp, Escherichia coli; identical to SEQ ID NO: 6360
  source 1..50: mol_type = genomic DNA

SEQ ID NO: 27851 - protein, 514 aa, Escherichia coli; identical to SEQ ID NO: 27811

SEQ ID NO: 27852 - DNA, 50 bp, Escherichia coli; identical to SEQ ID NO: 27787
  source 1..50: mol_type = genomic DNA

SEQ ID NO: 27853 - DNA, 40 bp, Escherichia coli; identical to SEQ ID NO: 6378
  source 1..40: mol_type = genomic DNA

SEQ ID NO: 27854 - DNA, 40 bp, Escherichia coli; identical to SEQ ID NO: 6379
  source 1..40: mol_type = genomic DNA

SEQ ID NO: 27855 - DNA, 50 bp, Escherichia coli; identical to SEQ ID NO: 6360
  source 1..50: mol_type = genomic DNA

SEQ ID NO: 27856 - protein, 514 aa, Escherichia coli
MRKVYSYIRFSSTKQAFGDSHRRQSKAIQDWLASHPDHILDESLSFEDLGRSAFHGDHLKEGGALRAFLEAVKQGLIPPDSVLLVESLDRVSRQSISHAQETIRAILEQGITVVTLSDGETYNRQSLDDSLALIRMIILQERSHNESVIKSDRIKKVWSHKRQQFEQDGTKITGNCPGWLKLNSDGKSFSLIPLHVETIHRIFDEKLSGKSLHAIARDLNLENIPTITNKKVDTGWTPTRVRDLLLKESLIGVAYGVSDYFPPAISKEKFHAVQMIRGQGKGKKPTSRQPSSIDIFKGICKCAECGSTLRQRNTKKTPEGRYPRGYLECRNRQLGRCNSKAFNRSLIEDILIQKVFPTLQYLSLKSNGDNISVTTLKADITSLEKGINNLISLAERGLGDLDTLAQRITNNRVELESKKKDLRQAEAIQSLRSDNDIQDSDRKTVEGRIKLQLAIKSFIKEMIFDYYKQEITIRLLNGKSFSGISVARENKDFDHSSVFEVLQKSLLDIDEVHL

SEQ ID NO: 27857 - DNA, 50 bp, Escherichia coli; identical to SEQ ID NO: 27787
  source 1..50: mol_type = genomic DNA

SEQ ID NO: 27858 - DNA, 40 bp, Escherichia coli; identical to SEQ ID NO: 6408
  source 1..40: mol_type = genomic DNA

SEQ ID NO: 27859 - DNA, 40 bp, Escherichia coli; identical to SEQ ID NO: 6409
  source 1..40: mol_type = genomic DNA

SEQ ID NO: 27860 - DNA, 50 bp, Escherichia coli; identical to SEQ ID NO: 6360
  source 1..50: mol_type = genomic DNA

SEQ ID NO: 27861 - protein, 461 aa, Staphylococcus pseudintermedius
MKVAIYTRVSTHEQSLRGFSIEEQERKLKQFCDINDWNVYKIYTDAGFSGAKRDRPALNQLIQDIDKFDLVLVYKLDRLTRSVKDLLDILEVLEKNDVSFRSATEVYDTSTAMGRLFVTLVGAMAEWERTTIQERTFMGRRAAAQKGLIKTTPPFFYDRVDNKFIPNEYSKVLRFAVDEIKKGTSLREITIKLNNSNYKAPIGNRWHRSVLRNALKSPVARGHYCFSDVFIENTHEPIITDTEYEEIKERISERTNSVVVRHISAFRGKLICPTCGNRCTLNTNKHVTQKKGTWYSKHYYCDRCKCDKSVENFSFSEEEALKQFYTYISNFDLTNYEVEVNEEKEQEIEIDIDKINEERKRYHILFAKGLMREDELTPLIKELDDMVAVYNKQKKENDRKVYDYEQIKDFKYSLLDGWERMDLELKAEFIKRAIKSIKIEYIKGVRGKKPNSINILDVDFY

SEQ ID NO: 27862 - DNA, 50 bp, Staphylococcus pseudintermedius
  source 1..50: mol_type = genomic DNA
aattgggggtatgtcttacttattagcgtacctatttcataccccctaaa

SEQ ID NO: 27863 - DNA, 40 bp, Staphylococcus pseudintermedius
  source 1..40: mol_type = genomic DNA
taaaggcggtgttccaataagcgtacccaagcccccaata

SEQ ID NO: 27864 - DNA, 40 bp, Staphylococcus pseudintermedius
  source 1..40: mol_type = genomic DNA
taaaggcggtgttccaatactcgtacccaagcccccaata

SEQ ID NO: 27865 - DNA, 50 bp, Staphylococcus pseudintermedius
  source 1..50: mol_type = genomic DNA
aattgggggcaatctttacttattctcctttccttttcccacccccttct

SEQ ID NO: 27866 - protein, 512 aa, Clostridium neonatale
MKVVAIYSRKSKESDTGESIKNQIEMCKDYFLNQGKEFTFEIFQDEGFSGGNTKRPEFQRMMLLAKHGKFDIVACYKVDRIARNIIDFMNTFDILKKNKVSLVSVTEGFDPNTPIGMMLMTMIAGFAEMERMNIAQRVKDNMNALAKMGRWLGGTPPTGYRAIKENTHNGKYAMYLELIPEMKEKLTFIFESAAAGYTSRYIGKLVELHPKTIINIVYNPTYCPSDELSKSYLENLGYKVYGELNGRGYLPWNRRPIDVNGKKMYRSEDRFVTASKHEIPTDSATWIKANEEIRKRGDEGRPRISQYSFLAHMLTCKCGCGMSVDSGYKRKDGSRSYYFKCSSKKGGYNRNCDAKLIRVDYIENDILSLLQKICLNKELLNDEISKTETIVIDKNEIKNISQKIKSNDIEMENLVSQLGKLKGSAADAVTTKMNKLSEENDNLKQKLFLLEHDNILNSINHYDIDYLYNKIVNLMSSWENLSLEDKQFGIQSIIDKIKWDGEKFKISFIKKS

SEQ ID NO: 27867 - DNA, 50 bp, Clostridium neonatale
  source 1..50: mol_type = genomic DNA
cataggaattaacagagtactgcacctgcaagactcttcaaatacatatt

SEQ ID NO: 27868 - DNA, 40 bp, Clostridium neonatale
  source 1..40: mol_type = genomic DNA
tagtgccatagctggaactccacctggtcttccgccaata

SEQ ID NO: 27869 - DNA, 40 bp, Clostridium neonatale
  source 1..40: mol_type = genomic DNA
tagtgccatagctggaactttacctggtcttccgccaata

SEQ ID NO: 27870 - DNA, 50 bp, Clostridium neonatale
  source 1..50: mol_type = genomic DNA
tatataaaaggaatgattacagaatttgcaagactcaaaaaatgcataat

SEQ ID NO: 27871 - protein, 461 aa, Mycobacteroides abscessus
MSVKAVIYTRISEDQTGEQEGVTRQLEDCVKLADQLGWEVVAHYDDNDLSAFNGKLRPGFETLLKAMAAGEFTALLVWHPDRLYRSPKDLERIIEIADARRVKIATVRAGDMDLSTPAGRMVARILGSVARQESEHKGDRQRRANEQRAAEGKWYTANRCFGYTHDGVPLEPEATAVRTAVADVLAGKSIRKVGIEWNEQGLKTTLGTSWNSPRVRRLLVNPRYAALRTYRGVVVGPGAWEPLIDADTHRGLVAFLSDPSRIKCTSFERKYIGSGVYRCGKCEGGLMKAAQPGGRKNRAYVCREHAHVLRAGEPVDAYVEALVLEYLSRPDAKLVLDDGRDVDVAELQAQRAGLQARLDELASLFADGAIDGSQLRRGTNELRSRLAVLDSQLADLARTNPVADLLGAGDQLAEKWAAMSKDMQGKIVNELMVVTILPAPRGRRAFDPDYIRIDWKAGHAA

SEQ ID NO: 27872 - DNA, 50 bp, Mycobacteroides abscessus
  source 1..50: mol_type = genomic DNA
aggtacccaacctaaagcgtcttgcccaagaccccctagttgagatacct

SEQ ID NO: 27873 - DNA, 40 bp, Mycobacteroides abscessus; identical to SEQ ID NO: 6503
  source 1..40: mol_type = genomic DNA

SEQ ID NO: 27874 - DNA, 40 bp, Mycobacteroides abscessus; identical to SEQ ID NO: 6504
  source 1..40: mol_type = genomic DNA

SEQ ID NO: 27875 - DNA, 50 bp, Mycobacteroides abscessus; identical to SEQ ID NO: 6505
  source 1..50: mol_type = genomic DNA

SEQ ID NO: 27876 - protein, 592 aa, Pseudomonas syringae
MPKIWPYIRFSSEEQKKGDSLRRQQDLIDKFAVRPEIVLEGAIIDTSLDLNDLGVSGYTGKNLLQGRFKTFLDAVDSGIVKPGDYLAVEALNRVTRLNPRASLPILLGLLEKGVKIAITDSSLVYTNTGDITQLYIAIGELQRGYSESQEKGRRVREAWDSKKKRALLTGEIATSRLPLWLRAVKTTVKGMVVRTVEEIPERVAVVKEIYRLSDSNVGAIATARILTEKKIPTFTREDGRKNPNYGDFWQPSYIKKILDSRAVMGHYQPMTWEKLPDNGRRRINHGPEIENYFPAIVEPELFTRIQEKRKGRAIDGQGNKGKKFSNLFTKIAHCSKCGATASHVNKGPNPSKGGRYLVCYRARHGDCQYNAWRYDEIETAILKFLAEADIKSIIKNESHAEDLINKKYLLDAEISDIQEMIDAFKIDFIRLKGKVSDLERELVIENEHAIEKLKAKAETLQQEIFEAFEQQKADIEKDIQVLRNLPATESESRVFEIRAKINERLKLIIDDVKIDFQQRYIEIIFKNGNRRYLSERTTINMAPPTQEEREEMEMWAEVYASMSEEEQRQYMEHTIPGEIANDPLKLLKYFDS

SEQ ID NO: 27877 - DNA, 50 bp, Pseudomonas syringae
  source 1..50: mol_type = genomic DNA
gtgggtccaatggttgcctaaaacaaggatttaagacaccattagacccc

SEQ ID NO: 27878 - DNA, 40 bp, Pseudomonas syringae
  source 1..40: mol_type = genomic DNA
gccgggcggcccgctgaacaacaggttatgcgccccggca

SEQ ID NO: 27879 - DNA, 40 bp, Pseudomonas syringae
  source 1..40: mol_type = genomic DNA
gccgggcggcccgctgaacttcaggttatgcgccccggca

SEQ ID NO: 27880 - DNA, 50 bp, Pseudomonas syringae
  source 1..50: mol_type = genomic DNA
gagccaccacgcctggccgaaaacttggattttagatgcaattagacact

SEQ ID NO: 27881 - protein, 450 aa, Enterococcus faecium
MKRVALYMRVSTEQQAKHGDSLREQKETLYEYINQNKDLKVINEYIDGGISGQKINRDEFQKLLQDVKENKIDIILFTKLDRWFRNLRHYLNTQEILEKHNVSWNAVSQQYYDTTTAYGRTFIAQVMSFAELEAQIDSERIKAVMANKISQGEVVSGKTPLGYSIENKKLVINDDAPIVVDIFDYFLSSGSLRKTVYYLGSQYGIVRDYQSVKNMLTNKKYIGELRNNKNYCPPIIDKKLFYAVQKALPKNLKTNAKRDYIFKGLLKCSDCQGSVAGQTIKSRYKKKDGTESIYERTCYRCVKRRNNKLRCTNKRAFYEKNLERYIFEATKQKFEQIQINYSKKQPKTIKKKNSKKNIENKLDRLKKAYLNEVIDLEEYKKDREALMKELNEIEVEPAKIDMKNVEFILSKEFDKVYKESSKEEKNALWRSIIDNIIVFPDGNITVNFFI

SEQ ID NO: 27882 - DNA, 50 bp, Enterococcus faecium
  source 1..50: mol_type = genomic DNA
atgtgtactaacttatatatcccagaaggataatataagttagtacacat

SEQ ID NO: 27883 - DNA, 40 bp, Enterococcus faecium; identical to SEQ ID NO: 21713
  source 1..40: mol_type = genomic DNA

SEQ ID NO: 27884 - DNA, 40 bp, Enterococcus faecium
  source 1..40: mol_type = genomic DNA
cgatggaataacattaccacaaggatgattatgcgctaaa

SEQ ID NO: 27885 - DNA, 50 bp, Enterococcus faecium
  source 1..50: mol_type = genomic DNA
atatgtacttctaaatatataggacatatattatatataaaaatacacat

SEQ ID NO: 27886 - protein, 539 aa, Klebsiella pneumoniae
MLRQATQNLITALYPRLSHEDELQGESNSISNQKRILEAFAKQNGFTNLRWYTDDGYSGANFQRPGFQAMLADIEAGKVGTVIVKDMSRLGRNYLQVGFYTEMLFPQKGVRFIAVNDNVDSANGGMDNDFTPLRNLFNEWLVRDTSKKIKAVKRAKGMSGKPVTSKPVYGYLMDEDENYIVDEETAPVVRQIYQLCLAGNGPTKIARMLTEQQIPTPGTLEYRRTGSTRRYHPGYECKWATNTVVHLLENREYTGCLVNFKTEKPSYKTKHSVENPIEKQAIFENHHEPIIDRETWERVQELRKQRKRPNRYDEVGLFSGMLFCADCGHVMYQQRYQNKTRKQDCYICGSYKKRTRDCTAHFIRTDLLTAGVLSNLRQVTEYAAKHESRFVKLLIQQNEIGGKRKTAAATKQLEQAQERISEVSRIIKRLYEDNVNGKISDERFMELSADYEQEQRELKDRAAALQEELSKSQAATVNAEKFMGIVRKHLAFEELTPTLLREMIEKIVVHECSYDENGTRRQDIEIYYSFVGKIDLPEA

SEQ ID NO: 27887 - DNA, 50 bp, Klebsiella pneumoniae
  source 1..50: mol_type = genomic DNA
acttctttatcgcacatcagtaaatgctcatgtgccataaagtaacacat

SEQ ID NO: 27888 - DNA, 40 bp, Klebsiella pneumoniae
  source 1..40: mol_type = genomic DNA
atgacaatccccaccatgatgaacagcgcgctaaacagat

SEQ ID NO: 27889 - DNA, 40 bp, Klebsiella pneumoniae
  source 1..40: mol_type = genomic DNA
atgacaatccccaccatgatcaacagcgcgctaaacagat

SEQ ID NO: 27890 - DNA, 50 bp, Klebsiella pneumoniae
  source 1..50: mol_type = genomic DNA
acttcttgatcttacagctttaaatcttcatttgcataaataaaacacat

SEQ ID NO: 27891 - protein, 539 aa, Escherichia coli
MLRQATQNLITALYPRLSHEDELQGESNSISNQKRILETYAKQNGFTNLRWYTDDGFSGANFQRPGFQAMLADIEAGKVGTVIVKDMSRLGRNYLQVGFYTEMLFPQKGVRFIAVNDNVDSANGSMDNDFTPLRNLFNEWLVRDTSKKIKAVKRAKGMSGKPVTSKPVYGYLMDEDENYIVDEETAPVVQQIYQLCLAGNGPTKIARMLTEQQIPTPGTLEYRRTGSTRRYHPGYECKWATNTVVHILENREYTGCLVNFKTEKPSYKVKHSVENPVEKQAIFENHHEPIIDRETWERVQELRKQRKRPNRYDEVGLFSGMLFCADCGHVMYQQRYQNKNRKQDCYICGSYKKRTRDCTAHFIRTDLLTAGVLSNLRQVTEYAAKHESRFVKLLIQQNEIGGKRKTAATTRQLEQAQERIAEVSRIIKRLYEDNVNGKISDERFMELSADYEQEQRELKDRAAALQAELDKSQAATVNAEKFMGIVRKHLAFEELTPTLLREMIEKIVVHECSYDENGTRRQDIEIYYSFVGKIDLPEA

SEQ ID NO: 27892 - DNA, 50 bp, Escherichia coli
  source 1..50: mol_type = genomic DNA
ttacttctttatcgcacatcagtaaatgctcatgtgtcataaagaaacac

SEQ ID NO: 27893 - DNA, 40 bp, Escherichia coli
  source 1..40: mol_type = genomic DNA
tagcgatagtgcctgcgttaatatccattaaatcaaacca

SEQ ID NO: 27894 - DNA, 40 bp, Escherichia coli; identical to SEQ ID NO: 27893
  source 1..40: mol_type = genomic DNA

SEQ ID NO: 27895 - DNA, 50 bp, Escherichia coli
  source 1..50: mol_type = genomic DNA
ttacttcttgatcttacagctttaaatcttcatttgcataaataaaacac

SEQ ID NO: 27896 - protein, 628 aa, Enterobacter ludwigii
MPQLYSYIRWSTDRQDKGTTRTRQVAAAKAYAEEAGLEMVEIIEPGVSAFRGKNRAGKLGDFIDAVKNAAIPSDSWLYCENLDRLSRDQVDEALRLFLELIGLGLTIVTGMDRKVYNRDTIRQNPTDLMISILMFIRGNEESETKSNRTVGNVVALVERHKEGLPVNIKSVGRHPFWIDDTGSQYEAVKKHPFYWNIAREIIDMFLSGNGVYSVKKYLDEKYPNGLKGREWDYQVLKKMRDNRALIGERTINLRGVPYKLENYYPWLCKDEAEFFLLEKRKQQNNYKSKKDGADTIKLLSGLSILRCSKCGGTMHSFMNHGKARYICTNGVHLQKNCSGWSITAQLVEHCTMIALLIGYMDKSRKNGSDTTLIEEELNEKEKLIKALDSKISNLVTAIAIAPDVNSLAHSLNEINSKRKELVLSVEKLKERLVSLQGKGSFEVDIMEFLILIQWAFFTNMEDNDRDKIRKIIDAIIEYIVVDKTNDCITIKIKYYGNDEVLVFGGVDRKPHWRFSIDFDTGKEGVLTVLENDLKDVPEIQKAVSYLHKLEKGYLAMYDSAVTMLAEVGYPEIKGTQFWPNSGKHEKVTVAFDGVEHTISLNGRLPKAIVSAIETTGLNRQQFIEKFKV

SEQ ID NO: 27897 - DNA, 50 bp, Enterobacter ludwigii
  source 1..50: mol_type = genomic DNA
gattttatttcttgattgttagggcaccctaatgatataaatccaatctt

SEQ ID NO: 27898 - DNA, 40 bp, Enterobacter ludwigii
  source 1..40: mol_type = genomic DNA
atccaccaggttttttgggcagcccagggagacgaagccg

SEQ ID NO: 27899 - DNA, 40 bp, Enterobacter ludwigii
  source 1..40: mol_type = genomic DNA
atccaccaggttttttgggctgcccagggagacgaagccg

SEQ ID NO: 27900 - DNA, 50 bp, Enterobacter ludwigii
  source 1..50: mol_type = genomic DNA
tatgttattttttcattgtgagggctccctaagtttctcagccaaatgtt

SEQ ID NO: 27901 - protein, 532 aa, Pseudomonas veronii
MTIKNSLPRAFSDVFRDDETINVYSYIRFSSKAQALGFGEVRQLEQLNRFFEQYPTARQVERYEDLGVSAFKGKNLKTGQLAKFVERIKSKEILPNALLLVESFDRISRMGGYDALELIISIIQSDCSIYTLFDNRLYSKRKKDSSVDISLIQNILERANDESKSKSERISDAKARNLEKGENGGIITKRCPFWISFVDGKFVLNEHSKAVKRMTELCFDFGFQSIAKELNKENHPRKYTDSTIGKVLHKHAIYGSFLAMKNDENGNRTIVNKEIKNYYPAVISESEFHRISEKLKERQDPSLAGRKAQEFRNILRGLVFCKCGSTFRFHAQKSLYVDLVCHASTLGQCKYALPGKGIRHRYARIEEIFLAYQSLIPFHKIIVKNEDIKALEKEHQEILGQIIIKEKALANNFSILEKSSDSAQKYITNRIDEVSQELDKLKVDEHKLNLQINSLHLTTKSDLKSIEIFRLLITEKGRIKINNFLHSQKIKLIITPVKKKFFSLDIYHDEKHIDTIDVTPDGYAAHHKPHLK

SEQ ID NO: 27902 - DNA, 50 bp, Pseudomonas veronii
  source 1..50: mol_type = genomic DNA
attttacaaaaagcgccactcattgcaatgacaggaggattttgtataaa

SEQ ID NO: 27903 - DNA, 40 bp, Pseudomonas veronii
  source 1..40: mol_type = genomic DNA
aatccgcaccccgatgaacgcggtgatcggcatgctcgaa

SEQ ID NO: 27904 - DNA, 40 bp, Pseudomonas veronii
  source 1..40: mol_type = genomic DNA
aatccgcaccccgatgaaccaggtgatcggcatgctcgaa

SEQ ID NO: 27905 - DNA, 50 bp, Pseudomonas veronii
  source 1..50: mol_type = genomic DNA
agttttcaaacctggctatgcattcaagtcacatgaggtacttttataaa

SEQ ID NO: 27906 - protein, 537 aa, Bacillus cereus
MKRVWCLYRVSTKKQVNTDDDIPMQRNACHSFVNNRTDWKITNELSEKGVSGWAKKADERDALNTIKRGAMKREFDILLVFMFDRLGRREDETPLVVSFLSENNVEVWSVEEGKRSVETHTDKLLNYISFWQSDGESQKTSARVRESKKQLSEQGYFQGGVTPFGYKIIETDQVHWKNKDRRIKELVPDEKEVELVKLVFNLYIDRHMGYRKIVDYLNTNGYRTRDGKIIGVSTIQRMLENPIYIGRKRYKSFDGQMKEQPYDEGLRIVSDNTFNQVLEIKNKRREKLNNQDKTGIPLTGKLMFSGLAYCKYCGAKLSGNYLYRKQKQKNKGGYYTNAIYRYKCPLNKGKLNCNHEKNIWGAKKHDKLIIQQIKDVLKHFDIKSFIDNSVVKKKTKIKQKEKNVKTLEKECLSLVKQLEKLNSEIAKSLLDESPFTPQQLSTAIEGINIKIDENQTNINNLRNEIEKEKENFSDVDFIVNELDNWEQKFDNAGDDLKKAMLSRIIDKVYFSKDEIDIELNLMFDESFIKQNTKNTNY

SEQ ID NO: 27907 - DNA, 50 bp, Bacillus cereus
  source 1..50: mol_type = genomic DNA
tagtgtattttgttactgtatgcaaaggcattacataacaaaatgcacta

SEQ ID NO: 27908 - DNA, 40 bp, Bacillus cereus
  source 1..40: mol_type = genomic DNA
ctctcctgtaccagatgcaaaggcatttgcaatattagca

SEQ ID NO: 27909 - DNA, 40 bp, Bacillus cereus
  source 1..40: mol_type = genomic DNA
ctctcctgtaccagatgcatcggcatttgcaatattagca

SEQ ID NO: 27910 - DNA, 50 bp, Bacillus cereus
  source 1..50: mol_type = genomic DNA
tggtgtatttacccactgtctgcatccccattgtatctgagaagtaacta

SEQ ID NO: 27911 - protein, 550 aa, Serratia liquefaciens
MRTKMAYCYCRVSSGHQTTEKGGYGMSRQQGMLMDYVDEYSDSDGLGYGLSSESVVFLNAEGVSGFSGANLAKGSVLLAFIEDVKAGKIKNAVLCIENIDRFSRTNPQTAALSFLQLIEAGCNIHEAENGIVHHNNSDLNLISSGLIRSHRESLRKQKLSLKNWDKRFDKVVKKEAVLTARCPIWLRVEDNKYFEVLEHTKSIRLIFDLYIKGFGQAYIRDELNSRQWLYNGTTWGSWNVHRVLNDVRVTGKHRTQSDLRKDFDGMVIYPAIISEMDFNSVQQKLKSPGRSKKINRRANNLFSGLLMCGHCKKAHILLQVDKDKRFGRCSYATAGNNRCHARGFKYEIIENALIEHLRNFEMQSLDEGEHNIELQKLQDEFIYYNNYGAEVQSIVDSFDIPNERDYRILKNIESKVREIEGRIAEIKVANNVVDEFGKIVETITSDLKDVNNISMRQEFNSHLRKIIKSISVFRNSEIILLSIDYYACKDCQWININPKTGDLQGNLYVEGDKIVIHTKNGEVSYNTIDREYSFIETSINEDEVLEILQK

SEQ ID NO: 27912 - DNA, 50 bp, Serratia liquefaciens
  source 1..50: mol_type = genomic DNA
tactatattttagcgtggataattaccattagttatgctaaattatagtt

SEQ ID NO: 27913 - DNA, 40 bp, Serratia liquefaciens
  source 1..40: mol_type = genomic DNA
ggcgataatggcgatcaccaccatcagttctatcagggta

SEQ ID NO: 27914 - DNA, 40 bp, Serratia liquefaciens
  source 1..40: mol_type = genomic DNA
ggcgataatggcgatcaccttcatcagttctatcagggta

SEQ ID NO: 27915 - DNA, 50 bp, Serratia liquefaciens
  source 1..50: mol_type = genomic DNA
ttctttttttaagggtgaataatattcattagatatatgtaactatatat

SEQ ID NO: 27916 - protein, 469 aa, Brevibacterium aurantiacum
MTKVAAYVRASVDFTGERWSVGTQKEVIARRAKERGWKIVDVYEDSGVSASKARGPKTDWARMLRDADAGHIDMVVAVDVDRLLRSTKDLNTLIDHGLKIVTLDGEIDLSTADGEFRATMLASIARFETRRKSERQLRSNARRRAEGLPASAWTPFGWTKDGKVVPDQAEAVRRAFDSFLGEPSLSIRRIREDLNAAGHRTARGSEFSTDAVRYLLGNPLYAGFIKKYSTGELHPVTDERFPPIVAEQTWRAALAKLEDNVRRAARQGNQPKYLLSSVGLCGKCGATLVSGTNSQGVGTYRCGDHFHLSRQRTPVDAMVTEAVLTRLSAGDVHDLVVPKEDVGVDRETLLTERNALIERVNELSPMLSDVSQPVIEITQAINDVKARIVEIDAELHDRSVSQTSDFMVDIADPVGTVQRREAVERKWDAWDMDRRRLLVDELVTVTIEPIRPGHVKFDPDLIRIDPSRN

SEQ ID NO: 27917 - DNA, 50 bp, Brevibacterium aurantiacum
  source 1..50: mol_type = genomic DNA
aagcgccacagcttggacatgcgctagtgcatctcgtagttgtaaccttg

SEQ ID NO: 27918 - DNA, 40 bp, Brevibacterium aurantiacum
  source 1..40: mol_type = genomic DNA
cagatagagagggttctcgtagcgcatgtcgatgacaccg

SEQ ID NO: 27919 - DNA, 40 bp, Brevibacterium aurantiacum
  source 1..40: mol_type = genomic DNA
cagatagagagggttctcgaagcgcatgtcgatgacaccg

SEQ ID NO: 27920 - DNA, 50 bp, Brevibacterium aurantiacum
  source 1..50: mol_type = genomic DNA
aagccccaggttatggacaagcacaagtccatgtcctgttaggaacctgg

SEQ ID NO: 27921 - protein, 570 aa, Shewanella amazonensis
MSTSTSTPPQVVSYSRYSTKKQSKGFSLERQDENLKRWSDANGIPISELSFADLGISAFSGTAVREGLANMLEAVRQGAVPQGWWIAFERIDRLSRRGITETRRLIDQILQHGVNIVCIGEGIELRLDDDATDELKGSLMVAIHAHLAREQSAKASERIRATAAAKRRRARETGAPIKKRLPYWLELSPDGSKYQFKAGRIETVRYIVKRRIEGRGFHGICAELNEMNTPPLTRMSKQWNDMAVAATVRNVALFGQYQPAITSEVEKVDSDGRRKMVRVAIPDGEPLDNYFPAVVDRSTWDQIQSDSRTKMKAGRRGDNPVSGLTFCRHCGGTLPMKPASKTSTNGTRHTYRYWTCRGAVDGKCDHGKGIKDLDQFVIKACRRIVPRTLGQGTGGQDPAAAFEYQSLLERRDKVTTQIATLDAAMADPELGAAALKHIARQIDVATTNLEQVDAEIATIEARQKADQDTTPEAVERLKQLESDPVAYNLHLKTLVHRIVAGAVRLDDGEWSDVALMFRFTVELLNGQRIDVTVSRRNRWDKNPVEFYSHSEDATAGGEDDLYPWETEGQD

SEQ ID NO: 27922 - DNA, 50 bp, Shewanella amazonensis
  source 1..50: mol_type = genomic DNA
attcataccaatataaagtacattataatgtagttgatattgcacaaccc

SEQ ID NO: 27923 - DNA, 40 bp, Shewanella amazonensis; identical to SEQ ID NO: 27743
  source 1..40: mol_type = genomic DNA

SEQ ID NO: 27924 - DNA, 40 bp, Shewanella amazonensis
  source 1..40: mol_type = genomic DNA
gtccagtgccagcaacagctggatagcgttttccaatacc

SEQ ID NO: 27925 - DNA, 50 bp, Shewanella amazonensis
  source 1..50: mol_type = genomic DNA
cttcacactaaaggaaaggatatttgaatgtatatgacctatcacaaacc

SEQ ID NO: 27926 - protein, 506 aa, Streptomyces griseorubiginosus
MAEDDTSEQTDARLRRALRARQTAATQRAKKHRSDWTGEPAAIYCRISHANDDDQTGVERQERICRDVAARLGLVVAEDQVFVDNNRSAWQRKRNRPGWEALLTEASKGRVRHVLTYHPDRLMRQPRDLEELLQIADDHDITLHGQANRRDLADPDDRFFLRIEVAHACRSSDDTSRRLIDAMIDRAQDGRPHTGRRRYGYDKTGTVIVPEEAAIVREIFTRYLDGVSPVQLAKELYERGEKTAEGRNWSAPRVRDVLDNRHVAGIRVFRGEEIGDGEWPAIIDRGMWREVRERRAYRAAKLANGKQPSRFYLLRGVVTCTGCGRIMAGSGGSGAKYVCTRHTHKLDVPRCNRVVSAPILEEFVCDAALNLLERLDLTEAPTPSELSEEDQAAIEANRRELDELKDMWDNQELKTREYRAMRKTVEARIAEVERKMIVRPTAQVLDGLVGPHARESWAALKEAEDYERMNAVMRFLFAAVKIKAATQRGPYFDYGRIDIEQNPIWF

SEQ ID NO: 27927 - DNA, 50 bp, Streptomyces griseorubiginosus
  source 1..50: mol_type = genomic DNA
gaggtctatgaacgcggcttgacgtggatcaagcagtgctcatagccttt

SEQ ID NO: 27928 - DNA, 40 bp, Streptomyces griseorubiginosus
  source 1..40: mol_type = genomic DNA
gaagcgggacaggatgacgtggatcaagccgtcgttcctg

SEQ ID NO: 27929 - DNA, 40 bp, Streptomyces griseorubiginosus
  source 1..40: mol_type = genomic DNA
gaagcgggacaggatgacgaagatcaagccgtcgttcctg

SEQ ID NO: 27930 - DNA, 50 bp, Streptomyces griseorubiginosus
  source 1..50: mol_type = genomic DNA
caggtccatcagtgtggcttgaggaagatctagcaggagccacttccttc

SEQ ID NO: 27931 - protein, 540 aa, Bittarella massiliensis
MKQPYNTTIYNTALYMRLSRDDENYGDSVSIETQRTILQQYAKEQGLHVVGEYVDDGWSGTNFERPDFQRMMDDVEAGKVNCIVTKDLSRFGREHVMMDYYLEFLFPEKRVRYIAVAENEDTEKGLSDFVPFKNLFNEWFAKDTSRKVKAAFKAKFATGQRIGAYAPIGYRKHPEIKNKLIIDEETRWIVEKIFDLAIHGRGAASITRILIAEKVPTPGFINFQRDGTFANIYAGAPEEKSYAWTIAQVKSIMKDETYIGHTIHYRETNISFKNKRRIRKPQSEWVRVENTQEPIISEQVFRQVQEQIANRRRKCKDGTTQIFSGLVKCSDCGWSLSYGENRQNSKPYGHYHCSKYGQGTRQCSMHYIRYDVLYAYVLSRLQYWSGLVQHDEERLLKRLLNANDKGQAAARKKQAAELNKAEKRKAEVDTLFARMYEDWAAGRITEYNFSMLSGKYQSEQAELDTKIEQLQSAIATESQNAADAEKWIALMKECVNPTELTAELLNTLIEKIVVHEAVKGEDGSREQEVEIFYRFIGKID

SEQ ID NO: 27932 - DNA, 50 bp, Bittarella massiliensis
  source 1..50: mol_type = genomic DNA
caatatttttaactatgtgataccgggggttcacttagataaagatacca

SEQ ID NO: 27933 - DNA, 40 bp, Bittarella massiliensis
  source 1..40: mol_type = genomic DNA
ggtctccaagtgggagaacggcgcctcctgtcccgacatc

SEQ ID NO: 27934 - DNA, 40 bp, Bittarella massiliensis
  source 1..40: mol_type = genomic DNA
ggtctccaagtgggagaactgcgcctcctgtcccgacatc

SEQ ID NO: 27935 - DNA, 50 bp, Bittarella massiliensis
  source 1..50: mol_type = genomic DNA
caggttttaaacaaatgtgatacctgggcttagctttcaagaagtttcca

SEQ ID NO: 27936 - protein, 540 aa, Anaeromassilibacillus sp An250; identical to SEQ ID NO: 27931

SEQ ID NO: 27937 - DNA, 50 bp, Anaeromassilibacillus sp An250; identical to SEQ ID NO: 27932
  source 1..50: mol_type = genomic DNA

SEQ ID NO: 27938 - DNA, 40 bp, Anaeromassilibacillus sp An250
  source 1..40: mol_type = genomic DNA
tatgctggacagcgacgccgggttctcccatgcggaggat

SEQ ID NO: 27939 - DNA, 40 bp, Anaeromassilibacillus sp An250
  source 1..40: mol_type = genomic DNA
tatgctggacagcgacgcctggttctcccatgcggaggat

SEQ ID NO: 27940 - DNA, 50 bp, Anaeromassilibacillus sp An250; identical to SEQ ID NO: 27935
  source 1..50: mol_type = genomic DNA

SEQ ID NO: 27941 - protein, 505 aa, Achromobacter xylosoxidans
MKTNQQIAVIYCRVSSTAQTKRGDGLGSQKARCTEYANARGYTVVETFMDDITGKAVERRGMKAMLAFLKKNRSASPIVLIDDISRLAREVKAHIELRAAISLAGGTLESPSVEFGDDADSELQEYILATVAQHQRRKNAEQTKNRMRARVLNGYWPFACPVGYRHQRVPGHGNMLVRNEPLASIVQEALEGYASGRFQLQAEVGRFLESFPEFPRDRKGNVRSQQVTDILTRPVYAGYVGAPNWDVPLRKGHHEALVSYETLMKIQERINGNTRAPARKDLNADFPLRGAVVCGDCGTPLTACWSKGRMSYHPYYLCRSRGCESYGKSIRRDVIEGQFVDLLKGMQPSANLLQAARAMFKDLWDHRLATGAARIKTLKTELAKVSEQVEQFLDRIADTTIPSVVAAYEKRIKGLEDRKIVLAENIAHCGRPLRSFDETLRTAFDFLASPCNLWTSDRLDDKRTVLKLAFADRLAYTKKEGFRTPHFSLPFKALADFERQDLRMA

SEQ ID NO: 27942 - DNA, 50 bp, Achromobacter xylosoxidans
  source 1..50: mol_type = genomic DNA
tttgaacggcaagatttaagaatggcgcaccccgaaggagacacatcgaa

SEQ ID NO: 27943 - DNA, 40 bp, Achromobacter xylosoxidans
  source 1..40: mol_type = genomic DNA
attggccatttggtcgatggcgcgcccgacaggaatcgaa

SEQ ID NO: 27944 - DNA, 40 bp, Achromobacter xylosoxidans
  source 1..40: mol_type = genomic DNA
attggccatttggtcgatggtgcgcccgacaggaatcgaa

SEQ ID NO: 27945 - DNA, 50 bp, Achromobacter xylosoxidans
  source 1..50: mol_type = genomic DNA
agtgaactcacagtttaaaggatggtgcacccagaatatatgacagcgaa

SEQ ID NO: 27946 - protein, 566 aa, Shewanella oneidensis
MDTSNLSGNVYLYQRFSSSGQEGNSSLFRQGEAQREWLSRHPNCVVVELDDRPLIDAGLSAYKGRHVDHGSLGRLVKAIESGLVAKGSIILVEHFSRLTRMDIDQSEELIKKIWKHGVSIVTARGSNYYPPEAVNDSKLRISLIIEIEKAHEESKWRAKKVKGSWERREKLAREQKISPKMRMPFWLNSDGSLNEFAPVVRDIFKLHATGKGQIIIERELRKRYGDIKPLENVNPTKIIRILKNEKCIGRVYGEKLYEAAVDDVTFYNAQRIHAGKLFTSVREDRKWPLHGMVRCGHCGSGMSIQQTNSTMPLLRCSKKQRSGGEYCPSSTTFPYVVAYHFFIYYVEPVILAMMTDYKRMNSLELEQVKTQQEITKLRVALADASSQYKSRVNAGKAANATLSVMDDLQENIDLLEIKVRGLRGKISAQKSLKSISNEIYDLSVNSPSQYNLELNKTGCKILLKDRVLTFSNPDTNEDMASLHYILYDRSRLSYIYTFNGKRDYYNAEIFNGEVRSEDWTIDKLLNPRSNNKMGPIDLAAMVHSLNIEKDSGTSFKFELDGFSDEL

SEQ ID NO: 27947 - DNA, 50 bp, Shewanella oneidensis
  source 1..50: mol_type = genomic DNA
aatatgcacatatttacattatgtgagctaaatgataatatgtgcacata

SEQ ID NO: 27948 - DNA, 40 bp, Shewanella oneidensis; identical to SEQ ID NO: 23828
  source 1..40: mol_type = genomic DNA

SEQ ID NO: 27949 - DNA, 40 bp, Shewanella oneidensis
  source 1..40: mol_type = genomic DNA
aattgaccattgtaattgttagctaaaagcggcgcagact

SEQ ID NO: 27950 - DNA, 50 bp, Shewanella oneidensis
  source 1..50: mol_type = genomic DNA
aatatccaaaggcatattttatattatataaatgattgcatgtgtatata

SEQ ID NO: 27951 - protein, 452 aa, Listeria monocytogenes; identical to SEQ ID NO: 27016

SEQ ID NO: 27952 - DNA, 50 bp, Listeria monocytogenes
  source 1..50: mol_type = genomic DNA
tttagtacctcgttatctctcgttggacggagaagaaacgagatgcaaaa

SEQ ID NO: 27953 - DNA, 40 bp, Listeria monocytogenes; identical to SEQ ID NO: 1298
  source 1..40: mol_type = genomic DNA

SEQ ID NO: 27954 - DNA, 40 bp, Listeria monocytogenes; identical to SEQ ID NO: 1299
  source 1..40: mol_type = genomic DNA

SEQ ID NO: 27955 - DNA, 50 bp, Listeria monocytogenes
  source 1..50: mol_type = genomic DNA
tttgctacagggacatctatcggtgaaaggggaagaaatcagatgcaagt

SEQ ID NO: 27956 - protein, 452 aa, Listeria monocytogenes; identical to SEQ ID NO: 27006

SEQ ID NO: 27957 - DNA, 50 bp, Listeria monocytogenes
  source 1..50: mol_type = genomic DNA
tttagtacctcgttatctctcgctggacggagaagaaacgagatgcaaaa

SEQ ID NO: 27958 - DNA, 40 bp, Listeria monocytogenes; identical to SEQ ID NO: 1298
  source 1..40: mol_type = genomic DNA

SEQ ID NO: 27959 - DNA, 40 bp, Listeria monocytogenes; identical to SEQ ID NO: 1299
  source 1..40: mol_type = genomic DNA

SEQ ID NO: 27960 - DNA, 50 bp, Listeria monocytogenes; identical to SEQ ID NO: 27955
  source 1..50: mol_type = genomic DNA

SEQ ID NO: 27961 - protein, 452 aa, Listeria monocytogenes; identical to SEQ ID NO: 27016

SEQ ID NO: 27962 - DNA, 50 bp, Listeria monocytogenes; identical to SEQ ID NO: 27952
  source 1..50: mol_type = genomic DNA

SEQ ID NO: 27963 - DNA, 40 bp, Listeria monocytogenes; identical to SEQ ID NO: 7828
  source 1..40: mol_type = genomic DNA

SEQ ID NO: 27964 - DNA, 40 bp, Listeria monocytogenes; identical to SEQ ID NO: 7829
  source 1..40: mol_type = genomic DNA

SEQ ID NO: 27965 - DNA, 50 bp, Listeria monocytogenes; identical to SEQ ID NO: 27955
  source 1..50: mol_type = genomic DNA

SEQ ID NO: 27966 - protein, 528 aa, Intestinimonas butyriciproducens
MPDKVLAFYIRLSSEDRDLKTNALKNESNSVFNQRRLLQDYYDTHESLHGYKVIVFCDDGVTGTHFDRPKFDELIEMARNQEIHCIMVKDLSRFGRNFLEMGNYLELILPLYGVRFISINDAFDSDDYLGVTGGLELALRNLINNMYSRDLSTKVRSAFRTRNLRGEYWGGNGFYGYQVHPHNKKRLIVDEQVRDIIVMIFESCVAGMTTSEIAQMLNDMGIPSPLEHKRRNGGFYNGVVKEETGIWLKGAVRKILTDERYTGKMITNTRETEEVGKPKMRSLPRDQWIIVPGTHEAIISEELFRAAQNALQGRIRNVNKNTAGNRANNLFVCGCCGRKLRKNPAKEPHLVCPKNDSIKGAECAGIFVNQAHIEQAVLQMLREQSRSFLEQHCLMQACIDKKLSSIQTELDANTNMTRRLQSRKAELYEQYRAGRISREKFADIQKTDSEKLARLSCRAEEIKRLLVEHYESRGNLAAGKRTADQIILLKDYDPEIIRNFVERVRVYPSGEIEIDMRTSSGFAFVTAS

SEQ ID NO: 27967 - DNA, 50 bp, Intestinimonas butyriciproducens
  source 1..50: mol_type = genomic DNA
tgtatgtctatcttgacacaaccagaggattgacctataatagacataca

SEQ ID NO: 27968 - DNA, 40 bp, Intestinimonas butyriciproducens
  source 1..40: mol_type = genomic DNA
ggcgctggagttcaaaagcgaggggttcatcaccggcacc

SEQ ID NO: 27969 - DNA, 40 bp, Intestinimonas butyriciproducens
  source 1..40: mol_type = genomic DNA
ggcgctggagttcaaaagcggggggttcatcaccggcacc

SEQ ID NO: 27970 - DNA, 50 bp, Intestinimonas butyriciproducens
  source 1..50: mol_type = genomic DNA
tgtctgtcttgtctgtctcaaccaggagatgtacctcaagcaggaagaca

SEQ ID NO: 27971 - protein, 528 aa, Intestinimonas butyriciproducens
MPDKVLAFYIRLSSEDRDLKTNALKNESNSVFNQRRLLQDYYDTHESLHGYKVIVFCDDGVTGTHFDRPKFDELIEMARNQEIHCIMVKDLSRFGRNFLEMGNYLELILPLYGVRFISINDAFDSDDYLGVTGGLELALRNLINNMYSRDLSTKVRSAFRTRNLRGEYWGGNGFYGYQVHPHNKKRLIVDEQVRDIIVMIFESCVAGMTTSEIAQMLNDMGIPSPLEHKRRNGGFYNGVVKEETGIWLKGAVRKILTDERYTGKMITNTRETEEVGKPKMRSLPRDQWIIVPGTHEAIISEELFRTAQNALQGRIRNVNKNTAGNRANNLFVCGCCGRKLRKNPAKEPHLVCPKNDSIKGAECAGLFVNQAQIEQAVLQMLREQSRSFLEQHCLMQACIDKKLSSIQTELDANTNMTRRLQSRKAELYEQYRAGRISREKFADIQKTDSEKLARLSSRAEEIKRLLVEHYESRGNLAAGKRTADQIILLKDYDPEIIRNFVERVRVYPSGEIEIDMRTSSGFEFVTAS

SEQ ID NO: 27972 - DNA, 50 bp, Intestinimonas butyriciproducens; identical to SEQ ID NO: 27967
  source 1..50: mol_type = genomic DNA

SEQ ID NO: 27973 - DNA, 40 bp, Intestinimonas butyriciproducens; identical to SEQ ID NO: 27968
  source 1..40: mol_type = genomic DNA

SEQ ID NO: 27974 - DNA, 40 bp, Intestinimonas butyriciproducens; identical to SEQ ID NO: 27969
  source 1..40: mol_type = genomic DNA

SEQ ID NO: 27975 - DNA, 50 bp, Intestinimonas butyriciproducens; identical to SEQ ID NO: 27970
  source 1..50: mol_type = genomic DNA

SEQ ID NO: 27976 - protein, 638 aa, Klebsiella aerogenes
MKPKLYSYVRFSSVKQREGNSLERQQDTALRIASRYDLELDTTAFHDLGMSAFKGKNAHEGKLSEFIKQIGVKVPVGSWLVVENLDRISRDDAWSALDIFKSILSKGIVVVTGMDEKVYKYADVKNNPTDLIISLLMFTRAHDESLTKKNRVESQARSLIRHNLTREPGTPARAIESVGQNVWWVDTKSGYVTPHPTYFAAAQKIIELKQGGETLLGIQRYLNEHYPAPKKRVYKDQAGQALTSKTEQWGKHLIRTFLNPTVHGQKVFTLDKRDESGIVIYDPDSEKPLKETFTIPDYYPVLMSEIDYLTLSKLDRHRAVTRSSSKYPEGNPEPEIPLLSGLGILFCGKCGSFMFKSGSNKNKYRYICGSKIVQGKPCGKKGFTSYQLEHTILQLIADHVWNNHQEDKTAWYESEITKASESIDKLLKLATLTDSLEELAEQINSNKHKKVTLEREFHQYKINRSEIQTTGWEQFQHFDVHDTKNPNRKQIRLKVKQAIKRIDCYDIDGRHGHFEVTFADETKQRIVIKFNRNRSPGVSYVEAQTVNDHDLLKMQGLVLHSFIDELISPDKFAKHIKEKHEVSLLNPTYITELENSTSRGKGNGMAIIVDGSTSKTYATIKGTKYEINSLEDLEKLSH

SEQ ID NO: 27977 - DNA, 50 bp, Klebsiella aerogenes
  source 1..50: mol_type = genomic DNA
actatgaataattgacaattaggtttgcctaatatacgattactcattgt

SEQ ID NO: 27978 - DNA, 40 bp, Klebsiella aerogenes
  source 1..40: mol_type = genomic DNA
gcatggggtgttagccggcttgccgtcaggcattccggga

SEQ ID NO: 27979 - DNA, 40 bp, Klebsiella aerogenes
  source 1..40: mol_type = genomic DNA
gcatggggtgttagccggcaggccgtcaggcattccggga

SEQ ID NO: 27980 - DNA, 50 bp, Klebsiella aerogenes
  source 1..50: mol_type = genomic DNA
actatgcatgagggaaactgaggtaggcccaatatcctgtgactctaggt

SEQ ID NO: 27981 - protein, 638 aa, Klebsiella michiganensis; identical to SEQ ID NO: 27976

SEQ ID NO: 27982 - DNA, 50 bp, Klebsiella michiganensis; identical to SEQ ID NO: 27977
  source 1..50: mol_type = genomic DNA

SEQ ID NO: 27983 - DNA, 40 bp, Klebsiella michiganensis; identical to SEQ ID NO: 20468
  source 1..40: mol_type = genomic DNA

SEQ ID NO: 27984 - DNA, 40 bp, Klebsiella michiganensis
  source 1..40: mol_type = genomic DNA
gcagcgggtgtttgccggcaggccttgcggcatgcccggg

SEQ ID NO: 27985 - DNA, 50 bp, Klebsiella michiganensis; identical to SEQ ID NO: 27980
  source 1..50: mol_type = genomic DNA

SEQ ID NO: 27986 - protein, 523 aa, Schaalia radingae
MSRTVTAIPATKKLRSATASSGAPARRRVAAYARVSTEMEEQTSSYEAQIDYYTTYIHSRNDWQFAGMYCDEGISGTSMKHREGFQTMIDDALAGKIDLILTKSVSRFARNTVDSLTTVRKLKDAGVEVYFQKENIYTFDTKGELLITIMSSLAQEESRSISENVTWGHRKRFADGKIMVPYASLLGYKKGADGSLVIDETQAPTVRLIYQLFLDGMAISEIKTELAARKILTPRGKEVWSTSTVRSILSNEKYKGDALLQKTFTTDFLTKKMKVNEGEVPQYYVTGNHEPIIAPHIWDQVQYELSTRHGNISSAKVGLFSTRLKCFQCGAWYGRKTWASNTKYKYTVWQCNHKYAGQHPCSSATVKDEQIKDSFVQALNQLIARHRYESHLPQVLGDMFDTSRLEEQAAACQAKIVELTEQIEALIAENQQRALDQDAYQAHYTELDTAYRKTLARKASLEADIAANTAKHAAITTTLNDLTGEPVSEFHPAQWSALIDHAIVGEDTIRFVFRVGEVVRVQL

SEQ ID NO: 27987 - DNA, 50 bp, Schaalia radingae
  source 1..50: mol_type = genomic DNA
cttatcattttcgacgtccaagtggatattaagacgtcgaaaatgataaa

SEQ ID NO: 27988 - DNA, 40 bp, Schaalia radingae
  source 1..40: mol_type = genomic DNA
caaatccgacgtctaagtggagcgagtgacgggaatcgaa

SEQ ID NO: 27989 - DNA, 40 bp, Schaalia radingae
  source 1..40: mol_type = genomic DNA
caaatccgacgtctaagtgaggcgagtgacgggaatcgaa

SEQ ID NO: 27990 - DNA, 50 bp, Schaalia radingae
  source 1..50: mol_type = genomic DNA
tttaccatttcaaatgttcaaataagtattaaaaagaagaaaatgttaaa

SEQ ID NO: 27991 - protein, 522 aa, Bacillus licheniformis
MKRTFDHIKHVAIYLRISQEKRGENVETLENHRQILCDFCKENGYTYEEYGEVISGGKSEIEQRKELQRLLEDIEKFDAILCFELTRLSRNGLISQTVKQYCIDYDKPILTPYQSYDLANSETDRLLYDVGSMISSHEHGTIGKRSKANKKQMSKAGLHVSGNVPFGYRRNKETKKLEIYEEEAKVVRYIFKLHSEGLGSFKIRDILNSEGYKSATGKAFELPTIKRIIKNPTYKGTIVFNDRKKVKKNGKFVYEPVETIQVDNAHPAIIPPDEWDRANRERISRAKQAAVIREKPASTTGTTMLKDLVYCGVCGRKMRIFFDDKSSTGYVIQRCYHLYNGEKCPNRGIKLELVEKEVAKALPNFKNLLKKSVQRLQQEKEAGVETDIKRKIKQQERKLNDLNEQQNKLIDLALKGIFNEEEIRNKKQELIDEIKYTESAIFDLKEKMSNININDHINSLMNIIELIEKLPNMEPEEVNQSLKTFISKIVYTRVLPPELLKKSTRNKQRKEYPFEIEIEFIE

SEQ ID NO: 27992 - DNA, 50 bp, Bacillus licheniformis
  source 1..50: mol_type = genomic DNA
acacatgaaataaaaaacactgtccctactgcattttttatttcatgtat

SEQ ID NO: 27993 - DNA, 40 bp, Bacillus licheniformis; identical to SEQ ID NO: 21298
  source 1..40: mol_type = genomic DNA

SEQ ID NO: 27994 - DNA, 40 bp, Bacillus licheniformis; identical to SEQ ID NO: 23674
  source 1..40: mol_type = genomic DNA

SEQ ID NO: 27995 - DNA, 50 bp, Bacillus licheniformis
  source 1..50: mol_type = genomic DNA
ccacagagattaccaaacactgtatatactgttttttcccatatatgtat

SEQ ID NO: 27996 - protein, 522 aa, Bacillus licheniformis
MKRTFDHIKHVAIYLRISQEKRGENVETLENHRQILCDFCKENGYTYEEYGEVISGGKSEIEQRKELQRLLEGIEKFDAILCFELTRLSRNGLISQTVKQYCIDYDKPILTPYQSYDLANSETDRLLYDVGSMISSHEHGTIGKRSKANKKQMSKAGLHVSGNVPFGYRRNKETKKLEIYEEEAKVVRYIFKLHSEGLGSFKIRDILNAEGYKSATGKAFELPTIKRIIKNPTYKGTIVFNDRKKVKKNGKFVYEPVETIQVDNAHPAIIPPDEWDRANRERISRAKQAAVIREKPASTTGTTMLKDLVYCGVCGRKMRIFFDDKSSTGYVIQRCYHLYNGEKCPNRGIKLELVEKEVTKALPNFKSLLEKSVQRLQQEKEAGVETDIKRKIKQQERKLNDLNEQQDKLIDLALKGIFNEEEIRNKKQELIDEIKYTESAIVDLKEKIGNIDLNDHINSLMNIIELIEKLPNMEPDEVNQSLKTFISKIVYTRVLPPELLKKSTRNKQRKEYPFEIEIEFIE

SEQ ID NO: 27997 - DNA, 50 bp, Bacillus licheniformis
  source 1..50: mol_type = genomic DNA
acacatgaaataaaaaacactgtccctactgcgttttttatttcatgtat

SEQ ID NO: 27998 - DNA, 40 bp, Bacillus licheniformis; identical to SEQ ID NO: 21298
  source 1..40: mol_type = genomic DNA

SEQ ID NO: 27999 - DNA, 40 bp, Bacillus licheniformis; identical to SEQ ID NO: 23674
  source 1..40: mol_type = genomic DNA

SEQ ID NO: 28000 - DNA, 50 bp, Bacillus licheniformis; identical to SEQ ID NO: 27995
  source 1..50: mol_type = genomic DNA

SEQ ID NO: 28001 - protein, 522 aa, Bacillus licheniformis
MKRTFDHIKHVAIYLRISQEKRGENVETLENHRQILCDFCKENGYTYEEYGEVISGGKSEIEQRKELQRLLEDIEKFDAILCFELTRLSRNGLISQTVKQYCIDYDKPILTPYQSYDLANSETDRLLYDVGSMISSHEHGTIGKRSKANKKQMSKAGLHVSGNVPFGYRRNKETKKLEIYEEEAKVVRYIFKLHSEGLGSFKIRDILNAEGYKSATGKAFELPTIKRIIKNPTYKGTIVFNDRKKVKKNGKFVYEPVETIQVDNAHPAIIPPEEWDRANRERISRAKQAAVIREKPASTTGTTMLKDLVYCGVCGRKMRIFFDDKSSTGYVIQRCYHLYNGEKCPNRGIKLELVEKEVTKALPNFKSLLEKSVQRLQQEKEAGVETDIKRKIKQQERKLNDLNEQQDKLIDLALKGIFNEEEIRNKKQELIDEIKYTESAIVDLKEKIGNIDLNDLINSLMNIIELIEKLPNMEPDEVNQSLKTFISKIVYTRVLPPELLKKSTRNKQRKEYPFEIEIEFIE

SEQ ID NO: 28002 - DNA, 50 bp, Bacillus licheniformis; identical to SEQ ID NO: 27997
  source 1..50: mol_type = genomic DNA

SEQ ID NO: 28003 - DNA, 40 bp, Bacillus licheniformis; identical to SEQ ID NO: 21298
  source 1..40: mol_type = genomic DNA

SEQ ID NO: 28004 - DNA, 40 bp, Bacillus licheniformis; identical to SEQ ID NO: 23674
  source 1..40: mol_type = genomic DNA

SEQ ID NO: 28005 - DNA, 50 bp, Bacillus licheniformis; identical to SEQ ID NO: 27995
  source 1..50: mol_type = genomic DNA

SEQ ID NO: 28006 - protein, 522 aa, Bacillus licheniformis
MKRTFDHIKHVAIYLRISQEKRGENVETLENHRQILCDFCKENGYTYEEYGEVISGGKSEIEQRKELQRLLEDIEKFDAILCFELTRLSRNGLISQTVKQYCIDYDKPILTPYQSYDLANSETDRLLYDVGSMISSHEHGTIGKRSKANKKQMSKAGLHVSGNVPFGYRRNKETKKLEIYEEEAKVVRYIFKLHSEGLGSFKIRDILNAEGYKSATGKAFELPTIKRIIKNPTYKGTIVFNDRKKVKKNGKFVYEPVETIQVDNAHPAIIPPEEWDRANRERISRAKQAAVIREKPASTTGTTMLKDLVYCGVCGRKMRIFFDDKSSTGYVIQRCYHLYNGEKCPNRGIKLELVEKEVTKALPNFKSLLEKSVQRLQQEKEAGVETDIKRKIKQQERKLNDLNEQQDKLIDLALKGIFNEEEIRNKKQELIDEIKYTESAIVDLKEKIGNIDLNDHINSLMNIIELIEKLPNMEPDEVNQSLKTFISKIVYTRVLPPELLKKSTRNKQRKEYPFEIEIEFIE

SEQ ID NO: 28007 - DNA, 50 bp, Bacillus licheniformis; identical to SEQ ID NO: 27997
  source 1..50: mol_type = genomic DNA

SEQ ID NO: 28008 - DNA, 40 bp, Bacillus licheniformis; identical to SEQ ID NO: 21298
  source 1..40: mol_type = genomic DNA

SEQ ID NO: 28009 - DNA, 40 bp, Bacillus licheniformis; identical to SEQ ID NO: 23674
  source 1..40: mol_type = genomic DNA

SEQ ID NO: 28010 - DNA, 50 bp, Bacillus licheniformis; identical to SEQ ID NO: 27995
  source 1..50: mol_type = genomic DNA

SEQ ID NO: 28011 - protein, 522 aa, Bacillus licheniformis
MKRTFDHIKHVAIYLRISQEKRGENVETLENHRQILCDFCKENGYTYEEYGEVISGGKSEIEQRKELQRLLEDIEKFDAILCFELTRLSRNGLISQTVKQYCIDYDKPILTPYQSYDLANSETDRLLYDVGSMISSHEHGTIGKRSKANKKQMSKAGLHVSGNVPFGYRRNKETKKLEIYEEEAKVVRYIFKLHSEGLGSFKIRDILNAEGYKSATGKAFELPTIKRIIKNPTYKGTIVFNDRKKVKKNGKFVYEPVETIQVDNAHPAIIPPDEWDRANRERISRAKQAAVIREKPASTTGTTMLKDLVYCGVCGRKMRIFFDDKSSTGYVIQRCYHLYNGEKCPNRGIKLELVEKEVTKALPNFKSLLEKSVQRLQQEKEAGVETDIKRKIKQQERKLNDLNEQQDKLIDLALKGIFNEEEIRNKKQELIDEIKYTESAIVDLKEKIGNIDLNDHINSLMNIIELIEKLPNMEPDEVNQSLKTFISKIVYTRVLPPELLKKSTRNKQRKEYPFEIEIEFIE

SEQ ID NO: 28012 - DNA, 50 bp, Bacillus licheniformis; identical to SEQ ID NO: 27997
  source 1..50: mol_type = genomic DNA

SEQ ID NO: 28013 - DNA, 40 bp, Bacillus licheniformis; identical to SEQ ID NO: 21298
  source 1..40: mol_type = genomic DNA

SEQ ID NO: 28014 - DNA, 40 bp, Bacillus licheniformis; identical to SEQ ID NO: 23674
  source 1..40: mol_type = genomic DNA

SEQ ID NO: 28015 - DNA, 50 bp, Bacillus licheniformis; identical to SEQ ID NO: 27995
  source 1..50: mol_type = genomic DNA

SEQ ID NO: 28016 - protein, 521 aa, Bacillus licheniformis
MKRTFDHIKHVAIYLRISQEKRGENVETLENHRQILCDFCKENGYTYEEYGEVISGGKSEIEQRKELQRLLEDIEKFDAILCFELTRLSRNGLISQTVKQYCIDYDKPILTPYQSYDLANSETDRLLYDVGSMISSHEHGTIGKRSKANKKQMSKAGLHVSGNVPFGYRRNKETKKLEIYEEEAKVVRYIFKLHSEGLGSFKIRDILNAEGYKSATGKAFELPTIKRIIKNPTYKGTIVFNDRKKVKKNGKFVYEPVETIQVDNAHPAIIPPEEWDRANRERVSRAKQAAVIREKPASTTGTTMLKDLVYCGVCGRKMRIFFDKSSTGYVIQRCYHLYNGEKCPNRGIKLELVEKEVTKTLPNFKSLLEKSVQRLQQEKEAGVETDIKRKIKQQERKLNDLNEQQDKLIDLALKGIFNEEEIRNKKQELIDEIKYTESAIVDLKEKIGNIDLNDHINSLMNIIELIEKLPNMEPDEVNQSLKTFISKIVYTRVLPPELLKKSTRNKQRKEYPFEIEIEFIE

SEQ ID NO: 28017 - DNA, 50 bp, Bacillus licheniformis; identical to SEQ ID NO: 27997
  source 1..50: mol_type = genomic DNA

SEQ ID NO: 28018 - DNA, 40 bp, Bacillus licheniformis; identical to SEQ ID NO: 21298
  source 1..40: mol_type = genomic DNA

SEQ ID NO: 28019 - DNA, 40 bp, Bacillus licheniformis; identical to SEQ ID NO: 23674
  source 1..40: mol_type = genomic DNA

SEQ ID NO: 28020 - DNA, 50 bp, Bacillus licheniformis; identical to SEQ ID NO: 27995
  source 1..50: mol_type = genomic DNA

SEQ ID NO: 28021 - protein, 522 aa, Bacillus paralicheniformis; identical to SEQ ID NO: 28006

SEQ ID NO: 28022 - DNA, 50 bp, Bacillus paralicheniformis; identical to SEQ ID NO: 27997
  source 1..50: mol_type = genomic DNA

SEQ ID NO: 28023 - DNA, 40 bp, Bacillus paralicheniformis
  source 1..40: mol_type = genomic DNA
cacaagcggctatgcagtccctacctttgtcgttgacgcg

SEQ ID NO: 28024 - DNA, 40 bp, Bacillus paralicheniformis
  source 1..40: mol_type = genomic DNA
cacaagcggctatgcagtctatacctttgtcgttgacgcg

SEQ ID NO: 28025 - DNA, 50 bp, Bacillus paralicheniformis; identical to SEQ ID NO: 27995
  source 1..50: mol_type = genomic DNA

SEQ ID NO: 28026 - protein, 522 aa, Bacillus paralicheniformis
MKRTFDHIKHVAIYLRISQEKRGENVETLENHRQILCDFCKENGYTYEEYGEVISGGKSEIEQRKELQRLLEDIEKFDAILCFELTRLSRNGLISQTVKQYCIDYDKPILTPYQSYDLANSETDRLLYDVGSMISSHEHGTIGKRSKANKKQMSKAGLHVSGNVPFGYRRNNETKKLEIYEEEAKVVRYIFKLHSEGLGSFKIRDILNAEGYKSATGKAFELPTIKRIIKNPTYKGTIVFNDRKKVKKNGKFVYEPVETIQVDNAHPAIIPPDEWDRANRERISRAKQAAVIREKPASTTGTTMLKDLVYCGVCGRKMRIFFDDKSSTGYVIQRCYHLYNGEKCPNRGIKLELVEKEVTKALPNFKSLLEKSVQRLQQEKEAGVETDIKRKIKQQERKLNDLNEQQDKLIDLALKGIFNEEEIRNKKQELIDEIKYTESAIVDLKEKIGNIDLNDHINSLMNIIELIEKLPNMEPGEVNQSLKTFISKIVYTRVLPPELLKKSTRNKQRKEYPFEIEIEFIE

SEQ ID NO: 28027 - DNA, 50 bp, Bacillus paralicheniformis; identical to SEQ ID NO: 27992
  source 1..50: mol_type = genomic DNA

SEQ ID NO: 28028 - DNA, 40 bp, Bacillus paralicheniformis; identical to SEQ ID NO: 28023
  source 1..40: mol_type = genomic DNA

SEQ ID NO: 28029 - DNA, 40 bp, Bacillus paralicheniformis; identical to SEQ ID NO: 28024
  source 1..40: mol_type = genomic DNA

SEQ ID NO: 28030 - DNA, 50 bp, Bacillus paralicheniformis; identical to SEQ ID NO: 27995
  source 1..50: mol_type = genomic DNA

SEQ ID NO: 28031 - protein, 522 aa, Bacillus sonorensis; identical to SEQ ID NO: 28006

SEQ ID NO: 28032 - DNA, 50 bp, Bacillus sonorensis; identical to SEQ ID NO: 27997
  source 1..50: mol_type = genomic DNA

SEQ ID NO: 28033 - DNA, 40 bp, Bacillus sonorensis
  source 1..40: mol_type = genomic DNA
tacaagcggatatgctgttcccgcgtttgtcgtcgatgcg

SEQ ID NO: 28034 - DNA, 40 bp, Bacillus sonorensis
  source 1..40: mol_type = genomic DNA
tacaagcggatatgctgtttacgcgtttgtcgtcgatgcg

SEQ ID NO: 28035 - DNA, 50 bp, Bacillus sonorensis; identical to SEQ ID NO: 27995
  source 1..50: mol_type = genomic DNA

SEQ ID NO: 28036 - protein, 507 aa, Bacillus pumilus
MYFKKSSVEEIIKYDDYPYKIYTRVSTDRDEQISSKENQIDVCRYWIEQHNYEWDDRSVLLDDGISGTVLEDRAAMKYIFSLAEKKEIKMVIFKSITRLARDLKDALYIREILVSNGVRVVTLEEDYDSLYESKASMKFEMSALFAEQLPKSMSVNISGVLAAKARRGEHSGRVPYGYMKEGKHLVINENEAQVIRLIFHLYNNEGLGHKRVTYALQEKCKLGEIPPPKKRSNWQLTTVQTILRNPIYCGVHIANRHTTIKVDGRKKFIRNPPEKWTVYEDFCPPIVSREDWEKANNKLTVNKKTKFTPWNELRQLLICGKCGSNMVIIQTSRAKQNGEKTYWKYVKCSNYRRAGQEGCVNHVPITYEEVRDLVIENLIEFSKDISHDYRKNAIEQKEKQMKSVKVELKSLETQNKRLLELYLEDQIISKAEFQTKRNEIQSNIIKLEQSLFSLQQVHDEKSSMMEMQAVLRELEDKEKDLKHVFDKLIDHIVIHPNGKMNFHYRFK

SEQ ID NO: 28037 - DNA, 50 bp, Bacillus pumilus
  source 1..50: mol_type = genomic DNA
catttgtaaaaggtatgcataacaaatgctaagcagaccttttacaaatt

SEQ ID NO: 28038 - DNA, 40 bp, Bacillus pumilus; identical to SEQ ID NO: 21833
  source 1..40: mol_type = genomic DNA

SEQ ID NO: 28039 - DNA, 40 bp, Bacillus pumilus
  source 1..40: mol_type = genomic DNA
tgttcgaaatcacatttcgtgtgccatgcaaaagctagga

SEQ ID NO: 28040 - DNA, 50 bp, Bacillus pumilus
  source 1..50: mol_type = genomic DNA
catttctctgtaaggtgcatcacatgtgcttagcagtctctttccgaaat

SEQ ID NO: 28041 - protein, 491 aa, Mycobacteroides abscessus
MGARVSVLSGPQKVSHEAQIDTATKWAKAHDYPVVGAFEDLGVSASVPPDERPDLGPWIRVRSHEWEVIIWSKLDRAFRSMRHCSDFIKWAETNKKIVVFAEDGMTLNYLNPSKGIDSILGELFVQIAAAFAQIELNRFKSRAEDMHRAIRPTTRWAAGLPPLGYQVVDHPSGRGKGLAIDSDAANLVREMADKLVDGWSFVRITEWLNESGKLTSQGRSRKARGLEPKGRWTTTNVIEILTGYRTLGIKTHKGQPVLDDNGEPIRLAPPLFTPERWDEVQRAAQLRKGKPRTPSDTSNPMLEVGFCAVCGSSLAQQFAKTRPRKSDGHVTHYRYYRCSRTPINCKTVFVVADDLDELLSEQFLLERGDRRVTERVFIPGEDNSYELDFINQRIELLREDRASGLFPSGEDELVYRNQMKQLLARRDELASVPVRQAGYENVELEKTYREVWPGATPEEKRKMLIDAEISIRLGESPGKSLRAELVIGTPY

SEQ ID NO: 28042 - DNA, 50 bp, Mycobacteroides abscessus
  source 1..50: mol_type = genomic DNA
ccttctcataggtgtacttctcgatcaacagtagcatacactcttgaagt

SEQ ID NO: 28043 - DNA, 40 bp, Mycobacteroides abscessus; identical to SEQ ID NO: 23373
  source 1..40: mol_type = genomic DNA

SEQ ID NO: 28044 - DNA, 40 bp, Mycobacteroides abscessus
  source 1..40: mol_type = genomic DNA
tgatagcgatgctcctggagaagcagattccgatggaggt

SEQ ID NO: 28045 - DNA, 50 bp, Mycobacteroides abscessus
  source 1..50: mol_type = genomic DNA
ccttctcatcactttacagatgaagaaacagaagcactgagacatgaggt

SEQ ID NO: 28046 - protein, 491 aa, Mycobacteroides abscessus; identical to SEQ ID NO: 28041

SEQ ID NO: 28047 - DNA, 50 bp, Mycobacteroides abscessus; identical to SEQ ID NO: 28042
  source 1..50: mol_type = genomic DNA

SEQ ID NO: 28048 - DNA, 40 bp, Mycobacteroides abscessus
  source 1..40: mol_type = genomic DNA
tgaccgccatgctgtccgaacacggcataccgatggaaac

SEQ ID NO: 28049 - DNA, 40 bp, Mycobacteroides abscessus
  source 1..40: mol_type = genomic DNA
tgaccgccatgctgtccgagaacggcataccgatggaaac

SEQ ID NO: 28050 - DNA, 50 bp, Mycobacteroides abscessus; identical to SEQ ID NO: 28045
  source 1..50: mol_type = genomic DNA

SEQ ID NO: 28051 - protein, 589 aa, Enterobacter hormaechei; identical to SEQ ID NO: 12416

SEQ ID NO: 28052 - DNA, 50 bp, Enterobacter hormaechei
  source 1..50: mol_type = genomic DNA
aattatacctattacacttcagtgaacactaaagtaaaatacacctcatc

SEQ ID NO: 28053 - DNA, 40 bp, Enterobacter hormaechei
  source 1..40: mol_type = genomic DNA
gctcggtgtgaccatcggtaacactgacggtaacgtgatt

SEQ ID NO: 28054 - DNA, 40 bp, Enterobacter hormaechei
  source 1..40: mol_type = genomic DNA
gctcggtgtgaccatcggtgccactgacggtaacgtgatt

SEQ ID NO: 28055 - DNA, 50 bp, Enterobacter hormaechei
  source 1..50: mol_type = genomic DNA
aactatacagtgatcacttttgtagccactatcctaagaaacaccacatc

SEQ ID NO: 28056 - protein, 540 aa, Hungatella hathewayi
MKQPYNTTIYNTALYLRLSRDDELQGESGSIQTQRMMLRQYAAEHGLTVVDEYIDDGWSGTNFERPSFQRMIDDIEDGKINCVVTKDLSRLGRNYILTGQYTEIYFPSKGVRYIAINDNVDTINGESELAPFLNILNEMHARQTSKKVKAAMRTRFANGAHYGAYAPLGYVKDPDKKGHLLIDPETRWIVEKIFDLAVHGRGAASITRILVEEKVPTPGWLNYERYGTFANIYAGAPAEKAYAWTIAQVKSILKEETYIGHSVHNKQSNISFKNKKKVRKPQEEWYRVENTHEAIISEEVFQKVQELIASRRRKRRNGTTQIFAGLIKCADCGWSLAYGENKQNKNPYGYYHCSKNGQGLRQCSMHYIRYDVLYAYVLARLQYWSMLAQKDEDKLLKRLLNASDRERNSAKKKQAAELKKAEKRKAEVDGLFAKMYEDWSAGRITEYNFNMLSEKYQNEQKELEAKIRQLHETMEAAVQTAADAEKWIALMKQYVNPVELTAELLNTLIEKITVHEAVKGEDGSREQEVEIYYRFIGKID

SEQ ID NO: 28057 - DNA, 50 bp, Hungatella hathewayi
  source 1..50: mol_type = genomic DNA
caatatctttaattaagggagaacggagtttcccatagttaaagatacca

SEQ ID NO: 28058 - DNA, 40 bp, Hungatella hathewayi
  source 1..40: mol_type = genomic DNA
cgtgaccaaatgggaaaacggccaggcatttcccgatttt

SEQ ID NO: 28059 - DNA, 40 bp, Hungatella hathewayi
  source 1..40: mol_type = genomic DNA
cgtgaccaaatgggaaaactgccaggcatttcccgatttt

SEQ ID NO: 28060 - DNA, 50 bp, Hungatella hathewayi
  source 1..50: mol_type = genomic DNA
gaaaaactttctgaaaaggaaaactgggttttaaatgatcaaagatacca

SEQ ID NO: 28061 - protein, 539 aa, Clostridium leptum
MTAYINKPEQITALYAHLSQEDALDGDSNSIVNQKAVLSKYAADNGFTNPVFFIDDGVSGVTFDRTNFNHMIAEIEAGNVATVIVKDMSRLGRDYLKVGYYTEIFFVERDVRYIAINDGVDSAKGDNDFTPFRNLFNDFYAKDTSKKVRAIKKAQGMAGEHLTKPPYGYKVDPADKKKWIVDEEAAAVVKRIFDLCIAGKGPMQIAKILKADKILTVKAYYAKQKGKLLPDNPYNWNENSIVGILERMDYCGHTVNFKSYSKSHKLKKRIPTPKEQQAIFRDTHEAIVEEAVFERVQELRANKRRPTKAERQGLFSGLVYCADCGSKLHFATCKSFNGSQDHYRCAKYKSNTGSCTAHFIREETLKAIVRQRIFDVTASFIENIMDFREMVYQQQFAEAEKDMKRKRREVEQARKRITELDRIFKRIYEDDINGTISHERFLKLSAEYETEQQEVDTYEQNKMDFDSFAAIIRKYVGITELTPTIVNEFIKKIVVHTPEKIDGKSFQKVDIVFNFVGKIHLSAEPQTEQKEANKQEKTA

SEQ ID NO: 28062 - DNA, 50 bp, Clostridium leptum
  source 1..50: mol_type = genomic DNA
atacttccttgtaacccgaaatccttagttttacagtgataaggaagtag

SEQ ID NO: 28063 - DNA, 40 bp, Clostridium leptum
  source 1..40: mol_type = genomic DNA
accgaaacctctcgaagaattctttaaatgtgatttttaa

SEQ ID NO: 28064 - DNA, 40 bp, Clostridium leptum
  source 1..40: mol_type = genomic DNA
accgaaacctctcgaagaaaactttaaatgtgatttttaa

SEQ ID NO: 28065 - DNA, 50 bp, Clostridium leptum
  source 1..50: mol_type = genomic DNA
atacttagtacactcctgaaatccaaagtattacagtgataaggagtacc

SEQ ID NO: 28066 - protein, 537 aa, Anaerobutyricum hallii; identical to SEQ ID NO: 1706

SEQ ID NO: 28067 - DNA, 50 bp, Anaerobutyricum hallii; identical to SEQ ID NO: 1707
  source 1..50: mol_type = genomic DNA

SEQ ID NO: 28068 - DNA, 40 bp, Anaerobutyricum hallii
  source 1..40: mol_type = genomic DNA
tgtttctaaatgggagcgaggagtttgcctgccggatgta

SEQ ID NO: 28069 - DNA, 40 bp, Anaerobutyricum hallii
  source 1..40: mol_type = genomic DNA
tgtttctaaatgggagcgaatagtttgcctgccggatgta

SEQ ID NO: 28070 - DNA, 50 bp, Anaerobutyricum hallii; identical to SEQ ID NO: 6570
  source 1..50: mol_type = genomic DNA

SEQ ID NO: 28071 - protein, 537 aa, Clostridium innocuum; identical to SEQ ID NO: 2031

SEQ ID NO: 28072 - DNA, 50 bp, Clostridium innocuum; identical to SEQ ID NO: 2032
  source 1..50: mol_type = genomic DNA

SEQ ID NO: 28073 - DNA, 40 bp, Clostridium innocuum; identical to SEQ ID NO: 6728
  source 1..40: mol_type = genomic DNA

SEQ ID NO: 28074 - DNA, 40 bp, Clostridium innocuum; identical to SEQ ID NO: 6729
  source 1..40: mol_type = genomic DNA

SEQ ID NO: 28075 - DNA, 50 bp, Clostridium innocuum; identical to SEQ ID NO: 6570
  source 1..50: mol_type = genomic DNA

SEQ ID NO: 28076 - protein, 537 aa, Holdemanella biformis
MKQQIYNTALYLRLSRDDELQGESSSITTQRSMLRLYAKEHHLNVIDEYIDDGWSGTNFDRPSFQRMIEDIEAGKINCVVTKDLSRLGRNYIMTGQYTELYFPSHNVRYIAIDDGVDSEKGESEIAPFKNIINEWVARDTSRKVKSAFKTKFAEGAHYGAYAPLGYKKHPDIKGKLLIDDETKWIIEKIFSLAYQGYGSAKITKQLRAEKVPTASWLNFTRYGTFAHIFEGKPESKRYEWTIAHVKAILKSEVYIGNSVHNMQSTVSFKSKKKVRKPESEWFRVENTHEPIIDKEVFYRVQEQIKSRRRQTKEKATPIFAGLVKCADCGWSMRFATNKANKTPYSYYACSYYGQFGKGNCSMHYIRYDVLYQAVLERLQYWAKAVQQDEEKVLNKIQKVGNAERIREKKKKASTLKKAENRQNEIDRLFAKMYEDRACEKITERNFVMLSSKYQKEQIELEQQITNLREELSKMEQDMIGAEKWIELIKEYSVPKELTAPLLNAMIEKILIHEATTNEENERIQEIEIYYRFIGKVD

SEQ ID NO: 28077 - DNA, 50 bp, Holdemanella biformis; identical to SEQ ID NO: 2032
  source 1..50: mol_type = genomic DNA

SEQ ID NO: 28078 - DNA, 40 bp, Holdemanella biformis
  source 1..40: mol_type = genomic DNA
tgtatcaaaatgggaaagtggtgcatcggatccaagtaca

SEQ ID NO: 28079 - DNA, 40 bp, Holdemanella biformis
  source 1..40: mol_type = genomic DNA
tgtatcaaaatgggaaagtattgcatcggatccaagtaca

SEQ ID NO: 28080 - DNA, 50 bp, Holdemanella biformis; identical to SEQ ID NO: 6570
  source 1..50: mol_type = genomic DNA

SEQ ID NO: 28081 - protein, 535 aa, Pseudoflavonifractor sp An184
MKQPYNTALYMRLSRDDENYGDSVSIETQRTILQQYAKEHGLSVYGEYVDDGWSGTNFERPSFQRMMDDVEAGKVNCIITKDLSRFGREHVMMDYYLEFVFPEKQIRYIAVAENEDTEKGLSDFVPFKNLFNEWFAKDTSRKVKTALRAKFAAGERTFAYAPLGYIRHPEIKNTLAIDEETRWIIEKIFDLAFHGAGAAKITKTLIAEKVPTAGWLNYQRYGTFANIYANAPEEKSYAWTIAQVKSILQDETYIGNSVHNKQTNISYKNKKKVRKPKEEWIRVENTHEAIISRDVFEQVQKQIASRRRQQKDATTQIFAGLVKCADCGWSMRFGTNRQNKTPYSHFTCSQYGQMGTQCSAHYIRYDTLYVYVLSRIQYWSHRAQLSEEKLLQQILKNGDRERMTAAKRQESELKRAEKRKAEVDGKFVRMYEDWSAGRITEYNFNLLTKKYQAEQLELEEKISRLQAELSAEQQTALNAEKWVALIKQYANPTELTAELLNTLIEKIVIHEATKGADGMRDQEIEIYYRFIGKID

SEQ ID NO: 28082 - DNA, 50 bp, Pseudoflavonifractor sp An184
  source 1..50: mol_type = genomic DNA
ccatatccttaactatgggaaacagaagtttcccatagttaaggatacca

SEQ ID NO: 28083 - DNA, 40 bp, Pseudoflavonifractor sp An184
  source 1..40: mol_type = genomic DNA
ggtttacaagtgggaaagcgacctgtctctgcccgacatc

SEQ ID NO: 28084 - DNA, 40 bp, Pseudoflavonifractor sp An184
  source 1..40: mol_type = genomic DNA
ggtttacaagtgggaaagcatcctgtctctgcccgacatc

SEQ ID NO: 28085 - DNA, 50 bp, Pseudoflavonifractor sp An184; identical to SEQ ID NO: 6765
  source 1..50: mol_type = genomic DNA

SEQ ID NO: 28086 - protein, 537 aa, Ruminococcus torques; identical to SEQ ID NO: 17751

SEQ ID NO: 28087 - DNA, 50 bp, Ruminococcus torques; identical to SEQ ID NO: 17752
  source 1..50: mol_type = genomic DNA

SEQ ID NO: 28088 - DNA, 40 bp, Ruminococcus torques
  source 1..40: mol_type = genomic DNA
tgtagatatgctggaaaccgggatagatgtgccggaaatt

SEQ ID NO: 28089 - DNA, 40 bp, Ruminococcus torques
  source 1..40: mol_type = genomic DNA
tgtagatatgctggaaaccatgatagatgtgccggaaatt

SEQ ID NO: 28090 - DNA, 50 bp, Ruminococcus torques; identical to SEQ ID NO: 6570
  source 1..50: mol_type = genomic DNA

SEQ ID NO: 28091 - protein, 537 aa, Blautia obeum; identical to SEQ ID NO: 1706

SEQ ID NO: 28092 - DNA, 50 bp, Blautia obeum; identical to SEQ ID NO: 1707
  source 1..50: mol_type = genomic DNA

SEQ ID NO: 28093 - DNA, 40 bp, Blautia obeum; identical to SEQ ID NO: 20033
  source 1..40: mol_type = genomic DNA

SEQ ID NO: 28094 - DNA, 40 bp, Blautia obeum
  source 1..40: mol_type = genomic DNA
cgtatccagatgggaaaccataaacaatatgccggatatc

SEQ ID NO: 28095 - DNA, 50 bp, Blautia obeum; identical to SEQ ID NO: 6570
  source 1..50: mol_type = genomic DNA

SEQ ID NO: 28096 - protein, 537 aa, Eubacterium rectale; identical to SEQ ID NO: 1706

SEQ ID NO: 28097 - DNA, 50 bp, Eubacterium rectale; identical to SEQ ID NO: 1707
  source 1..50: mol_type = genomic DNA

SEQ ID NO: 28098 - DNA, 40 bp, Eubacterium rectale
  source 1..40: mol_type = genomic DNA
gacttcgaaccgggagagtggattcggaagatacgatgtg

SEQ ID NO: 28099 - DNA, 40 bp, Eubacterium rectale
  source 1..40: mol_type = genomic DNA
gacttcgaaccgggagagtatattcggaagatacgatgtg

SEQ ID NO: 28100 - DNA, 50 bp, Eubacterium rectale; identical to SEQ ID NO: 6570
  source 1..50: mol_type = genomic DNA

SEQ ID NO: 28101 - protein, 537 aa, Coprococcus comes; identical to SEQ ID NO: 1706

SEQ ID NO: 28102 - DNA, 50 bp, Coprococcus comes; identical to SEQ ID NO: 1707
  source 1..50: mol_type = genomic DNA

SEQ ID NO: 28103 - DNA, 40 bp, Coprococcus comes
  source 1..40: mol_type = genomic DNA
ggtttctaaatgggaacgaggcatatgcctgccggacgtg

SEQ ID NO: 28104 - DNA, 40 bp, Coprococcus comes
  source 1..40: mol_type = genomic DNA
ggtttctaaatgggaacgaatcatatgcctgccggacgtg

SEQ ID NO: 28105 - DNA, 50 bp, Coprococcus comes; identical to SEQ ID NO: 6570
  source 1..50: mol_type = genomic DNA

SEQ ID NO: 28106 - protein, 537 aa, Coprococcus comes; identical to SEQ ID NO: 6596

SEQ ID NO: 28107 - DNA, 50 bp, Coprococcus comes; identical to SEQ ID NO: 1707
  source 1..50: mol_type = genomic DNA

SEQ ID NO: 28108 - DNA, 40 bp, Coprococcus comes; identical to SEQ ID NO: 28103
  source 1..40: mol_type = genomic DNA

SEQ ID NO: 28109 - DNA, 40 bp, Coprococcus comes; identical to SEQ ID NO: 28104
  source 1..40: mol_type = genomic DNA

SEQ ID NO: 28110 - DNA, 50 bp, Coprococcus comes; identical to SEQ ID NO: 6570
  source 1..50: mol_type = genomic DNA

SEQ ID NO: 28111 - protein, 452 aa, Listeria monocytogenes
MKAAIYIRVSTQEQVENYSIQAQTEKLTALCRSKDWDVYDIFVDGGYSGSNMNRPALNEMLSKLHEIDAVVVYRLDRLSRSQKDTITLIEEYFLKNNVEFVSLSETLDTSSPFGRAMIGILSVFAQLERETIRDRMVMGKIKRVESGLPLTTAKGRTFGYDVVDTKLYVNKEEAQHLQLIYDIFEEEKSITFLQKRLKELGFKVKSYSSYNKWLMNDLYIGYVSYSDKVHVKGVHEAIISEEQFYRVQEIFSRMGKNPNMNRDSSSLLNNLIACEKCGLSFVHRVKDTASRGKKYRYRYYSCKTYKHTHELEKCGNKIWRADKLEEIIIDRVKNYSFATRNLDKEDELDSINAKLQVEHSKKKRLFDLYMNGSYEVAELDKLMADIDAQINYYNSQIEANEELKRNKKVQESLAELATVDFDSLEFREKQIYLKSIINKIYINDEQVTIEWI

SEQ ID NO: 28112 - DNA, 50 bp, Listeria monocytogenes
  source 1..50: mol_type = genomic DNA
tttagtctctcgatttctctcgctggaagaagaagaaacgagaaactaaa

SEQ ID NO: 28113 - DNA, 40 bp, Listeria monocytogenes; identical to SEQ ID NO: 1298
  source 1..40: mol_type = genomic DNA

SEQ ID NO: 28114 - DNA, 40 bp, Listeria monocytogenes
  source 1..40: mol_type = genomic DNA
tttcggatcaagctatgagcaacgcaaagagggaactaaa

SEQ ID NO: 28115 - DNA, 50 bp, Listeria monocytogenes
  source 1..50: mol_type = genomic DNA
tttagtttccatcgttctccagctcaaagaaggagtacatagcatttaag

SEQ ID NO: 28116 - protein, 466 aa, Mycobacterium avium
MRSAAVYARISADVEGKSLGVQRQLEDCRKLASDRGWVVGREYVDNDISAYSGKVRPGYEAMCSDLAAGVRDAVIVYNLDRLHRRPAELEEFVALCEAAGVNQVATVTADIDLGNDDGLFMARIFAAFAAKESGRKSARMKRKYEQKAAQGLPHGPNRPFGYEPDKITIRESEAEVIRELVVRVIAGESLNALTVWLNETGVAPVRGARWASTAVRGIVSSPRIAGLRAYKGEVVGDAAWPAIISTAQRDQVLAALSVRSWNRKRSPRKYLLSGLCRCGRCQARMFSAARLESGAHKRRYVCSSSPDHGGCGRMTVVAEPLEKLITDAVLTRLDSKTLADALAGKARANPDTAVLSAQVETAQARLDELTGLYSTGAISAREWIMARDPITDTITRLRREIAETLDTGPLAELAGQGSKLRSEWDDLGLDRCHAIIRTVIDHVVIKPGQPGARGLDMNRIDPIWRT

SEQ ID NO: 28117 - DNA, 50 bp, Mycobacterium avium
  source 1..50: mol_type = genomic DNA
aggtcagatttatgacttgttgggttacttatttttcgttaagctgacct

SEQ ID NO: 28118 - DNA, 40 bp, Mycobacterium avium
  source 1..40: mol_type = genomic DNA
ggggcagaccagcaccaggttggccaactcggtcggtccg

SEQ ID NO: 28119 - DNA, 40 bp, Mycobacterium avium
  source 1..40: mol_type = genomic DNA
ggggcagaccagcaccaggaaggccaactcggtcggtccg

SEQ ID NO: 28120 - DNA, 50 bp, Mycobacterium avium
  source 1..50: mol_type = genomic DNA
aggttagaatgggcacttgctggcaaacctatttttgacggagaaaaact

SEQ ID NO: 28121 - protein, 466 aa, Mycobacterium avium; identical to SEQ ID NO: 28116

SEQ ID NO: 28122 - DNA, 50 bp, Mycobacterium avium; identical to SEQ ID NO: 28117
  source 1..50: mol_type = genomic DNA

SEQ ID NO: 28123 - DNA, 40 bp, Mycobacterium avium
  source 1..40: mol_type = genomic DNA
cccgcaggcgaaggtgaggttgtcgacatcggtcaagccg

SEQ ID NO: 28124 - DNA, 40 bp, Mycobacterium avium
  source 1..40: mol_type = genomic DNA
cccgcaggcgaaggtgaggaagtcgacatcggtcaagccg

SEQ ID NO: 28125 - DNA, 50 bp, Mycobacterium avium; identical to SEQ ID NO: 28120
  source 1..50: mol_type = genomic DNA

SEQ ID NO: 28126 - protein, 473 aa, Mycobacteroides abscessus
MVKKVSAARSAAVYARISADVEGKSLGVQRQLEDCRKLASDRGWVVGREYVDNDVSAYSGKARPGYEAMCADLAAGVRDAVIVYNLDRLHRRPAELEDFVALCEAAGVNQVATVTADIDLGNDDGLFMARIFAAFAAKESGRKSARMRRKYEQKAAQGLPHGPNRPFGYEDDKMTIRETEAEVIRELVTRVIAGESLNSLTVWLNETGIRPVRGERWASTAVRGIVSSPRIAGLRAYKGEVVGDAAWEPIITAAQRDQVLASLAVRSWNRKRSPRKYLLSGLCRCGRCQARMFSAARLEAGASKRRYVCSSSPDHGGCGRMTVVADPLEKLIADAVLTRLDSKVLADALAGKVRANPDTAALSAQVEAAQTRLDELTGLYSSGAISAREWIMARDPITDTIGRLRREIAETADTGPLAELVGQGKALRGQWESLSLDRQHAIVRTVIDHVTINPGTPGARGLDIGRVEPHWRI

SEQ ID NO: 28127 - DNA, 50 bp, Mycobacteroides abscessus; identical to SEQ ID NO: 28117
  source 1..50: mol_type = genomic DNA

SEQ ID NO: 28128 - DNA, 40 bp, Mycobacteroides abscessus
  source 1..40: mol_type = genomic DNA
tgcgcaggcgaaggtgaggttgtcgatgtcggtgggtccg

SEQ ID NO: 28129 - DNA, 40 bp, Mycobacteroides abscessus
  source 1..40: mol_type = genomic DNA
tgcgcaggcgaaggtgaggaagtcgatgtcggtgggtccg

SEQ ID NO: 28130 - DNA, 50 bp, Mycobacteroides abscessus; identical to SEQ ID NO: 28120
  source 1..50: mol_type = genomic DNA

SEQ ID NO: 28131 - protein, 522 aa, Blautia massiliensis
MELLNVCIYLRKSRADREAEARGEGETLARHERILLDLAKKRGYNVGAIYKEIVSGETISARPVMQQLLREVESGMWDGVLVVEVERLARGDTIDQGVVARSFQYSNTLIITPLKTYDPNNEYDEEYFEFGLFMSRREYKTIRRRLTAGRESSAKEGKYCGSKPPYGYSRVKLVGEKGWTLQPVPDQAEIVKLIFNLYVHGVSGERIGMAKICRKLNDSGIKTMDGGLWTISRVQAILRNPVYEGMIRWNSRKAVKHIKDGQITISRPFAQDYILVKGRHPAIVSRELFQQAQDIVNKNPARPLNSLHVLRNPLAGIVRCGKCDHVMTRKSPNGRQGDLIRCPYSSCSNISSKLPLVEKALLDGIQELVDGYRLNNSVSDQEYSLSISEREKMIQGKLKEIDILKKRKQRQYDLLEQGIYSTEEFLERSRATAAELSACDAVILSLKQEIEHEQELQFQRSSFIPKCEDLLANYWTWDTSTKNRFLRELIEKAVYTKNAKNTWKNGDDISFTLDIYPKIQQK

SEQ ID NO: 28132 - DNA, 50 bp, Blautia massiliensis
  source 1..50: mol_type = genomic DNA
tgtaggtagcctttatgtacctacacattggcacataaatgatgatacaa

SEQ ID NO: 28133 - DNA, 40 bp, Blautia massiliensis; identical to SEQ ID NO: 26988
  source 1..40: mol_type = genomic DNA

SEQ ID NO: 28134 - DNA, 40 bp, Blautia massiliensis
  source 1..40: mol_type = genomic DNA
aaacgacatgattgccagaaaattggcacgtatcgtgtcc

SEQ ID NO: 28135 - DNA, 50 bp, Blautia massiliensis
  source 1..50: mol_type = genomic DNA
tcttggtaggttgtatgtatctagaaatttgctcattctaaattttccaa

SEQ ID NO: 28136 - protein, 475 aa, Limosilactobacillus fermentum
MRIAVYVRVSTLEQAESGYSIGEQTEKLKSYCEIKDWDIAKIYTDPGFSGSSLDRPAMQQLISDCKLGVFDAVLVYKLDRLSRSQKDTLYLIEDVFNAYNIHFMSLSENFDTSTPFGKAMIGLLSVFAQLEREQIKERMQMGKLGRVKAGKISAWSNVPFGYTKVKDSYDVDPLRAGIVKRIYADYLAGKSITKIMNELNREGHVGKGVAWSYRTVRQVLGNVTYTGRIIFKGQVYDGLHTGIISKADWDEVQRVLKIRQLDQAKKSNNPRPFQARYMLSGLLKCHYCGATLAIAKSHTKNGPLWRYVCPTRHASKYHRNNAARYRIPPVNCELTYKYKDDLEKAVLCEVKKVALDPDAVVARQDDGQPTIDKQAIKAQLAKIKRQQAKLVDLYLLSDDLNVDQLHDRAEKLKVQADALQAQLIHDTKKTDAFKKTATDAAQIDQLDYEHQTAIVRMLIDHINVSNTGLDIYWQI

SEQ ID NO: 28137 - DNA, 50 bp, Limosilactobacillus fermentum
  source 1..50: mol_type = genomic DNA
taaaaatatttagagagtgccatttcaaccaccatctctaaatcttttct

SEQ ID NO: 28138 - DNA, 40 bp, Limosilactobacillus fermentum; identical to SEQ ID NO: 6858
  source 1..40: mol_type = genomic DNA

SEQ ID NO: 28139 - DNA, 40 bp, Limosilactobacillus fermentum
  source 1..40: mol_type = genomic DNA
gaacaagacaatcgtcattctcaccagggtaaagcccttg

SEQ ID NO: 28140 - DNA, 50 bp, Limosilactobacillus fermentum
  source 1..50: mol_type = genomic DNA
taaaaatagaaatcaaatgccattcttatcaaaatcctagtaggttttct

SEQ ID NO: 28141 - protein, 626 aa, Bittarella massiliensis
MRNEKITPLYERLSRDDELQGESNSISNQKKMLEDFARRNGLPNPTHFTDDGVSGTRFDRPGFLAMMEEVEAGRVEAIVIKDMSRLGRDYLKVGQVMEILRQRGVRLIAINDGVDSLKGDDDFTPFRNIMNEFYARDTSRKIRSVFKSKGMSGKHLTGTVIYGYLWDEKREHWLVDEEAAAVVRHIFALAMEGYGPYQIATKLSEEKIEMPAVHLARYGEGVNKNKTFADIYRWSASTVVEILKKREYLGHTVNFKTRKHFKDKKSHYVDESEWTIFENTHEAIIDQETFDNVQRIRGNAKRYPDGFGEAHPLTGLMYCADCGGKMYVHRTYNGKRVPQYTCGQYGKYPIGSLCPTQHRIKAEAVLTLIADMLRAIAEYSKNDRAEFIRTVQETQAAQQTADISKKRKRLAAAQKRAGELERLICKIYEDNALGKLPDARYEALDAQYAKEQDALNAEITELEKAVTGYEQSRKSAEKFIALIDKYENFDTLTNTMLNEFVEKILVHERARKGSQDTTQEVEIYFNFVGRYIPPALQPVPLTPEEQEELRKKEERKDRLHQNYLRRKANGKQKEWEERYNAKRKAKMEAAKAAIRAEDMEKGIFTTVSQLPRQEPRKATVSASAAV

SEQ ID NO: 28142 - DNA, 50 bp, Bittarella massiliensis
  source 1..50: mol_type = genomic DNA
aaaagtccttgacaactcgtttcgggagatgtatgctctaagtgacttct

SEQ ID NO: 28143 - DNA, 40 bp, Bittarella massiliensis
  source 1..40: mol_type = genomic DNA
caaattcaaaatggccgcgggcaaaactctaaaatccata

SEQ ID NO: 28144 - DNA, 40 bp, Bittarella massiliensis
  source 1..40: mol_type = genomic DNA
caaattcaaaatggccgcggacaaaactctaaaatccata

SEQ ID NO: 28145 - DNA, 50 bp, Bittarella massiliensis
  source 1..50: mol_type = genomic DNA
aacagtcatagtgaacttgttttggaagatgttagcacttaggtgcttct

SEQ ID NO: 28146 - protein, 626 aa, Coprococcus comes
MRNEKITPLYERLSRDDELQGESNSISNQKKMLEDFARRNGLPNPTHFTDDGVSGTRFDRPGFLAMMEEVEAGRVEAIVIKDMSRLGRDYLKVGQVMEILRQRGVRLIAINDGVDSLKGDDDFTPFRNIMNEFYARDTSRKIRSVFKSKGMSGKHLTGTVIYGYLWDKKREHWLVDEEAAAVVRHIFALAMEGYGPYQIATKLSEEKIEMPAVHLARYGEGVNKNKTFADIYRWSASTVVEILKKREYLGHTVNFKTRKHFKDKKSHYVDESEWTIFENTHEAIIDQETFDNVQRIRGNARRYPDGFGEAHPLTGLMYCADCGGKMYVHRTYNGKRVPQYTCGQYGKYPIGSLCPTQHRIKAEAVLTLIADMLRAIAEYSKNDRAEFIRTVQETQAAQQTADISKKRKRLAAAQKRAGELEKLICKIYEDNALGKLPDARYEALDTQYAKEQDALNAEITELEKAVTGYEQSRKSAEKFIALIDKYENFDTLTNTMLNEFVEKILVHERARKGSQDTTQEVEIYFNFVGRYIPPALQPVPLTPEEQEELRKKEERKDRLHQNYLRRKANGKQKEWEERYNAKRKAKMEAAKAAIRAEDMEKGIFTTVSQLPKQEPRKATVSASAAV

SEQ ID NO: 28147 - DNA, 50 bp, Coprococcus comes; identical to SEQ ID NO: 28142
  source 1..50: mol_type = genomic DNA

SEQ ID NO: 28148 - DNA, 40 bp, Coprococcus comes
  source 1..40: mol_type = genomic DNA
gaacttctgcttgcttaccgggagtggctgatgcagcatt

SEQ ID NO: 28149 - DNA, 40 bp, Coprococcus comes
  source 1..40: mol_type = genomic DNA
gaacttctgcttgcttaccgagagtggctgatgcagcatt

SEQ ID NO: 28150 - DNA, 50 bp, Coprococcus comes; identical to SEQ ID NO: 28145
  source 1..50: mol_type = genomic DNA

SEQ ID NO: 28151 - protein, 613 aa, Vibrio parahaemolyticus; identical to SEQ ID NO: 19306

SEQ ID NO: 28152 - DNA, 50 bp, Vibrio parahaemolyticus; identical to SEQ ID NO: 19297
  source 1..50: mol_type = genomic DNA

SEQ ID NO: 28153 - DNA, 40 bp, Vibrio parahaemolyticus; identical to SEQ ID NO: 23528
  source 1..40: mol_type = genomic DNA

SEQ ID NO: 28154 - DNA, 40 bp, Vibrio parahaemolyticus; identical to SEQ ID NO: 23528
  source 1..40: mol_type = genomic DNA

SEQ ID NO: 28155 - DNA, 50 bp, Vibrio parahaemolyticus
  source 1..50: mol_type = genomic DNA
gaaggaaaggaaattgtgtttggtttgctaaaaaaaaaatcttgccttcc

SEQ ID NO: 28156 - protein, 678 aa, Vibrio parahaemolyticus
MRTTPKIYNYARVSTTKQTKGVGLETQQQRSVLENLSQEHNLPIHDENFVDQGLSAYHGKHKDGAFGVVLSRIESGEIASGSILVVFSLDRLSRETVNVAMEQFLSIINRGVRVYTHIDCKMFDSESQNQTADLIGSLITMQRANEESETKSKRIIAAQKIALKRWKDTGKPQGALGRSPFWIDQPTNTLNINAEGVKKAVEMKLAGYGDLKIKQYLDANFEYKQTRTKGTVKQSNTWDYTAISQLWANRSLIGEKNFHIEGVSHVFENYYPPIIDEATFRKLKMCKSEKRGRNTSSGKIPLLKGIARCGICGGAMVFVDKGDNRVNYVCNLAMKGEHDREVYNVNMLDLLTLEICKDAYLAESDKANNTFVENEKIKIETELVEEREVLDELVARFKAKKSNTILDLIGDSENQIDVLEAKLDAINNADVVLNADELVSLPEIFTDDVRTDYLHPERYTIRNNLYRFISSITLNRVVEHCSDAKIKSANCIDITWHFKNGQKRRLAMLPYQYLKADDGRKSLYLPFVYMYGSKSNIKVDDGGQFLPSIFEKLHAFDLTRCLYPSRGCYQWSKLSLECGKTYWAPLDKAMFMEKGMEVIADTVRDNGGINKVDGVTTNYLSLMFNYPSSEEFSYDYPDSTFVELACKFGFVADRDFSLFLQDNNFNRELYSSLDFLMS

SEQ ID NO: 28157 - DNA, 50 bp, Vibrio parahaemolyticus
  source 1..50: mol_type = genomic DNA
cgaagaaagttgattgtttttagtttgccaataaaaaacagtttccttcg

SEQ ID NO: 28158 - DNA, 40 bp, Vibrio parahaemolyticus; identical to SEQ ID NO: 23528
  source 1..40: mol_type = genomic DNA

SEQ ID NO: 28159 - DNA, 40 bp, Vibrio parahaemolyticus; identical to SEQ ID NO: 23528
  source 1..40: mol_type = genomic DNA

SEQ ID NO: 28160 - DNA, 50 bp, Vibrio parahaemolyticus; identical to SEQ ID NO: 28155
  source 1..50: mol_type = genomic DNA

SEQ ID NO: 28161 - protein, 678 aa, Vibrio parahaemolyticus
MRTTPKIYNYARVSTTKQTKGVGLETQQQRSVLENLSQEHNLPIHDENFVDQGLSAYHGKHKDGAFGVVLSRIESGEIASGSILVVFSLDRLSRETVNVAMEQFLSIINRGVRVYTHIDCKMFDSESQNQTADLIGSLITMQRANEESETKSKRIIAAQKIALKRWKDTGKPQGALGRSPFWIDQPTNTLNINAEGVKKAVEMKLAGYGDLKIKQYLDANFEYKQTRTKGTVKQSNTWDYTAISQLWANRSLIGEKNFHIEGVSHVFENYYPPIIDEATFRKLKMCKSEKRGRNTSTGKIPLLKGIARCGICGGAMVFVDKGDNRVNYVCNLAMKGEHDREVYNVNMLDLLTLEICKDAYLAESDKANNTFVENEKIKIETELVEEREVLDELVARFKAKKSNTILDLIGDSENQIDVLEAKLDAINNADVVLNADELVSLPEIFTDDVRTDYLHPERYTIRNNLYRFISSITLNRVVEHCSDAKIKSANCIDITWHFKNGQKRRLAMLPYQYLKADDGRKSLYLPFVYMYGSKSNIKVDDGGQFLPSIFEKLHAFDLTKCLYPSRGCYQWSKLSLECGKTYWAPLDKAMFMEKGMEVIADTVRDNGGTNKVDGVTTNYLSLMFNYPSSEEFSYDYPDSTFVELACKFGFVADRDFSLFLQDNNFNRELYSSLDFLMS

SEQ ID NO: 28162 - DNA, 50 bp, Vibrio parahaemolyticus; identical to SEQ ID NO: 19297
  source 1..50: mol_type = genomic DNA

SEQ ID NO: 28163 - DNA, 40 bp, Vibrio parahaemolyticus
  source 1..40: mol_type = genomic DNA
gaggaatatttgctgtggttcgataaaaaaggctggccga

SEQ ID NO: 28164 - DNA, 40 bp, Vibrio parahaemolyticus; identical to SEQ ID NO: 23528
  source 1..40: mol_type = genomic DNA

SEQ ID NO: 28165 - DNA, 50 bp, Vibrio parahaemolyticus; identical to SEQ ID NO: 28155
  source 1..50: mol_type = genomic DNA

SEQ ID NO: 28166 - protein, 674 aa, Vibrio parahaemolyticus
MRTTPKIYNYARVSTTKQTKGVGLETQQQRSVLENLSQEHNLPIHDENFVDQGLSAYHGKHKDGAFGVVLSRIESGEIASGSILVVFSLDRLSRETVNVAMEQFLSIINRGVRVYTHIDCKMFDSESQNQTADLIGSLITMQRANEESETKSKRIIAAQKIALKRWKDTGKPQGALGRSPFWIDQPTNTLNINAEGVKKAVEMKLAGYGDLKIKQYLDANFEYKQTRTKGTVKQSNTWDYTAISQLWANRSLIGEKNFHIEGVSHVFENYYPPIIDEATFRKLKMCKSEKRGRNTSSGKIPLLKGIARCGICGGAMVFVDKGDNRVNYVCNLAMKGEHDREVYNVNMLDLLTLEICKDAYLAESDKANNTFVENEKIKIEAELVEEREVLDELVARFKSKRSNAILDLIGDSENKIDELEARLDALNSADVILSADELASLPDIFTDDVRKDYLRPERLAIRNNLYRFISSITLNRMFEPCSDAKTKFANCVDITWHFKNGQKRRLAMLPYEYTKTESGGKGLYLPFVYMYCSKNLIKVEDGDQLLSDILTKLHKLDLTKCLYPSKGQYQWSQRTLECGKTYWVPLDEGVFLEPEALQFDFGGIHTEKSTSQNYISLMYSHLWAEGEYTNDYPLLKFRDLARGFNFVESYAFYDTLRDNLFDQELYLARDFLMS

SEQ ID NO: 28167 - DNA, 50 bp, Vibrio parahaemolyticus
  source 1..50: mol_type = genomic DNA
cgaagaaagttgattctttttggttcgccaataaaaaacagtttccttcg

SEQ ID NO: 28168 - DNA, 40 bp, Vibrio parahaemolyticus; identical to SEQ ID NO: 23528
  source 1..40: mol_type = genomic DNA

SEQ ID NO: 28169 - DNA, 40 bp, Vibrio parahaemolyticus; identical to SEQ ID NO: 23528
  source 1..40: mol_type = genomic DNA

SEQ ID NO: 28170 - DNA, 50 bp, Vibrio parahaemolyticus; identical to SEQ ID NO: 28155
  source 1..50: mol_type = genomic DNA

SEQ ID NO: 28171 - protein, 613 aa, Vibrio alginolyticus
MRTTPKIYNYARVSTTKQLKGVGLETQQQRSVLENLSQKYNLPIHDENFVDQGLSAYHGKHKDGAFGVVLSQIESGEIASGSILVVFSLDRISRETTNLAMAQLLSIINRGVRVYTHIDDKMYDTSNDNFSTDLMFSMFTMERANEESRTKSRRIIAAQKEALKKWHIDKKPQGALGRVPCWIDQPTNKLNQNATGIKVAIDLYLQGWSSIKIKKHLDKSYPYKRTRKTKVKTSSTWDLGVIDQLWKKRALIGEKHLRIEDKTHVLKDYYPKLVDLNTYLRLKALREPKKGRATTTGSIHLLKGLARCGVCGGAMVFIDKGASRQNYVCNLATKGEHQREVVSTRMLEFLTLEVCKDFYLVNKVGATSNTNIEAEIQERILKEKAELSDLIERYKKKARGSLAELIEDQEDKIELLEKELDTFNINTFDEVLERLTEDLYTEEVRNNISDPQRADLHEILCRILKAVNVYRRTEDTNFTKTKKVNCIEIEWVFKSGQVRKLVMNPFEYIITENKKSLYIPYEYKHDIPFEEYRRNKSVISNALKKLHDWNLLRGLYPTKGRYEWNEIDLELGYVHSITSPNFDAILDGSYMKKSTMYIQSDKNSLEDKDDIFC

SEQ ID NO: 28172 - DNA, 50 bp, Vibrio alginolyticus; identical to SEQ ID NO: 19297
  source 1..50: mol_type = genomic DNA

SEQ ID NO: 28173 - DNA, 40 bp, Vibrio alginolyticus; identical to SEQ ID NO: 26748
  source 1..40: mol_type = genomic DNA

SEQ ID NO: 28174 - DNA, 40 bp, Vibrio alginolyticus; identical to SEQ ID NO: 26748
  source 1..40: mol_type = genomic DNA

SEQ ID NO: 28175 - DNA, 50 bp, Vibrio alginolyticus; identical to SEQ ID NO: 28155
  source 1..50: mol_type = genomic DNA

SEQ ID NO: 28176 - protein, 613 aa, Vibrio alginolyticus; identical to SEQ ID NO: 19306

SEQ ID NO: 28177 - DNA, 50 bp, Vibrio alginolyticus; identical to SEQ ID NO: 19297
  source 1..50: mol_type = genomic DNA

SEQ ID NO: 28178 - DNA, 40 bp, Vibrio alginolyticus; identical to SEQ ID NO: 26748
  source 1..40: mol_type = genomic DNA

SEQ ID NO: 28179 - DNA, 40 bp, Vibrio alginolyticus; identical to SEQ ID NO: 26748
  source 1..40: mol_type = genomic DNA

SEQ ID NO: 28180 - DNA, 50 bp, Vibrio alginolyticus; identical to SEQ ID NO: 28155
  source 1..50: mol_type = genomic DNA

SEQ ID NO: 28181 - protein, 678 aa, Vibrio metschnikovii
MRNIPKIYNYARVSTTKQLKGVGLETQQQRSVLERLSQEYSLPIHDEDFVDEGLSAYHGSHKDGEFGVILSRIESGEIAHGSILVIFSLDRISREATNVAMAQLLDFINNGVRVYTHIDDKMYDSSSKHLFIDLMYSFLTMERANEESRTKSKRIIAAQKIALKHWKDTGKPQGALGRSPFWIDQPTNTLNINAEGVKKAVEMKLAGYGDLKIKQYLDANFEYKQTRTKGTVKQSNTWDYTAISQLWANRSLIGEKTFHIEGVSHVLENYYPPIIDEATFRKLKMCKSKKRGRNTSSGKIPLLKRLARCGICGGAMVFVDKGGDRVNYVCNLAMKGEHDQEVYNANMLDLLTLEICKDAYLVESDKTNNNAIENEKLKIEVELAIEHERRDELVTRYKAQKAMSFLDLLEDCESNISDLEAKLDAINNNNVVLSADELESLPEIFSGDVRTDYSHPERYAIRNNFYRFISSITLNRVVEPCSDAKTKYANCVDITWHFKNGQKRRLAMLPYQYLKADDGNKGLYLPFVYMYGSKSNIKVDDGDQFLSSIFKKLHAFDLTKCLFPSKGRYQWSQLSLECGKTYWASLDKAMFMEKGMEVIADTIRDNGGKNKVDGVTTNYLSLMFNYPSSEEFSYDYPDSTFVELACKFGFVADRDFSLFLQDNNFNRELYSSLDFLVS

SEQ ID NO: 28182 - DNA, 50 bp, Vibrio metschnikovii
  source 1..50: mol_type = genomic DNA
cgaagaaagttaattatttttggttcgccaataaaaaacagtttccttcg

SEQ ID NO: 28183 - DNA, 40 bp, Vibrio metschnikovii
  source 1..40: mol_type = genomic DNA
gaagagtacctactgtggtttgccaataaaggttttcccg

SEQ ID NO: 28184 - DNA, 40 bp, Vibrio metschnikovii; identical to SEQ ID NO: 28183
  source 1..40: mol_type = genomic DNA

SEQ ID NO: 28185 - DNA, 50 bp, Vibrio metschnikovii; identical to SEQ ID NO: 28155
  source 1..50: mol_type = genomic DNA

SEQ ID NO: 28186 - protein, 601 aa, Vibrio furnissii
MIGMDEKPRIAHIYSRVSKGTQVKGDGLRRQIEIASKFIEDVNISNSRDGLPVYTLADSPIYDRGLSAYFGLNTDENAGLGAFLKAAENGQVEKGTLLIVEAIDRISRLPVDDARALFARFKKYGIDVAICRFNLIIYHDKSSDLGQDLLITTAIHLAHLESEQKSKRIRARFTHKRLLEKEGGERRTSMSPSWIELSKDKTHFVLIPERARIVRKMVDLKLQGWGAHRITVYLNEQGYPCWNRSNTWYTNIVDKYLKMIQLVGDFQPVEHVHGEKGVRKEPVGDVIKGYYPALITEEEWIRLKASFKRSGGRQTGAFSNLFSRMLYCPTCGYCMSYFKPNRGRIKVRCRKQIDKQGCDQRALNYEEIEPRLIKALAGLDYAKINNNSFASLQKELNTLEAQVVELEASADDIKTQMLEESDPRIISAYVNKLKAIYTEQDKAKARFEKLSTQTSDYDVNTLEQLQLERNEDRERYNGFVRSFVKYVIASDSKLGKPLRIVFKSEAVGEVPVFFNDDKNNKAISDIFTAQKDVNEAAPIRLINMSRVHGNLGKLAAIDTVPVPDDLGDTLERIKYLFAVRQAVLQNPEKWQAIADDARLFE

SEQ ID NO: 28187 - DNA, 50 bp, Vibrio furnissii
  source 1..50: mol_type = genomic DNA
tgcaatactaataccttgccaaccaatgaagagtgggtgatagcatcgca

SEQ ID NO: 28188 - DNA, 40 bp, Vibrio furnissii
  source 1..40: mol_type = genomic DNA
ggcgatggtgattccaaccaacgaagagttcgtgattgct

SEQ ID NO: 28189 - DNA, 40 bp, Vibrio furnissii
  source 1..40: mol_type = genomic DNA
ggcgatggtgattccaacctccgaagagttcgtgattgct

SEQ ID NO: 28190 - DNA, 50 bp, Vibrio furnissii
  source 1..50: mol_type = genomic DNA
agccattcttggaactgggcaacttctgaaaagtggaagacagcatggga

SEQ ID NO: 28191 - protein, 554 aa, Rhizobium leguminosarum
MKPKAYSYIRMSTDIQLKGDSLRRQSEESRRYADENDLDLVEDFRLEDIGVSAFHGKNVAQGALGEFLVLCEQQIIQAGSYLIVESLDRISRQNPQVATSLFLQILGAGINIVTLTDRHVYRAGSSDFTDIIVSVVIMSRAYEESRTKSLRVGAAWENKRRNIHDKKLTQVAPIWLRLSADRTAFETVPERVAVLRWIFDEADQGKGSLQISRALNQKGVPTFAPSKGWYESYVSKVLTNRAVLGEFQPHRYIDGKRMRSGEPIPNYFPAIVTREQFERIQVGRAVRRLRGAGRKGQNNINLFQGVATCGYCSARMMIVNKGTGPKGGVYLRCDRARRSADCSASGWPLDHFEGAFLWFVEELDIGAIVQGAASEEARKALEGQAATISADLETQKKIRERAFDLLGEPMSATAFVRGKIDDASMKIDELEMKLASIKEATMIAAASQKRPLEEVRLMIKEIGGWQTADGDSRSRVADWIKRNVKELLLFTDGLDQSDQIAADAKLRQFSVALEGGEFRTVQIGGNDPTVASYSVHANDDQWVLTQDGERSFHR

SEQ ID NO: 28192 - DNA, 50 bp, Rhizobium leguminosarum
  source 1..50: mol_type = genomic DNA
attcttttaatccaccgcataatgcagatgttgaggtggattaattaatg

SEQ ID NO: 28193 - DNA, 40 bp, Rhizobium leguminosarum
  source 1..40: mol_type = genomic DNA
gcccggcaaggtcggcatgcagatcgtcggtctgcccgac

SEQ ID NO: 28194 - DNA, 40 bp, Rhizobium leguminosarum
  source 1..40: mol_type = genomic DNA
gcccggcaaggtcggcatgaggatcgtcggtctgcccgac

SEQ ID NO: 28195 - DNA, 50 bp, Rhizobium leguminosarum
  source 1..50: mol_type = genomic DNA
attcctttatatctacacattatgagaatatttaggtaagttacttaata

SEQ ID NO: 28196 - protein, 447 aa, Rhodococcus qingshengii
MPTSAAVYARISLDRDNEQLGVSRQRQDCLELAKRLGWGIGEVYLDNSISASKDVLRPEYERMIADLSSGKRDGLIVYDLDRLTRKPAELESFIALAEKAGFALANVAGDVDLSTANGRMLARFKGAIARQEAERIGERVSRAAKQRAEQGKPQKAKHRPFGYTVDYEIVPDEAEMIRQAYARVIAGESITSIMRDFQANFSTVAGGKWYRQTVKKILQRPANAGIREYKGEEVGVGDWTPIVDRATYDAAMETFSKASKPMPDMANKHLLSAICKCGLCGFPMYGRRRGKGSTAQYTCMPTHGGCGRIARAQEPLDKYIISLVVAHLEKIAPVVAVANENDDKIAETQKRISDLQKAYSDEQLSMIDFMPLVNAERQKLKQYQRKEAKAATVATKSTRAEHFIDANLSQQRAIIKRYIRDVVVMPTGRGSRKLDYDCIKVIKNERT

SEQ ID NO: 28197 - DNA, 50 bp, Rhodococcus qingshengii
  source 1..50: mol_type = genomic DNA
tatgtaaaactaatgctatcgagttgatgcagtagcattatttacatatg

SEQ ID NO: 28198 - DNA, 40 bp, Rhodococcus qingshengii
  source 1..40: mol_type = genomic DNA
agtaccagcgagatcgagttgatgcagtaccgctgatcgg

SEQ ID NO: 28199 - DNA, 40 bp, Rhodococcus qingshengii
  source 1..40: mol_type = genomic DNA
agtaccagcgagatcgagtcaatgcagtaccgctgatcgg

SEQ ID NO: 28200 - DNA, 50 bp, Rhodococcus qingshengii
  source 1..50: mol_type = genomic DNA
taaataaaacaaaagctatccagtcattggagttccttcatttacagata

SEQ ID NO: 28201 - protein, 457 aa, Bacillus cereus; identical to SEQ ID NO: 21696

SEQ ID NO: 28202 - DNA, 50 bp, Bacillus cereus
  source 1..50: mol_type = genomic DNA
ttttaggttaatggtccatttcctctagtaaatgtattattaacccaaaa

SEQ ID NO: 28203 - DNA, 40 bp, Bacillus cereus; identical to SEQ ID NO: 6833
  source 1..40: mol_type = genomic DNA

SEQ ID NO: 28204 - DNA, 40 bp, Bacillus cereus; identical to SEQ ID NO: 6834
  source 1..40: mol_type = genomic DNA

SEQ ID NO: 28205 - DNA, 50 bp, Bacillus cereus; identical to SEQ ID NO: 6795
  source 1..50: mol_type = genomic DNA

SEQ ID NO: 28206 - protein, 622 aa, Roseburia hominis
MSKQKITALYERLSRDDELQGESNSISNQKKLLEEYAAQQGFTNCVHFTDDGISGTCFDRPGFLDMMRQVEAGNVDYLCIKDMSRLGRDYLKVGQIMEILRQRGVRLIAINDGVDSARGDDDFTPFRNIMNEYYARDTSRKIKSTFKTKGMTGKHLTGTVIYGYLWNETRDQWIVDEYAAEVVKRIFAMTIDGYGPYQIAKKLSEDKILIPSAYLAQHNEGVNKNKTFKDVYGWGSSTIVNLLDKREYLGHTVNFKTRKHFKDKKSHYVPEDEWTIFENTHEAIISQETFDLAQKIRSKVRRYPDGWGEAAPLTGLLYCADCGGKMYVHRTNNGKRISQYTCSQYTKVPCGTLCKTQHRINEDVVLSLVSDMLRAIAEYAKHERAEFVRVVQEAQSSQQTSEVKKQRTRLATAKQRVSELEVLLCKIYEDNVLGKLPDARYAVLDAQYAKEQAALTAEIATLEKAVGDYEKHEKSADRFIALIDKYQNFDKLTNTMLNEFVDKILVHERARKGSRETTQEVEIFFNFVGRFVPPAFAEVELTPEELEEIRKREERKDKLHQNYLKRKASGAQKRYEDKIKAAKKAEMDEKKNAIRAEDIARGVFIPVSNLPKREPQKGAITA

SEQ ID NO: 28207 - DNA, 50 bp, Roseburia hominis
  source 1..50: mol_type = genomic DNA
aaaaagtccttgacttttcgtctctggtgttgtatgctttaagagactta

SEQ ID NO: 28208 - DNA, 40 bp, Roseburia hominis
  source 1..40: mol_type = genomic DNA
agaaatataagctggcagccggcaaaacagccaagtcgat

SEQ ID NO: 28209 - DNA, 40 bp, Roseburia hominis
  source 1..40: mol_type = genomic DNA
agaaatataagctggcagcgagcaaaacagccaagtcgat

SEQ ID NO: 28210 - DNA, 50 bp, Roseburia hominis
  source 1..50: mol_type = genomic DNA
aaaaagtcccataattttggtgatgagaataggatgctgacagagacata

SEQ ID NO: 28211 - protein, 587 aa, Intestinimonas butyriciproducens
MMNGIQFQSVQTPNALSSELRSVIRDNVLQFYVQGNGMDAQEEGITALYERLSQEDKLDGESNSIANQKKILERYCKDHGYTAIRHYDEDDGYSGTNFNRPGFQRMLTDIKAGKIKRVIVKDMSRFGRDYLQVGMYTDVLFPEFGVHFIAVNDGVDSTRGENEFTAIRNVFNEMYARDTSKKIRATWQSKGKSGEHLTTIPPYGYIKDQEDKKKWIVDEEAAAVVQKIFSLCVDGFGPTQIAKWLKQHQILNPTAYAHSKGLPASNKPTADPYKWTNETVSRILERVDYLGHTVNFKTTKQSYKSKKKLWNDPADWVIFENTQPAIIEESVFIIVQNIRKSRRRPTKMGDMGIFSGLLYCAECGGKMYQCRATNFTEEQKYFICSTYRKGKDLCTTHSIRNVVLHEIVLKNLREAIQYVSQHEAEFMQEAADISMRDRDAEFARKRDTLAKADKRIAELDRIISRLYEDNVMGKLSDDRFIKMSHDYELEQSNLKSMAEVLRKELKQQEQQKTNAKAFVAAVKKYTDMQELDAAVLREFIDRIEVSHADKKSKTREITIVYNFIGAFDFTRAIEEANNTTQKQQKTA

SEQ ID NO: 28212 - DNA, 50 bp, Intestinimonas butyriciproducens
  source 1..50: mol_type = genomic DNA
atgttttcttaagtcaccgccccattaagagcgttgacataagaaaacaa

SEQ ID NO: 28213 - DNA, 40 bp, Intestinimonas butyriciproducens
  source 1..40: mol_type = genomic DNA
gacacaaaaaccgcctgctttcgcaggcggtttgttttgc

SEQ ID NO: 28214 - DNA, 40 bp, Intestinimonas butyriciproducens
  source 1..40: mol_type = genomic DNA
gacacaaaaaccgcctgctgtcgcaggcggtttgttttgc

SEQ ID NO: 28215 - DNA, 50 bp, Intestinimonas butyriciproducens
  source 1..50: mol_type = genomic DNA
atgttttaactcattggagccccagtaagatggttccttggagaaaacaa

SEQ ID NO: 28216 - protein, 547 aa, Vibrio parahaemolyticus; identical to SEQ ID NO: 4841

SEQ ID NO: 28217 - DNA, 50 bp, Vibrio parahaemolyticus
  source 1..50: mol_type = genomic DNA
ttatgtcattaagaaaacttaactaaggtattgtatcggttatgacataa

SEQ ID NO: 28218 - DNA, 40 bp, Vibrio parahaemolyticus; identical to SEQ ID NO: 4428
  source 1..40: mol_type = genomic DNA

SEQ ID NO: 28219 - DNA, 40 bp, Vibrio parahaemolyticus
  source 1..40: mol_type = genomic DNA
atttggctggcatgtggtctaggttctctacagaacatag

SEQ ID NO: 28220 - DNA, 50 bp, Vibrio parahaemolyticus
  source 1..50: mol_type = genomic DNA
taatgtcattttaacaagtgaatttagttattgaaactaaaatgacaaaa

SEQ ID NO: 28221 - protein, 530 aa, Vibrio parahaemolyticus
MRQAYSYVRLSSKKQILGYGQERQWEAIQSAALAHNWELSDKTFSDLGVSGWKGVNIDTGALSQFLRCVEDGYIEQGSVLIVENVDRLSRAGVNRAVTLLMQLLDNGISIYTLTDSKLYEPDSPNPLMDLMGWALSAQRAFEESERKSQMILNAKAKAREEARLTGKIITRRCPSWLRVNDDKTAFELLPERVETVQKIFDLYTSGYGTPRIGRLLTEEGRKPLNGRAWYARSLSRIIQYRAVLGEYQPTLNGKPEGEPVKEYYPAIVNEDQFNEAQAIMKAGGAGKGRRGEDMRNYFAGLLRCSCGEGMHITSSKVKGKRYYQLRCLQYRISCTNATWNFNKTSTFILFGLRRLPILEVMGADNNKDIKELNDSIRDLTAQLDSSKQQLENTTNAIAELGLSDQLKNKFRELTVLVEDTERQLAEAKSALDKSHGETAIKKQDTEMLSGRFLELIENTKEVDDRIKLNQVLRRYLSKIVLDADKEKDNRFIEIYRKDGELLVTAKLDHKLDGGLFDSSEASEAIELKRA

SEQ ID NO: 28222 - DNA, 50 bp, Vibrio parahaemolyticus
  source 1..50: mol_type = genomic DNA
ttatgtcattaagaaaacttaactaaggtattgtataggttatgacataa

SEQ ID NO: 28223 - DNA, 40 bp, Vibrio parahaemolyticus; identical to SEQ ID NO: 4428
  source 1..40: mol_type = genomic DNA

SEQ ID NO: 28224 - DNA, 40 bp, Vibrio parahaemolyticus; identical to SEQ ID NO: 28219
  source 1..40: mol_type = genomic DNA

SEQ ID NO: 28225 - DNA, 50 bp, Vibrio parahaemolyticus; identical to SEQ ID NO: 28220
  source 1..50: mol_type = genomic DNA

SEQ ID NO: 28226 - protein, 471 aa, Streptococcus agalactiae; identical to SEQ ID NO: 2871

SEQ ID NO: 28227 - DNA, 50 bp, Streptococcus agalactiae
  source 1..50: mol_type = genomic DNA
atgcattgttgacaaacgacaataaatattgttgtacatgaaaaacgctg

SEQ ID NO: 28228 - DNA, 40 bp, Streptococcus agalactiae
  source 1..40: mol_type = genomic DNA
agaagcctttttaccaaccaatattgttgtacaagccatg

SEQ ID NO: 28229 - DNA, 40 bp, Streptococcus agalactiae; identical to SEQ ID NO: 28228
  source 1..40: mol_type = genomic DNA

SEQ ID NO: 28230 - DNA, 50 bp, Streptococcus agalactiae
  source 1..50: mol_type = genomic DNA
ttctattttataaaaattacaataaatactgttgtaaagaaaaaacactt

SEQ ID NO: 28231 - protein, 471 aa, Streptococcus agalactiae; identical to SEQ ID NO: 2871

SEQ ID NO: 28232 - DNA, 50 bp, Streptococcus agalactiae
  source 1..50: mol_type = genomic DNA
atgcattattgacaaacgacaataaatattgttgtacatgaaaaacgctg

SEQ ID NO: 28233 - DNA, 40 bp, Streptococcus agalactiae; identical to SEQ ID NO: 28228
  source 1..40: mol_type = genomic DNA

SEQ ID NO: 28234 - DNA, 40 bp, Streptococcus agalactiae; identical to SEQ ID NO: 28228
  source 1..40: mol_type = genomic DNA

SEQ ID NO: 28235 - DNA, 50 bp, Streptococcus agalactiae; identical to SEQ ID NO: 28230
  source 1..50: mol_type = genomic DNA

SEQ ID NO: 28236 - protein, 540 aa, Enterocloster lavalensis
MKQPYNTTIYNTALYMRLSRDDENYGDSVSIETQRTILQQYAKEQGLHVVGEYVDDGWSGTNFERPDFQRMMDDMEAGKVNCIVTKDLSRFGREHVMMDYYLEFLFPEKRVRYIAVAENEDTEKGLSDFVPFKNLFNEWFAKDTSRKVKAAFKAKFATGQRIGAYAPIGYRKHPEIKNKLIIDEETRWIVEKIFDLAIHGRGAASITRILIAEKVPTPGFINFQRDGTFANIYAGAPEEKSYAWTIAQVKGIMKDETYIGHTIHYRETNISFKNKRRVRKPQSEWVRVENTQEPIISEQVFRQVQEQIANRRRKCKDGTTQIFSGLVKCADCGWSLSYGENRQNSKPYGHYHCSKYGQGTRQCSMHYIRYDVLYAYVLSRLQYWSGLVQHDEERLLKQLLNATDKGQAAARKKQAAELKKAEKRKAEVDTLFARMYEDWAAGRITEYNFSMLSGKYQSEQAELDEKIEQLQSAIATESQNAVDAEKWIALMKECVNPTELTAELLNMLIEKIVVHEAVKGEDGSREQEVEIFYRFIGKID

SEQ ID NO: 28237 - DNA, 50 bp, Enterocloster lavalensis; identical to SEQ ID NO: 12477
  source 1..50: mol_type = genomic DNA

SEQ ID NO: 28238 - DNA, 40 bp, Enterocloster lavalensis
  source 1..40: mol_type = genomic DNA
ggtttccaagtgggagcagggcgcggggtatcctgaggtg

SEQ ID NO: 28239 - DNA, 40 bp, Enterocloster lavalensis
  source 1..40: mol_type = genomic DNA
ggtttccaagtgggagcagaacgcggggtatcctgaggtg

SEQ ID NO: 28240 - DNA, 50 bp, Enterocloster lavalensis
  source 1..50: mol_type = genomic DNA
caagtttttttgccacgttataacaaggattaactttcctcaagttccca

SEQ ID NO: 28241 - protein, 535 aa, Roseburia hominis
MLRQTTQKITALYPRLSHEDELQGESNSISNQKRILETYAKQNGFSNLRWYTDDGYSGANFQRPGFQSMLADIEAGKVATVIVKDMSRLGRNYLQVGMYTEMIFPQKGVRFIAINDGVDSAQGDNDFAPLRNIFNEWLVRDTSKKIKAVKRSKGMSGKPITSKPVYGYLMDEDENFIIDEEAAPVVKQIYNLCLAGNGPTKIARMLTEQQIPTPGTLEYRRTGSTRRYHPGYECKWATNTVVHILENREYMGCLVNFKTEKPSYKTKHSVENPIEKQAIFENHHEPIIDTQTWERVQELRKQRKRPNRYDEVGLFSGILFCADCGSVMYQQRYQTDKRKQDCYICGNYKKRTHDCTAHFIRTDLLTAGVLSNLRKVTSYAAKHEARFMKLLIEQNEDGGKRRNAAKKKELEAAEKRIAELSAIFKRLYEDSVTGRISDERFTELSADYEAEQRELKERAAAIQAELSKAQEATVNAEKFMNVVRRHTSFEELTPTLLREFVEKIVVHECSYDENKTRRQDIEIYYSFVGKVDLPE

SEQ ID NO: 28242 - DNA, 50 bp, Roseburia hominis
  source 1..50: mol_type = genomic DNA
ttacttctttatcacacatcagtaaatgctcatgtgcgataaagtaacac

SEQ ID NO: 28243 - DNA, 40 bp, Roseburia hominis
  source 1..40: mol_type = genomic DNA
atgatggatacgtgctggaaaatcagcaggtttataatcc

SEQ ID NO: 28244 - DNA, 40 bp, Roseburia hominis
  source 1..40: mol_type = genomic DNA
atgatggatacgtgctggatcatcagcaggtttataatcc

SEQ ID NO: 28245 - DNA, 50 bp, Roseburia hominis
  source 1..50: mol_type = genomic DNA
tcacttcttccctccccagcagtatctcatcatgtgatgcctcataacaa

SEQ ID NO: 28246 - protein, 536 aa, Clostridium symbiosum; identical to SEQ ID NO: 2966

SEQ ID NO: 28247 - DNA, 50 bp, Clostridium symbiosum; identical to SEQ ID NO: 2822
  source 1..50: mol_type = genomic DNA

SEQ ID NO: 28248 - DNA, 40 bp, Clostridium symbiosum; identical to SEQ ID NO: 21733
  source 1..40: mol_type = genomic DNA

SEQ ID NO: 28249 - DNA, 40 bp, Clostridium symbiosum
  source 1..40: mol_type = genomic DNA
caacgacaaccctggtgcatcatcacagggcatgaagcag

SEQ ID NO: 28250 - DNA, 50 bp, Clostridium symbiosum; identical to SEQ ID NO: 28245
  source 1..50: mol_type = genomic DNA

SEQ ID NO: 28251 - protein, 480 aa, Abiotrophia defectiva
MEDIKKVAIYTRVSTIEQAEGGYSLDEQQSKLKAYCDLRDWHVYKVYTDGGYSGSNLVRPAMSALLEDANARKFDTVLVYKLDRLSRSQKDTLYLIEDVFNPLNIDFVSLSENFDTSTPYGKAGLSMVAVFAQLEREQIKERMQLGKLGRAKSGKPMNWAIKAFGYEYKEGALEIVPFEADIIRGMYEDYNAGLSLHQLVIKLNKEGHIGKSKPWSFNPVRGILTNPLYTGMVPYKGDTFPGNHEPIIPQALFDSVQAQIAIRQRTNAERFNPRPFQAKYMVSGIARCGICGAPMRLESQNKKKDGTRTQNYLCSCARREKSKHIPVKDYGPCNNIRFKRQDLENFVLGEVQKLKTRPGLLKKLATKKDKLTNFDNLQAQLDKVQSQLDKLIDLYLMDELSRDKLDARRDALLKEKSALLSKLEKQDAVTVDITPVSAILDGFKDIRSLPYQRACIVVKSLIERVEVSPDLIKITWRFEV

SEQ ID NO: 28252 - DNA, 50 bp, Abiotrophia defectiva
  source 1..50: mol_type = genomic DNA
taatcatttttagttacattgatttcaatgcgtgtaactaaaaacgataa

SEQ ID NO: 28253 - DNA, 40 bp, Abiotrophia defectiva
  source 1..40: mol_type = genomic DNA
aataaggacgatcaacatttcgatcaacgtgaaggcattc

SEQ ID NO: 28254 - DNA, 40 bp, Abiotrophia defectiva
  source 1..40: mol_type = genomic DNA
aataaggacgatcaacattaagatcaacgtgaaggcattc

SEQ ID NO: 28255 - DNA, 50 bp, Abiotrophia defectiva
  source 1..50: mol_type = genomic DNA
taatcatttagataaattttgagaaaagtgcatgaaaatgctaacgataa

SEQ ID NO: 28256 - protein, 421 aa, Abiotrophia defectiva
MEDIKKVAIYTRVSTIEQAEGGYSLDEQQSKLKAYCDLRDWHVYKVYTDGGYSGSNLIRPAMSALLEDANARKFDTVLVYKLDRLSRSQKDTLYLIEDVFNPLKIDFVSLSENFDTSTPYGKAGLSMVAVFAQLEREQIKERMQLGKLGRAKSGKPMNWAIKAFGYEYKEGSLEIVPFEADIIRGMYEDYNAGISLHGLVIKLNEEGHLGKSKPWSFNPVRRILTNPLYAGMVPYKGDTFPGNHEPIISQALFDSVQAQIAIRQRTNAERFNPRPFQAKYMVSGIARCGICGAPMRLESQNKKKDGTRTQNYLCSCARREKSKHIPVKDYGPCNNIRFKRQDLENFVLGEVQKLKTRPGLLKKLTTKKDKRTNFDNLQAQLDKVQSQLDKLIDLYLMDELSRDKLDARRDSLLKRKKRPAL

SEQ ID NO: 28257 - DNA, 50 bp, Abiotrophia defectiva; identical to SEQ ID NO: 28252
  source 1..50: mol_type = genomic DNA

SEQ ID NO: 28258 - DNA, 40 bp, Abiotrophia defectiva; identical to SEQ ID NO: 28253
  source 1..40: mol_type = genomic DNA

SEQ ID NO: 28259 - DNA, 40 bp, Abiotrophia defectiva; identical to SEQ ID NO: 28254
  source 1..40: mol_type = genomic DNA

SEQ ID NO: 28260 - DNA, 50 bp, Abiotrophia defectiva; identical to SEQ ID NO: 28255
  source 1..50: mol_type = genomic DNA

SEQ ID NO: 28261 - protein, 529 aa, Bacillus velezensis
MRLREYNINSIVNYLRKSRKDIERERRTGEDTLYQQQKTMTEFLDKTGIPYVQRFEVGSGDKISTRPVFQGVLEELKEFKYDAIAVKEISRLGRGSMSDMGVIYDLIIENRIFILTPDRTYDPRNDSDLRQIRFEMFFAREEFEQIRQRLTGARYSSAREGKWMGVVPYGYTRNPKTLRLEPNEDAKNVKLIFNLLAHGIDGKEVRERAIATYLKRIGIKSAKGLDQWDTTQLKRLLTNQAYIGVSKFRETERLSNGKLRKRPVDEHIIVENAHEPIISKELFDEVQKKLNNRTVTKVKLDVGRYALTGLVTCGVCGSRMVVNSYSRKRKDYVLRDSYLVCKNTCQSVKYDTVEREIINQLQGMKQMDIELLQEAKNEALKDTSIEEQYLLKEEIKKSILQKKENLQKRLKFIQQKHFNGIYTDEDYLGFKKEIDEELKEIEKIEQNDFEDEASAALEDAPLEKEQFVKQIDHILDAYQNTDSKEKKNQLLTEYYDEIVLTVLESGTRVKPAKIKLDSALSYNFWNIGS

SEQ ID NO: 28262 - DNA, 50 bp, Bacillus velezensis
  source 1..50: mol_type = genomic DNA
tgctgttatcaatagtctaactataggtgcattgcttattgataacagca

SEQ ID NO: 28263 - DNA, 40 bp, Bacillus velezensis
  source 1..40: mol_type = genomic DNA
cgccgtgtcatgtgatcatagttttatcgcggaaacagcg

SEQ ID NO: 28264 - DNA, 40 bp, Bacillus velezensis
  source 1..40: mol_type = genomic DNA
cgccgtgtcatgtgatcatgcttttatcgcggaaacagcg

SEQ ID NO: 28265 - DNA, 50 bp, Bacillus velezensis
  source 1..50: mol_type = genomic DNA
tgctgctaaaacctgtccaacaatgcgagcattgttctcagatcacaccg

SEQ ID NO: 28266 - protein, 495 aa, Clostridium perfringens
MKKIAIYTRKSVYVENSESIETQINMCKAYFTRQFKDCEFEIFEDEGFSGKNTDRPAFKRLMNLCKIKKFDAVAVYKIDRLARNIVDFMNIYDDLEKLEIKLISITEGFDPTTPIGRMMMVMLAGFADMERMNIAQRVKDNMISLAKKGCFTGGKINRGYCLEEKSDGKKYLKLENHEFIKFTFESFDKGFSLLEILRMQKDKFGSYSLGSTMSVKRMLRSPVYVQSSIEVSDYLRNKGYEIVGNENKNGYLPYGVKVNEPCAIVSKHKAVIEPLLWLRVNSKLDKVRENAIKKGSKCYWLTGVLKCPICGENYVLANSRKKTYYTCSTRLKRGANRPNTCTNSKYVDATRIEAIVENTISKLFNKDTFNSSYSKNEIIYEDNTLELEKKIKSHEKSIKSLVEKLTLIDNSAAKYLTDKIEELTKEISEIKIKIEENKLNKLENELNKSTPEIIYNNIINFVSSNSPQEKRRYLKLIFKSIYYNPETNNIEVDFI

SEQ ID NO: 28267 - DNA, 50 bp, Clostridium perfringens
  source 1..50: mol_type = genomic DNA
tatatcagttttacaactatagcatcaccaatagttttaaaactgatatc

SEQ ID NO: 28268 - DNA, 40 bp, Clostridium perfringens
  source 1..40: mol_type = genomic DNA
ctttgaagtaaataaaggctctcctgttgtaatatctaca

SEQ ID NO: 28269 - DNA, 40 bp, Clostridium perfringens
  source 1..40: mol_type = genomic DNA
ctttgaagtaaataaaggcattcctgttgtaatatctaca

SEQ ID NO: 28270 - DNA, 50 bp, Clostridium perfringens
  source 1..50: mol_type = genomic DNA
tatgtcagtttttaaattttagccattctagtaggtgtgtaattgatatc

SEQ ID NO: 28271 - protein, 495 aa, Clostridium perfringens
MKKIAIYTRKSVYVENSESIETQINMCKAYFTRQFKDCEFEIFEDEGFSGKNTDRPAFKRLMNLCKLKKFDAVAVYKIDRLARNIVDFMNIYDDLEKLEIKLISITEGFDPTTPIGRMMMVMLAGFADMERMNIAQRVKDNMISLAKKGCFTGGKINRGYCLEEKSDGKKYLKLENPEFIKFTFESFDKGFSLLEILRMQKDKFGSYALGSTMSVKRMLRSPVYVQSSSNVSDYLRNKGYEIVGNENKNGYLPYGVTVNEPCAIVSKHKAVIEPLLWLRVNSKLDKVRENAIKKDSKCYWLTGVLKCPICGENYVLANSRKKTYYTCSTRLKRGANRPNTCTNSKYVDATGIEAIVENTISKLFNKDTFNSSYSKNEIIYEDNTLELEKKIKSHEKSIKSLVEKLTLIDNSAAKYLTDKIEELTKEISEIKIKIEENKLNKLENELNKSTPEIIYNNIINFVSSNSPQEKRRYLKLIFKSIYYNPETNNIEVDFI

SEQ ID NO: 28272 - DNA, 50 bp, Clostridium perfringens; identical to SEQ ID NO: 28267
  source 1..50: mol_type = genomic DNA

SEQ ID NO: 28273 - DNA, 40 bp, Clostridium perfringens; identical to SEQ ID NO: 28268
  source 1..40: mol_type = genomic DNA

SEQ ID NO: 28274 - DNA, 40 bp, Clostridium perfringens; identical to SEQ ID NO: 28269
  source 1..40: mol_type = genomic DNA

SEQ ID NO: 28275 - DNA, 50 bp, Clostridium perfringens; identical to SEQ ID NO: 28270
  source 1..50: mol_type = genomic DNA

SEQ ID NO: 28276 - protein, 524 aa, Hungatella hathewayi
MPVTECIAVYIRLSSEDNDVDGSIKAESNSVSAQRMLINEFIKKQDEFTNCPVVEYVDDGYSGTNFNRPGFQRMMEDAKAGRIKSIVIKDFSRFGRDYLEVGNYLEKILPVLGIRIISINDGFDSINSSGFTGGMSVALKNMLNAMYSRDLSRKVRSAMKTHAKNGEYMPAFPKYGYIKDPEDKHHLVIDPEAAEIVKLIFTMAADGKTKGQIAKYLNETHVLTCREYMCRKGMKMHRENEKEKKLWSVTTISDMLKNEVYLGKIIWNKKRVARTGSNKLVSNDKEEWIVVENAHEPIISDELFRKANEKAFTNQKRVLTKRGVACPIFFCPTCGRRLGFTSRETGYRCMQAHISGLSGCAESKMDRKEAEETVLDAAKNMAQFISEILEKKKSEWHKTILKEENIATLESEKKRLSSRKMKLYSDYRSEVLDKEGYMKELEKTTSRISEITLQITELENEIAIAKKKCDEATEKEMEVNEIAALQDFDKIQLSKIIEKVFIYEPGRMEINWKVDDIFYKEEKA

SEQ ID NO: 28277 - DNA, 50 bp, Hungatella hathewayi; identical to SEQ ID NO: 10887
  source 1..50: mol_type = genomic DNA

SEQ ID NO: 28278 - DNA, 40 bp, Hungatella hathewayi
  source 1..40: mol_type = genomic DNA
actgggagtgaggctggctgagagtctggggattccgttt

SEQ ID NO: 28279 - DNA, 40 bp, Hungatella hathewayi
  source 1..40: mol_type = genomic DNA
actgggagtgaggctggctccgagtctggggattccgttt

SEQ ID NO: 28280 - DNA, 50 bp, Hungatella hathewayi
  source 1..50: mol_type = genomic DNA
tttagaattttatagacaaaataacctgaacatttcaaaaaaagagtaaa

SEQ ID NO: 28281 - protein, 507 aa, Escherichia coli
MKRVISYIRFSSEKQAKGDSLRRQSKMVTDWLKAHPEYYLDQDLSFRDLGVSGFTGKHLKGGLGDFLTAIEKGLVKAGDTLLIESLDRLSRQDIDIASELLRRILRAGVDVVTLSDGEHYTRESLKDPLSLIKSILIMQRAHEESLRKSERVQAAWNRKKELISEGIKVSRRCPAWLRLNDDRKSFSVIPEKVETVKRCFQLRLEGKSIWEIVRTLNDEGHQTLNQYKAGKFGQTSVQDLLKNRSVIGYFTPKGCEEITGYFPSIIPETDFYKVQQLSYSRYGRKPASDKPLSVNLFKGVIRCSECGHALIITGFSDTRNGIYRCPLRNENRCSAKGLSRKQTDGTLLTLLSRLDRFDSDTTNTIDMLRLHREHISSNIEKLVQLSLEIEDLSAITSKLKQLKGELSQVDADIEKETQRLKSIDVGCLSDCDLTTKAGRIEAQLIIKSAVKEVVLNTAKRRCKVTFHNGRAITLPITENPSEDVTEAIQSLSEVTERGLIDVDEVII

SEQ ID NO: 28282 - DNA, 50 bp, Escherichia coli
  source 1..50: mol_type = genomic DNA
tagtgtatttagaccttgatgatttttattagatacgtttaaatacacta

SEQ ID NO: 28283 - DNA, 40 bp, Escherichia coli; identical to SEQ ID NO: 5188
  source 1..40: mol_type = genomic DNA

SEQ ID NO: 28284 - DNA, 40 bp, Escherichia coli; identical to SEQ ID NO: 5749
  source 1..40: mol_type = genomic DNA

SEQ ID NO: 28285 - DNA, 50 bp, Escherichia coli
  source 1..50: mol_type = genomic DNA
tagtgtcttgtaatcattatgatgaacaatagttactatgtaatgcaata

SEQ ID NO: 28286 - protein, 452 aa, Listeria seeligeri
MKAAIYIRVSTQEQVENYSIQAQTEKLTALCRSKDWDVYDTFIDGGYSGSNMNRPALNEMLSKLHEIDAVVVYRLDRLSRSQRDTITLIEEYFLKNNVEFVSLSETLDTSSPFGRAMIGILSVFAQLERETIRDRMVMGKIKRVESGLPLTTAKGRTFGYDVVDTKLYVNKEEAQHLQLIYDIFEEEKSITFLQKRLKKLGFKVKSYSSYNKWLMNDLYIGYVSYGDKVHVKGVHEPIISEEQFYRVQEVFSRMGKNPNMNKESSSLLNNLIVCEKCGLGFVHRVKDTVSRGKKYHYRYYSCKTYKHTHELEKCGNKIWRADKLEEMITDRVKNYSFATRNLDKEDELDSINAKLKVEHSKKKRLFDLYINGSYEVAELDKMMADIDAQINYYNSQIEANEELKRDKKVQESLAELATVDFDSLEFREKQIYLKSIINKIYISDEQVTIEWI

SEQ ID NO: 28287 - DNA, 50 bp, Listeria seeligeri
  source 1..50: mol_type = genomic DNA
tttagtacctcgttttctctcactggacggagaataaacgagaaactaaa

SEQ ID NO: 28288 - DNA, 40 bp, Listeria seeligeri; identical to SEQ ID NO: 21013
  source 1..40: mol_type = genomic DNA

SEQ ID NO: 28289 - DNA, 40 bp, Listeria seeligeri
  source 1..40: mol_type = genomic DNA
ttttggttcaagctacgatttacggaaagagggaaccaag

SEQ ID NO: 28290 - DNA, 50 bp, Listeria seeligeri
  source 1..50: mol_type = genomic DNA
tttaggacctacttttgtttcattttacagacaatatacacacaacttaa

SEQ ID NO: 28291 - protein, 452 aa, Listeria monocytogenes
MKAAIYIRVSTQEQVENYSIQAQTEKLTALCRSKDWDVYDTFIDGGYSGSNMNRPALNEMLSKLHEIDAVVVYRLDRLSRSQKDTITLIEEYFLKNNVEFVSLSETLDTSSPFGRAMIGILSVFAQLERETIRDRMVMGKIKRVESGLPLTTAKGRTFGYNVVDTKLYVNKEEAQHLQLIYDIFEEEKSITFLQKRLKKLGFKVKSYSSYNKWLMNDLYIGYVSYGDKVHVKGVHEAIISEEQFYRVQEIFSRMGKNPNMNKESSSLLNNLIVCEKCGLGFVHRVKDTVSRGKKYHYRYYSCKTYKHTHELEKCGNKIWRADKLEEIIINRVKNYSFATRNLDKEDELDSINAKLKVEHSKKKRLFDLYINGSYEVAELDKMMADIDAQINYYNSQIEANEELKRDKKVQESLAELATVDFDSLEFREKQIYLKSIINKIYISDEQVTIEWI

SEQ ID NO: 28292 - DNA, 50 bp, Listeria monocytogenes; identical to SEQ ID NO: 28287
  source 1..50: mol_type = genomic DNA

SEQ ID NO: 28293 - DNA, 40 bp, Listeria monocytogenes; identical to SEQ ID NO: 1298
  source 1..40: mol_type = genomic DNA

SEQ ID NO: 28294 - DNA, 40 bp, Listeria monocytogenes; identical to SEQ ID NO: 20354
  source 1..40: mol_type = genomic DNA

SEQ ID NO: 28295 - DNA, 50 bp, Listeria monocytogenes; identical to SEQ ID NO: 28290
  source 1..50: mol_type = genomic DNA

SEQ ID NO: 28296 - protein, 493 aa, Metabacillus halosaccharovorans
MLANDNIKHVAIYLRLSRDEENRGIEEMLASHRHTLTELCKQNGWSYEIFEEIASSRTIEKRDKMVELLERIQKNHFDAVVVMDIDRLSRNEFDSVEIKKILFMTGTSIVTPSKFYNLSKDEDNLLLGIQSLVAAQEYKQILKRMQRGKLYASKQGHWTNGIPPLGYDKNPKTKKLVPNEQAEHVKYIFNSLVNGKTISDVYHHLNKYGVTTRTGSNFHFNAILRIVNNETYKGTIVSNRVIGKHEAERPKSQWIIVENAHPAIIDEDTWERANKIVNTYSFSAPRSKNKIYPTTKLIYCGNCGKVQGAQYHPHINKLYLKMCKYCKNRTYLYEPILKIIKGEIATYRQKVLNSIEIIENNNDSGDTEYKIKQLESQIRRATQALDNIEILFEESEINLQQYRDRKAKRKQQLEQLNLELENLKTETPKDKVADLSEVLKQIDYLLGKWECLDGEGLTDEEVNRSLHYIIDRIEWKYGKNDEAPELKIKYYND

SEQ ID NO: 28297 - DNA, 50 bp, Metabacillus halosaccharovorans
  source 1..50: mol_type = genomic DNA
aaataagccctaagttctggacaaactggttgagaatttagggcttatta

SEQ ID NO: 28298 - DNA, 40 bp, Metabacillus halosaccharovorans
  source 1..40: mol_type = genomic DNA
aatgattttcacaggtccgaccggttcaggtaaaacgaca

SEQ ID NO: 28299 - DNA, 40 bp, Metabacillus halosaccharovorans
  source 1..40: mol_type = genomic DNA
aatgattttcacaggtccgaacggttcaggtaaaacgaca

SEQ ID NO: 28300 - DNA, 50 bp, Metabacillus halosaccharovorans
  source 1..50: mol_type = genomic DNA
aaataaaccagtccctggtgccaaaaaggttgggaactgatgccttatta

SEQ ID NO: 28301 - protein, 401 aa, Listeria seeligeri
MNRPALNEMLSKLHEIDAVVVYRLDRLSRSQKDTITLIEEYFLKNNVEFVSLSETLDTSSPFSRAMIGILSVFAQLERETIRDRMVMGQMKRVESGLPLITSRGRTFGYNVIDTKLYVNEEEAKHLQLVYDIFEEEKSITFLQKRLKKLGFKVETYSRYKNWLTNDLYIGYVSYGDKMHVKGIHDPVISEEQFYRVREIFSHMGKNPNLNKISASLLNNLIVCEKCGLGYVHRAKDTVSRGKKYHYRYYSCKTHKHTHELEKCGNKTWRADKLEEIIISRVKNYSFATRSVEKENETDGINAKLKVEHKKKKRLFDLYINGSYEVAELDRMMADIDAQINYYNSQIEANEELKKNKKIQGSLAELATVDFDALEFREKQIYLKSIINKIYIDGEQVTIEWI

SEQ ID NO: 28302 - DNA, 50 bp, Listeria seeligeri
  source 1..50: mol_type = genomic DNA
tttagtacatcgttttcgctcgctggacatagaataaatgagatactaat

SEQ ID NO: 28303 - DNA, 40 bp, Listeria seeligeri
  source 1..40: mol_type = genomic DNA
tttcgtgctatgataagttggacatagaaaggggacagat

SEQ ID NO: 28304 - DNA, 40 bp, Listeria seeligeri
  source 1..40: mol_type = genomic DNA
tttcgtgctatgataagttcaacatagaaaggggacagat

SEQ ID NO: 28305 - DNA, 50 bp, Listeria seeligeri
  source 1..50: mol_type = genomic DNA
tctagtacctcttgttcatttgctcaacaaataatagatgtgataccact

SEQ ID NO: 28306 - protein, 418 aa, Listeria seeligeri
MSVKRLGCLRYIYRRRLQRFKYESSRLSKLHEIDAVVVYRLDRLSRSQKDTITLIEEYFLKNNVEFVSLSETLDTSSPFSRAMIGILSVFAQLERETIRDRMVMGQMKRVESGLPLITSRGRTFGYNVIDTKLYVNEEEAKHLQLIYDIFEEEKSITFLQKRLKKLGFKVETYSRYKNWLTNDLYIGYVSYGDKVHVKGIHDPVISEEQFYRVREIFSHMGKNPNLNKISASLLNNLIVCEKCGLGYVHRAKDTVSRGKKYHYRYYSCKTHKHTHELEKCGNKTWRADKLEEIIISRVKNYSFATRSVEKENETDGINAKLKVEHKKKKRLFDLYINGSYEVAELDRMMADIDAQINYYNSQIEANEELKKNKKIQGSFAELATVDFDALEFREKQIYLKSIINKIYIDGEQVTIEWI

SEQ ID NO: 28307 - DNA, 50 bp, Listeria seeligeri; identical to SEQ ID NO: 28302
  source 1..50: mol_type = genomic DNA

SEQ ID NO: 28308 - DNA, 40 bp, Listeria seeligeri
  source 1..40: mol_type = genomic DNA
tttcgtgctgtgataagttggacatagaaaggggacagag

SEQ ID NO: 28309 - DNA, 40 bp, Listeria seeligeri
  source 1..40: mol_type = genomic DNA
tttcgtgctgtgataagttcaacatagaaaggggacagag

SEQ ID NO: 28310 - DNA, 50 bp, Listeria seeligeri; identical to SEQ ID NO: 28305
  source 1..50: mol_type = genomic DNA

SEQ ID NO: 28311 - protein, 418 aa, Listeria seeligeri; identical to SEQ ID NO: 28306

SEQ ID NO: 28312 - DNA, 50 bp, Listeria seeligeri; identical to SEQ ID NO: 28302
  source 1..50: mol_type = genomic DNA

SEQ ID NO: 28313 - DNA, 40 bp, Listeria seeligeri
  source 1..40: mol_type = genomic DNA
tttcgtgctatgataagttggacatagaaaggggacagag

SEQ ID NO: 28314 - DNA, 40 bp, Listeria seeligeri
  source 1..40: mol_type = genomic DNA
tttcgtgctatgataagttcaacatagaaaggggacagag

SEQ ID NO: 28315 - DNA, 50 bp, Listeria seeligeri; identical to SEQ ID NO: 28305
  source 1..50: mol_type = genomic DNA

SEQ ID NO: 28316 - protein, 418 aa, Listeria seeligeri
MSVKRLGCLRYIYRRRLQRFKYESSRLSKLHEIDAVVVYRLDRLSRSQKDTITLIEEYFLKNNVEFVSLSETLDTSSPFSRAMIGILSVFAQLERETIRDRMVMGQMKRVESGLPLITSRGRTFGYNVIDTKLYVNEEEAKHLQLIYDIFEEEKSITFLQKRLKKLGFKVETYSRYKKWLTNDLYIGYVSYGDKVHVKGIHDPVISEEQFYRVREIFSHMGKNPNLNKISALLLNNLIVCEKCGLGYVHRAKDTVSRGKKYHYRYYSCKTHKHTHELEKCGNKTWRADKLEEIIISRVKNYSFATRSVEKENETDGINAKLKVEHKKKKILFDLYINGSYEVAELDRMMADIDAQINYYNSQIEANEELKKNKKIQGSFAELATVDFDALEFREKQIYLKSIINKIYIDGEQVTIEWI

SEQ ID NO: 28317 - DNA, 50 bp, Listeria seeligeri; identical to SEQ ID NO: 28302
  source 1..50: mol_type = genomic DNA

SEQ ID NO: 28318 - DNA, 40 bp, Listeria seeligeri; identical to SEQ ID NO: 28313
  source 1..40: mol_type = genomic DNA

SEQ ID NO: 28319 - DNA, 40 bp, Listeria seeligeri; identical to SEQ ID NO: 28314
  source 1..40: mol_type = genomic DNA

SEQ ID NO: 28320 - DNA, 50 bp, Listeria seeligeri; identical to SEQ ID NO: 28305
  source 1..50: mol_type = genomic DNA

SEQ ID NO: 28321 - protein, 418 aa, Listeria seeligeri
MSVKRLGCLRYIYRRRLQRFKYESSRLSKLHEIDAVVVYRLDRLSRSQKDTITLIEEYFLKNNVEFVSLSETLDTSSPFSRAMIGILSVFAQLERETIRDRMVMGQMKRVESGLPLITSRGRTFGYNVIDTKLYVNEEEAKHLQLIYDIFEEEKSITFLQKRLKKLGFKVETYSRYKKWLTNDLYIGYVSYGDKVHVKGIHDPVISEEQFYRVREIFSHMGKNPNLNKISALLLNNLIVCEKCGLGYVHRAKDTVSRGKKYHYRYYSCKTHKHTHELEKCGNKTWRADKLEEIIISRVKNYSFATRSVEKENETDGINAKLKVEHKKKKRLFDLYINGSYEVAELDRMMADIDAQINYYNSQIEANEELKKNKKIQGSFAELATVDFDALEFREKQIYLKSIINKIYIDGEQVTIEWI

SEQ ID NO: 28322 - DNA, 50 bp, Listeria seeligeri; identical to SEQ ID NO: 28302
  source 1..50: mol_type = genomic DNA

SEQ ID NO: 28323 - DNA, 40 bp, Listeria seeligeri; identical to SEQ ID NO: 28313
  source 1..40: mol_type = genomic DNA

SEQ ID NO: 28324 - DNA, 40 bp, Listeria seeligeri; identical to SEQ ID NO: 28314
  source 1..40: mol_type = genomic DNA

SEQ ID NO: 28325 - DNA, 50 bp, Listeria seeligeri; identical to SEQ ID NO: 28305
  source 1..50: mol_type = genomic DNA

SEQ ID NO: 28326 - protein, 418 aa, Listeria seeligeri
MSVKRLGCLRYIYRRRLQRFKYESSRLSKLHEIDAVVVYRLDRLSRSQKDTITLIEEYFLKNNVEFVSLSETLDTSSPFSRAMIGILSVFAQLERETIRDRMVMGQMKRVESGLPLITSRGRTFGYNVIDTKLYVNEEEAKHLQLIYDIFEEEKSITFLQKRLKKLGFKVETYSRYKKWLTNDLYIGYVSYGDKVHVKGIHDPVISEEQFYRVREIFSHMGKNPNLNKISALLLNNLIVCEKCGLGYVHRAKDTVSRGKKYHYRYYSCKTHKHTHELGKCGNKTWRADKLEEIIISRVKNYSFATRSVEKENETDGINAKLKVEHKKKKRLFDLYINGSYEVAELDRMMADIDAQINYYNSQIEANEELKKNKKIQGSFAELATVDFDALEFREKQIYLKSIINKIYIDGEQVTIEWI

SEQ ID NO: 28327 - DNA, 50 bp, Listeria seeligeri; identical to SEQ ID NO: 28302
  source 1..50: mol_type = genomic DNA

SEQ ID NO: 28328 - DNA, 40 bp, Listeria seeligeri; identical to SEQ ID NO: 28313
  source 1..40: mol_type = genomic DNA

SEQ ID NO: 28329 - DNA, 40 bp, Listeria seeligeri; identical to SEQ ID NO: 28314
  source 1..40: mol_type = genomic DNA

SEQ ID NO: 28330 - DNA, 50 bp, Listeria seeligeri; identical to SEQ ID NO: 28305
  source 1..50: mol_type = genomic DNA

SEQ ID NO: 28331 - protein, 620 aa, Vibrio parahaemolyticus
MRTTPKIYNYARVSTTKQLQGVGLETQQQRSILESLSQEHNLPIHDENFVDQGLSAYHGKHREGVLGLVLSHIESGEISSGSILVVFSLDRLSRETVNVAMEQLLSIINRGVRVYTHIDGKMFDANSPNLSADLIVSVITMERANEESRTKSQRVKGAAKEGLKKWKATGEPQSSLGRVPFWIDQPTNTFNKNADGVLKAIELYLKGVGCLKIKQHLDEHYPYEAVRKKGRKTSQTDKWDFTAINQVFTKPSLIGEKHITVGGVKYKLEDYYPPLIDVATFQKLQQIKSLKAGRAPAKPTTHLLKGLVKCGVCGGRMVFIDKGRGNQAINYVCSNAAKGNHQRENYSVQMLELAIIRLSNDELLRSKIDENSYEAERAQLLKQKDDLEQELIELKSRYIQKKRKTILELIEDTEDRLESVISELEIIKPINIIQAFHELSDIKFDAEMMNDFNHPLRHELKLNLNKVIDHIQINRTQELSNITKSGYVSCISITVVFKNKQRRVLTSTPFQYFDNVQGKNIFVGYKYEYDVPFEELTRNKKLIVNLLSELHCYDLLHKLYPSKGRYEWTDMPIDFGTVHQKGTNLLGALKHMIEAGSWEYGIKKQFSEGIQYTIIEENSI

SEQ ID NO: 28332 - DNA, 50 bp, Vibrio parahaemolyticus
  source 1..50: mol_type = genomic DNA
agaagaaatttaatatttattggcttgctaataaaaaacaatttccttcg

SEQ ID NO: 28333 - DNA, 40 bp, Vibrio parahaemolyticus; identical to SEQ ID NO: 23528
  source 1..40: mol_type = genomic DNA

SEQ ID NO: 28334 - DNA, 40 bp, Vibrio parahaemolyticus
  source 1..40: mol_type = genomic DNA
gaggaatatttgctgtggtaagataaaaaaggctggccga

SEQ ID NO: 28335 - DNA, 50 bp, Vibrio parahaemolyticus
  source 1..50: mol_type = genomic DNA
agaaaccaagatatatttatcgacaagctgttaaaggatcatttccttcg

SEQ ID NO: 28336 - protein, 550 aa, Stenotrophomonas maltophilia
MATKARVYSYLRFSDPKQAAGSSADRQLEYARRWASEHGMTLDSALSMQDEGLSAYHQRHVKKGALGVFLAAIDEGRIPSGSVLIVEGLDRLSRAEPIQAQAQLAQIINAGITVVTASDGREYNRAGLKAQPMDLVYSLLVMIRAHEESDTKSKRVRAAIHRQCQGWIAGTWRGVIRNGRDPHWLELTKPGEFKLVPERAEAVRLAVRMFREGNGAVTIMRALEEQGLQITNGGNPAGQLYKIVRNRALVGEKVLEVEGQEYRLPGYYPPLLTAEEFADLQHVAGQRIRRKGTSEIPSLIAGMRVTYCGYCGSAMVAQNLMNRGRRADGQPQHGHRRMICVGNSQGSGCAVSGSCSVVPIEHALMTFCADQMNLTRLHEGGNREASISGQLAVARAAVADTTAKIEKVTDALLSAAAGQAPAAFMRRARELEETLAGQQAEVDALEHELASAAATPPPALAQAWADLVEGVRALDYDARIKARQMVADTFERIAIYHRGIEPVQTRSWKGTIDLVLVAKRGSTRVLHVDRQTGEWRAGEELTTEALPAPL

SEQ ID NO: 28337 - DNA, 50 bp, Stenotrophomonas maltophilia
  source 1..50: mol_type = genomic DNA
agtatatttcagcgatctttagggcaccctaaagaaataaaccctatact

SEQ ID NO: 28338 - DNA, 40 bp, Stenotrophomonas maltophilia
  source 1..40: mol_type = genomic DNA
atcgacaagggccttcgggcagccaaggctgacgaagccg

SEQ ID NO: 28339 - DNA, 40 bp, Stenotrophomonas maltophilia
  source 1..40: mol_type = genomic DNA
atcgacaagggccttcgggctgccaaggctgacgaagccg

SEQ ID NO: 28340 - DNA, 50 bp, Stenotrophomonas maltophilia
  source 1..50: mol_type = genomic DNA
aatatatatgtagaatagttagctcttcctaaagaattgaaccctttacc

SEQ ID NO: 28341 - protein, 550 aa, Stenotrophomonas maltophilia; identical to SEQ ID NO: 28336

SEQ ID NO: 28342 - DNA, 50 bp, Stenotrophomonas maltophilia; identical to SEQ ID NO: 28337
  source 1..50: mol_type = genomic DNA

SEQ ID NO: 28343 - DNA, 40 bp, Stenotrophomonas maltophilia; identical to SEQ ID NO: 21998
  source 1..40: mol_type = genomic DNA

SEQ ID NO: 28344 - DNA, 40 bp, Stenotrophomonas maltophilia
  source 1..40: mol_type = genomic DNA
atcgacgagggccttcgggctgccaaggctgacgaagccg

SEQ ID NO: 28345 - DNA, 50 bp, Stenotrophomonas maltophilia; identical to SEQ ID NO: 28340
  source 1..50: mol_type = genomic DNA

SEQ ID NO: 28346 - protein, 550 aa, Stenotrophomonas maltophilia
MATKARVYSYLRFSDPKQAAGSSADRQLEYARRWASEHGMTLDSALSMQDEGLSAYHQRHVKRGALGVFLAAIDEGRIPSGSVLIVEGLDRLSRAEPIQAQAQLAQIINAGITVVTASDGREYNRAGLKAQPMDLVYSLLVMIRAHEESDTKSKRVRAAIHRQCQGWIAGTWRGVIRNGRDPHWLELTKPGEFKLVPERAEAVRLAVRMFREGNGAVTIMRALEEQGLQITNGGNPAGQLYKIVRNRALVGEKVLEVEGQEYRLPGYYPPLLTAEEFADLQHVAGQRIRRKGTSEIPSLIAGMRVTYCGYCGSAMVAQNLMNRGRRADGQPQHGHRRMICVGNSQGSGCAVSGSCSVVPIEHALMTFCADQMNLTRLHEGGNREASISGQLAVARAAVADTTAKIEKVTDALLSAAAGQAPAAFMRRARELEETLAGQQAEVDALEHELASAAATPPPALAQAWAELVEGVRALDYDARIKARQMVADTFERIAIYHRGIEPVQTRSWKGTIDLVLVAKRGSTRVLHVDRQTGEWRAGEELTTEALPAPL

SEQ ID NO: 28347 - DNA, 50 bp, Stenotrophomonas maltophilia
  source 1..50: mol_type = genomic DNA
agtatatttcaacgatctttagggcaccctaaagaaataaaccctatact

SEQ ID NO: 28348 - DNA, 40 bp, Stenotrophomonas maltophilia; identical to SEQ ID NO: 28338
  source 1..40: mol_type = genomic DNA

SEQ ID NO: 28349 - DNA, 40 bp, Stenotrophomonas maltophilia; identical to SEQ ID NO: 28339
  source 1..40: mol_type = genomic DNA

SEQ ID NO: 28350 - DNA, 50 bp, Stenotrophomonas maltophilia; identical to SEQ ID NO: 28340
  source 1..50: mol_type = genomic DNA

SEQ ID NO: 28351 - protein, 550 aa, Stenotrophomonas maltophilia
MATKARVYSYLRFSDPKQAAGSSADRQLEYARRWASEHGMTLDSALSMQDEGLSAYHQRHVKKGALGVFLAAIDEGRIPSGSVLIVEGLDRLSRAEPIQAQAQLAQIINAGITVVTASDGREYNRAGLKAQPMDLVYSLLVMIRAHEESDTKSKRVRAAIHRQCQGWIAGTWRGVIRNGRDPHWLELTKPGEFKLVPDRAEAVRLAVRMFREGNGAVTIMRALEEQGLQITNGGNPAGQLYKIVRNRALVGEKVLEVEGQEYRLPGYYPPLLTAEEFADLQHVAGQRIRRKGTSEIPSLIAGMRVTYCGYCGSAMVAQNLMNRGRRADGQPQHGHRRMICVGNSQGSGCAVSGSCSVVPIEHALMTFCADQMNLTRLHEGGNREASISGQLAVARAAVADTTAKIEKVTDALLSAAAGQAPAAFMRRARELEETLAGQQAEVDALEHELASAAATPPPALAQAWADLVEGVRALDYDARIKARQMVADTFERIAIYHRGIEPVQTRSWKGTIDLVLVAKRGNTRVLHVDRQTGEWRAGEELTTGALPAPL

SEQ ID NO: 28352 - DNA, 50 bp, Stenotrophomonas maltophilia; identical to SEQ ID NO: 28337
  source 1..50: mol_type = genomic DNA

SEQ ID NO: 28353 - DNA, 40 bp, Stenotrophomonas maltophilia; identical to SEQ ID NO: 28338
  source 1..40: mol_type = genomic DNA

SEQ ID NO: 28354 - DNA, 40 bp, Stenotrophomonas maltophilia; identical to SEQ ID NO: 28339
  source 1..40: mol_type = genomic DNA

SEQ ID NO: 28355 - DNA, 50 bp, Stenotrophomonas maltophilia; identical to SEQ ID NO: 28340
  source 1..50: mol_type = genomic DNA

SEQ ID NO: 28356 - protein, 506 aa, Micrococcus luteus
MPPRAVIYARISVASEESVSIERQLEAARQYAAARGWEVAAVFTDEGISATHNSPEARSGWSALLRYDQPYDFVVVWKIDRVARRITDFWDAVKTLQGRDRALVSIGDNLDMSSTVGQIVAGVLAGFAQLEAEAIRDRVTAARRHLIQNGRLPGGTVPYGWRSVPNPDGAGKVLAQDPDRIEYVRGAADRVRGGATLYSVVQWLDEVEAPLPRASQSRRREGSGWSYTTVERLLRNPVLAGMVSFNPGNSSKMRGSEVLRDERGLPVVDPAVAIMSPSDWRAMVAALDANDTGRAKPHALRAKTSALLSGLVWCGHCEDSDGHPVRMHRGTTQGRESYSCPRCHQTISRIQDYVVQQFLWAKGEHVRWTPVREVYESGTAALPEIEARLDELDAAIRDAPDRAARRRLQEQQDALLDLRDEKRAEAPRTVLKYEDAGFFAEAWAEAGGVEAQRAVLDDALERITVVRGRTGRGLDKSRLTFSWRHPDQVGPLPEPSQEELASWTEG

SEQ ID NO: 28357 - DNA, 50 bp, Micrococcus luteus
  source 1..50: mol_type = genomic DNA
ccaccttgttctctaccggtcagggtagtgccaggcggggaacaagtatg

SEQ ID NO: 28358 - DNA, 40 bp, Micrococcus luteus
  source 1..40: mol_type = genomic DNA
ggtggtcttgcccgcctgggtggccccgctgacgaggatg

SEQ ID NO: 28359 - DNA, 40 bp, Micrococcus luteus
  source 1..40: mol_type = genomic DNA
ggtggtcttgcccgcctggccggccccgctgacgaggatg

SEQ ID NO: 28360 - DNA, 50 bp, Micrococcus luteus
  source 1..50: mol_type = genomic DNA
ccaccatgtcagtcactgctgaggccagggccaagcccaggaaaaggacg

SEQ ID NO: 28361 - protein, 479 aa, Mycobacteroides abscessus
MGVAEDLDISAGKTTPFNRPQLGKWLKRPGDFDVIVFYRVDRIVRRLFDLSDLIKWTRDHRVTLVSATESHFDLSTEWGDVIALLVAKVAEMELAAISERNRSAAQHNLRVGKYRGGPAPWGYMPVHTDEGWKLVQDPEQVVVIHEVVERVLSGEPLRSVAHDLTERAVLTPRDRFAQLRGREVKGYTWHPGGLKRALTSPTLLGRIAVTDTSKGAEDRSEAALIVSDDGTPFTRCEPILSRDVFDRVGVELAGRENRKEPTKRSTSLLLGIIHCDVCGKPAYKLKGGEGRKPRYRCASAQYKNPCANRSIPLDLAEHHVEQNIMSAFGDMPRMVRVWSPGSDHSPELAEVNATLADLTDQLGTPAFRRGTPQRARLDARIEALTTRQAELSSKPTHPAGWTYEPTDDLVKDWWASASIEERNVWLRQMGFRVVWRSHSEGTRTVVDDFKMSGSVADLERFVEDSEWTVDVESLTAGRG

SEQ ID NO: 28362 - DNA, 50 bp, Mycobacteroides abscessus
  source 1..50: mol_type = genomic DNA
tgatggcaaaacgaagcattcgcgtacgcgaatgttgggcttttatgccc

SEQ ID NO: 28363 - DNA, 40 bp, Mycobacteroides abscessus
  source 1..40: mol_type = genomic DNA
gggaatggtgtccgtcgagtatgcgactgtggccataccc

SEQ ID NO: 28364 - DNA, 40 bp, Mycobacteroides abscessus; identical to SEQ ID NO: 28363
  source 1..40: mol_type = genomic DNA

SEQ ID NO: 28365 - DNA, 50 bp, Mycobacteroides abscessus; identical to SEQ ID NO: 6915
  source 1..50: mol_type = genomic DNA

SEQ ID NO: 28366 - protein, 528 aa, Mycobacteroides abscessus
MTSNTQPRALIVTRLSRVTEATTSPERQRAACEDLCRQRGYKVVGEARDLDVSAGKTTPFNRPQLGEWLKRPHEFDVIVVFRVDRIVRRLFDLADVIRWCQEHRVAFVSATESFLDLTQPFGDIIALLVAKVAEMELAAISERNRSAAQHNLRAGKYRGGPAPWGYMPVHTDEGWKLVQDPEQVVVIHEVVERVLSGEPLRSVAHDLTERGVLTPRDRFAQLRGREVKGYTWHPGGLKRALTSPTLLGRIAVTDTSQGAQDRPEASLVVSDDGTPFVRTEPIIERDKFDRVGVELAGRENRKEPTKRTTSLLLGIIHCGVCGKPAYKLKGGTGRKPRYRCASSQYKNPCSNRSIPLEYAEDEVESKIMHAFGFHPRMLRVWSPGSDHSSDLAEVDAALADLVDSLGTPAFRRGTPARAKLDARIEALATRRDELSSKPTQPAGWTYEATDELVIEWWATATNEERNVWLRQLDIRVEWRSHSEGTRTVVDEFKMSGGVDALQRFVEDGEWTFDVGTTVDIESLTAGRG

SEQ ID NO: 28367 - DNA, 50 bp, Mycobacteroides abscessus; identical to SEQ ID NO: 28362
  source 1..50: mol_type = genomic DNA

SEQ ID NO: 28368 - DNA, 40 bp, Mycobacteroides abscessus
  source 1..40: mol_type = genomic DNA
cgcgatagtcccgatcgcgtattcgaccgtggacatgcca

SEQ ID NO: 28369 - DNA, 40 bp, Mycobacteroides abscessus; identical to SEQ ID NO: 28368
  source 1..40: mol_type = genomic DNA

SEQ ID NO: 28370 - DNA, 50 bp, Mycobacteroides abscessus; identical to SEQ ID NO: 6915
  source 1..50: mol_type = genomic DNA

SEQ ID NO: 28371 - protein, 479 aa, Mycobacteroides abscessus
MDVSAGKTTPFDRPQLGKWLKRPGEFDVIVVFRVDRIVRALFDLADLIKWCQEHRVALVSATEAFIDLTAPFGDIVALLVAKVAEMELAAISERNRSAAQHNLRAGKYRGGPAPWGYMPVHTDEGWKLVQDAEQVVVIHEVVERVLSGEPLRSVAHDLTERGVLTPRDRFAQLRGREVKGYTWHPGGLKRALTSPTLLGRIAVTDTSIGAQDRPEASLVVSDDGTPFVRAEPIIDRDKFDRVGVELAGRENRKEPTKRTTSLLLGIIHCGVCGKPAYKLKGGAGRKPRYRCASSQYKNPCSNRSIPLEYAEDEVESKIMHAFGFHPRMVRVWSPGSDSSSDLAEVNAALADLTDQLGTPAFRRGTPQRARLDAKIDALATRQAELSSKPTQPAGWTYEATDELVIEWWATATNEERNVWLRQLDIRVEWRSRSEGTRTVVDEFKMSGGVDALERFVEDGEWTLDVGTTVDIESLTAGRG

SEQ ID NO: 28372 - DNA, 50 bp, Mycobacteroides abscessus; identical to SEQ ID NO: 28362
  source 1..50: mol_type = genomic DNA

SEQ ID NO: 28373 - DNA, 40 bp, Mycobacteroides abscessus
  source 1..40: mol_type = genomic DNA
gggtatggccacagtcgcatactcgacggacaccattccc

SEQ ID NO: 28374 - DNA, 40 bp, Mycobacteroides abscessus; identical to SEQ ID NO: 28373
  source 1..40: mol_type = genomic DNA

SEQ ID NO: 28375 - DNA, 50 bp, Mycobacteroides abscessus; identical to SEQ ID NO: 6915
  source 1..50: mol_type = genomic DNA

SEQ ID NO: 28376 - protein, 510 aa, Iodidimonas gelatinilytica
MSEKKQPAVIYCRVSDTKQKTEGHGLESQEVRCLEYAKSKGYEVVATYKDDASGGDLKRPQSEEMLKYLRANRRVPHVIIIEDISRLARDTRIWMWFRDELAKTNSTLECPSFQFGETSEAWLMEMMSVNFAEYHRLKNAEQTRNRMWGRMMNGYWVFKPPIGFKYEKVGPHGKLLVRDEPVASILQEALERYADGRLQTLSEVKRYLESEPDFPKDTKQGEVRIQRIREWLTQVLYAGYIERPDWDIELREAQHDGIISLHTYRKIQDRLAGRKTNTATAAVRQDLREEMPLRGFVLCGDCDRPLTGGRSKGRKKYYVYYECHNKECVSHRKSIRKADIEKDFEMLLATATPTRKLFEFVHTMLKDLWEKHGERLVEQRKSLTHKIREVDAKIETLVDRTLETSSQTLIERYEARLRDLELEKAALVEQSTLPVGPQDTFKRTFRTAMDFLGNPLKLWNSSRFEDKRAVLKLTFADQLAYKRNEGFRTANFSLPFKLLGDFSALESKMV

SEQ ID NO: 28377 - DNA, 50 bp, Iodidimonas gelatinilytica
  source 1..50: mol_type = genomic DNA
gatttttcggccctagaaagcaagatggtgcacctaagcggagaaacttc

SEQ ID NO: 28378 - DNA, 40 bp, Iodidimonas gelatinilytica
  source 1..40: mol_type = genomic DNA
gaatggaaatacaggaaaagtggtgcccgctgccggactc

SEQ ID NO: 28379 - DNA, 40 bp, Iodidimonas gelatinilytica
  source 1..40: mol_type = genomic DNA
gaatggaaatacaggaaaaaaggtgcccgctgccggactc

SEQ ID NO: 28380 - DNA, 50 bp, Iodidimonas gelatinilytica
  source 1..50: mol_type = genomic DNA
gaattttctccttttaaaaggtagaaggagttcctagaggaagaaacttc

SEQ ID NO: 28381 - protein, 503 aa, Aeromonas hydrophila
MGREKHATLKSTAYSYIRLSSRQQILGDGQRRQLEAALTYCRDNNLTLSQKTFKDLGVSAYKEVDRPSLSDLHQCIANGTIKAGDVIILEKLDRLSRKGISATQRMLQEILNQGVEVVSLMDGMRLDRNSLDDLTSVIRIAIAADLANQESSTKSKRVQANKDQMRERIKAGIPIPQKLPFWLSFVDGKYVFNEKQQILERMIELKKSGTSLMKIAGILNEENVKSPNVRGIWSPSTLRDVLRNPILYGAHQLTVKVKGKYIPSELVKDYYPAVMTYSEFTQLNNKAIVRPAGTSETNHISGLVYCGVCGNKMSNKSRTTSKGKVNYYYCRQSMVKACGFRTHIRDLHKMVIKNISHLTVTKPTQSVDINALLLELDQVESRVKDLTAEFSNLNSALPVSAISAAISSMEERKKELNAKIREASTIEPDALQSVMKHVDDPKKFNIDLKKIIKRIEVSPYGEYQKIKVIRFDNHSIMWRTGGWIKGVSDTEKSLNMVMELLEE

SEQ ID NO: 28382 - DNA, 50 bp, Aeromonas hydrophila
  source 1..50: mol_type = genomic DNA
ttgtgatcttttgattgttatcgcaaggtgttacaatcaaaaacacacac

SEQ ID NO: 28383 - DNA, 40 bp, Aeromonas hydrophila; identical to SEQ ID NO: 26538
  source 1..40: mol_type = genomic DNA

SEQ ID NO: 28384 - DNA, 40 bp, Aeromonas hydrophila
  source 1..40: mol_type = genomic DNA
ctgcgaagcccgctatcgctcgggattccacgcccacgag

SEQ ID NO: 28385 - DNA, 50 bp, Aeromonas hydrophila
  source 1..50: mol_type = genomic DNA
ttgagatctctttctctttctctctctctgttacaaggtgaaatacatac

SEQ ID NO: 28386 - protein, 627 aa, Citrobacter werkmanii
MKKIFLYHRVSTEQQAEDGSGMARQADLLQSYIDRTRIVESMDDPVPVVLEDGGLSAFKGHNFLHGQLGRWMEEVRAGMWDGSILVVENIDRFSRQNPFNVMGYLHDLINHSVAIHDVNMNMVISRENSAMLPMVMMQAQRAYDESKFKSNRIRAGWAKKRDNAFNNGTIVTNKRPKWIDIVDNQYVLNAKARIVTEIFRLYQTGIGCPTIAKTLREMGDDWRFDRIWTGEAVHKVLRNRRVTGVIFISELIRDYNSTDNPIDQKRYEMNVYPPVIGEDEFNLVQQLLSSRRSGKATGGKRITKKRNDDGSVVTDVNGYPTYDFIDGGKITKSNIFNAVCRCAKCGSPMYHNIVVSKRTPAKATSPVVQEYRYIRCLNERDGLCDNKSLRYDVIERFIMEHIKGLDFNTIIQENRINPEVELIRLKLEQEREHIREYEHGIKRLRNSGKKVPFDVLVELEDAQERLKALEDKQATFADVHVDLDILKHVDLDALYDATNIELRGRVENELSKVLEKVELHRDGKNYVITFKYRRVDVLKHVLMITASKTPVLVSGVCIETVGDTVAYSTPSFDIIVVDGGDLCFQPIDDEPLSIIDYSFLMNYVDGTEGADVVAAWMKHNMNFLFTR

SEQ ID NO: 28387 - DNA, 50 bp, Citrobacter werkmanii
  source 1..50: mol_type = genomic DNA
tttgtacaatgtttccactattcaaatgaatagtacatagttcaaagtaa

SEQ ID NO: 28388 - DNA, 40 bp, Citrobacter werkmanii
  source 1..40: mol_type = genomic DNA
tttgcctgataatcatacaagtaagtgccattacagcaaa

SEQ ID NO: 28389 - DNA, 40 bp, Citrobacter werkmanii
  source 1..40: mol_type = genomic DNA
tttgcctgataatcatacaattaagtgccattacagcaaa

SEQ ID NO: 28390 - DNA, 50 bp, Citrobacter werkmanii
  source 1..50: mol_type = genomic DNA
gttgcacaaaatcaccacggtccaatttaagagtactttcctcatactaa

SEQ ID NO: 28391 - protein, 627 aa, Klebsiella pneumoniae; identical to SEQ ID NO: 15426

SEQ ID NO: 28392 - DNA, 50 bp, Klebsiella pneumoniae; identical to SEQ ID NO: 1957
  source 1..50: mol_type = genomic DNA

SEQ ID NO: 28393 - DNA, 40 bp, Klebsiella pneumoniae
  source 1..40: mol_type = genomic DNA
tttgcgtgataatcatacaaataggtgccattacaacaaa

SEQ ID NO: 28394 - DNA, 40 bp, Klebsiella pneumoniae
  source 1..40: mol_type = genomic DNA
tttgcgtgataatcatacaattaggtgccattacaacaaa

SEQ ID NO: 28395 - DNA, 50 bp, Klebsiella pneumoniae; identical to SEQ ID NO: 28390
  source 1..50: mol_type = genomic DNA

SEQ ID NO: 28396 - protein, 627 aa, Klebsiella pneumoniae; identical to SEQ ID NO: 15436

SEQ ID NO: 28397 - DNA, 50 bp, Klebsiella pneumoniae; identical to SEQ ID NO: 1957
  source 1..50: mol_type = genomic DNA

SEQ ID NO: 28398 - DNA, 40 bp, Klebsiella pneumoniae; identical to SEQ ID NO: 28393
  source 1..40: mol_type = genomic DNA

SEQ ID NO: 28399 - DNA, 40 bp, Klebsiella pneumoniae; identical to SEQ ID NO: 28394
  source 1..40: mol_type = genomic DNA

SEQ ID NO: 28400 - DNA, 50 bp, Klebsiella pneumoniae; identical to SEQ ID NO: 28390
  source 1..50: mol_type = genomic DNA

SEQ ID NO: 28401 - protein, 627 aa, Klebsiella michiganensis; identical to SEQ ID NO: 15426

SEQ ID NO: 28402 - DNA, 50 bp, Klebsiella michiganensis; identical to SEQ ID NO: 1957
  source 1..50: mol_type = genomic DNA

SEQ ID NO: 28403 - DNA, 40 bp, Klebsiella michiganensis
  source 1..40: mol_type = genomic DNA
tttgcatgataatcatacaaataagtgccattgcagcaaa

SEQ ID NO: 28404 - DNA, 40 bp, Klebsiella michiganensis
  source 1..40: mol_type = genomic DNA
tttgcatgataatcatacaattaagtgccattgcagcaaa

SEQ ID NO: 28405 - DNA, 50 bp, Klebsiella michiganensis; identical to SEQ ID NO: 28390
  source 1..50: mol_type = genomic DNA

SEQ ID NO: 28406 - protein, 582 aa, Enterobacter kobei
MIALAHLSFLSLLFAIGKGAVVRSAKAYSYVRFSTPKQAQGDSYRRQLQQARDYCTTHNLVLDDKTIEDFGVSAFRGSNRTDGALGRFIDAVKSGEIEKGSYLLVESVDRLSRQAIEEALTQFLEIVREGIVIVTLSDNQVFRSGEVDFTKLIVSIVYMARANDESEMKSRRSRAAWSNGRQQARENNKVIANSRLPSWLTLEGDKIVPIPERVAIVNEMFQMVRSGQGYQQIAKVFRDKDYKTFGQGKAWRPAGIQSVVKSRAVIGEFQPHIIYEGKRVPDGDPLFGYYPTVVSPAIFAEVQHIVDKRNNHSGSYRKGLYNNLFSGVIRCQCGELLRFHNKGSRGLVRNYLVCPMEGVTGCQLPYLLYNKIEPQLLQAISKLSVVMKQRMPQKEKTSLLKDELAVLRGQLEIETRKSKKAAQAMLELDDDAVFRSLYEECKANCQSLEKKILQIENEIVGLELSARTLFQLLSPEDLSTTEQRQRFNSQLKLAVKIEFIYEHYGLVAVIKNLEDELLLEQAFGHKLMNSIVHDFEGHVVVKTISDSPYIDPSWADEEREEYTKGISVEFDQCGDFNIDNFK

SEQ ID NO: 28407 - DNA, 50 bp, Enterobacter kobei
  source 1..50: mol_type = genomic DNA
taaggtccttatataaaaaatagctcgcatactttaggagaaaggccata

SEQ ID NO: 28408 - DNA, 40 bp, Enterobacter kobei; identical to SEQ ID NO: 27543
  source 1..40: mol_type = genomic DNA

SEQ ID NO: 28409 - DNA, 40 bp, Enterobacter kobei
  source 1..40: mol_type = genomic DNA
gcgggcttttttgatggtgctgcaatttttaatgccgtac

SEQ ID NO: 28410 - DNA, 50 bp, Enterobacter kobei
  source 1..50: mol_type = genomic DNA
taaattcctgctttagaaaatagcctgtattgtttgtttttaaagctata

SEQ ID NO: 28411 - protein, 539 aa, Coprococcus eutactus
MLRQATQNLITALYPRLSHEDELQGESNSISNQKRILEAYAKQNGFTNLRWYTDDGYSGANFQRPGFQAMLADIEAGKVGTVIVKDMSRLGRNYLQVGFYTEMLFPQKGVRFIAVNDNVDSANGGMDNDFTPLRNLFNEWLVRDTSKKIKAVKKAKGMSGKPVTSKPVYGYLMDKDENYIVDEEAAPVVRQIYQLCLAGNGPTKIARMLTEQQIPTPGTLEYRRTGSTRRYHPGYECKWATNTVVHLLENREYTGCLVNFKTEKPSYKVKHSVENPIEKQAIFPNHHEPIIDTETWERVQELRKQRKRPNRYDEVGLFSGMLFCADCGHVLYQQRYQNKNRKQDCYICGSYKKRTRDCTAHFIRTDLLTAGVLSNLRQVTEYAARHESRFVKLLIQQNEIGGKRKTAAATKQLEQAQTRIAEVNRIIKRLYEDNVSGKISDERFMELSADYEQEQRELKDRAAALQEELSKSQAATVNAEKFMGIVRKHLAFEELTPTLLREMIEKIVVHECSYDENGTRRQDIEIYYSFVGKIDLPEA

SEQ ID NO: 28412 - DNA, 50 bp, Coprococcus eutactus; identical to SEQ ID NO: 14622
  source 1..50: mol_type = genomic DNA

SEQ ID NO: 28413 - DNA, 40 bp, Coprococcus eutactus
  source 1..40: mol_type = genomic DNA
taatgataacccgggtgcaaagtcacagggcatgaagcag

SEQ ID NO: 28414 - DNA, 40 bp, Coprococcus eutactus; identical to SEQ ID NO: 28413
  source 1..40: mol_type = genomic DNA

SEQ ID NO: 28415 - DNA, 50 bp, Coprococcus eutactus
  source 1..50: mol_type = genomic DNA
ttacttcttttctgtgcattatctaatgctaatataatagaaacaaacat

SEQ ID NO: 28416 - protein, 548 aa, Mycobacterium intracellulare
MSLGFAFYGRVSTEDAQDPEASRSWQKRRAIDLIAPHGGVLAADYFDVGQSRSLPWKRRPEASRLLADVACRDRNFDAVVIGEPARAFYGPQFALTFPILTHYGVGLWVPEVGGAVDPGSEAHDLVMTLFGGMSKGERARIQMRVRTAMSALAQDTSRYLGGRPPYGYRLVDAGPHPNPAKANLGQRLHRLEPDPATSPVIERIYRMYADGAGLRYIAQQLTDDGVPSPSQYDPARNRHRDPRGWSHSAIRAILDNPAYRGIRVWGKQEKYEVLVSPDDVAAGYETRMRWRDQADWIAPDRRTHEALVADDLAQAVRLRTQARRGPGLVCSRESTVPYALRGMLFCAACGRRMQGAARVGKRTTRILYRCELGKSRSVPIDLSDHPRTVYLREDAVTFRLDEWIASLADPEDLARGQEVDPVAGAGYAALQRQLSEANGKIAALIAALESGVAVEDLTAALRRRTAERDELKARLEQAERPCVMSATQISELVEELGGLSAVLGEATGAERAQVYASLGLRLDYDPHLRRVKATADLSRVAECVRGGT

SEQ ID NO: 28417 - DNA, 50 bp, Mycobacterium intracellulare
  source 1..50: mol_type = genomic DNA
tgagtcgtgtcgccgaatgtgtccgaggggggacttggccacctgcgaca

SEQ ID NO: 28418 - DNA, 40 bp, Mycobacterium intracellulare
  source 1..40: mol_type = genomic DNA
tcgcctcagtcgtgtgtccgaggggggacttgaaccccca

SEQ ID NO: 28419 - DNA, 40 bp, Mycobacterium intracellulare
  source 1..40: mol_type = genomic DNA
tcgcctcagtcgtgtgtccctggggggacttgaaccccca

SEQ ID NO: 28420 - DNA, 50 bp, Mycobacterium intracellulare
  source 1..50: mol_type = genomic DNA
tgtgtggtgcaccggactgtctccctgatgcgactccatcacctgccaca

SEQ ID NO: 28421 - protein, 530 aa, Bacillus amyloliquefaciens
MKTCIYARRSTLKQGQAETIENQIKICERKAKELGLTIVDIKTDSASGTDDNNRPEVKELLKGAINKEYDCVIMKGISRIYRKTSKGLELIEKLDRHGVRVITVEEHFDSHARENRNGIGNLDTSRITMYLMFAEKESQKLAERIKFTQIEKAYAGEWNQASNAPIGYTYDSTTKKLSIDNSKSYVVRKIFKLYEQGMGMKAIAHYLNGDNPDKKTYPSSKGGRWSEYTVGYILKNRAYVGDVVYNKRSKKERPYKAPEALGKTSDDICIINDYNKEEDWIIAENAHEPLIERELFDKIQTMISTKSRRKGIRSNTSLFAGIAKCAKCGTGMTFKRGRKNSLGQVVSKDNYYCMNYIRYGKQYCDSHHVGARELQEAIFSDLEHILNSKDKLQRVLDKNKIVMSLDEKKAKERIVGIQKEMDSLIKKMDKLLEKNLAGDISDTQYKTFNEKYSAELDNLTEELKKARLTIANMSEQADNEMRFRQKLSNAIGIRNRAIEEQRHILLGLIDSIVINGNDIEDIVYKFERVD

SEQ ID NO: 28422 - DNA, 50 bp, Bacillus amyloliquefaciens
  source 1..50: mol_type = genomic DNA
tttttctatagtgtttaacaaggaacaccttgtataacattgtagaacct

SEQ ID NO: 28423 - DNA, 40 bp, Bacillus amyloliquefaciens
  source 1..40: mol_type = genomic DNA
gccgtctgccattaccggcacaccttgttctgtataaacc

SEQ ID NO: 28424 - DNA, 40 bp, Bacillus amyloliquefaciens
  source 1..40: mol_type = genomic DNA
gccgtctgccattaccggcaaaccttgttctgtataaacc

SEQ ID NO: 28425 - DNA, 50 bp, Bacillus amyloliquefaciens
  source 1..50: mol_type = genomic DNA
tttatcagtgaagattaacaaggaaaaacttttaattaaaagtataacat

SEQ ID NO: 28426 - protein, 645 aa, Vibrio coralliirubri
MSLIPYARVSSGKQLDGLSMSLQGDSKLLDKLAKEHNTTVSNLVYNDEGKSAYKGKNVDDGELGRLINDIKRNVIKQGDIIVMRALDRLSRQNLTDSENLYNSIVGSNVCILTTIDNHLYKRDCVMSSVLKTLAFKTANEESAKKSHLTNTYASHRIHQFLSNEKPDNGTAYDIGIGRHPFWIEIDKRVIQKGKHFTLARIMFEKAMQGYGVARLQKFALEQGLELSYSAVGKMFRSHTVFGDLHITHQGKEHTLKSYYPALATENEYYKVRAIKDRLTKESNAQRKHVSILAGMQKLYCDCCNSSVGISRNTKQDINYYSCINKLEKCYQPLRQDIIDNIVLNAIDTHIFSNEASDTTVVDGLELEFSEKKKQHENAVERFMLLGDSAGDNAVQTIHTLKAELDNIQKKIEVEKNKTASYAIDYEAITSFHDAMADYQAQQDKITEYVHGDNELKQEIKDILKLVLKRITIDHRHMITIELLDGSIIYRYLLRRKDGKRLHDRYFVPIKVHDEETIKIVRNSTPELVNWVTESELNSLDLYFEDVTNPFLAIERKRHQRDLEQEFFDLLQGNVYEWKRADIMKAGATTTQWQDFKDADVSKYGFTKDVCTITTKHYTKQHKTIIYRELDEAELINHFGCKRIEF

SEQ ID NO: 28427 - DNA, 50 bp, Vibrio coralliirubri
  source 1..50: mol_type = genomic DNA
ctctaaaatcttagagcaactcgccttagcgtcaccaaaatcaaattact

SEQ ID NO: 28428 - DNA, 40 bp, Vibrio coralliirubri
  source 1..40: mol_type = genomic DNA
agatgcttaggcagctctttttagcatcgccaaacagcat

SEQ ID NO: 28429 - DNA, 40 bp, Vibrio coralliirubri
  source 1..40: mol_type = genomic DNA
agatgcttaggcagctcttgatagcatcgccaaacagcat

SEQ ID NO: 28430 - DNA, 50 bp, Vibrio coralliirubri
  source 1..50: mol_type = genomic DNA
ctcttcactggtgcagcagctcgcgaccgcctcacctacaacaatttcct

SEQ ID NO: 28431 - protein, 484 aa, Mycobacteroides chelonae
MAAETTQQVRAGCYLRISSDPKDRREGVDRQREDTSALCEVKGWEAARYYIDNDRSASNGRDRPEWDRLLADIKAGDIDAIAAWDQDRGWRMMSELEELRRFFKSLGRRVQFATTGQGDIDLYSPTGVLAVQIKTAVSEHEIAMMRVRMLRAARQKAEQGKPKWRKAFGYLPDTRPKHEDDGCRELDPVTAPLVRQAYAAVLAGSSLMDITRDWNAREVYGLNGQPWTAATLSLFLRAPRNAGLRAHNREIVGPGTWEPLVDESTWRAAQAVLNAPGRAPGRKSVRKHLLTGVMLCGRCARELNSRLSGKWAMQAHSGPRAHSIVYACKTCRGCSIHAEHVEPMLYQLVSGRLARPDAVDLLKSEQHDAAEAEAQRTERMTLLARLDEIADERADGVLTGKQAQRATERIQAKLDDIERRQQDGERVRVFDGIPLGKPEVAAAIEGLSADRFRAVLDVLCVVTVLPVGKGGKAFKPERVRVDWI

SEQ ID NO: 28432 - DNA, 50 bp, Mycobacteroides chelonae
  source 1..50: mol_type = genomic DNA
aagagttctttccgcagtcgatgatgttattgactgcgcgaagtacacta

SEQ ID NO: 28433 - DNA, 40 bp, Mycobacteroides chelonae
  source 1..40: mol_type = genomic DNA
gaaggtcttgagtaggtggtgcttgcggcataacgctttc

SEQ ID NO: 28434 - DNA, 40 bp, Mycobacteroides chelonae
  source 1..40: mol_type = genomic DNA
gaaggtcttgagtaggtggatcttgcggcataacgctttc

SEQ ID NO: 28435 - DNA, 50 bp, Mycobacteroides chelonae
  source 1..50: mol_type = genomic DNA
aaaagtttttttttgaatcaatgaattggttgactgacagcagaacactg

SEQ ID NO: 28436 - protein, 485 aa, Mycobacteroides abscessus
MTGETQRQIKAGCYLRISSDPRDRREGVDRQREDTQALCEVKGWEAARYYIDNDRSASNGKDRPEWDRLLADIKAGDIDAIAAWDQDRGWRMMSELEELRRFFKSLGRRVQFATTGQGDIDLYSPTGVLAVQIKTAVSEHEIAMMKVRMLRAARHKAEQGKPKWRKAFGYLQETRPKHEDDGRRELDPVTAPLVQQAYATVLAGGSLMDITRDWNAREVYGLNGQPWTAATLSLFLRAPRNAGLRSHNGEIVGLGTWEPLVDESTWRAAQAVMNAPGRAPGRKSVRKHLLTGVMLCGKCVRELDSRLSGRWAMQAHGAGPRAHSIVYACKTCRGCSIRAEHVEPMLYQLVSGRLARPDAVDLLKAEQHDAAEAEALRLERMTLLARLDEIADERADGELTGPQARRATERIQAKLDDIERRQQDGERLRVFDGIPLGKPEVVAAVERLSADRFRAVLDVLCVITVLPVGKGGKAFKPERVHVDWH

SEQ ID NO: 28437 - DNA, 50 bp, Mycobacteroides abscessus
  source 1..50: mol_type = genomic DNA
aagagtttttttcgcagtcgatggtgttattgactgcgcgaagtacacta

SEQ ID NO: 28438 - DNA, 40 bp, Mycobacteroides abscessus; identical to SEQ ID NO: 26638
  source 1..40: mol_type = genomic DNA

SEQ ID NO: 28439 - DNA, 40 bp, Mycobacteroides abscessus
  source 1..40: mol_type = genomic DNA
gaaggtcttcaggagatgaatcttgcggcacagggccttc

SEQ ID NO: 28440 - DNA, 50 bp, Mycobacteroides abscessus; identical to SEQ ID NO: 28435
  source 1..50: mol_type = genomic DNA

SEQ ID NO: 28441 - protein, 474 aa, Blautia massiliensis
MQKRMAALYVRVSTEDQAELSPDAQKRLLLEYAKKNDLITCEEFIFCESVSGRHAQKRPEFQKMIAMAKQSSHPFDVILVWKFSRFARNQEESIVYKSMLKKDDVEVISISEPLVDGPFGSLIERIIEWMDEYYSIRLSGEVKRGMKEKALRHGYQSTPPLGYKAVGGGKPFVIDEASYAIVSYAMNLYDCENMDETAIARKCNDLGYRTKRGNLFERRSIDRILRNPFYCGTVTWNGMEFEGSHEVRISKERFQERQKLIQARMRPAKSRSVSTCRHWLSGLLKCSICGATLAYTGGGKDGYHYFNCWQYAKGYHRGTSSIPVKKAEEAVIEYFDKILEGADFSYVRKSNCSVNNEVTVDQIHKELSRIDMKSKRIHDAYESGIDSLQEYKENKERLNDDRSKLEFELHNLLHKKKEKFTDKSEVLKEIKSVNDVLKDPDVGYEEKGMLIRTIVDQIVWDKENNKMYFDIIVH

SEQ ID NO: 28442 - DNA, 50 bp, Blautia massiliensis
  source 1..50: mol_type = genomic DNA
ttttatctgctattgcactccggtccacctgagtacaataacagataatt

SEQ ID NO: 28443 - DNA, 40 bp, Blautia massiliensis
  source 1..40: mol_type = genomic DNA
tcctatttctccgtccggcccgccatactggctggatata

SEQ ID NO: 28444 - DNA, 40 bp, Blautia massiliensis
  source 1..40: mol_type = genomic DNA
tcctatttctccgtccggcctgccatactggctggatata

SEQ ID NO: 28445 - DNA, 50 bp, Blautia massiliensis
  source 1..50: mol_type = genomic DNA
ttttctgtgttcatgcacacctttctacccaagtacacctacagaaaatg

SEQ ID NO: 28446 - protein, 504 aa, Mammaliicoccus sciuri
MQIEDKIKHVAMYVRKSRAEEGEKDLENHMMHLKLRCEANEWTYELYKEVGSGSSIDDRPQMIKLLDDIEKKLYDAVLVVDFDRLTRGTGADNDRIMHSLMISDTLIVVEKPYHVLDPHNESDQDSMLMQGFMANFEYRKINKRMREGKKIAQYKGQWVNSVPPYGYAVDKQSKKLTPDEEESKIVLRIKEMFFENKSTAEIAWILNKEGVRPRKALEWRASRIGDILQNEVYVGTLVYNKSEGNRNKANSKYTQSRPFRNLPESEWKRVYNCHPKLFTNEEFKRIQDYFKNSSYSHKGARAKVYALTGLCKTPDGKTLKVHQGKSNQKKLYLITKANKFGDPTIYKGVSYNLVQEYIKHSIEQLKVMIDSQLDQGVNNLEKDELNKKIVYKQKELDSLNDEKARITQGYLKGIFDDDEMIELKKVKTEEINKVEKELEELQEDVENASLVKVELRKTKVETLLENINNSKSEKETNEYLKTIIKEIIVDRTTDDEIKLTVNFL

SEQ ID NO: 28447 - DNA, 50 bp, Mammaliicoccus sciuri
  source 1..50: mol_type = genomic DNA
tacatgaccacacaatgtgtacatggatgaacgcgtagtagggtaaggta

SEQ ID NO: 28448 - DNA, 40 bp, Mammaliicoccus sciuri
  source 1..40: mol_type = genomic DNA
ggatgtgcgactggtacttggtacagagcaggcgagggct

SEQ ID NO: 28449 - DNA, 40 bp, Mammaliicoccus sciuri
  source 1..40: mol_type = genomic DNA
ggatgtgcgactggtacttaatacagagcaggcgagggct

SEQ ID NO: 28450 - DNA, 50 bp, Mammaliicoccus sciuri
  source 1..50: mol_type = genomic DNA
ttcatgactatctcatgtgcacataaaagaatgtgtattctgctattgta

SEQ ID NO: 28451 - protein, 511 aa, Myroides odoratimimus
MRKADLYIRVSTDEQADKGYSQRDQEDRLRKYCDIKGIPVRDVYIEDHSAKSFKRPEWQKYLSNLRKTKNNKAGSIILFTKWDRFSRNAGDAYQMINQLRTHGVEPVAIEQPLDLTIPENKIMLAFYLASPEVENDRRALNVFHGMRRAKKEGRYMGTAPLGYVNKITEGKKKFIAQHDFEAPLLKWAFEQIVANNFNTEQIWKMVREKADGKGRFSKNNFWVAMRNPLYCGKIFIPPYKEEKGYFVKGQHEPLISEKTFADVQDILDGRKRVVKPKIVAIDNLPLRGFLKCPKCKRMLTGSASKGKMGRYYYYYHCSSACGTRFKAEPANEAFLKQLRYMSPKEGMVDVFIEAFIKDFNNKTKAQNTERANIIGEIDTLNKRYQNALLKNADGEMADDDFQEVKKLSKGKIEVLERRLNDLAVVGTEIKDLVASTLKKVANIDRRYENGDIEEKRLIVSSMFPDFLEFDGTRHRTPRLNSAIALIYQNNSKLQGKKNGTSLSFLDLSQDV

SEQ ID NO: 28452 - DNA, 50 bp, Myroides odoratimimus
  source 1..50: mol_type = genomic DNA
atttttagacttgtcccaagatgtgaacccactggtacagaactcgaact

SEQ ID NO: 28453 - DNA, 40 bp, Myroides odoratimimus
  source 1..40: mol_type = genomic DNA
aatctctgcttttttttgtgacccgactggggctcgaacc

SEQ ID NO: 28454 - DNA, 40 bp, Myroides odoratimimus
  source 1..40: mol_type = genomic DNA
aatctctgcttttttttgtatcccgactggggctcgaacc

SEQ ID NO: 28455 - DNA, 50 bp, Myroides odoratimimus
  source 1..50: mol_type = genomic DNA
attttcaaagtttatccaagttgtatacatactggtacctcattccaaca

SEQ ID NO: 28456 - protein, 525 aa, Pseudomonas aeruginosa
MPSAFSYVRFSSGKQAKGSSEQRQRSMLGQWLEQHPSFTLSDLRFEDLGRSGFSGEHLDHGLGQLLAAIDSGAIKSGDVILVEAVDRIGRLEPLEMLPLFSRIVRAGVSVITLEDGHIYSKDSVNETSLFLLVAKVQQAHDYSNRLSRRINASYTARREKARAGLGVKRETPVWLTTDGQLVPHVAPHIAQAFQDYADGLGERRICRKLRESGLEEFSKTNATTVRRWLKNKTAIGYWNDIPDVYPHVVDPALFYRVQQRLDAPKVDRAKPSAHYLTGLVKCAVCGRNYNFKQRKHTDPAMLCTSRARLAGEGCSNSKTYPVIVLDQVRKLTSLPFLQHAMESASSQADPSSQRLAVIDGEIGELSRKISEATKALLVLGFTPEIQESLEQLKTAREALEEERAALLLPQAEKLTAAQLEAFSNGLLDDEPMKLNHVLQTAGYSMVVHPDGSIDVDGKRFVYEGASRKEKVYKLRLLGEDKRWSLPILTPQMATYKSLFMAAVRLPGDPSEEELRRFEEAKHSER

SEQ ID NO: 28457 - DNA, 50 bp, Pseudomonas aeruginosa
  source 1..50: mol_type = genomic DNA
cgagtccatcttgagtcttctttctcgcaagacgatacaaaatagacaca

SEQ ID NO: 28458 - DNA, 40 bp, Pseudomonas aeruginosa; identical to SEQ ID NO: 20278
  source 1..40: mol_type = genomic DNA

SEQ ID NO: 28459 - DNA, 40 bp, Pseudomonas aeruginosa
  source 1..40: mol_type = genomic DNA
gagaccgtgacctacatgcttgaagggcgtatgcgccacg

SEQ ID NO: 28460 - DNA, 50 bp, Pseudomonas aeruginosa
  source 1..50: mol_type = genomic DNA
ctaatctatgttgagtgttcttccttacaagaagatcatgggaagacaca

SEQ ID NO: 28461 - protein, 568 aa, Clostridium botulinum
MKTVAIYSRKSKFTGKGESIENQVQMCTEYIKQRLNKDTEILIYEDEGFSGGTTNRPKFKEMIKDIKSKKIHILICYRLDRISRNVADFSNTLEILQENNCSFISIREQFDTSTPMGRAMIYIASVFAQLERETIAERVRDNMLELAKNGRWTGGKIPLGFTSERVKYTDDTGLQREYSKLKINKEEIKFVEFLYKKYLELGSLHKLEVYITQNELKSRNGIMFEKSSLKLILQNPIYVKANYEVINYLKENNWTIYGEIDNKHSLLSYNKTEQSFKNGKHTKVKKSENERFVAISNIEGFINPDLWLNVQRQFDKNRTRFPRLGKTHNALLVGKLRCGKCKEYMLVQHGRVSKTTGKKLFYYTCSLKRKSHKKLCDNGNAKADYVENLVINSLKLLSKSKKKFINGLKILYKNKLKSNETSIERLSLEKSLNEKKNQIDNLVLALSKSSEIEDILLDKIKSLKNDCVEIENKIKNIETSTKEQKLNNINLSLIESIIDECSMIDQLSRNEQKRIIDILIDTIYWYGSGNGKGKIKIKFIGADENTKEIVLSEEKLQQRMLQFYSPST

SEQ ID NO: 28462 - DNA, 50 bp, Clostridium botulinum
  source 1..50: mol_type = genomic DNA
tgttgcagttttattcacctagcacattcaaggtgaacataaatgcaaca

SEQ ID NO: 28463 - DNA, 40 bp, Clostridium botulinum
  source 1..40: mol_type = genomic DNA
cgtaatactagatactggccatgcaaaattaatgacttct

SEQ ID NO: 28464 - DNA, 40 bp, Clostridium botulinum
  source 1..40: mol_type = genomic DNA
cgtaatactagatactggctatgcaaaattaatgacttct

SEQ ID NO: 28465 - DNA, 50 bp, Clostridium botulinum
  source 1..50: mol_type = genomic DNA
agttgcatttctatacaccaataatattcaagatgagaatcaaatcaaca

SEQ ID NO: 28466 - protein, 487 aa, Mycobacteroides abscessus
MKPRALIVVRLSRVTDATTSPERQVAACRELCATRGYEVVGVAEDLDVSAGKTTPFDRPQLGRWLADPSRFDVIVFFRVDRIVRRLFDLADLIRWSREHAVTLVSATETHFDLSTDFGDIIALLVAKVAEMELEAISERNASAFRHNIKAGKYRGGIPPWGYVPSRDGDSGDWRLVQDPSQVGVIHDVVKRVLKGEPLRAIAHDLTTQGIPTPKDRFAQTQGREMSGYEWHSAPLKRALTSPTLLGRVVTREPLLDAQGRLQRDTKGRKVFGPETVVVSEDGSPVIRAEPVLSREVFDRVGVELSGRENRKEPTKRSSGLLLRVIYCGECGRPAYRLKGGAGRKARYRCASAQYKDSCSNRTISLEWAEAELERRILTNMGPMERRHRVWFPGDDHSDELGEVNEMLADLTDQLGTSMFKRGTPQRERLDKRIQSLTARQAELSSTPGEPAGWRYEPTGDLVGGPRHRGQERLAASDEFPRGVEVPH

SEQ ID NO: 28467 - DNA, 50 bp, Mycobacteroides abscessus
  source 1..50: mol_type = genomic DNA
ggggtgtaaacaacaacttttgactatgcgttggttgaggattactaccc

SEQ ID NO: 28468 - DNA, 40 bp, Mycobacteroides abscessus; identical to SEQ ID NO: 28373
  source 1..40: mol_type = genomic DNA

SEQ ID NO: 28469 - DNA, 40 bp, Mycobacteroides abscessus
  source 1..40: mol_type = genomic DNA
gggtatggccacagtcgcaggctcgacggacaccattccc

SEQ ID NO: 28470 - DNA, 50 bp, Mycobacteroides abscessus
  source 1..50: mol_type = genomic DNA
ggggtgtaatgtaaaacttttgagggtgcatttggtaatatctgctaaat

SEQ ID NO: 28471 - protein, 534 aa, Pseudomonas syringae
MKQAISYIRFSSARQDGGSSVERQEGMIAKWLLDHQDYELSKLNYSDLGKSGFHGEHVKEGGNFGKLLKAVMDGYIKRDDVVLVEAIDRTGRLPALQMLSDVIAPILRAGVSIITLDDNTTYTEASVGGPHLFMLVAKIQAAHEYSRTLSRRVEDSYKKRRKDAKEKGVAPKRMTPVWLNSDGTVREDVAPWIKTAFELYVSGVGKSTIAKRLRESGVERLAKASGPGVEGWLRNKAVIGKWETLIGTPEHHVIDDVYPLIIEPSLFYKAQVHAEKMKTQRPIKTAKHFLVGLVHCGECGKNYIMQNLHGKPHSMRCRTRQSQNNCSNSYVVPKAVLDAIYRYTSVTAALEAVQLQQLGVNEKEIVTREAELLTITKRVEGFVQAVNEAGPMPELLTALKQARIERESAENALVILRATVVTPPANQWREMGKVWSLEAEDAQRLAAMLRQVGYNITVGKGAIIKSSHSDVVYQYLGVDRVKDMYRVLANGEMKLIHKGQVDDYPYYEPFQEVVGEATMDEADKENLLLQYQSS

SEQ ID NO: 28472 - DNA, 50 bp, Pseudomonas syringae
  source 1..50: mol_type = genomic DNA
cagtgttacttacaaaaagcttgctcccaacgttttcacatgtaacactg

SEQ ID NO: 28473 - DNA, 40 bp, Pseudomonas syringae
  source 1..40: mol_type = genomic DNA
catgcccatcaggccctggtcccagcctttaatgacgcga

SEQ ID NO: 28474 - DNA, 40 bp, Pseudomonas syringae
  source 1..40: mol_type = genomic DNA
catgcccatcaggccctggacccagcctttaatgacgcga

SEQ ID NO: 28475 - DNA, 50 bp, Pseudomonas syringae
  source 1..50: mol_type = genomic DNA
cagagataccgtacagtagccagcactcaacgttttctaatgaaacaatg

SEQ ID NO: 28476 - protein, 531 aa, Pseudomonas syringae
MKQAISYIRFSSARQEGGSSVERQEGMIAKWLLDHQDYELSKLNYSDLGKSGFHGEHVKEGGNFGKLLKAVMDGYIKRDDVVLVEAIDRTGRLPALQMLSDVIAPILRAGVSIITLDDNTTYTEASVGGPHLFMLVAKIQAAHEYSRTLSRRVEDSYKKRRKDAKEKGVAPKRMTPVWLNSDGTIREDVAPWIKTAFELYVSGVGKSTIAKRLRESGVERLAKASGPGVEGWLRNKAVIGKWETLIGTPEHHVIDDVYPLIIEPSLFYKAQVHAEKMKTQRPVKTANHFLVGLVRCGECEKNYIVQNLHGKPHSMRCRTRQSQNDCTNSHCVPKPVLDAIYRYTSVTAAVDAVQQQQMGVNEKEIVTREAELLTLAKRVEGLAEAVKQAGPMPELIEALKQSRIAREAAENALVILRSTVICPAGTGWNEMGKVWKLEADDAQRLAAMLRMVGYHITVQTTGEITSSHSDVLYRYIGVDRALDKYKLLVNGKLTLIPKGYVDDYPYHEPFQEVEGEMTWNEADYENLRLQY

SEQ ID NO: 28477 - DNA, 50 bp, Pseudomonas syringae; identical to SEQ ID NO: 1757
  source 1..50: mol_type = genomic DNA

SEQ ID NO: 28478 - DNA, 40 bp, Pseudomonas syringae
  source 1..40: mol_type = genomic DNA
catgccaatcaggccctggtcccagcctttaatgacgcga

SEQ ID NO: 28479 - DNA, 40 bp, Pseudomonas syringae
  source 1..40: mol_type = genomic DNA
catgccaatcaggccctggacccagcctttaatgacgcga

SEQ ID NO: 28480 - DNA, 50 bp, Pseudomonas syringae; identical to SEQ ID NO: 28475
  source 1..50: mol_type = genomic DNA

SEQ ID NO: 28481 - protein, 584 aa, Enterobacteriaceae bacterium ENNIH1
MTKHQIHVYTRISKTSQQEGSGLDEQLSRIDAYIKSKPEFLGSEITYWQDVGISAFKNKNIHDGQLAEFIKQVESGSIGAGHALVIYSLDRLSRRSSWDEDTIQKLVKNGVDIHDVSTPVVLKRDDPFSKIIMELIVARGNNESRIKSERSIAGWEKRLKETREQGKVFTRKLPRWLSTDENGYVVITEQAELIKRIFLEYTNGLSSPMIARRLNEEGIKSTGRSMWRPNTITKLIKDERLRGFLRRSSDQALIPNIFPVVIDEEIFVLANRILKNNATGIKGRPRENNITREVNNILTGIVRCGKCGARVTTSKNSRGVRYVVCLNRRNYEICGQKSIKLDEFEKVVISHAQQIDMSKVFSYDKVDTSRESTLNSELSNLEIDEKSCIIDIEARKKAKKTASLVLANTLVEIQDRIEEIKQQLLELKIKEPLPEIQHFSINDLINPSNIELRMSLRKFLTQAVDKIKFRSLDNNILIEIKYHNNVYRHILITDKKVKEVLHEVDIVKNGDVINYTTNGFLITENEHENTCIFHGIYNVHYTDYFLLANYIGSLKNKHWIVDKMYETENMSIVMTNEKQKSHYN

SEQ ID NO: 28482 - DNA, 50 bp, Enterobacteriaceae bacterium ENNIH1
  source 1..50: mol_type = genomic DNA
aagtgtgaaactattaacatgaccgtggtaatgtgatacaattcacacat

SEQ ID NO: 28483 - DNA, 40 bp, Enterobacteriaceae bacterium ENNIH1
  source 1..40: mol_type = genomic DNA
ctggcgtaacgccgatacggtggttatcggacgggcacag

SEQ ID NO: 28484 - DNA, 40 bp, Enterobacteriaceae bacterium ENNIH1
  source 1..40: mol_type = genomic DNA
ctggcgtaacgccgatacgaaggttatcggacgggcacag

SEQ ID NO: 28485 - DNA, 50 bp, Enterobacteriaceae bacterium ENNIH1
  source 1..50: mol_type = genomic DNA
aagtcctaactttgtatcacgaacaagctaatgtaataatgtacacacat

SEQ ID NO: 28486 - protein, 510 aa, Sphingobacteriaceae bacterium GW460-11-11-14-LB5
MKTADLYIRVSTDEQADKGYSQRSQEEVLRKYCDLNKIEVRKVIYEDHSAKTFMRPRWTELIENLKRLRNKIDLILFTKWDRFSRNAPDAYQMIAILKKLGVEPQAIEQPLDMSVPENKMMLAIYLTTPEIENDRRALNTLYGMRRAKKEGRWTGRAPVGYRNRCSPDGKNKYIEPNNDQARIMKWAFHELAEAKYSTEQVFKRAKALGLACNKNNFLVAIRNPIYCGLIPIPAYGDEKAFVAKGQHKGIISQELFYDVQDILNGKKKAIKTTIMSKSMLPLKGFIDCSNCTRTLCASASKGRNNYYYYYHCSSSCGYRKKAEEVNELFLTELQNYVLRQESVGHFKTAILDSFISLTGSDKDSKTSYIKQITEQNNRITKARELLLAGDIDGIDYKTIKVEAEKTIMRLEAKLTEIPSNTMSINQVEEVLDRAIDKLTKLDVIYWKSDIKVQREIIGSMFPEKVTFEQLQHRTAKVDFLFQIIYLINSQLGVKKERANENFFCLPSMAP

SEQ ID NO: 28487 - DNA, 50 bp, Sphingobacteriaceae bacterium GW460-11-11-14-LB5
  source 1..50: mol_type = genomic DNA
gagaatttcttctgtttgccctctatggctcccctaactgggcaattctc

SEQ ID NO: 28488 - DNA, 40 bp, Sphingobacteriaceae bacterium GW460-11-11-14-LB5
  source 1..40: mol_type = genomic DNA
tttaccgtgcttgccctatttggctccctctgctgggctc

SEQ ID NO: 28489 - DNA, 40 bp, Sphingobacteriaceae bacterium GW460-11-11-14-LB5
  source 1..40: mol_type = genomic DNA
tttaccgtgcttgccctatctggctccctctgctgggctc

SEQ ID NO: 28490 - DNA, 50 bp, Sphingobacteriaceae bacterium GW460-11-11-14-LB5
  source 1..50: mol_type = genomic DNA
cagaatttcggcccactgcaacctctgcctcccgtgttcaagcaattctc

SEQ ID NO: 28491 - protein, 555 aa, Pseudomonas veronii
MTKAYAYVRYSRAIQATGDSENRQLTALELFETTTGTKIVEIVYDKGKSAFRGDNARSGNFKEMLDRMQSGAIRRGDFLVVESIDRITRQRVLDGVELLQGILKKGINIYTTVDKKTYSYNDPSRDFENLLMISLIAKRSNEESETKSGRLLSAWKARKARAENGEVIIKKGKSIPYGLRVEDGKLVIHKEEQEEIKTLFELLLKFGINTAIAKINETSLKKWNNGTLSKIIKHKTVIGCMATHRIEYTADGKSKKILTGFIENYYPNLIEPSLFYKAVDVLKSRKQKNWSGRRTEQDFNIFKHCIFCEKCGGKMYYDHRGSRYKGKIYPFFKCDNARVQKHICTADNIRFEYVLGSLLESIKIINRVATEITRDFKGISTQARYLNPKINSLLKIDTESNNLILEDKQKQLISRRTKLDNMNIQMVEADYNVPTKFIQEIAKTEKEIEALNKEILLIHNTFTDDAVNINDTKTVIDLFMTDEGRAKLNYFFKTNDIIFLVRHSKSTRQTGFSMRRKNDDVDERICNNVTKFPLKNILEEYEIGDLQTMFDLTVH

SEQ ID NO: 28492 - DNA, 50 bp, Pseudomonas veronii
  source 1..50: mol_type = genomic DNA
ctcggaaaaacagtttacctaatcatcatccggtgatatgattttccgag

SEQ ID NO: 28493 - DNA, 40 bp, Pseudomonas veronii
  source 1..40: mol_type = genomic DNA
gcccagcgacagaccactgatgatgcggttgcgccggggg

SEQ ID NO: 28494 - DNA, 40 bp, Pseudomonas veronii
  source 1..40: mol_type = genomic DNA
gcccagcgacagaccactgaggatgcggttgcgccggggg

SEQ ID NO: 28495 - DNA, 50 bp, Pseudomonas veronii
  source 1..50: mol_type = genomic DNA
ctcagaaagttcatctacctaatgagtttctggtgagattgttttgggag

SEQ ID NO: 28496 - protein, 520 aa, Butyrivibrio crossotus
MLEKNIIIYLRKSRSDDPGMSVEDVLAKHELQLQEYAVSEYGEQIPEDHIFREVVSGETIADRPVMKQVMRLLEAGNITAVLVIEPQRLSRGDLEDCGRIINIFRYTHTLVATPPKTYDLTNEYDRKFFEMELMRGNDYLEYTKKILNRGRIASVKKGNFIGSVAAYGYKKVKIGTGKDACHTLEIIPEQADAVKLMFKLYLEGKGFTNIAKTLDELKIKPLRSETWSPAAISDMLENPVYVGKIRWNYFKTVKKIEDGQIVKSRPINQDPSDWFLVQGKHPAIIDQATFDAAQERRGRTPKIKRFNELKNPFAGLLYCQCGKAMSLKIYNQKKGKCEPTKLMLCNKQSWCKTKSVKYDTFLERIVETLESTIADFEIKLKKDNGDAAQLHKNIVYNLETNLKKLKDKDIRQKDAYEDGIYTKEEYASRNAKLQEQISETTKALCQAKDSVPPTINYKEKIARFTDCLNALNDVSVPAAEKNMLLKACFEKIIYHNDMPSISGHGRWIENKFKLEIFLRL

SEQ ID NO: 28497 - DNA, 50 bp, Butyrivibrio crossotus
  source 1..50: mol_type = genomic DNA
aatttccaacatttatgtaccaatgaattggcacattgatgttggatatt

SEQ ID NO: 28498 - DNA, 40 bp, Butyrivibrio crossotus
  source 1..40: mol_type = genomic DNA
taccgatatcgctacagaagaattggcgcacctcgagatg

SEQ ID NO: 28499 - DNA, 40 bp, Butyrivibrio crossotus
  source 1..40: mol_type = genomic DNA
taccgatatcgctacagaaatattggcgcacctcgagatg

SEQ ID NO: 28500 - DNA, 50 bp, Butyrivibrio crossotus
  source 1..50: mol_type = genomic DNA
aatttccaattattaactgccagtatatagaaatataattgttgtatatt

SEQ ID NO: 28501 - protein, 484 aa, Streptococcus agalactiae; identical to SEQ ID NO: 3001

SEQ ID NO: 28502 - DNA, 50 bp, Streptococcus agalactiae
  source 1..50: mol_type = genomic DNA
gcgtgagttttagataccaaacattcaatcaaggttactaaaattattga

SEQ ID NO: 28503 - DNA, 40 bp, Streptococcus agalactiae
  source 1..40: mol_type = genomic DNA
aaccaatgctaccaaacattctaaaagcgtaaatgcttta

SEQ ID NO: 28504 - DNA, 40 bp, Streptococcus agalactiae
  source 1..40: mol_type = genomic DNA
aaccaatgctaccaaacatattaaaagcgtaaatgcttta

SEQ ID NO: 28505 - DNA, 50 bp, Streptococcus agalactiae
  source 1..50: mol_type = genomic DNA
gtttgagttttaattaccacacatatattcaaggaaatttaaattgtcta

SEQ ID NO: 28506 - protein, 519 aa, Paenibacillus campinasensis
MIKEDRAYVRVSTKYETQKDSPEHQESFIKECAAREQITIRHVYLDRDTATNIVEREDVKKMISDAQKGYIRSLWFASLSRFSRDALDAITLKRILVNALKIRVVSIEDGYDSAKKDDELLFGIKSVVNQNTSGDISISSRRGIRQSALDKGNIIASKPAFGYRKVTVDKRRTYEIVPEQAAIVELIYELYIDEGFGAKAIVKYLNGDNPQKTVYDSYSGKLWSLSTVQAILENPTYTGYNVAGRYKSEIAYDDITDLMNRRKKLVKNPPSEWEWSKEMTHPAIIPKERYDRATEIRLSRGGRGGRREFVNVFAKMIFCAHCESAMVSMSSIGRGGKRYRYLMCSRRRRLGEAGCPNEKWIPYEEARDELISEILSRISKAIEKFESSGTEELAISIPVNDFEKEKRKLEKRIEGNRKLLFEIRRQHMLDEIDKVQYEFEKEQYEKEIADFEQRLVRILAEEKKVVDLERLIKAAKKTLRELTDITSYNDDVERTRTLLNQVVKRIYVNGEDITVETYI

SEQ ID NO: 28507 - DNA, 50 bp, Paenibacillus campinasensis
  source 1..50: mol_type = genomic DNA
atgtgtgcttgaaaatgcataaccaatgtagtataatttgaagcacacaa

SEQ ID NO: 28508 - DNA, 40 bp, Paenibacillus campinasensis
  source 1..40: mol_type = genomic DNA
ggtgcgtaaccacatctccaatgtgatgcagaaattgaac

SEQ ID NO: 28509 - DNA, 40 bp, Paenibacillus campinasensis
  source 1..40: mol_type = genomic DNA
ggtgcgtaaccacatctcccctgtgatgcagaaattgaac

SEQ ID NO: 28510 - DNA, 50 bp, Paenibacillus campinasensis
  source 1..50: mol_type = genomic DNA
aactgtggtgatgaatgcataaccccaggaatatattaaaaagcactgaa

SEQ ID NO: 28511 - protein, 505 aa, Streptomyces alboflavus
MISIAIQKSVVEEAAIRRGRYIARWIEDPDATGRNFKRKIMQGIEAVEQGLFPEIWVWKFSRFGRNRYGVAINLARIEQAGGQLLSATEDIDASTAVGEFTRDMLFAVAAFESNRAGEQWKETHELRRSMGLPATGGKRFGYTWHPRRLPDGAGGWTLQDERYEVLDQQGDIVFDSFEEYRRGKTGFGKVAVWWNDLGFTNTRGDAWQDQTVKWFMDSGFAAGLLRVHKPDTRCPRPGRCQKEEHHYFRPAVHQSIVPGDDWEDYWDRRAIRKATPPRALEPVYPLAGLIKCGICQENKRTSAGQIHSCKGDPGYGYRCGARTRHHVQHEPVYIRRRIVEDAVLDWLVDKAAEIDAIAAGRVALPKPRKSPGAAQKRKRLEQEISKATKAIDRATEAYSLGHVPLDSYTRTRDKFTRQRDEAQAELDELPKLDAEPVSPVPHLETVRGLIKEWDTISVKSKRVTLAELVRRVEIFPDDRVEVVAVWDPPDPPREEKKSAARRAMA

SEQ ID NO: 28512 - DNA, 50 bp, Streptomyces alboflavus
  source 1..50: mol_type = genomic DNA
ggttgtgctttgaagtaattgatagttgttcattagtccaaagcacaaac

SEQ ID NO: 28513 - DNA, 40 bp, Streptomyces alboflavus
  source 1..40: mol_type = genomic DNA
ggtcggcgcctggtgcttcgtcgatcactacggccccgac

SEQ ID NO: 28514 - DNA, 40 bp, Streptomyces alboflavus
  source 1..40: mol_type = genomic DNA
ggtcggcgcctggtgcttcagcgatcactacggccccgac

SEQ ID NO: 28515 - DNA, 50 bp, Streptomyces alboflavus
  source 1..50: mol_type = genomic DNA
ggttttgcttatctgcaattcataagtgttcattacatcaaggtataagg

SEQ ID NO: 28516 - protein, 638 aa, Citrobacter werkmanii; identical to SEQ ID NO: 27976

SEQ ID NO: 28517 - DNA, 50 bp, Citrobacter werkmanii
  source 1..50: mol_type = genomic DNA
actatgaataattgacaattaggcttgcctaacatacgattactcattgt

SEQ ID NO: 28518 - DNA, 40 bp, Citrobacter werkmanii
  source 1..40: mol_type = genomic DNA
gcatggcgtattggcgggcttgccctcaggcatgccgggg

SEQ ID NO: 28519 - DNA, 40 bp, Citrobacter werkmanii
  source 1..40: mol_type = genomic DNA
gcatggcgtattggcgggcacgccctcaggcatgccgggg

SEQ ID NO: 28520 - DNA, 50 bp, Citrobacter werkmanii
  source 1..50: mol_type = genomic DNA
actatgaataatgaacattttggcacaccaaacttagcagttctcacaat

SEQ ID NO: 28521 - protein, 524 aa, Bacillus subtilis
MIKKLENIQHVAIYLRISQEKKGENVETLENHRQILIEFCEEHGFTYEEFGEVISGGKSEITQRVALKRLLDNIEKYDAIACFELTRISRNGLISQTVKQYCIDYDKPILTPYQSYDLANSETDRLLFDVGSMISSHEHSTIGKRSKANKMQMSKAGLHVSGNVPFGYKRNNETKKLEIDEDSAATIRYIFQLHSEGLGSFKIRDILNNEGYKSATGKAFNLPSIKRIIRNPAYKGTLVFNNRKKIKRNGKFEYDNIETITVENAHPAIIPPDIWEKANKDRKERAIRSERFREKPANKSRTTLLKDLIFCGVCGRKMVIRKEHRNNEEYSIKRCEYLLPNGEKCPNSGKSLNMVAAKVLHGLLQFSEEMEKTEQELKNKNVDELHNRNENKLKQIEKAIAENNQKQKNLIELAMDGLFSHDEIREKKQELVNELENLKNRKKEVLESINSISIEDEIQTLRERRELIMDIINIEDEEQGNELLKQFVKKIYFTRVIPKNLLLKSTRNAERREYPFEVQIEFYD

SEQ ID NO: 28522 - DNA, 50 bp, Bacillus subtilis
  source 1..50: mol_type = genomic DNA
atacatacaataaaaaacgacgttcctactgtgttttttattgtatgtat

SEQ ID NO: 28523 - DNA, 40 bp, Bacillus subtilis; identical to SEQ ID NO: 648
  source 1..40: mol_type = genomic DNA

SEQ ID NO: 28524 - DNA, 40 bp, Bacillus subtilis
  source 1..40: mol_type = genomic DNA
tacctcaggctatgcggtttttacctttgtcgttgacgca

SEQ ID NO: 28525 - DNA, 50 bp, Bacillus subtilis
  source 1..50: mol_type = genomic DNA
atacttacaagctctaacttctatttaactgtgttttaaaaggtttgtat

SEQ ID NO: 28526 - protein, 626 aa, Blautia marasmi
MRNEKITPLYERLSRDDDLQGESNSISNQKQMLEDYARRNGLPNPTHFTDDGISGTRFDRPGFLAMMEEVEAGRVEAIVVKDMSRLGRDYLKVGQVMEILRQKGVRLIAINDGVDSLNGDDDFTPFRNIMNEYYARDTSRKIRSVFKSKGMSGKHLTGTVIYGYLWNESREHWLVDEEAAAVVRRIFSLAMEGYGPYQIAQQLSADKVEMPAVHLARYGEGVNKNKTFADIYRWSASTVVEILKKREYLGHTINFKTRKHFKDKKSHYVDQSEWTIFENTHEAIIDQETFDNVQRIRGNARRYPDGFGEAHPLTGLMYCADCGGKMYVHRTYNGKRIPQYTCGQYGKYPIGSLCPTQHRIKAEVVLTLIADMLRAIAEYSKNDRAEFIRTVQETQAAQQTADISQKRKRLAAAQKRAGELEKLICKIYEDNVLGKLPDTRYAALDAQYAKEQDALSDEIAELEKAVTGYEQSRKSAEKFIALIDKYENFDTLTNTMLNEFVEKILVHERARKGSQDTTQEVEIYFNFVGRYIPPALQPVPLSPEELEELRKKEERKDRLHRNYLRRKANGKQKQWEASYNAKRKAKIEAEKAAIRAEDMAKGIYTTVSQLPHQEPQRAALPASSAI

SEQ ID NO: 28527 - DNA, 50 bp, Blautia marasmi
  source 1..50: mol_type = genomic DNA
aaaagcccttgacaacttgtttctggagttatatgctctaagtgacttct

SEQ ID NO: 28528 - DNA, 40 bp, Blautia marasmi
  source 1..40: mol_type = genomic DNA
gatttccgatcgcgtttcaggatgtgctggtaggtatttc

SEQ ID NO: 28529 - DNA, 40 bp, Blautia marasmi; identical to SEQ ID NO: 28528
  source 1..40: mol_type = genomic DNA

SEQ ID NO: 28530 - DNA, 50 bp, Blautia marasmi
  source 1..50: mol_type = genomic DNA
aaaaaagctaggatacttgtttttggcattatttgcatgttttgactttt

SEQ ID NO: 28531 - protein, 554 aa, Vibrio cholerae
MFTKNVSVKLNKYHLYQRVSKQVQAEEGLGIQRQEQVCEHWISEYNNRLVSEGKSVYSKGFIYEDRGKSAYTAANFNKGELGTLINDIKNGKIEKGDLIVIELIDRFSRANVDFVRGEFQRILDAGVKIAITKWNLVFEENMESVSSVTGRILLEIGMYLAYQESSQKSSRIKASRKLLEDSGRKSIAKPPFWLARNLDLKSYTIIEENAEIIRNIFDLKLNFNYGAQKIIKKLGDLEIYRYSFDENGNLIKTTKNSPLNESSINAYLRNQNVIGKLKGKNYYPRIIDDRTFYAVQRRTRENTGGVGDIFRNVFVGVGKCGCLIRKENENGCDSLAKCGYIMAFSSRKVKNPTKGMYLKCNRKRKSTRCDAENINYYLAQNKIYNVLKSLTFDIEQSVDISHLEEKIISIDKSMSKIREYMTQYSDDEEWEKQYNIKRIEREKIENEIKASKSRITGRLSNLDMDFSEEKDRVLFNQFLKDNRITVYFTKDRMEIIIGSLNNFSIKCGYNDNEREIDQLVESISQKGFVGLETISRVSEGKELLRFKLPTVSDS

SEQ ID NO: 28532 - DNA, 50 bp, Vibrio cholerae
  source 1..50: mol_type = genomic DNA
atgttgttaaacatacagttgactaatgacaattgtatgttaagctacat

SEQ ID NO: 28533 - DNA, 40 bp, Vibrio cholerae
  source 1..40: mol_type = genomic DNA
tggcaagccgcagttggcaaaggaaacgtaggggccacgt

SEQ ID NO: 28534 - DNA, 40 bp, Vibrio cholerae
  source 1..40: mol_type = genomic DNA
tggcaagccgcagttggcattggaaacgtaggggccacgt

SEQ ID NO: 28535 - DNA, 50 bp, Vibrio cholerae
  source 1..50: mol_type = genomic DNA
tcgttgctacagttacagttgagttttgataatttatatgtaagcttcag

SEQ ID NO: 28536 - protein, 554 aa, Vibrio cholerae
MFTKNVSVKLNKYHLYQRVSKQVQAEEGLGIQRQEQVCEHWISEYNNRLVSEGKSVYSKGFIYEDRGKSAYTAANFNKGELGTLINDIKNGKIEKGDLIVIELIDRFSRANVDFVRGEFQRILDAGVKIAITKWNLVFEENMESVSSVTGRILLEIGMYLAYQESSQKSSRIKASRKLLEESGRKSIAKPPFWLARNLDLKSYTIIEENAEIIRNIFDLKLNFNYGAQKIIKKLGDLEIYRYSFDENGNLIKTTKNSPLNESSINAYLRNQNVIGKLKGKNYYPRIIDDRTFYAVQRRTRENTGGVGDIFRNVFVGVGKCGCLIRKENENGCDSLAKCGYIMAFSSRKVKNPTKGMYLKCNRKRKSTRCDAENINYYLAQNKIYNVLKSLTFDIEQSVDISHLEEKIISIDKSMSKIREYMTQYSDDEEWEKQYNIKRIEREKIENEIKASKSRITGRLSNLDMDFSEEKDRVLFNQFLKDNRITVYFTKDRMEIIIGSLNNFSIKCGYNDNEREIDQLVESISQKGFVGLETISRGSESKELLRFKLPTVSDS

SEQ ID NO: 28537 - DNA, 50 bp, Vibrio cholerae
  source 1..50: mol_type = genomic DNA
atgttgttaaacatacagttgactaatgacaattgtatgataagctacat

SEQ ID NO: 28538 - DNA, 40 bp, Vibrio cholerae
  source 1..40: mol_type = genomic DNA
aggcaagccgcagttggcaaaggaaacgtaggggccacgc

SEQ ID NO: 28539 - DNA, 40 bp, Vibrio cholerae
  source 1..40: mol_type = genomic DNA
aggcaagccgcagttggcattggaaacgtaggggccacgc

SEQ ID NO: 28540 - DNA, 50 bp, Vibrio cholerae; identical to SEQ ID NO: 28535
  source 1..50: mol_type = genomic DNA

SEQ ID NO: 28541 - protein, 463 aa, Lysinibacillus fusiformis
MEKKKRVALYSRYSTHTQDGNYSIDIQLERMEAMCKSKGWEVTEYFSDAAYSGANMDRPELQNLLSRLSEFDVVMVYRLDRLSRSQRDTMTLIQDHFLLNNVAFVSVSETLDTTTAFGMAMIGILAVFAELERATITERMQSGIKKRIEAGYRLVSGNHMPTGYKKGIDGNGNNILVIDEIQSEKVRRIFDLYEQYHSITKIQHALKEEGYSGRRFTTIRQILSNRLYLGEVKYRDEYFEGIHDSIISSEQFDRVQALLARHPKGANAGKAKESLFSGFVYCGCCGENFKTYSYRLENKIKGKYYVRSYLCRARRYPSEYEQKCMNQIVKNDTLEDLFLKNLDILIENRQTKTVSSKRKTNYELALKKIDEKIVRLLDLYEDGELDKETLNTRLEKRKKEKEDILLKKNSEAQNEAINIEIKDIKKYLTKFQTMDFIEKRALVEKVLDRIVIEPNDIIFEWII

SEQ ID NO: 28542 - DNA, 50 bp, Lysinibacillus fusiformis
  source 1..50: mol_type = genomic DNA
attccgtcttcattctatgctactcaaatgacaagttatgaagactgaat

SEQ ID NO: 28543 - DNA, 40 bp, Lysinibacillus fusiformis
  source 1..40: mol_type = genomic DNA
ctccgtttttcctgccccacatacagcatgaataaggtgg

SEQ ID NO: 28544 - DNA, 40 bp, Lysinibacillus fusiformis
  source 1..40: mol_type = genomic DNA
ctccgtttttcctgccccatttacagcatgaataaggtgg

SEQ ID NO: 28545 - DNA, 50 bp, Lysinibacillus fusiformis
  source 1..50: mol_type = genomic DNA
attaagtcaaacatctaagcttctttaaggacaagttctaatgaccgatt

SEQ ID NO: 28546 - protein, 525 aa, Chryseobacterium arthrosphaerae
MQAVYLYIRVSTDEQAVKGYSQRSQLDRLVHYCKDHNLIVTKTIFEDYSAKTFNRPEWNKLFAELKLTKNQSSLILFTYWDRFSRNIMDAYKMLERLQNMKVSIQAIEQQIDFSIPESKIMLAMYWATSEVENDKRSRNVRLGMQKARLEGRWINKAPLGYRNKITSDGKKYIALYEPEAYIIREAFTAIVRQNKYCLTEIYKDALSNGLHCSRSAFYRLVRNPIYCGKIKIPAFEDKAERIVEGAHERLIPVVLFDQVQRIIKGADLNHSKKLTSKRIVNENLIFRGVLQCPNCGNTLTGSGSQGHTKKYYYYHCVGLCSYRVRADLINLSFLSFLKNNRVVEPFLELANSISKEIYGEEHHDYIQKKEEIKKEMEKLIDRGFNAQKLFSNGNIDYDDYILIRSRCQESLKDNTDKLRQQALKIVAEKHTEKGTDYIINHLGEFYENSDTITKQRIIRLFFSEKVKVIEGNIEKMLSESVKTIFGLTASASKIKEIHGQQTEQEIVEFFKELYFLGYEQNLKNI

SEQ ID NO: 28547 - DNA, 50 bp, Chryseobacterium arthrosphaerae
  source 1..50: mol_type = genomic DNA
taaattatcctaatggtgtcattaagtgaacttggaaggattatcttcga

SEQ ID NO: 28548 - DNA, 40 bp, Chryseobacterium arthrosphaerae
  source 1..40: mol_type = genomic DNA
ataaaaatgatgaggtttttgtgagcgcgaaaggattcga

SEQ ID NO: 28549 - DNA, 40 bp, Chryseobacterium arthrosphaerae
  source 1..40: mol_type = genomic DNA
ataaaaatgatgaggttttactgagcgcgaaaggattcga

SEQ ID NO: 28550 - DNA, 50 bp, Chryseobacterium arthrosphaerae
  source 1..50: mol_type = genomic DNA
caaattatgtatgtggtagttttaactgaccttggaagttgtaactttga

SEQ ID NO: 28551 - protein, 550 aa, Ruthenibacterium lactatiformans
MDKKKVKVYTYTRVSTTMQIDGYSLDAQKSRMKAFAEYNDYEIVREYEDAGKSGKSIEGRVQFSQMMDDIKEGKDGVSYVLVFKLSRFGRNAADVLSTLQIMQDFGVNLICVEDGIDSSKDAGKLMISVLSAVAEIERENIRVQTMEGRIQKAREGKWNGGFAPYGYQLVDGKLEINEEEAVAIRVIFDQYVNTNIGSNGIAKYLENHGIRKIQRQNGKNPLFDAHLVRLILRNPVYCGKIAYGRRRTEKVHGTRNDYHLVEQENYLLVDGLHEAIVSEEIWQAAQVKLLAQAKKYEHVNKGKDTRAHLLSGIVKCPVCGAGMYGNKCIKHKKDGTKYKDFYYYGCKHRTMTRGHKCDYRKQINEELLDDAVAEIIVALVSKPKFATMMQEKINVKVDTSTIDQEVANHEKQLRQYYSTKSKLMEEIDSLDPDDRHYIKRKADLDDRLYRMYDKIEEEENLLVEARAKKQAIEAEKLTADNIYKVLIYFEKLYGVMNDVERRRFIEALISEIQIFPERQPNGQWLKSIKFKLPIIGENMELSLDNDKHVE

SEQ ID NO: 28552 - DNA, 50 bp, Ruthenibacterium lactatiformans
  source 1..50: mol_type = genomic DNA
agtttggacaatgataagcatgtggagacggtagtattattgtccaaact

SEQ ID NO: 28553 - DNA, 40 bp, Ruthenibacterium lactatiformans
  source 1..40: mol_type = genomic DNA
tgctggccgccaatgtgatgagccgtgcgcaggctgcgga

SEQ ID NO: 28554 - DNA, 40 bp, Ruthenibacterium lactatiformans
  source 1..40: mol_type = genomic DNA
tgctggccgccaatgtgatgtgccgtgcgcaggctgcgga

SEQ ID NO: 28555 - DNA, 50 bp, Ruthenibacterium lactatiformans
  source 1..50: mol_type = genomic DNA
agtttggacataactaagaatggggtggtggaagaagtcattgccaaaca

SEQ ID NO: 28556 - protein, 670 aa, Selenomonas ruminantium
MAETEIIRARSWTDVHPQTLLRVAAYCRVSTDSDDQVASYKSQVDHYREKIRGTRGWLLVDVYADEGITGTSFEKRKEFKRMIDDCMAGKIDMVITKSLSRFSRNTEDTIKYVRLLRDRAIPIVFEEEHINTCSMDGELMLTVLGAIYQQEVQNTSNHVRQGLKMKMKRGEAVGRVKVYGYDYDKSTKTLTINPEEAEVVRFIFQRYVEGLGAHKICLELEEKGIKAPKIDYWTNAAIIRIIKNVKYRGDLLQGKIYVNDPIRRQAVINFGERDRYYVKNHHEAIIDEELFDKAQEILRNRREKYNLSQVTGKHREKKQSEVFCKKIYCAECGKAFVKRRRQRRSGGKPDLIKWQCGGRANHGSKCSNKREWHNSWIESAFVESFNLLCRTGYSSMDAFLDVMKTVIRKKERERKELGRYVKADVDKLQQQMDMLLNQNLAGDIEKALFNARYNALRKELIKAKSEAEKIASRLKNSNGLVDVIRKLQIELRQKGPLEQFDAKVFEEVVDRVVIGREENKEYITFIYRDGEENSFNIESFQKAVGLKRQLNMVSAHHKNKKDNMHLSKHKQNVGLLPRLDSRGGADCSHHTVKKTTEVELTTKAEQGNFDKNEGKVAAVDIENCSMHSVKGSLHNTLSTKNAMSEPLDITGQNDHVIEGAEDCSMRSVNR

SEQ ID NO: 28557 - DNA, 50 bp, Selenomonas ruminantium
  source 1..50: mol_type = genomic DNA
actgctccatgcgtagcgtaaacaggtcgttagaatacgatatgggtata

SEQ ID NO: 28558 - DNA, 40 bp, Selenomonas ruminantium
  source 1..40: mol_type = genomic DNA
ggcaggtttttctttattgggagtgctcatcgcgctatgt

SEQ ID NO: 28559 - DNA, 40 bp, Selenomonas ruminantium
  source 1..40: mol_type = genomic DNA
ggcaggtttttctttattgttagtgctcatcgcgctatgt

SEQ ID NO: 28560 - DNA, 50 bp, Selenomonas ruminantium
  source 1..50: mol_type = genomic DNA
actgctccatggcgtgcccaaatatttggttagatattattctgggtatg

SEQ ID NO: 28561 - protein, 507 aa, Escherichia coli
MKRAISYIRFSSEKQSRGDSLRRQSKLVTDWLKAHPEYHLDESLTFRDLGVSGFTGKHLKGGLGDFLTAIEKGLVKAGDTLLIESLDRLSRQDVDQASELLRNILRSGVDVVTLSDGEHYTKESLKDPLALIKSILIMQRSHEESLRKSERIQAAWDAKKEAAKAGIKISKRCPAWLKLNDDRKTFSVIPEKVETVRRCFQLRLEGKSIWEIVRTLNDEGHQTLNQYKAGKFGQTSVQDLLKNRSVIGYFTPKGCEEISGYYPAIMDETTFYKVQQLSYARYGRKPASDKPMAVNLFRGVIRCSECGHALIITGFSDTRSGIYRCPLRNENRCNAKGLSRKQTDGTLLALLSRLDRFDSDMTNTVDTLRLHREHISNNIEKLVQLSLEIEDLSAITSKLKQLKGELSQVDADIEKETQRLKSIDVGCLSDCDLTTKAGRIEAQLIIKSAVKEVVLNTAKRRCKVTFHNGKAITLPITENPSEDVTEAMQSLSEVTERGLIDVDEVII

SEQ ID NO: 28562 - DNA, 50 bp, Escherichia coli
  source 1..50: mol_type = genomic DNA
tagtgcatttagaccttgatgattttaattaggcacgtttaaatacacca

SEQ ID NO: 28563 - DNA, 40 bp, Escherichia coli; identical to SEQ ID NO: 5188
  source 1..40: mol_type = genomic DNA

SEQ ID NO: 28564 - DNA, 40 bp, Escherichia coli
  source 1..40: mol_type = genomic DNA
cggcgttaatcgggtgattgtagacagccgcccggttcat

SEQ ID NO: 28565 - DNA, 50 bp, Escherichia coli
  source 1..50: mol_type = genomic DNA
taatgcatttctttcttaataattgtcattatgaaatgtatcatacacaa

SEQ ID NO: 28566 - protein, 503 aa, Clostridium perfringens
MKRIAIYSRKSVFIEGSISIETQINMCKEYMINKFPDATFEIFEDEGFSGGNTNRPAFQKMLKLAELKEIDIVVCYKIDRIARNTLDFLNILEIFKKNNVELVSITEGFDPNTQMGKVMLTLLASFAEMERTNIQQRVKDSMFSLAQKGNWTGGAPPLGFKVKESGGIEIDNKSLILDAFNMKFKKYKNTEIIEYIESKYNHKFVNTTLASMLRKPIYTKSSKEVSTYLKTKGYKILREENNSNSYYTYKNNNQDYAIVNNDIEGLIDPYVWISINKAMDDNSNGETNRFSEKFWLTKTLRCKYCGKTYCGQTKIVKSKYTNKDGDSKEYIGTYEYYMCRDMFRGRLKTCENTKRLKKVDLEKKIEELIYILKDRSIFEKKYYKKEVDNPAKELKELESNMKKLDKTINNLTDKIALLSNDAAMILIDKIETLVKEKKVLKDKMIKIELESLDNIDGKEEFIYENILEFNTNLSVDQKRNIAINIFKEIVYDYKTDKFEVFFN

SEQ ID NO: 28567 - DNA, 50 bp, Clostridium perfringens
  source 1..50: mol_type = genomic DNA
tttgttcaacttagaagtgtagcacttccaccaatgtttattttgacaaa

SEQ ID NO: 28568 - DNA, 40 bp, Clostridium perfringens
  source 1..40: mol_type = genomic DNA
cttcatgtccattgaaacacttccaccagtagcgtggaag

SEQ ID NO: 28569 - DNA, 40 bp, Clostridium perfringens
  source 1..40: mol_type = genomic DNA
cttcatgtccattgaaacacatccaccagtagcgtggaag

SEQ ID NO: 28570 - DNA, 50 bp, Clostridium perfringens
  source 1..50: mol_type = genomic DNA
gctttggaagctaaaagtgtagcacatcaaacaatgacttgtttgaataa

SEQ ID NO: 28571 - protein, 556 aa, Rhizobium leguminosarum
MKPKAYSYIRMSTDVQLKGDSLRRQSEESRRYADENDLDLVEDFRLEDIGVSAFHGKNVAQGALGEFLVLCEQQIIQAGSYLIVESLDRISRQNPQVATSLFLQILGAGINIVTLTDRHVYRAGSSDFTDIIVSVVIMSRAYEESRTKSLRVGAAWENKRRNIHDKKLTQVAPIWLRLSADRTAFETVPERVAVLRWIFEEADQGKGSLQISRSLNQQGVPTFAPSKGWYESYVSKVLTNRAVLGEFQPHRYIDGKRVRSGEPIPNYFPAIVTREQFERIQVGRAVRRLRGAGRKGQNNINLFQGVARCGYCSARMMIVNKGTGPKGGVYLRCDRARRSADCSASGWPLDHFEGAFLWFVEELDLSAVVEGPAGEEVRKTLEGRAAIISSDIGAQKKMRERAFDLLGEPSSATAFVRVKIDDASMKIDELERNLASIREAIMVTAVGQKRPFEEVRRMIKEIGRWQTADGDSRSRVADWIKRNVNELLIFSDGLDERDPVADTKPRQFSVALTSGEFRTVQISGNDPTVASYSVHANNDQWVLTEDSKLSIHREAT

SEQ ID NO: 28572 - DNA, 50 bp, Rhizobium leguminosarum
  source 1..50: mol_type = genomic DNA
tttacattaatccacttcacaatccagatgttgaggtggattaattaatg

SEQ ID NO: 28573 - DNA, 40 bp, Rhizobium leguminosarum
  source 1..40: mol_type = genomic DNA
tcccggcaaggtcggcatgcagatcgtcggtctgcccgac

SEQ ID NO: 28574 - DNA, 40 bp, Rhizobium leguminosarum
  source 1..40: mol_type = genomic DNA
tcccggcaaggtcggcatgtagatcgtcggtctgcccgac

SEQ ID NO: 28575 - DNA, 50 bp, Rhizobium leguminosarum
  source 1..50: mol_type = genomic DNA
tttacattttatcaatttacaatatagattttaggggattgtgatttatg

SEQ ID NO: 28576 - protein, 523 aa, Vibrio lentus
MNTYGYIRVSTEEQKKVEKTGVQRQLKFINKCAKSLGCDNPIIIDDTGMSAHASSSKKKTNITHGKLRKFLDDVAKGKHDGDVFIVEDMDRLSRDNDAGTLALIQMRQGGVTVHTKDGVQGKELVSSLLTTVKLALAQQESDAKSHKIKGAYREKIRRAKAGEKTPFNQIPHYYYWDKVKKDYFYHDYYKQAVNRAVDLYLDGHGYGYIAKVLQDEGYKGSARKSSEWLGSHVSTLLHHKSLHGDFHINGETIVNMFPKMMSDEKYTKLKLALSQREKFGRGGQKFGQTLITALGGITRCGDCHGAVVKNRDRFGRYVLKCPVCSRGASKEGRKASALLGYIEEKVFAVLAFDFKPHMNKTDSDVDDRINSVLVDIKAKEDSIQSFFDMIEENPSLTAMVGERVGKLNREIKSLNGRLKELELEKSAEDIDDDVYIKLIELETDIFDKKCQESIALARTYISKLVNRIEVFFNGQGDCKNTVTVTVELKDNTTFEIELCRKKKDAVSLIVRNEMLNNGMAKLI

SEQ ID NO: 28577 - DNA, 50 bp, Vibrio lentus
  source 1..50: mol_type = genomic DNA
gggcataggttagtggttgcctgttcgcaagtgtatggtaagatatgcct

SEQ ID NO: 28578 - DNA, 40 bp, Vibrio lentus
  source 1..40: mol_type = genomic DNA
aggcatcattgaagcttggtcccaaccacaaatagaggct

SEQ ID NO: 28579 - DNA, 40 bp, Vibrio lentus
  source 1..40: mol_type = genomic DNA
aggcatcattgaagcttggtgccaaccacaaatagaggct

SEQ ID NO: 28580 - DNA, 50 bp, Vibrio lentus
  source 1..50: mol_type = genomic DNA
gagcataggaggcaagttgcctgctgtcaagggggtaaagggatatgatt

SEQ ID NO: 28581 - protein, 523 aa, Vibrio cyclitrophicus
MNTYGYIRVSTEEQKKSEKTGVQRQLKFINDYAKTNGFAAPTIIDDTGMSSHQSTKSKKTNMTHGKLKRFLDDVAKGNHDGDVFIVEDMDRLSRDNDAGQLALINMRQGGVAVHTRDGVQGKELASSLITTIKLVLAQQESDNKSHKIKEAYQEKIRRAKAGEKTPFNQIPHYYYWDAVKKDYFYHDYYKQAVNRAVDLYLDGHGYGYIAKILQEEGHRGSARKGSEWLGSHVSTLLHHKSLHGDFHINGETIVNMFPKMMSDEKYTRLKLALSQREKFGRGGQKFGHTLITALGGITRCGDCHGAVVKNRDRFGRYVLRCPVCIRGASKEGRKASALLEYIEEKVFSVLAFDFKPHMNKTESDVDDRINSVLVDIKAKEDSIQSFFDMIEENPSLTAMVSERVSKLNNEVSKLKNNLKELELEKSAETIDDDVYIKLVELETDIFDKKCQESIALARTYISKLVNRIEVFFNGHADYKSTVTVTVELKDSTVFEVEICRKKKDAVSLIVRNEMLNNGMAKLI

SEQ ID NO: 28582 - DNA, 50 bp, Vibrio cyclitrophicus
  source 1..50: mol_type = genomic DNA
gggcataggttagttgttgcctgttcccaagtgtatggtaagatatgcct

SEQ ID NO: 28583 - DNA, 40 bp, Vibrio cyclitrophicus
  source 1..40: mol_type = genomic DNA
tggcatcatggaagcttggtcccaactacaaatagaggcg

SEQ ID NO: 28584 - DNA, 40 bp, Vibrio cyclitrophicus
  source 1..40: mol_type = genomic DNA
tggcatcatggaagcttggtgccaactacaaatagaggcg

SEQ ID NO: 28585 - DNA, 50 bp, Vibrio cyclitrophicus; identical to SEQ ID NO: 28580
  source 1..50: mol_type = genomic DNA

SEQ ID NO: 28586 - protein, 541 aa, Vibrio vulnificus
MKNRYLLPQVYLYMRFSKKRQEDGDSLRRQMKLAEETSKKHNIPINEDLIMRDRGLSAFKAEHIKRGALGKFIAAIEDGLIAEGSILIVESMDRLSRDTPLAAQIQFNILMSKGITVITANDGLTYNEATLATESSKLFLIMGSMQRAHDESKHKHIRSLEAIEAKIQAFKEGAKPKSVGGDPHWIKTQDGYLQLDQERADIVKLIVDMYLKEHKGLNLIARELTKRGYSTPSGKRKAWGATTIRKILDNKALYGHKKFSLTYLKNGRYIAEPPYELDDYYPPIITKEEYDIIQVRKGNTSGSRESYGEDENVYLLSAYGKGKSVCAHCGKNTHTQYQKQKNRKNEYTGRNVQRLHCGSHKESSDCQPSFICQELEMAFIRAICTHINPQFLEKENAGKIDEERLRKDISILDAKIDALLKSIDELDSIDIIMKIKEKIRAFDLEKKELSGLLNQSYDHQTGAEDFHKMRELAEKCIDIKNSNERRTFKKILLQSIDKITINFEEKSLTAQFMNGNNFSLGKDGQGVYQTVTFYKRRPKNH

SEQ ID NO: 28587 - DNA, 50 bp, Vibrio vulnificus
  source 1..50: mol_type = genomic DNA
gtagttaacattcgacactggctgtccgcctggtgtagaatcttaacagc

SEQ ID NO: 28588 - DNA, 40 bp, Vibrio vulnificus
  source 1..40: mol_type = genomic DNA
gaaatagccaaatgaaccatcggtccaatggatatcctgc

SEQ ID NO: 28589 - DNA, 40 bp, Vibrio vulnificus
  source 1..40: mol_type = genomic DNA
gaaatagccaaatgaaccataggtccaatggatatcctgc

SEQ ID NO: 28590 - DNA, 50 bp, Vibrio vulnificus
  source 1..50: mol_type = genomic DNA
ttaattagctgggcacactggctgtatgcctgttgtctcagtttctcagg

SEQ ID NO: 28591 - protein, 515 aa, Enterovibrio norvegicus
MEKAYSYIRFSTKGQIEGRSLQRQSETANRYAEEHGLALQPLSFQDLGVSGFKGRNSEQGALSHFIDAVKEGAISEGSWLLLESFDRMSRQPVEKSMRLLMELVDLGINVVTLMDNQVYKKGQLDMTKLIISLVIMSRAHEESASKSKRLADAWHAKQAIAHEKPLGAHLPAWLEYNEDKTAITVNVMKAAIVKYMFMLSADGYGRVALIRRLNTEGIKPIGSRAKQWHISYVTKLLNGTSVLGEYIPHITNKLGERVPTGNILKDYYPQIIDKDLWHRAQAATQARRKGGTGAIRNGKTKNIFSGFVSCECGSTVQFVNKGTSDKGGYYLVCGTARHGAGCKYVGHRYYSVQWVVLIALQKLLTTFANKPNDNAKEMQLEGELVGLEKKVSNLISDLEENGSSTYISTAIRKAEQRVEAIKQELIDLQSLKVIEDDYVDLEEVTAKINEDSERLRLHQYLKRHIETVVLHRCKERIDIKVKNGDNIHLRYTPSDDTWESDSGVRFKVTFDTRWG

SEQ ID NO: 28592 - DNA, 50 bp, Enterovibrio norvegicus
  source 1..50: mol_type = genomic DNA
taggtctattagtacctataggtaagcaattaaggatacaatagacccat

SEQ ID NO: 28593 - DNA, 40 bp, Enterovibrio norvegicus
  source 1..40: mol_type = genomic DNA
ccctggcggtccgagaaaaagaaggttgtgggaacctgcc

SEQ ID NO: 28594 - DNA, 40 bp, Enterovibrio norvegicus
  source 1..40: mol_type = genomic DNA
ccctggcggtccgagaaaaccaaggttgtgggaacctgcc

SEQ ID NO: 28595 - DNA, 50 bp, Enterovibrio norvegicus
  source 1..50: mol_type = genomic DNA
tagggctatctctccatctagttgcccaaatatggaaaaaatagacctct

SEQ ID NO: 28596 - protein, 471 aa, Halobacillus salinus
MTIGIYIRVSTLEQAKEGYSISAQRERLSSFCSAQGWKNYKFYVDEGVSGKDTKRPQLQKLLEDMESGKLEMILVYRLDRFTRSVLDLHKMLEKMDKHNCVFKSATEPYDTSTAMGRMFITIVAAMAQWEIENSSERIRMALEEKVSEGQRVGNIPYGFDLNSEEVLVMNEKAPVVIDAIEKVISGWSALAVSEYLNKTNSDKVWRAQTVLRLLRNPALYGATRWNDKVYENTHEGMITKEEFLKLQQILTDRTHHHRRNVTNDYLFQGVLSCPTCSKFLSVNRYIRKRRDGSEYKGAIYRCNRCNKDGKFNKSPGEHRFLDALLRYMRNVTVEHLGLVEPEVKKTDFYEEQLKQIEKKREKYQRAWASDLMDDDEFKKLMDETKEPYEDLKQKVNEMDEPQKVDKEKIEGIIMTFNENFSRLTQLEKKSFISTFIRRIDFEVIPQPPIRPDKTKSQYGKDKIEITNVEFY

SEQ ID NO: 28597 - DNA, 50 bp, Halobacillus salinus
  source 1..50: mol_type = genomic DNA
ggttgtgtttatgtcactcgctcaactgataacgacacataaacacaacc

SEQ ID NO: 28598 - DNA, 40 bp, Halobacillus salinus
  source 1..40: mol_type = genomic DNA
gattttattcactggcccaacaggatccggaaaaacgacc

SEQ ID NO: 28599 - DNA, 40 bp, Halobacillus salinus
  source 1..40: mol_type = genomic DNA
gattttattcactggcccagaaggatccggaaaaacgacc

SEQ ID NO: 28600 - DNA, 50 bp, Halobacillus salinus
  source 1..50: mol_type = genomic DNA
ggttgtgtacagtacactatcccagaggaaaatcacaaagcaacacaact

SEQ ID NO: 28601 - protein, 499 aa, Mediterranea massiliensis
MKNCVIWTRVSTKHQEDNGGSLDDQRCKCEAFAKQNGYDIKGYFGGTHESAKTPGPLLRDMYQAIKRDKTITYIIVAAIDRFSRNVGQASTIIDELGKQNVVVVEASTGIDTSTREGVMMIKFKLTLAEWDNGNRTDKFTSGRKHCLESGVYCGAAKPLGYDKHGKSMGTTFTINDKGKLIAKAFRWKLQGLANHQIISKLAVYGLEMSKQKLHHILTNPFYAGKIRHKMLAGKLVDGNQPCVVSYADFLRVQDILNGKTGVYKHQKETPRFPLKRHVLCSKDHTPFTAYTVKRKNIDYYKCNLNGCKTNVSAKKLHSKYEELLRTYKIPEVLKPILHDIISTMILSDNEEQRKNESLLKKQKTEYQNKLKACKVRFGIGDIDEDVYRLTNEELQGKLNKIELELAQCQKELSNRKEEVDEVFLMCCKLDSLWKNSSLEIEQKLQNLLFPHGILWDKEIDDYRTFDENEALSVIARISRSYKNEKEDFLDGKSSEVKLC

SEQ ID NO: 28602 - DNA, 50 bp, Mediterranea massiliensis
  source 1..50: mol_type = genomic DNA
ggaaaatcctctgaagtaaaattgtgcgaatatatgaaagattatcgaac

SEQ ID NO: 28603 - DNA, 40 bp, Mediterranea massiliensis
  source 1..40: mol_type = genomic DNA
cgcccctcgcttcgttgtgtgcgggtgataggactcgaac

SEQ ID NO: 28604 - DNA, 40 bp, Mediterranea massiliensis
  source 1..40: mol_type = genomic DNA
cgcccctcgcttcgttgtgctcgggtgataggactcgaac

SEQ ID NO: 28605 - DNA, 50 bp, Mediterranea massiliensis
  source 1..50: mol_type = genomic DNA
ggtaaataccaagaagtatgattgctggatcatatgtttagttttcgaag

SEQ ID NO: 28606 - protein, 522 aa, Vibrio fluvialis
MRFSRPEQAKGTSIERQSNFAEQYALEHGLELDKSLTMMDKGLSAFHGVHKTKGAFGQFLAAVTAGKVPSGSVLVVESLDRLSREDPLIAQAALTDLILSGITVVTAADNQVYSREEIQQNPFKLIMSLVVMIRANEESETKQRRSNAFLKSALNQYQANGKIRRLGSDPSWLDFNKDNDTYSFNERVEVIRRILNLYNQGIGSLKIARQLTEENIPTLSGKRSAWGQTTVANIVKSHALYGMKRINVQGVEYDLEDFYPALITKSKWLALQQHRTKRSKSMHGRGEVVHLITGHGKGFTTCGYCGGGLGAQTQKQYKRSGEYSRTVTRLHCLTHKETSSCCSSVFLEPIESAVLFAACIGVEPQSLVPTVNNVNYSALIDEVENKVKHIVEQVTAGAPWDLFKDAHDRLKLEKQKLIKERDSQKPDVNQSDVQKWVNKLVELADKARANDKEARLKCRTLINSICKSIVIKLRGHDLKSEPVVTITFVTDEQFEFKVGKNGAVQFVDNGMAVNRRLKPLLA

SEQ ID NO: 28607 - DNA, 50 bp, Vibrio fluvialis
  source 1..50: mol_type = genomic DNA
tagttatgcactgtacatttgctttctatctaatgtatagtgataacttg

SEQ ID NO: 28608 - DNA, 40 bp, Vibrio fluvialis
  source 1..40: mol_type = genomic DNA
gaagtagccgaagctgccgtctgtccaatgaatgtcctgc

SEQ ID NO: 28609 - DNA, 40 bp, Vibrio fluvialis
  source 1..40: mol_type = genomic DNA
gaagtagccgaagctgccgggtgtccaatgaatgtcctgc

SEQ ID NO: 28610 - DNA, 50 bp, Vibrio fluvialis; identical to SEQ ID NO: 7095
  source 1..50: mol_type = genomic DNA

SEQ ID NO: 28611 - protein, 522 aa, Vibrio parahaemolyticus
MRFSRPEQAKGTSIERQSNFAEQYALEHGLELDKSLTMMDKGLSAFHGVHKTKGAFGQFLAAVTAGKVPSGSVLVVESLDRLSREDPLIAQAALTDLILSGITVVTAADNQVYSREEIQQNPFKLIMSLVVMIRANEESETKQRRSNAFLKSALNQYQANGKVRRLGSDPSWLDFNKDNDTYSFNERVEVIRRILNLYNQGIGSLKIARQLTEESIPTLSGKRSAWGQTTVANIVKSHALYGMKRINVQGVEYDLEDFYPALITKSKWLALQQHRTKRSKSMHGRGEVVHLITGHGKGFTTCGYCGGGLGAQTQKQYKRSGVYSKTVTRLHCLTHKETSSCCSSVFLEPIENAVLFAACIGVEPQSLVPTVNNVNYSALIDEVDNKVKHIVEQVTAGAPWDLFKDAHDRLKSEKQKLIEERDSQKPDVNQSDVQKWVNKLVELADKARANDKEARLKCRTLISSICKSIVIKLRGHDLKLEPVVTITFVTDEQFEFKVGKSGAVQFVDNGMAVNRRLKPLLA

SEQ ID NO: 28612 - DNA, 50 bp, Vibrio parahaemolyticus
  source 1..50: mol_type = genomic DNA
tagttatgcactgtacatttgctctctgtctaatgtatagtgataacttg

SEQ ID NO: 28613 - DNA, 40 bp, Vibrio parahaemolyticus; identical to SEQ ID NO: 7098
  source 1..40: mol_type = genomic DNA

SEQ ID NO: 28614 - DNA, 40 bp, Vibrio parahaemolyticus; identical to SEQ ID NO: 7099
  source 1..40: mol_type = genomic DNA

SEQ ID NO: 28615 - DNA, 50 bp, Vibrio parahaemolyticus; identical to SEQ ID NO: 7095
  source 1..50: mol_type = genomic DNA

SEQ ID NO: 28616 - protein, 522 aa, Vibrio parahaemolyticus
MRFSRPEQAKGTSIERQSNFAEQYALEHGLELDKSLTMMDKGLSAFHGVHKTKGAFGQFLAAVTAGKVPSGSVLVVESLDRLSREDPLIAQAALTDLILSGITVVTAADNQVYSREEIQQNPFKLIMSLVVMIRANEESETKQRRSNAFLKSALNQYQANGKVRRLGSDPSWLDFNKDNDTYSFNERVEVIRRILNLYNQGIGSLKIARQLTEASIPTLSGKRSAWGQTTVANIVKSHALYGMKRINVQGVEYDLEDFYPALITKSKWLALQQHRTKRSKSMHGRGEVVHLITGHGKGFTTCGYCGGGLGAQTQKQYKRSGVYSKTVTRLHCLTHKETSSCCSSVFLEPIENAVLFAACIGVEPQSLVPTVNNVNYSALIDEVDNKVKHIVEQVTAGAPWDLFKDAHDRLKSEKQKLIEERDSQKPDVNQSDVQKWVNKLVELADKARANDKEARLKCRTLISSICKSIVIKLRGHDLKSEPVVTITFVTDEQFEFKVGKSGSVQFVDNGMAVNRRLKPLLA

SEQ ID NO: 28617 - DNA, 50 bp, Vibrio parahaemolyticus; identical to SEQ ID NO: 28612
  source 1..50: mol_type = genomic DNA

SEQ ID NO: 28618 - DNA, 40 bp, Vibrio parahaemolyticus; identical to SEQ ID NO: 7098
  source 1..40: mol_type = genomic DNA

SEQ ID NO: 28619 - DNA, 40 bp, Vibrio parahaemolyticus; identical to SEQ ID NO: 7099
  source 1..40: mol_type = genomic DNA

SEQ ID NO: 28620 - DNA, 50 bp, Vibrio parahaemolyticus; identical to SEQ ID NO: 7095
  source 1..50: mol_type = genomic DNA

SEQ ID NO: 28621 - protein, 529 aa, Vibrio cyclitrophicus
MRKVYSYMRFSRPEQAKGTSIERQSSFAEQYALAHGLELDKSLTMMDKGLSAFHGMHRTKGAFGQFLAAVAAGKVPSGSVLVVESLDRLSREDPLIAQAALTDLILSGITVVTAADNQVYSREEIQQNPFKLIMSLVVMIRANEESETKQRRSNAFLKSALNQYQANGNIRRLGADPSWLDFNKDDNTYSFNARVDVIRRILSLYNQGIGSLKIARQLTEESIPTLSGKRNAWGQTTVANIVKSHALYGMKRINVQGVDYDLEDFYPALITKSKWLALQQHRSKRSKTMHGRGEVVHLITGHGKGFTTCGYCGGGLGAQTQKQYKRSGEYSRTVTRLHCLTHKETSSCCSSVFLQPIESAVLFAVCIGVEPQSLVPTVNNVNYSALIDEVENKVKHIVEQVTAGAPWDLFKDAHDKLKLEKQKLIKERDSQKPDVNQSDVQKWVNKLVELADKARANDKEARLKCRTLINSICKSIVIKLRGHDLKSEPVVTITFVTDEQFEFKVGKNGAVQFVDNGMAVNRRLKPLLA

SEQ ID NO: 28622 - DNA, 50 bp, Vibrio cyclitrophicus
  source 1..50: mol_type = genomic DNA
tagttatgcactgtacatttgctttctgtccaatgtatagtgaaaactta

SEQ ID NO: 28623 - DNA, 40 bp, Vibrio cyclitrophicus; identical to SEQ ID NO: 8008
  source 1..40: mol_type = genomic DNA

SEQ ID NO: 28624 - DNA, 40 bp, Vibrio cyclitrophicus
  source 1..40: mol_type = genomic DNA
aaaatagccgaatgcgccgggtgtccagtggatgtcttgc

SEQ ID NO: 28625 - DNA, 50 bp, Vibrio cyclitrophicus; identical to SEQ ID NO: 7095
  source 1..50: mol_type = genomic DNA

SEQ ID NO: 28626 - protein, 575 aa, Vibrio parahaemolyticus
MTKMAYSYTRLSTEKQINGHGFTRQREAIEKVCCQYGWQLSDQTFNDLGVSAWKGANATTGALSQFIDLAKKGAIRPNSVLIVESVDRLSRQQVDKSLRLMLELLEVGVSIFTLSDSKLYTTNSDSVMLDLMMWLMTAQRAHEESEIKSLRVRAAKKKNKELIRKGIIVTRKCPEWLTVSDDKSCFLVNNERAEIVRKIFTWYSQGFSTKPIALKLNELGIPYWGKSSTWSYRHIRSLLKHRGVIGEIQLLKRIDGRDVSDGDPVEDYYPAIIDRGLWATCQQIKSSKTTAKGRIVERGMANLFRGLLKCECGSGLAINSSTVKGRTYRFLRCSQLKTTGCQAKNWHYEKTERILLIALRHSLSSFCEEDHAVSLRESQHYLARINEELQEKERQAENAINYLLDKPSRLLEARLQTLEDDIARLKAIQEQAEHRLEAVHYEKSTALDKVEELQRVLEDIANDDDSRHKANGLLRRLIDTVTLGSISNPRSKEFMELSGNEYHGLIVIKRRDGLEVRVEVLKNYELSISWEGDEFTVIECPPTQQSKSQHAPQKFINVGGQTVDLWNDEGWVAST

SEQ ID NO: 28627 - DNA, 50 bp, Vibrio parahaemolyticus
  source 1..50: mol_type = genomic DNA
gtttggggaattgatttccttattaaggtgctttatcgtattccctgaaa

SEQ ID NO: 28628 - DNA, 40 bp, Vibrio parahaemolyticus; identical to SEQ ID NO: 4428
  source 1..40: mol_type = genomic DNA

SEQ ID NO: 28629 - DNA, 40 bp, Vibrio parahaemolyticus
  source 1..40: mol_type = genomic DNA
atttggctggcatgtggtcccggttctctacagaacatag

SEQ ID NO: 28630 - DNA, 50 bp, Vibrio parahaemolyticus
  source 1..50: mol_type = genomic DNA
ttttggagagctgttaaactttttccaatgctttaagtagctccctgaaa

SEQ ID NO: 28631 - protein, 515 aa, Microbacterium oxydans
MGTPAAIYARLSVDRDGTKVGIDTQLEDSRKLAEQRGWTVVAEYVDRNLTAADKLVKRPEYDRMVADFELSRFSNLVCWDLDRLTRQPRQLEDWIDAAEDRGLRIVTANGEADLGTDGGRMYARIKAAVAKGETERASARQRRNKLERRKNGLWHGGTPPYGYRAEAGRLVPNPAEVERIREVARRMLDDREAMHSIVTDWNNRGIQTRRGNHWRQANLRSIMLNRVMLGETVLGTPAQWDPIIDQRTFDRMNALLTDPSRKVIHSPGVKGGKYSMGGGLTVCGACGKPLITHIRTEGGSKSVTIACLARVHGPSDKHPRERRTRGGVERPEDTGRVSIVHDALEEVVWEELIGKLKATPRFMQRMSEQDPETDDQLDALEQERRDLRAQKERAQKAYVLGIMDERDSVAEVQRIDTLLDALGKEYDSLLRLPISLADFDPEKGIDWRSWTAGRRRAALKGFVKRIEVHSYPEGMARTRRRRKNESEQDYLDARWKILKEATASRIRIVWQWESA

SEQ ID NO: 28632 - DNA, 50 bp, Microbacterium oxydans
  source 1..50: mol_type = genomic DNA
tgattgtattcctgattgtttgactcgtcgaataatcggaaatacaatcg

SEQ ID NO: 28633 - DNA, 40 bp, Microbacterium oxydans
  source 1..40: mol_type = genomic DNA
gcgtgagaactcggccgcttcatcgaggaacaacacgccg

SEQ ID NO: 28634 - DNA, 40 bp, Microbacterium oxydans
  source 1..40: mol_type = genomic DNA
gcgtgagaactcggccgcttaatcgaggaacaacacgccg

SEQ ID NO: 28635 - DNA, 50 bp, Microbacterium oxydans
  source 1..50: mol_type = genomic DNA
aaaatttttaggcaattgtttgcctagtggaataatacagcatacattct

SEQ ID NO: 28636 - protein, 505 aa, Amedibacterium intestinale
MAYAIYLRKSRADAEMEALGEMETLARHEKILTELAKRQELPIGRIYKEIVSGESIADRPQMKQLLDDVYLKKWEGVLVMEVERLARGDTRDQGDVAEAFKYSNTKIITPIKTYDPNNEYDEEYFEFGLFMSRREYKTIKRRLDRGRKISVQEGNYIGGCAPYGYDIWRRGKKDITLKPNEDAKIVKMIYEWYANDNLGASKIASKLSLMGVTSPSGNKEWNHSCIIDILKNPHYIGKIRWKNREMKKEFVDGKMKKMNVRNKVNFEIYDGKHEAIIDEELYERVQNRIGKNSKTQISRELQNPLAGILCCKSCGKKLVYQGYSTRPNMSPRYVHVHSVFCKMKSSSAKEVIDAVIIGLKAHIEDFELKMTNEFEIENKKKQDDVIEFIEKELIKLKKSRTKLFDYLEDGIYTKEEFIERKGILTVKIEELEKQLEAEKLKVGEEVNYEEKIVTLKQIIESLKDDSIGAKYKNDFLKEVIDHIDYECEDFGRGRGGQIYLDIFLK

SEQ ID NO: 28637 - DNA, 50 bp, Amedibacterium intestinale
  source 1..50: mol_type = genomic DNA
gacatctatgatgatggtggctataaataataaccattatgatagatgtc

SEQ ID NO: 28638 - DNA, 40 bp, Amedibacterium intestinale
  source 1..40: mol_type = genomic DNA
tacgatagtgggttattataaaagactcttgatactgttt

SEQ ID NO: 28639 - DNA, 40 bp, Amedibacterium intestinale
  source 1..40: mol_type = genomic DNA
tacgatagtgggttattattaaagactcttgatactgttt

SEQ ID NO: 28640 - DNA, 50 bp, Amedibacterium intestinale
  source 1..50: mol_type = genomic DNA
cacatcaatgcatgtggtagctattattactagccacttttacagatgca

SEQ ID NO: 28641 - protein, 452 aa, Listeria monocytogenes
MKAAIYIRVSTQEQVENYSIQAQTEKLTALCRSKDWDVYDIFIDGGYSGSNMNRPALNEMLSKLHEIDAVVVYRLDRLSRSQRDTITLIEEYFLKNNVEFVSLSETLDTSSPFGRAMIGILSVFAQLERETIRDRMVMGKIKRVESGLPLTTAKGRTFGYDVVDTKLYVNKEEAKHLQLIYDIFEEEKSITFLQKKLKELGFKVKSYSSYNKWLMNDLYIGYVSYSDKVHVKGIHEPIISEDQFYRVQEIFSRMGKNPNMNKESSSLLNNLIVCEKCGLSFVHRVKDTVSRGKKYRYRYYSCKTYKHTHELEKCGNKIWRADKLEEIVIDRVKNYSFATRNLDKEDELDSITEKLKTEHSKKKRLFDLYMNGSYEVAELDKLMADIDAQINYYNSQIEANEELKRNKKVQESLSELATVDFDSLEFREKQIYLKSIINKIYINDEQVTIEWI

SEQ ID NO: 28642 - DNA, 50 bp, Listeria monocytogenes
  source 1..50: mol_type = genomic DNA
tttagtctctcgatttctctcactggacggagaataaacgagatactaat

SEQ ID NO: 28643 - DNA, 40 bp, Listeria monocytogenes; identical to SEQ ID NO: 1298
  source 1..40: mol_type = genomic DNA

SEQ ID NO: 28644 - DNA, 40 bp, Listeria monocytogenes
  source 1..40: mol_type = genomic DNA
tttcggatcaagctatgagtaacgcaaagagggaactaaa

SEQ ID NO: 28645 - DNA, 50 bp, Listeria monocytogenes
  source 1..50: mol_type = genomic DNA
tttagtctcagttttcttgtcagttaaatggggataaaaatcatactaat

SEQ ID NO: 28646 - protein, 507 aa, Clavibacter michiganensis
MTRVAIYLRQSKDAEGDGMAIDRQRDGCLALAEHEGWTVDEDRIYTDNNTSATSAKARPAYQRLIADVRARKVDVVIAWNLDRLTRKPREIEDWIDMHEAYGVNLLTSERRERIDLSTESGRMILRITASVARQEVERKGRRQKESNAQGRSLGLPPVGRRAFGYTPLRAGARGTQATRTGADGLTYPDYGHEPLEAEAAAVRRGFDLLLAGASLHSIAREWTAAGLTTTVGQPWTQNTVRGVLTNPRYAGLVALPRVAGSPGHRASRYDLSALAAGTWEPLVPLETWTAASEVLRDPGRRASSGAPRRWLLSGLAVCGVEVDGRPCGATVKAGATRDKVATYRCSASSHLSRKADVADELVTAVTLARLGKADAAELLTNQEAPDLDALRAELLALQSRLASVAGLVADGTLTGDQARDATRRLKASVAATQAAMSDAGRVDVLGPLVAAEDVAEAWQALDVDRQRRVISTLMQVTMTSPGKGSRGPRDEAGRLEHTSRSVLISWR

SEQ ID NO: 28647 - DNA, 50 bp, Clavibacter michiganensis
  source 1..50: mol_type = genomic DNA
ttacgtcctaagtgtgtctatgcgatcggctgcatgcgattgagacatac

SEQ ID NO: 28648 - DNA, 40 bp, Clavibacter michiganensis
  source 1..40: mol_type = genomic DNA
ctacgaccgcgtcctccggatcgggtggacgctcgcggac

SEQ ID NO: 28649 - DNA, 40 bp, Clavibacter michiganensis
  source 1..40: mol_type = genomic DNA
ctacgaccgcgtcctccggtccgggtggacgctcgcggac

SEQ ID NO: 28650 - DNA, 50 bp, Clavibacter michiganensis
  source 1..50: mol_type = genomic DNA
ttacggcctgtgtgtgtctcagcctcctgctgcatgctcctgagcaagat

SEQ ID NO: 28651 - protein, 617 aa, Phocaeicola sartorii
MEKKVIAIIRTSTTQQEIDSQRKEVLSMAIADGYSIEEIEVVGRAGASAIKVDEAYQENMNRVYELIDTIPTIEAVYAWAIDRIGRNEEILMKLKNTLINKKIQLVIKNPSLRLLESNGDVNAGVELAFSLFATMAKQEMEQKKARFNRARKRNDEKGKYNGGYVAYGYMVKDGYIVINEEEAKIVRLIFTELASGKYSCDGLARELQERGIKFKGKKMLFSNVRGILKNKIYCGEQLNTSGTIRNVPQIVSKELYDKATAAISANNPSKTNAYTNRNLLGLRLIKCPYCGCHFSVAAKLYQCHNHNRNYYDSRQGFEKCPNGISIGVANLDRLLWYAAATVHFEYLKQLTGQRDEEIDSKVEVLNQKIKHLQSEIDSLADKRKRINIVFLDGDLSVKERDEKLSKLLKDNEKYAVQIREYEEEIGKLIALKEGDVGNEIVFENFRSLMMLDDKELQCKIARKHIKDIQLEKAEYAPYKRVLRITIQFYNHSDMQYLYLAKSIGEFFPIINGAVEKDINGNLKAIPNLEKQRKLIGKEVLSYYRMIPELIAVKKSGDKEAIAALKEKYGVSRRDLAFLLSAATRFAIPTADEALCRMAERLLNSGLIISMDSAAIPV

SEQ ID NO: 28652 - DNA, 50 bp, Phocaeicola sartorii
  source 1..50: mol_type = genomic DNA
atatgagtaaatagtaaagagtagaacccattagcatctactcatatatt

SEQ ID NO: 28653 - DNA, 40 bp, Phocaeicola sartorii
  source 1..40: mol_type = genomic DNA
catccttacaagtaagatgaagtagtagtcagcctgaagc

SEQ ID NO: 28654 - DNA, 40 bp, Phocaeicola sartorii; identical to SEQ ID NO: 28653
  source 1..40: mol_type = genomic DNA

SEQ ID NO: 28655 - DNA, 50 bp, Phocaeicola sartorii
  source 1..50: mol_type = genomic DNA
atatgagtagtatctaaggtgtaaaacacattagcataaaacattaaaat

SEQ ID NO: 28656 - protein, 518 aa, Escherichia coli; identical to SEQ ID NO: 25816

SEQ ID NO: 28657 - DNA, 50 bp, Escherichia coli
  source 1..50: mol_type = genomic DNA
gtgtatcattagaaaggttatttaaggaatataccatcttatgatacact

SEQ ID NO: 28658 - DNA, 40 bp, Escherichia coli
  source 1..40: mol_type = genomic DNA
tgaaccgggcggctgtctaaaatcacccgattaacgccgc

SEQ ID NO: 28659 - DNA, 40 bp, Escherichia coli
  source 1..40: mol_type = genomic DNA
tgaaccgggcggctgtctactatcacccgattaacgccgc

SEQ ID NO: 28660 - DNA, 50 bp, Escherichia coli
  source 1..50: mol_type = genomic DNA
gtgtaacatgggaacagtgatatactgaataaagcatgttgctatacact

SEQ ID NO: 28661 - protein, 539 aa, Pseudomonas syringae group genomosp 3
MAKNGARVYSYLRFSDPRQSTGSSADRQLQYAQKWAAEKGLILDESLSMRDEGLSAYHQRHITQGALGVFLVAIEEGRIASGSVLVVEGLDRLSRAEPIQAQAQLAQIINAGITVVTASDGREYNRAGLKAQPMDLVYSLLVMIRAHEESDTKSKRVKASIRRLCEAWQAGTYRGQIRNGKDPQWLKWTGTNWEFIPKRVATVRRALQLYLEGMGAARAIRVLHDEGLSYSDVGITALQIYRLIKLKALRGAKSLTINGEEFVLEGYYPRLLSETEWAELQHMSGQRLRRRMKGEIPGIITGIGLTYCGYCGTAVIGQNYMSRVRADGTLADGHRRLQCVSYSKNDGCGSGGSCSVVPIEKALLNFCSDRLNLQRLMQVGDEGQGLRHQLVGAQATVQKISEQLERVTAALMADDDGPAPISFLRKARELEAQKLDAEKNVINIEYELAAASRSGKPEQQEQWGELAALVNAGDYSAREKVRQLVMDTFQRIVVYMRGMGDEDRKSKFIDVQLISRTGQHRLLQINRRSGEWVASEDWD

SEQ ID NO: 28662 - DNA, 50 bp, Pseudomonas syringae group genomosp 3
  source 1..50: mol_type = genomic DNA
ggtatatttttgatttcgttaggtcaccctaacgatatcattcctacacg

SEQ ID NO: 28663 - DNA, 40 bp, Pseudomonas syringae group genomosp 3; identical to SEQ ID NO: 22608
  source 1..40: mol_type = genomic DNA

SEQ ID NO: 28664 - DNA, 40 bp, Pseudomonas syringae group genomosp 3
  source 1..40: mol_type = genomic DNA
gtcaacgagcgccttggggttacccagagaaacgaatccg

SEQ ID NO: 28665 - DNA, 50 bp, Pseudomonas syringae group genomosp 3
  source 1..50: mol_type = genomic DNA
ggtatatttcaccatttattagctttcactaaggatgtattttctatatc

SEQ ID NO: 28666 - protein, 470 aa, Salinispora arenicola
MAPKTRPRAGVIRCSIYCRISLDRKGEQVGVKTQLAACKKFATSMGWEVRDVYIDNDMSAREGAKQRPEYEALLKSQPEAVVVWHQDRLVRVPKDLERIIALGVNIHAIKAGHLDLSTPAGRAVARTLVAWSTYELEQKGERQRLANEARAVTGKPWWTRCPFGYNPDGTLNDIQAQALQQVYQDVLAGASVAGRARWLNDANFRTERGNTWTSTTLRQTLVNPRNAGIRTYLGEEVSKGAWEPIVEEETYRALVMILSRPARNIGGRGPIPDNLATGLAECGRCGGPVRAAFSRGKRGDLKAYPTYVCRLGQCVSHPRELVDRYLSARVVHYLSSAPGRAVWRQGEVGSDTARLRGEVVELRERLDAFAEDYAAGLISRSQMIKGSESVRRQLDDSEDRLAQAASSGALLGLAGDPAQVQARWDALMLDRQRAVLQALFPVIRLLPRGRGARTYDPVKSIHMPDPGDEE

SEQ ID NO: 28667 - DNA, 50 bp, Salinispora arenicola
  source 1..50: mol_type = genomic DNA
gtacctctcttttcaatttgcatgcctcagcagaatgaattagggtgcat

SEQ ID NO: 28668 - DNA, 40 bp, Salinispora arenicola
  source 1..40: mol_type = genomic DNA
gttcaggcaccagtgcatgccgtaggtgaaatagacgtag

SEQ ID NO: 28669 - DNA, 40 bp, Salinispora arenicola
  source 1..40: mol_type = genomic DNA
gttcaggcaccagtgcatgacgtaggtgaaatagacgtag

SEQ ID NO: 28670 - DNA, 50 bp, Salinispora arenicola
  source 1..50: mol_type = genomic DNA
ttacctctctcttaaatttgctcaactcagcaaaatctctgggctttcat

SEQ ID NO: 28671 - protein, 503 aa, Clostridium perfringens; identical to SEQ ID NO: 20906

SEQ ID NO: 28672 - DNA, 50 bp, Clostridium perfringens
  source 1..50: mol_type = genomic DNA
tttgtttaaatcagaagtgtagcacttccaccaatgtttattttaacaaa

SEQ ID NO: 28673 - DNA, 40 bp, Clostridium perfringens; identical to SEQ ID NO: 6243
  source 1..40: mol_type = genomic DNA

SEQ ID NO: 28674 - DNA, 40 bp, Clostridium perfringens; identical to SEQ ID NO: 6243
  source 1..40: mol_type = genomic DNA

SEQ ID NO: 28675 - DNA, 50 bp, Clostridium perfringens
  source 1..50: mol_type = genomic DNA
ttggtttaaggcccaagtgtagctcttccaccatccttttgtgagacaat

SEQ ID NO: 28676 - protein, 426 aa, Pseudomonas putida
MSRAHEESATKGGRVSSAWRAKQKEARATGKPLGKLRPLWLDVTPDGYVLNPDKAAVVRRIFDLSTKGHGSRIIAATLNQEGIPAFSAGRKNFSGLWGFSTVRHILDSRTTLGEYQPHIFIDGKRTPDGDPIKNYFPSVVTEDEFYLAQAARTSRKTHSVTKATTNFNVLAGILNCYKCGSAMHLQGQRGRKYYKCSKTTRGLCDAGIISAPRTEQVFKEILTKVDSLSLVQDSSGSLQKSLQIVEGRIASLNARQDDAEASHAEFPSRITAKLLHELEADIGALESERTAIAEQLASEKVMSKHDFFEKLDLVSFEGRVAANNLIKRLGLFIFASKNGRTDETYWVSKNNTIPIPFSAETQNLLFYLMHRGKEIRFEAMYDEYVDLQVDQGELSQVEAIFSKTESWDELPPELLALWKARHGAPK

SEQ ID NO: 28677 - DNA, 50 bp, Pseudomonas putida
  source 1..50: mol_type = genomic DNA
agcagtgttttgttgcacaacatcaagaaatgctgccacaattacctacc

SEQ ID NO: 28678 - DNA, 40 bp, Pseudomonas putida
  source 1..40: mol_type = genomic DNA
cgccagcgggcacaaattcaagaaatgctgcgccagctac

SEQ ID NO: 28679 - DNA, 40 bp, Pseudomonas putida; identical to SEQ ID NO: 28678
  source 1..40: mol_type = genomic DNA

SEQ ID NO: 28680 - DNA, 50 bp, Pseudomonas putida
  source 1..50: mol_type = genomic DNA
agccgtgttcatgagcaaaacagcaaggaatgctcccttttatccctaat

SEQ ID NO: 28681 - protein, 475 aa, Bittarella massiliensis
MEDYSVSAVIVKDLSRLGREYSYMGRLQDFIFPAYDVRFIAINDDVDSAKGENDFAVFKNVFNDYYAKDTSKKIRAVVKMRGEAGEHIASNPPYGYIKDPQDKKKWIVDEEAAKVVRRIFNLCIAGKGPMQIAKILTADRVLTVTAYHARQKGWAMPENLYQWCSKSVAGILERREYTGCTVNFKTYTKSLKFKKRMENPVENQRIFEDTQPAIIEKGQWERVQELRKNKRRPTKTGRTSMFSGLLYCADCGAKLYFCTCNTYRDDSQNHFVCSNYKSNTGSCKIHYIREQVLYRIVLETIRQTLSYVRMFRKDFKLEMLAQDEESRKAELAEKQKALSGAKKRMEDLDRIIQHIYEDNVLGKLSDSRYLKLSRQYEKEQAEIEQLAAVLEREIETQAGQVSNVNEFLKLVDKYLDIPELDAAILNELVSKIVVHSPVRENGRKHVQIDLYFTYVGQIRIPLKIGRESLNESEPA

SEQ ID NO: 28682 - DNA, 50 bp, Bittarella massiliensis
  source 1..50: mol_type = genomic DNA
ttacttccttatgggacgctgcataaaggcaggggatcataaagaagtat

SEQ ID NO: 28683 - DNA, 40 bp, Bittarella massiliensis
  source 1..40: mol_type = genomic DNA
caaaaaagggagcgcttccaaagcgctcccctttctattt

SEQ ID NO: 28684 - DNA, 40 bp, Bittarella massiliensis; identical to SEQ ID NO: 28683
  source 1..40: mol_type = genomic DNA

SEQ ID NO: 28685 - DNA, 50 bp, Bittarella massiliensis
  source 1..50: mol_type = genomic DNA
ttatttcctcattggactctaaataaatgaaggagagaattgagaaggat

SEQ ID NO: 28686 - protein, 513 aa, Elizabethkingia anophelis
MKRADLYIRVSTDEQADKGYSQRDQEERLRRYCSSHNISVGQIIYEDHSAKTFNRPEWAKLLISLKKKSSKTNLILFTKWDRFSRNAGDAYQMINILTKLGIEPQAVEQPLDLSIPENKMMLAIYLAAPEVENDRRALNTFYGMRRAKKEGRVLGNAPFGYINRSREDGSKYIAIKEPEASTMRMAFEEILKGIFAPDQIRQKIERSGKKILSRASFHTAIRNPVYCGKVFVAKYGDEEAVTVKGQHEAIISEELFYNVQDILHGNKRATVHSTKILSDVNLPLRGYLVCPDCGRNLTGSASKGRNTRYYYYHCIASCGYRQKAEKANEIFEQGLAQFELNEGNKDILKKMVLLNYNQVIKENPRMDKRKIVLEIDKLNEKLSVAREKLLSNVMDDDEYVELKKEYKEKIDKLEEQLARDDTPDSNEMSIQRKLNKALDIVQNISKLYIRGEIETKRTLIGSIFPEKLEFDGTQYRTARINSVIATIFQINNELCNKKNRKSDKNNHFSCVVP

SEQ ID NO: 28687 - DNA, 50 bp, Elizabethkingia anophelis
  source 1..50: mol_type = genomic DNA
aaataatcacttttcctgtgtagtacccaacaccgacgaaatatcgaaac

SEQ ID NO: 28688 - DNA, 40 bp, Elizabethkingia anophelis
  source 1..40: mol_type = genomic DNA
gtttaaacctttccattgtacccagtgccggaatcgaacc

SEQ ID NO: 28689 - DNA, 40 bp, Elizabethkingia anophelis
  source 1..40: mol_type = genomic DNA
gtttaaacctttccattgtgtccagtgccggaatcgaacc

SEQ ID NO: 28690 - DNA, 50 bp, Elizabethkingia anophelis
  source 1..50: mol_type = genomic DNA
aagtaaacatgtttgctgtgtattgtacaagatcgatttaataacaaaac

SEQ ID NO: 28691 - protein, 587 aa, Bacteroides caccae; identical to SEQ ID NO: 19326

SEQ ID NO: 28692 - DNA, 50 bp, Bacteroides caccae; identical to SEQ ID NO: 19327
  source 1..50: mol_type = genomic DNA

SEQ ID NO: 28693 - DNA, 40 bp, Bacteroides caccae
  source 1..40: mol_type = genomic DNA
cggtatttgacacgaatactcaaagaaagcaattgcccag

SEQ ID NO: 28694 - DNA, 40 bp, Bacteroides caccae
  source 1..40: mol_type = genomic DNA
cggtatttgacacgaatacataaagaaagcaattgcccag

SEQ ID NO: 28695 - DNA, 50 bp, Bacteroides caccae
  source 1..50: mol_type = genomic DNA
tttagttttccttcctacttatttatgattaaaatttgcatcttgcccat

SEQ ID NO: 28696 - protein, 587 aa, Bacteroides xylanisolvens; identical to SEQ ID NO: 15186

SEQ ID NO: 28697 - DNA, 50 bp, Bacteroides xylanisolvens; identical to SEQ ID NO: 15187
  source 1..50: mol_type = genomic DNA

SEQ ID NO: 28698 - DNA, 40 bp, Bacteroides xylanisolvens
  source 1..40: mol_type = genomic DNA
cggtatctgacaggaatattcaaaaaaggcgatcgcccag

SEQ ID NO: 28699 - DNA, 40 bp, Bacteroides xylanisolvens
  source 1..40: mol_type = genomic DNA
cggtatctgacaggaatatataaaaaaggcgatcgcccag

SEQ ID NO: 28700 - DNA, 50 bp, Bacteroides xylanisolvens; identical to SEQ ID NO: 28695
  source 1..50: mol_type = genomic DNA

SEQ ID NO: 28701 - protein, 587 aa, Bacteroides ovatus
MNHKKAIAYIRVSTTHQDVERQRIKFKEYCKNNNLQANEEIIDFGISGAKSDRPGYLRLQALTGKDADILVVSELSRLSRQEEILETINIIQNIVYNGLSLIFLDAPNKIYEAHSTLDITELIILLVGAFRAAQDRKEIKRKNQEGKQALLSQNPYAVVDAKIPYGYNAIYNPDGNRPKKILIENEEEVTNVKKIFQLALEGYSLGKIARYFNNRNILFRGNFVTRQLLSVLVRNILYKGIRRRIHSFDRKDNPNIIENKITPIISESDFERVNQMLKDNHKFCSTGNNYFNTLRGIIKCRCGRGMMVKDKGYTSGIKKMVYRCNDVSAKDNPIHCQYKDEISYQFTNEVIFNVFKYIHNTDEIFIFMAKTEQKIYEIDEEIKGIERKIENKNIEIESLNKDNKRLIERYIHAKSQSIANAIQDEQLTIENKIHKLEDEISHCNKEKVKLITNRESLINYIDTEELSSLGNEERAELFKKHLEKVIYLPVTLMQGFYIITFKSKMQRIVAIRKTAKSPIAAILPDGYTVDMNTKLITEYYQGIQTGDCSYPISSSFKQLTIQEYFKKLPQIANLGILEIDYSYRKGK

SEQ ID NO: 28702 - DNA, 50 bp, Bacteroides ovatus
  source 1..50: mol_type = genomic DNA
ctgggtatttttggctatttatattcgtttaacataacgtacttgcccat

SEQ ID NO: 28703 - DNA, 40 bp, Bacteroides ovatus; identical to SEQ ID NO: 28698
  source 1..40: mol_type = genomic DNA

SEQ ID NO: 28704 - DNA, 40 bp, Bacteroides ovatus; identical to SEQ ID NO: 28699
  source 1..40: mol_type = genomic DNA

SEQ ID NO: 28705 - DNA, 50 bp, Bacteroides ovatus; identical to SEQ ID NO: 28695
  source 1..50: mol_type = genomic DNA

SEQ ID NO: 28706 - protein, 587 aa, Bacteroides thetaiotaomicron; identical to SEQ ID NO: 15186

SEQ ID NO: 28707 - DNA, 50 bp, Bacteroides thetaiotaomicron
  source 1..50: mol_type = genomic DNA
gtgggtatttttgactatttatattcgtttaacataacgcacttgcccat

SEQ ID NO: 28708 - DNA, 40 bp, Bacteroides thetaiotaomicron
  source 1..40: mol_type = genomic DNA
cggtatttgacaagaatattcaaaaaatgcaatgacccaa

SEQ ID NO: 28709 - DNA, 40 bp, Bacteroides thetaiotaomicron
  source 1..40: mol_type = genomic DNA
cggtatttgacaagaatatataaaaaatgcaatgacccaa

SEQ ID NO: 28710 - DNA, 50 bp, Bacteroides thetaiotaomicron; identical to SEQ ID NO: 28695
  source 1..50: mol_type = genomic DNA

SEQ ID NO: 28711 - protein, 623 aa, Faecalibacterium prausnitzii
MDAQEVMHMTDYSKITALYSRLSVGDEDRDGGESNSIQNQKIFLENYARGQHLTNIRHYIDDDESGRFFDRSAYSRMMDDVENGKIGVCIMKDLTRWGRDYLQVGNAMEIFRRNNVRFIAVNNGIDSEKPDTLEFAPFINIMSEWYAKDISKKVKTGIKTKGMSGKPIVTEAPYGYIKAPDNKDFWIIDEEAAEVVRLISRLFLDGKNRNQIAVYLTQEQIPSPTFYMKDRGRGTCKNKTLNEDNRCKWNKATLTNILTRQEYCGDVVNFKTTKHFRDKHNHYVDRSQWHITENVHEPIISRSDFETVQRILKNAPVKRPNGDGEIHPLSGLLFCKDCGAKMHIRIDYRNGGKRHVAYCSEYHKGKAKNPKCHSPHIMDADLLMQTITEVLKKIEDYSISNRAEFEALVKKNLAMQQTDQTKKQQKRIPQITTRLEQIDKVLNKLYEDNALGTIPQDRYEQMSQKYSEEYYALKAELATLQEQLSAYENAGGRAQRFLKLTERHAAFTDLTPTILNEFISRIEVHERDQKRARYAIQHISIYFNYIGKFENEVTQLAEPTEQEIRQMREEIEEAKKEKSRAYHRQYSKEYRARNLEKQREYDRMKAREYRARRKAQAAAQPTQ

SEQ ID NO: 28712 - DNA, 50 bp, Faecalibacterium prausnitzii; identical to SEQ ID NO: 13642
  source 1..50: mol_type = genomic DNA

SEQ ID NO: 28713 - DNA, 40 bp, Faecalibacterium prausnitzii
  source 1..40: mol_type = genomic DNA
ggagtacggcagtgcccgctggggcaccgcggcggacatt

SEQ ID NO: 28714 - DNA, 40 bp, Faecalibacterium prausnitzii
  source 1..40: mol_type = genomic DNA
ggagtacggcagtgcccgcatgggcaccgcggcggacatt

SEQ ID NO: 28715 - DNA, 50 bp, Faecalibacterium prausnitzii
  source 1..50: mol_type = genomic DNA
aaaatcaataaattatacacttaaatgagtgaattacatagtatgtaaat

SEQ ID NO: 28716 - protein, 624 aa, Fusicatenibacter saccharivorans
MDAQEVMHMTDYSKITALYSRLSVGDEDRDGGESNSIQNQKKFLESYARQLKLTNIRHYIDDDESGRFFDRSAYSRMMDDVENGKIGVCIMKDLTRWGRDYLQVGNAMEIFRRNNVRFIAVNNGIDSEKPDTLEFAPFINIMSEWYAKDISKKVKTGIKTKGMSGKPIVTEAPYGYVKDPDDKDFWIIDEEAAEVVRLIFRLFIGGKNRNQIAIYLTQEQIPTLTFYMKDRGWGTCKNKTLNEDNRCKWNKVTLTNILTRQEYCGDVVNFKTTKHFRDKHNHYVDRSQWHITENVHEPIISRSDFETVQRILENAPVKRPNGDGEIHPLSGLLFCKDCGAKMHIRIDYRNGGKRHVAYCSEYHKGKARNPKCNSPHIMDADLLMQTIAEVLKKIEDYSISNRAEFEALVKKNLAMQQTDQTKKQQKRIPQITTRLEQIDKVLNKLYEDNALGTIPQDRYEQMSQKYSEEYYALKAELATLQEQLSAYENAGGRAQKFLKLTERHAAFTDLTPAILNEFISRIEVHERDQKRARYAIQHISIYFNYIGKFENEVTQLAEPTEQEIRQMREEIEEAKKEKSRAYHRQYSREYRARNLEKQREYDRMKAREYRARRKAQAAAAQPTQ

SEQ ID NO: 28717 - DNA, 50 bp, Fusicatenibacter saccharivorans; identical to SEQ ID NO: 13642
  source 1..50: mol_type = genomic DNA

SEQ ID NO: 28718 - DNA, 40 bp, Fusicatenibacter saccharivorans
  source 1..40: mol_type = genomic DNA
ggaatatggttcggcccgctggggaacccgtgaggatatt

SEQ ID NO: 28719 - DNA, 40 bp, Fusicatenibacter saccharivorans
  source 1..40: mol_type = genomic DNA
ggaatatggttcggcccgcatgggaacccgtgaggatatt

SEQ ID NO: 28720 - DNA, 50 bp, Fusicatenibacter saccharivorans; identical to SEQ ID NO: 28715
  source 1..50: mol_type = genomic DNA

SEQ ID NO: 28721 - protein, 624 aa, Fusicatenibacter saccharivorans
MDAQEVMHMTDYSKITALYSRLSVGDEDRDGGESNSIQNQKIFLENYARGQHLTNIRHYIDDDESGRFFDRSAYSRMMDDVENGKIGVCIMKDLTRWGRDYLQVGNAMEIFRRNNVRFIAVNNGIDSEKPDTLEFAPFINIMSEWYAKDISKKVKTGIKTKGMSGKPIVTEAPYGYVKDPDNKDFWIIDEEAAAVVRLIFRLFIGGKNRNQIAVHLKNEQIPTPTFYMKDRGRGTCKNKTLNEDSRCKWNKATLTNILTRQEYCGDVVNFKTTKHFRDKHNHYVDRSQWHITENVHEPIISRSDFETVQRILENAPVKRPNGDGEIHPLSGLLFCKDCGSKMHIRIDYRNGGKRHVAYCSEYHKGKAKNPKCHSPHIMDADLLMQTIAEVLKKIEDYSISNRAEFEALVKKNLVMQQTDQTKKQQKRIPQITTRLEQIDKVLNKLYEDNALGTIPQDRYEQMSQKYSEEYYALKAELATLQEQLSAYENAGGRAQKFLKLTERHAAFTELTPAILNEFISRIEVHERDQKRARYAIQHISIYFNYIGKFENEVTQLAEPTEQEIRQMREEIEEAKKEKSRAYHRQYSREYRARNLEKQREYDRMKAREYRARRKAQAAAAQPTQ

SEQ ID NO: 28722 - DNA, 50 bp, Fusicatenibacter saccharivorans; identical to SEQ ID NO: 13642
  source 1..50: mol_type = genomic DNA

SEQ ID NO: 28723 - DNA, 40 bp, Fusicatenibacter saccharivorans; identical to SEQ ID NO: 28718
  source 1..40: mol_type = genomic DNA

SEQ ID NO: 28724 - DNA, 40 bp, Fusicatenibacter saccharivorans; identical to SEQ ID NO: 28719
  source 1..40: mol_type = genomic DNA

SEQ ID NO: 28725 - DNA, 50 bp, Fusicatenibacter saccharivorans; identical to SEQ ID NO: 28715
  source 1..50: mol_type = genomic DNA

SEQ ID NO: 28726 - protein, 419 aa, Fusicatenibacter saccharivorans
MDAQEVMHMTDYSKITALYSRLSVGDEDRDGGESNSIQNQKKFLESYARQLKLTNIRHYIDDDESGRFFDRSAYSRMMDDVENGKIGVCIMKDLTRWGRDYLQVGNAMEIFRRNNVRFIAVNNGIDSEKPDTLEFAPFINIMSEWYAKDISKKVKTGIKTKGMSGKPIVTEAPYGYVKDPDDKDFWIIDEEAAEVVRLIFRLFIGGKNRNQIAIYLTQEQIPTPTFYMKDRGWGTCKNKTLNEDNRCKWNKVTLTNILTRQEYCGDVVNFKTTKHFRDKHNHYVDRSQWHITENVHEPIISRSDFETVQRILENAPVKRPNGDGEIHPLSGLLFCKDCGAKMHIRIDYRNGGKRHVAYCSEYHKGKARNLKCNSPHIMDADLLMQTIAEVLKKIEDYSISNRAEFEALVKKNLAMQQTD

SEQ ID NO: 28727 - DNA, 50 bp, Fusicatenibacter saccharivorans; identical to SEQ ID NO: 13642
  source 1..50: mol_type = genomic DNA

SEQ ID NO: 28728 - DNA, 40 bp, Fusicatenibacter saccharivorans; identical to SEQ ID NO: 28718
  source 1..40: mol_type = genomic DNA

SEQ ID NO: 28729 - DNA, 40 bp, Fusicatenibacter saccharivorans; identical to SEQ ID NO: 28719
  source 1..40: mol_type = genomic DNA

SEQ ID NO: 28730 - DNA, 50 bp, Fusicatenibacter saccharivorans; identical to SEQ ID NO: 28715
  source 1..50: mol_type = genomic DNA

SEQ ID NO: 28731 - protein, 548 aa, Fusicatenibacter saccharivorans
MMDDVENGKIGVCIMKDLTRWGRDYLQVGNAMEIFRRNNVRFIAVNNGIDSEKPDTLEFAPFINIMSEWYAKDISKKVKTGIKTKGMSGKPIVTEAPYGYVKDPDDKDFWIIDEEAAEVVRLIFRLFIGGKNRNQIAIYLTQEQIPTPTFYMKDRGWGTCKNKTLNEDNRCKWNKVTLTNILTRQEYCGDVVNFKTTKHFRDKHNHYVDQSQWHITENVHEPIISRSDFETVQRILENAPVKRPNGDGEIHPLSGLLFCKDCGAKMHIRIDYRNGGKRHVAYCSEYHKGKARNPKCNSPHIMDADLLMQTIAEVLKKIEDYSISNRAEFEALVKKNLAMQQTDQTKKQQKRIPQITTRLEQIDKVLNKLYEDNALGTIPQDRYEQMSQKYSEEYYALKAELATLQEQLSAYENAGGRAQKFLKLTERHAAFTDLTPAILNEFISRIEVHERDQKRARYAIQHISIYFNYIGKFENEVTQLAEPTEQEIRQMREEIEEAKKEKSRAYHRQYSREYRARNLEKQREYDRMKAREYRARRKAQAAAAQPTQ

SEQ ID NO: 28732 - DNA, 50 bp, Fusicatenibacter saccharivorans; identical to SEQ ID NO: 13642
  source 1..50: mol_type = genomic DNA

SEQ ID NO: 28733 - DNA, 40 bp, Fusicatenibacter saccharivorans; identical to SEQ ID NO: 28718
  source 1..40: mol_type = genomic DNA

SEQ ID NO: 28734 - DNA, 40 bp, Fusicatenibacter saccharivorans; identical to SEQ ID NO: 28719
  source 1..40: mol_type = genomic DNA

SEQ ID NO: 28735 - DNA, 50 bp, Fusicatenibacter saccharivorans; identical to SEQ ID NO: 28715
  source 1..50: mol_type = genomic DNA

SEQ ID NO: 28736 - protein, 624 aa, Clostridium innocuum
MDAQEVMHMTDYSKITALYSRLSVGDEDRDGGESNSIQNQKIFLENYARGQHLTNIRHYIDDDESGRFFDRSAYSRMMDDVENGKIGVCIMKDLTRWGRDYLQVGNAMEIFRRNNVRFIAVNNGIDSEKPDTLEFAPFINIMSEWYAKDISKKVKTGIKTKGMSGKPIVTEAPYGYVKDPDNKDFWIIDEEAAEVVRLIFRLFIGGKNRNQIAVHLTQEQIPTPTFYMKDRGRGTCKNKTLNEDNRCKWNKATLTNILTRQEYCGDVVNFKTTKHFRDKHNHYVDRSQWHITENVHEPIISRSDFETVQRILENAPVRRPNGDGEIHPLSGLLFCKDCGAKMHIRIDYRYGSKRHIAYCSEYHKGKAKNPKCSSPHIMDADLLMQTIAEVLKKIEDYSISNRAEFEALVKKNLAMQQTDQTKKQQKRIPQITTRLEQIDKVLNKLYEDNALGTIPQDRYEQMSQKYSEEYYALKAELATLQEQLSAYENAGGRAQKFLKLTERHAAFTELTPAILNEFISRIEVHERDQKRARYAIQHISIYFNYIGKFENEVTQLAEPTEQEIRQMREEIEEAKKEKSRAYHRNYSREYRARNLEKQREYDRMKAREYRARRKAQAAAAQPTQ

SEQ ID NO: 28737 - DNA, 50 bp, Clostridium innocuum; identical to SEQ ID NO: 13642
  source 1..50: mol_type = genomic DNA

SEQ ID NO: 28738 - DNA, 40 bp, Clostridium innocuum
  source 1..40: mol_type = genomic DNA
cgaatacggttcagcccgttggggcaacgccgaagatata

SEQ ID NO: 28739 - DNA, 40 bp, Clostridium innocuum
  source 1..40: mol_type = genomic DNA
cgaatacggttcagcccgtatgggcaacgccgaagatata

SEQ ID NO: 28740 - DNA, 50 bp, Clostridium innocuum; identical to SEQ ID NO: 28715
  source 1..50: mol_type = genomic DNA

SEQ ID NO: 28741 - protein, 624 aa, Clostridium innocuum
MDAQEVMHMTDYSKITALYSRLSVGDEDRDGGESNSIQNQKIFLENYARGQHLTNIRHYIDDDESGRFFDRSAYSRMMDDVENGKIGVCIMKDLTRWGRDYLQVGNAMEIFRRNNVRFIAVNNGIDSEKPDTLEFAPFINIMSEWYAKDISKKVKTGIKTKGMSGKPIVTEAPYGYVKDPDNKDFWIIDEEAAEVVRLIFRLFIGGKNRNQIAVYLTQEQIPTPTFYMKDQGRGTCKNKTLNEDNRCKWNKATLTNILTRQEYCGDVVNFKTTKHFRDKHNHYVDRSQWHITENVHEPIISRSDFETVQRILENAPVRRPNGDGEIHPLSGLLFCKDCGAKMHIRIDYRNGGKRHVAFCSEYHKGKAKNPKCHSPHIMDADLLMQTIAEVLKKIEDYSISNRAEFEALVKKNLAMQQTDQTKKQQKRIPQITTRLEQIDKVLNKLYEDNALGTIPQDRYEQMSQKYSEEYYALKAELATLQEQLSAYENAGGRAQRFLKLTERHAAFTELTPAILNEFISRIEVHERDQKRARYAIQHISIYFNYIGKFENEVTQLAEPTEQEIRQMREEIEEAKKEKSRAYHRQYSREYRARNLEKQREYDRMKAREYRARRKAQAAAAQPTQ

SEQ ID NO: 28742 - DNA, 50 bp, Clostridium innocuum; identical to SEQ ID NO: 13642
  source 1..50: mol_type = genomic DNA

SEQ ID NO: 28743 - DNA, 40 bp, Clostridium innocuum; identical to SEQ ID NO: 28738
  source 1..40: mol_type = genomic DNA

SEQ ID NO: 28744 - DNA, 40 bp, Clostridium innocuum; identical to SEQ ID NO: 28739
  source 1..40: mol_type = genomic DNA

SEQ ID NO: 28745 - DNA, 50 bp, Clostridium innocuum; identical to SEQ ID NO: 28715
  source 1..50: mol_type = genomic DNA

SEQ ID NO: 28746 - protein, 623 aa, Clostridium symbiosum
MDAQEVMHMTDYSKITALYSRLSVGDEDRDGGESNSIQNQKIFLENYARGQHLTNIRHYIDDDESGRFFDRSAYSRMMDDVENGKIGVCIMKDLTRWGRDYLQVGNAMEIFRRNNVRFIAVNNGIDSEKPDTLEFAPFINIMSEWYAKDISKKVKTGIKTKGMSGKPIVTEAPYGYVKDPDNKDFWIIDEEAAEVVRLIFRLFIGGKNRNQIAVYLTQEQIPTPTFYMKDRGRGTCKNKTLNEDNRCKWNKVTLTNILTRQEYCGDVVNFKTTKHFRDKHNHYVDRSQWHITENVHEPIISRSDFETVQRILENAPVRRPNGDGEIHPLSGLLFCKDCGAKMHIRIDYRNGGKRHVAFCSEYHKGKAKNPKCHSPHIMDADWLMQTIAEVLKKIEDCSISNRAEFEALVKKNLAMQQTDQTKKQQKRIPQITTRLEQIDKVLNKLYEDNALGTIPQDRYEQMSQKYSEEYYALKAELATLQEQLSAYENAGGRAQKFLKLTERHAAFTDLTPAILNEFISRIEVHERDQKRARYAIQHISIYFNYIGKFENEVTQLAEPTEQEIQQMREEIEEAKKEKSRAYHRQYSREYRARNLEKQREYDRMKAREYRARRKAQAAAQPAQ

SEQ ID NO: 28747 - DNA, 50 bp, Clostridium symbiosum; identical to SEQ ID NO: 13642
  source 1..50: mol_type = genomic DNA

SEQ ID NO: 28748 - DNA, 40 bp, Clostridium symbiosum
  source 1..40: mol_type = genomic DNA
ggagtatggctctgcccgttggggaacccgtgaggatatt

SEQ ID NO: 28749 - DNA, 40 bp, Clostridium symbiosum
  source 1..40: mol_type = genomic DNA
ggagtatggctctgcccgtatgggaacccgtgaggatatt

SEQ ID NO: 28750 - DNA, 50 bp, Clostridium symbiosum; identical to SEQ ID NO: 28715
  source 1..50: mol_type = genomic DNA

SEQ ID NO: 28751 - protein, 636 aa, Anaerotruncus colihominis
MECIILSVNDTYMDAQEVMHMTDYSKITALYSRLSVGDEDRDGGESNSIQNQKIFLENYARGQHLTNIRHYIDDDESGRFFDRSAYSRMMDDVENGKIGVCIMKDLTRWGRDYLQVGNAMEIFRRNNVRFIAVNNGIDSEKPDTLEFAPFINIMSEWYAKDISKKVKTGIKTKGMSGKPIVTEAPYGYVKDPDNKDFWIIDEEAAEVVRLIFCLFIGGKNRNQIAVHLKNEQIPTPTFYMKDRGRGTCKNKTLNEDNRCKWNKVTLTNILTRQEYCGDVVNFKTTKHFRDKHNHYVDRSQWHITENVHEPIISRSDFETVQRILENAPVRRPNGDGEIHPLSGLLFCKDCGAKMHIRIDYRNGGKRHVAFCSEYHKGKAKNPKCHSPHIMDADLLMQTIAEVLKKIEDYSISNRAEFEALVKKNLAMQQTDQTKKQQKRIPQITTRLEQIDKVLNKLYEDNALGTISQDRYEQMSQKYSEEYYTLKAELATLQEQLSAYENAGGRAQKFLKLTERHAAFTELTPAILNEFISRIEVHERDQKRARYAIQHISIYFNYIGKFENEVTQLAEPTEQEIRQMREEIEEAKKEKSRAYHRQYSREYRARNLEKQREYDRMKAREYRARRKAQAAAAQPTQ

SEQ ID NO: 28752 - DNA, 50 bp, Anaerotruncus colihominis; identical to SEQ ID NO: 13642
  source 1..50: mol_type = genomic DNA

SEQ ID NO: 28753 - DNA, 40 bp, Anaerotruncus colihominis
  source 1..40: mol_type = genomic DNA
tgagtacggcagcgcccgatggggcacggcggccgatatt

SEQ ID NO: 28754 - DNA, 40 bp, Anaerotruncus colihominis
  source 1..40: mol_type = genomic DNA
tgagtacggcagcgcccgaatgggcacggcggccgatatt

SEQ ID NO: 28755 - DNA, 50 bp, Anaerotruncus colihominis; identical to SEQ ID NO: 28715
  source 1..50: mol_type = genomic DNA

SEQ ID NO: 28756 - protein, 620 aa, Coprococcus eutactus
MDAQEVMHMTDYSKITALYSRLSVGDEDRDGGESNSIQNQKIFLENYARGQHLTNIRHYIDDDESGRFFDRSAYSRMMDDVENGKIGVCIMKDLTRWGRDYLQVGNAMEIFRRNNVRFIAVNNGIDSEKPDTLEFAPFINIMSEWYAKDISKKVKTGIKTKGMSGKPIVTEAPYGYVKDPDNKDFWIIDEEAAEVVRLIFRLFIGGKNRNQIAVYLTQEQIPTPTFYMKDRGRGTCKNKTLNEDNRCKWNKATLTNILTRQEYCGDVVNFKTTKHFRDKHNHYVDRSQWHITENVHEPIISRSDFETVQRILENAPVRRPNGDGEIHPLSGLLFCKDCGAKMHIRIDYRNGGKRHVAFCSEYHKGKSRNPKCNSPHIMDADLLMQTIAEVLKKIEDYSISNRAEFEALVKKNLAMQQTDQTKKQQKRIPQITTRLEQIDKVLNKLYEDNALGTIPQDRYEQMSQKYSEEYYALKAELATLQEQLSAYENAGGQAQKFLKLTERHAAFTELTPAILNEFISRIEVHERDQKRARYAIQHISIYFNYIGKFENEVTQLAEPTEQEIRQMREEIEEAKKEKSRAYHRQYSKEYRARNLEKQREYDRMKAREYRARRKAQAAAQ

SEQ ID NO: 28757 - DNA, 50 bp, Coprococcus eutactus; identical to SEQ ID NO: 13642
  source 1..50: mol_type = genomic DNA

SEQ ID NO: 28758 - DNA, 40 bp, Coprococcus eutactus
  source 1..40: mol_type = genomic DNA
ggaatatggctctgcgaagtgggggacggataaggatttt

SEQ ID NO: 28759 - DNA, 40 bp, Coprococcus eutactus
  source 1..40: mol_type = genomic DNA
ggaatatggctctgcgaagatggggacggataaggatttt

SEQ ID NO: 28760 - DNA, 50 bp, Coprococcus eutactus; identical to SEQ ID NO: 28715
  source 1..50: mol_type = genomic DNA

SEQ ID NO: 28761 - protein, 624 aa, Coprococcus eutactus
MDAQEVMHMTDYSKITALYSRLSVGDEDRDGGESNSIQNQKIFLENYARGQHLTNIRHYIDDDESGRFFDRSAYSRMMDDVENGKIGVCIMKDLTRWGRDYLQVGNAMEIFRRNNVRFIAVNNGIDSEKPDTLEFAPFINIMSEWYAKDISKKVKTGIKTKGMSGKPIVTEAPYGYVKDPDNKDFWIIDEEAAEVVRLIFRLFIGGKNRNQIAVYLTQEQIPTPTFYMKDRGRGTCKNKTLGEDNRCKWNKATLTNILTRQEYCGDVVNFKTTKHFRDKHNHYVDRSQWHITENVHEPIISRSDFETVQRILENAPVRRPNGDGEIHPLSGLLFCKDCGAKMHIRIDYRNGGKWHVAFCSEYHKGKAKNPKCHSPHIMDADLLMQTIAEVLKKIEDYSISNRAEFEALVKKNLAMQQTDQTKKQQKRIPQITTRLEQIDKVLNKLYEDNALGTIPQDRYEQMSQKYSEEYYTLKAELATLQEQLSAYENAGGRAQKFLKLTERHAAFTDLTPAILNEFISRIEVHERDQKRARYAIQHISIYFNHIGKFENEVTQLAEPTEQKIRQMREEIEEAKKEKSRAYHRQYSREYRARNLEKQREYDRIKAREYRARRKAQAAAAQPAQ

SEQ ID NO: 28762 - DNA, 50 bp, Coprococcus eutactus; identical to SEQ ID NO: 13642
  source 1..50: mol_type = genomic DNA

SEQ ID NO: 28763 - DNA, 40 bp, Coprococcus eutactus; identical to SEQ ID NO: 28758
  source 1..40: mol_type = genomic DNA

SEQ ID NO: 28764 - DNA, 40 bp, Coprococcus eutactus; identical to SEQ ID NO: 28759
  source 1..40: mol_type = genomic DNA

SEQ ID NO: 28765 - DNA, 50 bp, Coprococcus eutactus; identical to SEQ ID NO: 28715
  source 1..50: mol_type = genomic DNA

SEQ ID NO: 28766 - protein, 624 aa, Bifidobacterium pseudocatenulatum
MDAQEVMHMTDYSKITALYSRLSVGDEDRDGGESNSIQNQKIFLENYARGQHLTNIRHYIDDDESGRFFDRSAYSRMMDDVENGKIGVCIMKDLTRWGRDYLQVGNAMEIFRRNNVRFIAVNNGIDSEKPDTLEFAPFINIMSEWYAKDISKKVKTGIKTKGMSGKPIVTEAPYGYVKDPDNKDFWIIDEEAAEVVRLIFRLFIGGKNRNQIAVYLTQEQIPTPTFYMKDRGRGTCKNKTLNEDNRCKWNKATLTNILTRQEYCGDVVNFKTTKHFRDKHNHYVDRSQWHITENVHEPIISRSDFETVQRILENAPVRRPNGDGEIHPLSGLLFCKDCGAKMHIRIDYRNGGKRHVAYCSEYHKGKAKNPKCHSPHIMDADLLMQTVAEVLKKIEDYSISNRAEFEALVKKNLVMQQTDQTKKQQKRIPQITTRLEQIDKVLNKLYEDNALGTIPQDRYEQMSQKYSEEYYALKAELATLQEQLSAYENAGGRAQKFLKLTERHAAFTDLTPAILNEFISRIEVHERDQKRARYAIQHISIYFNYIGRFENEVTQLAEPTEQEIRQMREEIEEAKKEKSRAYHRQYSREYRARNLEKQREYDRIKAREYRARRKAQTAAAQPAQ

SEQ ID NO: 28767 - DNA, 50 bp, Bifidobacterium pseudocatenulatum; identical to SEQ ID NO: 13642
  source 1..50: mol_type = genomic DNA

SEQ ID NO: 28768 - DNA, 40 bp, Bifidobacterium pseudocatenulatum
  source 1..40: mol_type = genomic DNA
atcgccttcagcggcaacgtgggaggcaaagccgtggtca

SEQ ID NO: 28769 - DNA, 40 bp, Bifidobacterium pseudocatenulatum
  source 1..40: mol_type = genomic DNA
atcgccttcagcggcaacgatggaggcaaagccgtggtca

SEQ ID NO: 28770 - DNA, 50 bp, Bifidobacterium pseudocatenulatum; identical to SEQ ID NO: 28715
  source 1..50: mol_type = genomic DNA

SEQ ID NO: 28771 - protein, 624 aa, Flavonifractor plautii
MDAQEVMHMTDYSKITALYSRLSVGDEDRDGGESNSIQNQKIFLENYAKGQHLTNIRHYIDDDESGRFFDRSAYSRMMDDVENGKIGVCVMKDLTRWGRDYLQVGNAMEIFRRNNVRFIAVNNGIDSEKPDTLEFAPFINIMSEWYAKDISKKVKTGIKTKGMSGKPIVTEAPYGYVKDPDNKDFWIIDEEAAEVVRLIFRLFIGGKNRNQIAVYLTQEQIPTPTFYMKDRGRGTCKNKTLNEDNRCKWNKATLTNILTRQEYCGDVVNFKTTKHFRDKHNHYVDRSQWHITENVHEPIISRSDFETVQRILENAPVRRPNGDGEIHPLSGLLFCKDCGAKMHIRIDYRNGGKRHVAFCSEYHKGKAKNPKCHSPHIMDADLLMQTVAEVLKKIEDYSISNRAEFEALVKKNLAMQQTDQTKKQQKRIPQITTRLEQIDKVMNKLYEDNALGTIPQDRYEQMSQKYSEEYYALKAELATLQEQLSAYENAGGRAQKFLKLTERHAAFTDLTPAILNEFISRIEVHERDQKRARYAIQHISIYFNYIGKFENEVTQLAEPTEQEIRQMREEIEEAKKEKSRAYHRQYSREYRARNLEKQREYDRMKAREYRARRKAQAAAAQPTQ

SEQ ID NO: 28772 - DNA, 50 bp, Flavonifractor plautii; identical to SEQ ID NO: 13642
  source 1..50: mol_type = genomic DNA

SEQ ID NO: 28773 - DNA, 40 bp, Flavonifractor plautii
  source 1..40: mol_type = genomic DNA
ggagtatgggagcgcccgctggggaacggccaaggacatc

SEQ ID NO: 28774 - DNA, 40 bp, Flavonifractor plautii
  source 1..40: mol_type = genomic DNA
ggagtatgggagcgcccgcatgggaacggccaaggacatc

SEQ ID NO: 28775 - DNA, 50 bp, Flavonifractor plautii; identical to SEQ ID NO: 28715
  source 1..50: mol_type = genomic DNA

SEQ ID NO: 28776 - protein, 623 aa, Faecalibacterium prausnitzii
MDAQEVMHMTDYSKITALYSRLSVGDEDRDGGESNSIQNQKIFLENYARGQHLTNIRHYIDDDESGRFFDRSAYSRMMDDVENGKIGVCIMKDLTRWGRDYLQVGNAMEIFRRNNVRFIAVNNGIDSEKPDTLEFAPFINIMSEWYAKDISKKVKTGIKTKGMSGKPIVTEAPYGYIKAPDNKDFWIIDEEAAEVVRLIFRLFLDGKNRNQIAVYLTQEQIPSPTFYMKDRGRGTCKNKTLNEDNRCKWNKATLTNILTRQEYCGDVVNFKTTKHFRDKHNHYVDRSQWHITENVHEPIISRSDFETVQRILENAPVKRPNGDGEIHPLSGLLFCKDCGAKMHIRIDYRNGGKRHVAYCSEYHKGKAKNPKCHSPHIMDADLLMQTITEVLKKIEDYSISNRAEFEALVKKNLAMQQTDQTKKQQKRIPQITTRLEQIDKVLNKLYEDNALGTIPQDRYEQMSQKYSEEYYALKAELATLQEQLSAYENAGGRAQRFLKLTERHAAFTDLTPTILNEFISRIEVHERDQKRARYAIQHISIYFNYIGKFENEVTQLAEPTEQEIRQMREEIEEAKKEKSRAYHRQYSKEYRARNLEKQREYDRMKAREYRARRKAQAAAQPTQ

SEQ ID NO: 28777 - DNA, 50 bp, Faecalibacterium prausnitzii; identical to SEQ ID NO: 13642
  source 1..50: mol_type = genomic DNA

SEQ ID NO: 28778 - DNA, 40 bp, Faecalibacterium prausnitzii
  source 1..40: mol_type = genomic DNA
agaatacggctctgcccggtggggcaccgccaaggatatt

SEQ ID NO: 28779 - DNA, 40 bp, Faecalibacterium prausnitzii
  source 1..40: mol_type = genomic DNA
agaatacggctctgcccggatgggcaccgccaaggatatt

SEQ ID NO: 28780 - DNA, 50 bp, Faecalibacterium prausnitzii; identical to SEQ ID NO: 28715
  source 1..50: mol_type = genomic DNA

SEQ ID NO: 28781 - protein, 509 aa, Streptomyces olivaceus
MRMMDTRGLKARDYRRLSDRKGGRSLEGQRKENKAAADDQEWTLGEPYIDDGRSASRYARRRRDDFERLVADLKSGPTGRQSAFGADILMLWESSRGSRQVGEWVAFIELCEDKGVLIWVTTHERLYDPANGRDRKALIDDAVDSEYESYKTHRRLIRTAPGDAEAGRPYGRAPYGLRPVYDQKDGKLLTWEADPTPAGPETSAGRDQVVRDLFEILAAGQPTAHVARVFLKRGYLNASGRPFQRAQLRVMAVRHAYAGLRCYKGTVYQGTWGGLVEESRFWSVHGMLTSSDRATSPGGELLHVVTAALTCGRCDTLMVPRFETGRPDAYRCTGCGMKIKKDEIDELLIGTREDPGALLSFLARPDIYEVLSAPDSTNPAVRQVQSDLARARAQRDEMRAATGDTLTEVQLLAASLAKKEAEVLDLEARERELLLPATVLSIVRPDRDVWDSWPEAPVRVQRMVARLILGPGYLGRPCVMPSPLVGRSQPPAAERLEWRKAGGRIVNYR

SEQ ID NO: 28782 - DNA, 50 bp, Streptomyces olivaceus
  source 1..50: mol_type = genomic DNA
tgggccctacagcgcacggactgtcgatagtctgtgcgctgtaggaccca

SEQ ID NO: 28783 - DNA, 40 bp, Streptomyces olivaceus
  source 1..40: mol_type = genomic DNA
cgggcccggtacttcctcgcggcggtgcgcacgggatccc

SEQ ID NO: 28784 - DNA, 40 bp, Streptomyces olivaceus
  source 1..40: mol_type = genomic DNA
cgggcccggtacttcctcgccgcggtgcgcacgggatccc

SEQ ID NO: 28785 - DNA, 50 bp, Streptomyces olivaceus
  source 1..50: mol_type = genomic DNA
tgggccctggggtttagggactgtccctagttgtttggtgctaggtccca

SEQ ID NO: 28786 - protein, 450 aa, Enterococcus faecium
MKRVALYMRVSTEQQAKHGDSLREQKETLYEYIDQHKDLKVANEYIDGGISGQKINRDEFQKLLQDVKENKIDIILFTKLDRWFRNLRHYLNTQEILEKHNVSWNAVSQQYYDTTTAYGRTFIAQVMSFAELEAQIDSERIKAVMANKIAQGEVVSGKTPLGYSIENKKLVINDDAPIVIDIFNYFLSSGSLRKTVYYLGSQYGIVRDYQSVKNMLTNKKYIGELRNNKNYCPPIIDKKLFYAVQKTLPKNLKTNAKRDYIFKGLLKCSDCQGSVAGQTIKARYKKKDGTESIYERTCYRCVKRRNNKLRCTNKHAFYEKNLESYIFEATKQKFEQIQINYSKKQPKTIKKKNSKKNIENKLDRLKKAYLNEVIDLEEYKKDREILMKELNEIEVEPAKIDMKNVEFILSKEFDEVYKESSKEEKNALWRSIIDTIVVSPDGNITVNFFI

SEQ ID NO: 28787 - DNA, 50 bp, Enterococcus faecium
  source 1..50: mol_type = genomic DNA
atgtgtactaaccaacagtttccagaaggataatataagttagtacacac

SEQ ID NO: 28788 - DNA, 40 bp, Enterococcus faecium; identical to SEQ ID NO: 21713
  source 1..40: mol_type = genomic DNA

SEQ ID NO: 28789 - DNA, 40 bp, Enterococcus faecium
  source 1..40: mol_type = genomic DNA
cgatggaataacattaccaagaggatgattatgcgctaaa

SEQ ID NO: 28790 - DNA, 50 bp, Enterococcus faecium
  source 1..50: mol_type = genomic DNA
atgtatacatagaaatagtatacaagagtataaaattgtgtggtacagac

SEQ ID NO: 28791 - protein, 595 aa, Serratia sp SSNIH1
MTRHKLYSYVRWSSDRQAKGTSLERQTNKAKEFATLHNLELVELLDAGLSAYRGKNTTQGALGGFIQAVESGAIPQDSYLFVENLDRLSRQDILTANKLFSHLLELGLTVVTGMDGKIYTKESVTANPTDLMLSILLFSRANEESATKQKRVYGNIKALVERHKAGLPTTIKTAGSHVWWTDASGDKHTAVKPHPEYWEPARKAVELFLEGYSAHAVCDYLNEHYTAPPVRVTKATNTQENGGKWSYPLLRRMKTHRALIGERTITTDNTIYTLENYYPALCSPTEFALLQDLNENNKLTQGPTKTRITLLSGLGVLKCGHCGGAMTFMIGANSKIRYMCSNGKDKIGNCRSWSISLDIVERSLVPALVRGYMEYATGGGAKGDDIKASIEATQAALQELESQIDNITTAITLGGNLAPLVERMGVLSKEKDSKLVELDRLARLSLLSESEGSAIEKITDFILQIRPAVLADVNHPLRLQLREAVRAVIESCTLTKRADRGLEIEYVIKGKPHRIRYTFKATTLGNYNGVTKGYTETTADLDEHGKPLAYPDTEEGLRLLQTRQQMEAELFKRVDQIQEEMKLPPIDGGQLWARR

SEQ ID NO: 28792 - DNA, 50 bp, Serratia sp SSNIH1
  source 1..50: mol_type = genomic DNA
attgttgtctaagttacaccaacgaaacctaatgtgatttaggtaactga

SEQ ID NO: 28793 - DNA, 40 bp, Serratia sp SSNIH1
  source 1..40: mol_type = genomic DNA
caacgcatggttgctgggcaagattgatgaatacaaattc

SEQ ID NO: 28794 - DNA, 40 bp, Serratia sp SSNIH1
  source 1..40: mol_type = genomic DNA
caacgcatggttgctgggcatgattgatgaatacaaattc

SEQ ID NO: 28795 - DNA, 50 bp, Serratia sp SSNIH1
  source 1..50: mol_type = genomic DNA
attgttttcttgctggcatcaatgatacacaatttgccaaaggtaactgc

SEQ ID NO: 28796 - protein, 588 aa, Serratia marcescens
MTRHKLYSYVRWSSDRQAKGTSLERQTNKAKEFATLHNLELVELLDAGLSAYRGKNTTQGALGGFIQAVESGAIPQDSYLFVENLDRLSRQDILTANKLFSHLLELGLTVVTGMDGKIYTKASVTANPTDLMLSILLFSRANEESATKQKRVYGNIKALVERHKAGLPTTIKTAGSHVWWTDASGDKHTAVKPHPEYWEPARKAVELFLEGYSAHAVCDYLNEHYTAPPVRVTKATNTQENGGKWSYPLLRRMKTHRALIGERTIKTENTVYTLENYYPALCSPTEFALLQDLNENNKLTQGPTKTRITLLSGLGVLKCGHCGGAMTFMIGANSKIRYMCSNGKDKIGSCKSWSVSLDIVERTLVPALVRGYMEYATGGGAKGDDIKASIEATQAALQELETQIDNITTAITLGGNLAPLVERMGVLSKEKDSKLVELDRLARLSLLSESEGSAIEKITDFILQIRPAVLADVNHPLRLQLREAVRAVIESCTLTKRADRGLEIEYVIKGDPHRIRYTFKATTFGNYTEVTADLDEHGKPLAYPNTEEGLKLLQTRQQMEADLFKKVDQIQEEMKLPPIDGGQLWARR

SEQ ID NO: 28797 - DNA, 50 bp, Serratia marcescens; identical to SEQ ID NO: 28792
  source 1..50: mol_type = genomic DNA

SEQ ID NO: 28798 - DNA, 40 bp, Serratia marcescens
  source 1..40: mol_type = genomic DNA
caacgcatggttgctgggcaagattgatgactacaaattc

SEQ ID NO: 28799 - DNA, 40 bp, Serratia marcescens
  source 1..40: mol_type = genomic DNA
caacgcatggttgctgggcatgattgatgactacaaattc

SEQ ID NO: 28800 - DNA, 50 bp, Serratia marcescens; identical to SEQ ID NO: 28795
  source 1..50: mol_type = genomic DNA

SEQ ID NO: 28801 - protein, 594 aa, Serratia ureilytica
MTRRKLYSYVRWSSDRQAKGTSLERQTNKAKEFATLHNLELVELLDAGLSAYRGKNTTQGALGGFIQAVESGAIPNDSYLFVENLDRLSRQDILTANKLFSHLLELGLTVVTGMDGKIYTKESVTANPTDLMLSILLFSRANEESATKQKRVYGNIKALVERHKAGLPTTIKTAGSHVWWTDASGDKHTAVKPHPEYWEPARKAVELFLEGYSAHAVCDYLNEHYTAPPVRVTKATNTQENGGKWSYPLLRRMKTHRALIGERTINAGGKGIQGGAVYTLENYYPALCSPTEFALLQDLNENNKLTQGPTKTRITLLSGLGVLKCGHCGGAMTFMIGANSKIRYMCSNGKDKIGSCKSWSVSLDIVERTLVPALVRGYMEYATGGGAKGDDIKASIEATQAALQELESQIDNITTAITLGGNLAPLVERMGVLSKEKDSKLVELDRLARLSLLSESEGSAIEKITDFILQIRPAVLADVNHPLRLQLREAVRAVIELCTLTKRADRGLEIEYVIKGAPHRIRYTFKATTFGNYTEVTADLDEHGKPLAYPDTEEGLRLLQTRQQMEAELFKKVDQIQEEMKLPPIDGGQLWARR

SEQ ID NO: 28802 - DNA, 50 bp, Serratia ureilytica; identical to SEQ ID NO: 28792
  source 1..50: mol_type = genomic DNA

SEQ ID NO: 28803 - DNA, 40 bp, Serratia ureilytica; identical to SEQ ID NO: 28798
  source 1..40: mol_type = genomic DNA

SEQ ID NO: 28804 - DNA, 40 bp, Serratia ureilytica; identical to SEQ ID NO: 28799
  source 1..40: mol_type = genomic DNA

SEQ ID NO: 28805 - DNA, 50 bp, Serratia ureilytica; identical to SEQ ID NO: 28795
  source 1..50: mol_type = genomic DNA

SEQ ID NO: 28806 - protein, 594 aa, Serratia marcescens
MTRHKLYSYVRWSSDRQAKGTSLERQTNKAKEFATLHNLELVELLDAGLSAYRGKNTTQGALGGFIQAVESGAIPNDSYLFVENLDRLSRQDILTANKLFSHLLELGLTVVTGMDGKIYTKASVTANPTDLMLSILLFSRANEESATKQKRVYGNIKALVERHKAGLPTTIKTAGSHVWWTDASGDKHTAVKPHPEYWEPARKAVELFLEGYSAHAVCDYLNEHYTAPPVRVTKATNTQENGGKWSYPLLRRMKTHRALIGERTINAGGKGIQGGAVYTLENYYPALCSPTEFALLQDLNENNKLTQGPTKTRITLLSGLGVLKCGHCGGAMTFMIGANSKIRYMCSNGKDKIGSCRSWSVSLDIVERTLVPALVRGYMEYATGGGAKGDDIKASIEATQAALQELESQIDNITTAITLGGNLAPLVERMGVLSKEKDSKLVELDRLARLSLLSESEGSAIEKITDFILQIRPAVLADVNHPLRLQLREAVRAVIESCTLTKRADRGLEIEYVIKGDPHRIRYTFKATTFGNYTEVTADLDEHGKPLAYPNTEEGLRLLQTRQQMEAELFKKVDQIQEEMKLPPIDGGQLWARR

SEQ ID NO: 28807 - DNA, 50 bp, Serratia marcescens; identical to SEQ ID NO: 28792
  source 1..50: mol_type = genomic DNA

SEQ ID NO: 28808 - DNA, 40 bp, Serratia marcescens; identical to SEQ ID NO: 28798
  source 1..40: mol_type = genomic DNA

SEQ ID NO: 28809 - DNA, 40 bp, Serratia marcescens; identical to SEQ ID NO: 28799
  source 1..40: mol_type = genomic DNA

SEQ ID NO: 28810 - DNA, 50 bp, Serratia marcescens; identical to SEQ ID NO: 28795
  source 1..50: mol_type = genomic DNA

SEQ ID NO: 28811 - protein, 521 aa, Escherichia coli
MKVPVWCYARISTLKQIDGFGIQRQINTINQFLQCVELDHRLPFTLDVDNVTQMVAEGKSAFREKNWNEKTKLGQYRKLVMDGVVKESVLITESIDRLTRLDPYKAVEILSGLINRGTTILEVDTGMTYSRYIPESLSVLTMQINRANGESKRKSIMMQKSHANRYGKVSKVRPRWFDVVEIDGIKQYRPNETAKAIQRMYNDYINGIGAAHIVRTYGNTDNGKAWTLVTVLRALSDKRVADDARYPPIIDKELYDSVQALKAATNKKGNTHQKNMLNIFSGMSRCPVCNQSIIVKRNSHGNLFTVCLGKRTNKTCEARSISYFALERPLLTAIRGLDFSEVYKHEDKNVLTLHDQWIQNERDIAAFRERLNKASRHEKFAILDELEIMNREQEELTIRLKSVDVPKDIQLTFDDDKLDLDTNYRIELNNRIKKLIQYINIVREDVTKSSYTIYCTIKYWTDVISHLVIIDVNIKRTGTGGTNTLTTTLRSVSSLNMDGTVSGNPDSDAWEYWKSFLDDLK

SEQ ID NO: 28812 - DNA, 50 bp, Escherichia coli
  source 1..50: mol_type = genomic DNA
cggtgtacattcttgcatgactatgaacagttatgttatgatgtacacca

SEQ ID NO: 28813 - DNA, 40 bp, Escherichia coli; identical to SEQ ID NO: 23868
  source 1..40: mol_type = genomic DNA

SEQ ID NO: 28814 - DNA, 40 bp, Escherichia coli
  source 1..40: mol_type = genomic DNA
cggccccatcagcagcaatccacagtcagtcgtaccaccg

SEQ ID NO: 28815 - DNA, 50 bp, Escherichia coli
  source 1..50: mol_type = genomic DNA
ctgtttacaaaaaggcaaaactatccacagttatttatctatttccccaa

SEQ ID NO: 28816 - protein, 545 aa, Clostridium botulinum
MIAAIYSRKSKFTGKGESVENQIEMCKEYLKRNFNNIDDIEIYEDEGFSGKDTNRPKFKKMIKAAKNKKFSILICYRLDRISRNVADFSNTIEELQKYNIDFISIKEQFDTSTPMGRAMMNIAAVFAQLERETIAERIKDNMVELAKTGRWLGGTSPLGYKSEPVEYSSEDGKNKKMYKLTEVEDEMNIVKLIYKLYLEKRGFSSVATYLCKNKYKGKNGGEFSRETVRQIVINPVYCISDKNIFKWFKSKGATTYGASDDIHGLMVYNKREGGKKDKPINEWIIAVGKHKGVISSDIWLKCQNLIQQNNAKSSPRSGTGEKFLLSGMVVCKECNSGMSSWSHFNKKTNFMERYYRCNLRNRASNRCSTKMLNAYKAEEYVANYLKELNIDVFKKIYHSNKKDIIDYNAKNEVNKLNKSIEENKKIIQGIIKKIALFDDLDILGMLKNELERLKKENDEMKLKLKEIKSILELEDEEEIFLNTMEENISNFKKFYDFVNITQKRILIKGLVESIVWDTSGKEKILEINLIGSNTKLPSGKIKRRE

SEQ ID NO: 28817 - DNA, 50 bp, Clostridium botulinum
  source 1..50: mol_type = genomic DNA
acctgtgtattggaacagtgtgctgataaaactattacaaaaacacaagt

SEQ ID NO: 28818 - DNA, 40 bp, Clostridium botulinum
  source 1..40: mol_type = genomic DNA
ttcaactggacaaggtgctgataaaactatgcagcaagta

SEQ ID NO: 28819 - DNA, 40 bp, Clostridium botulinum
  source 1..40: mol_type = genomic DNA
ttcaactggacaaggtgctcataaaactatgcagcaagta

SEQ ID NO: 28820 - DNA, 50 bp, Clostridium botulinum
  source 1..50: mol_type = genomic DNA
aagtttttagttggtcattgtgctcataaaaatacttttagaaaacaagt

SEQ ID NO: 28821 - protein, 545 aa, Vibrio parahaemolyticus
MKKYHLYQRVSKQIQAEEGLGIQRQEQVCEHWISEYNKRLLDDGKSAYSKGLVYEDHGKSAYTTANFKRGELGTLMKDIESGKIAKGDLIVIELIDRFSRANVDFVRKKFQSILDAGVKVAITKWNLVFEENMEGISSVSARLLLEIGMHLAYQESSQKSTRIKASRKLLEDSGRKSIAKPPFWLVRNLDLRSYTIIEENAEIVRKIFDLKLKFNYGPQKIIKSLGELEIYRYKFDDNGNLVKTTKNSPLSESSINAYIRNPNVIGKLDGKDYYPRIIDDKTYYAVQKRTRENTGGASDIFRNVFVGVGKCGCLIRNEDENGYVKFTKCGYIMAYSSRKVKNPAKGQYLKCNKKRKNTKCKSENINYYLAQNKVYSVLKSLKFDFSQSVDISHLEEKINILNKEMSKIRTFMAKYTDDDEWENQYNIKRMEREKIENEIKASKSRITGKLSNLDIDFSKEKDRVLFNQFLKDNRITVYFTKERMEIIIGSLNNFSIKCGYDDSNRDIDHIIESYSKNGLVGIEEKAGKSEGKGLLRFNLPTVPGS

SEQ ID NO: 28822 - DNA, 50 bp, Vibrio parahaemolyticus
  source 1..50: mol_type = genomic DNA
atgtcgtctatcatacagttgactaatgacaattgtatgataagctacat

SEQ ID NO: 28823 - DNA, 40 bp, Vibrio parahaemolyticus; identical to SEQ ID NO: 1343
  source 1..40: mol_type = genomic DNA

SEQ ID NO: 28824 - DNA, 40 bp, Vibrio parahaemolyticus; identical to SEQ ID NO: 1344
  source 1..40: mol_type = genomic DNA

SEQ ID NO: 28825 - DNA, 50 bp, Vibrio parahaemolyticus
  source 1..50: mol_type = genomic DNA
atgacatcttgatcactcttaagttttggcacttgtaaatgaagctactt

SEQ ID NO: 28826 - protein, 458 aa, Gordonia amarae
MTTATPRAAIYTRISLDRTGEGLGVERQEEDAKAIVAERGWTLAGVWSDNSISASDSRKVRPGYDALVKAYDAGAFDALVCYDLDRLTRQPRQLEDWVDAAEAHGLALVTTNGECDLTTDAGRLFARIKAAVARAEVERKSARQKRAEAQRAASGKAPVKGHRLTGYALGGAVIPEEADVVRRVFARFLAGGSIKGIARSLTEEGVPTRSGRDWHAATVRTILTNPRYAGRVVYDGKVLEGVVGQWEPIVDAATFDLAQAKLTDPARLTARKGTHRAHLGSGLYLCDECGQATNATGGETGAYRCAVAGHVSRSRVPVDRFVRDVVAERLRQADASELLAPAESDVAPLVAEAERLRARMAVVDEEYLSDEIDGRLHRTKTERLRAQLSEVERDLGSRRTGSALGEILGQANPAAAFLSADLMAQRSIVDALAEVRLRRGIRGRNRFDPATVVIDWRA

SEQ ID NO: 28827 - DNA, 50 bp, Gordonia amarae
  source 1..50: mol_type = genomic DNA
aatagctatcggtgttgtctcttgcccatgagccaacacagatgactatg

SEQ ID NO: 28828 - DNA, 40 bp, Gordonia amarae
  source 1..40: mol_type = genomic DNA
catggccgaatggctcagtccggtgccgcagtcggtgatg

SEQ ID NO: 28829 - DNA, 40 bp, Gordonia amarae
  source 1..40: mol_type = genomic DNA
catggccgaatggctcagttcggtgccgcagtcggtgatg

SEQ ID NO: 28830 - DNA, 50 bp, Gordonia amarae
  source 1..50: mol_type = genomic DNA
aatagctatactctatgtttcctatccattagacatgcgtcatggcaatg

SEQ ID NO: 28831 - protein, 517 aa, Empedobacter brevis
MRSDLKDKKVLVYTRVSTKDQKDFGHSLSAQKKAISNFCISNQMEILEYFEEDYSAKNFNRPVFNELKDFAKKNKGKIDYILVQKWDRFSRNVGLALQMIEYFKKMNIEINSIENTIDYSTPDHIVMLSIYLSTPEAENSKISERTIAGTREALKQGRYVKSIPKGYISGKDSFNKTLIQPDPKIAPLVKNIFEDFATGLYSQQDILKKYRAKGLNIGRSALSRMLDNVLYMGKVVVPAYKNEPEVIVEGKHTAIVSEDVFYKVQSIKHGKRHQVKKQVEKNENFPLTGFLICAECGHVIYGSQSNNGKSKRVTRTYYYYQCNSKCKCKRYKAEIVHKELEKVFSSLKPSQEIVNLFEKILIDEYKNVKNDRLKDIKSIDKQIQDISNNQLMLTEKFGLDKIREDVYNKLMENYDREIINLKAVKSELGDYQEDLDKFVSFGLSLLVNLDKFYSKADVNTKVKILGSIFSDKLQFFENSFRTLPFNEAIHLICSYSKGFEGLVNKKGETFKSFSHLV

SEQ ID NO: 28832 - DNA, 50 bp, Empedobacter brevis
  source 1..50: mol_type = genomic DNA
aacttttaaaagtttctcccacttagtacccacagaacaacttattacga

SEQ ID NO: 28833 - DNA, 40 bp, Empedobacter brevis
  source 1..40: mol_type = genomic DNA
ttgtttcgagctttaatctagtactcggagtgggaatcga

SEQ ID NO: 28834 - DNA, 40 bp, Empedobacter brevis
  source 1..40: mol_type = genomic DNA
ttgtttcgagctttaatctcttactcggagtgggaatcga

SEQ ID NO: 28835 - DNA, 50 bp, Empedobacter brevis
  source 1..50: mol_type = genomic DNA
cacgtttaactttttttccaaatgcttttccacagagtcatttattagga

SEQ ID NO: 28836 - protein, 501 aa, Clostridium algidicarnis
MKGVCIYLRKSRADEELEKSLGEGETLSKHRKALLKFAKDKKINIVEIKEEIVSGESLFFRPKMLELLKEVEDKKYSGVLVMDMQRLGRGDMQDQGLILKTFKDSHTLIITPQKTYDLHNDFDEEYSEFEAFMSRKELKMINRRMQGGRVRSIEEGNYISPTPPYGYDIHFINKNRTLKVNKDEAEIVKLIFNMYLEGNGAGIIANHLNSLGCKTKFGNSFTSSSVLFILKNPVYIGKVTWKKKEIKKSKDIDKLTDTRTRDIDEWIIADGKHEAIIKEDIFNKATEILKGRYHVPYKLTNGMANPLAGIVICSVCGNKMVLRKSRGVDRILCNKSCGNKSVRYDYLENAMLTALDDYLKEYKINIKNNKPNNNIKAYEVQLEINKNELENLNNQKLKLFDLLERGIYDDDTFLERTKNLDDRIKSIKDNVNKLVSSVEKNSKTATKKDIIKFENTIQAYKVATNIQLKNTLIKNILHKVEFKKEKHQRDNNFTIEIYPRV

SEQ ID NO: 28837 - DNA, 50 bp, Clostridium algidicarnis; identical to SEQ ID NO: 12637
  source 1..50: mol_type = genomic DNA

SEQ ID NO: 28838 - DNA, 40 bp, Clostridium algidicarnis
  source 1..40: mol_type = genomic DNA
aacatccattagcgatatttcattgccttccttatcgatg

SEQ ID NO: 28839 - DNA, 40 bp, Clostridium algidicarnis
  source 1..40: mol_type = genomic DNA
aacatccattagcgatattaaattgccttccttatcgatg

SEQ ID NO: 28840 - DNA, 50 bp, Clostridium algidicarnis
  source 1..50: mol_type = genomic DNA
aacatacaatcatcttaacactacaaaataacttcaaaattttatatgta

SEQ ID NO: 28841 - protein, 501 aa, Clostridium algidicarnis
MKGVCIYLRKSRADEELEKSLGEGETLSKHRKALLKFAKDKKINIVEIKEEIVSGESLFFRPKMLELLKEVEDKKYSGVLVMDMQRLGRGDMQDQGLILKTFKDSHTLIITPQKTYDLHNDFDEEYSEFEAFMSRKELKMINRRMQGGRVRSIEEGNYISPTPPYGYDIHFINKNRTLKVNKDEAEIVKLIFNMYLEGNGAGIIANHLNSLGCKTKFGNSFTSSSVLFILKNPVYIGKVTWKKKEIKKSKDIDKLTDTRTRDIDEWIIADGKHEAIIKEDIFNKATEILKGRYHVPYRLANGMANPLAGIVICSVCGNKMVLRKSRGVDRILCNKSCGNKSVRYDYLENAMLTALDDYLKEYKINIKNNKPNNNVKAYEVQLEVNRNELENLNNQKLKLFDLLERGIYDDDTFLERTKNLDDRIKSIKDNVNKLVSAVEKDSKTATKKDIIKFENTIQAYKVATNIQLKNTLIKNILHKVEFKKEKHQRDNNFTIEIYPRV

SEQ ID NO: 28842 - DNA, 50 bp, Clostridium algidicarnis; identical to SEQ ID NO: 12637
  source 1..50: mol_type = genomic DNA

SEQ ID NO: 28843 - DNA, 40 bp, Clostridium algidicarnis; identical to SEQ ID NO: 28838
  source 1..40: mol_type = genomic DNA

SEQ ID NO: 28844 - DNA, 40 bp, Clostridium algidicarnis; identical to SEQ ID NO: 28839
  source 1..40: mol_type = genomic DNA

SEQ ID NO: 28845 - DNA, 50 bp, Clostridium algidicarnis; identical to SEQ ID NO: 28840
  source 1..50: mol_type = genomic DNA

SEQ ID NO: 28846 - protein, 501 aa, Clostridium algidicarnis
MKGVCIYLRKSRADEELEKSLGEGETLSKHRKALLKFAKDKKINIVEIKEEIVSGESLFFRPKMLELLKEVEDKKYSGVLVMDMQRLGRGDMQDQGLILKTFKDSHTLIITPQKTYDLHNDFDEEYSEFEAFMSRKELKMINRRMQGGRVRSIEEGNYISPTPPYGYDIHFINKNRTLKVNKDESEIVKLIFNMYLEGNGAGIIANHLNSLGCKTKFGNSFTSSSVLFILKNPVYIGKVTWKKKEIKKSKDIDKLTDTRTRDIDEWIIADGKHEAIIKEDIFNKATEILKGRYHVPYRLANGMANPLAGIVICSVCGNKMVLRKSRGVDRILCNKSCGNKSVRYDYLENAMLTALDDYLKEYKINIKNNKPNNNVKAYEVQLEVNRNELENLNNQKLKLFDLLERGIYDDDTFLERTKNLDDRIKSIKDNVNKLVSAVEKDSKTATKKDIIKFENTIQAYKVATNIQLKNTLIKNILHKVEFKKEKHQRDNNFTIEIYPRV

SEQ ID NO: 28847 - DNA, 50 bp, Clostridium algidicarnis; identical to SEQ ID NO: 12637
  source 1..50: mol_type = genomic DNA

SEQ ID NO: 28848 - DNA, 40 bp, Clostridium algidicarnis; identical to SEQ ID NO: 28838
  source 1..40: mol_type = genomic DNA

SEQ ID NO: 28849 - DNA, 40 bp, Clostridium algidicarnis; identical to SEQ ID NO: 28839
  source 1..40: mol_type = genomic DNA

SEQ ID NO: 28850 - DNA, 50 bp, Clostridium algidicarnis; identical to SEQ ID NO: 28840
  source 1..50: mol_type = genomic DNA

SEQ ID NO: 28851 - protein, 572 aa, Agathobaculum butyriciproducens
MTNEKSYVNMMTTSPVLTVAPPKEETEMFGATEKITALYCRLSQEDERAGESLSIENQKSILLSYSREHHMTNPVYFVDDGYSGTNFDRPGFQEMLAQIEAGKVANCIVKDLSRLGRNSAMTGLYTTLTFPKYGTRFIAINDNFDSADPNSVNNDFAGIKNWFNEFYARDTSRKIRAVQKSKGEKGIPLTVNVPYGYVKDPNDPHHWLIDPEAALVVKRIFTMCMEGRGPSQIANQLRADQVLTPTAYKKQQGLGTPHPLPENPCKWSDSSVVNILERREYTGCTVNFKTFTNSIWDKKQRENPLENQAVFPDTHERIIEDDVFEKVQEIRQQRHRMTRSGRTSMFSGLVFCVDCGSKMNYGSTNNYKPQQAFFDCSLHWKDKEKCNTHYIRESVLERLVLHHIQRVTEYILHHRDYFVSAMGQQMWLESTEKIQISRKKLERNQKRIAELKRLFIKIYEDNAAGRLSDERFDMMSQSYEAEQKQLEAETQTLQQEIEVQERQHENIEFFIQKADKYVGIEKLTPYALRELIQGIYVEAPDKSTGKRRQTIHIKYDGIGFIPLDVLMNGKTA

SEQ ID NO: 28852 - DNA, 50 bp, Agathobaculum butyriciproducens
  source 1..50: mol_type = genomic DNA
actgttttacggccaccgtgcatttggatgggtggtcataaaacagtaac

SEQ ID NO: 28853 - DNA, 40 bp, Agathobaculum butyriciproducens
  source 1..40: mol_type = genomic DNA
aaaatgcaagccgcccggtttccgggcggctttttttgcg

SEQ ID NO: 28854 - DNA, 40 bp, Agathobaculum butyriciproducens; identical to SEQ ID NO: 28853
  source 1..40: mol_type = genomic DNA

SEQ ID NO: 28855 - DNA, 50 bp, Agathobaculum butyriciproducens
  source 1..50: mol_type = genomic DNA
actgtttatcagaaatcttgcattttgatgggtggtttcccaaatttatg

SEQ ID NO: 28856 - protein, 488 aa, Clostridium perfringens
MKKIAIYIRKSIKGDENSISLDAQIEVIKNYFKEDCNFTIYKDDGFSGGNTNRPAFKKLMIDASVNKFDAVACYKLDRIARNTLDFLTTFNTLNDYGIDLICVEDKYDPTTPSGRLMMTLLASLAEIERENIKQRVKDSMLKLAKEGRWTGGTAPFGYKIVTIDCGKYLELVDEANIKYIFNEFVSGKGILKLSKEFNCNKQNISRILRSITYLKSTEEANKYLEKFLNYEVIGVPNGCGYLPYGNYKNVNGKKVKNNDSKLATVSKHKAVIDLDTFIKVQNRLKTFEGNPSPRISSKTFLAQMVKCKCGSNMNVILGKKKKDGSRKIYFACPKKCGNTFCDVSKIENDVLNTLKDVDLFNKIIKSSNPINKDYSKIKEPLLKEIDEKKKILDGLVCKLALANDSLTKILLDKIESLDLDINSIKEKINEIEKEEISKKVNENDIKIREMNRVNLIKNFDKMDMKERQSSIKKVINKIVWLGDAVLIK

SEQ ID NO: 28857 - DNA, 50 bp, Clostridium perfringens
  source 1..50: mol_type = genomic DNA
tactataatttgaataaacctcctttaccaagtgtatttaaattgtagta

SEQ ID NO: 28858 - DNA, 40 bp, Clostridium perfringens; identical to SEQ ID NO: 6333
  source 1..40: mol_type = genomic DNA

SEQ ID NO: 28859 - DNA, 40 bp, Clostridium perfringens; identical to SEQ ID NO: 6333
  source 1..40: mol_type = genomic DNA

SEQ ID NO: 28860 - DNA, 50 bp, Clostridium perfringens
  source 1..50: mol_type = genomic DNA
tacaaagatgatgggaaacctgcttttcctggtgaaggtttattgtagta

SEQ ID NO: 28861 - protein, 523 aa, Pseudomonas xanthomarina
MTKKCFPYVRFSSAKQEDGSTRARQNELIEAFVAKHGLEIDQTLEDAGTSAFRGLNASKDGVLGGFLEKVRNGEIEKGSYLLIENFDRLSRDKIVRSNKIFSDLLFAGIKIVILDKNKVYDADNLDFSEWIIALVEFERANKESERKSDFSSKAWRYNREKMRGGEIVTKKVPSWLSVENGVFIVDLDKVSRITHLFNLSLKYGLLEATKRYNQEYADKLAPHQVQYLLGNRKLIGEHQPKKLYWEDGGKRRLKDEGKAIPNYYPVVIEPTLFFKVQEIINDRKPFTGNYNKQQYNIFRGLIYCRWCGGTIRYMNKGKRDYFICTKSMGHNCVVPGQQSIRGKKLFSLFFQFTYRLNIQSLIEENKDYSNIKNEMLAIENKKNKLQSSIDDFKSRIKKMVIDNQSIPNSLYEVLQELENDFSALHESSKLLEEKYNQATQSYNALLEVEHIDIESIIYDRSEEAIEKRVAYNLTLKSIFKGIAINWLDNSLELEFKDGTVRYLQEGQRVPTDIPNDFIVPDLE

SEQ ID NO: 28862 - DNA, 50 bp, Pseudomonas xanthomarina
  source 1..50: mol_type = genomic DNA
atggaacctattacagaatacatccagatgtgttacgttaaaggttccac

SEQ ID NO: 28863 - DNA, 40 bp, Pseudomonas xanthomarina
  source 1..40: mol_type = genomic DNA
tcgcgcaaagcagtagatgcaaccgtgttcgcagccgcgg

SEQ ID NO: 28864 - DNA, 40 bp, Pseudomonas xanthomarina
  source 1..40: mol_type = genomic DNA
tcgcgcaaagcagtagatgctaccgtgttcgcagccgcgg

SEQ ID NO: 28865 - DNA, 50 bp, Pseudomonas xanthomarina
  source 1..50: mol_type = genomic DNA
ctggaacctaggtgaggataaaaactgctgtatttccatccaggttccaa

SEQ ID NO: 28866 - protein, 527 aa, Roseburia inulinivorans
MYELTQSMESLSVDEIIVYLRKSRSDSPEMSVEDVLKKHEEMIQDYANTHFGSPIPEKNIYREVVSGETIDSRPQVKIVLQKIESPQIKAVLIVEPQRLSRGDLEDCGRLINILRYTNTMVLTLTHSFNLQEEYERKFFEMEITRGNDYLEYTKRILRRGRESSAAKGHYIGSVDPYGYRKIVIKKDGVNCHTLEIVPEEANVVRLIHELYAYTPGGIGFTNIAHKLDSMNLKPKKAAHWTPAIISSILCNPLYLGLIRWDTRKVVKYINDGRLEKSRPRSSDAKYYKGLHEPIISQELYEACMARRGTNPSLRRNKELCNPFAGLLYCGTCDHAMSLKIYKNPNSVSQIMLCNHQSYCHTKSVLYSAFLERFISSMENTIHDFELALLADDGNAQAVNQSIVANLETRLKKLQEKDMRQKDAYEDGIYSKEEFLERNIKTQQEIASTITALTAAKETKENYVDYGEKIRRFRDCINALNDPELSATEKNQFLKSCVSKIIYYNNMESKAGVGRYVENVFSLEIQYI

SEQ ID NO: 28867 - DNA, 50 bp, Roseburia inulinivorans
  source 1..50: mol_type = genomic DNA
catttccaacatctatgtactgatgaattagcacatagatgttggaaatg

SEQ ID NO: 28868 - DNA, 40 bp, Roseburia inulinivorans
  source 1..40: mol_type = genomic DNA
tacggatattggaacagaagaattagcgcatctggaaatg

SEQ ID NO: 28869 - DNA, 40 bp, Roseburia inulinivorans
  source 1..40: mol_type = genomic DNA
tacggatattggaacagaataattagcgcatctggaaatg

SEQ ID NO: 28870 - DNA, 50 bp, Roseburia inulinivorans
  source 1..50: mol_type = genomic DNA
aacttccaatagatattttctgtttatttagctcattcaagtcagaaatg

SEQ ID NO: 28871 - protein, 473 aa, Paenarthrobacter ureafaciens
MGNVAIYVRQSQDKIGNEAAVTRQESSCRKLVEAKGWDVPTIYSDNDRSATTGAQRPEFERMLRDIAAGSIGAVVVWHLDRLTRTTRDLTRVIEAGQPHNVTIACVHGVSLDLSDPTGVAVANILTSIAQMEVGHKGRRQREANKQRASEGKAFWTRRPFGYDRVDKKVVTIPEEADAIRSAAESVLAGTKTLAQIAREWNAAGLLTTDQRRDRNTGQVTKIGGLWGVTQVRRVLLNPRYAGLRLYNGEPMEADGDWEPILTQEQLDELAVRLNDPRRRTAPDDLNARHLLSGILDCGKCGRKMFAAPYKAKGREIMVYRCFGGYCMQRRKDLVDELVVGVVLARLSLPDAAKAFTSGEDVGELRAEAVGLRERRDALAALLADGLLSPASVRQQAGKLAAELQRIESAIAAAEGVNPLAPLLGVEEVGEVWEAMDVAAQRKVLRVLMDITLLPAGKGVRFSPEQVRIEWKES

SEQ ID NO: 28872 - DNA, 50 bp, Paenarthrobacter ureafaciens
  source 1..50: mol_type = genomic DNA
taatcacaactatgcgcctttgcggtaacacttgtcaacagctagtattt

SEQ ID NO: 28873 - DNA, 40 bp, Paenarthrobacter ureafaciens
  source 1..40: mol_type = genomic DNA
caaggaaatcggcatgatggtccccctggtctttggcgtc

SEQ ID NO: 28874 - DNA, 40 bp, Paenarthrobacter ureafaciens
  source 1..40: mol_type = genomic DNA
caaggaaatcggcatgatgtaccccctggtctttggcgtc

SEQ ID NO: 28875 - DNA, 50 bp, Paenarthrobacter ureafaciens
  source 1..50: mol_type = genomic DNA
taatcacaaaataaatcctctccttaaatacttgttatactttaatattt

SEQ ID NO: 28876 - protein, 573 aa, Intestinimonas butyriciproducens
MDIHAVRQQLRTKSIYDIPLRVTYYARVSSESDEQLNSLENQIRYYEDLIRKNRAWTFVPGYIDEGLSGISTKKRENFNRMVEEAAEDRFDLVITKEISRFARNTLDSIQYTRQLLSYGVGVFFQNDNINTLDEDSELRLSIMSSIAQDELRKLSSRVKFGHQQAIKQSVVLGNSRIFGYRKDQKRLVIDETEAPMVRELFELYATDQYSMKQIETLFWEKGYRNLNGNKIAHSTMANMISNPKYKGYYVGNKVKVVDMFTKKQKFLPPEEWVMFKDETGEIVPAIVSEELWDKANEILKRRSEDVKNRQGICNHANLLTGKLWCTHCGQPYYRRESKDKSGNKNSKWLCSGKIKNGADSCGSFAIYEEEIKPVLYEVFRDTKADADGMVAEYVRMYNELTINGALPQKIEEQQKIIDMANRKKNKLLQLAADDSITNADFKSMTAACNEEIRAAEEEIAELEQAALEGEEFRRKIDEIRKVLANAQRDAANGVITKEFVDKYIDKIFITPTDENTLLLQIKIFTGETTEKYLRKFEHRVGIITGELTEQQKNQDAARGSEPCVSAGHTFKKM

SEQ ID NO: 28877 - DNA, 50 bp, Intestinimonas butyriciproducens
  source 1..50: mol_type = genomic DNA
tgcgtttctgcgggtcacacgttcaagaagatgagtaccgtacgaactgc

SEQ ID NO: 28878 - DNA, 40 bp, Intestinimonas butyriciproducens
  source 1..40: mol_type = genomic DNA
tgttgggggccagatggtcaagaagatgatcgaggcctac

SEQ ID NO: 28879 - DNA, 40 bp, Intestinimonas butyriciproducens
  source 1..40: mol_type = genomic DNA
tgttgggggccagatggtccagaagatgatcgaggcctac

SEQ ID NO: 28880 - DNA, 50 bp, Intestinimonas butyriciproducens
  source 1..50: mol_type = genomic DNA
tgtgtctctgtcagtctgatcttccagaggatgagtcagccacgcaccgc

SEQ ID NO: 28881 - protein, 609 aa, Vibrio parahaemolyticus
MDLCGSVMKKAYSYIRYSSPQQAAGDSYRRQLAATQAYCDAYGYELDTELSIYKELGISGFTGDQENLKQFISDCETGKVKKGSLLVVENLDRLSRQAINVAMRQFLSLLEYVDIYTLQDKKHYSNNDGRDSENQLLDIMTSLIIMSRAHEESLTKQKRLKDSWANQRKNAHKIKMSGVYPHWLIRSEDKKEFYLKEDRVKIIRHIFDLCINGQGATQILRSLNDNVEKYPPPSSKKEFWVRSTVKRLLSDRRLLGEHQFYVGHHSKREPIGEPLSNYFPQVIDEKTFVNAQISLKSRKIGAGKIKSDSFSNIFRGFLRCGHCDSPIEYVNKASKQASTLYLTCSNAKRGGDCNHSKHYRYLPLEHMLIHLSTANGFIPKPEKPSDLQTQLELITSKREQTNSKLSTLLERDFTAPIIMSKIEELTHNLAKYESEIAEIEDKLLALKADYEYEDLYHDMIVESDATKKFSNRVRFNSNLNKKIDNAYLYSIGLLPSIVFTMSDKSVHSLIIDERYNFGGCSIKNEDDTLIRLNGESVEAVDQMIWQMITQSIDLLGNINKDNEQAVKAGRKISLLISKFVMDSQNHSLLDEFQSVLSEFQDIQYKSEIC

SEQ ID NO: 28882 - DNA, 50 bp, Vibrio parahaemolyticus
  source 1..50: mol_type = genomic DNA
gagtagtgttattgacataagtttataaacatatgttaatatcactacta

SEQ ID NO: 28883 - DNA, 40 bp, Vibrio parahaemolyticus
  source 1..40: mol_type = genomic DNA
acatggtggtgccatatggatgattgccaaaccgcctaga

SEQ ID NO: 28884 - DNA, 40 bp, Vibrio parahaemolyticus
  source 1..40: mol_type = genomic DNA
acatggtggtgccatatggaagattgccaaaccgcctaga

SEQ ID NO: 28885 - DNA, 50 bp, Vibrio parahaemolyticus
  source 1..50: mol_type = genomic DNA
gagtagggtaaagaacagaaggttaaaaacatgagtagcagtaaggactt

SEQ ID NO: 28886 - protein, 654 aa, Vibrio breoganii
MRAPKIHVYARVSTLGQVESGLSLGLQTDDDMINEYCQRYGAELGKVYSDHGRSAFHQKNLAGKLGDFLTDMADKNNLDVQAGDYLLVRALDRISRANLDDAFWLYLQIMRSGVSILTTMDNREYKPNDSVSQILATLSFDLAGEESRKKQAITLAAMRKRIKQYQTGERASCGNPYNVSTGLPFYAYAKDNVCYIDEQKFQLAKNICQMALDGKGNVACRDYLRKHGVDLTVDSVASIFKSECLYGDRQITLLDLDATNRYPEKKKIYSTFILKDYYPAACTKDEFHRIRAIKDSYKIHDNRRISYSILGGISRLYCKDTVAIGSRENGGIYKCSSPECACGFYARQQLLDHIVLSCLSEHQIVPVEPDKKKIESIQQQIGAYQHQLSTLKKIMFDNPLAFDLTDQDRLSDLSVKIQELNDQLTIEQENHAHSNSFISLDDVKNWREKKKVYISGSDEDKLEAREVVQRLVKEIRIVEDTVTIKTIDNKVHWYYIPTPLNRRKKAYVKLLVTEQALEMRSINEALDKVCFTEEDIKNGKHHYPLEAYAADLVTVAIEALPKEKDEFELLLETITEPFVFKRRVLLSMGLSANQYQRHASFEKAIENGFHAVSVDYTSKNYKYPTDIIVSPREITKDDIQRLLSIRKVSKIVAL

SEQ ID NO: 28887 - DNA, 50 bp, Vibrio breoganii
  source 1..50: mol_type = genomic DNA
atgatgatttgaacttgataaggcttgcctaaatttgggttaatcatgtt

SEQ ID NO: 28888 - DNA, 40 bp, Vibrio breoganii
  source 1..40: mol_type = genomic DNA
gcgcgcagcccgctctacgttgacgtaatcacctgattga

SEQ ID NO: 28889 - DNA, 40 bp, Vibrio breoganii
  source 1..40: mol_type = genomic DNA
gcgcgcagcccgctctacgtcgacgtaatcacctgattga

SEQ ID NO: 28890 - DNA, 50 bp, Vibrio breoganii
  source 1..50: mol_type = genomic DNA
agactgattacaccttgacaaggctcacctgaatgtcttcctataatgtt

SEQ ID NO: 28891 - protein, 515 aa, Bacillus cereus; identical to SEQ ID NO: 26551

SEQ ID NO: 28892 - DNA, 50 bp, Bacillus cereus
  source 1..50: mol_type = genomic DNA
ttgttggtgtaattagatttaccccaacatggtagcaacaatgaaaatgt

SEQ ID NO: 28893 - DNA, 40 bp, Bacillus cereus
  source 1..40: mol_type = genomic DNA
aggcgcatgaggttgacgccattaagccctaaagcatcat

SEQ ID NO: 28894 - DNA, 40 bp, Bacillus cereus
  source 1..40: mol_type = genomic DNA
aggcgcatgaggttgacgcaattaagccctaaagcatcat

SEQ ID NO: 28895 - DNA, 50 bp, Bacillus cereus
  source 1..50: mol_type = genomic DNA
ttgctggtacctccagatttgccaaaagatgatagcaccactcaatatct

SEQ ID NO: 28896 - protein, 527 aa, Photobacterium damselae
MNKPKAIPYIRFSSLVQGNGSSVARQQDYINKWLKSNPDVLLSNLQFKDLGKSGYTGKHLKNDLGKLLVAIESNHIKAGDFILIEAMDRLGRLPELEMISIIQQIISAGIKIVTLQDNTEYSTESIAANSGLLYVLVGKVQGAHQYSKSLSDRLSKAWEDKKRKAIEGQGVKRKTPWWVTWNDLTKRYDIVTEDNKYILKSIYNLYLNGFGERRILNRLREKYPDKFGTTDPASVKRWLKNKTAIGYWGDVPNVYPSAIPESLFYTVQAELKNRGAGKSQTPRSGRFLCGLVKCGCCGGNYAIRSNPHSKDAMLCSQSNKRKDKCNNKKTIPYQVLDWVRSQTYLDALARIATRSQKTDIDEKLIVIDGELESLKSQRDNLLELGSKVGFSDSLTNKYTTLEEQITKLEISRVGITQTIIEPEDIDSSMLPELEYDLFEDVEAFGQLLQKVGYKMVVKGRKIECEGTVFEYLKWSRTNDTYHILINGVDFVELSVMRDVTDEEIKDMQETETNSFLITEDNVCDFIL

SEQ ID NO: 28897 - DNA, 50 bp, Photobacterium damselae
  source 1..50: mol_type = genomic DNA
gttatcatccagacagcgaacattacaatgcaatttgtatagtagctaac

SEQ ID NO: 28898 - DNA, 40 bp, Photobacterium damselae; identical to SEQ ID NO: 7188
  source 1..40: mol_type = genomic DNA

SEQ ID NO: 28899 - DNA, 40 bp, Photobacterium damselae; identical to SEQ ID NO: 7189
  source 1..40: mol_type = genomic DNA

SEQ ID NO: 28900 - DNA, 50 bp, Photobacterium damselae; identical to SEQ ID NO: 7190
  source 1..50: mol_type = genomic DNA

SEQ ID NO: 28901 - protein, 538 aa, Streptomyces antibioticus
MPYAPEYLHLVIPGVTFEALLYGRNSDGDGTESSVAAQLATGRALCNSHNWRIQREFDDADTSASRHGRKTRSDFEALIETITEPAPPGIRRIVVAFQASRYYRDLEAYVRLRKACIETDTLLCYNSQVYDLSRRDDRKATAMHAVDAEDEAEGIRDGNLRTAKSQAAAGMPHGKLHYGYTRTYTTIRGRQRCTGQHEDERGKYVVQSLHRIDEGGSLRGLVRWLKAQPEATRPDGKPWTDQYVRSMLLNRVYLGERTHKGLTVKAAWLPLKGLETPEGRALFNRVTARLTDPARLMQRGSEVAHLLSYLALCGECGDHAALRYLAGSPTRKATLCCATNDTSIVEARIDAYVQEAVIDWFSDKRKARAALVPADDKVKEMAAATQRLINVFEEQLAEARQLAETFDEELGRFKLSAVSLASLESRLEPKLEAARKKLQSFAGVSPLLLRMLEADDPDEVWNGRPGEEGRPAVRGLTLEQKREVIRSVVTVRLFKAQASGRRALDDDRIRLSFFGEPGFRARRLRAPEPAAGLAAVGA

SEQ ID NO: 28902 - DNA, 50 bp, Streptomyces antibioticus
  source 1..50: mol_type = genomic DNA
caccacctctaaatacttttgtgggtccagaaacctatttagggatggta

SEQ ID NO: 28903 - DNA, 40 bp, Streptomyces antibioticus
  source 1..40: mol_type = genomic DNA
ggcccagtcacggatctgggtccagatcgccggtgtcgtg

SEQ ID NO: 28904 - DNA, 40 bp, Streptomyces antibioticus
  source 1..40: mol_type = genomic DNA
ggcccagtcacggatctggagccagatcgccggtgtcgtg

SEQ ID NO: 28905 - DNA, 50 bp, Streptomyces antibioticus
  source 1..50: mol_type = genomic DNA
caacccctaaggtgactttattggagatagaaaccttatggaggttggta

SEQ ID NO: 28906 - protein, 593 aa, Escherichia marmotae
MIFSECLLFKVLAMKKLYSYIRWSTDKQTGNTSLERQTEKAKQYAAIHGLEYVQILDAGVSAFRGKNTTQGAFSGFINAVKAGVISSDSWLYVENLDRLTRQDVMTALNLFTSLLKLGLTIVTGMDGKIYTEESISNNVNDLIMSLFLFSRANEESLTKQKRAYETTLKLIERHKSGLPTNIKSAGSTPFWIDATGPNTEAVKPHPIYFKAAKEAVRLLLSGWGNYRVANYLNENSDIYPPPPGKKTRNKNREARWTVPNIKKMRLNRALMGEKVLTLNNVTYHLEDYFPPVCTPAEFARLQDVACNNKMPQGCKKKVITLLSGMGILRCGHCGGAMTSFSKQGKIRYLCESGKKRMSSCKAWSVSGELVERCLLYPLISGYMSLVIEDQNAGESLADQIDSKRSELELVESQIGNLTTAITMGGNLESLVTQLQELESRKRGLLLELDKLSQRELLQGSREQQIEKIVDTVEMLTPQLLEDTTHPNRLNIREVVRAVISSVTISKAKDKTLTLRYEIYDRQRYLFEGQIKTDNNGNKLCGYAMYVETPVFSDKVPPEVIKKYHDSGKLLVQKIDEMLIGFPRINPSCFVSKQ

SEQ ID NO: 28907 - DNA, 50 bp, Escherichia marmotae
  source 1..50: mol_type = genomic DNA
ctgtttgtctaaatgataatgggcttgcccaagtttgaaaagatgatatt

SEQ ID NO: 28908 - DNA, 40 bp, Escherichia marmotae
  source 1..40: mol_type = genomic DNA
cggattagccaacttagtgttgcccataattcctcaaaaa

SEQ ID NO: 28909 - DNA, 40 bp, Escherichia marmotae
  source 1..40: mol_type = genomic DNA
cggattagccaacttagtgtagcccataattcctcaaaaa

SEQ ID NO: 28910 - DNA, 50 bp, Escherichia marmotae
  source 1..50: mol_type = genomic DNA
gtgtttgtctcagggataattgcctatgccaagtttgctatgatattcta

SEQ ID NO: 28911 - protein, 593 aa, Escherichia marmotae; identical to SEQ ID NO: 28906

SEQ ID NO: 28912 - DNA, 50 bp, Escherichia marmotae; identical to SEQ ID NO: 28907
  source 1..50: mol_type = genomic DNA

SEQ ID NO: 28913 - DNA, 40 bp, Escherichia marmotae
  source 1..40: mol_type = genomic DNA
cgggttagccaacttagtgttgcccataattcctcaaaaa

SEQ ID NO: 28914 - DNA, 40 bp, Escherichia marmotae
  source 1..40: mol_type = genomic DNA
cgggttagccaacttagtgtagcccataattcctcaaaaa

SEQ ID NO: 28915 - DNA, 50 bp, Escherichia marmotae; identical to SEQ ID NO: 28910
  source 1..50: mol_type = genomic DNA

SEQ ID NO: 28916 - protein, 593 aa, Escherichia marmotae
MIFSECLLFKVLAMKKLYSYIRWSTDKQTGNTSLERQTEKAKQYAAIHGLEYVQILDAGVSAFRGKNTTQGAFSGFINAVKAGVISSDSWLYVENLDRLTRQDVMTALNLFTSLLKLGLTIVTGMDGKIYTEESISNNVNDLIMSLFLFSRANEESLTKQKRAYETTLKLIERHKSGLPTNIKSAGSTPFWIDATGPNTEAVKPHPIYFKAAKEAVRLLLSGWGNYRVANYLNENSDIYPPPPGKKTRNKNREARWTVPNIKKMRLNRALMGEKVLTLNNVTYHLEDYFPPVCTPAEFARLQDVACNNKMPQGCKKKVITLLSGMGILRCGHCGGAMTSFSKQGKIRYLCESGKKRMSSCKAWSVSGELVERCLLYPLISGYMSLVIEDQNAGESLADQIDSKRSELELVESQIGNLTTAITMGGNLESLVTQLQELESRKRGLLLELDKLSQRELLQGSREQQIEKIVDTVEMLTPQLLEDTTHPNRLNIREVVRAVISSVTISKAKDKTLTLRYEIYDRQRYLFEGQIKTDNNGNKLCGYAMYVETPVFSDRVPPEVIKKYRDSGKLLVQKIDEMLIGFPRINPSCFVSKQ

SEQ ID NO: 28917 - DNA, 50 bp, Escherichia marmotae; identical to SEQ ID NO: 28907
  source 1..50: mol_type = genomic DNA

SEQ ID NO: 28918 - DNA, 40 bp, Escherichia marmotae; identical to SEQ ID NO: 28913
  source 1..40: mol_type = genomic DNA

SEQ ID NO: 28919 - DNA, 40 bp, Escherichia marmotae; identical to SEQ ID NO: 28914
  source 1..40: mol_type = genomic DNA

SEQ ID NO: 28920 - DNA, 50 bp, Escherichia marmotae; identical to SEQ ID NO: 28910
  source 1..50: mol_type = genomic DNA

SEQ ID NO: 28921 - protein, 593 aa, Escherichia coli
MIFSECLLFKVLAMKKLYSYIRWSTDKQTGNTSLERQTEKAKQYAAIHGLEYVQILDAGVSAFRGKNTTQGAFSGFINAVKAGVISSDSWLYVENLDRLTRQDVMTALNLFTSLLKLGLTIVTGMDGKIYTEESISNNVNDLIMSLFLFSRANEESLTKQKRAYETTLKLIERHKSGLPTNIKSAGSTPFWIDATGPNTEAVKPHPIYFKAAKEAVRLLLSGWGNYRVANYLNENSDIYPPPPGKKTRNKNREARWTVPNIKKMRLNRALMGEKVLTLNNVTYHLEDYFPPVCTPAEFARLQDVACNNKMPQGCKKKVITLLSGMGILRCGHCGGAMTSFSKQGKIRYLCESGKKRMSSCKAWSVSGELVERCLLYPLISGYMSLVIEDQNAGESLADQIDSKRSELELVESQIGNLTTAITMGGNLESLVTQLQELESRKRGLLLELDKLSQRELLQGSREQQIEKIVDTVEMLTPQLLEDTTHPNRLNIREVVRAVISSVTISKAKDKTLTLRYEIYDRQRYLFKGQIKTDNNGNKLCGYAMYVETPVFSDRVPPEVIKKYHDSDKLLVQKIDEMLIGFPRINPSCFVSKQ

SEQ ID NO: 28922 - DNA, 50 bp, Escherichia coli
  source 1..50: mol_type = genomic DNA
ttgtttgtctaaatgataatgggcttgcccaagtttgaaaagatgatatt

SEQ ID NO: 28923 - DNA, 40 bp, Escherichia coli; identical to SEQ ID NO: 28908
  source 1..40: mol_type = genomic DNA

SEQ ID NO: 28924 - DNA, 40 bp, Escherichia coli; identical to SEQ ID NO: 28909
  source 1..40: mol_type = genomic DNA

SEQ ID NO: 28925 - DNA, 50 bp, Escherichia coli; identical to SEQ ID NO: 28910
  source 1..50: mol_type = genomic DNA

SEQ ID NO: 28926 - protein, 593 aa, Escherichia coli; identical to SEQ ID NO: 28916

SEQ ID NO: 28927 - DNA, 50 bp, Escherichia coli; identical to SEQ ID NO: 28907
  source 1..50: mol_type = genomic DNA

SEQ ID NO: 28928 - DNA, 40 bp, Escherichia coli; identical to SEQ ID NO: 28908
  source 1..40: mol_type = genomic DNA

SEQ ID NO: 28929 - DNA, 40 bp, Escherichia coli; identical to SEQ ID NO: 28909
  source 1..40: mol_type = genomic DNA

SEQ ID NO: 28930 - DNA, 50 bp, Escherichia coli; identical to SEQ ID NO: 28910
  source 1..50: mol_type = genomic DNA

SEQ ID NO: 28931 - protein, 593 aa, Escherichia coli
MIFSECLLFKVLAMKKLYSYIRWSTDKQTGNTSLERQTEKAKQYAAIHGLEYVQILDAGVSAFRGKNTTQGAFSGFINAVKAGVISSDSWLYVENLDRLTRQDVMTALNLFTSLLKLGLTIVTGMDGKIYTEESISNNVNDLMMSLFLFSRANEESLTKQKRAYETTLKLIERHKSGLPTNIKSAGSTPFWIDATGPNTEAVKPHPIYFKAAKEAVRLLLSGWGNYRVANYLNENSDIYPPPPGKKTRNKNREARWTVPNIKKMRLNRALMGEKVLTLNNVTYHLEDYFPPVCTPAEFARLQDVACNNKMPQGCKKKVITLLSGMGILRCGHCGGAMTSFSKQGKIRYLCESGKKRMSSCKAWSVSGELVERCLLYPLISGYMSLVIEDQNAGESLADQIDSKRSELELVESQIGNLTTAITMGGNLESLVTQLQELESRKRGLLLELDKLSQRELLQGSREQQIEKIVDTVEMLTPQLLEDTTHPNRLNIREVVRAVISSVTISKAKDKTLTLRYEIYDRQRYLFEGQIKTDNNGNKLCGYAMYVETPVFSDRVPPEVIKKYRDSGKLLVQKIDEMLIGFPRINPSCFVSKQ

SEQ ID NO: 28932 - DNA, 50 bp, Escherichia coli; identical to SEQ ID NO: 28922
  source 1..50: mol_type = genomic DNA

SEQ ID NO: 28933 - DNA, 40 bp, Escherichia coli; identical to SEQ ID NO: 28908
  source 1..40: mol_type = genomic DNA

SEQ ID NO: 28934 - DNA, 40 bp, Escherichia coli; identical to SEQ ID NO: 28909
  source 1..40: mol_type = genomic DNA

SEQ ID NO: 28935 - DNA, 50 bp, Escherichia coli; identical to SEQ ID NO: 28910
  source 1..50: mol_type = genomic DNA

SEQ ID NO: 28936 - protein, 593 aa, Escherichia coli
MIFSECLLFKVLAMKKLYSYIRWSTDKQTGNTSLERQTEKAKQYAAIHGLEYVQILDAGVSAFRGKNTTQGAFSGFINAVKAGVISSDSWLYVENLDRLTRQDVMTALNLFTSLLKLGLTIVTGMDGKIYTEESISNNVNDLIMSLFLFSRANEESLTKQKRAYETTLKLIERHKSGLPTNIKSAGSTPFWIDATGPNTEAVKPHPIYFKAAKEAVRLLLSGWGNYRVANYLNENSDIYPPPPGKKTRNKNREARWTVPNIKKMRLNRALMGEKVLTLNNVTYHLEDYFPPVCTPAEFARLQDVACNNKMPQGCKKKVITLLSGMGILRCGHCGGAMTSFSKQGKIRYLCESGKKRMSSCKAWSVSGELVERCLLYPLISGYMSLVIEDQNAGESLADQIDSKRSELELVESQIGNLTTAITMGGNLESLVTQLQELESRKRGLLLELDKLSQRELLQGSREQQIEKIVDTVEMLTPQLLEDTTHPNRLNIREVVRAVISSVTISKAKDKTLTLRYEIYDRQRYLFKGQIKTDNNGNKLCGYAMYVETPVFSDRVPPEVIKKYHDSDKLLVQKIDEMLIGFPRIDPSCFVSKQ

SEQ ID NO: 28937 - DNA, 50 bp, Escherichia coli; identical to SEQ ID NO: 28922
  source 1..50: mol_type = genomic DNA

SEQ ID NO: 28938 - DNA, 40 bp, Escherichia coli; identical to SEQ ID NO: 28908
  source 1..40: mol_type = genomic DNA

SEQ ID NO: 28939 - DNA, 40 bp, Escherichia coli; identical to SEQ ID NO: 28909
  source 1..40: mol_type = genomic DNA

SEQ ID NO: 28940 - DNA, 50 bp, Escherichia coli; identical to SEQ ID NO: 28910
  source 1..50: mol_type = genomic DNA

SEQ ID NO: 28941 - protein, 593 aa, Escherichia coli
MIFSECLLFKVLAMKKLYSYIRWSTDKQTGNTSLERQTEKAKQYAAIHGLEYVQILDAGVSAFRGKNTTQGAFSGFINAVKAGVISSDSWLYVENLDRLTRQDVMTALNLFTSLLKLGLTIVTGMDGKIYTEESISNNVNDLIMSLFLFSRANEESLTKQKRAYETTLKLIERHKSGLPTNIKSAGSTPFWIDATGPNTEAVKPHPIYFKAAKEAVRLLLSGWGNYRVANYLNENSDIYPPPPGKKTRNKNREARWTVPNIKKMRLNRALMGEKVLTLNNVTYHLEDYFPPVCTPAEFARLQDVACNNKMPQGCKKKVITLLSGMGILRCGHCGGAMTSFSKQGKIRYLCESGKKRMSSCKAWSVSGELVERCLLYPLISGYMSLVIEDQNAGESLADQIDSKRSELELVESQIGNLTTAITMGGNLESLVTQLQELESRKRGLLLELDKLSQRELLQGSREQQIEKIVDTVEMLTPQLLEDTTHPNRLNIREVVRAVISSVTISKAKDKTLTLRYEIYDRQRYLFEGQIKTDNNGNKLCGYAMYVETPVFSDKVPPEVIKKYHDSDKLLVQKIDEMLIGFPRINPSCFVSKQ

SEQ ID NO: 28942 - DNA, 50 bp, Escherichia coli; identical to SEQ ID NO: 28907
  source 1..50: mol_type = genomic DNA

SEQ ID NO: 28943 - DNA, 40 bp, Escherichia coli; identical to SEQ ID NO: 28908
  source 1..40: mol_type = genomic DNA

SEQ ID NO: 28944 - DNA, 40 bp, Escherichia coli; identical to SEQ ID NO: 28909
  source 1..40: mol_type = genomic DNA

SEQ ID NO: 28945 - DNA, 50 bp, Escherichia coli; identical to SEQ ID NO: 28910
  source 1..50: mol_type = genomic DNA

SEQ ID NO: 28946 - protein, 443 aa, Blautia sp YL58
MYYDVRFIAINDDVDSAKGENDFAVFNNVFNDYYTKDTSKKIRAVVKMRGEAGEHLASNPPYGYVKDPQDKKKWIVDEEAAKVVRRIFDLCIAGKGPMQIAKILTKEQILTVTAYHARQKGWTMPDNLYGWSQKSVSGILERREYTGCTVNFKTYAKSLKFKKRLQNPKENQRIFEGTQPVIIEYGQWERVQVLRENKRRPTKTGKTSIFSGLVRCADCGAKLYYCTCHSYKDDSQNHFVCSNYKSNTGSCQIHYIRETTLYKRVLECVQRTLTYVRLFKDDFTQEMLMQDEASRKEELTQKRKALSGAQKRMEDLDKIIQRLYEDNVLGKLSDLRFQKLSGQYETEQEEIRLLSEVLEREITEEAEQVSDVERFLQLAERYSDIQELDAATVNELIEKIVIHNPKKIDGRKHVTIEIYFTYVGKIRIPLQKPELPTGTEKPA

SEQ ID NO: 28947 - DNA, 50 bp, Blautia sp YL58
  source 1..50: mol_type = genomic DNA
ttacttccttatgagcttccgcctaaaggcggtagctcataaggaaacat

SEQ ID NO: 28948 - DNA, 40 bp, Blautia sp YL58
  source 1..40: mol_type = genomic DNA
tataaaaaggacgttcccaaagcggaacgtcctttttata

SEQ ID NO: 28949 - DNA, 40 bp, Blautia sp YL58
  source 1..40: mol_type = genomic DNA
tataaaaaggacgttcccagagcggaacgtcctttttata

SEQ ID NO: 28950 - DNA, 50 bp, Blautia sp YL58
  source 1..50: mol_type = genomic DNA
ttacttccacaccacctcctgcctgaaggccctagcataaaaagatgcat

SEQ ID NO: 28951 - protein, 547 aa, Anaerostipes hadrus
MIRKKIKVAAYARVSTDKDDQLNSLDNQRIYFQNYIKGHPDWEFVDVYWDEGISGTQTKNRVGFNNMIADAINGKIDLIITKEVSRFARNTVDTLSYTRKLKQFDVGVIFILDNIDSRDVDAEFRLTIMASNAQEESRKTSERVKWGQKRQMEKGVVFGRSLLGYIVDNGKISINQEEVPIVKKIFHKYTIEGKGTHVIARELLEEGIEPKRVKKWSNTVILRVLRNEKYVGDLCQKKTITPDYLTHKKKYNRGEEEMVYIKDHHEPIISRELWKATQEELKRRSVSKKQKLKHSSRYWCSGKIKCAECGNRFVGRSRILKNGQKYKTWKCFENVTHGSKKKKLNGEIVGCCNNAINEKSLVVCMNYCISFMQDGKELLKKEILQEIGKIKKEKENKLFGEESIRESIEHYERKKRKSIDLMLDGLISEEDFINQKNWYDEKIKNLKDKLIEESKKYREDKKEYIIQSYRNALDEIMDIDNPSEMVFKEILDHIDVHKNKVLDIWLKSVPFGIRLKIETEGRSTTYKTKILETELIEKSKGVISKTI

SEQ ID NO: 28952 - DNA, 50 bp, Anaerostipes hadrus
  source 1..50: mol_type = genomic DNA
aggagtcatatcgaaaacaatataggtatatcggtttcgatatggcacat

SEQ ID NO: 28953 - DNA, 40 bp, Anaerostipes hadrus
  source 1..40: mol_type = genomic DNA
tggggtgctaaccgatataggtacagaagaattagctcac

SEQ ID NO: 28954 - DNA, 40 bp, Anaerostipes hadrus
  source 1..40: mol_type = genomic DNA
tggggtgctaaccgatatatatacagaagaattagctcac

SEQ ID NO: 28955 - DNA, 50 bp, Anaerostipes hadrus
  source 1..50: mol_type = genomic DNA
aaaagtcattatgtaaaaaatatatatgcatttgtgtgttcatggcacac

SEQ ID NO: 28956 - protein, 547 aa, Anaerostipes hadrus
MIRKKIKVAAYARVSTDKDDQLNSLDNQRIYFQNYIKGHPDWEFVDVYWDEGISGTQTKNRVGFNNMIADAINGKIDLIITKEVSRFARNTVDTLSYTRKLKQFDVGVIFILDNIDSRDVDAEFRLTIMASNAQEESRKTSERVKWGQKRQMEKGVVFGRSLLGYIVDNGKISINQEEVPIVKKIFHKYTIEGKGTHVIARELLEEGIEPKRVKKWSNTVILRVLRNEKYVGDLCQKKTITPDYLTHKKKYNRGEEEMVYIKDHHEPIISRELWKATQEELKRRSVSKKQKLKHSSRYWCSGKIKCAECGNRFVGRSRILKNGQKYKTWKCFENVTHGSKKKKLNGEIVGCCNNAINEKSLVVCMNYCISFMQDGKELLKKEILQEIGKIKKEKENKLFGEESIRESIEHYERKKRKSIDLMLDGLISEEDFINQKNWYDEKIKNLKDKLIEESKKDREDKKEYIIQSYRNALDEIMDIDNPSEMVFKEILDHIDVHKNKVLDIWLKSVPFGIRLKIETEGRSTTYKTKILETELIEKSKGVISKTI

SEQ ID NO: 28957 - DNA, 50 bp, Anaerostipes hadrus
  source 1..50: mol_type = genomic DNA
aggagtcatatcaaaaacaatataggtatatcggtttcgatatggcacat

SEQ ID NO: 28958 - DNA, 40 bp, Anaerostipes hadrus
  source 1..40: mol_type = genomic DNA
tggggtgctaactgatataggtacagaagaattagctcac

SEQ ID NO: 28959 - DNA, 40 bp, Anaerostipes hadrus
  source 1..40: mol_type = genomic DNA
tggggtgctaactgatatatatacagaagaattagctcac

SEQ ID NO: 28960 - DNA, 50 bp, Anaerostipes hadrus; identical to SEQ ID NO: 28955
  source 1..50: mol_type = genomic DNA

SEQ ID NO: 28961 - protein, 547 aa, Anaerostipes hadrus
MIRKKIKVAAYARVSTDKDDQLNSLDNQRIYFQNYIKGHPDWEFIDVYWDEGISGTQTKNRVGFNNMIADAINGKIDLIITKEVSRFARNTVDTLSYTRKLKQFDVGVIFILDNIDSRDVDAEFRLTIMASNAQEESRKTSERVKWGQKRQMEKGVVFGRSLLGYIVDNGKISINQEEVPIVKKIFHKYTIEGKGTHVIARELLEEGIEPKRVKKWSNTVILRVLRNEKYVGDLCQKKTITPDYLTHKKKYNRGEEEMVYIKDHHEPIISRELWKATQEELKRRSVSKKQKLKHSSRYWCSGKIKCAECGNRFVGRSRILKNGQKYKTWKCFENVTHGSKKKKLNGEIVGCCNNAINEKSLVVCMNYCISFMQDGKELLKKEILQEIGKIKKEKENKLFGEESIRESIEHYERKKRKSIDLMLDGLISEEDFINQKNWYDEKIKNLKDKLIEESKKDREDKKEYIIQSYRNALDEIMDIDNPSEMVYKEILDHIDVHKNKVLDIWLKSVPFGIRLKIETEGRSTTYKTKILETELIEKSKGVISKTI

SEQ ID NO: 28962 - DNA, 50 bp, Anaerostipes hadrus; identical to SEQ ID NO: 28952
  source 1..50: mol_type = genomic DNA

SEQ ID NO: 28963 - DNA, 40 bp, Anaerostipes hadrus; identical to SEQ ID NO: 28958
  source 1..40: mol_type = genomic DNA

SEQ ID NO: 28964 - DNA, 40 bp, Anaerostipes hadrus; identical to SEQ ID NO: 28959
  source 1..40: mol_type = genomic DNA

SEQ ID NO: 28965 - DNA, 50 bp, Anaerostipes hadrus; identical to SEQ ID NO: 28955
  source 1..50: mol_type = genomic DNA

SEQ ID NO: 28966 - protein, 547 aa, Anaerostipes hadrus
MIRKKIKVAAYARVSTDKDDQLNSLDNQRIYFQNYIKGHPDWEFVDVYWDEGISGTQTKNRVGFNNMIADAINGKIDLIITKEVSRFARNTVDTLSYTRKLKQFDVGVIFILDNIDSRDVDAEFRLTIMASNAQEESRKTSERVKWGQKRQMEKGVVFGRSLLGYIVDNGKISINQEEVPIVKKIFHKYTIEGKGTHVIARELLEEGIEPKRVKKWSNTVILRVLRNEKYVGDLCQKKTITPDYLTHKKKYNRGEEEMVYIKDHHEPIISRELWKATQEELKRRSVSKEQKLKHSNRYWCSGKIKCAECGNRFVGRSRILKNGQKYKTWKCFENVTHGLKKKKLNGEIVGCCNNAINEKSLVVCMNYCISFMQDGKELLKKEILQEIGKIKKEKENKLFGEESIRESIEHYERKKRKSIDLMLDGLISEEDFINQKNWYDEKIKNLKDKLIEESKKDREDKKEYIIQSYRNALDEIMDIDNPSEMVYKEILDHIDVHKNKVLDIWLKSVPFGIRLKIETEGRSTTYKTKILETELIEKSKGVISKTI

SEQ ID NO: 28967 - DNA, 50 bp, Anaerostipes hadrus; identical to SEQ ID NO: 28952
  source 1..50: mol_type = genomic DNA

SEQ ID NO: 28968 - DNA, 40 bp, Anaerostipes hadrus; identical to SEQ ID NO: 28958
  source 1..40: mol_type = genomic DNA

SEQ ID NO: 28969 - DNA, 40 bp, Anaerostipes hadrus; identical to SEQ ID NO: 28959
  source 1..40: mol_type = genomic DNA

SEQ ID NO: 28970 - DNA, 50 bp, Anaerostipes hadrus; identical to SEQ ID NO: 28955
  source 1..50: mol_type = genomic DNA

SEQ ID NO: 28971 - protein, 554 aa, Pseudomonas agarici
MTKAYAYIRYSRAIQATGDSEHRQLTALELFETSTGTKIVEVMYDKGKSAFRGDNARSGNFKEMLDRMQSGAIRPGDYLVVESIDRITRQRVLDGVELLQGILKKGINIYTTVDQKTYSYNDPSRDFENLLMISLIAKRANEESETKSGRLLSAWKARKAKAENGEVIIKKGKSIPYGLRVEHGKFVIQKEEQGEIQKLFELLLKFGLNTAITKINETSLKKWNNGTVNKILKNKTVIGCMATHRIEYTEEGKARKILTGFIEGYYPNLIEPSLFYKAIDAMSNRKQKNWSGRRTEQDFNIFKHCIYCEQCGGKMYYDHRGSRYKGKIYPFFKCDNARVQKHICTADNIRFEYVFGSLLECVYLVNRVATGITKDFKGISTQARYLNPKINNLLKIDDSQQNIELEEKRKKLVASRTKLDGMNLRMIEADYNVPTEYMRQMSSLELEIEALKKSIALLDDTGSDGINIEDTQTIIDLFQTDDGRAKLNSFFKSNDIIFYASHIKSTRCTVFRMHRKNSDVDERISGTTKVFPLKNILQEFGLGDLQSMFDLTIN

SEQ ID NO: 28972 - DNA, 50 bp, Pseudomonas agarici
  source 1..50: mol_type = genomic DNA
cactgaaaaatcgtttacccaatcatcatcaagtggtatgattttccgag

SEQ ID NO: 28973 - DNA, 40 bp, Pseudomonas agarici
  source 1..40: mol_type = genomic DNA
cccccgccgcaaccggatcatcagcggtttatcccttggc

SEQ ID NO: 28974 - DNA, 40 bp, Pseudomonas agarici
  source 1..40: mol_type = genomic DNA
cccccgccgcaaccggatctccagcggtttatcccttggc

SEQ ID NO: 28975 - DNA, 50 bp, Pseudomonas agarici
  source 1..50: mol_type = genomic DNA
caattaaccagcatttacccagcatccatcaagtagtaaggttttcccag

SEQ ID NO: 28976 - protein, 547 aa, Vibrio parahaemolyticus
MRTAYSYVRLSSKKQIQGYGQERQWEAIQAAALAHGWSLSEKTFSDLGVSGWKGANIETGALSQFLQCVEDGYIEKGSVLIVENVDRLSRAGVQRAVSLLMQLLASGISIYTFTDSKLYEPDSHNPLMDLMAWALSAQRAFEESERKSQMILNAKAKAREKARLTGEIITRRCPSWLRVNQDKTEFELIPERVETVRKIFDLYVNGYGTPRIGRLLTEEGRKPLTGRAWYPRSISRILQYRAVLGEYQPTLNGKPEGEAIKNYYPAIIDEDQFNEVQAVLKEGGAGKGRRGKEMRNYFAGLLRCSCGEGMHIVSSCVKGKRYYQLRCLQYRISCFDSPWNFYRLSSFVLFALRRLPILEVMGSQDNNNIKELNAKERELTFLLEDTRRQLDNTINAIAALGLNDQLQSKFRELKTSVTNIEKQLSNVKTELETSQGKLVIQKQDSEMLTGRFLELIDSTKDIDGRIKLNQVLRRYLSKIEMHADKKEEYRYIKIYRKDGDELVSIQCDHSLKGALFESKDDLETFELLPANDAKRNEISNTLLCTPK

SEQ ID NO: 28977 - DNA, 50 bp, Vibrio parahaemolyticus
  source 1..50: mol_type = genomic DNA
ttgtgcctttaagaaaacataactaaagtattgtatcggttatgacataa

SEQ ID NO: 28978 - DNA, 40 bp, Vibrio parahaemolyticus; identical to SEQ ID NO: 4428
  source 1..40: mol_type = genomic DNA

SEQ ID NO: 28979 - DNA, 40 bp, Vibrio parahaemolyticus
  source 1..40: mol_type = genomic DNA
atttggctggcatgtggtcgtggttctctacagaacatag

SEQ ID NO: 28980 - DNA, 50 bp, Vibrio parahaemolyticus
  source 1..50: mol_type = genomic DNA
attaaccttagactaaacacagctgtagtattgtataagaaatatcatga

SEQ ID NO: 28981 - protein, 480 aa, Streptococcus salivarius
MATHKVAIYVRVSTTSQVDEGYSIDEQKAKLTSYCDIKDWNIYDIYTDGGFSGSNTERPALERLIRDAKRKLFDTVLVYKLDRLSRSQKDTLYLIEDVFLENDIEFVSLLENFDTSTPFGKAMIGLLSVFAQLEREQIKERMQLGKLGRAKSGKSMQWAKTSYGYDYIKETGTLSVNPYQALIVRKMFEWYLSGMSITKLRDALNEQYGQDKEWSYRTVRVILSNPVYCGYNQFKGQIFPGTHEPIISEDDFNKTQEEIKTRQRTAAQRFNPRPFQAKYMLSGIAQCGYCSAPLAIKLGMKRKDGTRLVKYECKQRHPRKTKGVTVYNNNEKCDSGFYFKDDIEHFVLTEISKLQTDSDYIDKLFSNTDKETIDRASYQKQIDNLTAKISRLNDLYIDDRISLEELQKRSSDFMAERSALEKELDADSSLKAVERKKDIRRVLDTKDIFTLDYEQQKTIARALISKVRVTSESIVILWKL

SEQ ID NO: 28982 - DNA, 50 bp, Streptococcus salivarius
  source 1..50: mol_type = genomic DNA
tagagcgttttgctatccttcatttcaatcaacgatactaaaattcttga

SEQ ID NO: 28983 - DNA, 40 bp, Streptococcus salivarius
  source 1..40: mol_type = genomic DNA
gagaagcacgaccagcatttcaatcaaggtaaaagcacgt

SEQ ID NO: 28984 - DNA, 40 bp, Streptococcus salivarius
  source 1..40: mol_type = genomic DNA
gagaagcacgaccagcattttaatcaaggtaaaagcacgt

SEQ ID NO: 28985 - DNA, 50 bp, Streptococcus salivarius
  source 1..50: mol_type = genomic DNA
taggacgtttttgaatcctttattttattcaaatataaccattttctaga

SEQ ID NO: 28986 - protein, 480 aa, Streptococcus vestibularis
MTMHKVAIYVRVSTTSQVDEGYSIDEQKAKLTSYCDIKDWNIYDIYTDGGFSGSNTERPALERLIRDAKRKLFDTVLVYKLDRLSRSQKDTLYLIEDIFLENNIEFVSLLENFDTSTPFGKAMIGLLSVFAQLEREQIKERMQLGKLGRAKSGKSMMWSKTSYGYDYVKETGTLSVNPYQALIVRKMFEWYLSGMSITKLRDTLNEQYGQDKEWSYRTVRVILSNPVYCGYNQFKGQIFPGTHEAIISEDDFNKTQEEIKTRQRTAAQRFNPRPFQAKYMLSGIAQCGYCSAPLAIKLGRIRRDGTRLVKYECKQRHPRKTKGVTVYNNNEKCDSGFYFKDDIENFVLTEISKLQTDSDYIDKLFSNTNQETIDRDSYQKQIDNLTAKISRLNDLYIDDRISLEELQKRSSDFMAERATLEKELDADTSIKAVERKKDIRRVLDTKDIFTLDYDQQKAIARALISKVRVTSEAIVILWKL

SEQ ID NO: 28987 - DNA, 50 bp, Streptococcus vestibularis
  source 1..50: mol_type = genomic DNA
tagagcgttttagtatccttcatttcaatcaaggatactaaaattcttga

SEQ ID NO: 28988 - DNA, 40 bp, Streptococcus vestibularis
  source 1..40: mol_type = genomic DNA
gagaagcacgaccaacatttcaatcagtgtaaaagctcgt

SEQ ID NO: 28989 - DNA, 40 bp, Streptococcus vestibularis
  source 1..40: mol_type = genomic DNA
gagaagcacgaccaacattttaatcagtgtaaaagctcgt

SEQ ID NO: 28990 - DNA, 50 bp, Streptococcus vestibularis; identical to SEQ ID NO: 28985
  source 1..50: mol_type = genomic DNA

SEQ ID NO: 28991 - protein, 574 aa, Propionibacterium freudenreichii
MTSEHADEAAIDSLVAPTPFAGAIAVSYLRVSTKEQAEKGGNAEGFSIPAQREANQRKADQLGATIVEEFVDAGESARKADRPELMRMIKYVATHKTNYCIVHKVDRLARNRADDVTIHLALKDAGVTLVSATENIDETPSGMLLHGIMSSIAEFYSRNLATEVVKGLSQKAAQGGTVTKAPIGYRNVGVRDDMGREIRTVEVDEERAGLVRWAFQVFASGDWTTSQLHQELVARGLTTLPTPRRPSKPIGKSTVHRMLTNPYYKGAIVYQGVTYRGAHDPIVPVEVWEQVQIVLGTHKSAADATQIHDHYLKGSVFCGQCGARLIVCNAKSSQGTIYPYFVCSSRHAGRNNCTRQAMLIEDVERLIERFYTHVQIPPETRQALSEMIHAKFDQMMSEGAAELAELATRRTELEGEQTKLLQAHYAGAIPLDLLKREQDRINASLETIEFRIQAHNGEYADARANLDDSLVLMSNMADIYANADDANRRLCNQALFKAIYIDEDNDIRVGYRTPFDGLSNTDLQADALTWAEHARAQAEAHTEASTTGARKKGQVSTPTKAGPLVESSNLTHLG

SEQ ID NO: 28992 - DNA, 50 bp, Propionibacterium freudenreichii
  source 1..50: mol_type = genomic DNA
aagttcaaacctgacccatctggggtgcctgcgtagcacgttcggcaact

SEQ ID NO: 28993 - DNA, 40 bp, Propionibacterium freudenreichii
  source 1..40: mol_type = genomic DNA
tcctcgtgtcataggtggggtggatgacgagacttgaact

SEQ ID NO: 28994 - DNA, 40 bp, Propionibacterium freudenreichii
  source 1..40: mol_type = genomic DNA
tcctcgtgtcataggtgggatggatgacgagacttgaact

SEQ ID NO: 28995 - DNA, 50 bp, Propionibacterium freudenreichii
  source 1..50: mol_type = genomic DNA
aagtacaaagaacccccatctgtgatgactgcaaagctgtcacagcagcc

SEQ ID NO: 28996 - protein, 572 aa, Corynebacterium falsenii
MTSEHADEAAIDSLVAPTPFAGAIAVSYLRVSTKEQAEKGGNVEGFSIPAQREANQRKADQLGATIVEEFVDAGESARKADRPELMRMIKYVATHKTNYCIVHKVDRLARNRADDVTIHLALKDAGVTLVSATENIDETPSGMLLHGIMSSIAEFYSRNLATEVVKGLSQKAAQGGTVTKAPIGYRNVGIRDDMGREIRTVEVDEERAGLVRWAFQVFASGDWTTSQLHQELVARGLTTSPTPRRPSKPIAKSTVHRMLTNPYYKGAIVYQGVTYRGAHDPIVPVEVWEQVQIVLGTHKSAADATQIHDHYLKGSVFCGQCGSRLIVCNAKSSQGTIYPYFVCSSRHAGRNNCTRQAMLIEDVEQLIERFYTHVQIPSETRQALSEMIHAKFDQMMSEGAAELAELATRRTELEGEQTKLLQAHYAGAIPLDLLKREQDRINASLETIEFRIQAHNGEYAEARANLDDSLVLMSNMADIYANADDANRRLCNQALFTAIYVDEDNDIHVGYRTPFDGLSNTDLQADALTWAEQARAQAEAHAEATGACKKGQISTPTKGGPLVESSNLTHLG

SEQ ID NO: 28997 - DNA, 50 bp, Corynebacterium falsenii; identical to SEQ ID NO: 28992
  source 1..50: mol_type = genomic DNA

SEQ ID NO: 28998 - DNA, 40 bp, Corynebacterium falsenii
  source 1..40: mol_type = genomic DNA
tgtccgacccggatgtggggtgactgacgggactcgaacc

SEQ ID NO: 28999 - DNA, 40 bp, Corynebacterium falsenii
  source 1..40: mol_type = genomic DNA
tgtccgacccggatgtgggatgactgacgggactcgaacc

SEQ ID NO: 29000 - DNA, 50 bp, Corynebacterium falsenii; identical to SEQ ID NO: 28995
  source 1..50: mol_type = genomic DNA

SEQ ID NO: 29001 - protein, 572 aa, Brevibacterium casei
MTSERADEAAIDSLVAPTPFAGDIAVSYLRVSTKEQAEKGGNAEGFSIPAQREANQRKADQLGATIVEEFVDAGESARKADRPELMRMIKYVATHKTNYCIVHKVDRLARNRADDVTIHLALKDAGVTLVSATENIDETPSGMLLHGIMSSIAEFYSRNLATEVVKGLSQKAAQGGTVTKAPIGYRNVGIRDDMGREVRTVEVDEERAGLVRWAFQVFASGDWTTSQLHQELVARGLTTLPTPRRPSRPIAKSTVHRMLTNPYYKGAIVYQGITYRGAHDPIVPVEVWEQVQIVLGTHKSAADATQIHDHYLKGSVFCGQCGSRLIVCNAKSSQGTIYPYFVCSSRHAGRNNCTRQAMLIEDVERLIERFYTRVQIPAATRQALSEMIHAKFDQMMSEGAAELAELATRRTELEGEQTKLLQAHYAGAIPLDLLKREQDRITASLETIEFRIQAHNGEYADARANLDDSLVLMSNMADIYANADDANRRLCNQALFKAIYIDEDNDVHVGYRSPFDGLSNTDLQADALTWAEQARTQADAHAEAARARKKGQAPTPTKGGPLVESSNLTHLG

SEQ ID NO: 29002 - DNA, 50 bp, Brevibacterium casei; identical to SEQ ID NO: 28992
  source 1..50: mol_type = genomic DNA

SEQ ID NO: 29003 - DNA, 40 bp, Brevibacterium casei
  source 1..40: mol_type = genomic DNA
gcggggcttctcgatcggggtgagtaacgggacttgaacc

SEQ ID NO: 29004 - DNA, 40 bp, Brevibacterium casei
  source 1..40: mol_type = genomic DNA
gcggggcttctcgatcgggatgagtaacgggacttgaacc

SEQ ID NO: 29005 - DNA, 50 bp, Brevibacterium casei; identical to SEQ ID NO: 28995
  source 1..50: mol_type = genomic DNA

SEQ ID NO: 29006 - protein, 500 aa, Bacillus subtilis; identical to SEQ ID NO: 18376

SEQ ID NO: 29007 - DNA, 50 bp, Bacillus subtilis
  source 1..50: mol_type = genomic DNA
caccccccttttgtaattacaatctcattattaattacaaaargggggkg

SEQ ID NO: 29008 - DNA, 40 bp, Bacillus subtilis; identical to SEQ ID NO: 20773
  source 1..40: mol_type = genomic DNA

SEQ ID NO: 29009 - DNA, 40 bp, Bacillus subtilis
  source 1..40: mol_type = genomic DNA
gcgcaaatgcatgaggattttattttcaatacacctcgca

SEQ ID NO: 29010 - DNA, 50 bp, Bacillus subtilis
  source 1..50: mol_type = genomic DNA
cagcaacctcagaatattatattattattattattttggggagggggggc

SEQ ID NO: 29011 - protein, 500 aa, Bacillus subtilis
MIAIYVRVSTEEQAIKGSSIDSQIEACIKKAGTKDVLKYADEGFSGELLERPALNRLREDASKGLISQVICYDPDRLSRKLMNQLIIDDELRKRNIPLIFVNGEYANSPEGQLFFAMRGAISEFEKAKIKERTSSGRLQKMKKGMIIKDSKLYGYKFVKEKRTLEIFEEEAKIIRMIFNYFTDHKSPFFGRVNGIALHLTQMGVKTKKGAKVWHRQVVRQILMNSSYKGEHKQYKYDTEGSYVSKQAGNKSIIKIRPEEEQITVVIPAIVPAEQWEYAQELLGQSKRKHLSISPHNYLLSGLVRCGKCGNTMTGKKRKSHGKDYYVYTCRKNYSGAKDRGCGKEMSENKLNRHVWGEIFKFITNPQKYASFKEIEQSNHLSDELELIQKEIEKTKKGRKRLLTLISLSDDDDLDIDEIKAQIIELQKKQNQLTEKCNEIQSKMKVLDDTSSSENALKRAIDYFQSIGADNLTLEDKKTIVNFIVKEVTVVDSDTVYIETY

SEQ ID NO: 29012 - DNA, 50 bp, Bacillus subtilis
  source 1..50: mol_type = genomic DNA
caccccccttttgtaattacaatctcattattagttacaaaagggggggg

SEQ ID NO: 29013 - DNA, 40 bp, Bacillus subtilis
  source 1..40: mol_type = genomic DNA
gcgcaaatgcatgaggatttcattttcaatacacctcgct

SEQ ID NO: 29014 - DNA, 40 bp, Bacillus subtilis
  source 1..40: mol_type = genomic DNA
gcgcaaatgcatgaggattttattttcaatacacctcgct

SEQ ID NO: 29015 - DNA, 50 bp, Bacillus subtilis; identical to SEQ ID NO: 29010
  source 1..50: mol_type = genomic DNA

SEQ ID NO: 29016 - protein, 500 aa, Bacillus subtilis
MIAIYVRVSTEEQAIKGSSIDSQIEACIKKAGTKDVLKYADEGFSGELLERPALNRLREDASKGLISQVICYDPDRLSRKLMNQLIIDDELRKRNIPLIFVNGEYANSPEGQLFFAMRGAISEFEKAKIKERTSSGRLQKMKKGMIIKDSKLYGYKFVKEKRTLEIFEEEAKIIRMIFNYFTDHKSPFFGRVNGIALHLTQMGVKTKKGAKVWHRQVVRQILMNSSYKGEHKQYKYDTEGSYVSKQAGNKSIIKIRPEEEQITVAIPAIVPAEQWDYAQELLGQSKRKHLSISPHNYLLSGLVRCGKCGNTMTGKKRKSHGKDYYVYTCRKNYSGAKDRGCGKEMSENKLNRHVWGEIFKFITNPQKYASFKEIEQSNHLSDELELIQKEIEKTKKGRKRLLTLISLSDDDDLDIDEIKAQIIELQKKQNQLTEKCNEIQSKMKVLDDTSSSENALKRAIDYFQSIGADNLTLEDKKTIVNFIVKEVTIVDSDTIYIETY

SEQ ID NO: 29017 - DNA, 50 bp, Bacillus subtilis; identical to SEQ ID NO: 29012
  source 1..50: mol_type = genomic DNA

SEQ ID NO: 29018 - DNA, 40 bp, Bacillus subtilis; identical to SEQ ID NO: 20773
  source 1..40: mol_type = genomic DNA

SEQ ID NO: 29019 - DNA, 40 bp, Bacillus subtilis; identical to SEQ ID NO: 29009
  source 1..40: mol_type = genomic DNA

SEQ ID NO: 29020 - DNA, 50 bp, Bacillus subtilis; identical to SEQ ID NO: 29010
  source 1..50: mol_type = genomic DNA

SEQ ID NO: 29021 - protein, 642 aa, Blautia producta
MNVGYVRLSRDDDKRNYVSIENQKLIINQYAAERNIVIDRWYEDDGVSGYIFDRPGFNQLMSDLDKDVETVFVKDFSRLGRHNAKVLLLLDEFQEREKHLIVIDDNYDSYNPDDDTIGIKTWYNERYVKDTSKKIRRAIGARQKEGTLMTQPPFGYVRNEKNKEILEIVPKEAEYIKMVFELYLNGSGYRKIANYLTDLGVPTPSMVRHELEVAEGRQTNRQIANHWSDGMVKDLLDNDFYIGTFRLRKRARTTIHGSDKRVPKEEQCVFENHHPAIIDKMTFELVQDMKAKRSKNNYRGSRGQWLGSEIPNPFGSCLFCKDCGTRLTPIVRKTSSRERKYYICSKYNTKGSRYCSKAHLIEEQDLMNDVITYVQLCRDTLCEVIATYDMKDFESEKKSVEDKRTELQTAIGAQKKQLKALFAQKIKDLSINSDNEELITETYEGLQNDILARIHGLELQLQELNETELETPAVKEKLKTALDVVDEIIEKGTLTRKDIEILIEKIVVDEEGMPEIELKYGLSNLIQYSPAEELNRQENEIIYTTMKLILEDDREFTSAKYLSAKLTDLGYKKSKKSVLPYIGLMLEMGIVEQSDNPRKPFTIIKSKDEIRELMETFYQGIPSKGHSETECNPDLHVSVNDR

SEQ ID NO: 29022 - DNA, 50 bp, Blautia producta
  source 1..50: mol_type = genomic DNA
atttacatgtatcagtgaacgacaggtggcgttcacaggataatgtaaat

SEQ ID NO: 29023 - DNA, 40 bp, Blautia producta
  source 1..40: mol_type = genomic DNA
tattctgggcgggcgcgccggcggcatgccggaaatggta

SEQ ID NO: 29024 - DNA, 40 bp, Blautia producta
  source 1..40: mol_type = genomic DNA
tattctgggcgggcgcgccgacggcatgccggaaatggta

SEQ ID NO: 29025 - DNA, 50 bp, Blautia producta
  source 1..50: mol_type = genomic DNA
atgtagatgagtaagtgaaagacagatttcgctcacttggcaattttatt

SEQ ID NO: 29026 - protein, 556 aa, Alteromonas macleodii
MALESKKAYLYSRVSNTIQSADGHGIERQIEAARKFLEAYPEYEVDDSTVISDHGISAYSGANITDSAGLGGFLTAVREGTIPRGSLLVIEAPDRLTRLGIRKGQRLFDELAEHGIDVGLVRFGVIVKHDTDNDFTSSLIVSIGLYLGHLESKQKSERICATMAKRRREMRTGGIKATPHCPMWLTPKSDNSGFDLNSFAEVVQLMFKYRLSGLGSHKIADRLQEEGYTDHKGNAITFQRVTHCLRRKSVMGQYQPHTITKVNGKRKNIPEGEPIMDFYPRIVSDSDFYEVQKLLDTTKGGRREEFTNFLRDIVVCHTEGCNEKFVYTATKDKGVTYDYLKCHSSTTKHMPSCGAKSVPFRKIKEFILPALQKLDYVTLFSGTEMESSEVGNIRKEIERLRETIATNREALNYVSGSARVAVENVIEEELNQLHELRKKAESSNNIISQTVMEDYQTHIRNNTLDTPTKRIEFNNRVKQLVKEIKVFRDHWEVTFRGVELTVGIAYGKSIDVGEVLTNFYKHRERLIQFDEVTPDEITQLTGLKTKMTNGELDIIE

SEQ ID NO: 29027 - DNA, 50 bp, Alteromonas macleodii
  source 1..50: mol_type = genomic DNA
tttagtgataaatacataacatcaacagtggtcgcgtacatttgaccaaa

SEQ ID NO: 29028 - DNA, 40 bp, Alteromonas macleodii
  source 1..40: mol_type = genomic DNA
cattgtcgcgggaacatccactggcggaatgacggctaaa

SEQ ID NO: 29029 - DNA, 40 bp, Alteromonas macleodii
  source 1..40: mol_type = genomic DNA
cattgtcgcgggaacatcccttggcggaatgacggctaaa

SEQ ID NO: 29030 - DNA, 50 bp, Alteromonas macleodii
  source 1..50: mol_type = genomic DNA
acttctgattcccccaaaacataactactggtagcctactgttgaccaaa

SEQ ID NO: 29031 - protein, 502 aa, Bacillus velezensis
MELQNRIQRVAIYLRKSRNKEGEETEETLRKHRKRLIDIANKNKWDYELFQEVGNSMNENRPEYQKLLSKLSEGIFDAVLSVNLARVTRDDAETPKFMSLLRQEDILFITDSERIYDLEVQEDWQALKFTGFVNNWEYENIKAQLRKGKKDSAKMGRWSNGVPNYGLVYNRFDRSLEIDQQKADAVKLAFQLVIDGLGVDNVAKELNRLGYKTNRGRYFSGNAITRMIRAEIYKSVIISNRLKGRNLYEGKLRPKDQWIIAENAAPPIIDEETWNMANEALDQRKLLSPRGKQKKHPLSNLIKCGLCGRTQTVSRRRDRNDALAIQPCNKTDPLGKNKCNNRGIKHDTMISLVIEAIHEKHHEISSELIKFDEDTEANDIKAIKINKLQEQINKSKKALDILQIQLEEELINISSFKERRKIRQVELNKLEKELTELLEETKEDALKSKKSFANKLDFFLENWHTIDGSDLNHELMSFINKIIWYAPRDSELPPELKFEWRV

SEQ ID NO: 29032 - DNA, 50 bp, Bacillus velezensis
  source 1..50: mol_type = genomic DNA
cgggtagcttagcgaacatgtcattggtgtcatgtccactaaactaacca

SEQ ID NO: 29033 - DNA, 40 bp, Bacillus velezensis
  source 1..40: mol_type = genomic DNA
cggctattcgacgtgtcactggtgtcacgtaatggcccac

SEQ ID NO: 29034 - DNA, 40 bp, Bacillus velezensis
  source 1..40: mol_type = genomic DNA
cggctattcgacgtgtcacctgtgtcacgtaatggcccac

SEQ ID NO: 29035 - DNA, 50 bp, Bacillus velezensis
  source 1..50: mol_type = genomic DNA
ggggtaggtagtgaaaaatgtcatctgtttctttccaagaacactaaaca

SEQ ID NO: 29036 - protein, 565 aa, Streptococcus suis
MNRTLTISDYRQVDTSRLSDITVVYCRLSQDDGLDGDSNSIINQKNILFEVVAREKLPNPVLFVDDGFSGTNFDRPAISEALRLVENGQVSNFIVKDLSRLGRSYIKVGQLTEITFPSFDVRFIALNDGIDSNKPNETNSIFLPIKSLMDEMYAADTSKKIRAVFQAKAKSGVPVTTNPPYGYLKDPSNPKNWIIDPVASEVVKRIFQEAKSGKSANEISRMLEADQVEKPDAYRVKNGRKPLSGMKDSGYSPYYWSRETINRLLRREEYLGHTVNLRTRTKSYKDKRSIDLPREDWLIFKNTHEAIIDQETFDIVQKMRSHKRSNQRYKNRLGHENLFAGLVFCGTCGRKHYFCPFESKTGLNHDHYKCSGYRRPIDGCENPHYIQKSALIEIVSDKLRQTISEAQLDRENFLKKLEQQSQAQFSKENKRQRQQLQKDEHRSKGIDRIIQQLYEDNLLGKISDERFVKLSQTYEEEQRQLQASISDLTEKLAKQQEDSLNISKFMTRISKYTQVSELTVEMVNELIDKIVIHKPTGTKRNRIIQIDIYYNFIGKLNIEKASQTD

SEQ ID NO: 29037 - DNA, 50 bp, Streptococcus suis
  source 1..50: mol_type = genomic DNA
aaactgctaggtgtcagctcggctaatagaagtatgacactcagcagtct

SEQ ID NO: 29038 - DNA, 40 bp, Streptococcus suis
  source 1..40: mol_type = genomic DNA
cgctaaaaaaacgcagactaacgtccgcgtttttttcata

SEQ ID NO: 29039 - DNA, 40 bp, Streptococcus suis
  source 1..40: mol_type = genomic DNA
cgctaaaaaaacgcagacttccgtccgcgtttttttcata

SEQ ID NO: 29040 - DNA, 50 bp, Streptococcus suis
  source 1..50: mol_type = genomic DNA
aaacttctaatctgaagcccactttctaaaagtatgctcttcagctatct

SEQ ID NO: 29041 - protein, 597 aa, Enterobacter hormaechei
MKQKLYSYQRWSSAVQSDGTTKARQTFAAEEYAKRNDLEVVEIVDAGISGFKSINSKSGALAKFLEAVDEGLIPNNAYLFVESLDRITRDEIDVALELFMGILRRGITIVTGMDNKVYTHAGIKGNPIDLLTSILLFTRAHEESKTKQNRTNGNALAMIRRFQSGLPTTIKAVGSHPWWIDCSTDKFEAVRRHPTLWQPAQDAINMFMEGVSVFKVVQYLNEKYPHAYKGKAWKTANIRKLRFNKAVYGLREITVDGTDYALPNYFPSLITEGQFLRLEKIRETTKYIGKVGEGKTVTDEEGNSKVIAERNNINLLAGMKLFRCGHCGGTMMAMRHGDTIRYLCEKGRGHQNDCKTWSLPGILVEHTLMLVTTIAYINIQRKGGVDKEDYTAQISSTEQHIEDISKKISNGTSLVLAGLGDVDEVIEQLQELKDTRSNLVLELEVLQRKQLLAEDQTFEGLMMDFFTYAQYGVLQDPVHEYRSKLRDIVYSSIGDVRAWKVDRRLMISFQIKGDDEYYTFSAGDEPYNYIFYYGSPVQLGEDLSPQGNYELPEEVKQRIREHSDVYEDSMKLLGTANALLSVVHYPDLDGRLFWPRK

SEQ ID NO: 29042 - DNA, 50 bp, Enterobacter hormaechei
  source 1..50: mol_type = genomic DNA
atatgtgcagaaattcatgcagggaatcctaaacgaatttctacacatta

SEQ ID NO: 29043 - DNA, 40 bp, Enterobacter hormaechei
  source 1..40: mol_type = genomic DNA
cattatcagccacccgggaaatccgaaatacccgattgat

SEQ ID NO: 29044 - DNA, 40 bp, Enterobacter hormaechei
  source 1..40: mol_type = genomic DNA
cattatcagccacccgggacatccgaaatacccgattgat

SEQ ID NO: 29045 - DNA, 50 bp, Enterobacter hormaechei
  source 1..50: mol_type = genomic DNA
atatatgcaatgattcatacaaggcatcccagtagaaaagacacacattt

SEQ ID NO: 29046 - protein, 550 aa, Streptococcus agalactiae
MNKLNRQPSYTLDNVGKITALYCRLSKDDELQGDSNSIINQKSMLKKYAEDNHFNNLMFFVDDGYSGTNFQRPDWLKLTALIDEGKIGTIIVKDMSRLGRDYLQVGMYTEMVFPNADIRFIAINNGVDSNNQSDNDMTPFINIFNEFYAKDTSRKIKAVFKAKGQSGKPLCINPPYGYLKDPEDKNHWIVDEEAASVVREIFRLCVNGYGPSQIANELIKRNIPTPSEHFFSLGIKIPSAKSEIKGVWNQKTISNMLEKQEYLGHTVNFKTRKKSYKCKKTLLNPKEDWLIFKNTHEAIIDQETFDIVQRIRDGRRVRTNLGEMPVLSGMLFCADCGNKLYQVRGKGWSHDKEYFVCATYRKQKGKCSSHQIRNIQIEAILLHELRMITSFAKQHEEEFVGLVMKKSEKELTQKLKSSNRELEQAKARISKLDTIVQHLYEDNLDGKISDERFKSMSESYDKEQAELKSKIESLEAFISKAQEECLNVDSFLKLVRQYTDIQELNAEIIRTFVDKIYVEKSEKVAGTRTKKQTIWIRWNYIGAVDIPLHK

SEQ ID NO: 29047 - DNA, 50 bp, Streptococcus agalactiae
  source 1..50: mol_type = genomic DNA
ttaaatccctaagtgaacgcccctaaaggggtgttcagtaagggattaaa

SEQ ID NO: 29048 - DNA, 40 bp, Streptococcus agalactiae
  source 1..40: mol_type = genomic DNA
taataaaaagcgtaaacgaaagtttacgctttttttgctc

SEQ ID NO: 29049 - DNA, 40 bp, Streptococcus agalactiae
  source 1..40: mol_type = genomic DNA
taataaaaagcgtaaacgattgtttacgctttttttgctc

SEQ ID NO: 29050 - DNA, 50 bp, Streptococcus agalactiae
  source 1..50: mol_type = genomic DNA
tgaaatgcctttcttaactcccattttgggatattcttagcaggattaaa

SEQ ID NO: 29051 - protein, 557 aa, Kosakonia radicincitans
MKSYLYSRISTLQQVAGFGIERQIQTVQDFLKYAVLDERLGYQLDPDDFELLESDLGKSAFHGRNWLPGASLGNFYIDVIEGHITRGALIFENIDRLVRQTQYQALEKLITLINRGIDIVEVETSAVFSAKIPDSTMMLNMSVTRAHQESKRKSNMATKSWKNRIEGYTTGTKIKSHNLPEWLSVVDNKYVVDEELAAKFREVFQLYSTGIGAAEIVRKTGWPTVRVHLVLRDTRLIGRMTVGKKRGKGKEEIFENIFPCVIDKELFAHVQVLIKSNEATNKQRATTKTIGNIFKGISRCPYCKEVYVTISSGGVKPGWKQFHYFNCLGRRHSKNDVCKPFSYTIIEKTLLTYIKGIDWAKVYAGDTDTTVIDLLRNKIVVIETTIKELESELVNADDEEVLALVRVLKKKKAERDSINQELIGLSTQRVAEVDYDISDVCNRDNVQLRVDVNVALRKMIKCIWMRKVDSIVIARIDYYTDIACHYLVIDASTGDLLNFATVDSELMIRSNLMDLNLITGEETRYPERANEWDQIVWNTIEEVFTNAFEQAKQIRKS

SEQ ID NO: 29052 - DNA, 50 bp, Kosakonia radicincitans
  source 1..50: mol_type = genomic DNA
tttcgtaaacttgttgatacttataaacatgtggtgtatactttacgaag

SEQ ID NO: 29053 - DNA, 40 bp, Kosakonia radicincitans
  source 1..40: mol_type = genomic DNA
tcccgtagtcaaagcctacaaacacgtgtttatccccatg

SEQ ID NO: 29054 - DNA, 40 bp, Kosakonia radicincitans
  source 1..40: mol_type = genomic DNA
tcccgtagtcaaagcctactgacacgtgtttatccccatg

SEQ ID NO: 29055 - DNA, 50 bp, Kosakonia radicincitans
  source 1..50: mol_type = genomic DNA
tttagtaaagatgttgaaactgtttggtatggggaggaaagtttaggaag

SEQ ID NO: 29056 - protein, 501 aa, Escherichia coli
MQKQNGLAYSYIRFSSKKQEQGDSVRRQTELAEKYSIANNLTLSEKNFQDLGISAFKEGNRPSLGDMLSAIEQGAIESGSTIIIESLDRLSRRGIDVTQQIIKSILQHNVFIASLTDGLLLNRESVNDLVSVIRIALAADLAHKESEKKSQRLRETKQQQRKAALEGKVINKILPFWLAREKDQFVFSDRLDAVKRIIELKRKGLGTNKIAKTLNDEGFRPLRSAGWNHTTVGKTLSSVALYGAYQTSETTKDRKVILLDIIDNYYPAVISKEDWMLLQSDAKQNKPGYKSDKNAFTGLLKHSCGGALVRKFHVVTGKTYQYHVCANARDGKCTVTQNFKNMEIALYKILKHLKMEKKTSVDTTIAQERAQLKEQIDNLNGMLLTMKKVPMSVLETIGNLEEKLQELDQQFKQQSDMVLAEQSVDFNLLSEIKDPIELNMMLKRVIKEITVFNLKKSWRIKVQYLNGHSQSFRWDGYSMSFVSDSKKLQEYMNAEKEQLDN

SEQ ID NO: 29057 - DNA, 50 bp, Escherichia coli
  source 1..50: mol_type = genomic DNA
attttgtcgctttgaaactatattgtgacgttgttgctaaggagcaaaat

SEQ ID NO: 29058 - DNA, 40 bp, Escherichia coli; identical to SEQ ID NO: 4473
  source 1..40: mol_type = genomic DNA

SEQ ID NO: 29059 - DNA, 40 bp, Escherichia coli; identical to SEQ ID NO: 24234
  source 1..40: mol_type = genomic DNA

SEQ ID NO: 29060 - DNA, 50 bp, Escherichia coli
  source 1..50: mol_type = genomic DNA
attttgtaaagtttaaactattttttgaccttgtttaataaaaacaagaa

SEQ ID NO: 29061 - protein, 509 aa, Chryseobacterium indologenes
MKIADLYIRVSTDEQADKGYSQRDQEERLRRYCSQNNFTVGNVIYEDHSAKSFNRPEWRKLLVELKKKGSKTNVILFTKWDRFSRNAGDAYQMISILSKLGVDLQAVEQPLDLSIPENKMMLAIYLAAPEVENDRRALNVFYGMRRAVKEGRVMGKAPFGYANKITENGKKYIAIKEPEATKMKWAFNELAKGIYASNSIRTKINESLRKGVSRTSFHIAIRNPIYCGKVFVPKHKDEEACFVEGQHEPLISEELFDKVQEILDGKKRPQRPNTKITVQENFPLRGFLMCPNCGKTLTASASRGRNNRYYYYHCNSTCGFRVRAEIVNKVFEDGLMTLEMNAPVKKYLKKLLTENYENFTSDPLKEKKKISDEIDTLNNKLSFARNKFLSEIIDDDEYLEIKRECKEQISKLEENLIKSLVPQITNIDKLLEQALQTLQNIGKHYQEGGIETKRAIIGSIFPEKLEFDGKHYRTARINSIAYHIFQINNELDGVKKKRNDQNDHFSLNV

SEQ ID NO: 29062 - DNA, 50 bp, Chryseobacterium indologenes
  source 1..50: mol_type = genomic DNA
atcaaaatgatcatttctccttgaatgtagtctcaaacgaacaaatttcg

SEQ ID NO: 29063 - DNA, 40 bp, Chryseobacterium indologenes
  source 1..40: mol_type = genomic DNA
ccttgaaaaaggatggtttttgtagactcacagggattcg

SEQ ID NO: 29064 - DNA, 40 bp, Chryseobacterium indologenes
  source 1..40: mol_type = genomic DNA
ccttgaaaaaggatggtttatgtagactcacagggattcg

SEQ ID NO: 29065 - DNA, 50 bp, Chryseobacterium indologenes
  source 1..50: mol_type = genomic DNA
atccacatgacaaattctccttgaatgtagttccaggaaaatttatttct

SEQ ID NO: 29066 - protein, 632 aa, Escherichia coli
MPQLYSYIRWSSDRQEKGTTKNRQVAAAKAYAEEAGLEMVEILEPGTSAYRGKNRAGKLGDFIDAVKNNAIPSDSWLYCENLDRLSRDQVDEALRLFLELIGLGLTIVTGMDRKVYNRESIRQNPTDLMISILMFIRGNEESETKSNRTIGNVVALVERHKAGLPVNIKSVGRHPFWIDDSGSQYEAVKEHPVYWSIAREAIDMFLDENGIYTVKRHLDKNYPNGLKGKEWDYQVLKKMRDNRALIGERTINAGGATYKLDNYYPWLCKDEAEYLTLAERKQQNNFKAKKDKVEEIKLLSGLQVLRCSKCGGTMHSFMNHGSARYICTNGVHLQKNCSGWSISAQLVEHCTIISLLIGYMNKRLKDGIDTTVIEEDLSRKETLITDLESRITNMAQAIAIAPNVSALAVQLNAFDMERKKTVLEVDKLKERLYSLKGKGSLEVDINEFMILIQWAVFTNMQDTDRNKIRKVISSIIESVIVDKTDGCITIKIKYHFKDEWLVFGGTDRKPHWAFKVEFSSVDNVSNRDEGFLTTSNLPLFNKAVEQLDKIEQSYLDLFNTANEMLEVVGYSEISGASFWPNTGKYDRVDIVYEGNTYSIALNGRVPKDIATALESTGLTRKEFIERYRIDQI

SEQ ID NO: 29067 - DNA, 50 bp, Escherichia coli
  source 1..50: mol_type = genomic DNA
gactttatttcttgattcttagggcaccctaatgatataaaaccaatctt

SEQ ID NO: 29068 - DNA, 40 bp, Escherichia coli; identical to SEQ ID NO: 9013
  source 1..40: mol_type = genomic DNA

SEQ ID NO: 29069 - DNA, 40 bp, Escherichia coli
  source 1..40: mol_type = genomic DNA
atcaacaaggtttttcggaacgccaagggaaacaaagccg

SEQ ID NO: 29070 - DNA, 50 bp, Escherichia coli
  source 1..50: mol_type = genomic DNA
ggcttcattggtgaattctcccggacacttaaagaattaacaccaatctt

SEQ ID NO: 29071 - protein, 478 aa, Streptococcus suis
MSKVALYLRLSVDEAGTDESISIVNQRYLLHHYLDNSSDFQNFQREEFVDDGFSGTTVNRPAFQRLMTKVKSGEIRHVIVKDLSRFMRDYLELGNYLENIFPFLGVRFIALNDQYDSLASENNGVEIDVPFKNLLNEFYAKDVSEKIKSAMNSMKRSGKNMSWLPPFGYLKDPEDRFKIIIDETVAPIVRRIFALYLDGNSYQTIARLLNEEQVITPAERKMQISQARYAKSLRLTTEQKRNVWSSTTVGQILKNEAYKGTYLFNTRTYVRGKHVFRPKSEWERIENNHEAIISSELFEQVVQLKGSKATKRKQHQIPKTSSVLTGLIRCEHCDHSLIGHYNHQGYQYFSCRYCKGQGEKMKSCRVDRIEQAIKGKLGDEAVKPHQKVSKTLVLREIERLKTEKLACFQDYKDSLLTREDYIAKKKEVDKSVQALEEQMKEANCVQLPTDKKLSKEIVVAHVDKVVVDCLGFFTVIYK

SEQ ID NO: 29072 - DNA, 50 bp, Streptococcus suis
  source 1..50: mol_type = genomic DNA
agtgtcagtagcttgacacaagagggggattgtgtcataataatgacagg

SEQ ID NO: 29073 - DNA, 40 bp, Streptococcus suis
  source 1..40: mol_type = genomic DNA
tggtgttgcctttccaggtggacatattgaagaaggcgag

SEQ ID NO: 29074 - DNA, 40 bp, Streptococcus suis
  source 1..40: mol_type = genomic DNA
tggtgttgcctttccaggtttacatattgaagaaggcgag

SEQ ID NO: 29075 - DNA, 50 bp, Streptococcus suis
  source 1..50: mol_type = genomic DNA
aatgtcagtttttgtaaacatgagttggaagatgtcacataaatgaatgg

SEQ ID NO: 29076 - protein, 478 aa, Streptococcus suis
MSKVALYLRLSVDEAGTDESNSIVNQRYLLHHFLDNSSDFQNFLREEFVDDGFSGTSVNRPAFQRLMVRVKSGEIRHIIVKDLSRFMRDYLELGNYLENIFPFLGVRFVALNDQYDSLTSENNGVEIDVPFKNLLNEFYAKDVSEKVKSAMNSMKRSGKNMSWLPPFGYIKDPEDRFKIIIDEAVAPIVRRIFTLYLDGNSYQKIARILNEEQVITPAERKMQISQARYEKSLRLTIEQERNVWSVVNVAQILKNEAYVGTYLYNTRTYIRGKHISLPKSEWERIENNHEAIISAELFEQVARLKAKKVTRKKYPQPPKIPSILTGLIRCKHCDHSLIGHYNHQGYQYFSCRYCKGQGEKMKSCRVDRIEKSIKEKLGNEEGKPRKKTSKTRFLREIEGLKKQKLSFFQDYKDNLMTREDYITKKIEIDESVKNLEEQLNEANKVQILTNDKLTKEIVNTHIEKVVVDCLGFFTIIYK

SEQ ID NO: 29077 - DNA, 50 bp, Streptococcus suis
  source 1..50: mol_type = genomic DNA
agtgtcagttacttgacacaagagggggattgtgtcataataatgacagg

SEQ ID NO: 29078 - DNA, 40 bp, Streptococcus suis
  source 1..40: mol_type = genomic DNA
tggtgttgcttttccaggtggacatattgaagaaggcgag

SEQ ID NO: 29079 - DNA, 40 bp, Streptococcus suis
  source 1..40: mol_type = genomic DNA
tggtgttgcttttccaggtttacatattgaagaaggcgag

SEQ ID NO: 29080 - DNA, 50 bp, Streptococcus suis; identical to SEQ ID NO: 29075
  source 1..50: mol_type = genomic DNA

SEQ ID NO: 29081 - protein, 478 aa, Streptococcus suis
MSKVALYLRLSVDEAEIDESNSITNQRYLLNHYLDQATEFKNWERLEFVDDGFSGTSLNRPSFQRLMAAVKVGTIRNIIVKDLSRFMRDYLELGNYLENIFPFLGVRFIALNDQYDSMVSENNGLDIDVPFRNLLNDFYAKDVSEKVKSAMNSMKRSGKNMSWLPPFGYLKDPEDRFKIIIDETVAPIVRRIFALYLDGNSYQTIARLLNEEQVITPAERKMQISQARYAKSLRLTTEQKRNVWSSTTVGQILKNEAYKGTYLFNTRTYVRGKHVFRPKSEWERIENNHEAIISSELFEQVVQLKGSKATKRKQHQIPKTSSVLTGLIRCEHCDHSLIGHYNHQGYQYFSCRYCKGQGEKMKSCRVDRIEQAIKGKLGDEAVKPHQKVSKTLVLREIERLKTEKLACFQDYKDSLLTREDYIAKKKEVDKSVQALEEQMKEANCVQLPTDKKLSKEIVVAHVDKVVVDCLGFFTVIYK

SEQ ID NO: 29082 - DNA, 50 bp, Streptococcus suis
  source 1..50: mol_type = genomic DNA
agtgtcagtaccttgacacaagagggggattgtgtcataataatgacagg

SEQ ID NO: 29083 - DNA, 40 bp, Streptococcus suis; identical to SEQ ID NO: 29073
  source 1..40: mol_type = genomic DNA

SEQ ID NO: 29084 - DNA, 40 bp, Streptococcus suis; identical to SEQ ID NO: 29074
  source 1..40: mol_type = genomic DNA

SEQ ID NO: 29085 - DNA, 50 bp, Streptococcus suis; identical to SEQ ID NO: 29075
  source 1..50: mol_type = genomic DNA

SEQ ID NO: 29086 - protein, 478 aa, Streptococcus suis
MSKVALYLRLSVDEAGTDESISIVNQRYLLHHYLDNSSDFQNFQREEFVDDGFSGTTVNRPAFQRLMTKVKSGEIRHVIVKDLSRFMRDYLELGNYLENIFPFLGVRFIALNDQYDSLTSENNGVEIDVPFKNLLNEFYAKDVSEKIKSAMNSMKRSGKNMSWLPPFGYLKDPEDRFKIIIDETVAPIVRRIFALYLDGNSYQTIARLLNEEQVITPAERKMQISQARYAKSLRLTTEQKRNVWSSTTVGQILKNEAYKGTYLFNTRTYVRGKHVFRPKSEWERIENNHEAIISSELFEQVVQLKGSKATKRKQHQIPKTSSVLTGLIRCEHCDHSLIGHYNHQGYQYFSCRYCKGQGEKMKSCRVDRIEQAIKGKLGDEAVKPHQKVSKTLVLREIERLKTEKLACFQDYKDSLLTREDYIAKKKEVDKSVQALEEQMKEANCVQLPTDKKLSKEIVVAHVDKVVVDCLGFFTVIYK

SEQ ID NO: 29087 - DNA, 50 bp, Streptococcus suis; identical to SEQ ID NO: 29072
  source 1..50: mol_type = genomic DNA

SEQ ID NO: 29088 - DNA, 40 bp, Streptococcus suis; identical to SEQ ID NO: 29073
  source 1..40: mol_type = genomic DNA

SEQ ID NO: 29089 - DNA, 40 bp, Streptococcus suis; identical to SEQ ID NO: 29074
  source 1..40: mol_type = genomic DNA

SEQ ID NO: 29090 - DNA, 50 bp, Streptococcus suis; identical to SEQ ID NO: 29075
  source 1..50: mol_type = genomic DNA

SEQ ID NO: 29091 - protein, 554 aa, Rhizobium leguminosarum
MKPKAYSYIRMSTDVQLRGDSLRRQSEESRRYADDNDLDLVEDFRLEDIGVSAFHGKNVAQGALGKFLVLCEQQIIQAGSYLIVESLDRISRQNPQAATTLFLQILGAGINIVTLTDRHVYRAGSSDFTDIIVSVVIMSRAYEESRTKSLRVGAAWENKRRNIHDKKLTQVAPIWLRLSADRTAFETVPERVAVLRWIFDEADQGKGSLQISRVLNQRGVPTFAPSKGWYESYVSKVLTNRAVLGEFQPHRYIDGKRVRSGEPIPNYFPAIVAREQFERIQVGRAVRRLRGAGRKGQNNINLFQGVATCGYCNARMMIVNKGAGPKGGVYLRCDRARRSADCSASGWPLDHFEGAFLWFVEELDIAAIVQGASSEETRKALEGQSATISADLETQKKMRERAFDLLGEPTSATAFVRGKIDDASMKIDELERKLASIKEATMIAAASQKRPLEEVRLMIKEIGGWQTADGDSRSRVADWIKRNVKELLLFTDGLDQSDQVAADAKLRQFSVALAGGEFRTVQINGDDPTVASYSVHANDDRWVLTQDGEHLVHH

SEQ ID NO: 29092 - DNA, 50 bp, Rhizobium leguminosarum
  source 1..50: mol_type = genomic DNA
tatcaaataatccacctcacaatgcagatgttgaggtggattaatttatg

SEQ ID NO: 29093 - DNA, 40 bp, Rhizobium leguminosarum
  source 1..40: mol_type = genomic DNA
tcccggcaaggtcgggatgcagatcgtcggcttgcctgac

SEQ ID NO: 29094 - DNA, 40 bp, Rhizobium leguminosarum
  source 1..40: mol_type = genomic DNA
tcccggcaaggtcgggatggggatcgtcggcttgcctgac

SEQ ID NO: 29095 - DNA, 50 bp, Rhizobium leguminosarum
  source 1..50: mol_type = genomic DNA
tattaaatacttgtcataacaataggtttattgatgtctgataatttatt

SEQ ID NO: 29096 - protein, 582 aa, Clostridioides difficile; identical to SEQ ID NO: 7596

SEQ ID NO: 29097 - DNA, 50 bp, Clostridioides difficile
  source 1..50: mol_type = genomic DNA
gcaatttttgtctatatatctatgcaccgttcggtacatgcttatataga

SEQ ID NO: 29098 - DNA, 40 bp, Clostridioides difficile
  source 1..40: mol_type = genomic DNA
atagttgtcgtcttacccgcaccgtttcttcctagcaatc

SEQ ID NO: 29099 - DNA, 40 bp, Clostridioides difficile
  source 1..40: mol_type = genomic DNA
atagttgtcgtcttacccgaaccgtttcttcctagcaatc

SEQ ID NO: 29100 - DNA, 50 bp, Clostridioides difficile
  source 1..50: mol_type = genomic DNA
gcaatatatgtaagtatatgtatgaatagttctgcatggaattacataaa

SEQ ID NO: 29101 - protein, 521 aa, Cytobacillus firmus
MRKDIRHVAMYLRISQEKDDKNADTLENHRELLTEYCERYEYTYEEFGEVVSGGSSELENRPKLQELLDNIEKFDAILVVELSRLSRNNYISQKVKQTCIDYDIPIITLTKVFYLSNREDSLLFDITSSVSSYEHGIIGMRSKINKITMTKQGKHVSGNVPYGYYRDPVKKVLKINKEEAEVVRLIFDWHKEGYGSYKIRDMLNAQGYKPAKSVAFNLPSIKRIIRNPAYKGTLVFHDRKRVKEKGKTVYKILKTYEFEEAHDAIIDPKEWEEANRTREDRAIKAGMIREKPMVKTDITMLKDLIFCGYCGRKMAIRKDNKADHYYIKICDNLLLNSAEKCMNAGINLEYVLKKFTEKLLTYKKEVEEELEDILKQDVSKIVESIHENLRQMERELIELEKQYQNLLDMGQVGAIKPNDLVVRTDSIEQRKIELAANKEKLSTQLTELDLTQIEANLRGMLSILEQFEQFQDADASVQNEYVKTFVKAIYYKRRMPEEIRRLSTRDPRRKAFKFDLVVEYF

SEQ ID NO: 29102 - DNA, 50 bp, Cytobacillus firmus
  source 1..50: mol_type = genomic DNA
ttacatacaattaaaaacgcagtacctacttcatttttaattgaatgtat

SEQ ID NO: 29103 - DNA, 40 bp, Cytobacillus firmus
  source 1..40: mol_type = genomic DNA
tacatccggctatgctgtcccgacttttgtggtcgatgcg

SEQ ID NO: 29104 - DNA, 40 bp, Cytobacillus firmus
  source 1..40: mol_type = genomic DNA
tacatccggctatgctgtcttgacttttgtggtcgatgcg

SEQ ID NO: 29105 - DNA, 50 bp, Cytobacillus firmus
  source 1..50: mol_type = genomic DNA
ttacatacatcagaaaaagaaatgtttactatatttttggttccatttat

SEQ ID NO: 29106 - protein, 548 aa, Streptococcus agalactiae; identical to SEQ ID NO: 2696

SEQ ID NO: 29107 - DNA, 50 bp, Streptococcus agalactiae; identical to SEQ ID NO: 2902
  source 1..50: mol_type = genomic DNA

SEQ ID NO: 29108 - DNA, 40 bp, Streptococcus agalactiae
  source 1..40: mol_type = genomic DNA
taaatctcaaggtattaagcagcttatggctggtggagga

SEQ ID NO: 29109 - DNA, 40 bp, Streptococcus agalactiae
  source 1..40: mol_type = genomic DNA
taaatctcaaggtattaaggcgcttatggctggtggagga

SEQ ID NO: 29110 - DNA, 50 bp, Streptococcus agalactiae
  source 1..50: mol_type = genomic DNA
taccatctcatgccagtcagaatggcaattattgcaaaatcaggaaataa

SEQ ID NO: 29111 - protein, 548 aa, Streptococcus agalactiae
MIQTNSNHFSFKAAIYCRLSKDDEQKGESASIQNQKELLENYVKSKGWSIYDVYIDDGYTGLNTNRPSFQRLINDIENKKVDIVITKDLSRLGRNYLQTGYYTENFFPKNNVRYIALNDGVDTFQENNEIVPFKNVLNEFYSRDVSKKMKSAYMTRARQGKFIGCLAPIGYRKDNDNPHKLVIDDETSWIVEKIFDLAFSGYGVQAIRRRLFEEKIPTPTWWNRKKGLRNKKTKLEMTVDGGEYRWDCTTLKEIIENPVYIGHIASQKVNYKFKVGWLSDKPKEEWIIVENTHEPIISEDIYNIANEKLKSRRRPFKNGEESIFAGIVKCPDCGKSLNLGRNKSKKREKLLTCNTYRRYGKSLCSQHRIYYDTLYEIVLKDIRKNAEIALKDEKEIIKALEKSREVDNEEEQKFIMDKIYEDQIRVEDLTKKIERLYDDWLDNKISESNFQKILEKSQNEQDYLNQRIEDNQKLIVKEDLEDINVKKWIELIKKHRDIKKLDKETLNELISKIYVHEKEVVNGEITQTIDIYYNFIGNTDTLQVFYNL

SEQ ID NO: 29112 - DNA, 50 bp, Streptococcus agalactiae; identical to SEQ ID NO: 2902
  source 1..50: mol_type = genomic DNA

SEQ ID NO: 29113 - DNA, 40 bp, Streptococcus agalactiae; identical to SEQ ID NO: 29108
  source 1..40: mol_type = genomic DNA

SEQ ID NO: 29114 - DNA, 40 bp, Streptococcus agalactiae; identical to SEQ ID NO: 29109
  source 1..40: mol_type = genomic DNA

SEQ ID NO: 29115 - DNA, 50 bp, Streptococcus agalactiae; identical to SEQ ID NO: 29110
  source 1..50: mol_type = genomic DNA

SEQ ID NO: 29116 - protein, 548 aa, Streptococcus agalactiae
MIQTNSNHFSFKAAIYCRLSKDDEQKGESASIQNQKELLENYVKSRGWSIYDVYIDDGYTGLNTNRPSFQRLIRDIENKEVDIVITKDLSRLGRNYLQTGYYTENFFPKNNVRYIALNDGVDTFQENNEIVPFKNVLNEFYSRDVSKKMKSAYMTRARQGKFIGCLAPIGYRKDNDDPHKLVIDDETSWIVEKIFDLAFSGYGVQAIRRRLFEEKIPTPTWWNRKKGLRNKKTKLEMTVDGGEYWWDCTTLKEIIENPVYIGHIASQKVNYKFKVGWLSDKPKEEWIIVENTHEPIISEDIYNIANEKLKSRRRPFKNGEESIFAGIVKCPDCGKSLNLGRNKSKKREKLLTCNTYRRYGKSLCSQHRIYYDTLYEIVLKDIRKNAEIALKDEKEIIKALEKSREVDNEEEQKFIMDKIYEDQIRVEDLTKKIERLYDDWLDNKISESNFQKILEKSQNEQDYLNQRIEDNQKLIVKEDLEDINVKKWIELIKKYRDIKKLDKATLNELISKIYVHEKEVVNGEITQTIDIYYNFIGNTDTLQVFYNL

SEQ ID NO: 29117 - DNA, 50 bp, Streptococcus agalactiae; identical to SEQ ID NO: 2902
  source 1..50: mol_type = genomic DNA

SEQ ID NO: 29118 - DNA, 40 bp, Streptococcus agalactiae; identical to SEQ ID NO: 29108
  source 1..40: mol_type = genomic DNA

SEQ ID NO: 29119 - DNA, 40 bp, Streptococcus agalactiae; identical to SEQ ID NO: 29109
  source 1..40: mol_type = genomic DNA

SEQ ID NO: 29120 - DNA, 50 bp, Streptococcus agalactiae; identical to SEQ ID NO: 29110
  source 1..50: mol_type = genomic DNA

SEQ ID NO: 29121 - protein, 548 aa, Streptococcus pyogenes
MIQTNSNHFSFKAAIYCRLSKDDEQKGESASIQNQKELLENYVKSRGWSIYDVYIDDGYTGLNTNRPSFQRLIRDIENKKVDIVITKDLSRLGRNYLQTGYYTENFFPKNNVRYIALNDGVDTFQENNEIVPFKNVLNEFYSRDVSKKMKSAYMTRARQGKFIGCLAPIGYRKDNDDPHKLVIDDETSWIVEKIFDLAFSGYGVQAIRRRLFEEKIPTPTWWNRKKGLRNKKTKLEMTVDGGEYWWDCTTLKEIIENPVYIGHIASQKVNYKFKVGWLSDKPKEEWIIVENTHEPIISEDIYNIANEKLKSRRRPFKNGEESIFAGIVKCPDCGKSLNLGRNKSKKREKLLTCNTYRRYGKSLCSQHRIYYDTLYEIVLKDIRKNAEIALKDEKEIIKALEKSREVDNEEEQKFIMDKIYEDQIRVEDLTKKIERLYDDWLDNKISESNFQKILEKSQNEQDYLNQRIEDNQKLIVKEDLEDINVKKWIELIKKHRDIKKLDKETLNELISKIYVHEKEVVNGEITQTIDIYYNFIGNTDTLQVFYNL

SEQ ID NO: 29122 - DNA, 50 bp, Streptococcus pyogenes; identical to SEQ ID NO: 2902
  source 1..50: mol_type = genomic DNA

SEQ ID NO: 29123 - DNA, 40 bp, Streptococcus pyogenes
  source 1..40: mol_type = genomic DNA
gaaatcttcagggtaaaggcatccttagccagctgacggt

SEQ ID NO: 29124 - DNA, 40 bp, Streptococcus pyogenes
  source 1..40: mol_type = genomic DNA
gaaatcttcagggtaaagggctccttagccagctgacggt

SEQ ID NO: 29125 - DNA, 50 bp, Streptococcus pyogenes; identical to SEQ ID NO: 29110
  source 1..50: mol_type = genomic DNA

SEQ ID NO: 29126 - protein, 548 aa, Anaerococcus obesiensis
MIQTNSNHFSFKAAIYCRLSKDDEQKGESASIQNQRELLENYVKSRGWSIYDVYIDDGYTGLNTNRPSFQRLIRDIENKKVDIVITKDLSRLGRNYLQTGYYTENFFPKNNVRYIALNDGVDTFQENNEIVPFKNVLNEFYSRDVSKKMKSAYMTRARQGKFIGCLAPIGYRKDNDDPHKLVIDDETSWIVEKIFDLAFSGYGVQAIRRRLFEEKIPTPTWWNRKKGLRNKKTKLEMTVDGGEYWWDCTTLKEIIENPVYIGHIASQKVNYKFKVGWLSDKPKEEWIIVENTHEPIISEDIYNIANEKLKSRRRPFKNGEESIFAGIVKCPDCGKSLNLGRNKSKKREKLLTCNTYRRYGKSLCSQHRIYYDTLYEIVLKDIRKNAEIALKDEKEIIKALEKSREIDNEEEQKFIMDKIYEDQIRVEDLTKKIERLYDDWLDNKISESNFQKILEKSQNEQDYLNQRIKDNQKLIVKEDLEDINVKKWIELIKKHRDIKKLDKETLNELISKIYVHEKEVVNGEITQTIDIYYNFIGNTDTLQVFYNL

SEQ ID NO: 29127 - DNA, 50 bp, Anaerococcus obesiensis; identical to SEQ ID NO: 2902
  source 1..50: mol_type = genomic DNA

SEQ ID NO: 29128 - DNA, 40 bp, Anaerococcus obesiensis; identical to SEQ ID NO: 29108
  source 1..40: mol_type = genomic DNA

SEQ ID NO: 29129 - DNA, 40 bp, Anaerococcus obesiensis; identical to SEQ ID NO: 29109
  source 1..40: mol_type = genomic DNA

SEQ ID NO: 29130 - DNA, 50 bp, Anaerococcus obesiensis; identical to SEQ ID NO: 29110
  source 1..50: mol_type = genomic DNA

SEQ ID NO: 29131 - protein, 630 aa, Pseudomonas fluorescens
MTTTQTLPAVDVQPAQSDAPKRLAYSYVRYSSEQQMTKKNGEVGDSVRRQMENQRKAVETYNLHVVDVFEDLGKSAFRGKHRLKGALSLFLASLDQGKIPSGAYLLIESFDRLSRERMTDGLTVVLTILRKGIKIITTDDLKLYDLSIKGKDLEQTIMITVLLERANNESTTKSDRQKAKWEGRRERIIKGEKKFLNKNVPWWIALDESTGAYSLIPERVAELKTIYELMMVKNLGLRAAAAYINENNPLKVGFGKNPDSYGWTARGIKRMIETPSLYGSLELCEYIYENGKATPDRKTIKVMDNFYPAAFTRHEVDVLKAKISSRMTSKERPTKRDLQYYNIYHGLIKCAFCGGNVRFSQKQKYSYLVCRNSEIKLCKHPKTLSMQYERFHEVFFKYAQHYNFELLIQSGGNDNEVVVKEITEIEETIAAEKYKAQKFTEKLFDMFDGDIPAEQEAALITRNKKIKLMEAKAKALRAKIVYVDTDAETISDAIQLVSKMVETKDGRLELSNYLTKVIDKMVVDFGKAHNRDGDYVKVMFKNKDFSHHMLIGKTTAYSYDSDGELFLDTLQGVVRDDGYYLEAQKAQDEWFDVPDFTDLEIYDDEQAKVNQAVDLGHRGDDENGVDSEYQ

SEQ ID NO: 29132 - DNA, 50 bp, Pseudomonas fluorescens
  source 1..50: mol_type = genomic DNA
ttcctattgcgtgctcgctatcttcctatgttggtgctatgatagagaaa

SEQ ID NO: 29133 - DNA, 40 bp, Pseudomonas fluorescens
  source 1..40: mol_type = genomic DNA
ggcgtcggcccgacgtcttcatacagcggatcaccttcct

SEQ ID NO: 29134 - DNA, 40 bp, Pseudomonas fluorescens
  source 1..40: mol_type = genomic DNA
ggcgtcggcccgacgtcttagtacagcggatcaccttcct

SEQ ID NO: 29135 - DNA, 50 bp, Pseudomonas fluorescens
  source 1..50: mol_type = genomic DNA
ttcttcctgcctagttgctaacttagtctgtttgtgttgttagaaagaaa

SEQ ID NO: 29136 - protein, 508 aa, Clostridium botulinum
MRIAIYSRKSVETDTGESIQNQIKLCKEYFKRQDPNCIFEIFEDEGYSGGNINRPSFQRMMELVKIKQFDIVAVYKIDRIARNIVDFVNTYDELDNIGVKLVSITEGFDPSTPAGKMMMLLLASFAEMERMNIAQRVKDNMRELAKMGRWSGGTPPKGYTTKKVIENGKKITYLDLIDDEAYIIKDAFKLYAEGYSTYKINKHFKEKGIRLPQKTIQNMLNNPTYLISSKESVDFLKNKGYTVYGEPNGFGFLPYNRRPRTKGKKSWNDKSQFVGVSKHEGIIDLPLWIEVQNKLKERTVDPHPRESNFTFLSGGLLKCSCGSSMFVHPGHTRKDGSRLYYFRCMKNNGNCSNSKFLRVDYAESSILEFLESISSKEKLTEYQKKKKPRLDFSIEIKNLNKKIRDNSKAIDNLIDKLMILSNEAGKVVATKIEELTKQNNILKESLLEIERKKLLSGLEDNNLNILYNEIQNFIQTEDISLRRLKIKNIIKYITYNPQNDSLQVELVD

SEQ ID NO: 29137 - DNA, 50 bp, Clostridium botulinum
  source 1..50: mol_type = genomic DNA
tagtgtagttttacctgtgctgcacatccagaccagttaaaactccatta

SEQ ID NO: 29138 - DNA, 40 bp, Clostridium botulinum
  source 1..40: mol_type = genomic DNA
agctgttatggctgctgcacatccagaccagccacctcca

SEQ ID NO: 29139 - DNA, 40 bp, Clostridium botulinum
  source 1..40: mol_type = genomic DNA
agctgttatggctgctgcacttccagaccagccacctcca

SEQ ID NO: 29140 - DNA, 50 bp, Clostridium botulinum
  source 1..50: mol_type = genomic DNA
cagtgaagtgttccctgttcaacacttccagaccagtatctactgttttt

SEQ ID NO: 29141 - protein, 450 aa, Clostridium cocleatum
MNALIYARVSHDEQVKYGYSINAQLEALIEYCKINKLKIKGRYVDEGISAYSVKKRKSLQKMIEEAENGDIILFTKLDRFSRNVLDANNVLRDLNKKGVAIKAINEEDIDTTTADGKFMFDLRLSLAERERNKTSERINDVFKHKAMHSEIISGTIPFGYKKNNKKYEIDAETAEMVIDMFEYYNLCSSVSKTLRYYNEKYPSQHLSYKIMRYRLSNEIYIGKHKYNDTYCVGIIPQELFYSVQKKLINNIKERKANSVFLFTGLIICPHCGHKLTANRTTYKRKNDNGHIEIYRCNKAIVNRDCSCRFTLNEKKIEKYLINNLKNIINNYRVELEKKSLKQKDYTSEVTKIKKKMTKLKELYLEDLIQKNEYENDYKELNERLKKISSLTVSKPTSKVKNFFNEDGIKKMYEALSREDKRTFWNNIIESMIIFSNKDYDNPENYRIIFK

SEQ ID NO: 29142 - DNA, 50 bp, Clostridium cocleatum
  source 1..50: mol_type = genomic DNA
acttttacttagaaccctatgccagttggaactagtatctaagtaaaagt

SEQ ID NO: 29143 - DNA, 40 bp, Clostridium cocleatum
  source 1..40: mol_type = genomic DNA
attacttttaccgctacctgttggggcctctaaatagaaa

SEQ ID NO: 29144 - DNA, 40 bp, Clostridium cocleatum
  source 1..40: mol_type = genomic DNA
attacttttaccgctaccttatggggcctctaaatagaaa

SEQ ID NO: 29145 - DNA, 50 bp, Clostridium cocleatum
  source 1..50: mol_type = genomic DNA
acttttttttttttctttttgccataaggaactagctgaatagtaataat

SEQ ID NO: 29146 - protein, 474 aa, Bacillus paralicheniformis
MRIALYIRVSTDEQAKHGYSLDAQKEKLEAFCKSQGWENYETYIDDGYSAKDLNRPKFNLMKDAIKKGTIDVLLVYRLDRLTRSVIDLYEILKMLDENGCKFKSATEVYDTTNAMGRLFITLIAAIAQWERENLAERVKMGIEKKVKFGKWPGGLPPYGYVYKNDELIINPEEAKVVKLIFSMAKTLGFYTIAKRLTETGYSTKNGGQWHVDTVRGIANNPVYAGYLTHNDSPKAAKKPPREQALYEGEHERIVLRDEFWQLQEILEKRRGAGGKRETSNYYFSSILKCGRCGSSMSGHKTPAGKTYRCSGKKAGKSCTSHIVLEKYLVQKVFESFDDLISELSPQADVATNPLDEKIKELENNLANIEKKLEKQKNMYERDIIDIDELVTKTEKLREEEKEITSQLRAYKKSADQSEDITYIAENISSLWEIANEYERKQMMTTLFSQMVIDTKDEYKRGTGKPREILILSVK

SEQ ID NO: 29147 - DNA, 50 bp, Bacillus paralicheniformis
  source 1..50: mol_type = genomic DNA
tatatgtctttcataggtattagtactccttcaccgataatagacatatg

SEQ ID NO: 29148 - DNA, 40 bp, Bacillus paralicheniformis
  source 1..40: mol_type = genomic DNA
catttgggtcggcggcggtacgcttgtgccatgggcgctc

SEQ ID NO: 29149 - DNA, 40 bp, Bacillus paralicheniformis
  source 1..40: mol_type = genomic DNA
catttgggtcggcggcggtttgcttgtgccatgggcgctc

SEQ ID NO: 29150 - DNA, 50 bp, Bacillus paralicheniformis
  source 1..50: mol_type = genomic DNA
tatatgtttatatattgtatttgttttcatactgctgataaagacatatg

SEQ ID NO: 29151 - protein, 539 aa, Clostridium sporogenes
MKAAIYSRKSMFTGKGDSVENQVQMCKDYGNRLNIDEYLIYEDEGYSGGNINRPKFQELLQDVKKKKFDVLICYRLDRISRNVADFSSTLELLQDNNISFVSIKEQFDTSTPMGKAMVYIASVFAQLERETIAERVRDNMLELAKSGRWLGGQTPLGFESEKISYFDAEMKERTMYKLSPEPKELELVKLIYNKYLETGSIHLTLKYLLSNNIKGKNGGEFASMSINDILRNPVYAKSNEMVLNYLKDKGMNVCGTANGNGILIYNKRNSKYKRKDINEWIAAVSKHKGIIPANAWIEVQKTLDKNSSKSTPRQGTSKRSILSGVLKCSRCASPMRVTYGRKRKDGTSIYYYTCTMKAHSGKTRCDNPNVRGDYLEKAIIKKLKNLNSDVVIKELEEYKKQLAATIENSIIKNISKEIEEKKKEMDSLLKQLSKVESPVASEFIISKVDSLGTEIKDLEISLTKTTDKKKENSNIELNIEIVLQALNEFNDFFNSVESLKNDELTIQRKRYLLERAVDEITIDGETKKIGIDLWGSKKK

SEQ ID NO: 29152 - DNA, 50 bp, Clostridium sporogenes
  source 1..50: mol_type = genomic DNA
cattgcagttacataaagcatgtacatgcatgattgatataattgcgaca

SEQ ID NO: 29153 - DNA, 40 bp, Clostridium sporogenes
  source 1..40: mol_type = genomic DNA
agatttccctggtcataaacatgcatggctttatgatgta

SEQ ID NO: 29154 - DNA, 40 bp, Clostridium sporogenes
  source 1..40: mol_type = genomic DNA
agatttccctggtcataaaaatgcatggctttatgatgta

SEQ ID NO: 29155 - DNA, 50 bp, Clostridium sporogenes
  source 1..50: mol_type = genomic DNA
cattacagtggagaaacacatttaaatgcatgactaaatatataatgaca

SEQ ID NO: 29156 - protein, 540 aa, Enterobacter hormaechei
MPKAISYIRFSSRIQAYGDSTKRQNKYINEWLKNNPDYHLDESLRFQDLGISGYSGANAKSGAFGEFLAAVESGVIEAGSVLLVESLDRVSRQDIDTARERLRKILLAGVDVVTLADNSWYKKESLNDPLSLIKAVLIMQRANEESATKSKRLRSAWDAKREEAAKGKIMSRRCVAWLRVSDDMSHFELIPDNVKAVQRVFQLRLEGLPFVRIARQMNEEGFYTLNQRNPVKGAWSHTTVKALLDNRSVIGFKVPSNCTVTQGVKEIPNYYPAVISEEQFYAVQQLKQGAGRRPSSEKPLLTNLFKGVMRCGECGFVTVVNCATEKWHGVYRCSMRYEGRCDAKSINRRLADKSLVQGLLYNTNRLSLNRDNGSAIGTLQSELEQLQKQRERLIKLAMLADDTESMAKDLKALNSQIKDAEKAVSEVHQREQSSQLETISHLDLTVKKDRVEAQIIIKRIVKEIRLNTAGKKCDVFLHNGLKLLNFPLDRVVDGAQWLEVLPLIDGDEFDFEGFTTKPRHIALEEAPNWVKEMEEQSNQP

SEQ ID NO: 29157 - DNA, 50 bp, Enterobacter hormaechei
  source 1..50: mol_type = genomic DNA
gttagtgattagagatttgtaattaggactacacatctcttatgataaac

SEQ ID NO: 29158 - DNA, 40 bp, Enterobacter hormaechei
  source 1..40: mol_type = genomic DNA
attagtatggagggtggacagcaccagatgcccggtttgc

SEQ ID NO: 29159 - DNA, 40 bp, Enterobacter hormaechei
  source 1..40: mol_type = genomic DNA
attagtatggagggtggacctcaccagatgcccggtttgc

SEQ ID NO: 29160 - DNA, 50 bp, Enterobacter hormaechei
  source 1..50: mol_type = genomic DNA
tatagtgattaaaaatatgtacttctggttaaacatacagcatagtaaac

SEQ ID NO: 29161 - protein, 548 aa, Streptococcus anginosus
MSKEKIKVYLYTRVSTSIQIDGYSLEAQKSRMKAFALYNDYEIIGEYEDAGKSGKSIEGRIQFTRMMEDIKSGKDGVSFVLVFKLSRFARNAADVLSTLQTMQDFGVNLICVEDGIDSSKDAGKLMISVLSAVAEIERENIRVQTMEGRIQKAREGKWNGGFAPYGYQLVDGKLFINEEEAVAIRTIFDQYVNTTIGANGLSKYLENHGIRKIPRQNGKNPLFDAGLIRKILKNPVYNGKIAFGRRTLEKVHGTRNEYKQVEQDEYLIAEGIHEAIISDELWQAAQVKLKSQAKKYEHVNKGKDTRTHLLSGIVKCPICGVGMFGNKCIKKKKDGTKYKDFYYYGCKHRHMIRGHKCTYNKQIREELLDDAVAEVIIKIVSNPKFASMMQEKINMKVDTSEIEKEIDNYQKELRKSHSTKFKLIEEIDNLDADDKHYKRRKQDLDDRLYRMYDKIEDLESLLIDAKAKKQTIEAEKLTGDNIYKILIYFDKLYKVMNDVERRQLITALISEIQIYEEKQPNGQWLKSITFKLPIIDGDLNIGLDNDEH

SEQ ID NO: 29162 - DNA, 50 bp, Streptococcus anginosus
  source 1..50: mol_type = genomic DNA
tataggtttggacaatgatgagcatgtggagacggtagcattattgtcca

SEQ ID NO: 29163 - DNA, 40 bp, Streptococcus anginosus
  source 1..40: mol_type = genomic DNA
tatttccaatgacgcatcatgttgagtgtgttgctctgct

SEQ ID NO: 29164 - DNA, 40 bp, Streptococcus anginosus; identical to SEQ ID NO: 29163
  source 1..40: mol_type = genomic DNA

SEQ ID NO: 29165 - DNA, 50 bp, Streptococcus anginosus
  source 1..50: mol_type = genomic DNA
tataggtgggatccatggtgagcatgaggagacagggacaggattggcct

SEQ ID NO: 29166 - protein, 534 aa, Pseudomonas tolaasii
MTKKCYPYVRFSSTRQEDGSTRQRQNELIDAFVSKHGLEVDRHLEDAGTSAYHGKNASAEGVLGQFLREVRMGEIEKGSYLLIENFDRLSRDKIVRSNKIFTDLLFAGVRIVILDRDKVYDAENLDFGDWINALVEFERANAESKRKSDFSSKAWNYNREKMRSGEIVTKKVPTWLKVENNAFVIDYEKVERINTLFKLSLSKGLQEATREYNELYSEKLAIHQTQYLLSNRKLIGEHSPQKIHYDESGQLKRKDEGDPISNYYPVVVDEKLFYQVQEVIKSRKPFSGRYSNQRYNVFRDLVVCKACGGTIRYMNKGERDYFICTNSMTGKCVLNSHFGQLSIRGKKLFSMFFAFTAGLNISALLEENTQAEELKSQTMKLEAKRTQITQRLENFKAEVKTMILEGKTIPSTYNELITELESNRTNIDQEIESNTKKLDQIYTSEKSFSNLKSNDISTVLYDRSDEAIEKRVKYNAELKKIIRTIKIDYLNTFLQIEFFNGVTRRIDEDGKAYDYNMEELTATMYEAAKKYAPQ

SEQ ID NO: 29167 - DNA, 50 bp, Pseudomonas tolaasii
  source 1..50: mol_type = genomic DNA
atggaacctttcacagaacacatccagctatgttaggctatacgttccat

SEQ ID NO: 29168 - DNA, 40 bp, Pseudomonas tolaasii
  source 1..40: mol_type = genomic DNA
ccgcgcgtaacagtagatgcaaccgtgttcgcagccacga

SEQ ID NO: 29169 - DNA, 40 bp, Pseudomonas tolaasii
  source 1..40: mol_type = genomic DNA
ccgcgcgtaacagtagatgttaccgtgttcgcagccacga

SEQ ID NO: 29170 - DNA, 50 bp, Pseudomonas tolaasii
  source 1..50: mol_type = genomic DNA
aatgaacttgaaaaagaatacatgttcttctgttaggtgaaacattccat

SEQ ID NO: 29171 - protein, 533 aa, Pseudomonas fulva
MTKKCYPYVRFSSTRQEDGSTRTRQNELIDAFVSKHGLEVDRHLEDAGTSAYHGKNASAEGVLGQFLREVRMGEIEKGSYLLIENFDRLSRDKIVRSNKIFTDLLFAGVRIVILDRNKVYDAENLDFGDWINALVEFERANAESKRKSDFSSKAWNYNREKMRSGEIVTKKVPTWLKVENNAFVIDHEKVERINTLFKLSLSKGLQEATREYNELYSEKLAIHQTQYLLSNRKLIGEHSPQKIHYDDAGQLKRKDEGDPIANYYPVVVDEKLFYQVQEVIKSRKPFAGRYSNQRYNVFRDLVVCKACGGTIRYMNKGERDYFICTNSMTGKCVLNSHYGQLSIRGKKLFSMFFAFTSGLNISALLEENTQAEELKSQTMKLEAKRSQITQRLENFKAEVKTMILDGKTIPSTYNELITELESNRTNIDQEIESNTKKLDQIYTSEKSFSNLKSNDISTILYDRSDEAIEKRVKYNAELKKIIRTVKIDYLNTFLQIEFFNGVTRRIDEDGKAYDYNMEELTASMYEAAKKYAP

SEQ ID NO: 29172 - DNA, 50 bp, Pseudomonas fulva; identical to SEQ ID NO: 29167
  source 1..50: mol_type = genomic DNA

SEQ ID NO: 29173 - DNA, 40 bp, Pseudomonas fulva
  source 1..40: mol_type = genomic DNA
gcgtgcatagcagtagatgcacccgtgctcgcaaccgcga

SEQ ID NO: 29174 - DNA, 40 bp, Pseudomonas fulva
  source 1..40: mol_type = genomic DNA
gcgtgcatagcagtagatgttcccgtgctcgcaaccgcga

SEQ ID NO: 29175 - DNA, 50 bp, Pseudomonas fulva; identical to SEQ ID NO: 29170
  source 1..50: mol_type = genomic DNA

SEQ ID NO: 29176 - protein, 577 aa, Pseudomonas gingeri
MLGIPAMQRKCYSYVRFSHKKQELGTSFARQSDIQHFVEKHNLIVDTKLEDLGVSAFRGKNSQKGQLGDFIDLVENGLIEENSILLIENFDRLSRQKVIKSTQIFINLLNRGVDIAVLDTGKIYSKNTLLSSDFFIAVIEFERANAESSRKSDFTSAAWNIHRAEMRNNKSVKTRKTPSWIGVSGVVKARPGDESAKFFIIENEARKIRKIFDLALSKGLSETARAVNDWLEPNEPKYSIHQIQYLLKNRKVIGEHQPMKFNENEIGEMKLMPEGPTIHDYYPAIIEKAIFEEVQEKIAGRKPFSGRFNKSRLNIFQGFITCYHCKGTVRYMDKSSIERGNKHYFVCTNSMSRKCVINRRLTYNASEAMQYFFEKTDRLNLSEIFENDEKILTLNSSIKEAERELKNTFAQLERLKKQIKEMLRSGKEISDTLNEMLIEFETSQRQQIKTANALKEEKQKSVQQIEASRSFDQDNILELLNDKSDEATRKRITINNHLKQIIENIEFFCRGYSKKNPITGVEDKRSTLTPTMIVRFKNGAVRVIVESELIKDVGEQSGGAELYLQILEDMHKKMILK

SEQ ID NO: 29177 - DNA, 50 bp, Pseudomonas gingeri
  source 1..50: mol_type = genomic DNA
gagggtcttatcgcagaataaatacacctgtgttacgctataagatactc

SEQ ID NO: 29178 - DNA, 40 bp, Pseudomonas gingeri
  source 1..40: mol_type = genomic DNA
ccgcgcatagcagtagatgcagccatgctcgcagccgcgg

SEQ ID NO: 29179 - DNA, 40 bp, Pseudomonas gingeri
  source 1..40: mol_type = genomic DNA
ccgcgcatagcagtagatgtggccatgctcgcagccgcgg

SEQ ID NO: 29180 - DNA, 50 bp, Pseudomonas gingeri
  source 1..50: mol_type = genomic DNA
cagagaagaaactgagaataaatatgactattttacacttcaagatactc

SEQ ID NO: 29181 - protein, 518 aa, Clostridium butyricum
MNKIWNIAIYARVSTDKKEQSESIPVQIENLKKWILDKSREDLNSIYNVVDMYEDKGISGSTFEREAFIRMKDDIEDKKINMVVTRDLSRFSRNYVLAGYYLEEYFKINNIRFVSVLDGVDTENEFENDLVPFKNIINEMYIKDTSKKVRSALRTRMERGSSIASKPPYGYKFKEIYEDNVKIIKLIPANDESPQVVKDIFNRYLSGWGAGKIASYLNEKKIDPPSNRVKNFSRSKFGKWSNNTIMSILRNPKYGGYMVQGRYKKVSFKVKKVKLMPEENWVYGGEFEGIISKEIFKRTQEMLKKRSTNNYRYKNDVIHPFSTVLKCGRCGGSMTYRKNYEGYKCTNSQQGAKRCSPHSIKESKLIEIVSNEIKNMIDCKINKQKIYDKYNNLKIKDNILANLETVEKKLKSLDNQFKKLYEDKLEEIINERNFNFMINDIQQKQDKLIEKRDELKSLNSNDEDIRGLLEKYKPEMDALLNGKNIDRKLVETLVDKIIIKEEHNKKEKSVQVYFKFNK

SEQ ID NO: 29182 - DNA, 50 bp, Clostridium butyricum
  source 1..50: mol_type = genomic DNA
aagaactatatcgtctaaaaagagactgctttatagacgacaagggttat

SEQ ID NO: 29183 - DNA, 40 bp, Clostridium butyricum
  source 1..40: mol_type = genomic DNA
agagcctgctaataaggagactgctacgtgtataggttta

SEQ ID NO: 29184 - DNA, 40 bp, Clostridium butyricum
  source 1..40: mol_type = genomic DNA
agagcctgctaataaggaggctgctacgtgtataggttta

SEQ ID NO: 29185 - DNA, 50 bp, Clostridium butyricum
  source 1..50: mol_type = genomic DNA
aaaaaaaaaaaaaactaaaatgaggctgttttagagcagaaaaggctaat

SEQ ID NO: 29186 - protein, 539 aa, Azotobacter chroococcum
MKNGAKVYSYLRFSDPRQATGSSADRQLQYAQTWAAARGFELDETLSLRDEGLSAYHQKHVKQGALGVFLLAVDEGRIPAGSVLIVEGLDRLSRAEPIQAQAQLAQIINAGITVVTASDGREYNRAGLKAQPMDLVYSLLVMIRAHEESDTKSKRVKASIRRQCEGWQAGTYRGLIRNGKDPQWVRWTGEGWELIPERVEAVRAALDLYRCGLGAGRAAKRMFADGHMLSDWGISGQQIYRLVRLPALRGAKRISVDGEDYLLEEYYPRVLSDAEFDELQLLAGQRYRRRGAGEIPGIITGVGLAFCGYCGAAIVAQNLMGRARADGSLADGHRRLHCTSYSKGRGCPDGGSCSVVPVERALLAYCADQMNLQRLQQAAVDGPDLRQQLAEARLQVEELDKQLARITDALLADESGAAPLAFVRRARELEQQQVAAQARVQQLERELSVAAVHVEPAQAERWAELAALVEQGDYGAREQVRQLVLDTFERLVIYMRGIAPDGRRGRTIDMMMVPKGGAPRLIQIDRRSGAWVASEDWAG

SEQ ID NO: 29187 - DNA, 50 bp, Azotobacter chroococcum
  source 1..50: mol_type = genomic DNA
agtttagaaagactagcctatgggcacccgagcgatataaaccctatact

SEQ ID NO: 29188 - DNA, 40 bp, Azotobacter chroococcum
  source 1..40: mol_type = genomic DNA
gtcgacggtggccttcgggcatccgagcgacacgaatccg

SEQ ID NO: 29189 - DNA, 40 bp, Azotobacter chroococcum
  source 1..40: mol_type = genomic DNA
gtcgacggtggccttcgggattccgagcgacacgaatccg

SEQ ID NO: 29190 - DNA, 50 bp, Azotobacter chroococcum
  source 1..50: mol_type = genomic DNA
aaatttgaattgtaagcctataggatcccaagagttccaaactctatatt

SEQ ID NO: 29191 - protein, 635 aa, Citrobacter koseri
MPQLYSYIRWSSDRQEKGTTRNRQVAAAKAYADEAGLEMVEIIEPGVSAFRGKNRAGKLGDFIDAVKNNAIPSDSWLYCENLDRLSRDQVDEALRLFLELIGLGLTIVTGMDRKVYNRESIRQNPTDLMISILMFIRGNEESETKSNRTVGNVVALVERHKKGLPVNIKSVGRHPFWIDDSGSQYEAVKEHPVYWSIAREAIDMFLAGDGIYTVKRYLDQKYPNGLKGKEWDYQVLKKMRDNRALIGERTINVAGATYKLDNYYPWLCKDEAEFLTLAERKQQNNYKGKKDKAEEIKLLSGLQVLRCSKCGGTMHSFMNHGSARYICTNGVHLQKNCSGWSISAQLVEHCTMISLLIAYMDKSHKDGIDTTAIEEDISRKEIFITDLESRIANMAQAIAIAPDVSALAVQLNAFDMERKNTVLEVDKLKERLHSLKGKGSFGVDVTEFLVLIQWSVFANMEDTDRNKIRKIISSIIESVVVDKTDGCITIKIKCHHKDEWLVFGGVNRKPYWAFTIEYSTDDEIHIEGEDSYDFISNPLFQKAVEQLDSIKQSYLNLFETANTMLGVVGYSDIRGSSFWPNTGQYERVNVEYEGVTYSIALNGRVPKVIASALEATGLSRKDFIERFKVCKDEQR

SEQ ID NO: 29192 - DNA, 50 bp, Citrobacter koseri
  source 1..50: mol_type = genomic DNA
tactttatttcttgattgttagggcatcctaatgatataaaaccaatctt

SEQ ID NO: 29193 - DNA, 40 bp, Citrobacter koseri
  source 1..40: mol_type = genomic DNA
atcaaccaggtttttcgggcagcccagggaaacgaagccg

SEQ ID NO: 29194 - DNA, 40 bp, Citrobacter koseri
  source 1..40: mol_type = genomic DNA
atcaaccaggtttttcggggtgcccagggaaacgaagccg

SEQ ID NO: 29195 - DNA, 50 bp, Citrobacter koseri
  source 1..50: mol_type = genomic DNA
tactttttttaaccttttttagtggttgctatacatttacaaccaatcta

SEQ ID NO: 29196 - protein, 635 aa, Citrobacter koseri
MPQLYSYIRWSSDRQEKGTTRNRQVAAAKAYADEAGLEMVEIIEPGVSAFRGKNRAGKLGDFIDAVKNNAIPSDSWLYCENLDRLSRDQVDEALRLFLELIGLGLTIVTGMDRKVYNRESIRQNPTDLMISILMFIRGNEESETKSNRTVGNVVALVERHKKGLPVNIKSVGRHPFWIDDSGSQYEAVKEHPVYWSIAREAIDMFLAGDGIYTVKRYLDQKYPNGLKGKEWDYQVLKKMRDNRALIGERTINVAGATYKLDNYYPWLCKDEAEFLTLAERKQQNNYKGKKDKVEEIKLLSGLQVLRCSKCGGTMHSFMNHGSARYICTNGVHLQKNCSGWSISAQLVEHCTMISLLIAYMDKSHKDGIDTTAIEVDISRKETLISDLESRIANTAQAIAIAPDVSALAVQLNAFDMERKNTILEVDKLKERLHSLKGKGSFGVDVTEFLVLIQWAVFTNMEDTDRNKIRKIISSIIESVVVDKTDGCITIKIKYYHKDEWLVFGGVNRKPYWAFTVEYSTDDEMGIEGKNSSDFISNPLFQKAVEQLDSIEQSYLNLFETANTMLGVVGYSEIRGSSFWPNTGQYERVNVEYEGVTYSIALNGRVPKVIASALEATGLSRKDFIARFKVCKAEKR

SEQ ID NO: 29197 - DNA, 50 bp, Citrobacter koseri; identical to SEQ ID NO: 29192
  source 1..50: mol_type = genomic DNA

SEQ ID NO: 29198 - DNA, 40 bp, Citrobacter koseri; identical to SEQ ID NO: 29193
  source 1..40: mol_type = genomic DNA

SEQ ID NO: 29199 - DNA, 40 bp, Citrobacter koseri; identical to SEQ ID NO: 29194
  source 1..40: mol_type = genomic DNA

SEQ ID NO: 29200 - DNA, 50 bp, Citrobacter koseri; identical to SEQ ID NO: 29195
  source 1..50: mol_type = genomic DNA

SEQ ID NO: 29201 - protein, 494 aa, Priestia aryabhattai
MRCAIYARVSKELDSQKTSIDNQIDLFRNYADEKNWEIVKIYTDKTSGTKVNRPGLKSLIADGKAKLFDVILAKELSRLARNGRLSYELRDICQLNNIHIVCLDNSINTLTGDVQNFGLFAWLYENESLNNSRRNKASKRTKAVRGEFTGSNPTYGYYNDGGKLKIRQDQSPDIVRRIFNCYLEGMGMDTIAKGLIAEGVQTPSQVAKKANASTLWHASTIKNILKNRHYCGDLVQHKTESISVTTTKRRTLDEENLIVHRDMHEPIISKETFEAVQRMLQSRTRIGKAPKKHLFTNVLYCKECGRGMWYKVNQKGYRCGGNLKYGDFYCLNKKAVKELKLKKIVLAYLKELFQAFQDESMMKSLMKKLEQKQQEFQQEMSNVDNQIQDLRLKRLEYLNLYTEQVITKQELIEYRELTDKKLKELDIIKAQIHQNLEECTNENYAIELGNKLKNFFPLKDLDSKLLHSLVEKITVGIDGNIDIHYTFINPFQNK

SEQ ID NO: 29202 - DNA, 50 bp, Priestia aryabhattai
  source 1..50: mol_type = genomic DNA
atgagttgcgagacacattccacgtgtgcggtctgcaactggcaacacaa

SEQ ID NO: 29203 - DNA, 40 bp, Priestia aryabhattai
  source 1..40: mol_type = genomic DNA
actcactacattctccacatgcgctgtatgagggaacata

SEQ ID NO: 29204 - DNA, 40 bp, Priestia aryabhattai
  source 1..40: mol_type = genomic DNA
actcactacattctccacacccgctgtatgagggaacata

SEQ ID NO: 29205 - DNA, 50 bp, Priestia aryabhattai
  source 1..50: mol_type = genomic DNA
atgagctgcacaaaacctgcaacgcctgcagccggcgttggtcaacagaa

SEQ ID NO: 29206 - protein, 476 aa, Streptococcus pyogenes
MNRNKVAIYVRVSTQGQVDEGYSLDEQVDLLTNYCKLKAWTLYDVYVDPGISGKNMHRPEIERLTRDAKHKLFDIVLIYDLKRLGRSQKENIVLVEDVFNKNGIRLVSFTENFDASTPVGKMVFGMLSAYAELDRANIAERMMMGKIGRAKSGKAMSWGMPPFAYDYNKETGNLELDEAKAPIVEMIFSDYLKGASVNQIVQKLNSMDYNGKDHEWKHHAVTVILENPSYCGMTRYIDQIYEANHKPIIDKVTFDLVQIERKKRLSKYHDNDLVGPFQRKYIGSKFCYCGLCGANLKSEKDKRNKHTGIRPISFYCPNTRSRGTNDCTNKRFRQDILEGYILKEVAKLQQQPEKLRVIKPKKDAENESKLDNYKNKIRQNTSKLSKLNELYINDLMPIDELKKRSKTLYDENEFLEKQIEQLSSTTREDELRNKIDTFLAFPDILTADYETQKQAIEIVVSRVEVTKNGIDIFFNF

SEQ ID NO: 29207 - DNA, 50 bp, Streptococcus pyogenes
  source 1..50: mol_type = genomic DNA
aaccctgttttactaccgagtattaaaatacatagcaataaaacaggtaa

SEQ ID NO: 29208 - DNA, 40 bp, Streptococcus pyogenes
  source 1..40: mol_type = genomic DNA
tgtgtacctaatacgtaacaaaataatgggttagcaaaat

SEQ ID NO: 29209 - DNA, 40 bp, Streptococcus pyogenes
  source 1..40: mol_type = genomic DNA
tgtgtacctaatacgtaacataataatgggttagcaaaat

SEQ ID NO: 29210 - DNA, 50 bp, Streptococcus pyogenes
  source 1..50: mol_type = genomic DNA
caccctatttcttctactaatattatcatacatagccataatacatgtaa

SEQ ID NO: 29211 - protein, 515 aa, Vibrio alginolyticus
MTKAYSYIRFSTKGQIEGRSLQRQLETARKYAEENGLELQSLSFQDLGVSGFKGRNSEQGALSQFIEAVKEGTIPEGSWLLLESFDRMSRQPVEKSMRLLMELVELGIIVVTLMDKQVYRRGQLDMTKLIISLVIMSRAHEESAAKSKRLADVWHAKQAVAHLKPLGTHLPAWLEYNEDKTKIQINYEKAVVVRYIFELSANGYGRSALIRKLNSQGIAPIGSRAKRWHLSYVTKLLNNTAVLGEYIPHVTDKLGQRVPTGEVIENYYPPIIEKDLWLRAKAAAQSRKIRGTGAIRRGHTRNILSGMVSCECGSSMQFVNKGSSDKGGYYLVCSTARHGAGCQYIGHRYYSVQWVVLIALQKLLHTFANKADNHEKEMQLEGELVELDRKLNNLINDLEENGSSKYISAAIRKTEQRMDIVKNELLMLQSSKAVENDEVDLQEITLRLNENFERLRLHQYLKRHIANIVVYKNKERLEINLKTGEDIILTFIPSENLWQSNTGVSFSVTFDTRWG

SEQ ID NO: 29212 - DNA, 50 bp, Vibrio alginolyticus
  source 1..50: mol_type = genomic DNA
ataggtcttttaggttctaaaagtaggaatcttaggtataatagacctac

SEQ ID NO: 29213 - DNA, 40 bp, Vibrio alginolyticus
  source 1..40: mol_type = genomic DNA
acctggcgggccaaggaaaagtaagttgtggtttccagcg

SEQ ID NO: 29214 - DNA, 40 bp, Vibrio alginolyticus
  source 1..40: mol_type = genomic DNA
acctggcgggccaaggaaacataagttgtggtttccagcg

SEQ ID NO: 29215 - DNA, 50 bp, Vibrio alginolyticus
  source 1..50: mol_type = genomic DNA
ttaagtcttaccctttctgaaagacagaatataaggagaatcagacttcc

SEQ ID NO: 29216 - protein, 544 aa, Anaerotruncus massiliensis
MNRQPDMITALYCRLSRDDELQGDSNSIVNQKEILRRYAEENHFPNPRFFVDDGYSGTNFDRPAYQEMMELVEDGVVEAIIVKDHSRLGRNRLVIGQLLEEILEEHNVRYIAVTDNIDSLKGLDDMVAVRDLFNEWYARDTSKKIRAVWRAKSSAGKRLCNNPPYGYRKDPEDKENWLVDEEAAKVVREIFSLCIAGLGPLQIAKRLRKEQVLNPTAYREAHGLTVGNPTPADPYHWDNKAVAAILERMEYLGHTVNFKGTKKSYKSKKRIKNPPEKWQVIPDTHPAIIEQAQWDRVQELRKNKRRPTKTGKHNMFSGLVECADCGAKLYYCTTNYFEERQDHFVCSNYKSNTGTCSAHFIRAVVLEKLVLEHLQRTIQYVREYESEFVQSMGEKSAADRRKEISTKRRGLSQAQRRMEELDRLFQRLYEDNVSGKISDERFTKLSGGYEAEQKELQEKVAILQAELTGQEEQAMNLDRFLSIVKKYTEIEKLTPTILNEFVEKIIVHAPDKSTGKRVQQVEISYNCIGVIELPDTNETDSKTA

SEQ ID NO: 29217 - DNA, 50 bp, Anaerotruncus massiliensis
  source 1..50: mol_type = genomic DNA
atacttctttattgggggccgcctaaggccgacacccaataaggaagtat

SEQ ID NO: 29218 - DNA, 40 bp, Anaerotruncus massiliensis
  source 1..40: mol_type = genomic DNA
ggaaaacagggggcgcctcaacgaggcgccccctgttttc

SEQ ID NO: 29219 - DNA, 40 bp, Anaerotruncus massiliensis
  source 1..40: mol_type = genomic DNA
ggaaaacagggggcgcctctgcgaggcgccccctgttttc

SEQ ID NO: 29220 - DNA, 50 bp, Anaerotruncus massiliensis
  source 1..50: mol_type = genomic DNA
atgtttcttgccatggggctcccttgggcagagatccagcagggaagtag

SEQ ID NO: 29221 - protein, 507 aa, Roseomonas sp FDAARGOS 362
MKEANAPRAVIYCRVSSKKQVRQGDGLRSQETRCREYADFHGYQVVHAFYDDISGGVVSRKGMTALLHFLKQNRRQGIVVIIDGLDRFARDICSHWGLRKLLTEAGGKLESPSFEFGEDADSVLRENVMASVAQHQRQKNAEQTRNRMRARAMNGYWVTRAPIGYEFERVAGHGKLLVRKEPLASIVAEALEGYASGRFETTTEVKRFLEAQPAYPRNSNNEVHIERVVEMFERPVYAGHITYEDWGLRLVRGKHEGLVSLDTWQKVQERRNGGVPKVPARQDLSEDFPLRGFVTCGHCGEPLTACWSKGRSARYPYYLCDTRGCEATRKSIRRDVIEGEFETLLQSLRPSEGLFNLAFHMFRDLWDAKLVSARTQGAALKKELQDVERKVGQLLDRIVDATSDSVVAAYEKRIKELETQKALMRERVENCGRPLKSFGETYRTAFDFLANPCKLWHSDRIEDRRAVLKLVFADHLPYVRGEGYRTPKISMPFKLIGAANMGEKGMV

SEQ ID NO: 29222 - DNA, 50 bp, Roseomonas sp FDAARGOS 362
  source 1..50: mol_type = genomic DNA
cgcaaacatgggtgaaaaggggatggtgcgcttctccggtgaggagacga

SEQ ID NO: 29223 - DNA, 40 bp, Roseomonas sp FDAARGOS 362
  source 1..40: mol_type = genomic DNA
gctcgttcatgggaggaatggtgcccaggggcggaatcga

SEQ ID NO: 29224 - DNA, 40 bp, Roseomonas sp FDAARGOS 362
  source 1..40: mol_type = genomic DNA
gctcgttcatgggaggaattgtgcccaggggcggaatcga

SEQ ID NO: 29225 - DNA, 50 bp, Roseomonas sp FDAARGOS 362
  source 1..50: mol_type = genomic DNA
cccaaacctgaatctaaaggggtttgtgcactgctttaaggaggaaacgg

SEQ ID NO: 29226 - protein, 455 aa, Listeria booriae
MKAAIYIRVSTDEQAKKFSIPAQERLAKAFCESKGWKIYKIYTDGGFSGKNLDRPALQEMLSETDKFDAVIVYRLDRLSRSQVDTMTLIETFFLKNDIEFISLTETLDTTSPGGRAMIGVLAAFSQMERESIRERSIMGRIQRVKSGLRDSPVKKRNFGYDIVDGKLYINESEAAVIREVCNRFEVLQSVGKIQQEQKANGVEVITRARIMNYLTNDLYIGYVHYLDEVHRKGIHEPIISEDQYYRIQAILERIKRAPNINKKSQSLLSGLVRCATCGSPYHHAVKGVKKYASGKVIEYRYYTCKKNRRKPELEGCTNKSYRGEKLEDIVINRIKNYSVDTRTDEKMKDLAENREKIDAQVVKKNRLLALYVDGVYQKSDLDPLMQDIDTEIKRLTDEASQQSKEINNKEITKRLLNKNQTLDFDSLDFAEKQRLLRGIIKEIVINGDNVKVYWL

SEQ ID NO: 29227 - DNA, 50 bp, Listeria booriae
  source 1..50: mol_type = genomic DNA
tttagtacctcatgtttttatgacggtagatagctgtatgagaacctaac

SEQ ID NO: 29228 - DNA, 40 bp, Listeria booriae
  source 1..40: mol_type = genomic DNA
ttttggttcaagttatgacggtagacgagaaggtacacgt

SEQ ID NO: 29229 - DNA, 40 bp, Listeria booriae
  source 1..40: mol_type = genomic DNA
ttttggttcaagttatgactgtagacgagaaggtacacgt

SEQ ID NO: 29230 - DNA, 50 bp, Listeria booriae; identical to SEQ ID NO: 1135
  source 1..50: mol_type = genomic DNA

SEQ ID NO: 29231 - protein, 537 aa, Flavonifractor plautii
MKQPIYNTALYLRLSRDDENAGESNSISTQRMMLRRYAEQNGLFVVDEYIDDGYSGTNFDRPDFQRMITDIEAGRINCVVVKDLSRFGRNYLEMGMYTEMRFPELGVRFIAVDSGVDSNNQQSTEFTPFLNVINEWYARDISRKVTKAFRTRHENGAHYGAYAPLGYRKDPEQTGHLLIDEETRWIVEKIFSLAVQGAGAAKITHILASEQIPTPSWLNFQRYGTFAHVYEGQPESKRYAWTIAQVKKILQDENYIGNSVHNKQTNVSFKCKKKIRKPKEEWWRVENTHEAIISKTDFDRVQEQITSRRRKRKNGTTQIFAGLVKCADCGWSLAYATNQRKKAPYSYYHCSKNGQGLRQCSMHYIRYDVLYNFVLSRLQYWIKAVHQDEQTIIQRLSKSNLAEQATASKRAAQEKKRAEKRLSDLDNLLAKLYEDRVSGKITERNFSMLSQKYQQEQEEQEQRIEALTAHLASEKEQEDGIGKWVDLIKQFSSPSELTAELLNTLIEKILVHEAVKEVDGSRTQEIEIVYRFVGKID

SEQ ID NO: 29232 - DNA, 50 bp, Flavonifractor plautii
  source 1..50: mol_type = genomic DNA
tgacttctttaactttgttactccgggctttcccatgcttaaagatacgg

SEQ ID NO: 29233 - DNA, 40 bp, Flavonifractor plautii
  source 1..40: mol_type = genomic DNA
ggtcagcaagtgggagaggggcatgtcctacccggacatc

SEQ ID NO: 29234 - DNA, 40 bp, Flavonifractor plautii
  source 1..40: mol_type = genomic DNA
ggtcagcaagtgggagaggtacatgtcctacccggacatc

SEQ ID NO: 29235 - DNA, 50 bp, Flavonifractor plautii
  source 1..50: mol_type = genomic DNA
tgccttttccccctttcttccacctagcttctccatcctttaagattcgg

SEQ ID NO: 29236 - protein, 427 aa, Pseudomonas syringae
MLPLLSRIVNAGVDLVTLDDGITYDRASVNSNHLFLLVAKVQQAHQYSDSLSRRLRAAYQTKRAKAAAGEGATRRMPLWIRDGKLRDDIAPFVTQVFEDYAAGIGERRILGRLKGQHPEFETISPSTFRRWLRNPVAVGRWNDIEDVWPAVVSKELWFRVQKRLTDGVKPKAASSKYLLSGLVKCARCGKNYCVGGQKGALTMLCVSRHRFGSNAGGCTNKRSIPYAVFDFIRSQTAHAALVRASQSQNLTASEKRQIEIDGELIELRKQSSHAAEGLVRYGMVKEITDVLDRVTDQIDRLEKERVMLQAVPAPATLDDMIDVENDLLDDDIVKLNALLQGVGYEMVVDDRTIVVCEASVFSTLQSQTYRYLGADRVTGTYKVTANDEVLHHLPNLDSKVQQDEYAKFLKQEARYESGELKREIYRL

SEQ ID NO: 29237 - DNA, 50 bp, Pseudomonas syringae
  source 1..50: mol_type = genomic DNA
attccccaagctgcagatttctttgctatgataggcacagtattatgatt

SEQ ID NO: 29238 - DNA, 40 bp, Pseudomonas syringae
  source 1..40: mol_type = genomic DNA
ttcaagcatgccgatcaccgcgttcatgggcgtgcggatt

SEQ ID NO: 29239 - DNA, 40 bp, Pseudomonas syringae
  source 1..40: mol_type = genomic DNA
ttcaagcatgccgatcaccaagttcatgggcgtgcggatt

SEQ ID NO: 29240 - DNA, 50 bp, Pseudomonas syringae
  source 1..50: mol_type = genomic DNA
attcttcaatagatatatttttttaatttgatggcttaaaaattatgagt

SEQ ID NO: 29241 - protein, 531 aa, Pseudomonas aeruginosa
MSTVTPLPRAFSEVFQGDDRINVYSYIRFSSKAQKLGFSEMRQIDQLNRFFEQYPQARQVERYEDLGVSAFKGKNLKSGQLARFVERIKAKEILPNALLLVESFDRISRMGGYDALELIISIIQADCAIYTLFDNRLYSRRKTDSSADISLIQNILERANDESRSKSDRISDAKARNLLKGENGGIITKRCPFWISFADGKFVLNEHARAITRAVELCFDMGFQAIAKTLNDEIHPKKYTESIVGKFLRQPAIYGSFIAMEWDESGKPLQLKKEIKGYYPAVITEAEFHRVSVKLQERQDPKLAGRKAAEFKNILRGLVYCACGSGFRYHAQKSGYVDLVCSASLTGRCTSAKPGKGVRYRYARLEEIFLAYQAKIPFHRIIAKTEDIQALEKAHGEISGLLIQKEKALQNNFSILERASESAQKYILDRINEVSQELDQLKAQEQELSRRINTMHLASKSTLNVMEIYKLLLTEHGRMRVNNFLQGQAVKLIVTPIQKKYFYIDIFLGHEHIDQVHVTPDGYTAGNKTKS

SEQ ID NO: 29242 - DNA, 50 bp, Pseudomonas aeruginosa
  source 1..50: mol_type = genomic DNA
tttctacgaatatgccctatgattgcaatcagcagtgcttttggtagaaa

SEQ ID NO: 29243 - DNA, 40 bp, Pseudomonas aeruginosa
  source 1..40: mol_type = genomic DNA
gatccgcacgccgatgaacgcggtgatcggcatcctcgaa

SEQ ID NO: 29244 - DNA, 40 bp, Pseudomonas aeruginosa
  source 1..40: mol_type = genomic DNA
gatccgcacgccgatgaacacggtgatcggcatcctcgaa

SEQ ID NO: 29245 - DNA, 50 bp, Pseudomonas aeruginosa
  source 1..50: mol_type = genomic DNA
tctctacaagagaaaccttggattacaattagcaattatcatggtaaaag

SEQ ID NO: 29246 - protein, 531 aa, Pseudomonas aeruginosa; identical to SEQ ID NO: 29241

SEQ ID NO: 29247 - DNA, 50 bp, Pseudomonas aeruginosa; identical to SEQ ID NO: 29242
  source 1..50: mol_type = genomic DNA

SEQ ID NO: 29248 - DNA, 40 bp, Pseudomonas aeruginosa; identical to SEQ ID NO: 7143
  source 1..40: mol_type = genomic DNA

SEQ ID NO: 29249 - DNA, 40 bp, Pseudomonas aeruginosa
  source 1..40: mol_type = genomic DNA
ttgcagcatgcccagcacgacattcatcggcgtgcggatc

SEQ ID NO: 29250 - DNA, 50 bp, Pseudomonas aeruginosa; identical to SEQ ID NO: 29245
  source 1..50: mol_type = genomic DNA

SEQ ID NO: 29251 - protein, 536 aa, Clostridium botulinum
MKAAIYSRKSVFTGKGESIENQINLCKDYGKKNLGIEDYLIYEDEGFSGGNTNRPKFKQLIKDAKNKKFDVLICYRLDRISRNVADFSSTLELLQENNISFVSIKEQFDTSSPMGKAMVYIASVFAQLERETIAERVRDNMLELAKTGRWLGGQTPLGFQSEKISYFDAEMKERTMYKLSPVKEELDKVKLIYKKYLELKSLRKVTQYLLENNFKTKLGANWHTSVVSDLLQNPTYVKSSQDVFNYLRESGITCVGTPDGIHGLLTYNKKKGTKKQRDKTDWIATVAKHKGIIDSDIWLQIQSKMNCNKAKAPKLGRTHNALLTGLLRCEKCGSPMSVIHGPKDKNGNKTYFYGCSMKIYSKGTRCDNSNIRTTEMETVVINKLKSVTKNNGLLFEELNAVKEQLAPSKEETNELTLLNSKIKSNKQAIENLVKQLSLNPSSTASKYIIEEIEKKEEEIKQTQSKIESLKEDKMEINKLEIDLDLIISNLKNFYDTIDNVDIEKKKYLISVLVDKITWNGSTGEVDIKLWGSSKKK

SEQ ID NO: 29252 - DNA, 50 bp, Clostridium botulinum
  source 1..50: mol_type = genomic DNA
acttgcagtttgctatgtcaagcagatgcttgaactaccaaactgcaaga

SEQ ID NO: 29253 - DNA, 40 bp, Clostridium botulinum
  source 1..40: mol_type = genomic DNA
gctgtttgtgggtcacactgaagccatgaccacaggaagt

SEQ ID NO: 29254 - DNA, 40 bp, Clostridium botulinum
  source 1..40: mol_type = genomic DNA
gctgtttgtgggtcacactggagccatgaccacaggaagt

SEQ ID NO: 29255 - DNA, 50 bp, Clostridium botulinum
  source 1..50: mol_type = genomic DNA
atctgcagtattgaaagtcaaggtggtggttaaccttggtgactgcaagg

SEQ ID NO: 29256 - protein, 536 aa, Clostridium botulinum
MKAAIYSRKSVFTGKGESIENQINLCKDYGKKNLGVEDYLIYEDEGFSGGNTNRPKFKQLIKDAKNKKFDVLICYRLDRISRNVADFSSTLELLQENNISFVSIKEQFDTSSPMGKAMVYIASVFAQLERETIAERVRDNMLELAKTGRWLGGQTPLGFESEKISYFDAEMKERTMYKLSPVKEELDKVKLIYKKYLELKSLRKVTQYLLENNFKTKLGANWHTSVVSDLLQNPTYVKSSQGVFNYLRESGITCVGTPDGIHGLLTYNKKKGTKKQRDKTDWIATVAKHKGIIDSDIWLQIQSKMNCNKAKAPKLGRTHNALLTGLLRCEKCGSPMSVIHGPKDKNGNKTYFYGCSMKIYSKGTRCDNSNIRTTEMETVVINKLKSVTKNNGLLLKELNAVKEQLAPSKEETNELTLLNSKIKSNKQAIENLVKQLSLNSSSTASKYIIEEIEKKEEEIKQTESKMESLKEDKMEMNKLEIDLDLIISNLKNFYDTIDNVDIEKKKYLISVLVDKITWNGSTGEVDIKLWGSSKKK

SEQ ID NO: 29257 - DNA, 50 bp, Clostridium botulinum
  source 1..50: mol_type = genomic DNA
acttgcagtttgctatgtcaagcagatgcttgaactaccaaactgcaagt

SEQ ID NO: 29258 - DNA, 40 bp, Clostridium botulinum; identical to SEQ ID NO: 29253
  source 1..40: mol_type = genomic DNA

SEQ ID NO: 29259 - DNA, 40 bp, Clostridium botulinum; identical to SEQ ID NO: 29254
  source 1..40: mol_type = genomic DNA

SEQ ID NO: 29260 - DNA, 50 bp, Clostridium botulinum; identical to SEQ ID NO: 29255
  source 1..50: mol_type = genomic DNA

SEQ ID NO: 29261 - protein, 492 aa, Mycobacteroides abscessus
MKQQAKRALVVVRLSRVTDETTSPLRQREACFELCEQRGYEVIGTAEDLDISAGKTSPFDRPQLGDWLTNRRGEFDVLVTFRMDRIVRRLLDLADLIRWCQSNSVSLVSATETFLDLDSAFGDIIALLVAKVAEMELAAISERNRSAAQHNMRQGKYRGGPPPWGYTTEKVDGDWRFVQDEEQVTVINEVVRRVLDGEPLRQVAADLTDRAVLTPRDRVNQLKGRPIHGYRWHSAKLREMLTSKSLLGHAVTANGSIRNDDGSPIIRATPILERDVFEQVQVELAGRENRKEPTKRSSSLLLRVLYCGVCGKPAYKLKGGKGRQDRYRCASAQYKSTCGNGMVLVADANEVLTDAVMFELGDKYRRDRVWDAGSDYAAELAEIDDTLADLTDQLGTGAFRKGTRQRERLDARIADLAERQAQLAAQATRPAGWTWVPTTELFKDWWKSQTVEQLNLWLRSMDIQMWWNHQGIQTDMLHLEKMAEQWSNPAIG

SEQ ID NO: 29262 - DNA, 50 bp, Mycobacteroides abscessus
  source 1..50: mol_type = genomic DNA
gggctgtaaaagttgataatggaatattccacgagtatcatttacaacca

SEQ ID NO: 29263 - DNA, 40 bp, Mycobacteroides abscessus
  source 1..40: mol_type = genomic DNA
cgcgatagtcccgatcgcgtactcgaccgtggacatgcca

SEQ ID NO: 29264 - DNA, 40 bp, Mycobacteroides abscessus
  source 1..40: mol_type = genomic DNA
cgcgatagtcccgatcgcgaactcgaccgtggacatgcca

SEQ ID NO: 29265 - DNA, 50 bp, Mycobacteroides abscessus
  source 1..50: mol_type = genomic DNA
gggttgaaatgaaggataatggaaaaatccactacttgtgtttgctactt

SEQ ID NO: 29266 - protein, 492 aa, Mycobacteroides abscessus
MKQQAKRALVVVRLSRVTDETTSPLRQREACFELCEQRGYEVIGTAEDLDISAGKTSPFDRPQLGDWLTNRRGEFDVLVTFRMDRIVRRLLDLADLIRWCQSNSVSLVSATETFLDLDSAFGDIIALLVAKVAEMELAAISERNRSAAQHNMRQGKYRGGPPPWGYMPEKVDGDWRFVHDDEQVKVINEVVRRVLDGEPLRQVAADLTDRAVLTPRDRVNQLKGREIRGYSWHSAKIREMLTSKSLLGHAVTANGSIRNDDGSPIIRATPILERDVFEQVQVELAGRENRKEPTKRSSSLLLRVLYCGVCGKPAYKLKGGKGRQDRYRCASAQYKSTCGNGMVLVADANEVLTDAVMFELGDKYRRDRVWDAGSDYAAELAEIDDTLADLTDQLGTGAFRKGTRQRERLDARIADLAERQAQLAAQATRPAGWTWVPTTELFKDWWKSQTVEQLNLWLRSMDIQMWWNHQGIQTDMLHLERMAEQWSNPAIG

SEQ ID NO: 29267 - DNA, 50 bp, Mycobacteroides abscessus; identical to SEQ ID NO: 29262
  source 1..50: mol_type = genomic DNA

SEQ ID NO: 29268 - DNA, 40 bp, Mycobacteroides abscessus
  source 1..40: mol_type = genomic DNA
tggcatgtccacggtcgagtacgcgatcgggactatcgcg

SEQ ID NO: 29269 - DNA, 40 bp, Mycobacteroides abscessus
  source 1..40: mol_type = genomic DNA
tggcatgtccacggtcgagaacgcgatcgggactatcgcg

SEQ ID NO: 29270 - DNA, 50 bp, Mycobacteroides abscessus; identical to SEQ ID NO: 29265
  source 1..50: mol_type = genomic DNA

SEQ ID NO: 29271 - protein, 492 aa, Mycobacteroides abscessus; identical to SEQ ID NO: 29261

SEQ ID NO: 29272 - DNA, 50 bp, Mycobacteroides abscessus; identical to SEQ ID NO: 29262
  source 1..50: mol_type = genomic DNA

SEQ ID NO: 29273 - DNA, 40 bp, Mycobacteroides abscessus; identical to SEQ ID NO: 29268
  source 1..40: mol_type = genomic DNA

SEQ ID NO: 29274 - DNA, 40 bp, Mycobacteroides abscessus; identical to SEQ ID NO: 29269
  source 1..40: mol_type = genomic DNA

SEQ ID NO: 29275 - DNA, 50 bp, Mycobacteroides abscessus; identical to SEQ ID NO: 29265
  source 1..50: mol_type = genomic DNA

SEQ ID NO: 29276 - protein, 491 aa, Mycobacteroides abscessus
MKQQAKRALVVVRLSRVTDETTSPLRQREACFELCEQRGYEVIGTAEDLDISAGKTSPFDRPQLGDWLTNRRGEFDVLVTFRMDRIVRRLLDLADLIRWCQSNSVSLVSATETFLDLDSAFGDIIALLVAKVAEMELAAISERNRSAAQHNMRQGKYRGGPPPWGYMPEKVDGDWRFVHDDEQVKVINEVVRRVLDGEPLRQVAADLTDRAVLTPRDRVNQLKGREIRGYSWHSAKIREMLTSKSLLGHAVTANGSIRNDDGSPIIRATPILERDVFEQVQVELAGRENRKEPTKRSSSLLLRVLYCGVCGKPAYKLKGGKGRQDRYRCASAQYKSTCGNGMVLVADANEVLTDAVMFELGDKYRRDRVWDAGSDYAAELAEIDDTLADLTDQLGTGAFRKGTRQRERLDARIADLAERQAQLAAQATRPAGWTWVPTTELFKDWWKSQTVEQLNLWLRSMDIQMWWNHQGIQTDMLHLEKMAEQWSPALS

SEQ ID NO: 29277 - DNA, 50 bp, Mycobacteroides abscessus; identical to SEQ ID NO: 29262
  source 1..50: mol_type = genomic DNA

SEQ ID NO: 29278 - DNA, 40 bp, Mycobacteroides abscessus; identical to SEQ ID NO: 29263
  source 1..40: mol_type = genomic DNA

SEQ ID NO: 29279 - DNA, 40 bp, Mycobacteroides abscessus; identical to SEQ ID NO: 29264
  source 1..40: mol_type = genomic DNA

SEQ ID NO: 29280 - DNA, 50 bp, Mycobacteroides abscessus; identical to SEQ ID NO: 29265
  source 1..50: mol_type = genomic DNA

SEQ ID NO: 29281 - protein, 490 aa, Mycobacteroides abscessus
MKQRAKRALVVVRLSRVTDETTSPLRQREACFELCEQRGYEVIGTAEDLDISAGKTSPFDRPQLGDWLTNRRGEFDVLVTFRMDRIVRRLLDLADLIRWCQSNSVSLVSATETFLDLDSAFGDIIALLVAKVAEMELAAISERNRSAAQHNMRQGKYRGGPPPWGYRPEKIDGDWRFVQDDEQVAVINEVVRRVLDGEPLRQVAADLSDRAVLTPRDRVNQLKGREIRGYSWHSAKIREMLTSKSLLGHAVTANGSIRNDDGSPIIRATPILERDVFEQVQVELAGRENRKEPTKRSSSLLLRVLYCGVCGKPAYKLKGGKGRQDRYRCASAQYKSTCGNGMVLVADANEVLTDAVMFELGDKYRRDRVWDAGSDYAAELAEIDDTLADLTDQLGTGAFRKGTRQRERLDARIADLAERQTQLAAQATRPAGWTWVPTTELFKDWWKSQTVEQLNLWLRSMDIQMWWNHQGIQTDMLHLERMAEQWSTPS

SEQ ID NO: 29282 - DNA, 50 bp, Mycobacteroides abscessus
  source 1..50: mol_type = genomic DNA
gggctgtaaaaattgataatggaatattccacgagtatcgtttacaacca

SEQ ID NO: 29283 - DNA, 40 bp, Mycobacteroides abscessus; identical to SEQ ID NO: 29263
  source 1..40: mol_type = genomic DNA

SEQ ID NO: 29284 - DNA, 40 bp, Mycobacteroides abscessus; identical to SEQ ID NO: 29264
  source 1..40: mol_type = genomic DNA

SEQ ID NO: 29285 - DNA, 50 bp, Mycobacteroides abscessus; identical to SEQ ID NO: 29265
  source 1..50: mol_type = genomic DNA

SEQ ID NO: 29286 - protein, 550 aa, Mesorhizobium opportunistum
MRRAAVYARFSTELQNEKSTEDQIALCRAYAARNGLAIVAVYEDKARSGSSILGRDALMRLMEAADQNAFDIVVVEALDRLSRDMADLAGLHKRLSFLDIEIQAVHDGIADAVLIGIRGLVGQMQREDGAKKVRRGMAGVVRDGRHAGGRAYGYRPVLGHPGELEIVQEEADVIRRIFAAYSAGRAPRDLAGDLNRDGIAPPRGIRWNGSTINGNAQRGVGLLFNELYVGRIVWNKVRMVKNPDTGKRVSRPNPKDQWQTKEVAHLRIIDDETWHKAQARKAVRVNATSHVKRRPAHLLSGLLRCGVCGSGLSVHDRDKTGKTRIRCSAVRESGSCSNRRIIYLPEIEKAVLDGMRDQLKAPDLIEAYIRRYNQERRELSAQANAMRTALQGKRDRIEGERQRTIDLVIRSVIAEEDAKQRIAELKTQLSEVEAQLSGLDEPPSPVALHPATLRRYIETVDGLSKALADHATAADDRGPLIQNLRGLVHSVTVHPKRAREGFEIEVKGKLAALIGGAAFPNARYTEKPTGLGSRFNAAVTYDSGLEVVAG

SEQ ID NO: 29287 - DNA, 50 bp, Mesorhizobium opportunistum
  source 1..50: mol_type = genomic DNA
tagtgggttggaagtggtagcgggagaccgctacatcgcgagacccacta

SEQ ID NO: 29288 - DNA, 40 bp, Mesorhizobium opportunistum
  source 1..40: mol_type = genomic DNA
taggtaggctggtagcgggagagggacttgaacccccgac

SEQ ID NO: 29289 - DNA, 40 bp, Mesorhizobium opportunistum
  source 1..40: mol_type = genomic DNA
taggtaggctggtagcggggaagggacttgaacccccgac

SEQ ID NO: 29290 - DNA, 50 bp, Mesorhizobium opportunistum
  source 1..50: mol_type = genomic DNA
tcctggtttgcctctggtttcagggaactgcttcatagtaggacccagta

SEQ ID NO: 29291 - protein, 582 aa, Brucella anthropi
MDTENTKPLAYSYVRMSTDMQLKGNSLERQKEKSKEYAIRHDLQLVENFEDIGVSAFKGKNIKEGMLGDFISLIENKTVPAGSYLLIESLDRLSRENIFESIPLFIKILKSGIKIVTLIDEQVYGAENADFKDLLYPMVVLSRAHEESVAKSFRVGKAWANKRKNIYQRKLTKVCPAWLKLNTDSNSFEVIPGRDDVVKRIFDLADSGYGSYSIGRILNNEAVPPFGEDSKGWHASYISRILNNRSVLGEFQPHRQVNGIAEPDGDTVPNYFPQLIDEEQFLRIKHARRKRQVEGAGRKGPVYRNLFSRIAKCAYCASPMRFVDKGPPPKGGQFLRCTNADRHFGCSASNWRYDHFENVFLYFVHELDLIETLKRADEQSERYTLEQKLVSINENIRGKRELLNTTFDMLQTSNASKDFIQSKIEEISSEILELENQKGAVEAKLEKDAALAPVDDQQIKSLIKELQDADDGDLERKRRVVANRLQMMIKSLTLAPDGLRKDAEKLVLSQFGSSEALFDFFETGALSGEVSTGMSFSVVLLDGIMRRVTVSRREPLKVIQLIAVDKHGLIIETEQTHESLKI

SEQ ID NO: 29292 - DNA, 50 bp, Brucella anthropi
  source 1..50: mol_type = genomic DNA
tttaaattaattagctcatatatcgagatgttgtggctaattaatttatc

SEQ ID NO: 29293 - DNA, 40 bp, Brucella anthropi
  source 1..40: mol_type = genomic DNA
gtccggcaagccgacaatggacatgcccatcttgcccggc

SEQ ID NO: 29294 - DNA, 40 bp, Brucella anthropi
  source 1..40: mol_type = genomic DNA
gtccggcaagccgacaatgaacatgcccatcttgcccggc

SEQ ID NO: 29295 - DNA, 50 bp, Brucella anthropi
  source 1..50: mol_type = genomic DNA
tttaaattaaaaatctcttaaaacaaaattttctaatttactaatttata

SEQ ID NO: 29296 - protein, 531 aa, Pseudomonas nitroreducens
MTSAQPLPRAFAEVFQGDDRINVYSYIRFSSKAQKLGFSEMRQIDQLNRFFEQYPQAQQVERYEDLGVSAFKGKNLKSGQLARFVERIKAKEIQPNSLLLVESFDRISRMGGYDALELIISIIQADCAIYTLFDNRLYSRRKTDSSADISLIQNILERANDESRSKSDRISDAKARNLLKGENGGIITKRCPFWISFADGKFVLNEHARAITRAVELCFDMGFQAIAKTLNDEIHPKKYTESIVGKFLRQPAIYGSFIAMEWDESGKPVQLKKEIKGYYPAVITEAEFHRISVKLQERQDPKLAGRKAAEFKNILRGLVYCVCGSGFRYHAQKSGYVDLVCSASLTGRCSAAKPGKGVRYRYARLEEIFLAYQAKIPFHRIIAKTEDIQALEKAHGEISGLLIQKEKALQNNFSILEKGSESAQKYILDRINEVSQELDQLKEQEQELSRRINTLHLASKSTLNVMEIYKLLLTEHGRMRVNNFLQGQSVKLIVTPIQKKYFYIDIFLGDEHIDRVHVTPDGYTAENKPSA

SEQ ID NO: 29297 - DNA, 50 bp, Pseudomonas nitroreducens
  source 1..50: mol_type = genomic DNA
attatactaatccatcctgtgattgcaatcactgaggattttagtagaaa

SEQ ID NO: 29298 - DNA, 40 bp, Pseudomonas nitroreducens
  source 1..40: mol_type = genomic DNA
ctccagcatcccgatcactgcgttcatgggagtgcggatc

SEQ ID NO: 29299 - DNA, 40 bp, Pseudomonas nitroreducens
  source 1..40: mol_type = genomic DNA
ctccagcatcccgatcactatgttcatgggagtgcggatc

SEQ ID NO: 29300 - DNA, 50 bp, Pseudomonas nitroreducens
  source 1..50: mol_type = genomic DNA
ataatattatatgtacatgtgtatatattcactgagaggtttagaagcaa

SEQ ID NO: 29301 - protein, 582 aa, Brucella anthropi
MDKKHAQPLAYSYVRMSTDMQLKGNSLERQKEKSKEYALRNDLHLVENFEDIGVSAFKGRNVKDGMLGEFISLIENKTVPSGSYLLIESLDRLSRENIFESIPLFIKILKSGIKIVTLIDEQVYGAENADFKDLLYPMIVLSRAHEESVAKSFRVGKAWANKRKNIHQRKLTKVCPAWLKLNTDSNSFEVIPGRDDIVKRIFDLADSGYGSYSIGRILNNEAVPPFGEDSKGWHASYISRILNNRSVLGEFQPHKLVNGTAQPDGDTVPDYFPQLIDEEQFLRIKHARRKRQVEGAGRKGPVYRNLFSRIAKCAYCASPMRFVDKGPPPKGGQFLRCTNAERHFGCSASNWRYDHFENVFLYFVHELDLIETLKRADEQSERYTLEQKLVSINENIRGKRELLNTTFDMLQTSNASKDFIQSKIEEISSEILELENQKGAVEAKLEKDAALAPVDDQQIKSLIKELQDADDGDLERKRRVVANRLQMIIKSLTLAPDGLRKDAEKLVLSQFGSSEALFDFFETGALSGEVSTGMSFSVVLLDGIMRRVTVSRREPLKVIQLIAVDKHGLIIETEQTHESLKI

SEQ ID NO: 29302 - DNA, 50 bp, Brucella anthropi
  source 1..50: mol_type = genomic DNA
cgataattaattagcccctatattgagatgttgtggctaattaatttatc

SEQ ID NO: 29303 - DNA, 40 bp, Brucella anthropi; identical to SEQ ID NO: 29293
  source 1..40: mol_type = genomic DNA

SEQ ID NO: 29304 - DNA, 40 bp, Brucella anthropi; identical to SEQ ID NO: 29294
  source 1..40: mol_type = genomic DNA

SEQ ID NO: 29305 - DNA, 50 bp, Brucella anthropi
  source 1..50: mol_type = genomic DNA
tgataataatatagaccccaaattaatattttattgtttgctaatttatc

SEQ ID NO: 29306 - protein, 483 aa, Priestia megaterium
MRTALYIRVSTEEQAKEGYSIRAQTERLKAYCLSQGWEIVDFYIDDGQSAKDMERTNLKRMIQHIEQGLIECVLVYKLDRLTRSVLDLYKLLEIFDAHGCKFKSATEVYDTTTAMGRMFITIVAALAQWERENLSERVRMGMEQKAREGQWVINMAPFGYELDKKNKSLIINDKEAAIVTRIFNMYLSGKGMKKIATELNAVNIPTKTGNTWSDNKIGYILKNPTYIGTIRYNYRVHNDQYFEVENAVPAIIDRVTFEKVQSVATARKKVHPKAATSEFIFSGTIKCAKCGAPFSGKYGYSKRGEKIHRPRSYYCSKQILGLCTQRNISERFIEHHFLKYLQDIEIDQDQIKNVEPTNEQKDIQEQIMLLEKDLRAIEQRRKKWQYAWVNNMIDDDDFAARMEEENQTEVKTQEELNNIQPVTNAMDPVEFKTILKDIRTNWNSLTAIEKKMMLQMLVKKIVVDKISPKPKVDSVEIIEIEFN

SEQ ID NO: 29307 - DNA, 50 bp, Priestia megaterium
  source 1..50: mol_type = genomic DNA
cattgtcctattatcataacagaatgttctgtcatgataataggacgctt

SEQ ID NO: 29308 - DNA, 40 bp, Priestia megaterium
  source 1..40: mol_type = genomic DNA
catcgttgtcaaaaccaagtgtccggtaagcgctgctctc

SEQ ID NO: 29309 - DNA, 40 bp, Priestia megaterium
  source 1..40: mol_type = genomic DNA
catcgttgtcaaaaccaagtttccggtaagcgctgctctc

SEQ ID NO: 29310 - DNA, 50 bp, Priestia megaterium
  source 1..50: mol_type = genomic DNA
cattctcctgggaacataacagatttttatggcatttcttcagcttgttt

SEQ ID NO: 29311 - protein, 553 aa, Blautia producta
MARIRKEKAQENEKKKWFFGKYERLSKEDLLKGDSRSIQSQDMTLDNYLDGLILNGEDITIVDTYKDDGTSGMYDSRSEFQRTIMDIENGRINALIVCDLSRMFRNDADQKHYLEYYFRERKIRIISCSLPQLDTYKEPDRVFSMDVKFQAMSNANMPLENSLKIKDKLATRRKCGLYVGSFAPYGYKKDTENKNQLLVDDNVSDVIKDIYNWFVYESMSIRRIVERLNELGIVNPTEYKKQQGSNFKNTSVDNCGLWCEGTVRNILTREYYIGNMDQHHSKTVFTQERKRTVALEDDDVNEIVENTHEAIIDKHTYELAKRLLERDRRTAPTKKHSYLFSGFLVCGDCGKAMVAKKAKNNSYYYCSTYTKRSKTACTKHTFREDQLQEAVLKVIQLQIALAVNMSKQVDRINQTEKVNHSSKRIEDLLKATQTSLQKQQNVQDNLYIDWKNGDITREQHNRLRSKTEDKIENFKQTINQLWQEKKVLESNLKDSNNFLETFCKYQNIKTLDSKILIELVNKIYIYENKTIDVKFNFRDEYKLTLEFIENNKL

SEQ ID NO: 29312 - DNA, 50 bp, Blautia producta
  source 1..50: mol_type = genomic DNA
agttttcctaaaatcaatgcaccagttggtacatatattttaggaaaacc

SEQ ID NO: 29313 - DNA, 40 bp, Blautia producta
  source 1..40: mol_type = genomic DNA
ggtggctccatcggctccggttggccccgttgctcccgtt

SEQ ID NO: 29314 - DNA, 40 bp, Blautia producta
  source 1..40: mol_type = genomic DNA
ggtggctccatcggctccgaatggccccgttgctcccgtt

SEQ ID NO: 29315 - DNA, 50 bp, Blautia producta
  source 1..50: mol_type = genomic DNA
aatattccttttactcattcaccaaatggtacatattaataaggctgtcc

SEQ ID NO: 29316 - protein, 574 aa, Yersinia rohdei
MTKLQLHVYTRISKTSQQEGSGLDEQLTRINSYIDDKKYLFDLNTIQYWQDVGVSAFKNKNIEDGSALGELLDKISTGVIGTGHALVVYSLDRLSRRSNWDEYIIQQIVKSGCVIHDVSTPIVLDRNDPMSKIIMELIISRANNESKIKSERSLSGWAAKVAHSIKTGAALTKHTPSWLRIDNGKYEVVEAEVKTIKYIFHDYIIVGLSAAMIAKKLNDSGDYVRRWRSNSVVKMLNDERLLGTLTRYREKTKIDNFYPAVIDIDIFLQAKNLLNINSSGQSKSRVAKSGGLHNIITGFTRCGCCGSKVTTTVNGKRQRFIKCRKRLDYLNCGAKSIKLVNFEQVVFQHLKQLDLSKIFKESNDDYERENLKLELASLQVDEKTIIDTIETRKLEKKKVSIQLLDGLTEIQDQIDDINESIQKKSNNNSTLDIGSIDISQLMNPDNIEIRMKLRKFIMLILNTVTFKQISKEHMLFEFNYKNKVLKHIIITDKKIENVLHEISIEGDDESHITYRIGAGTFIITEDVSANTVHLVGLTDTTSYFVLVNYIGSLGKNELVDFMFNEEIIDLYTTK

SEQ ID NO: 29317 - DNA, 50 bp, Yersinia rohdei
  source 1..50: mol_type = genomic DNA
gtgtgtgtagtattgcctagtgccttggttgcatggtatgctacacatat

SEQ ID NO: 29318 - DNA, 40 bp, Yersinia rohdei
  source 1..40: mol_type = genomic DNA
caaacgcagcaccgcggctttggttttgaagttacgcccg

SEQ ID NO: 29319 - DNA, 40 bp, Yersinia rohdei; identical to SEQ ID NO: 29318
  source 1..40: mol_type = genomic DNA

SEQ ID NO: 29320 - DNA, 50 bp, Yersinia rohdei
  source 1..50: mol_type = genomic DNA
ttgtgtgtatttgagttgagtgcattgggtgcatgtttgtatatacatgt

SEQ ID NO: 29321 - protein, 516 aa, Vibrio parahaemolyticus
MSNNKALAFLYIRFSTKKQEQGDSIRRQIDAAEAWCKEKDIELSAQTFEDLGVSAFKEGGKRPALEDMLFAIEQGRIPRNSYLLLEDHDRLSRRGWLHTQTLVHKVVKLGVKIVMLRSRTVYDQSNINNISDNIMLMFSADRAFQESERKSQLIKASRNNARNNREVTGKLPAWIARNGDEFIFNDKLTTIQDLIDCKLSGKSHQATAKHLNSLGMTTGSGSVWSASGVRAIIQNHALYGAKAYFDTGADGRMNAKPIEIVSDIFPQLISFQQYQSLNVKKASGRTSKRGAFTQLLKCGRCGSAMTTRSSNYKGQPRTYKMCVRATEGSCSQVERVREPERYLNDVLRKLTYQISKGAYVSRTGEYEKQLETLNETKDKLISLGLTDALTDVYVDMNRVRELIEDSKIADQANIEPDVDFAYVCDIENIEERNTELRKLLSKIVFYCISKRGQTSQWKVVIHQVNGFTISFLLDQQYGFGNTNVKFVADKQQYIKDTQVDMYAWEDEYAEATLGNV

SEQ ID NO: 29322 - DNA, 50 bp, Vibrio parahaemolyticus
  source 1..50: mol_type = genomic DNA
gtgcattgtaatgaacatgttactaaagtactatacagattatgatgcac

SEQ ID NO: 29323 - DNA, 40 bp, Vibrio parahaemolyticus; identical to SEQ ID NO: 4428
  source 1..40: mol_type = genomic DNA

SEQ ID NO: 29324 - DNA, 40 bp, Vibrio parahaemolyticus; identical to SEQ ID NO: 28629
  source 1..40: mol_type = genomic DNA

SEQ ID NO: 29325 - DNA, 50 bp, Vibrio parahaemolyticus
  source 1..50: mol_type = genomic DNA
aggagttgtcgccaacatgtttctccagttctttgctgttcatgaagcac

SEQ ID NO: 29326 - protein, 555 aa, Streptomyces ipomoeae
MQPNLRYLACLRLSADSDGSTSIEWQRGVIRHHVSSPHLSGVLVGEAEDTDVSGSLSPFKRPKLGKWLTAKADEFDVIIAAKMDRLTRRSMHFNELLEWAQQNGKFIVCVEEGFDLSTPQGKMMARMTAVFAEAEWDTIQARILNGVQTRLENRSWLVGAPPTGYRIKTVEGGKRKILEIDQDFYPYVEEIFRRIREGQSTHRIARDFNGRSVLTWGDHLRKLKGEEPKGTQWQATIINKFIRSSWVPGLYTYKGEAVLDDQGDPVILPETPLATMDEWTDLVDRIKPAPKPEGATGGSRNSAKSLLSGVAHCGECGAPFTSLMDSGYKRKDGTKVPGHRRYRCSNKFKGGDCKNGSYVRADVLDSWVDQAIRDSIGQEDMYERAGKGPSQARELQETKARLAKLEADYESGKYDGEGQDESYWRMNKNLSAKVAHLAKQEAERANPTFKATGKKYGEVWEAKDQEDRRDFLRTYGVKVFVWGEGADKKDRGYAMNLGDIKTMAEELFPNRDRARFKLVHTHNAPEGYLSKIGIAVGLLKYGHPLEVKLRSPENS

SEQ ID NO: 29327 - DNA, 50 bp, Streptomyces ipomoeae
  source 1..50: mol_type = genomic DNA
gtgtgtgctttgccgactggcaaggtcaagccggtctgctaggcacagag

SEQ ID NO: 29328 - DNA, 40 bp, Streptomyces ipomoeae
  source 1..40: mol_type = genomic DNA
agacgtgcctaccggcaaggtcaagtggttcaacagcgag

SEQ ID NO: 29329 - DNA, 40 bp, Streptomyces ipomoeae
  source 1..40: mol_type = genomic DNA
agacgtgcctaccggcaagaacaagtggttcaacagcgag

SEQ ID NO: 29330 - DNA, 50 bp, Streptomyces ipomoeae
  source 1..50: mol_type = genomic DNA
ctgtgtgggccccgcactgggaagaatgagcctgtcatgatgtcacagag

SEQ ID NO: 29331 - protein, 573 aa, Pseudoclavibacter helvolus
MEQKTTATRAVLYARISEGDASTAKTENQLKAARALASRERYEVVAELDEGTASAYLPGVARPQFVELTRLVQTGSVDVVVAADQTRLTRTDAERAAFMKLCSDAGVQWHFSSTGVRHDLRNPSDALHSTVMGAFAAYESDLKRMRLAARFAARRADKLPLWGPRPFGFELDRVTLDETEAAELRKAYAAIVAGKTLTSVVRDWERRGIRTPLAQGKNPKRPPKRPGGNAYTVTTLKALLLRVRNVGVLEYEENGETKRIEGAWQPIVSADTFRRAHARLTNPDRKLKGGTTKRYLSAGLALCACGLVLRSGNGNGEAYLKCRPSYERRDPVAAASKVHSSIPMRLAEPFVMGALVRAICEAPMPDDAGELTGRELAVEDELIEARATVEALLDMLDAAGAVASQVQARIAAQGKRVEKLEAERDELAARRHGSLKDLRAEWYKRDPATGKTVVDWSGAATLADAVRAKLDSLSVKDQTELAREYVVVRLAPGRGKDRLSVEYLKSPQLNSEEMDAAELADAAFEADEERRIRRAASIHRLVVGYADALPSRVTFLPSGRVSKTAPPAQSQNS

SEQ ID NO: 29332 - DNA, 50 bp, Pseudoclavibacter helvolus
  source 1..50: mol_type = genomic DNA
tatggtgcgtttgtaagttcaggcatgcctgaagtagcgttgagaccatg

SEQ ID NO: 29333 - DNA, 40 bp, Pseudoclavibacter helvolus
  source 1..40: mol_type = genomic DNA
gatcgcgctgaacagcggcatgcccgggatgtgcagcatc

SEQ ID NO: 29334 - DNA, 40 bp, Pseudoclavibacter helvolus
  source 1..40: mol_type = genomic DNA
gatcgcgctgaacagcggccagcccgggatgtgcagcatc

SEQ ID NO: 29335 - DNA, 50 bp, Pseudoclavibacter helvolus
  source 1..50: mol_type = genomic DNA
gttgctgtgtggacaagctcaggccagcctgcagtgggcaagagaccact

SEQ ID NO: 29336 - protein, 490 aa, Aeromonas media
MASAILYSRFSSSQQSSGDSLRRQLEAAQKFCSLHGLELSETTFQDLGISGWKDVKRDGLERLIEAVESGAIPNDSYILVEHTDRLSRQGWQAVSDLVKRLVDTGCSFVTIDNGVIYNKETFKNFTGAIPILIAADLAVMESEKKSERLRAVKTNKRNNRVIQGNQPFWITVTDGKPYLNDKAPLARRIVDMSLSGKRPLAIVREFNTEGLESINGGIWQVAVIRNILKNTILYGAKTYFESRDGKYEPVETVAGLYPKICSLQEFNQIKVVSSGQKGRKQIGPFSTILRCSCGRPLINKGKRNDDTYRVCAGVIDGTCTLKGYYRNIDDIIMSQLEYIEVPETKPSTVINNDARISELEQLLIDLEAMRVENKGKPRVLQMVFDSIDEAEKELQELQSIVVVDTQIDLKSVVSIEDVDKQNMILRSIIRNISCKKISNTKTHVRIDFKTGFTKGFMIDQGRKIDGYAINWKSDSERLLKEMESLGVEEE

SEQ ID NO: 29337 - DNA, 50 bp, Aeromonas media
  source 1..50: mol_type = genomic DNA
attttgggaaatagaacaaacatcaccttgtttattcctttccccaaatg

SEQ ID NO: 29338 - DNA, 40 bp, Aeromonas media; identical to SEQ ID NO: 20063
  source 1..40: mol_type = genomic DNA

SEQ ID NO: 29339 - DNA, 40 bp, Aeromonas media
  source 1..40: mol_type = genomic DNA
gatgggggcaatcagcatcatcttgttgatcatccagacg

SEQ ID NO: 29340 - DNA, 50 bp, Aeromonas media
  source 1..50: mol_type = genomic DNA
atttttggaaaaataaggaatataatgatgttgattccctgcccctaatg

SEQ ID NO: 29341 - protein, 492 aa, Aeromonas rivipollensis
MIMASAILYSRFSSSQQSSGDSLRRQLEAAQKFCSLHGLELSETTFQDLGISGWKDVKRDGLERLIEAVESGAIPNDSYILVEHTDRLSRQGWQAVSDLVKRLVDTGCSFVTIDNGVIYNKETFKNFTGAIPILIAADLAVMESEKKSERLRAVKTNKRNNRVIQGNQPFWITVTDGKPYLNDKAPLARRIVDMSLSGKRPLAIVREFNTEGLESINGGIWQVSVIRNILKNTILYGAKTYFESRDGKYEPVETVAGLYPKICSLQEFNQIKVVSSGQKGRKQIGPFSTILRCSCGRPLINKGKRNDDTYRVCAGVIDGTCTLKGYYRNIDDIIMSQLEYIEVPETKPSTVINNDARISELEQLLIDLEVMRVENKGKPRVLQMVFDSIDEAEKELQELQSIVVVDTQIDLKSVVSIEDVDKQNMILRSIIRNISCKKISNTKTHVRIDFKTGFTKGFMIDQGRKIDGYAINWKSDSERLLKEMESLGVEEE

SEQ ID NO: 29342 - DNA, 50 bp, Aeromonas rivipollensis; identical to SEQ ID NO: 29337
  source 1..50: mol_type = genomic DNA

SEQ ID NO: 29343 - DNA, 40 bp, Aeromonas rivipollensis; identical to SEQ ID NO: 20063
  source 1..40: mol_type = genomic DNA

SEQ ID NO: 29344 - DNA, 40 bp, Aeromonas rivipollensis; identical to SEQ ID NO: 29339
  source 1..40: mol_type = genomic DNA

SEQ ID NO: 29345 - DNA, 50 bp, Aeromonas rivipollensis; identical to SEQ ID NO: 29340
  source 1..50: mol_type = genomic DNA

SEQ ID NO: 29346 - protein, 554 aa, Streptomyces scabiei
MQPNLRYVACLRLSADSDGSTSIEWQRGVIRHHVSSPHLSGVLVGEAEDTDVSGSMSPFKRPRLGRWLTKRADEFDVIIAAKMDRLTRRSMHFNELLEWAQENGKYIVCVEEGFDLSTPQGKMMARMTAVFAEAEWDIIQARILNGVQTRLENRSWLTGAPPTGYKIVQVEGERRKIIERDESFWDYIEEIKTRVREKKQSTHRIARDFNKRGILTWSDHLRVLKGEETKGIQWQATIINKMIRSNWFAGIYTYKGEVVLDDNGDPYIMPEEPHATMEEWLELVDLIAPAPKPEGAPETRNGAASLLGGIAMDGHCAVPVTSLMGSGHTRKDGTKVPGHRYYRCNNKFKGGNCTEGLYIRADLLDMLVDHAIRDSIGQWDMYERAGKGPSQAKELQDTKARLEKLEGDYLAGKYDGEGQEESYWRMHKGLSGKIALLAKQEEERANPTIKATGKKYGEEWAAKDQEDRREFLRTYGVKVWVWNKGVNESEPGMIIDLGDIQTMAQELSLGKEDGMDRILISQNVPPHWTNPELRDFAGLTLEPVPEFLKDLKAA

SEQ ID NO: 29347 - DNA, 50 bp, Streptomyces scabiei
  source 1..50: mol_type = genomic DNA
gtgtgtgctttgccgactggcaaggtcaagccggttacttaggcacacag

SEQ ID NO: 29348 - DNA, 40 bp, Streptomyces scabiei
  source 1..40: mol_type = genomic DNA
agacgtgcctaccggcaaggtcaaatggttcaacagtgag

SEQ ID NO: 29349 - DNA, 40 bp, Streptomyces scabiei
  source 1..40: mol_type = genomic DNA
agacgtgcctaccggcaagaccaaatggttcaacagtgag

SEQ ID NO: 29350 - DNA, 50 bp, Streptomyces scabiei
  source 1..50: mol_type = genomic DNA
gtgagtgctgggtggattggcaagaccaagcctgggagctgggagtccag

SEQ ID NO: 29351 - protein, 673 aa, Vibrio splendidus
MKINEIKLSVSNVIPVVITYTRFSTNIQKEGLSEYRQDELTQRYVIDFCEAHGIPLNDIISLKDRGVSAYRGKNMTQGSLSELIKLFKSGDLPKVYNEKGEINTFFFIESLDRLTRSDLHTANKLFLDLVEYCNIVVVAENEQKVYSLNSLKSDMGMLDLFSALLTLSRSHNESRMKEMRHRENWSKKRQEVMDYFDAPKDKRQGLQYPLNPTKTCPWWLKPKSDDRGFEFIEENRKAMKFFLDRMLEGYGLTSSIRRLNDAITNGEFNVEFTKRQAVKKGFQTHTFYQTLTDDSNESLIGNLIFHKDYYPTEKDVQQGLYERKKLGKKVRIPVYTAKGFYPALLSDIELLMLRKMMGARKQSNTKPNKRIANIAQGILKCPKCGFSYVVNDDKRPGRHSNLVCSYSRSGKCNAYTYRVEYFEYNLLRYCRNINIGRVLGNQVDDSAVIKEVTKLQHKQYQLNLLKAQLQVDIDQLVSNISNITIPSLLEKVQHDYSKKEMQIQQYESQVKSIESDILAINMRHKRGSNTNDSIYELIDIVSEKKDVEKREKLNIEFKKIIKSMSLINKKDADNPFGLSFIRVVFIDGYSRFIPVDRKLVDSELFDFLPTLETEKLVGSIDYKKTVILPTDYLDGLESGKYPQLDGMAQYYQENPAKYLKLKHQIDQSQEIYE

SEQ ID NO: 29352 - DNA, 50 bp, Vibrio splendidus
  source 1..50: mol_type = genomic DNA
tgcggtgtttttcttttgattttgttaatagtaaaaagataatcatagca

SEQ ID NO: 29353 - DNA, 40 bp, Vibrio splendidus
  source 1..40: mol_type = genomic DNA
tgcaatgatcataaccttgttgatcatccaaaccatagcg

SEQ ID NO: 29354 - DNA, 40 bp, Vibrio splendidus; identical to SEQ ID NO: 29353
  source 1..40: mol_type = genomic DNA

SEQ ID NO: 29355 - DNA, 50 bp, Vibrio splendidus
  source 1..50: mol_type = genomic DNA
tgggatgataccattttcatttttttaattgtaaaatatgcatcatgtaa

SEQ ID NO: 29356 - protein, 553 aa, Flavonifractor plautii
MWQYDTINGKFIPGTLPAEGNITACYDRLSQEDELEGDSGSVVNQRDFLRKYCEEHHFQNVRHFSDDGYTGTNFDRPGFQEMMDLVERGRVTAIIVKDHSRLGRNRLLVGALMERFTEDYGVRYIAVTDNIDSAKGLDDMTAVRELFNEFYPRDTSKKIRAVFTSKGNSGQRLCTQVPYGYKGNKYGWEIDEEAAQVVREIFSLCMAGLGPMQISKRLKAAGVLTPTAYKLEKGLSVTHKPTADPCGWDHRAVVKILERMEYLGCTVNFKTRKKSYKSKKMLYLPPEEWKVFPDTHPAIIDRETWERVQELRKHKRRPTKAGKRGLFSGLAYCADCMSKLYFATHKGSTEDQDHYVCSNYKSNTGSCTIHYIREKVLTALVLAHLQATIAYVQADENGFIRLVMDKDAQEQRRELARKKAELTKAEKRVTELDSLFQRVYEDHATGKLTEERYNRLSGSYEAEQRELEARVAELRRELAKGQEEAVNVSHFVELVRKYTEVRELTPTIVNEFIKMVIVHAPSKVNGKRFQPVQIVYNLVGEITIPGTMDSKTA

SEQ ID NO: 29357 - DNA, 50 bp, Flavonifractor plautii
  source 1..50: mol_type = genomic DNA
ttacttccttatggggccccggcttttgtctgtgtcccataaggaagtag

SEQ ID NO: 29358 - DNA, 40 bp, Flavonifractor plautii
  source 1..40: mol_type = genomic DNA
aacaaaagggcctctgccattcggcagaggccctttcctc

SEQ ID NO: 29359 - DNA, 40 bp, Flavonifractor plautii
  source 1..40: mol_type = genomic DNA
aacaaaagggcctctgccacacggcagaggccctttcctc

SEQ ID NO: 29360 - DNA, 50 bp, Flavonifractor plautii
  source 1..50: mol_type = genomic DNA
tttcttactctctaggagccggctcaggtgtctctccctccaggaagtgg

SEQ ID NO: 29361 - protein, 520 aa, Enterobacter sp Crenshaw
MKKAVYCYARVSSRGQAKDGYGMSRQQEMLRDYVAAYDDSQHNRGYELGDISWLYAEGVSAYSGKNIEDGSVLKTFIDDVLQKKITNSVLVIENLDRFSRAAPNRAAGLFLSLINAGCDIHEVETEMIHHQYSDLNIISGGLQRAHNESKRKARLSIKNWDERIKNTIDGTSVLTHRVPSWIEVKNNKYVLKKGESEKYNLIFKMYADGFGPAAIRDELKKRGMQINEREPTINHLMKIIKDQRLIGRFNSTGRKILDGMSIYPVVVEPELFEAVNDLRKQRNPLGKINVKANNLFAGLCICMNCGRYVQVNSVDKKGDTYFRCGGSLVKIDKCKERGFKYKIVENALLEHLRNFDFSMLRSDDNDIQVKINYLSMELVSNEKYSNEILADLEKEDIPDPNDRRILKNIQRRISEIRNEITILKQSNIGYETFNDLKDSYTDDLLDPKNTKLRLDFNVKVKRVIKNIKMKRYDNTIMLVVSYVGVNEKQAMVINSKTGAVVFMAVQNDDLKSIEYLINNN

SEQ ID NO: 29362 - DNA, 50 bp, Enterobacter sp Crenshaw
  source 1..50: mol_type = genomic DNA
tacagtaatttactgttgataatcactatgatatactgcttattactgtt

SEQ ID NO: 29363 - DNA, 40 bp, Enterobacter sp Crenshaw; identical to SEQ ID NO: 6063
  source 1..40: mol_type = genomic DNA

SEQ ID NO: 29364 - DNA, 40 bp, Enterobacter sp Crenshaw
  source 1..40: mol_type = genomic DNA
cgcaatgatgccaatgaccatcatcagctcaatgagtgtg

SEQ ID NO: 29365 - DNA, 50 bp, Enterobacter sp Crenshaw
  source 1..50: mol_type = genomic DNA
tgaagtaattataagttgacaataatttttatattctataaatttctgtg

SEQ ID NO: 29366 - protein, 552 aa, Vibrio harveyi
MKKLLIEYHRVSDPTQLAKTGMAQQKAPSELIEKLCREHNLEVFPTVFDDRGISAFKGTKVRNGYEELKELLASGEVHPESVLVVLNQDRLSRQAVFDAQVELMGILKHCRIYVMHDNRLMDRNSENIMGDLILSLANAQRAFSESDAKSKRTKGAVLNKIKAHQNGVRGVTGKPINLGMGKLPWWYSSDPVTKEIEPIEEAVAAARAAVELFIKGESVYGVKRYLDEHHQLPEKLSKKAKNGWSIDVVRRMHKSPNLVGEFSISVDGVEHQVTEYLEPIIDRKTYLKFLSVRGSKSTPRRSKDEAVALFSGLGHCRGCGGTLTNLSDKGRISLRCTNALNRRVACPSPVSITGNWFKDYMVNVVLRYLGTKQTTRPVNSEADLKLLDQQIAKSEQKLEQLLEVLVASPSEALGKLVQSQEQQLLQLQTHRDDLEMKVVTEVFDPIEKMPENDPELRDALLRLIKDMRVSRIGRGTVLVSIFTKNDINVSVAFKSGVLLREGYLSGTSDGDAQFIDDAQFHKFVADGELDLWLKEPTDSPVLSASELSSIFD

SEQ ID NO: 29367 - DNA, 50 bp, Vibrio harveyi
  source 1..50: mol_type = genomic DNA
aattgtagttataggattttaagtacgtctaaaatcctctagtttcaatt

SEQ ID NO: 29368 - DNA, 40 bp, Vibrio harveyi; identical to SEQ ID NO: 1328
  source 1..40: mol_type = genomic DNA

SEQ ID NO: 29369 - DNA, 40 bp, Vibrio harveyi; identical to SEQ ID NO: 1329
  source 1..40: mol_type = genomic DNA

SEQ ID NO: 29370 - DNA, 50 bp, Vibrio harveyi
  source 1..50: mol_type = genomic DNA
ctttgtatttccgatattttaagtttgtctattattttcccatttcaatc

SEQ ID NO: 29371 - protein, 552 aa, Vibrio owensii; identical to SEQ ID NO: 29366

SEQ ID NO: 29372 - DNA, 50 bp, Vibrio owensii; identical to SEQ ID NO: 29367
  source 1..50: mol_type = genomic DNA

SEQ ID NO: 29373 - DNA, 40 bp, Vibrio owensii
  source 1..40: mol_type = genomic DNA
tgttgcaacggctttcggtacgtctaagttgttttcgaaa

SEQ ID NO: 29374 - DNA, 40 bp, Vibrio owensii
  source 1..40: mol_type = genomic DNA
tgttgcaacggctttcggtttgtctaagttgttttcgaaa

SEQ ID NO: 29375 - DNA, 50 bp, Vibrio owensii; identical to SEQ ID NO: 29370
  source 1..50: mol_type = genomic DNA

SEQ ID NO: 29376 - protein, 534 aa, Pseudomonas syringae
MKQAISYIRFSSARQEGGSSVERQEGMIAKWLLDHEDYELSKLNYSDLGKSGFHGEHVKEGGNFGKLLKAVMDGYIKRDDVVLVEAIDRTGRLPALQMLSDVIAPILRAGVSIITLDDNTTYTEASVGGPHLFMLVAKIQAAHEYSRTLSRRVEDSYKKRRKDAKEKGVAPKRMTPVWLNSDGTVREDVAPWIKTAFELYISGVGKSTIAKRLRESGVERLAKASGPGVEGWLRNKAVIGKWETLIGTPEHHVIDDVYPLIIEPSLFYKAQVHAEKMKTQRPVKTANHFLVGLVRCGECEKNYIVQNLHGKPHSMRCRTRQSQNDCTNSHCVPKPILDAIYRYTSVTAAVEAVQQQQMGVNEKEIVTREAELLTLAKRVEGLAEAVKQAGPMPELIEALKQSRIAREAAENALVILRSTVICPAGTGWNEMGKVWKLEADDAQRLAAMLRMVGYHITVQTTGEITSSHSDVLYRYIGVDRALDKYKLLVNGKLTLIPKGYVDDYPYHEPFQEVVGEATMDEADRENLLLQYQGS

SEQ ID NO: 29377 - DNA, 50 bp, Pseudomonas syringae
  source 1..50: mol_type = genomic DNA
cagtgttacttacaaaaaccttgctcccaacgttttcacatgtaacactg

SEQ ID NO: 29378 - DNA, 40 bp, Pseudomonas syringae; identical to SEQ ID NO: 28478
  source 1..40: mol_type = genomic DNA

SEQ ID NO: 29379 - DNA, 40 bp, Pseudomonas syringae
  source 1..40: mol_type = genomic DNA
catgccaatcaggccctggatccagcctttaatgacgcga

SEQ ID NO: 29380 - DNA, 50 bp, Pseudomonas syringae
  source 1..50: mol_type = genomic DNA
cagtgtttctttgctaagccttgcatgcaaaatttgaaattttaacattg

SEQ ID NO: 29381 - protein, 452 aa, Listeria monocytogenes
MKAAIYIRVSTQEQIENYSIQAQTEKLTALCRSKDWDVYDIFIDGGYSGSNMNRPALNEMLSKLHEIDAVVVYRLDRLSRSQRDTITLIEEYFLKNNVEFVSLSETLDTSSPFGRAMIGILSVFAQLERETIRDRMVMGKIKRIEAGLPLTTAKGRTFGYDVIDTKLYINEEEAKQLQMIYDIFEQEKSITSLQKRLKNLGFKVKSYSSYNNWLTNDLYCGYVSYADKVHTKGVHDPIISEEQFYRVQEIFSRMGKNPNMNRDSASLLNNLVVCSKCGLGFVHRRKDTVARGKKYHYRYYSCKTYKHTHELEKCGNKIWRADKLEELIIDRVNNYSFASRNVDKEDELDSLNEKLKIEHTKKKRLFDLYISGSYEVSELDTMMTDIDAQINYYEAQIEANEELKKNKKIQENLADLATVDFDSLEFREKQLYLKSLINKIYIDGEQVTIEWL

SEQ ID NO: 29382 - DNA, 50 bp, Listeria monocytogenes
  source 1..50: mol_type = genomic DNA
tttagtccctcgttctctctcgttggagggagaaaaaacgaggaggaaaa

SEQ ID NO: 29383 - DNA, 40 bp, Listeria monocytogenes; identical to SEQ ID NO: 1298
  source 1..40: mol_type = genomic DNA

SEQ ID NO: 29384 - DNA, 40 bp, Listeria monocytogenes
  source 1..40: mol_type = genomic DNA
tttcggatcaagctatgagccacgcaaagagggaactaaa

SEQ ID NO: 29385 - DNA, 50 bp, Listeria monocytogenes
  source 1..50: mol_type = genomic DNA
ttaagtctcactctcttcttcgtgcctggtagaaaaagtatgaaggaaaa

SEQ ID NO: 29386 - protein, 522 aa, Roseburia hominis; identical to SEQ ID NO: 2566

SEQ ID NO: 29387 - DNA, 50 bp, Roseburia hominis; identical to SEQ ID NO: 2562
  source 1..50: mol_type = genomic DNA

SEQ ID NO: 29388 - DNA, 40 bp, Roseburia hominis
  source 1..40: mol_type = genomic DNA
cgtggtgcgcgctttctgttctgccgccatatcttcaaaa

SEQ ID NO: 29389 - DNA, 40 bp, Roseburia hominis
  source 1..40: mol_type = genomic DNA
cgtggtgcgcgctttctgtcgtgccgccatatcttcaaaa

SEQ ID NO: 29390 - DNA, 50 bp, Roseburia hominis
  source 1..50: mol_type = genomic DNA
cgtagtcatcgcggatttgcaccccgtggggtggtgcacacagaacaaca

SEQ ID NO: 29391 - protein, 522 aa, Roseburia hominis; identical to SEQ ID NO: 2566

SEQ ID NO: 29392 - DNA, 50 bp, Roseburia hominis; identical to SEQ ID NO: 2562
  source 1..50: mol_type = genomic DNA

SEQ ID NO: 29393 - DNA, 40 bp, Roseburia hominis
  source 1..40: mol_type = genomic DNA
cgttgaccgggctttctgttctgcagcgagatcttcgaac

SEQ ID NO: 29394 - DNA, 40 bp, Roseburia hominis
  source 1..40: mol_type = genomic DNA
cgttgaccgggctttctgtcgtgcagcgagatcttcgaac

SEQ ID NO: 29395 - DNA, 50 bp, Roseburia hominis; identical to SEQ ID NO: 29390
  source 1..50: mol_type = genomic DNA

SEQ ID NO: 29396 - protein, 522 aa, Anaerobutyricum hallii; identical to SEQ ID NO: 2566

SEQ ID NO: 29397 - DNA, 50 bp, Anaerobutyricum hallii; identical to SEQ ID NO: 2562
  source 1..50: mol_type = genomic DNA

SEQ ID NO: 29398 - DNA, 40 bp, Anaerobutyricum hallii
  source 1..40: mol_type = genomic DNA
ggtggagcgtgccttctgttctgctgccagatcttcaaac

SEQ ID NO: 29399 - DNA, 40 bp, Anaerobutyricum hallii
  source 1..40: mol_type = genomic DNA
ggtggagcgtgccttctgtcgtgctgccagatcttcaaac

SEQ ID NO: 29400 - DNA, 50 bp, Anaerobutyricum hallii; identical to SEQ ID NO: 29390
  source 1..50: mol_type = genomic DNA

SEQ ID NO: 29401 - protein, 522 aa, Blautia massiliensis; identical to SEQ ID NO: 2571

SEQ ID NO: 29402 - DNA, 50 bp, Blautia massiliensis; identical to SEQ ID NO: 2562
  source 1..50: mol_type = genomic DNA

SEQ ID NO: 29403 - DNA, 40 bp, Blautia massiliensis; identical to SEQ ID NO: 29398
  source 1..40: mol_type = genomic DNA

SEQ ID NO: 29404 - DNA, 40 bp, Blautia massiliensis; identical to SEQ ID NO: 29399
  source 1..40: mol_type = genomic DNA

SEQ ID NO: 29405 - DNA, 50 bp, Blautia massiliensis; identical to SEQ ID NO: 29390
  source 1..50: mol_type = genomic DNA

SEQ ID NO: 29406 - protein, 522 aa, Roseburia intestinalis; identical to SEQ ID NO: 2566

SEQ ID NO: 29407 - DNA, 50 bp, Roseburia intestinalis; identical to SEQ ID NO: 2562
  source 1..50: mol_type = genomic DNA

SEQ ID NO: 29408 - DNA, 40 bp, Roseburia intestinalis
  source 1..40: mol_type = genomic DNA
ggtggtgcgggctttctgctccgcagccatatcttcaaaa

SEQ ID NO: 29409 - DNA, 40 bp, Roseburia intestinalis
  source 1..40: mol_type = genomic DNA
ggtggtgcgggctttctgccgcgcagccatatcttcaaaa

SEQ ID NO: 29410 - DNA, 50 bp, Roseburia intestinalis; identical to SEQ ID NO: 29390
  source 1..50: mol_type = genomic DNA

SEQ ID NO: 29411 - protein, 522 aa, Blautia wexlerae; identical to SEQ ID NO: 2571

SEQ ID NO: 29412 - DNA, 50 bp, Blautia wexlerae; identical to SEQ ID NO: 2562
  source 1..50: mol_type = genomic DNA

SEQ ID NO: 29413 - DNA, 40 bp, Blautia wexlerae
  source 1..40: mol_type = genomic DNA
agtagaacgggctttttgctctgcagcaagatcctcgaac

SEQ ID NO: 29414 - DNA, 40 bp, Blautia wexlerae
  source 1..40: mol_type = genomic DNA
agtagaacgggctttttgccgtgcagcaagatcctcgaac

SEQ ID NO: 29415 - DNA, 50 bp, Blautia wexlerae; identical to SEQ ID NO: 29390
  source 1..50: mol_type = genomic DNA

SEQ ID NO: 29416 - protein, 522 aa, Blautia wexlerae; identical to SEQ ID NO: 2566

SEQ ID NO: 29417 - DNA, 50 bp, Blautia wexlerae; identical to SEQ ID NO: 2562
  source 1..50: mol_type = genomic DNA

SEQ ID NO: 29418 - DNA, 40 bp, Blautia wexlerae; identical to SEQ ID NO: 29413
  source 1..40: mol_type = genomic DNA

SEQ ID NO: 29419 - DNA, 40 bp, Blautia wexlerae; identical to SEQ ID NO: 29414
  source 1..40: mol_type = genomic DNA

SEQ ID NO: 29420 - DNA, 50 bp, Blautia wexlerae; identical to SEQ ID NO: 29390
  source 1..50: mol_type = genomic DNA

SEQ ID NO: 29421 - protein, 522 aa, Coprococcus comes; identical to SEQ ID NO: 2571

SEQ ID NO: 29422 - DNA, 50 bp, Coprococcus comes; identical to SEQ ID NO: 2562
  source 1..50: mol_type = genomic DNA

SEQ ID NO: 29423 - DNA, 40 bp, Coprococcus comes
  source 1..40: mol_type = genomic DNA
cgtcgtcctggctttctgttctgcggccatatcttcatgt

SEQ ID NO: 29424 - DNA, 40 bp, Coprococcus comes
  source 1..40: mol_type = genomic DNA
cgtcgtcctggctttctgtcgtgcggccatatcttcatgt

SEQ ID NO: 29425 - DNA, 50 bp, Coprococcus comes; identical to SEQ ID NO: 29390
  source 1..50: mol_type = genomic DNA

SEQ ID NO: 29426 - protein, 522 aa, Ruminococcus gnavus; identical to SEQ ID NO: 2566

SEQ ID NO: 29427 - DNA, 50 bp, Ruminococcus gnavus; identical to SEQ ID NO: 2562
  source 1..50: mol_type = genomic DNA

SEQ ID NO: 29428 - DNA, 40 bp, Ruminococcus gnavus
  source 1..40: mol_type = genomic DNA
agtcgtacgggctttttgttctgcagcgaggtcttcatga

SEQ ID NO: 29429 - DNA, 40 bp, Ruminococcus gnavus
  source 1..40: mol_type = genomic DNA
agtcgtacgggctttttgtcgtgcagcgaggtcttcatga

SEQ ID NO: 29430 - DNA, 50 bp, Ruminococcus gnavus; identical to SEQ ID NO: 29390
  source 1..50: mol_type = genomic DNA

SEQ ID NO: 29431 - protein, 504 aa, Mycobacterium kansasii
MRVLGRLRLSSATEASTSIERQREIIRQWADVGGHTIAGWATDVNVSGSLDPFETPQLGDWLKNRAPEFDIVACWKLDRLGRNAIRLNHLFGWCLEHDKSVVSCSESIDLGTPVGRLIANVIGFLAEGELEAIRERTRSSNAKLRELGRWGGGKVPYGYKSVRREGGGYSLEIDNEAADVVRRIVDEFLAGRPLAHIADGLNRDGIPPSEVYRGRSSEQSWHVSSIRNKLRSKALLGYAHHRGETVRDDAGEPIAYAEPLISLDEWNRIQAMLDSNQARRTGAKPTKGLLTGLIVCHFCEEPMYYQPSKARGKLYRYYQCASRKHTAISADDLESLVEQEFLEAFGDKLIRERVLVPGESHEAELREAVTAFDELSATAGRMTSATTKQRLQRQLEALDVKIAKLESAPVREAHYEYRETGQTYRQVWEALDSQGKAAQLAKSGITLAVGIQIEGRRSKYNGGSYRCEIRTPDGWPVSEPVELPNYPDMDARIAALEARRAGSG

SEQ ID NO: 29432 - DNA, 50 bp, Mycobacterium kansasii
  source 1..50: mol_type = genomic DNA
gtttcggaaagactggtgacccgactgctggtcgtcagctattccgaaac

SEQ ID NO: 29433 - DNA, 40 bp, Mycobacterium kansasii
  source 1..40: mol_type = genomic DNA
cgttcgggagctgacccgcctgctggtcgctagccgtaat

SEQ ID NO: 29434 - DNA, 40 bp, Mycobacterium kansasii
  source 1..40: mol_type = genomic DNA
cgttcgggagctgacccgcttgctggtcgctagccgtaat

SEQ ID NO: 29435 - DNA, 50 bp, Mycobacterium kansasii
  source 1..50: mol_type = genomic DNA
ttttgggaagctgaggtgagcggattgcttgaggtcaggagttccggacc

SEQ ID NO: 29436 - protein, 487 aa, Corynebacterium glutamicum
MTLRAAIYARISLDRKDEAGVKRQAHLATKLAEAEEATIVAEYTDNNASAFSGAYRPEYENLLKSIEAGELDVVYVYALDRLTRRTKDTLALFELCEKHNVRIKATQGYSIDPSDPSSRIIIVILGLIAEQESIDRAARIRASYVDRARVGRPKTGGRRMLGYEADAETIIETEAQAIRDAAVMILAGKTLRETVREIFKARGITATSGRDMTAPTLRDILLNPRVQGISTFNPTDPVTGYRLIRDRQIIGPGQWPAIIDEATGEKLDAVLRDPSRRRSHAGNAPTRYLASVLTCTCGDPMYSRTRAREDGSRKRYYACGRGIPGGTHVTIGDEVDSLIERVIIGRMSKPDGLELLQQSLSTNKDSTETEELQELVSQRNALLARLELLEDSLVDGEIGVDAFTRLEKKIAEQLTGIDDRLQNLTSARSADPLAAELIGVKDFAQWWVGASVEDKRRLTRILMDIHILPGTHGAKKFDPTRVQVTWH

SEQ ID NO: 29437 - DNA, 50 bp, Corynebacterium glutamicum
  source 1..50: mol_type = genomic DNA
cgtacccacttcccttgttctgttaataacgaatgtggtttgtgggtacg

SEQ ID NO: 29438 - DNA, 40 bp, Corynebacterium glutamicum
  source 1..40: mol_type = genomic DNA
cggcgctactggcagcggaaaatccgaacttttaagaaca

SEQ ID NO: 29439 - DNA, 40 bp, Corynebacterium glutamicum
  source 1..40: mol_type = genomic DNA
cggcgctactggcagcggaatatccgaacttttaagaaca

SEQ ID NO: 29440 - DNA, 50 bp, Corynebacterium glutamicum
  source 1..50: mol_type = genomic DNA
cgtacccaactcctttgttctgttattggcaaatgtattaaatagctata

SEQ ID NO: 29441 - protein, 605 aa, Bacteroides stercoris
MKKKAAIYARVSTDRQEYQRQIKELQSFAERSNMEVKYVFEEKQSGFNSERPEYNKLMALTKEDIDIVLLWELSRLSRKSIEIQSDIEKLTSKGINVYIHNKSLYTLDEQGNINPTTKLIISIVATIAEDEVRTSKQRSKSARQQYIINEGRSYTSHAPYGYTLKNKKLFINEKEANLVRRVYQLCIDGYSIYGIAVLLNSEGLRTRANVLWTQATINSMFKNTVYIGKPKYCISSVRRTSKVFTRQYSRKVLEYVTLDRPELAIISEAIYDKAAEERKKRRHRSLAIDIQPYLLQHLFKCPDCNRYYTFDRTTKRQKYKCARKYDKTVEKPTCQSPALERERVEFMIWESVKYYCIETMANTRKEEQQLPLLEEIDALKAKIENIDNMKQKIVKKAEIIVTAAIDLKIHYSNMPELYNKKMEEVDKLNKEAIKLDYERKRYKSQIENAKSQIDAINNVKDMSQYLKDVDFDTKYNLLHEVVDVILPYGTKDNCFLLEVRLKTGLKYYIGYYPIRAYYIQFLPSKGNYFVGEERSGYLEIINAKSCEHISLETEMKKYTIVEYINQMDIPANRYPALPYRLKKRDKFLKDMLQGYSKEQLLEMLQ

SEQ ID NO: 29442 - DNA, 50 bp, Bacteroides stercoris
  source 1..50: mol_type = genomic DNA
tgtaggttctgcaagtgttaaatcaatatatatcatttgcagaacccaca

SEQ ID NO: 29443 - DNA, 40 bp, Bacteroides stercoris
  source 1..40: mol_type = genomic DNA
ggacggaaaatgcacgacaaatacgtccaaagtatcggag

SEQ ID NO: 29444 - DNA, 40 bp, Bacteroides stercoris
  source 1..40: mol_type = genomic DNA
ggacggaaaatgcacgacaggtacgtccaaagtatcggag

SEQ ID NO: 29445 - DNA, 50 bp, Bacteroides stercoris
  source 1..50: mol_type = genomic DNA
tgtagtttcttaaaaagttaaataggtatctatcatatgatgtaaccatt

SEQ ID NO: 29446 - protein, 597 aa, Pseudomonas gingeri
MTSRPKAYSYVRFSTPEQAKGDSRRRQYKAAIEYADRHDLELVKDSNYAFLDAGVSAYRGTNVNRVTSSLGRFYDYVKQGKIVSGSYLLVESLDRLSREQVTEALPRFLDLLNSGIVVVTFGDGTVYRKSAEPMQLVMSIFHMSRAHSESSVKGKRVSEAWQQKQSLARSKGLPLGAACPQWLSFDGEAYRVIADRAKTVRRVFDLTVQGYGQRAIVKLFNSEGVPVFGSENRNKSGLWGNSSIAKILANRSVLGEYQPNIWTEGQRRTSGEPIKGFYPAVIDEELYYAALDGRRSRDVSKITKTTSNFNVWAKIALCAYCKSPMHLVNKGAPPKGQKYLRCSKSAKGACINRSVRLDVSELVFKEMLAKLNMTSLIKDNAQLLRKRISELDGRLESARVKLVDMSALMESHPSRTLAEAAANIEGNMSKMEIELDQCKLDLSSEYVADKFDFFKKLDLVSYEGRYLANQQVQRLGVKVRIKHDDIRVQYGVMVGEFPKFFYMADHGQALLFVPFSSDLLRAGIRQNDLQATRFITKPGGMLKEALSDESMAAYKINVPGDIDVHQFQFSAADNEAANQKLLKMFVKQSRGGDKGAS

SEQ ID NO: 29447 - DNA, 50 bp, Pseudomonas gingeri
  source 1..50: mol_type = genomic DNA
ttgggtgttttgtcacacaacattagcaagttgtggtaaaatacacccaa

SEQ ID NO: 29448 - DNA, 40 bp, Pseudomonas gingeri
  source 1..40: mol_type = genomic DNA
acccggcggcccgctgaacagcaggttgtgggcgccggcg

SEQ ID NO: 29449 - DNA, 40 bp, Pseudomonas gingeri
  source 1..40: mol_type = genomic DNA
acccggcggcccgctgaacttcaggttgtgggcgccggcg

SEQ ID NO: 29450 - DNA, 50 bp, Pseudomonas gingeri
  source 1..50: mol_type = genomic DNA
ttgggggtggggagagacaacattttcaaattacagaaacgtgcacccat

SEQ ID NO: 29451 - protein, 495 aa, Coprococcus comes
MSLKYAYGYIRVSTHDQEEISPDSQEHLLRDYAAKNNIVILKIFTDLGISGRKADKRPGFQEMIGLAKGPDHPVDCILVWKFSRFARNQEESIVYKSLLKKQHNVDVISISEPLADGPFGSLIERIIEWMDEYYSIRLSGEVFRGMKENATRGAYQARPPLGYKVIERGKPPVIVPEEAAIVRMIFDKYVNGKMNFFDIARYLNSLGLKTSHGKAFERRSIEYIIQNPSYCGMIRWNRMENATNRIKDQDEWIIADGMQEAIISKELFDAAQERLKKIYKPVGKRPSSTYKHWLSGLLKCPVCGRTLTATTMKRANGEKYAYFSCYGYSKGKCDKPHGVSSLVIEKEVLKALEEALGSNSIVYEMREIHPQELSNERTLISERLASLKGKEDRIRASYREGIDTLEEYKENKALIAKERDSLERQLAELEENTPDKIPDDPTPKMLDRVSSVHDILVSDSYSLVQKNEALKQIIDKIVYDRESDTLKIHFFLYHS

SEQ ID NO: 29452 - DNA, 50 bp, Coprococcus comes
  source 1..50: mol_type = genomic DNA
ctttataggttgtgacaatttggtcaaccattttgccacaaccgataaag

SEQ ID NO: 29453 - DNA, 40 bp, Coprococcus comes
  source 1..40: mol_type = genomic DNA
ctttagaaccccattgggtcatccagttcggacactgaac

SEQ ID NO: 29454 - DNA, 40 bp, Coprococcus comes
  source 1..40: mol_type = genomic DNA
ctttagaaccccattgggttttccagttcggacactgaac

SEQ ID NO: 29455 - DNA, 50 bp, Coprococcus comes
  source 1..50: mol_type = genomic DNA
ctttacaggaataaaaaatatgatttaccttttctcatgttccgatcatg

SEQ ID NO: 29456 - protein, 495 aa, Coprococcus comes
MSLKYAYGYIRVSTHDQEEISPDSQEHLLRDYAAKNNIVILKIFTDLGISGRKADKRPGFQEMIGLAKGPDHPVDCILVWKFSRFARNQEESIVYKSLLKKQHNVDVISISEPLADGPFGSLIERIIEWMDEYYSIRLSGEVFRGMKENATRGAYQARPPLGYKVIERGKPPVIVPEEAAIVRMIFDKYVNGKMSFFDIARHLNSLGLKTSHGKAFERRSIEYIIQNPSYCGMIRWNRMENATNRIKDQDEWIIADGMQEAIISKELFDAAQERLKKIYKPVGKRPSSTYKHWLSGLLKCPVCGRTLTATTMKRANGEKYAYFSCYGYSKGKCDKPHGVSSLVIEKEVLKALEEALGSNSIVYEMREIRPQELSNERTLISERLVSLKGKEDRIRASYREGIDTLEEYKENKALIAKERNSLERQLAELEENTPDKILDDPTPKMLDRVSSVHDILVSDSYSLVQKNEALKQIIDKIVYDRESDTLKIHFFLYHS

SEQ ID NO: 29457 - DNA, 50 bp, Coprococcus comes; identical to SEQ ID NO: 29452
  source 1..50: mol_type = genomic DNA

SEQ ID NO: 29458 - DNA, 40 bp, Coprococcus comes; identical to SEQ ID NO: 29453
  source 1..40: mol_type = genomic DNA

SEQ ID NO: 29459 - DNA, 40 bp, Coprococcus comes; identical to SEQ ID NO: 29454
  source 1..40: mol_type = genomic DNA

SEQ ID NO: 29460 - DNA, 50 bp, Coprococcus comes; identical to SEQ ID NO: 29455
  source 1..50: mol_type = genomic DNA

SEQ ID NO: 29461 - protein, 441 aa, Streptomyces hirsutus
MAVIVEKDTSASTKRGAKRSDEWERVKALVEDGKADAIVSRHYDRMYRTPWDLEDLVDLAESTGVTLAAAQAQGVLDLSTPSGRLAARIGAVVARNETEMRVERQVLGHQRRRESGRPFWSTRPFGFERDGRHREAEAEALRQAYRDVLTGVSLWSIAKDWNARELLSPHGKEWRSSNLRGVLLKPRNAGIQTYSQWVEKPDGRRVRLTEETGAGNWEAIVSEDTFRALVRYLSDPGRNTGGGGKRKALLSGVVRCSKCQAVATQGWSKKNAAGERYRIYTCSGGRCITCPADALDSFVVRKVIDRAEEWNAAPATDAADEEREAELLGQEAASVERRTALAEMFAVGDIDASTLRTGIGRCDADLTKIRAELADLAAKRVRVDLGDVEYLWEELDYEDPDRIDHVRTVVMQVCERVELMPRGRGVRAFKAEHCRITFRNP

SEQ ID NO: 29462 - DNA, 50 bp, Streptomyces hirsutus
  source 1..50: mol_type = genomic DNA
tgaccgccttgacatgagtaggtgactcaccaagcatgtatgtcgttact

SEQ ID NO: 29463 - DNA, 40 bp, Streptomyces hirsutus
  source 1..40: mol_type = genomic DNA
gaaccacatggcataggtgaagtagacgtacacatggccg

SEQ ID NO: 29464 - DNA, 40 bp, Streptomyces hirsutus; identical to SEQ ID NO: 29463
  source 1..40: mol_type = genomic DNA

SEQ ID NO: 29465 - DNA, 50 bp, Streptomyces hirsutus
  source 1..50: mol_type = genomic DNA
agacagccttctgattagaagttgaaacagaaagcaacatagttgttact

SEQ ID NO: 29466 - protein, 555 aa, Bacillus siamensis
MELKNIVHSYNITNILGYLRRSRQDMEREKRTGEDTLTEQKELMNKILKSIEIPYELKMEIGSGESIEGRPVFKECLKDLEEGKYQAIAVKELTRLSRGSYSDAGQIVNLLQSKRLIIITPYKVYDPRNPADMRQIRFELFMAREEFEMTRERMTGAKYTYAAQGKWISGLAPFGYRLNKKTSKLVPVEEEAKVVQFIFNIFLNGLNGKDYSYTAIASHLTKLQIPTPSGKKRWNQYTIKAILQNEAYIGTVKYKVREKTKDGKRTMRPEKEQIVVPDAHAPIIDQEQFQQSQEKIANKVPLLPNKNTLELSELAGVCTCSKCGEPLSKYETKRTRENKNGTKSVYHVKSLSCKKNKCTYVRYNDVENAILDYLSSLNNLDNKTLTKHIISMISKYEDGNNNVKTKKQICEYLSQKEQELKNKENFIFEKYESGIYTDELFLKRKAVLDEEFEELQIAKNEVNGTQEAQIEIDSNTVRNNINKIIDQYHIESSTEKKNALLRMVFKDVIVNMTQKRKGPIPAQFEITPILRFNFSFSISPSLIVPQHAVNILKNR

SEQ ID NO: 29467 - DNA, 50 bp, Bacillus siamensis
  source 1..50: mol_type = genomic DNA
cagtaaatatcttaaaaaaccgataaagccgtttattaagatactgacta

SEQ ID NO: 29468 - DNA, 40 bp, Bacillus siamensis
  source 1..40: mol_type = genomic DNA
gattaatatcagtaccgataaagccgtttctccggtgaac

SEQ ID NO: 29469 - DNA, 40 bp, Bacillus siamensis
  source 1..40: mol_type = genomic DNA
gattaatatcagtaccgatagagccgtttctccggtgaac

SEQ ID NO: 29470 - DNA, 50 bp, Bacillus siamensis
  source 1..50: mol_type = genomic DNA
cagaaaatatacttaaaaaccaacagaagagtttttttttgtcctgatta

SEQ ID NO: 29471 - protein, 561 aa, Flavonifractor plautii
MFHQSNTAAALQFPYTAMSVEAITALYCRLSRDDELQGDSNSIINQKKILQKYALEHGYTNFRFYIDDGISGTTFNRPGFQEMIADVEAGIVKRVIIKDMSRFGRDYLQVGMYTEIMFPEHDVHFIAVNDGVDSTQGDNEFTPFRNIINEWYAKDTSKKIRAVMKVKGNAGEHLTTSAPYGYMKDPEDSKHWIPDREAADVVYEIGLYVMDGFGPSQIARKLRERKILTPAAYYESKGIPCNVKKQGDPYGWDNTTIAGIMDRWREYLGHTVNFKTTKKSYKSKKKIKNPESEWVIFENTHEPIWTEAIAEAVKQARQSRRRPTKMGEMGMFSGMMYCADCGSILYQCRATGFRKDQEYYICSGYRKGKQVCNTPHSIRTVILEELILQNLREIVSFARSHENRFVQMVMDMDVKERNKGLAKKRRLLSESKKRITELDMIFKRLYEDNISGKLTDERFHKLSTDYEAEQAGLQAQAAMLREEIEEAESKSANVDRFLSVVRQYTDIPELTPRILHEFVEKIVIHAATDPHSKINRRQEVDIYYKGIGILEMSKVFDSRQK

SEQ ID NO: 29472 - DNA, 50 bp, Flavonifractor plautii
  source 1..50: mol_type = genomic DNA
atgttttcttaactggacacccctaatggtagcaccagataagaaaacat

SEQ ID NO: 29473 - DNA, 40 bp, Flavonifractor plautii
  source 1..40: mol_type = genomic DNA
ccaagaaaaaagggcgcccaatcgggcgtcctttttcttg

SEQ ID NO: 29474 - DNA, 40 bp, Flavonifractor plautii
  source 1..40: mol_type = genomic DNA
ccaagaaaaaagggcgccctgtcgggcgtcctttttcttg

SEQ ID NO: 29475 - DNA, 50 bp, Flavonifractor plautii; identical to SEQ ID NO: 7450
  source 1..50: mol_type = genomic DNA

SEQ ID NO: 29476 - protein, 561 aa, Anaerotruncus massiliensis
MFHQSNTAAALQFPYNAMSVEAVTALYCRLSRDDELQGDSNSIINQKKILQKYALEHGYTNFRFYIDDGISGTTFNRPGFQEMIADVEAGIVKRVIIKDMSRFGRDYLQVGMYTEIMFPEHDVHFIAVNDGVDSTQGDNEFTPFRNIINEWYAKDTSKKIRAVMKVKGNAGEHLTTNAPYGYMKDPDDSKHWIPDREAADVVYEIGLYVMDGFGPSQIARKLRERKILTPAAYYESKGIPCNVKKQGDPYGWDNTTIAGIMDRWREYLGHTVNFKTTKKSYKSKKKIKNPESEWVIFENTHEPIWTEAIAEAVKQARQSRRRPTKMGEMGMFSGMMYCADCGSILYQCRATGFRKDQEYYICSGYRKGKQVCGTPHSIRTVILEELILQNLREIVSFARSHENRFVQMVMDMDIKERNKGLAKKRKLLSEGEKRITELDMIFKRLYEDNISGKLTDERFHKLSTDYEAEQAGLQTQAAILREEIEEAEGKSANVDRFLSVVRQYTDIPELTPRILHEFVEKIIIHAATDPHSKINRRQEVDIYYKGIGILEMSKVFDSRQK

SEQ ID NO: 29477 - DNA, 50 bp, Anaerotruncus massiliensis; identical to SEQ ID NO: 29472
  source 1..50: mol_type = genomic DNA

SEQ ID NO: 29478 - DNA, 40 bp, Anaerotruncus massiliensis
  source 1..40: mol_type = genomic DNA
taaaaaagaagccctccgcaaggggggcttcttttttaga

SEQ ID NO: 29479 - DNA, 40 bp, Anaerotruncus massiliensis
  source 1..40: mol_type = genomic DNA
taaaaaagaagccctccgctgggggggcttcttttttaga

SEQ ID NO: 29480 - DNA, 50 bp, Anaerotruncus massiliensis; identical to SEQ ID NO: 7450
  source 1..50: mol_type = genomic DNA

SEQ ID NO: 29481 - protein, 561 aa, Intestinibacillus massiliensis
MFHQSNTAAALQFPYNAMSVEAITALYCRLSRDDELQGDSNSIINQKKILQKYALEHGYTNFRFYIDDGISGTTFNRPGFQEMIADVEAGIVKRVIIKDMSRFGRDYLQVGMYTEIMFPEHDVHFIAVNDGVDSTQGDNEFTPFRNIINEWYAKDTSKKIRAVMKVKGNAGEHLTTSAPYGYMKDPEDSKHWIPDREAADVVYEIGLYVMDGFGPSQIARKLRERKILTPAAYYESKGIPCNVKKQGDPYGWDNTTIAGIMDRWREYLGHTVNFKTTKKSYKSKKKIKNPESEWVIFENTHEPIWTEAIAEAVKQARQSRRRPTKMGEMGMFSGMMYCADCGSILYQCRATGFRKDQEYYICSGYRKGKQVCNTPHSIRTVILEELILQNLREIVSFARSHENRFAQMVMDMDVKERNKGLAQKRRLLSESKKRITELDMIFKRLYEDNISGKLTDERFHKLSTDYEAEQAGLQAQAAMLREEIEEAESKSANVDRFLSVVRQYTDIPELTPRILHEFVEKIVIHAATDPHSKINRRQEVDIYYKGIGILEMSKVFDSRQK

SEQ ID NO: 29482 - DNA, 50 bp, Intestinibacillus massiliensis; identical to SEQ ID NO: 29472
  source 1..50: mol_type = genomic DNA

SEQ ID NO: 29483 - DNA, 40 bp, Intestinibacillus massiliensis
  source 1..40: mol_type = genomic DNA
cgcaaaaaaggcggtggggaaacccaccgccttttttatg

SEQ ID NO: 29484 - DNA, 40 bp, Intestinibacillus massiliensis
  source 1..40: mol_type = genomic DNA
cgcaaaaaaggcggtggggtgacccaccgccttttttatg

SEQ ID NO: 29485 - DNA, 50 bp, Intestinibacillus massiliensis; identical to SEQ ID NO: 7450
  source 1..50: mol_type = genomic DNA

SEQ ID NO: 29486 - protein, 453 aa, Turicibacter bilis
MKVALYARVSTEQQIENYSIPLQKERIKAFCTSKGWNEVKEYIDAGYSGSHLNRPALEQLQKDIKNKKVNVVIVYRLDRLSRSQHDTLFLIEELFLPNHVEFISLSETLDTSTAFGRAAIGVLSVFAQLERETIIDRLWNCHRNMVRDEGLWAGSAAHVPYGYTRLNRGELVVNEEESKHIRRMFEAYVDLKSYAKVQAQLEKEGFNNIRLNRLIRILQNRLYLGEVSFAGEWFKGSHESIISPELFHQAQEVREKHKTKSYGTVKNKVFTGKVFCGCCGEEYRPYAVKYKLSTGESITRQDMMCKRRRLPARYDSKCINRKLTREEFEKEIFDRLHRLGTSGEIEFKHPVTHYEKQIERLDKKINKLLDLYMDDRLSKTSLDAKLADLNAQKEEQLAQAKAAEEEESEIKQFIKNGIPNLFECDLDTQTAMVDLFIHKIVVKEDGLQVIWNQ

SEQ ID NO: 29487 - DNA, 50 bp, Turicibacter bilis
  source 1..50: mol_type = genomic DNA
tttcggttttcagacagtagcgtcagtaagtgccccttttgaaaaccgaa

SEQ ID NO: 29488 - DNA, 40 bp, Turicibacter bilis
  source 1..40: mol_type = genomic DNA
aatacgtcttcccaattccagttgcagcaacgacaagccc

SEQ ID NO: 29489 - DNA, 40 bp, Turicibacter bilis
  source 1..40: mol_type = genomic DNA
aatacgtcttcccaattcccattgcagcaacgacaagccc

SEQ ID NO: 29490 - DNA, 50 bp, Turicibacter bilis
  source 1..50: mol_type = genomic DNA
tttgttttttttcccagaagcatccataagagcacccagcaaaaaatgaa

SEQ ID NO: 29491 - protein, 571 aa, Rhizobium favelukesii
MARQLSDGDIFPPNRNRETTEARRRRLSKPDAEVSPPMPRAERAALYLRVSGEKSVESNLSIPDQQEQLEKFCASKGWVVAAIYIEPGVSAKSTARSAFRRLILDAQAEVKPFDKILVHNTSRFARSHFDYERCEQILHHLDIEVLAISQTFSKDVGGWIAKRVTTLFDEYHSKRSAVDSIRARRKMVAQGYWPGSPPPYGYKLIPASENAQRKVLALAADESQLVEMIFSFVRCGDGNSAPMGVKAIAKWLNDRGFRTRNGARWSIQAIHRMLTNSVYYGVYYWGVSAQETDYQERQDPLPLNAPPIITREEFDAVQQTLEARDPKMGESRLMSSPMLLTGLAKCKCGASMTLGTGTGKCGRVYRYYRCSSDSRGQQKCSGPRIREDQLDRTIREVIRDIVLQEERLSELLARLQHRWVLRRQDTAGRVQELRGQVSTAESALRGLLEAAKTAPLINSQPVYRAELIRVSTELDTSRTLLSEALSTDSEFGEITPERIAYFRAEMENVIFGENAAISKIYIATIVESIVVGERFIMICGRDDDLRKAILDTTASDQSCGPGVRRYVRRWR

SEQ ID NO: 29492 - DNA, 50 bp, Rhizobium favelukesii
  source 1..50: mol_type = genomic DNA
ttcgtaggtatgtacgcagatggcggaccgcgaacgatgaaagcgggcat

SEQ ID NO: 29493 - DNA, 40 bp, Rhizobium favelukesii
  source 1..40: mol_type = genomic DNA
cttctttgaaagaaatggcggacagggtgggattcgaacc

SEQ ID NO: 29494 - DNA, 40 bp, Rhizobium favelukesii
  source 1..40: mol_type = genomic DNA
cttctttgaaagaaatggcagacagggtgggattcgaacc

SEQ ID NO: 29495 - DNA, 50 bp, Rhizobium favelukesii
  source 1..50: mol_type = genomic DNA
ttagtagtggtttctgcagatggaagacagcaaacgggggaagagtgcat

SEQ ID NO: 29496 - protein, 489 aa, Mycobacterium kansasii
MNAPKTAIYLRQSKDRDGNELAVHRQRDACLKLCREKKWHNTAQYIDNDRSASNGKRREDYQRMLTDIAAGRIGRVVVWDLDRLHRQPIELEHFMKLADDKHLALATVTGDVDLATDNGRLFARIKGAVGMAEVERKSARQKAAAEQLATTQVKVQGNEGARAWWAHRPFGYDADRDGDGKWWVYDVKRDRHNPIHKHPKESALLAEAYQEFNRGTALGTVAARWNKAGVTTPQGKPWSGTRVREVLLLARNAGLREYGGQLVIDKEGEAVKGAWPAIVTKEVWQAAREKINSNRGGPYRGRKYLLSGIARCGREGCGAALTSHISARGKLQYACLRCHKVSRSADKLDELIVAAVVGRLSRDDAVELLRPAVEEVDATALREQRRALHARLAQLGKDFVSAPPEFTQAALADINAKLADIDATLNDPGKAAVFEDVIGAPDVERAFNGLDLGRRRTIVDALMSITVNPVGKGTGGVWNPEAIDVAWRS

SEQ ID NO: 29497 - DNA, 50 bp, Mycobacterium kansasii
  source 1..50: mol_type = genomic DNA
gaaggttatagcgaacaccacacccctctgtggtgtggtaaattaccttc

SEQ ID NO: 29498 - DNA, 40 bp, Mycobacterium kansasii
  source 1..40: mol_type = genomic DNA
gaatgtggaccggatgacgccctgcacggtcttgccgtac

SEQ ID NO: 29499 - DNA, 40 bp, Mycobacterium kansasii
  source 1..40: mol_type = genomic DNA
gaatgtggaccggatgacgtcctgcacggtcttgccgtac

SEQ ID NO: 29500 - DNA, 50 bp, Mycobacterium kansasii
  source 1..50: mol_type = genomic DNA
gttttttataagacactgcacagctctttgtggtgctcattattaccttc

SEQ ID NO: 29501 - protein, 538 aa, Photobacterium leiognathi
MRQAVLYQRFSSTKQINNSSLFRQTEAQENWLKSNDDVVVIDRYVDEAMSGWTGKHLKKGSLGVLLQACKEKKIPKNTLILVEHFSRLSRMSISDTESLLREIWDYGITLVTVRDNQEYPPSTINNLEKRISLLLQIDSAYKESKWRSEKVKGSYEKRLNDAKKGIVPKIRKPFWLDTNGKLNEHSIIVKDIFNLYLKGYGQNYIIKHLRCTYPNFRPAQRINPSTMMQYMKKEIMIGKWKGVKIYDAVIDEKDFYEALNIRETKKFNNVSPNRNYPLSGLFRCTCCGAGMSIQKSNHAKPVIRCANRLRMKQCDRKKTFPYCVAHYYLMEFTLKRILIDISNNENSNNSSNELIELNSTLIKLRNEIKDLYEVYEDRKKEGKSLKAILNLIADTDDQIEDVEYKIKSKENELKHSTNNINDNVVKMIWDKETFNIAMHKLNIIFYIADDYIQAFFDDKPLSEKFYYDGYSRKNKIFKCRFIENKHEVSSFEDDFLELDLKAFTSKINNTVNLIKDRLKKLEDLNLTEKDYIKERNSL

SEQ ID NO: 29502 - DNA, 50 bp, Photobacterium leiognathi
  source 1..50: mol_type = genomic DNA
aatatgttcaatcaagctttaattgagctgttgacttgcttgcacatact

SEQ ID NO: 29503 - DNA, 40 bp, Photobacterium leiognathi
  source 1..40: mol_type = genomic DNA
ggtcgatcactgtaattgtgagctaaaagccagccaaacc

SEQ ID NO: 29504 - DNA, 40 bp, Photobacterium leiognathi
  source 1..40: mol_type = genomic DNA
ggtcgatcactgtaattgttggctaaaagccagccaaacc

SEQ ID NO: 29505 - DNA, 50 bp, Photobacterium leiognathi
  source 1..50: mol_type = genomic DNA
aaaattttaattaaatctttaatatggtagttaactatcatgcacataca

SEQ ID NO: 29506 - protein, 467 aa, Rhodococcus wratislaviensis
MTSTNNNTTTRTALYARISHDPTGEMLGCERQLKDDHALAAHLGWSVVGEYVDDDISAYTGAARPEYERLLDDIEAGEVDAIITWHPDRLYRRMVDLGRLIEVVDRAHCAIRTVKAGELDLTNPTGRMTAGILAQVAQHEVELKAERQSSGNQQKASAGKWTTRRRVFGYKFGGQEIEPAEAQAIRQAAIDVLSGTSTGEIARRWTKAGLRTTRKGNPWRSRDVVPVLRRPLYACRVMYRGQQLDVRGQWPQILDDETHLGLVALLDGRRQPRLKTRKYQGTGVYRCGKCGDDIDQVLECSASGNRGKVYRCPRLHLSRKQEVLDDYVSDIVVARLSRDDAHLLVETGSVDVPGLRAQRDALQARLVKLAAMFAAGDIDDAQLKAGSGQLHADQAKIDAQLAAQAQRDPVAELILAGDEVETNWGAMSADRRGKIIDLLMTVTVLPAPLGLRRFDPDYIDIQWKKES

SEQ ID NO: 29507 - DNA, 50 bp, Rhodococcus wratislaviensis
  source 1..50: mol_type = genomic DNA
atgagtgtttgggtctgttagttctgaaactgacacacccaaacacatcc

SEQ ID NO: 29508 - DNA, 40 bp, Rhodococcus wratislaviensis
  source 1..40: mol_type = genomic DNA
gggagtgggggtgttcttctgcacccagttgccgacggac

SEQ ID NO: 29509 - DNA, 40 bp, Rhodococcus wratislaviensis
  source 1..40: mol_type = genomic DNA
gggagtgggggtgttcttcttcacccagttgccgacggac

SEQ ID NO: 29510 - DNA, 50 bp, Rhodococcus wratislaviensis
  source 1..50: mol_type = genomic DNA
ataagtgtttttcacttttagttcttaaacataatctatggcccaaatcc

SEQ ID NO: 29511 - protein, 534 aa, Pseudomonas syringae
MQKLAFSYVRFSSLKQRHGDSLKRQTDMVANWLLANPEYKLSGETSYQDLGKSGFSGAHLDNAFGRLLAAIENGAIPKGSAILIEQIDRAGRMEPMEMLPLLSRIVNAGVDLVTLDDGITYDRASVNSNHLFLLVAKVQQAHQYSDSLSRRLRAAYQTKRAKAAAGEGATRRMPLWIRDGKLRDDIAPFVTQVFEDYAAGIGERRILGRLKGQHPDFETISPSTFRRWLRNPVAVGRWNDIEDVWPAVVSKELWFRVQKRLTDGVKPKAASSKYLLSGLVKCARCGKNYCVGGQKGALTMLCVSRHRFGSGAGGCTNKRSIPYAVFDFIRSQTAHAALVRASQSQNLTTSEKRQIEIDGELTELRKQSAHAAEGLVRYGMIKEITDVLDRVTAQIDQLEKERVLLQAVPAPVTMDDMVEVENDMLDDDIVKLNALLQGVGYQMVVDDRTITVHEASVFSDTDLHVFKFLGTDRALGTYRISLNGERLEDLPNLDSKVQQAAWATYIDEEAKYESGELARQELNFNPETCEIEPL

SEQ ID NO: 29512 - DNA, 50 bp, Pseudomonas syringae
  source 1..50: mol_type = genomic DNA
attccccaagctgcagatttctttgctatgataggcacagtgttatgatt

SEQ ID NO: 29513 - DNA, 40 bp, Pseudomonas syringae
  source 1..40: mol_type = genomic DNA
ttccagcatgccgatcaccgcattcatgggcgtgcggatt

SEQ ID NO: 29514 - DNA, 40 bp, Pseudomonas syringae
  source 1..40: mol_type = genomic DNA
ttccagcatgccgatcacctcattcatgggcgtgcggatt

SEQ ID NO: 29515 - DNA, 50 bp, Pseudomonas syringae
  source 1..50: mol_type = genomic DNA
tttccccaatttgctgttttccattctatggtaggctattatgtatggtt

SEQ ID NO: 29516 - protein, 543 aa, Pseudomonas syringae
MQKLAFSYVRFSSLKQRHGDSLKRQTDMVANWLLANPEYKLSGETSYQDLGKSGFSGAHLDNAFGRLLAAIENGAIPKGSAILIEQIDRAGRMEPMEMLPLLSRIVNAGVDLVTLDDGITYDRASVNSNHLFLLVAKVQQAHQYSDSLSRRLRAAYQTKRAKAAAGEGATRRMPLWIRDGKLRDDIAPFVTQVFEDYAAGIGERRILGRLKGQHPDFETISPSTFRRWLRNPVAVGRWNDIEDVWPAVVSKELWFRVQKRLTDGVKPKAASSKYLLSGLVKCARCGKNYCVGGQKGALTMLCVSRHRFGSGAGGCTNKRSIPYAVFDFIRSQTAHAALVRASQSQNLTTSEKRQIEIDGELTELRKQSAHAAEGLVRYGMIKEITDVLDRVTAQIDQLEKERVLLQAVPAPVTMDDMVEVENDMLDDDIVKLNALLQGVGYQMVVDDRTITVHEASVFSDTDLHVFKFLGTDRVLGIYRLSLNGERIEDIPNTESKVWKAGVAAYYEEEARYESGSLVREEFRLNAQTGEMELTNERYVGCTR

SEQ ID NO: 29517 - DNA, 50 bp, Pseudomonas syringae; identical to SEQ ID NO: 29512
  source 1..50: mol_type = genomic DNA

SEQ ID NO: 29518 - DNA, 40 bp, Pseudomonas syringae; identical to SEQ ID NO: 27443
  source 1..40: mol_type = genomic DNA

SEQ ID NO: 29519 - DNA, 40 bp, Pseudomonas syringae
  source 1..40: mol_type = genomic DNA
aatccgcaccccgatgaattcggtgatcggcatgctggag

SEQ ID NO: 29520 - DNA, 50 bp, Pseudomonas syringae; identical to SEQ ID NO: 29515
  source 1..50: mol_type = genomic DNA

SEQ ID NO: 29521 - protein, 505 aa, Enterobacter hormaechei
MTLAFSYARFSTKSQSTGTSLERQLNASRLFCSERGLTLSPKGYHDLGVSGFKQVKRPELEQMLQAIQSGDIPSGSYILIEAIDRLSRKGISHTQDVLKQILQYKVKVAFVGEDAKTLAGQVLDENSLNDLSSVILVALAADLAHKESVRKSKLVKAAKSIIRKKATEGHKVRGHTMFWIDWSDKKQDFVLNDRVKDVQKIIELRQQGQGPRKIAKTLNELGIKGPRGNLWNHMSVTIVLKSPVLYGAYQTHQIIDSKKVPDVLLENHYPSIITKEQFIQLQADSSKANKGRPSKANPFSGVLRCECGQAMLFSKRTNLDKDGEPLEYEYHFCIGSTEGRCKNKKRIRDLVPLLASLMDKLVINQTPKKNLNTEIIRATEQKIEKLNNMLVELDNPPMSVLKTIQKLEQELDILLNTHVEEPVQTDVQTLSTITDAQEYNQYLKRLVRQIVVYQKNGPKNLRIKVYKTDGHYQNFLVKNGKVLFKSDTKAMKELLDGFNKERREG

SEQ ID NO: 29522 - DNA, 50 bp, Enterobacter hormaechei
  source 1..50: mol_type = genomic DNA
tatgtcaataatgtaaaaaatttccgggatatgtttccattattgacatg

SEQ ID NO: 29523 - DNA, 40 bp, Enterobacter hormaechei
  source 1..40: mol_type = genomic DNA
tctgggcgccaacattttccgcgacttttttgccggcatt

SEQ ID NO: 29524 - DNA, 40 bp, Enterobacter hormaechei
  source 1..40: mol_type = genomic DNA
tctgggcgccaacattttcgccgacttttttgccggcatt

SEQ ID NO: 29525 - DNA, 50 bp, Enterobacter hormaechei
  source 1..50: mol_type = genomic DNA
tatatcaattctcaaaaaatgttggcacatatattttaacttctgacatg

SEQ ID NO: 29526 - protein, 501 aa, Enterobacter hormaechei
MTLAFSYARFSTKSQSTGTSLERQLNASRLFCSERGLTLSPKGYHDLGVSGFKQVKRPELEQMLQAIQSGDIPSGSYILIEAIDRLSRKGISHTQDVLKQILQYKVKVAFVGEDAKTLAGQVLDENSLNDLSSVILVALAADLAHKESVRKSKLVKAAKSIIRKKATEGHKVRGHTMFWIDWSDKKQDFVLNDRVKDVHKIIQLRQEGQGPRKIAKTLNELNIPGPRGNPWNHMTVTVVLRSPVLYGAYQTHQIIDGQKVPDVLLENHYPAVITQEEFVTIQADSSKSNKGRPSKANPFSGVLRCECGQAMLFSKRTNLNKDGEPLEYEYHFCLGYAEGRCKNNKRIRDLVPLLVQLMDKLVINQAPKKNLNVELIKQKEQKIEQLNKMLIELDSPPLSVLKTIQTLEAELDILLNTHVEEPVQADVQTLSSITDAQEYNQHLKRLVKKIVVYQKNGPKNLRIKVYKTDGHYQNFLVKDGTVLFKSDTKALKELIDGFNKA

SEQ ID NO: 29527 - DNA, 50 bp, Enterobacter hormaechei; identical to SEQ ID NO: 29522
  source 1..50: mol_type = genomic DNA

SEQ ID NO: 29528 - DNA, 40 bp, Enterobacter hormaechei; identical to SEQ ID NO: 21438
  source 1..40: mol_type = genomic DNA

SEQ ID NO: 29529 - DNA, 40 bp, Enterobacter hormaechei
  source 1..40: mol_type = genomic DNA
tctgggcgcaaacattttcgccgatttctttgccggcatt

SEQ ID NO: 29530 - DNA, 50 bp, Enterobacter hormaechei; identical to SEQ ID NO: 29525
  source 1..50: mol_type = genomic DNA

SEQ ID NO: 29531 - protein, 501 aa, Enterobacter cloacae
MTLAFSYARFSTKSQSTGTSLERQLNASRLFCSERGLTLSPKGYHDLGVSGFKQVKRPELEQMLQAIQSGDIPSGSYILIEAIDRLSRKGISHTQDVLKQILQYKVKVAFVGEDAKTLAGQVLDENSLNDLSSVILVALAADLAHKESVRKSKLVKAAKSIIRKKGTEGHKVRGHTMFWIDWSEKKQDFVLNDRVKDVHKIIQLRREGQGPRKIAKTLNELNIPGPRGNPWNHMTVTVVLRSPVLYGAYQTHQIIDGQKVPDVLLENHYPAVITQEEFVTIQADSSKSNKGRPSKANPFSGVLRCECGQAMLFSKRTNLNKDGEPLEYEYHFCLGYAEGRCKNNKRIRDLVPLLVQLMDKLVINQAPKKNLNVELIKQKEQKIEQLNKMLIELDSPPLSVLKTIQTLEAELDILLNTHVEEPVQADVQTLSSITDAQEYNQHLKRLVKKIVVYQKNGPKNLRIKVYKTDGHYQNFLVKDGTVLFKSDTKALKELIDGFNKA

SEQ ID NO: 29532 - DNA, 50 bp, Enterobacter cloacae; identical to SEQ ID NO: 29522
  source 1..50: mol_type = genomic DNA

SEQ ID NO: 29533 - DNA, 40 bp, Enterobacter cloacae; identical to SEQ ID NO: 21438
  source 1..40: mol_type = genomic DNA

SEQ ID NO: 29534 - DNA, 40 bp, Enterobacter cloacae; identical to SEQ ID NO: 29529
  source 1..40: mol_type = genomic DNA

SEQ ID NO: 29535 - DNA, 50 bp, Enterobacter cloacae; identical to SEQ ID NO: 29525
  source 1..50: mol_type = genomic DNA

SEQ ID NO: 29536 - protein, 489 aa, Bacillus cereus
MASIEDIRHVAIYLRLSRDEENKGVNEILSNHRKRLTELCDRNKWSYDLYQEIASGADRKRQQLEEMLVKVERNEYDAVVVHAVDRLGRDKKHTADIQEKLFVNDTFIVTPDRIFDWDDDNDMMLLDFNSLLAAQELRITKRRLQRGKLAASEKGLWVHGDPPLGYDKDPVTRKLVTNANAEHVTYIFKAIANGKTIPEICHELNEVMGVRTRTGKKFAYNSICRIVNNEVYTGTLVYNKYWKKRKERPKDEWKRIKNTHPAIIDEKTWAKVNEIVNTYSFSAPRSRNKIYPTTKLIFCGNCGKVQGTQMAHTGKMYIKICRYCKNRTFQYEPVLRHIKKELANHIPEILKDIKGLERNDNSAEMEYKKKQIQKQITKTATALDTIETMRIEGDLTPARYRERKTEYEEKMEQLHSELQEIEKQNPQEKIAGLKEKKLRIEYLLQNWQFLDGEGLTDEEVNRSLHFIIERIDWTYAKGDKQPTVEIEYK

SEQ ID NO: 29537 - DNA, 50 bp, Bacillus cereus
  source 1..50: mol_type = genomic DNA
aaataatccctaaaaaactacaaaacaaggttgtttggtggggactacag

SEQ ID NO: 29538 - DNA, 40 bp, Bacillus cereus; identical to SEQ ID NO: 24323
  source 1..40: mol_type = genomic DNA

SEQ ID NO: 29539 - DNA, 40 bp, Bacillus cereus; identical to SEQ ID NO: 24323
  source 1..40: mol_type = genomic DNA

SEQ ID NO: 29540 - DNA, 50 bp, Bacillus cereus
  source 1..50: mol_type = genomic DNA
aaacaatcctggtaatatgacaaaacaaggttgtttaacacccccaaaag

SEQ ID NO: 29541 - protein, 497 aa, Listeria monocytogenes
MISIKYQIKKYCLVLNRISSVKGISNMTVGIYIRVSTEEQAKDGYSISAQKEKLKAYCTAQEWVDFKFYVDEGKSAKDMNRPLLQEMITHVKKRLIDTVLVYKLDRLTRSVVDLHNLLSIFDEFNCAFKSATEVYDTSSAMGRFFITIISSVAQFERENTSERVSFGMAEKVRQGEYIPLPPFGYVKATDGKLIVNEVEKEIFLHVVDMISTGYSLRQTCEYLTNIGLKTRRSNDVWKVSTLIWMLKNPAVYGAIKWNNEIYENTHEPLIDKTTFDKLASILAIRSKSTTSRRGHVHHIFKSRLICPACGKRLSGLRTKYVNINKETFYNNNYRCATCKEHRRPAIQVSEQKIEKAFIDYISNYTLQKANSSSKKVDNNLRKQEMLQKEILSLQRKREKYQKAWAADLMNDDEFSKLMIDTKLEIEAAEIRKEEFDVSLFLSPEDIAKRNNILRELKINWTSLSPTEKTDFISMFIEGIEYVKDDKNKVLITKIRFL

SEQ ID NO: 29542 - DNA, 50 bp, Listeria monocytogenes
  source 1..50: mol_type = genomic DNA
tataggctttttgtcaaatatagagatgtgtactttacaaaaacactata

SEQ ID NO: 29543 - DNA, 40 bp, Listeria monocytogenes; identical to SEQ ID NO: 7183
  source 1..40: mol_type = genomic DNA

SEQ ID NO: 29544 - DNA, 40 bp, Listeria monocytogenes
  source 1..40: mol_type = genomic DNA
ttcaatgttactgtatccttttgtgtacctatagcccatc

SEQ ID NO: 29545 - DNA, 50 bp, Listeria monocytogenes
  source 1..50: mol_type = genomic DNA
tatatgatgaatcacagttatagatttgtgtattttgaagcaacattgca

SEQ ID NO: 29546 - protein, 518 aa, Cronobacter sakazakii
MKKAVYCYARVSSRGQAKDGYGMSRQQEMLRDYVAAYDDSLHNRGYELGSVNWLFAEGISAYSGKNIEDGSVLKSFIDDVLDRKIINAVLVIENLDRFSRAEPIKAANLFLNLITAGCDIHEVETETIHHSSSDLSIITGGLQRAHNESKRKARLSIKNWDERIKNAIDGKAVLTNRVPSWLEVKNNGYVIKEGEREKYNLIFQMYADGFGPAAIRDVLKERRMLINDSEPTIAHLNKIIKDERLIGKFNSTGRKKLSGLVIYPVVVDLSLFHIVDQLRKQRNPVGKIHRKANNLFAGLCICMECGRYVQVNSIEANGESYFRCGGSLVKIDRCQERGFKYKFFENALLQHIRNFDFSSLNANESKVQIRVNHLSMELLTHLKYKDEILQDIEKEDIPDPNDRRILKNLQNKIGEIESEISNLKHLNVNVSAFDELKQYSEELRDPTNVDIRLDFNIKIRRVIKNIIVKRYSDAIFLVVNYIAINEKQAIVINSKNGEILYMGVQNDDLKTVEHLIGN

SEQ ID NO: 29547 - DNA, 50 bp, Cronobacter sakazakii; identical to SEQ ID NO: 14307
  source 1..50: mol_type = genomic DNA

SEQ ID NO: 29548 - DNA, 40 bp, Cronobacter sakazakii; identical to SEQ ID NO: 5718
  source 1..40: mol_type = genomic DNA

SEQ ID NO: 29549 - DNA, 40 bp, Cronobacter sakazakii
  source 1..40: mol_type = genomic DNA
ggcgatgatgccgatcaccgacatcagttcaatgagtgta

SEQ ID NO: 29550 - DNA, 50 bp, Cronobacter sakazakii
  source 1..50: mol_type = genomic DNA
aacagtgataagccatgtaccattgacatgatatgcttagaatggcactt

SEQ ID NO: 29551 - protein, 518 aa, Cronobacter sakazakii
MKKAVYCYARVSSRGQAKDGYGMSRQQEMLRDYVAAYDDSLHNRGYELGSVNWLFAEGISAYSGKNIEDGSVLKSFIDDVLDRKIINAVLVIENLDRFSRAEPIKAANLFLNLITAGCDIHEVETETIHHSSSDLSIITGGLQRAHNESKRKARLSIKNWDERIKNAIDGKAVLTNRVPSWLEVKNNGYVIKEGEREKYNLIFQMYADGFGPAAIRDVLKERRMLINDSEPTIAHLNKIIKDERLIGKFNSTGRKKLSGLVIYPVVVDLSLFHIVDQLRKQRNPVGKIHRKANNLFAGLCICMECGRYVQVNSIEANGESYFRCGGSLVKIDRCQERGFKYKFFENALLQHIRNFDFSSLNANESEVQIRVNHLSMELLTHLKYKDEILQDIEKEDIPDPNDRRILKNLQKKIGEIESEISNLKHLNVNVSAFDELKQYSEELRDPTNVDIRLDFNIKIRRVIKNIIVKRYSDAIFLVVNYIAINEKQAIVINSKNGEILYMGVQNDDLKTVEHLIGN

SEQ ID NO: 29552 - DNA, 50 bp, Cronobacter sakazakii; identical to SEQ ID NO: 14307
  source 1..50: mol_type = genomic DNA

SEQ ID NO: 29553 - DNA, 40 bp, Cronobacter sakazakii; identical to SEQ ID NO: 6878
  source 1..40: mol_type = genomic DNA

SEQ ID NO: 29554 - DNA, 40 bp, Cronobacter sakazakii
  source 1..40: mol_type = genomic DNA
ggcgatgatgcctatcaccgacatcagttcaatgagtgta

SEQ ID NO: 29555 - DNA, 50 bp, Cronobacter sakazakii; identical to SEQ ID NO: 29550
  source 1..50: mol_type = genomic DNA

SEQ ID NO: 29556 - protein, 518 aa, Cronobacter sakazakii; identical to SEQ ID NO: 29551

SEQ ID NO: 29557 - DNA, 50 bp, Cronobacter sakazakii; identical to SEQ ID NO: 14307
  source 1..50: mol_type = genomic DNA

SEQ ID NO: 29558 - DNA, 40 bp, Cronobacter sakazakii
  source 1..40: mol_type = genomic DNA
ggcgatgatccctatcaccaccatcagttcaatgagtgta

SEQ ID NO: 29559 - DNA, 40 bp, Cronobacter sakazakii
  source 1..40: mol_type = genomic DNA
ggcgatgatccctatcaccgacatcagttcaatgagtgta

SEQ ID NO: 29560 - DNA, 50 bp, Cronobacter sakazakii; identical to SEQ ID NO: 29550
  source 1..50: mol_type = genomic DNA

SEQ ID NO: 29561 - protein, 554 aa, Vibrio cholerae
MFTKNVSVKLKKYHLYQRVSKQVQAEEGLGIQRQEQVCEHWISEYNNRLVSEGKSVYSKGFIYEDRGKSAYTAANFNKGELGTLINDIKNGKIEKGDLIVIELIDRFSRANVDFVRGEFQRILDAGVKIAITKWNLVFEENMESVSSVTGRILLEIGMYLAYQESSQKSSRIKASRKLLEDSGRKSIAKPPFWLARNLDLKSYTIIEENAEIIRNIFDLKLNFNYGAQKIIKKIGDLEIYRYSFDENGNLIKTTKNSPLNESSINAYLRNQNVIGKLKGKNYYPRIIDDRTFYAVQRRTRENTGGVGDIFRNVFVGVGKCGCLIRKENENGCGSLAKCGYIMAFSSRKVKNPTKGMYLKCNRKRKSTRCDAENINYYLAQNKIYNVLKSLKFDIEQSVDISHLEEKIISIDKSMSKIREYMTQYSDDEEWEKQYNIKRIEREKIENEIKASKSRITGRLSNLDMDFSEEKDRVLFNQFLKDNRITVYFTKDRMEIIIGSLNNFSIKCGYNDNEREIDQLVESISQKGFVGLETISRGSEGKELLRFKLPTVSDS

SEQ ID NO: 29562 - DNA, 50 bp, Vibrio cholerae
  source 1..50: mol_type = genomic DNA
atgttgtcaaagatgcaattgactaatgacaactatatgataagctacat

SEQ ID NO: 29563 - DNA, 40 bp, Vibrio cholerae
  source 1..40: mol_type = genomic DNA
tggcaagccgcagttggcaaaggaaacgtaggggccacgc

SEQ ID NO: 29564 - DNA, 40 bp, Vibrio cholerae
  source 1..40: mol_type = genomic DNA
tggcaagccgcagttggcatgggaaacgtaggggccacgc

SEQ ID NO: 29565 - DNA, 50 bp, Vibrio cholerae
  source 1..50: mol_type = genomic DNA
agagggtcattttcgcaaataacttgtcacaaatatggaagaagccacat

SEQ ID NO: 29566 - protein, 554 aa, Vibrio cholerae
MFTKNVSVKLNKYHLYQRVSKQVQAEEGLGIQRQEQVCEHWISEYNNRLVSEGKSVYSKGFIYEDRGKSAYTAANFNKGELGTLINDIKNGKIEKGDLIVIELIDRFSRANVDFVRGEFQRILDAGVKIAITKWNLVFEENMESVSSVTGRILLEIGMYLAYQESSQKSSRIKASRKLLEDSGRKSIAKPPFWLARNLDLKSYTIIEENAEIIRNIFDLKLNFNYGAQKIIKKLGNLEIYRYSFDENGNLIKTTKNSPLNESSINAYLRNQNVIGKLKGKDYYPRIIDDRTFYAVQRRTRENTGGVGDIFRNVFVGVGKCGCLIRKENENGCGSLVKCGYIMAFSSRKVKNPTKGMYLKCNRKRKSTRCDAENINYYLAQNKIYNVLKSLKFDIEQSVDISHLEEKIISIDKSMSKIREYMTQYSDDEEWEKQYNIKRIEREKIENEIKTSKSRITGRLSNLDMDFSEEKDRVLFNQFLKDNRITVYFTKDRMEIIIGSMNNFSIKCGYNDNEREIDQLVESISQKDFVGLETISRGSEGKELLRFKLPTVSDS

SEQ ID NO: 29567 - DNA, 50 bp, Vibrio cholerae
  source 1..50: mol_type = genomic DNA
atgttgtcaaagatgcaattgactaatgacaattatatgataagctacat

SEQ ID NO: 29568 - DNA, 40 bp, Vibrio cholerae; identical to SEQ ID NO: 28538
  source 1..40: mol_type = genomic DNA

SEQ ID NO: 29569 - DNA, 40 bp, Vibrio cholerae
  source 1..40: mol_type = genomic DNA
aggcaagccgcagttggcatgggaaacgtaggggccacgc

SEQ ID NO: 29570 - DNA, 50 bp, Vibrio cholerae; identical to SEQ ID NO: 29565
  source 1..50: mol_type = genomic DNA

SEQ ID NO: 29571 - protein, 535 aa, Sphingopyxis granuli
MMIQPRAALYLRVSTARQAEQDVSIPDQRRQGEAYCADKGFAVVDIFVEAGASATTDRRPEFQRMIEAGTAKPSQFDIIVVHSFSRFFRDHFELEFYVRKLAKNGVKLVSITQEIGDDPVHVMMRQIMALFDEYQSKENAKHTLRAMKENARQGFWNGAQPPIGYRLVVAAQRGERIKKKLEIDPLHADTVRLIFRLAQEGVGDGPMGVKMIVNHLNENHIRTRSGGLWGVGAVHQILTRRTYFGIHEFNRLAKGKRPNDKADIVTIEVPPIISEDCFNAVQTRLRARSPARLNPAIAASPSLLTGVLHCAECGGSMTVMTGKGGRYRYYACANRRRKGAVACSAGIIRTELLENVVSQYIEKRLLDPVRLGGLLSSLLDQREERAKEREQRIAELGRKAAEAQQRLARLYAAIESGAADLDDPDLANRIATLKATRDQAQVDAERAEALMDSSGAKSISPELLAEFTKRVKKRLRGSNGKYRRDHFHQFAQRVEILKRKIRIGGTKESLFNAVFALGNVQQKDLVPSAVLKWLP

SEQ ID NO: 29572 - DNA, 50 bp, Sphingopyxis granuli
  source 1..50: mol_type = genomic DNA
ttggtgccctctgctgtactgaaatggctccccaaggtggatagcagagg

SEQ ID NO: 29573 - DNA, 40 bp, Sphingopyxis granuli
  source 1..40: mol_type = genomic DNA
tgccatcgtggaaagaagatggctccccgggcaggattcg

SEQ ID NO: 29574 - DNA, 40 bp, Sphingopyxis granuli
  source 1..40: mol_type = genomic DNA
tgccatcgtggaaagaagattgctccccgggcaggattcg

SEQ ID NO: 29575 - DNA, 50 bp, Sphingopyxis granuli
  source 1..50: mol_type = genomic DNA
ttgttgcccaggctaatactgaattttctatccatgtttcattgcagagg

SEQ ID NO: 29576 - protein, 418 aa, Listeria seeligeri
MSVKRLGCLRYIYRRRLQRFKYESSRLSKLHEIDAVVVYRLDLLSRSQKDTITLIEEYFLKNNVEFVSLSETLDTSSPFSRAMIGILSVFAQLERETIRDRMVMGQMKRVESGLPLITSRGRTFGYNVIDTKLYVNEEEAKHLQLIYDIFEEEKSITFLQKRLKKLGFKVETYSRYKKWLTNDLYIGYVSYGDKVHVKGIHDPVISEEQFYRVREIFSHMGKNPNLNKISALLLNNLIVCEKCGLGYVHRAKDTVSRGKKYHYRYYSCKTHKHTHELEKCGNKTWRADKLEEIIISRVKNYSFATRSVEKENETDGINAKLKVEHKKKKRLFDLYINGSYEVAELDRMMADIDAQINYYNSQIEANEELKKNKKIQGSFAELATVDFDALEFREKQIYLKSIINKIYIDGEQVTIEWI

SEQ ID NO: 29577 - DNA, 50 bp, Listeria seeligeri
  source 1..50: mol_type = genomic DNA
tttagtacatcgttttcgctcgttggacatagaataaatgagatactaat

SEQ ID NO: 29578 - DNA, 40 bp, Listeria seeligeri; identical to SEQ ID NO: 28313
  source 1..40: mol_type = genomic DNA

SEQ ID NO: 29579 - DNA, 40 bp, Listeria seeligeri
  source 1..40: mol_type = genomic DNA
tttcgtgctatgataagttaaacatagaaaggggacagag

SEQ ID NO: 29580 - DNA, 50 bp, Listeria seeligeri
  source 1..50: mol_type = genomic DNA
ttaagtgtaattgcttcactccttaaaaatagaatttccaacatattaat

SEQ ID NO: 29581 - protein, 401 aa, Listeria seeligeri
MNRPALNEMLSKLHEIDAVVVYRLDRLSRSQKDTITLIEEYFLKNNVEFVSLSETLDTSSPFSRAMIGILSVFAQLERETIRDRMVMGQMKRVESGLPLITSRGRTFGYNVIDTKLYVNEEEAKHLQLIYDIFEEEKSITFLQKRLKKLGFKVETYSCYKNWLTNDLYIGYVSYGDKVHVKGIHDPVISEEQFYRVREIFSHMGKNPNLNKISASLLNNLIVCEKCGLGYVHRAKDTVSRGKKYHYRYYSCKTHKHTHELEKCGNKTWRADKLEEIIISRVKNYSFATRSVEKENETDGINAKLKVEHKKKKRLFDLYINGSYEVAELDRMMADIDAQINYYNSQIEANEELKKNKKIQGSLAELATVDFDALEFREKQIYLKSIINKIYIDGEQVTIEWI

SEQ ID NO: 29582 - DNA, 50 bp, Listeria seeligeri; identical to SEQ ID NO: 29577
  source 1..50: mol_type = genomic DNA

SEQ ID NO: 29583 - DNA, 40 bp, Listeria seeligeri; identical to SEQ ID NO: 28313
  source 1..40: mol_type = genomic DNA

SEQ ID NO: 29584 - DNA, 40 bp, Listeria seeligeri; identical to SEQ ID NO: 29579
  source 1..40: mol_type = genomic DNA

SEQ ID NO: 29585 - DNA, 50 bp, Listeria seeligeri; identical to SEQ ID NO: 29580
  source 1..50: mol_type = genomic DNA

SEQ ID NO: 29586 - protein, 584 aa, Pseudomonas carnis
MPTAYAYIRYSSKAQGEAGRDSVDRQMASIQAITKQQGIELPPENIYSDTGISAHDGSNKRKGKLKELIDMISDMHIKEGDYIFVESIDRLSRQRLLQAKELVNGILEKGVILITTIDGQRYEKPNETNRIDDLQQDILLSVIAKRAYEESKTKSVRRKSAWNRAKKLAEEEKVIFNAHNPPYGIRYNTELNCFEIEEEEAQEIRDFFESLKYVGVSLSIKKLNAYSKRKWSSRNIKHLIDTKYVLGAYMAQRRDENKKKVFERYIENYYPQIVSYELFNEAIAAMKNRAQRKNYGNQSVGSLNIFRHSIKCDGCEASMLFEKQTNPKGVVYPYFQCYTRKELKNGCDQPRFRFDLAFGLFLELIYQSTTNEDFDVHPWQNEDPNPERQHEWITRESGMIYRLPTQDDIDEEERVENFRELLIKLLSNRENQTKDNKKIVELNNFLLEQKSYRDNLMKSFAGFTSGVIPQEFLQVVSKTEANINDIEQNLAELQTQINIKKTTINIYSENDIIDLYKTENGRLKINQFFVANDITFKFNFDKTTRTLFAKIFQNGFEIDRIAKQFSLHNPLKEFGINNLNEYFN

SEQ ID NO: 29587 - DNA, 50 bp, Pseudomonas carnis
  source 1..50: mol_type = genomic DNA
gtgtggaataaccccctaccattcgagaccggtaggtggtattctcacac

SEQ ID NO: 29588 - DNA, 40 bp, Pseudomonas carnis
  source 1..40: mol_type = genomic DNA
ggtgctgcgcgagccattggagtcggggcacatcgtgatc

SEQ ID NO: 29589 - DNA, 40 bp, Pseudomonas carnis
  source 1..40: mol_type = genomic DNA
ggtgctgcgcgagccattgaggtcggggcacatcgtgatc

SEQ ID NO: 29590 - DNA, 50 bp, Pseudomonas carnis
  source 1..50: mol_type = genomic DNA
gggtggaagtgtctcctaacattcagggcctgtacagtttcttctccctc

SEQ ID NO: 29591 - protein, 620 aa, Tenacibaculum discolor
MLGIYCRTSKNRKDKYTIDDQRDGGIKCAKKLGLEYEVYVDDGISGTLDESVRDGLSDLFRDIRKDKITHIYSIDQSRIERRSRTWDFFVAECLNKKVKYYPNGEFFDLNNSANRMLASLMSVVNAYYAEITSKKVRLANARKAKEGKTHGIKPYGYKKSSNNDYVVDEEEAVHVRRMFELSLEGRGAYTIANIFNKEGIPTKYSRNFKGKITRKDSYTGITTTHDKSSIKWRGNVISDILRNKIYKGIREWNRYEDKIENVNGKSVKSKIKAELIISQVPNIVEPELWEKVQDNLAVNKINVGKKSHYNYLLNGLITCNHCGRLFVGKRRKTSRDNAYKCKGKVYPNSNCKASRSINISKLDSFIIKHLFKSKDLKRYLKSLPKPESKHEKIKENLEKEKKVLKRIEKQLDKGYKLLFDEESEFKDDEVVKSRVLVLKEKKEEQIELIDTLEEEFVLSESNFRANRTERLLNEYTEESSFEDIKRIIHSLIENINIKHYKEEGKMGVFFLNVKYKGYDEVSTFMTNWKANKWCWMSKYRKKSKTNEELEEDREMDIALLEYYGIDKDNIDIKGLQKERKLPIGEIDKMNPFSIEYQGAEIKEFKYELIELSKDEIIDFN

SEQ ID NO: 29592 - DNA, 50 bp, Tenacibaculum discolor
  source 1..50: mol_type = genomic DNA
actacgcaatttacctttattaacatatagatacaggtaattaaggtagt

SEQ ID NO: 29593 - DNA, 40 bp, Tenacibaculum discolor
  source 1..40: mol_type = genomic DNA
aaccatccaacgtaaaaacatgttaattcttttggatgca

SEQ ID NO: 29594 - DNA, 40 bp, Tenacibaculum discolor; identical to SEQ ID NO: 29593
  source 1..40: mol_type = genomic DNA

SEQ ID NO: 29595 - DNA, 50 bp, Tenacibaculum discolor
  source 1..50: mol_type = genomic DNA
acttcttaagaacacttgattaacatttagatacacatccttgaggcatt

SEQ ID NO: 29596 - protein, 458 aa, Staphylococcus epidermidis
MNYERRYLRSCQVSTLEQKEHGYSIEEQERKLKSFCEINDWSVSDVFIDAGFSGAKRERPELQRMMNDIKRFDLVLVYKLDRLTRNVRDLLDLLEIFEQNNVAFRSATEVYDTSTAMGRLFVTLVGAMAEWERETIRERVMMGKRAAIKQGMILTPPPFYYDRVDNTYIPNDYKKVVLWAYDEVMKGNSSKAIARKLNDSDIPPPNGKRWEDRTITRALRSPITRGHYTWGDVFIENSHEPIITEEMYQQIKERLEERINTKIVSHVSVFRGKFICPRCGGTLTLNTVTRKRKKGYVTYKTYYCNTCKAKKQSFGFSENEALRVFRDYLSKLDLEKYEVKTKQKDDVVTIDIDKIMEQRKRYHKLYAKGLMKEEELFGLIKETDETIAEYEKQKELVPRKSLDIDKIKKFKNALLESWEIFSLEDKADFIKMAIKSIDIDYVKLKNRHSIKINDIEFY

SEQ ID NO: 29597 - DNA, 50 bp, Staphylococcus epidermidis
  source 1..50: mol_type = genomic DNA
gtacggaagtatagacacctgattaatatttaatgtgtatacttccgtaa

SEQ ID NO: 29598 - DNA, 40 bp, Staphylococcus epidermidis; identical to SEQ ID NO: 26018
  source 1..40: mol_type = genomic DNA

SEQ ID NO: 29599 - DNA, 40 bp, Staphylococcus epidermidis
  source 1..40: mol_type = genomic DNA
gtatggtggtacatgcattcctatcggatgtatacctact

SEQ ID NO: 29600 - DNA, 50 bp, Staphylococcus epidermidis
  source 1..50: mol_type = genomic DNA
gtgtataagtcctaacagctgactcctagctaatgtaaaagcttccttaa

SEQ ID NO: 29601 - protein, 458 aa, Staphylococcus epidermidis
MNYERSYLRSCQVSTLEQKEHGYSIEEQERKLKSFCEINDWSVSDVFIDAGFSGAKRERPELQRMMNDIKRFDLILVYKLDRLTRNVRDLLDLLEIFEQNNVAFRSATEVYDTSTAMGRLFVTLVGAMAEWERETIRERVMMGKRAAIKQGMILTPPPFYYDRVDNTYIPNDYKKVVLWAYDEVLKGNSSKAIARKLNDSDIPPPNGKRWEDRTITRALRSPITRGHYTWGDVFIENSHEPIITEEMYQQIKERLEERINTKIVSHVSVFRGKFICPRCGGTLTLNTVTRKRKKGYVTYKTYYCNTCKTKKQSFGFSENEALRVFRDYLSKLDLEKYEVKTKQKDDVVTIDIDKIMEQRKRYHKLYAKGLMKEEELFGLIKETDETIAEYEKQKELVPRKSLDIDKIKKFKNALLESWEIFSLEDKADFIKMAIKSIDIDYVKLKNRHSIKINDIEFY

SEQ ID NO: 29602 - DNA, 50 bp, Staphylococcus epidermidis; identical to SEQ ID NO: 29597
  source 1..50: mol_type = genomic DNA

SEQ ID NO: 29603 - DNA, 40 bp, Staphylococcus epidermidis; identical to SEQ ID NO: 26028
  source 1..40: mol_type = genomic DNA

SEQ ID NO: 29604 - DNA, 40 bp, Staphylococcus epidermidis
  source 1..40: mol_type = genomic DNA
gtatggcggtacatgcattcctatcggatgtataccgact

SEQ ID NO: 29605 - DNA, 50 bp, Staphylococcus epidermidis; identical to SEQ ID NO: 29600
  source 1..50: mol_type = genomic DNA

SEQ ID NO: 29606 - protein, 458 aa, Staphylococcus epidermidis
MNYERSYLRSCQVSTLEQKEHGYSIEEQERKLKSFCEINDWSVSDVFIDAGFSGAKRDRPELQRMMNDIKRFDLVLVYKLDRLTRNVRDLLDLLEVFEQNNVAFRSATEVYDTSTAMGRLFVTLVGAMAEWERETIRERVMMGKRAAIKQGMILTPPPFYYDRVDNTYIPNDYKKVVLWAYDEVMKGNSSKAIARKLNDSDIPPPNGKRWEDRTITRALRNPITRGHYTWGDVFIENSHEPIITEEMYQQIKERLEERINTKIVSHVSVFRGKFICPRCGGTLTLNTVTRKRKKGYVTYKTYYCNTCKAKKQSFGFSENEALRVFRDYLSKLDLEKYEVKTKQKDDVVTIDIDKIMEQRKRYHKLYAKGLMKEEELFGLIKETDETIAEYEKQKELVPRKSLDIDKIKKFKNALLESWEIFSLEDKADFIKMAIKSIDIDYVKLKNRHSIKINDIEFY

SEQ ID NO: 29607 - DNA, 50 bp, Staphylococcus epidermidis; identical to SEQ ID NO: 29597
  source 1..50: mol_type = genomic DNA

SEQ ID NO: 29608 - DNA, 40 bp, Staphylococcus epidermidis; identical to SEQ ID NO: 26028
  source 1..40: mol_type = genomic DNA

SEQ ID NO: 29609 - DNA, 40 bp, Staphylococcus epidermidis; identical to SEQ ID NO: 29604
  source 1..40: mol_type = genomic DNA

SEQ ID NO: 29610 - DNA, 50 bp, Staphylococcus epidermidis; identical to SEQ ID NO: 29600
  source 1..50: mol_type = genomic DNA

SEQ ID NO: 29611 - protein, 458 aa, Staphylococcus epidermidis
MNYERRYLRSCQVSTLEQKEHGYSIEEQERKLKSFCEINDWSVSDVFIDAGFSGAKRDRPELQRMMNDIKRFDLVLVYKLDRLTRNVRDLLDLLEIFEQNNVAFRSATEVYDTSTAMGRLFVTLVGAMAEWERETIRERVMMGKRAAIKQGMILTPPPFYYDRVDNTYIPNDYKKVVLWAYDEVMKGNSSKAIARKLNDSDIPPPNGKRWEDRTITRALRSPITRGHYTWGDVFIENSHEPIITEEMYQQIKERLEERINTKIVSHVSVFRCKFICPRCGGTLTLNTVTRKRKKGYVTYKTYYCNTCKAKKQSFGFSENEALRVFRDYLSKLDLEKYEVKTKQKDDVVTIDIDKIMEQRKRYHKLYAKGLMKEEELFGLIKETDETIAEYEKQKELVPRKSLDIDKIKKFKNALLESWEIFSLEDKADFIKMAIKSIDIDYVKLKNRHSIKINDIEFY

SEQ ID NO: 29612 - DNA, 50 bp, Staphylococcus epidermidis; identical to SEQ ID NO: 29597
  source 1..50: mol_type = genomic DNA

SEQ ID NO: 29613 - DNA, 40 bp, Staphylococcus epidermidis; identical to SEQ ID NO: 26028
  source 1..40: mol_type = genomic DNA

SEQ ID NO: 29614 - DNA, 40 bp, Staphylococcus epidermidis; identical to SEQ ID NO: 29604
  source 1..40: mol_type = genomic DNA

SEQ ID NO: 29615 - DNA, 50 bp, Staphylococcus epidermidis; identical to SEQ ID NO: 29600
  source 1..50: mol_type = genomic DNA

SEQ ID NO: 29616 - protein, 458 aa, Staphylococcus epidermidis
MNYERSYLRSCQVSTLEQKEHGYSIEEQERKLKSFCEINDWSVSDVFIDAGFSGAKRERPELQRMMNDIKRFDLILVYKLDRLTRNVRDLLDLLEIFEQNNVAFRSATEVYDTSTAMGRLFVTLVGAMAEWERETIRERVMMGKRAAIKQGMILTPPPFYYDRVDNTYIPNDYKKVVLWAYDEVLKGNSSKAIARKLNDSDIPPPNGKRWEDRTITRALRSPITRGHYTWGDVFIENSHEPIITEEMYQQIKERLEERINTKIVSHVSVFRGKFICPRCGGTLTLNTVTRKRKKGYVTYKTYYCNTCKAKKQSFGFSENEALRVFRDYLSKLDLEKYEVKTKQKDDVVTIDIDKIMEQRKRYHKLYAKGLMKEEELFGLIKETDETIAEYEKQKELVPRKSLDIDKIKKFKNALLESWEIFSLEDKADFIKMAIKSIDIDYVKLKNRHSIKINDIEFY

SEQ ID NO: 29617 - DNA, 50 bp, Staphylococcus epidermidis; identical to SEQ ID NO: 29597
  source 1..50: mol_type = genomic DNA

SEQ ID NO: 29618 - DNA, 40 bp, Staphylococcus epidermidis; identical to SEQ ID NO: 26028
  source 1..40: mol_type = genomic DNA

SEQ ID NO: 29619 - DNA, 40 bp, Staphylococcus epidermidis; identical to SEQ ID NO: 29604
  source 1..40: mol_type = genomic DNA

SEQ ID NO: 29620 - DNA, 50 bp, Staphylococcus epidermidis; identical to SEQ ID NO: 29600
  source 1..50: mol_type = genomic DNA

SEQ ID NO: 29621 - protein, 611 aa, Vibrio splendidus
MGLYGCDMKKAYSYIRYSSPQQASGDSYRRQLAATQAYCDAHGYDLDTELSIYKELGVSGFKGDQEHLKQFINDCETGKVKKGSLLVVENLDRLSRQAINVAMRQFLSLLEYVDIYTLQDKKHYSNNDGRDSENQLLDIMTSLIIMSRAHEESLTKQKRLKESWSNQRKNAHKIKMSGCYPHWLVRSDDKTEFFIKEDRAQIIKDMLDMCINGLGATQILRHLNENLEKYPPPSLKKEFWVRSTVKRLLSDRRLLGEHQLYKGHHANREPVGEPIKNYFPQIIDEKTFVSAQISLKSRKIGAGKVKKGVFSNVFRGFLRCGHCVSTMEYVNKSSKQASTLYLTCSNAKRGGDCKHSKHYRYTPLEHMLIHLSTANGFMPKPEQPNDLHQQMELLKHKKEQSNKKLSVLLEQDFTAPLIVAKMEQLTVDIGKHDEQIRDIEERLLIIKPDYQHEELYHDVIIESDTTKKFTNRTMFNGYLNKKIKSAYIYSIGLLPCILFKMQNKNVHTLVLDERYNFGGCTLPNEKETLIRLNGEALAPVDEVIWKMLNNLIDLLGDVDEKDESMIKLGRKISLLMSKFIMDNQNNDLLNEIMILIKKNSRKATVSENCKG

SEQ ID NO: 29622 - DNA, 50 bp, Vibrio splendidus
  source 1..50: mol_type = genomic DNA
tagtggtgttattggcacaagttgataaacatatgctaatatcactacca

SEQ ID NO: 29623 - DNA, 40 bp, Vibrio splendidus
  source 1..40: mol_type = genomic DNA
acacggtggcgccatgtggatcaccgctaaaccacctaaa

SEQ ID NO: 29624 - DNA, 40 bp, Vibrio splendidus
  source 1..40: mol_type = genomic DNA
acacggtggcgccatgtggtccaccgctaaaccacctaaa

SEQ ID NO: 29625 - DNA, 50 bp, Vibrio splendidus
  source 1..50: mol_type = genomic DNA
tagatttggatggagcagaagttttcaaacatgtgcactattcacaaaca

SEQ ID NO: 29626 - protein, 536 aa, Streptococcus anginosus; identical to SEQ ID NO: 2966

SEQ ID NO: 29627 - DNA, 50 bp, Streptococcus anginosus; identical to SEQ ID NO: 2967
  source 1..50: mol_type = genomic DNA

SEQ ID NO: 29628 - DNA, 40 bp, Streptococcus anginosus
  source 1..40: mol_type = genomic DNA
taatgacaatcccggtgctaagagccaaggtattaagcag

SEQ ID NO: 29629 - DNA, 40 bp, Streptococcus anginosus
  source 1..40: mol_type = genomic DNA
taatgacaatcccggtgcttagagccaaggtattaagcag

SEQ ID NO: 29630 - DNA, 50 bp, Streptococcus anginosus
  source 1..50: mol_type = genomic DNA
ttactactaaaggatacatctgtttatgttcaagtaaatgaaggaaagaa

SEQ ID NO: 29631 - protein, 539 aa, Salmonella enterica
MLRQATQNLITALYPRLSHEDELQGESNSISNQKRILEAFAKQNGFTNLRWYTDDGYSGANFQRPGFQAMLADIEAGKVGTVIVKDMSRLGRNYLQVGFYTEMLFPQKGVRFIAVNDNVDSANGGMDNDFTPLRNLFNEWLVRDTSKKIKAVKRAKGMSGKPVTSKPVYGYLMDEDENYIVDEETAPVVQQIYQLCLAGNGPTKIARMLTEQQIPTPGTLEYRRTGSTRRYHPGYECKWATNTVVHILENREYTGCLVNFKTEKPSYKVKHSVENPVEKQAIFPDHHEPIIDTETWERVQELRKQRKRPNRYDEVGLFSGMLFCADCGHVMYQQRYQNKTRKQDCYICGSYKKRTRDCTAHFIRTDLLTAGVLSNLRQVTEYAAKHESRFVKLLIQQNEIGGKRKTAAATKQLEQAQERIAEVSRIIKRLYEDNVNGKISDERFMELSADYEQEQRELKDRAAALQAELDKSQAATVNAEKFMGIVRKHLAFEELTPTLLREMIEKIVVHECSYDENGTRRQDIEIYYSFVGKIDLPEA

SEQ ID NO: 29632 - DNA, 50 bp, Salmonella enterica; identical to SEQ ID NO: 2967
  source 1..50: mol_type = genomic DNA

SEQ ID NO: 29633 - DNA, 40 bp, Salmonella enterica; identical to SEQ ID NO: 22633
  source 1..40: mol_type = genomic DNA

SEQ ID NO: 29634 - DNA, 40 bp, Salmonella enterica; identical to SEQ ID NO: 25934
  source 1..40: mol_type = genomic DNA

SEQ ID NO: 29635 - DNA, 50 bp, Salmonella enterica; identical to SEQ ID NO: 29630
  source 1..50: mol_type = genomic DNA

SEQ ID NO: 29636 - protein, 536 aa, Salmonella enterica; identical to SEQ ID NO: 2966

SEQ ID NO: 29637 - DNA, 50 bp, Salmonella enterica; identical to SEQ ID NO: 2967
  source 1..50: mol_type = genomic DNA

SEQ ID NO: 29638 - DNA, 40 bp, Salmonella enterica; identical to SEQ ID NO: 22633
  source 1..40: mol_type = genomic DNA

SEQ ID NO: 29639 - DNA, 40 bp, Salmonella enterica; identical to SEQ ID NO: 25934
  source 1..40: mol_type = genomic DNA

SEQ ID NO: 29640 - DNA, 50 bp, Salmonella enterica; identical to SEQ ID NO: 29630
  source 1..50: mol_type = genomic DNA

SEQ ID NO: 29641 - protein, 536 aa, Megasphaera massiliensis; identical to SEQ ID NO: 2966

SEQ ID NO: 29642 - DNA, 50 bp, Megasphaera massiliensis; identical to SEQ ID NO: 2967
  source 1..50: mol_type = genomic DNA

SEQ ID NO: 29643 - DNA, 40 bp, Megasphaera massiliensis
  source 1..40: mol_type = genomic DNA
gagtttcaatcgctcttcaaatgatgctggattgaaataa

SEQ ID NO: 29644 - DNA, 40 bp, Megasphaera massiliensis
  source 1..40: mol_type = genomic DNA
gagtttcaatcgctcttcatatgatgctggattgaaataa

SEQ ID NO: 29645 - DNA, 50 bp, Megasphaera massiliensis; identical to SEQ ID NO: 29630
  source 1..50: mol_type = genomic DNA

SEQ ID NO: 29646 - protein, 536 aa, Neglectibacter timonensis; identical to SEQ ID NO: 2966

SEQ ID NO: 29647 - DNA, 50 bp, Neglectibacter timonensis; identical to SEQ ID NO: 2967
  source 1..50: mol_type = genomic DNA

SEQ ID NO: 29648 - DNA, 40 bp, Neglectibacter timonensis
  source 1..40: mol_type = genomic DNA
ctccgatacgcccagacaaaagctccaggggttctcctca

SEQ ID NO: 29649 - DNA, 40 bp, Neglectibacter timonensis
  source 1..40: mol_type = genomic DNA
ctccgatacgcccagacaatagctccaggggttctcctca

SEQ ID NO: 29650 - DNA, 50 bp, Neglectibacter timonensis; identical to SEQ ID NO: 29630
  source 1..50: mol_type = genomic DNA

SEQ ID NO: 29651 - protein, 536 aa, Veillonella seminalis; identical to SEQ ID NO: 2966

SEQ ID NO: 29652 - DNA, 50 bp, Veillonella seminalis; identical to SEQ ID NO: 2967
  source 1..50: mol_type = genomic DNA

SEQ ID NO: 29653 - DNA, 40 bp, Veillonella seminalis
  source 1..40: mol_type = genomic DNA
taatgataaccctggtgctaaatctcaaggtattaagcag

SEQ ID NO: 29654 - DNA, 40 bp, Veillonella seminalis
  source 1..40: mol_type = genomic DNA
taatgataaccctggtgcttaatctcaaggtattaagcag

SEQ ID NO: 29655 - DNA, 50 bp, Veillonella seminalis; identical to SEQ ID NO: 29630
  source 1..50: mol_type = genomic DNA

SEQ ID NO: 29656 - protein, 517 aa, Megasphaera stantonii
MQGESNSISNQKRILETFAKQNGFTNLRWYTDDGYSGANFQRPGFQAMLADIEAGKVGTVIVKDMSRLGRNYLQVGFYTEMLFPQKGVRFIAVNDNVDSANGGMDNDFTPLRNLFNEWLVRDTSKKIKAVKRAKGMSGKPVTSKPVYGYLMDEDENYIVDEETAPVVKQIYQLCLAGNGPTKIARMLTEQQIPTPGTLEYQRTGSTRRYHPGYECKWATNTVVHLLENREYTGCLVNFKTEKPSYKTKHSVENPIEKQAIFPNHHEPIIDTETWERVQELRKQRKRPNRYDEVGLFSGMLFCADCGHVMYQQRYQNKNRKQDCYICGSYKKRTRDCTAHFIRTDLLTAGVLSNLRQVTEYAAKHESRFVKLLIQQNEIGGKRKTAAATKQLEQAQERISEVSRIIKRLYEDNVNGKISDERFMELSADYEQEQRELKDRAAALQEELSKSQAATVNAEKFMGIVRKHLAFEELTPTLLREMIEKIVVHECSYDENGTRRQDIEIYYSFVGKIDLPEA

SEQ ID NO: 29657 - DNA, 50 bp, Megasphaera stantonii; identical to SEQ ID NO: 2967
  source 1..50: mol_type = genomic DNA

SEQ ID NO: 29658 - DNA, 40 bp, Megasphaera stantonii
  source 1..40: mol_type = genomic DNA
tgtcagcaaaccagctgttaacacagccggaattaaacgt

SEQ ID NO: 29659 - DNA, 40 bp, Megasphaera stantonii
  source 1..40: mol_type = genomic DNA
tgtcagcaaaccagctgtttacacagccggaattaaacgt

SEQ ID NO: 29660 - DNA, 50 bp, Megasphaera stantonii; identical to SEQ ID NO: 29630
  source 1..50: mol_type = genomic DNA

SEQ ID NO: 29661 - protein, 536 aa, Blautia luti; identical to SEQ ID NO: 2966

SEQ ID NO: 29662 - DNA, 50 bp, Blautia luti; identical to SEQ ID NO: 2967
  source 1..50: mol_type = genomic DNA

SEQ ID NO: 29663 - DNA, 40 bp, Blautia luti
  source 1..40: mol_type = genomic DNA
caacgacaaccctggtgcaaagtctcagggtatgaagcag

SEQ ID NO: 29664 - DNA, 40 bp, Blautia luti
  source 1..40: mol_type = genomic DNA
caacgacaaccctggtgcatagtctcagggtatgaagcag

SEQ ID NO: 29665 - DNA, 50 bp, Blautia luti; identical to SEQ ID NO: 29630
  source 1..50: mol_type = genomic DNA

SEQ ID NO: 29666 - protein, 482 aa, Rhodococcus qingshengii
MSATACGIYLRISQDRDGEGLGVARQEEACRALADKLGWVVAEIYEDNDVSAYGSKVRPAYQRLLKDIEDGKIAGLLAWHPDRLFRRPIELEHFIDIVAKAGLQIHTVESGTYDLSSDSGQAIARTLGAWARYESAHKGKRIAAARKQAAIAGKHHGGVRPFGYEKDGMTLRNAEAAEIFRAAEEILAGASLRSLVQDLNSRKVSTALGAPRWTSQTLRDILLSPRTAGLSTWRGEVVGKALWPAMIDEDKWRAVGAILNNPARRTRPAVGGAVKWLGSGLYICGVCGERTLRVGGGGSVGRRTYRCANRNHEKTTGHVTREAKSLDSFVEHSVVTRLSVPGVIEGLLAPVDTTVDVDALRVEKVELEERLDEQAVLHAQRVITARQMAIGSEVMVRRLTEIDALLARQVGSGPFAELAGVEDLRLGWFGSEEGEVEVVPPLSLAIRRMIVDAVVDVTVKKVPDDQRTRDFDPRHIAMDWKV

SEQ ID NO: 29667 - DNA, 50 bp, Rhodococcus qingshengii
  source 1..50: mol_type = genomic DNA
atgtgtcatagctgctgagtcggaaagaccgaccatgagctaaagcacac

SEQ ID NO: 29668 - DNA, 40 bp, Rhodococcus qingshengii
  source 1..40: mol_type = genomic DNA
cggcgggaccggtgcgggaaagaccacgttgttgtccgcc

SEQ ID NO: 29669 - DNA, 40 bp, Rhodococcus qingshengii; identical to SEQ ID NO: 29668
  source 1..40: mol_type = genomic DNA

SEQ ID NO: 29670 - DNA, 50 bp, Rhodococcus qingshengii
  source 1..50: mol_type = genomic DNA
ctctgtcattaaaccagaggaggaaagaacgacggtgcagaaaaccacac

SEQ ID NO: 29671 - protein, 513 aa, Bacteroides dorei
MSKKKSKEKVVEFSKLTNKVAAVWTRVSTERQADTNGSLESQRRICTEYAESHAIRIKKYYGGTNESAKVEGKLYREMIAEVARDKEINIILVYSFDRFSRAGYEAMMTKAYLKAKGIYVVSATQATDPDSAAGGFMEDVIFLFNQFENNLRKDKCITGMVECLRNGNWYSKPPLGYDKLKVGREHVLTVNEKGKILRNAFVWKATEGIGDIEIVQRLKGLGLVIDRKHLNKILHNPFYCGFIQHSLLGDEVIKGNQEILIDEATFNKVNSISNAGYEHKEITEPFPLKRHIICSDCGGYLTGYTVKARGRDYYKCNKKGCKSNHSTEKLHQKYINLLNGYNIPDEFIPILTDVLRKVFEEYNQSKGETKKVLLKRKTECENRINAVKVRFGLGEINSEIYTATMSELNSRLAEIRRDLEDAGKNLSNMMNYINQTIEISCKLGSLWRDSDFSNRQKIQNLVYPGGIYFDKKNDDYRTENENEVFRIFRRFTAVCKGGKEKATSNFHCLSPSV

SEQ ID NO: 29672 - DNA, 50 bp, Bacteroides dorei
  source 1..50: mol_type = genomic DNA
ttttcactgcttgtcgccttctgtcggctacactatcgaattatcgaaca

SEQ ID NO: 29673 - DNA, 40 bp, Bacteroides dorei
  source 1..40: mol_type = genomic DNA
ctcttatcctttacagtgtcggaatgaggcgactcgaacg

SEQ ID NO: 29674 - DNA, 40 bp, Bacteroides dorei
  source 1..40: mol_type = genomic DNA
ctcttatcctttacagtgtgggaatgaggcgactcgaacg

SEQ ID NO: 29675 - DNA, 50 bp, Bacteroides dorei
  source 1..50: mol_type = genomic DNA
tttgctttgctttcagcattctgagggctacaatataaaggtaacaaaca

SEQ ID NO: 29676 - protein, 513 aa, Bacteroides fragilis
MSKKKSKEKVVEFSKLTNKVAAVWTRVSTERQADTNGSLESQRRICTEYAESHAIRIKKYYGGTNESAKVEGKLYREMIAEVARDKEINIILVYSFDRFSRAGYEAMMTKAYLKAKGIYVVSATQATDPDSAAGGFMEDVIFLFNQFENNLRKDKCITGMVECLRNGNWYSKPPLGYDKLKVGREHVLTVNEKGKILRNAFIWKATEGIKDIEIVHRLKGLGLSIDRKHLNKILHNPFYCGYIQHSLLGDEIIKGNQEILIDEATFNKVNDISNAGYEHKEITEPFPLKRHIICSDCGGYLTGYTVKARGRDYYKCNKKGCKSNHSTEKLHQKYINLLNEYNIPDELIPILTDVLRKVFEEYNQSKGETKKVLLKRKTECENRINAVKVRFGLGEINSEIYTATMSELNSRLAEIRRELEDAGKNLSNMMNYINQTIEISCKLGSLWRDSDFSNRQKIQNLVYPGGIYFDKKNDDYRTENENEVFRIFRRFTAVCKGGKEKATNNFHCLSPSV

SEQ ID NO: 29677 - DNA, 50 bp, Bacteroides fragilis; identical to SEQ ID NO: 29672
  source 1..50: mol_type = genomic DNA

SEQ ID NO: 29678 - DNA, 40 bp, Bacteroides fragilis
  source 1..40: mol_type = genomic DNA
ggcttgtttgtgcgaatgtcggaatgaggcgactcgaacg

SEQ ID NO: 29679 - DNA, 40 bp, Bacteroides fragilis
  source 1..40: mol_type = genomic DNA
ggcttgtttgtgcgaatgtgggaatgaggcgactcgaacg

SEQ ID NO: 29680 - DNA, 50 bp, Bacteroides fragilis; identical to SEQ ID NO: 29675
  source 1..50: mol_type = genomic DNA

SEQ ID NO: 29681 - protein, 513 aa, Phocaeicola dorei; identical to SEQ ID NO: 29671

SEQ ID NO: 29682 - DNA, 50 bp, Phocaeicola dorei; identical to SEQ ID NO: 29672
  source 1..50: mol_type = genomic DNA

SEQ ID NO: 29683 - DNA, 40 bp, Phocaeicola dorei
  source 1..40: mol_type = genomic DNA
ctcttatcctttacagtgtcggaatgaggcgagctattga

SEQ ID NO: 29684 - DNA, 40 bp, Phocaeicola dorei
  source 1..40: mol_type = genomic DNA
ctcttatcctttacagtgtgggaatgaggcgagctattga

SEQ ID NO: 29685 - DNA, 50 bp, Phocaeicola dorei; identical to SEQ ID NO: 29675
  source 1..50: mol_type = genomic DNA

SEQ ID NO: 29686 - protein, 692 aa, Mesorhizobium silamurunense
MPDLKVTADHLRRDAYLYIRQSTLRQVAENGESTQRQYGLRDRAIAAGWPAERVHVIDCDLGKSGSSAVARDGFQELVSEVALAKAGVVMGLEVSRLARNSADWHRLLELCALTSTLILDEDGVYDPASFNDRLLLGLKGTMSEAELHFLKARMRGGQLNKASRGDLKIGPPVGLVYLPDGTLALDPDAEVQAALRMVFTTFERLGSATRTVKFFLDEGILFPRRLRKGPHKGELMWAPPRHARILQVLHNPRYAGAFVYGRTRGRPRPGGGVSQIKVDMADWRFVMPDLHPGYIDWERFKANQERLATNAQAYGMQRRAGPVREGSALLQGRVLCGLCGGRMGVHYSQEHGQPVPTYISQETATRRGGKVCQSVPGKVVDPAVGALLVELMTPMTLEITLAVQRELEARAAEMDTLRRQHIERTRHDAELARRRYMKVDPDNRLVADTLEAEWNEKLRLHTDVVEDYERRAPEEAAALDAETQQRVRDLAEQFPRIWSDPRIDVRERKRILRLLVADVTLVKAETITANVRLSGGATRTLTLERPLPIAQIRKCKPELVAEVDRLLDRHCDREIADILNEGGLRTWEGKPFNLKKIAFIRGAYNLPSRRQRLRDCGLLTTQEVAEHFAIAETTVHQWGRQGLITKVCSDSLNHGLWDIPHDIEIIKGRPGRNAVAARRASITVPSTEQDSL

SEQ ID NO: 29687 - DNA, 50 bp, Mesorhizobium silamurunense
  source 1..50: mol_type = genomic DNA
aggactcactatgaaacaattgccttggataaagccgtcaactgcagccc

SEQ ID NO: 29688 - DNA, 40 bp, Mesorhizobium silamurunense
  source 1..40: mol_type = genomic DNA
cgcgccctcgaccttggccttgtcgcgtggcttgcggctt

SEQ ID NO: 29689 - DNA, 40 bp, Mesorhizobium silamurunense
  source 1..40: mol_type = genomic DNA
cgcgccctcgaccttggccaagtcgcgtggcttgcggctt

SEQ ID NO: 29690 - DNA, 50 bp, Mesorhizobium silamurunense
  source 1..50: mol_type = genomic DNA
aggaagcactaaatttctattgccaaggttatatcccaggactgcacccc

SEQ ID NO: 29691 - protein, 589 aa, Streptococcus agalactiae
MKKEVKVIKGDTTLKRTASGCVERSIKRVAAYCRVSTDTEDQINSYNSQVEHYTEFIQKNNEWTLAGIYADEAITGTQVDRRIDFQRLINDCMNGDIDMIITKSISRFARNTLDTLKYVRKLKEFNVAVFFEEENINTLTMDGELLLTILSSVAQQEVENISANVKKGLRMKMERGEMVGFQGCLGYDYDPETKSISINEKEAEIVRYIFRRYIEGVGGMVISRELEEQGYLSPRGNKRWTETTVLGIIKNEKYKGDLMMGKTYTVDPISKRRLDNFGEQDKFYIENHHEPIISEEDFEKAQGIRLRRSKNRNTVANNGGKREKYSRKYAFSSMLECGFCGYNLSRRNWHSSSEYTKVIWQCVNATKNGKKYCPHSKGIEEEAIEKAFMESYRQVCHNNVEITNEFLKTVEEELKDNSLSKDLKKISNQLDKILKKEKDLVELRLNESISMDIYQDKYNEIAISKEKLLAEKRTLEVTLTDEKALKKRLEGFKKLLESNKYLEEFDRAVFESIVDKIIIGGTNDEGEIDPAMITIIYKTGKKDSQDGRLFKSRRKNAKEVNEKADSKLYPQSSDEVNNLYSYPIDNTCG

SEQ ID NO: 29692 - DNA, 50 bp, Streptococcus agalactiae
  source 1..50: mol_type = genomic DNA
gtattcctatcctattgacaacacatgtggaagctatagcgttgatacaa

SEQ ID NO: 29693 - DNA, 40 bp, Streptococcus agalactiae; identical to SEQ ID NO: 23678
  source 1..40: mol_type = genomic DNA

SEQ ID NO: 29694 - DNA, 40 bp, Streptococcus agalactiae
  source 1..40: mol_type = genomic DNA
ttattcccaatgacacatctcgtggagtgtgtggctctgc

SEQ ID NO: 29695 - DNA, 50 bp, Streptococcus agalactiae
  source 1..50: mol_type = genomic DNA
gttttgctaggattttgacaactttcctgaaagctaggccttttttacat

SEQ ID NO: 29696 - protein, 495 aa, Streptomyces lydicus
MTNDSQLVPVVAYARISADLAKDGHGVDDQHKVNDETASALGLKIVHYYTDNDLSAAKAGLVRPDFEAMLRTLKVGHLPDGQPVRGALVVADDRLVRRVGDYERFVDALTYEDGRVYADAKGLKDLYNEDVESMGLFGVVIAKAEVRKIKRRTRRSHRRRAEEGIPVGGKRPFGWQDDKLTLEPEEAQHLAQAARDVIARKSLHSILAAWREQGVRTVHGNEWQSRSLKLALWNPRLCGWRKHNGELVRDASGVPVVGKWEAIITPKEWMAIDALFSARIGPNIKADGTVTDYRTPSHLLTGILRCGKPKDDGQICNAPLRVSTRPDLSGGYVYQCQSRSMGGCGGSARNGAKVDEYVTEAVLAKLEERTAAKSQVSSEWTGQEELDRLMVKQRKMLQAWQEDQVSDELFFPENHKMESRIKELRKERTQHALQVQRASVVTENIREQWYSGKLDMAQKRALVREALHAVIVLPVGGGGRRPFNPDLLVPKWTEG

SEQ ID NO: 29697 - DNA, 50 bp, Streptomyces lydicus
  source 1..50: mol_type = genomic DNA
ttgctgcttgaaagatactgctggtggtacgtactctcttcatgcagtat

SEQ ID NO: 29698 - DNA, 40 bp, Streptomyces lydicus
  source 1..40: mol_type = genomic DNA
tttgtcgaggtactgctggtggtagccctcggccgggtag

SEQ ID NO: 29699 - DNA, 40 bp, Streptomyces lydicus
  source 1..40: mol_type = genomic DNA
tttgtcgaggtactgctggtagtagccctcggccgggtag

SEQ ID NO: 29700 - DNA, 50 bp, Streptomyces lydicus
  source 1..50: mol_type = genomic DNA
ttgctgcttcttgtttcttgctggtagtaggcactcaataaatgtatgtt

SEQ ID NO: 29701 - protein, 546 aa, Clostridium butyricum
MFEIKAAIYTRKSKYTEEGESIENQIHMCIDYAEKNLGIKDYVIYQDEGFTGGNTDRPQFQKMMKDLKDKEYTHLICYRLDRISRSVADFSATLEMLNKIKVSFISIKEQFDTSSAMGRAMLNISATFAQLERETIAERIKDNLRELGKTGRWLGGPPPLGYKSVEVENNDAGGKSRKKHILAINENEVDTIKALFKLFMEHKKYNKTATLLNELGYKPRHGKVFNLTIVKQAINNPVYIIADKTIFKYFKSKGSDTYLMDKCDNKKGLMPYHRRDSENKMLDMNEWIISVGDHDGIITSDEWLQCQKIKDEIKSRPSSRHGSSKLFLLSGLIVCSKCGSSMSGRHKVLNGSTYRYYTCNLRNRASSECCNDSLNAYDAEEYVVKNLKSITRETIIDNYKQSEKRQRSKVDNDKLITKYNKEIETNKTMISNLVKRIALIEDDIVETFMEEIKKLKENNIELQSLIDTLEKENSKILEDKISVDDILRNIEHFQNFYDFTEGFEKKQDLIRSIVKFITWDSENRKIRIVLIGSDEKRPTINPLFHL

SEQ ID NO: 29702 - DNA, 50 bp, Clostridium butyricum
  source 1..50: mol_type = genomic DNA
tttcacctttaggtgataagagcagatgctctaattatttaaaggtgaaa

SEQ ID NO: 29703 - DNA, 40 bp, Clostridium butyricum
  source 1..40: mol_type = genomic DNA
tttaccgctatttgtacctgacgatctaaaaaaaggtaaa

SEQ ID NO: 29704 - DNA, 40 bp, Clostridium butyricum
  source 1..40: mol_type = genomic DNA
tttaccgctatttgtacctaacgatctaaaaaaaggtaaa

SEQ ID NO: 29705 - DNA, 50 bp, Clostridium butyricum
  source 1..50: mol_type = genomic DNA
tggcactttaaaaggatgaaagaaaaagatctaattttgcaaaggggaaa

SEQ ID NO: 29706 - protein, 539 aa, Pseudomonas sp UW4
MNNAYSYIRFSTGKQLKGSSLERQQAMLDEWAEDNPAYTLNRELTFKDLGISGRSGKHLKNGFGKLLEAVEQGDIGAGDVVLVEAIDRAGRMEPAMMLHILTGILLKGVTIITLDDKAVYTSESLQGGNVYILAGKVQAAFNYSEALSVRMKASYKSRNKLALEGTPPKRNTPVWLTSKGELRDEIKPFVVQAFEDFAAGLGERRIYERIMEKVRTLPNDEESDKVRAYFVRMAPSTVKRWMSNRTAIGEWQGIPEIYPRVVEPELFYRVQKRMEAKFAPRGAPTKHKYTGLVVCGECGKNFNTKAYGVRKKGVTPPAVMECSTRARRGSTACSNSKGIPESVIALVYSLSFSKGALRALQGQVLSASQKREVEIDGEVAELNKKIKIANKVILEFEDDDEHDDMIVTLRSLKARRKELLAEKEGLTESAVSVYDKIVDVTKFNLDPAKANAMLQSVGYRIVCNKDSTVVSESGTFKYEGWGRAEDVHKVVTPEGKLIKLPIHRLGVERKPSKSGSGTADKIKATLDGIAAKRVKITIK

SEQ ID NO: 29707 - DNA, 50 bp, Pseudomonas sp UW4
  source 1..50: mol_type = genomic DNA
aatccccacattgctgcatgctgggtgaaggaagcggcaatgtgtagaag

SEQ ID NO: 29708 - DNA, 40 bp, Pseudomonas sp UW4
  source 1..40: mol_type = genomic DNA
ctcgtagtacaccggttgagtgaagatcatgtcgtagatc

SEQ ID NO: 29709 - DNA, 40 bp, Pseudomonas sp UW4
  source 1..40: mol_type = genomic DNA
ctcgtagtacaccggttgatcgaagatcatgtcgtagatc

SEQ ID NO: 29710 - DNA, 50 bp, Pseudomonas sp UW4
  source 1..50: mol_type = genomic DNA
aatccctatcggcatccatcctggtcctaggaacaacaggagtgtagaag

SEQ ID NO: 29711 - protein, 457 aa, Clostridium symbiosum
MKKKDIATALRVALYIRVSGEEQKIKGLSLEAQQERLEAYAREQGWVIVGVFVDAAKTARKKLHKRTEFHRMLDLVRRNEVDMLLFTRLDRWFRSVPDYYKVMEVLEAHNCGWKTIDDGEGYDTTTASGRLYINLKLSIAQNEADLDSERIAVVFDSKIKHGTVVSGSCPFWLRVNDQKRFEIIPEKAAILQDAFNHYEATVSQRGTVKYIRETYGLNWCDATFRRMLRDKLAIGVYDKNGRVNENFCEPAIDRAQFERVQKLLANNAKSSPSGRVYIFTSILVCDECRHNLAGIRTGGNYYYRCNQHFQRGRCPHKKEIREEVVEKWLFENLGEELKKYRLDWEIKEEKRRKAAASIDRAAVRRKLTRLKELYVNELIDLEEYRRDYDQLNALLAEKPEPAADQRPDFEKIERLLSQDFQTIYDSLGREEKRTLWRSVISEIRINNDQQITGISFL

SEQ ID NO: 29712 - DNA, 50 bp, Clostridium symbiosum
  source 1..50: mol_type = genomic DNA
ttttatactaactacacagcacctacgggtgctattatgttagtataaaa

SEQ ID NO: 29713 - DNA, 40 bp, Clostridium symbiosum
  source 1..40: mol_type = genomic DNA
ctgcctcgctgatgaacccaccggcagcctggacagccgg

SEQ ID NO: 29714 - DNA, 40 bp, Clostridium symbiosum
  source 1..40: mol_type = genomic DNA
ctgcctcgctgatgaacccggcggcagcctggacagccgg

SEQ ID NO: 29715 - DNA, 50 bp, Clostridium symbiosum
  source 1..50: mol_type = genomic DNA
taatatactacactgacagcacctgggggaggtatgcgccagttaaaaaa

SEQ ID NO: 29716 - protein, 460 aa, Faecalitalea cylindroides
MYPFYQILAIKERMGTMQNVRIYARVSTAEQKKKDISIPVQLEACRRYCAEHDYNVLGTYIDNGYSASSIKKRKEFQRMIEEVRRDEYILFTRLDRFSRNILDANKIVETLDQKNVSIVSIFEDDINTSTADGRFMFNLRVSLSQREIEKDSERILDVMAAKLAKGEVLTGRLPVGYKIKNKKPVIDESKAEMVKDIFKTYIDTGNWGLTARIISAKYDTYVSDTKVKWTIKNRRYIGEFRGISNYFPKIIDEATFFEANNISKNKYIKHSRNDVTYLFSGLLRCEMCGRRMASSHRKNKPNSNYYICSSRKTGKTVQHFAKSERKIEATLLNEFEGLLNDKILELEKAERKQSKKSDNTSRINNLKAKMKRIKYLYVDGFMDENEFRARYKDMENELIQLEINKNEDVMQKKEHYQYLIDSNALTLYKSFSREQKAIFWRTIIDHIVVHKDGNLDIFIR

SEQ ID NO: 29717 - DNA, 50 bp, Faecalitalea cylindroides
  source 1..50: mol_type = genomic DNA
aaagcagtaaactagttatacccatttgggtatatacagttcattgcttt

SEQ ID NO: 29718 - DNA, 40 bp, Faecalitalea cylindroides
  source 1..40: mol_type = genomic DNA
gatctaatcattatatccatttggattcatggtctgccac

SEQ ID NO: 29719 - DNA, 40 bp, Faecalitalea cylindroides
  source 1..40: mol_type = genomic DNA
gatctaatcattatatccacgtggattcatggtctgccac

SEQ ID NO: 29720 - DNA, 50 bp, Faecalitalea cylindroides
  source 1..50: mol_type = genomic DNA
agagcagcctctaagttaaacatacgtatgtatataagccacatttcttt

SEQ ID NO: 29721 - protein, 458 aa, Staphylococcus argenteus
MKVAIYTRVSTLEQKEKGYSIDEQERKLKSYCDINDWTIQGVYVDAGYSGAKTDRPELNRLKENLSKIDLVLVYKLDRLTRNVKDLLELLEIFEKENVSFRSATEVYDTSTAMGRLFVTLVGAMAEWEREMIRERAMMGKQAAIRKGMILTPPPFYYDRVDNKYIPNKYKDVVVWAYEEVKKGNSAKGIARKLNASDIPPPNGKQWEDRTITRALRSPLSRGHYFWGDIFIENSHEPIITDEMYNEIKERLNERVNAKVINHISVFRGKFVCPKCNGRLTMNSSYRKRKCGGITYKSYYCDNCKINKNGAFAFTENEALKVFYDYLSKLDLRKYKVKEKEDKKIVTIDINKVMEQRKRYHKLYANGMMQEEELFELIKETDEKISEYEKQKERVPKKQLDVSKIKNFKNVLLDSWNAFTLEDKADFIKMAIKSIEIEYIHVKKGRTKHSIKIKNIDFY

SEQ ID NO: 29722 - DNA, 50 bp, Staphylococcus argenteus
  source 1..50: mol_type = genomic DNA
gtatggaagtatgcacagtccatcaacacaaagtgtacaaacttccatac

SEQ ID NO: 29723 - DNA, 40 bp, Staphylococcus argenteus
  source 1..40: mol_type = genomic DNA
gtacggaggcacttgtataaatataggatgtataccttca

SEQ ID NO: 29724 - DNA, 40 bp, Staphylococcus argenteus; identical to SEQ ID NO: 29723
  source 1..40: mol_type = genomic DNA

SEQ ID NO: 29725 - DNA, 50 bp, Staphylococcus argenteus
  source 1..50: mol_type = genomic DNA
gcaaggaaaagagaaaagtccataaaacaacagtgtagacacttccatac

SEQ ID NO: 29726 - protein, 458 aa, Staphylococcus argenteus
MKVAIYTRVSTLEQKEKGHSIEEQERKLRAYSDINDWTIQGVYVDAGYSGAKTDRPELNRLKENLSKIDLVLVYKLDRLTRNVKDLLDLLEIFERENVSFRSATEVYDTSTAMGRLFVTLVGAMAEWEREMIRERAMMGKQAAIRKGMILTPPPFYYDRVDNKYIPNKYKDVVVWAYEEVKKGNSAKGIARKLNASDIPPPNGKQWEDRTITRALRSPLSRGHYFWGDIFIENSHEPIITDEMYNEIKERLNERVNAKVINHISVFRGKFVCPKCNGRLTMNSSYRKRKCGGITYKSYYCDNCKINKNGAFAFTENEALKVFYDYLSKLDLRKYKVKEKEDKKIVTIDINKVMEQRKRYHKLYANGMMQEEELFELIKETDEKISEYEKQKERVPKKQLDVSKIKNFKNVLLDSWNAFTLEDKADFIKMAIKSIEIEYIHVKKGRTKHSIKIKNIDFY

SEQ ID NO: 29727 - DNA, 50 bp, Staphylococcus argenteus; identical to SEQ ID NO: 29722
  source 1..50: mol_type = genomic DNA

SEQ ID NO: 29728 - DNA, 40 bp, Staphylococcus argenteus
  source 1..40: mol_type = genomic DNA
gtacggaggcacttgtataaacgtaggatgtataccttca

SEQ ID NO: 29729 - DNA, 40 bp, Staphylococcus argenteus; identical to SEQ ID NO: 29728
  source 1..40: mol_type = genomic DNA

SEQ ID NO: 29730 - DNA, 50 bp, Staphylococcus argenteus; identical to SEQ ID NO: 29725
  source 1..50: mol_type = genomic DNA

SEQ ID NO: 29731 - protein, 466 aa, Mycobacteroides abscessus
MRSAAVYARISADAEGKSLGVQRQLEDCRRLASDRSWVVGREYVDNDVSAYSGKARPGYEAMCNDLAAGVRDAVIVYNLDRLHRRPVELEEFVALCEAAGVNQVATVTADIDLGNDDGLFMARIFAAFAAKESGRKSARMRRKYEQKAAQGLPHGPNRPFGYEDDKITIRESEGEVIQELVTRVIAGESLNSLTVWLNETGVKPVRGTRWASTAVRNIVSSPRIAGLRAYKGEVVGEAAWPAIISTAERDQVMAALAVRAWNRKRSPRKYLLSGLCRCGRCQARMFSAARLEAGAAKRRYVCSSSPDHGGCGRMTVVAEPLEKLITDAVLTRLDSKALADALAGKARANPDTAALSAQVEQAQARLDELTGLYSSGAISAREWIMARDPITDTIGRLRREIAETLDTGPLAELAGQGSKIRTQWDDLGLDRCHAIIRTVIDHIIVKPGQPGARGLDMGRIDPIWRT

SEQ ID NO: 29732 - DNA, 50 bp, Mycobacteroides abscessus
  source 1..50: mol_type = genomic DNA
aggtcatgtttatgacttgttgagttgcttagttttcgttaaactgacct

SEQ ID NO: 29733 - DNA, 40 bp, Mycobacteroides abscessus; identical to SEQ ID NO: 28128
  source 1..40: mol_type = genomic DNA

SEQ ID NO: 29734 - DNA, 40 bp, Mycobacteroides abscessus; identical to SEQ ID NO: 28128
  source 1..40: mol_type = genomic DNA

SEQ ID NO: 29735 - DNA, 50 bp, Mycobacteroides abscessus
  source 1..50: mol_type = genomic DNA
aggcaatgtttagcaaatattgagttgcatcgttttcttaaaacggacat

SEQ ID NO: 29736 - protein, 526 aa, Roseburia hominis
MAEKRKLAFYIRLSDADEEVKEGTKDESNSITGQRKLLYAYIKKTEEFAGFEVLEYFDDGYSGTMFNNRAEFQRLIQDAELGRFECIIVKDFSRFGRDYLEVGNYLEFVFPAMGMRFISVNDNYDSDRNFGVTGGMDVAYKNLIYQLYSMDLSRKVKSARRTRNLSGEYTASFVCYGYKKDPDDKHKLIIDEEAAKVVVEIFSLIIAGYNASEVARILNERKIPTRVQNQWKNGINYVPVHNKGDYMWDNSEVIAIVQNEQYKGIMIQNKCETVGFGDNKKVRKRNKEDWSVVEGAIPRIVSDEMFDEVNKMLRVEARGIEKSTKKRKKNLFICPYCGRKLMNSSAVCTPKLLCPKRRMVRTGECQQIFMLKSEAQDKVLEITKEICRTLIQEEELKKASKDKRKVTSDEYLISELKAEYDRISNSTVSCYQSYREGKYTKEEYVQLRKTNQELLADLENQISDLQEKVANQEPDAEEKIEQLTQYSMLEQYDGDVLSNIIDKVLIYNDKDIEVVFKGENFIRNAV

SEQ ID NO: 29737 - DNA, 50 bp, Roseburia hominis
  source 1..50: mol_type = genomic DNA
tttgtcccagtcttgacagatgcaggtgcttgagttataattgggacaag

SEQ ID NO: 29738 - DNA, 40 bp, Roseburia hominis
  source 1..40: mol_type = genomic DNA
ctacgatgagattattcttggttttccaatctggtggtat

SEQ ID NO: 29739 - DNA, 40 bp, Roseburia hominis
  source 1..40: mol_type = genomic DNA
ctacgatgagattattcttaattttccaatctggtggtat

SEQ ID NO: 29740 - DNA, 50 bp, Roseburia hominis
  source 1..50: mol_type = genomic DNA
tttttcccatgaatgacaaatttaaatgctgacgtataatttggggcaag

SEQ ID NO: 29741 - protein, 526 aa, Roseburia hominis; identical to SEQ ID NO: 29736

SEQ ID NO: 29742 - DNA, 50 bp, Roseburia hominis; identical to SEQ ID NO: 29737
  source 1..50: mol_type = genomic DNA

SEQ ID NO: 29743 - DNA, 40 bp, Roseburia hominis
  source 1..40: mol_type = genomic DNA
gtacgacaccgtctatgtgggattcccgatctggtggtac

SEQ ID NO: 29744 - DNA, 40 bp, Roseburia hominis
  source 1..40: mol_type = genomic DNA
gtacgacaccgtctatgtgaaattcccgatctggtggtac

SEQ ID NO: 29745 - DNA, 50 bp, Roseburia hominis; identical to SEQ ID NO: 29740
  source 1..50: mol_type = genomic DNA

SEQ ID NO: 29746 - protein, 526 aa, Eubacterium rectale; identical to SEQ ID NO: 29736

SEQ ID NO: 29747 - DNA, 50 bp, Eubacterium rectale; identical to SEQ ID NO: 29737
  source 1..50: mol_type = genomic DNA

SEQ ID NO: 29748 - DNA, 40 bp, Eubacterium rectale
  source 1..40: mol_type = genomic DNA
ccggtacacagctgttgccggagtcacagcttgacaggtt

SEQ ID NO: 29749 - DNA, 40 bp, Eubacterium rectale
  source 1..40: mol_type = genomic DNA
ccggtacacagctgttgccaaagtcacagcttgacaggtt

SEQ ID NO: 29750 - DNA, 50 bp, Eubacterium rectale; identical to SEQ ID NO: 29740
  source 1..50: mol_type = genomic DNA

SEQ ID NO: 29751 - protein, 526 aa, Bacteroides pectinophilus; identical to SEQ ID NO: 29736

SEQ ID NO: 29752 - DNA, 50 bp, Bacteroides pectinophilus; identical to SEQ ID NO: 29737
  source 1..50: mol_type = genomic DNA

SEQ ID NO: 29753 - DNA, 40 bp, Bacteroides pectinophilus
  source 1..40: mol_type = genomic DNA
gtacgatactgtatttgtcggctacccaatctggtggtat

SEQ ID NO: 29754 - DNA, 40 bp, Bacteroides pectinophilus
  source 1..40: mol_type = genomic DNA
gtacgatactgtatttgtcaactacccaatctggtggtat

SEQ ID NO: 29755 - DNA, 50 bp, Bacteroides pectinophilus; identical to SEQ ID NO: 29740
  source 1..50: mol_type = genomic DNA

SEQ ID NO: 29756 - protein, 540 aa, Enterocloster bolteae
MKQPYNTTIYNTALYMRLSRDDELQGESGSIQTQRMMLRQYAAEHGLNVIDEYIDDGWSGTNFDRPDFQRMIDDIEDGKINCVVTKDLSRLGRNYILTGQYTEIYFPSKGVRYIAVNDNVDTINGENELAPFLNILNEMHARQTSKKVKAAMRARFANGAHYGAYAPLGYVKDPDKKGHLLIDPETRWIIEKIFDLAVHGRGAASITRILVEEKVPTPGWLNFQRYGTFANIYAGAPEEKAYAWTIAQVKSILKEETYIGHSVHNKQTNISFKNKKKVRKPKEEWYRVENTHEAIISEDVFRQVQEQICNRRRRQKNGTTQIFSGLVKCADCGWSLAYGMNSQNKNPYAHYHCSKYGQGLHQCSMHYIRYDVLYAYVLSRLQYWSVLAQQDGDKLLKRLLNASDKERNTARKRQTAELKKAEKRKAEVDTLFAKMYEDWSAGRITEYNFNMLSEKYQGEQRELDAKIERLHEAMEVAAQTAVDAEKWIGLMKQYVNPTELTAELLNTLIEKILIHEAVKSEDGSREQEVEIFYRFIGKIE

SEQ ID NO: 29757 - DNA, 50 bp, Enterocloster bolteae; identical to SEQ ID NO: 9162
  source 1..50: mol_type = genomic DNA

SEQ ID NO: 29758 - DNA, 40 bp, Enterocloster bolteae
  source 1..40: mol_type = genomic DNA
cgtgtccaattgggaaacaggcaggagccagccggatctg

SEQ ID NO: 29759 - DNA, 40 bp, Enterocloster bolteae
  source 1..40: mol_type = genomic DNA
cgtgtccaattgggaaacacacaggagccagccggatctg

SEQ ID NO: 29760 - DNA, 50 bp, Enterocloster bolteae
  source 1..50: mol_type = genomic DNA
gactatcaagatacaaaggaaactcaacagtcactttttataagatacca

SEQ ID NO: 29761 - protein, 540 aa, Anaerostipes hadrus; identical to SEQ ID NO: 9161

SEQ ID NO: 29762 - DNA, 50 bp, Anaerostipes hadrus; identical to SEQ ID NO: 9162
  source 1..50: mol_type = genomic DNA

SEQ ID NO: 29763 - DNA, 40 bp, Anaerostipes hadrus
  source 1..40: mol_type = genomic DNA
aatttcaaattgggaaaacggtaagaactatcccgatgta

SEQ ID NO: 29764 - DNA, 40 bp, Anaerostipes hadrus
  source 1..40: mol_type = genomic DNA
aatttcaaattgggaaaaccataagaactatcccgatgta

SEQ ID NO: 29765 - DNA, 50 bp, Anaerostipes hadrus; identical to SEQ ID NO: 29760
  source 1..50: mol_type = genomic DNA

SEQ ID NO: 29766 - protein, 470 aa, Enterocloster citroniae; identical to SEQ ID NO: 18361

SEQ ID NO: 29767 - DNA, 50 bp, Enterocloster citroniae; identical to SEQ ID NO: 9162
  source 1..50: mol_type = genomic DNA

SEQ ID NO: 29768 - DNA, 40 bp, Enterocloster citroniae
  source 1..40: mol_type = genomic DNA
gatctcaaaatgggagaggggactggggtgcccggatgta

SEQ ID NO: 29769 - DNA, 40 bp, Enterocloster citroniae
  source 1..40: mol_type = genomic DNA
gatctcaaaatgggagaggcaactggggtgcccggatgta

SEQ ID NO: 29770 - DNA, 50 bp, Enterocloster citroniae; identical to SEQ ID NO: 29760
  source 1..50: mol_type = genomic DNA

SEQ ID NO: 29771 - protein, 502 aa, Enterobacter hormaechei
MTLAFSYARFSTKSQAIGTSLERQLNASRLFCSERGLTLSPKGYHDLGVSGFKQVKRPELEQMLHAIQSGDIPSGSYILIEAIDRLSRKGISHTQDVLKQILQYKVKVAFVGEDAKTLNGQVLDEHSLNDLSSVILVALAADLAHKESVRKSKLVKAAKLIIRKKATEGHKVRGHTMFWIDWSDKKQDFVLNDRVKDVQTIIQLRREGQGPRKIAKTMNELGIKGPRGNLWNHMSVTIVLKSPVLYGAYQTHQIIEGQKVPDVLLENHYPALLTKEEYIKIQADSSKANKGRPSKANPFSGVLRCECGQAMLFSKRTNLDKNGDPLEYEYHFCIGSTEGRCKNKKRIRDLVPLLASIMDKLVINQTPTKNLNAELIKATEQKIEKLNNMLVELDNPPMSVLKTIQKLEQELDILLNTHIEEPVQADVKTLSSISDAQEYNQHLKRLVKQIVVYQINGPRNLRIKVHKTDGHYQNFLVKDNKILFKSDTKALKELIDEFNKAR

SEQ ID NO: 29772 - DNA, 50 bp, Enterobacter hormaechei; identical to SEQ ID NO: 15647
  source 1..50: mol_type = genomic DNA

SEQ ID NO: 29773 - DNA, 40 bp, Enterobacter hormaechei; identical to SEQ ID NO: 21433
  source 1..40: mol_type = genomic DNA

SEQ ID NO: 29774 - DNA, 40 bp, Enterobacter hormaechei
  source 1..40: mol_type = genomic DNA
aatgccggcaaagaaatcgtcgaaaatgtttgcgcccaga

SEQ ID NO: 29775 - DNA, 50 bp, Enterobacter hormaechei
  source 1..50: mol_type = genomic DNA
tgtgtcaatttcccaaaacactcttctgagatttttatcaaagtgacatt

SEQ ID NO: 29776 - protein, 502 aa, Enterobacter hormaechei
MTLAFSYARFSTKSQAIGTSLERQLNASRLFCSERSLTLSPKGYHDLGVSGFKQVKRPELEQMLHAIQSGDIPSGSYILIEAIDRLSRKGISHTQDVLKQILQYKVKVAFVGEDAKTLNGQVLDEHSLNDLSSVILVALAADLAHKESVRKSKLVKAAKLIIRKKATEGHKVRGHTMFWIDWSDKKQDFVLNDRVKDVQTIIQLRREGQGPRKIAKTMNELGIKGPRGNLWNHMSVTIVLKSPVLYGAYQTHQIIEGQKVPDVLLENHYPALLTKEEYIKIQADSSKANKGRPSKANPFSGVLRCECGQAMLFSKRTNLDKNGDPLEYEYHFCIGSTEGRCKNKKRIRDLVPLLASIMDKLVINQTPTKNLNAELIKATEQKIEKLNNMLVELDNPPMSVLKTIQKLEQELDILLNTHIEEPVQADVKTLSSISDAQEYNQHLKRLVKQIVVYQINGPRNLRIKVHKTDGHYQNFLVKDNKILFKSDTKALKELIDEFNKAR

SEQ ID NO: 29777 - DNA, 50 bp, Enterobacter hormaechei; identical to SEQ ID NO: 15647
  source 1..50: mol_type = genomic DNA

SEQ ID NO: 29778 - DNA, 40 bp, Enterobacter hormaechei; identical to SEQ ID NO: 21428
  source 1..40: mol_type = genomic DNA

SEQ ID NO: 29779 - DNA, 40 bp, Enterobacter hormaechei
  source 1..40: mol_type = genomic DNA
tctgggcgccaacattttctccgatttctttgccggcatt

SEQ ID NO: 29780 - DNA, 50 bp, Enterobacter hormaechei; identical to SEQ ID NO: 29775
  source 1..50: mol_type = genomic DNA

SEQ ID NO: 29781 - protein, 502 aa, Enterobacter hormaechei
MTLAFSYARFSTKSQAIGTSLERQLNASRLFCSERSLTLSPKGYHDLGVSGFKQVKRPELEQMLHAIQSGDIPSGSYILIEAIDRLSRKGISHTQDVLKQILQYKVKVAFVGEDAKTLNGQVLDEHSLNDLSSVILVALAADLAHKESVRKSKLVKAAKLIIRKKATEGHKVRGHTMFWIDWSDKKQDFVLNERVKDVQTIIQLRREGQGPRKIAKTMNELGIKGPRGNLWNHMSVTIVLKSPVLYGAYQTHQIIEGQKVPDVLLENHYPALLTKEEYIKIQADSSKANKGRPSKANPFSGVLRCECGQAMLFSKRTNLDKNGDPLEYEYHFCIGSTEGRCKNKKRIRDLVPLLASIMDKLVINQTPTKNLNAELIKATEQKIEKLNNMLVELDNPPMSVLKTIQKLEQELDILLNTHIEEPVQADVKTLSSISDAQEYNQHLKRLVKQIVVYQINGPRNLRIKVHKTDGHYQNFLVKDNKILFKSDTKALKELIDEFNKAR

SEQ ID NO: 29782 - DNA, 50 bp, Enterobacter hormaechei; identical to SEQ ID NO: 15647
  source 1..50: mol_type = genomic DNA

SEQ ID NO: 29783 - DNA, 40 bp, Enterobacter hormaechei; identical to SEQ ID NO: 21433
  source 1..40: mol_type = genomic DNA

SEQ ID NO: 29784 - DNA, 40 bp, Enterobacter hormaechei; identical to SEQ ID NO: 29774
  source 1..40: mol_type = genomic DNA

SEQ ID NO: 29785 - DNA, 50 bp, Enterobacter hormaechei; identical to SEQ ID NO: 29775
  source 1..50: mol_type = genomic DNA

SEQ ID NO: 29786 - protein, 502 aa, Enterobacter hormaechei; identical to SEQ ID NO: 29781

SEQ ID NO: 29787 - DNA, 50 bp, Enterobacter hormaechei; identical to SEQ ID NO: 15647
  source 1..50: mol_type = genomic DNA

SEQ ID NO: 29788 - DNA, 40 bp, Enterobacter hormaechei; identical to SEQ ID NO: 21438
  source 1..40: mol_type = genomic DNA

SEQ ID NO: 29789 - DNA, 40 bp, Enterobacter hormaechei
  source 1..40: mol_type = genomic DNA
tctgggcgcaaacattttctccgatttctttgccggcatt

SEQ ID NO: 29790 - DNA, 50 bp, Enterobacter hormaechei; identical to SEQ ID NO: 29775
  source 1..50: mol_type = genomic DNA

SEQ ID NO: 29791 - protein, 502 aa, Salmonella enterica
MTLAFSYARFSTKSQAIGTSLERQLNASRLFCSERGLTLSPKGYHDLGVSGFKQVKRPELEQMLHAIQSGDIPSGSYILIEAIDRLSRKGISHTQDVLKQILQYKVKVAFVGEDAKTLNGQVLDEHSLNDLSSVILVALAADLAHKESVRKSKLVKAAKLIIRKKATEGHKVRGHTMFWIDWSDKKQDFVLNDRVKDVQTIIQLRREGQGPRKIAKTMNELGIKGPRGNLWNHMSVTIVLKSPVLYGAYQTHQIIEGQKVPDVLLENHYPALLTKEEYIKIQADSSKANKGRPSKANPFSGVLRCECGQAMLFSKRTNLDKNGDPLEYEYHFCIGSTEGRCKNKKRIRDLVPLLASIMDKLVINQTPKKNLNTELIKATEQKIEKLNNMLVELDNPPMSVLKTIQKLEQELDILLNTHVEEPVQADVKTLSSISDAQEYNQHLKRLVKQIVVYQINGPKNLRIKVHKTDGHYQNFLVKDNKITFKSDTKALKELIDEFNKAR

SEQ ID NO: 29792 - DNA, 50 bp, Salmonella enterica; identical to SEQ ID NO: 15647
  source 1..50: mol_type = genomic DNA

SEQ ID NO: 29793 - DNA, 40 bp, Salmonella enterica
  source 1..40: mol_type = genomic DNA
tttaggcgccaatattttccgcgattttttcgccggcatt

SEQ ID NO: 29794 - DNA, 40 bp, Salmonella enterica
  source 1..40: mol_type = genomic DNA
tttaggcgccaatattttctccgattttttcgccggcatt

SEQ ID NO: 29795 - DNA, 50 bp, Salmonella enterica; identical to SEQ ID NO: 29775
  source 1..50: mol_type = genomic DNA

SEQ ID NO: 29796 - protein, 502 aa, Enterobacter asburiae
MTLAFSYARFSTKSQAIGTSLERQLNASRLFCSERSLTLSPKGYHDLGVSGFKQVKRPELEQMLQAIQSGDIPSGSYILIEAIDRLSRKGISHTQDVLKQILQYKVKVAFVGEDAKTLNGQVLDDHSLNDLSSVILVALAADLAHKESVRKSKLVKAAKLIIRKKATEGHKVRGHTMFWIDWSDKKQDFVLNDRVKDVQTIIQLRREGQGPRKIAKTMNELGIKGPRGNLWNHMSVTIVLKSPVLYGAYQTHQIIQGQKVPDVLLENHYPALLTKEEYIKIQADSSRANKGRPSKANPFSGVLRCECGQAMLFSKRTNLAKNGDPLEYEYHFCIGSTEGRCKNKKRIRNLVPLLASIMDKLVINQTPKKNLNTELIKSTEQKIEKLNNMLVELDNPPMSVLKTIQKLEQELDILLNTHVEEPIQADVKTLSSISDAQEYNQHLKRLVKKIVVYQINGPKNLRIKVHKTDGHYQNFLVKDGKVLFKSDTKALTELIDGFNKAR

SEQ ID NO: 29797 - DNA, 50 bp, Enterobacter asburiae; identical to SEQ ID NO: 15647
  source 1..50: mol_type = genomic DNA

SEQ ID NO: 29798 - DNA, 40 bp, Enterobacter asburiae
  source 1..40: mol_type = genomic DNA
gataccggcaaaaaagtcgcggaagatattggcgccgaga

SEQ ID NO: 29799 - DNA, 40 bp, Enterobacter asburiae
  source 1..40: mol_type = genomic DNA
gataccggcaaaaaagtcgtcgaagatattggcgccgaga

SEQ ID NO: 29800 - DNA, 50 bp, Enterobacter asburiae; identical to SEQ ID NO: 29775
  source 1..50: mol_type = genomic DNA

SEQ ID NO: 29801 - protein, 502 aa, Leclercia adecarboxylata; identical to SEQ ID NO: 29776

SEQ ID NO: 29802 - DNA, 50 bp, Leclercia adecarboxylata; identical to SEQ ID NO: 15647
  source 1..50: mol_type = genomic DNA

SEQ ID NO: 29803 - DNA, 40 bp, Leclercia adecarboxylata
  source 1..40: mol_type = genomic DNA
tctcggcgccaatatcttccgcgacttttttgccggtatc

SEQ ID NO: 29804 - DNA, 40 bp, Leclercia adecarboxylata
  source 1..40: mol_type = genomic DNA
tctcggcgccaatatcttctccgacttttttgccggtatc

SEQ ID NO: 29805 - DNA, 50 bp, Leclercia adecarboxylata; identical to SEQ ID NO: 29775
  source 1..50: mol_type = genomic DNA

SEQ ID NO: 29806 - protein, 498 aa, Faecalibacterium prausnitzii
MNNRIDAIYARQSVDKKDSISIESQIEFCKYELKGGNCKEYTDKGYSGKNTDRPKFQELVRDIKRGLIAKVIVYKLDRISRSILDFANMMELFQQHDVEFVSSTEKFDTSTPMGRAMLNICIVFAQLERETIQKRVADAYYSRSLKGFRMGGKAPYGFHTEPIKIDGINTKKLVANPEEAEQVKLMFEMYAEPGTSYGDIVRHFAEHGIKDFSRPALASLLCNPIYVKADLDIYEFFKSQGTVIINDAADFTGTNGCYFYRGRGMKGDTKHNLQGHTLVMAPSEGLVSSELWLKCRKKILANTSYQAGRKAVNTWLAGKIKCGRCQKALKAEGSYGRWYFRCSKRSDNKSCEGAGTLRIPDTEAVIYAAMVKKLKPFQTIKGRKNAMKSNPKLTALQVELAQIQHEIETLIDTLTGANPVLLSYVNSKIEELDGRKQELVKKIAELSVDTISPEQVKEISGYLDTWEEVDFDDKRRVVDLMISAIYATSESINIVWKI

SEQ ID NO: 29807 - DNA, 50 bp, Faecalibacterium prausnitzii; identical to SEQ ID NO: 13372
  source 1..50: mol_type = genomic DNA

SEQ ID NO: 29808 - DNA, 40 bp, Faecalibacterium prausnitzii
  source 1..40: mol_type = genomic DNA
ccgtccgccgaaacatactacacgatcttttagatagatt

SEQ ID NO: 29809 - DNA, 40 bp, Faecalibacterium prausnitzii
  source 1..40: mol_type = genomic DNA
ccgtccgccgaaacatactttacgatcttttagatagatt

SEQ ID NO: 29810 - DNA, 50 bp, Faecalibacterium prausnitzii
  source 1..50: mol_type = genomic DNA
gtttcaccccattccaaccaagctttgcctcactatggatcccgcgaaaa

SEQ ID NO: 29811 - protein, 589 aa, Methylobacterium durans
MSVKHLAFSYVRMSTEKQIKGDSLRRQLEWGQQYAKTHNLLLDDGLRDIGVSAWKGINRKKGALGEFLRMVETGTITRGSFLLVESLDRLSRTQVMDALQLFTGILRRGITIVTMGPPEQIYTWESINGDFGQLIITLTVMARAHEESQRKSERIRAAFANKRKLSQLGVRTNSSPPRWITATQIAKGEFTYTLNERLPLIEWIFQRSADGVGFDRIAKELNARNEPTLKPSTRGWFFTSVANIVQSRAAIGEYQPHEGVDGKRIPRGDIIVDYYPKAVSEELFLRAQKITHRNRIGGRGGKYFTNLLDGMAQCTHCRSRMYILNNSPSDKQYRYLVCSANYRQIAVEDQTPVCSQGTMRFRYDQAEQFILDNVSEFGISDILQMRRVDADVQQREEKLASLSIKLEDTVRREARLLTVLESEDVDDLPGILALARQRTQEREKIEGLIRALRHERDVAMAKKRGLDPANAIQALRDAWLTAEDENDRYGLRVRCNTAMKDFIDSIQFDSREGSYTAILFGGYRAYKFFNITRVRNATQEPLVVDMQPLVNTGLWPSNLKHAEARQLIQHNLENTPAVTTQNYRSAKSK

SEQ ID NO: 29812 - DNA, 50 bp, Methylobacterium durans
  source 1..50: mol_type = genomic DNA
tttagtgccaagccaaaacacgcttaacgtttttttgatttgccactaat

SEQ ID NO: 29813 - DNA, 40 bp, Methylobacterium durans
  source 1..40: mol_type = genomic DNA
cccctactcggccaagccctacgtgctgttctacaccacg

SEQ ID NO: 29814 - DNA, 40 bp, Methylobacterium durans
  source 1..40: mol_type = genomic DNA
cccctactcggccaagccccacgtgctgttctacaccacg

SEQ ID NO: 29815 - DNA, 50 bp, Methylobacterium durans
  source 1..50: mol_type = genomic DNA
ttttgtttactttgaaaacaggttcaacctttttttttaaagcaaccaat

SEQ ID NO: 29816 - protein, 530 aa, Vibrio parahaemolyticus
MRQAYSYVRLSSKKQILGYGQERQWEAIQSAALAHNWELSDKTFSDLGVSGWKGVNIDTGALSQFLRCVEDGYIEQGSVLIVENVDRLSRAGVNRAVTLLMQLLDNGISIYTLTDSKLYEPESPNPLMDLMGWALSAQRAFEESERKSQMILNAKAKAREEARLTGKIITRRCPSWLRVNDDKTAFELLPERVETVQKIFDLYTSGYGTPRIGRLLTEEGRKPLNGRAWYARSLSRIIQYRAVLGEYQPTLNGKPEGEPVKEYYPAIISEDQFNEAQAIMKAGGAGKGRRGEDMRNYFAGLLRCSCGEGMHITSSRVKGKRYYQLRCLQYRISCTNATWNFNKASTYILFGLRRLPILEVMGTDNNKDIKELNNSIRDLTAQLDSSKQQLENTTNAIAELGLSDQLKNKFRELTVLVEDTERQLAEAKSSLDKSHGETAIKKQDTEMLTGRFLELIENTKDVDDRIKLNQVLRRYLSKIVLDADKEKDNRFIEIYRKDGELLVTAKLDHKLNGGTFESSEASEAVELKRA

SEQ ID NO: 29817 - DNA, 50 bp, Vibrio parahaemolyticus
  source 1..50: mol_type = genomic DNA
ttatgtcgttaagaaaacttaactaaggtattgtataggttatgacataa

SEQ ID NO: 29818 - DNA, 40 bp, Vibrio parahaemolyticus; identical to SEQ ID NO: 4428
  source 1..40: mol_type = genomic DNA

SEQ ID NO: 29819 - DNA, 40 bp, Vibrio parahaemolyticus; identical to SEQ ID NO: 28629
  source 1..40: mol_type = genomic DNA

SEQ ID NO: 29820 - DNA, 50 bp, Vibrio parahaemolyticus
  source 1..50: mol_type = genomic DNA
ttatgtcgttccgcatacttctctcctggattgtatcacaagggaaaaaa

SEQ ID NO: 29821 - protein, 582 aa, Rhodobacter sphaeroides
MTNPASRPKAYSYIRMSSAIQIKGDSFRRQAEASAKYAAEHDLDLIDDYKLADLGVSAFKSDNLTTGALGRFVAECEAGEIEAGSFLLIESLDRLSRDKILDAFSLFARILKTGVKIVTLSDGQVYDGSSDQVGSIYYAISVMIRSNDESKIKSTRGLANWSQKRKLAAEHGVKMSSQCPAWLKLSVDRKSYLIDKERAKIVQRIFEASASGKGANLITKELNRDKVPTFGRGALWAEAFVSKTLRNRAVLGEFQPGQYVSGKRQPAGDPIPGYFPPVIEEELFDIVQASLRGRLLAGGRRGEGQSNIFTHVAFCGYCGSKMRHRSKGSRVKGNPPHRYLTCFNRFNGPGCDCKPLPYAAFERSFLTFVRDVDLRGLLEGAKRKSEAKTIADRITVNEEKVRKADERIRDYLIKIEGAPDLAEIFMERIRELKAEKDDLVRSIEESNDALSKIKSDNVTDEELASLISTFQNPCGENRIRLADRIKSIIERIDVYPNGEIRKDDPAIDLVRASGDPDAEKIIAAMNAGSRLKDDPYFIVTFRNGAVQTVVPNPSNPDDIRVSVYAGEKTRRVEGSAYEYESD

SEQ ID NO: 29822 - DNA, 50 bp, Rhodobacter sphaeroides
  source 1..50: mol_type = genomic DNA
aagggtaaaatacccttcacattcttgaacatgattggtattgtgacccc

SEQ ID NO: 29823 - DNA, 40 bp, Rhodobacter sphaeroides
  source 1..40: mol_type = genomic DNA
ggtgggccccttcatcttcttcgaccagatgggcccggcg

SEQ ID NO: 29824 - DNA, 40 bp, Rhodobacter sphaeroides; identical to SEQ ID NO: 29823
  source 1..40: mol_type = genomic DNA

SEQ ID NO: 29825 - DNA, 50 bp, Rhodobacter sphaeroides
  source 1..50: mol_type = genomic DNA
gagggtaaacttaaccccaaatccttgaacattatgagtaatgtgactgc

SEQ ID NO: 29826 - protein, 491 aa, Rhodococcus erythropolis
MQDRNTNSPNTFAAIYCRISSDKTGKSAGVERQQADCRTMADRLGLTVQHVLVDNDISAYSGKPRPGYKQLLELMRTGAVGTVLAYHQDRLQRSPVELEEYVDVSEIHRVTTHTVLAGHIDLSTPSGRFNARIIGAAARYEVEHMIERQQTAKLQAAKDGKYLGGQRPFGFEPQRKAIRESEAAIIRDMYERFVVGRSWWSIAVSLNQRGIRTTHGKDWNSLKVRNVLIRPINAGIVLHKGVEYPAQSPAILSPDEWANLKLAIDISRRKSPHPGRARKHLLKGFLICGACGEKMFHKSKQQRDGSYKTTAACGKTDNQTGRQHGCGKVSRMVEPIIDLVVDSIMFRLNSPELATTLHKHKTSADTLKTLNDQQRALESSINEITDDYYVNKLLTRDQFERAKTQADNDLALITKQIDAELVSEAVNTTDVSGDLRERWENETLEWQRSLLFLLIDRISVHPLPRVPGYKYPKYKSKWRFDPDLIQIEWKA

SEQ ID NO: 29827 - DNA, 50 bp, Rhodococcus erythropolis
  source 1..50: mol_type = genomic DNA
tggggtggcgtccgatctttcgcgtcgtcgaaagattgtgaaatgcccca

SEQ ID NO: 29828 - DNA, 40 bp, Rhodococcus erythropolis
  source 1..40: mol_type = genomic DNA
caccccgatctcggcacattcgtcgagaaacagcacgccg

SEQ ID NO: 29829 - DNA, 40 bp, Rhodococcus erythropolis
  source 1..40: mol_type = genomic DNA
caccccgatctcggcacataagtcgagaaacagcacgccg

SEQ ID NO: 29830 - DNA, 50 bp, Rhodococcus erythropolis
  source 1..50: mol_type = genomic DNA
tgggctggcatttaatgggccgggaattctaaagatcctgcaatgcccaa

SEQ ID NO: 29831 - protein, 523 aa, Eubacterium rectale
MRFFSYGRKSVFSDKSDSIDNQFRMNREYCESKFSGQVDSWQQFSDEDFTGANTSRPDLQRMLSFIKGGFCDVLVVYQLDRLSRDVRDFANIYALLEEHGVMFISIKENIDTTTPIGRAMMYVTVVFAQMERETIAARVTDNMLGLAKKGYWTGGNPPVGYVRKHIVVNGKKHCSIEVDPDGARYVTQIFDTFLAYNCSLQGMETRFKNQGIRTQSGKFFSTTQLHKILTMPYCVEATPEVYDFYAAKGCIMDPGSPREMWDGSVGVIIYGRSTEKNKKHQAQPPEKWTVCLGKHKPFMPAEKWLAVQSRFTQNKCIKDAKWPVPLLKGVLRCKCGNLMQVSRKKKVDGTCSSWYYCRKRMRQGVDACDMGQIKCDLLDEEVLELFRGITADPALIQKFVKAETPADVPDLKAAQARVSACERKIGRLAASLALAEDSAASKYIIAEMERLDVELGALKREASLAEMESHRAAASAKDAKATAAEIAKLIHGLDGFDDKEKNAIARAVIQECTWDGERLFITL

SEQ ID NO: 29832 - DNA, 50 bp, Eubacterium rectale
  source 1..50: mol_type = genomic DNA
tcactatttcataatggtggggttccgcccgcaatataaaaaagtgaatg

SEQ ID NO: 29833 - DNA, 40 bp, Eubacterium rectale
  source 1..40: mol_type = genomic DNA
tcgcccactattatcctgtccggtctcatacgaagagccg

SEQ ID NO: 29834 - DNA, 40 bp, Eubacterium rectale
  source 1..40: mol_type = genomic DNA
tcgcccactattatcctgtggggtctcatacgaagagccg

SEQ ID NO: 29835 - DNA, 50 bp, Eubacterium rectale
  source 1..50: mol_type = genomic DNA
ttgatattctcagatggtgggtttgggaatggaatagagataagtgaatg

SEQ ID NO: 29836 - protein, 589 aa, Cronobacter sakazakii; identical to SEQ ID NO: 12416

SEQ ID NO: 29837 - DNA, 50 bp, Cronobacter sakazakii
  source 1..50: mol_type = genomic DNA
ttatacccattacacttcagtgaatactaaagtaaaatacacctcattaa

SEQ ID NO: 29838 - DNA, 40 bp, Cronobacter sakazakii
  source 1..40: mol_type = genomic DNA
ttggcgtgaccatcggcaacaccgacggcaatattatcga

SEQ ID NO: 29839 - DNA, 40 bp, Cronobacter sakazakii
  source 1..40: mol_type = genomic DNA
ttggcgtgaccatcggcaaatccgacggcaatattatcga

SEQ ID NO: 29840 - DNA, 50 bp, Cronobacter sakazakii
  source 1..50: mol_type = genomic DNA
ttatacccagcttccttgagtcacatttaaactgaaacaatgatctttaa

SEQ ID NO: 29841 - protein, 585 aa, Bradyrhizobium japonicum
MQSQPNCFTSSFRLARLDGRAQKGRIRMARKHLQTLKATSEEVAKTSRNVLIYIRVSTDAQAQNALSLTDQENQLIDRCKRDGDNIVGVFRDEGETATNMKRPAFEQMVARATDGTRSVNAILVYSFSRAFRNQFEQELTVRALRKHKVELISFAEPLANDASGDMFRKFIGIVNEFQSAETSRATTRTMKENARRGFSNGGIIPFGYKSIDAEIIGNKQKKKLAVEPVEAEIVVRAFDLARNGDGNSGPLGTKKIAIWLNERGFRSRNGSLFGTGTVHEILTREAYTGVRRFNEFNRKGDGERKEAAEIVEYEIPTIIDRALFDEVQALLVARQPRARGPRLTSAPSLLGGLVRCDCKVSCALSAATGTSRTGKIYSYYKCIQATKQGRHKDGNGANCVNRKIPRPVIEKLVVEALSDQLLQPDRVTSILLTLKARRDERQASADRRIVDLARQATEAEERLGRLYAAIEAGTLDGTDPTLKERVAALKASRDRAAEALDYAKKSSATPIEIDPVAVDRFTRLMREQLVSGDVAGRKAYLSSVVDAIIVSEDKIRIIGSNDNIRSTFGPQGQPSPRVRNLFRNG

SEQ ID NO: 29842 - DNA, 50 bp, Bradyrhizobium japonicum
  source 1..50: mol_type = genomic DNA
gttcgtaatctgttcaggaatggtgcgccattcagaataaaagtgtgaac

SEQ ID NO: 29843 - DNA, 40 bp, Bradyrhizobium japonicum
  source 1..40: mol_type = genomic DNA
cgaagcagcgaaggctggtgcccctggccggaatcgaacc

SEQ ID NO: 29844 - DNA, 40 bp, Bradyrhizobium japonicum
  source 1..40: mol_type = genomic DNA
cgaagcagcgaaggctggtctccctggccggaatcgaacc

SEQ ID NO: 29845 - DNA, 50 bp, Bradyrhizobium japonicum
  source 1..50: mol_type = genomic DNA
tttcgtactgctcccaggaatgttctgccttttagaactagaggctgatt

SEQ ID NO: 29846 - protein, 556 aa, Streptococcus mitis
MTNSTLTKQIPDWTEVEFEGLSEISVLYCRLSAEDANEGESNSISNQRLILSKLAERENLNNPIVFYDDGYSGSNAQRPAFQQALALVKNNQVSNFVVKDLSRVSRDYLLSGNLLEVVFPSKNIRFISLQENIDSNKKSSQDAYLTPLVSLFNNWYSMQCSEKIKLSKHTKAKNGEKIGWITPYGYLNNPENRKEWLVDKYASEIVKRIFSEYISGRTPTEIAQGLRRDKILTPARYKKKLGVSNYRILESDPCYWKTQMIWQILEKEEYIGSTINLKTAKISYKQRNCRLRPREDWLIFPDSHEAIISKEDFEIARKMMNHKRVVQRHNWKDNPGHENLFAGLLYCENEHKLSFCPQEKDGVNLDHYKCYHFKRAGDTCSGGHYLRKEVLENLILNELQELINSFQINEADFLQRLKDKFEIKETKKFSKLQKQLSKDEQRIAELDTIIQKLYEKQLLGEIADDRFKKLCDSYEAEQAELKEKVQTATTTLGVKMKSAHNIEKFMTAIRKYTQLEKLTPKIINELIDKIIVHQPIGRGKNRQIKLEIHYRFIGDI

SEQ ID NO: 29847 - DNA, 50 bp, Streptococcus mitis
  source 1..50: mol_type = genomic DNA
ggactgctgagcgagttgtggtataatgtccacacctcacccagcagtcc

SEQ ID NO: 29848 - DNA, 40 bp, Streptococcus mitis
  source 1..40: mol_type = genomic DNA
ctgtcacgaactatggtataatgagagaatgaaataccca

SEQ ID NO: 29849 - DNA, 40 bp, Streptococcus mitis
  source 1..40: mol_type = genomic DNA
ctgtcacgaactatggtatgttgagagaatgaaataccca

SEQ ID NO: 29850 - DNA, 50 bp, Streptococcus mitis
  source 1..50: mol_type = genomic DNA
agtctgctgattttgttgtgctatgtagtctgcaccccaccccccagtgc

SEQ ID NO: 29851 - protein, 546 aa, Ralstonia pickettii
MSKARVYSYLRFSDPKQAAGSSADRQMEYARRWALERQLELDDSLSLRDEGLSAYHQRHVKQGALGVFLSAVEDGRIPAGSVLIVEGLDRLSRAEPIQAQAQLAQIVNAGITVVTASDGKEYNRERLRAQPMDLVYSLLVMIRAHEESDTKSKRVKAALRRQCQQWIDGAWRGIIRSGRDPHWVTVSDGKFVLVPERAEAIREALAMFSRGHGRTKIVRTLTERGLAMSDNGNNGLQFYRTVRNPMLMGTRVFEIDGEEYRLEGYYPALLTAEEFSVLQQLVELRAGTKVKGEVPGLFTGLGIAHCGYCGAAMIGQNYMHRANKESGTLKDGHRRLSCVTYSRDSGCLSPGSVSIVPVERAIMTFCADQMNLTRLLEGDDGATAVAARLATARRNAGDLREKLDRLTTVMLADDASAPPATFLRKARELEEQLAAQRQAIASLEGELLACTSAVAPVAAEVWANLTEGVLSLDYESRVQARQLVADTFSRVVIYRAGFKPVDGGEKRIGIQLVAKHGNVRMLTVDRKTGAWRAAEDFDMRALDDTR

SEQ ID NO: 29852 - DNA, 50 bp, Ralstonia pickettii
  source 1..50: mol_type = genomic DNA
gatatctattttttagttcctatgggcacccaagtgataccattcctata

SEQ ID NO: 29853 - DNA, 40 bp, Ralstonia pickettii
  source 1..40: mol_type = genomic DNA
gagtctacgagcgccttggggcaaccaaggctcacgaacc

SEQ ID NO: 29854 - DNA, 40 bp, Ralstonia pickettii
  source 1..40: mol_type = genomic DNA
gagtctacgagcgccttgggccaaccaaggctcacgaacc

SEQ ID NO: 29855 - DNA, 50 bp, Ralstonia pickettii
  source 1..50: mol_type = genomic DNA
gttttctcccaccaatttcctattgccacccaatagcagtgaatcctata

SEQ ID NO: 29856 - protein, 584 aa, Dorea longicatena
MNDVQVIKANRNENRIRGRKVEILRVAAYCRVSTDSEDQLNSYKSQVMYYTDLIKKKPEWSLADIYADEAITGTQVTKREDFQRMINDCMNGDIDMVITKSISRFARNTLDTLKYVRMLKEKGIAVFFEDENINTLTMDGELLLVVLSSVAQQEVENISSNVKKGLKMKMQRGELVGFQGCLGYDYHKDTKSISVNEKEAEIVRYIFNRYIEGAGCTVIANELENLGYKTKYGSSRWVQSTVIGIIKNEKYKGDLLLGKTFTVDPISKRRLENFGEEDKFYIRDHHEAIISEEIFEEAQKILAKRNVNRGVHQEGQKRNKFSRKYAFSCMIKCGFCGGTLSRRNWHSSSAYTKTIWHCVTATKHGKKNCPHCKGIPEEVIENAFVKSYQLLCSDQHEVVSEFLQKVEDILKDDASLKRLPKIEKEMTDLQRRKEKLLDLRLDNNIDRDIYDKKNQELSEQLKKLQGEQLQLVELSKNQESTKTRIREFRKNLNSGELLESFDRVVFESVVERIIIGGYNDEGVEDPLKITFVYKTGIHSNLNAKDFKPKRKNAAAVHTDAELCSYASVEDNKLCLHSSSDTCGD

SEQ ID NO: 29857 - DNA, 50 bp, Dorea longicatena; identical to SEQ ID NO: 567
  source 1..50: mol_type = genomic DNA

SEQ ID NO: 29858 - DNA, 40 bp, Dorea longicatena
  source 1..40: mol_type = genomic DNA
tttgttcccgggaacttatcatgtggagacggttgctctt

SEQ ID NO: 29859 - DNA, 40 bp, Dorea longicatena
  source 1..40: mol_type = genomic DNA
tttgttcccgggaacttattttgtggagacggttgctctt

SEQ ID NO: 29860 - DNA, 50 bp, Dorea longicatena
  source 1..50: mol_type = genomic DNA
tccgtttgtattctagctctgacatttgtgaagtcatgtgagttgagaca

SEQ ID NO: 29861 - protein, 586 aa, Pseudomonas syringae
MAKIWPYIRFSSEEQKHGDSRRRQRELVESFARRHEIVAEGSVIDDSLDLNDLGVSGYRGKNLLTGRFKVFLDAVEAGIVKPGDYLAVEALNRITRLDPMESLPIILNLIQEKGIKIAITSGSQIYKKGDDISSLYIALGELQRGFKESQEKGVRVKEAWNSKKKRAADLGEIATSRVPLWLAVDTTRLDSGTIKRTIREIEERVAVVREIFRLSDINIGAVATARMLTDRGVPTFTRENARKNSNYGDFWQVTYIRKILANRAVLGHYQPMQWLEVDGKRSRVNHGAEIKNYFPQIIGLELFDRVQLKKDSRKNEGQGNKGLKFSNLFTKMAFCSECGAVAHHVNKGKDPKKGGRYLVCYRAKYGSCAYKSWRYEKVESMILSYLAEADIKSIMRDDNKVDALINERYKIESEFISVSEMLENFRKDFKALNGRISNTERELAIENEARLVEFKSKLQSLDAEILDAIEQQKADIKQEVKALQEMESVADENTVFEIRSKINARLKLVVDRIVLNFALQVAEVRFKNGVVRYIHEDGVFGNIMPPPTPEQSLEDLRQIEEWSKLSDDEKRSTWADSAFPIVPLKI

SEQ ID NO: 29862 - DNA, 50 bp, Pseudomonas syringae
  source 1..50: mol_type = genomic DNA
tgggtccaatgctagctttaaagaaggatttcagctagcattggacctac

SEQ ID NO: 29863 - DNA, 40 bp, Pseudomonas syringae
  source 1..40: mol_type = genomic DNA
gccgggtggcccgctgaacagcaggttatgcgcccccgcc

SEQ ID NO: 29864 - DNA, 40 bp, Pseudomonas syringae
  source 1..40: mol_type = genomic DNA
gccgggtggcccgctgaacttcaggttatgcgcccccgcc

SEQ ID NO: 29865 - DNA, 50 bp, Pseudomonas syringae
  source 1..50: mol_type = genomic DNA
tgggtcgaactttgactttaaatgttcattacagctaattatggattttc

SEQ ID NO: 29866 - protein, 574 aa, Frankia casuarinae
MINQRPPAIRGEQAIAYYRVSSSGQVNTDYDPEGISLPAQRVACKQRARELGVVLVDEYIDPGKSGKTIDQRPAFQEMIARIKADRHIKHVFVYALSRFARNRYDDAIMMMTLERLGVQLHSATEKNLDTTPAGQAMHGMIAVFNEYQVRVSGEDIKYKMGQKAKKGGTLGVAPLGYLNVREQFEGREVRTVALDPERAPFVVMAFELYATGKFNFHTLRDALTEAGFRTRPTKQWASRPISINKIGEMLRDRYYLGYVRYDGEEYEGRHEPLISQELFDRVQRVLYAERRAGTRHRTHDHYLKGLVWCDRCRRRLIIMPGKSKSGVRYFYYICQGRLDHQCDLPYMAVSRVERAIEDFYVNVRLTPDFRATVQAHLDEMMASTSDASRRLRARYERQLKELDVREDGLLDLVGDPDWPKEKLTAKIRAVREERTRLEDRLAESDRPLDTGHEVLATVLRLLEDPQTLYRRAGVRARKVLNMAIFTKLHVDVQGEPVVTSDDLKEPFAATVSAHRAWSLTEAVDGVLADRERQVAPARQSGAPQGDDAALDDLSDRDLLITALSGGCSSTGVLV

SEQ ID NO: 29867 - DNA, 50 bp, Frankia casuarinae
  source 1..50: mol_type = genomic DNA
cgggtgttcaagtacgggggttctggtgcacctccttgggcgctactcga

SEQ ID NO: 29868 - DNA, 40 bp, Frankia casuarinae
  source 1..40: mol_type = genomic DNA
agaacgctgccgttcaacgggtgcgggaggggggacttga

SEQ ID NO: 29869 - DNA, 40 bp, Frankia casuarinae
  source 1..40: mol_type = genomic DNA
agaacgctgccgttcaacgagtgcgggaggggggacttga

SEQ ID NO: 29870 - DNA, 50 bp, Frankia casuarinae
  source 1..50: mol_type = genomic DNA
tggctgctcaaggccaggggttccagggcacccccacatgggctgctcga

SEQ ID NO: 29871 - protein, 509 aa, Mucilaginibacter lappiensis
MDAIGYIRISQKDQSTHSLEYQEKSIRYCDRNLIKLGNLFIDNGQKSDTFDRADFKALETFIKDHKGKAKVKYLIIFDHDRFSRNLPEALQKIESLEKKYGLKVIAVTEPLDIDTADPSVFLLRAFKYLIANQELLTIRKRAKVSARHAQESGRYINLAPYGYLNGRQPGGKMILVIDETKAYIVRKIYRDFLAGVPRFMIFKEIRELGFPHSSKSALHRILTNPLYAGLVRVCASGAIPEKIIKAIHEPIVTESQYYRTQEMLGLSKRLMQSKPKDEFPLKGILLSPCCNTLMTAGWTKGKTKYYLYYRCIPHSGINISGTMLHDKFKELLKYISFTPSFIDKLTQRVPQLAKGMLDIKDKRFKILQTQLTALEVKIENAEQKLFDDTINAATYKKWMKKFNAERARLKEEFTYLEDLDDRLQQELLTLPYMLNLPQVFSDSSLNQQHAIIREVFKQGITYKEGMFRTPCINPEFEFNRLILKEKGLLEIEQPSGTFHKVPSCGEGGI

SEQ ID NO: 29872 - DNA, 50 bp, Mucilaginibacter lappiensis
  source 1..50: mol_type = genomic DNA
gtaccctcttgcggagagggagggatttgtaccccctttaaagaccgctc

SEQ ID NO: 29873 - DNA, 40 bp, Mucilaginibacter lappiensis
  source 1..40: mol_type = genomic DNA
ctttagcggagagggagggattcgaaccctcgatacactt

SEQ ID NO: 29874 - DNA, 40 bp, Mucilaginibacter lappiensis
  source 1..40: mol_type = genomic DNA
ctttagcggagagggagggcctcgaaccctcgatacactt

SEQ ID NO: 29875 - DNA, 50 bp, Mucilaginibacter lappiensis
  source 1..50: mol_type = genomic DNA
gtcccttctcggtgagacggggggccttgcacccacctcccagcccccac

SEQ ID NO: 29876 - protein, 491 aa, Candidatus Kuenenia stuttgartiensis
MKYFLYIRKSTDEDDRQVLSLEAQETELKEFALRENLLIAATFRESQTAKEPGRPIFNDMLKRMESGEAEGILAWHPDRLARNSIDGGRIIFLIDTGKIKALKSPTFWFEPTPQGKFMLNIAFGQSKYFVDNLSENTKRGLRQKLRRGELPGYAPLGYLNDLLKHTMYKDPERFRLVRKLFELYATGNYSLKDLRKLITSAGLLSRKKNMLSVSNIQSILSNSFYYGVFKYNGEMYDGKHEPMIPKKLFEACQKVMADRSRPKKPSQKEYPFRNMLVCGECGCAITSETQKGHNYYRCTKKRDKKCSQKYIREEVLAEEVANELQKVSLSSAWAEWMLTELNKEEAEAAQSGAVFAQNLKDKIKELEGKLDILLDAHLDGTISREEYTAKKEKIINEKSELSEKSKDFKRNGNHWLELARQFILAAQQAKIIALQENPVAGRDFLKRIGSNRILLSQKVAIEPKKSWQILYNLPAEARSAEATNSQHTIWL

SEQ ID NO: 29877 - DNA, 50 bp, Candidatus Kuenenia stuttgartiensis
  source 1..50: mol_type = genomic DNA
caaactcacaacatacaatttggctccgaacgctgaacgaaatccgaact

SEQ ID NO: 29878 - DNA, 40 bp, Candidatus Kuenenia stuttgartiensis
  source 1..40: mol_type = genomic DNA
gcctataattaagattggctcctcgggtaggattcgaacc

SEQ ID NO: 29879 - DNA, 40 bp, Candidatus Kuenenia stuttgartiensis
  source 1..40: mol_type = genomic DNA
gcctataattaagattggcagctcgggtaggattcgaacc

SEQ ID NO: 29880 - DNA, 50 bp, Candidatus Kuenenia stuttgartiensis
  source 1..50: mol_type = genomic DNA
caaactcataatgcagactttggcagagaaaactgcatgtgatcagaagt

SEQ ID NO: 29881 - protein, 506 aa, Escherichia coli
MRSVITYLRYSSAIQGAEGADSTRRQNDLFKQWLKKNSDAQVVASFSDEGLSGYKGKHLTGQFGDMLARIESGEFPEGTILLVESIDRIGRLEHLETEALMNRILGNGLEIHTLQDGLIYTKDALADDLGISIIQRVKAYIAHQESKQKSFRVSQKWEQRAKLALAGEQRLTKMVPGWIDPDTFKLNEHAETVRLIFKLLLSGESLHNIARHLQSNGIKSFSRRKDANGFSVHSVRTILRSETTIGTLPASQRNDRPAIPNYYEAAIDAATFNKAQEILDKNRKGRTPASDNPLTINIFKGLFRCQCGASVHPTGTKNKYAGVYRCNNHLDGRCDVPPLKRKPFDKWVLENFLGMIDVGNDGESERKIAALQHEVEIVTARIKKATALLLEMDDIDELKIQLKELNQKRTELQTTIDSMRRKASLTDKELPQLKDIDLTTKAGRVECQLILSKHLKGLTLGKDSVTVTLQNDTEITIPTNPLPLNDGSPIFEIADKELLDIDAYQL

SEQ ID NO: 29882 - DNA, 50 bp, Escherichia coli
  source 1..50: mol_type = genomic DNA
aaaccgaatagactttattcaagggtcattatattgtagctattcggcat

SEQ ID NO: 29883 - DNA, 40 bp, Escherichia coli; identical to SEQ ID NO: 20043
  source 1..40: mol_type = genomic DNA

SEQ ID NO: 29884 - DNA, 40 bp, Escherichia coli
  source 1..40: mol_type = genomic DNA
gcggcgaggtaaatcaaggcacattgaagtcataatcatt

SEQ ID NO: 29885 - DNA, 50 bp, Escherichia coli
  source 1..50: mol_type = genomic DNA
caacccaaaaagtcttcttcaaggcacattagattcaaactatcaggaat

SEQ ID NO: 29886 - protein, 635 aa, Clostridium neonatale
MKKAALYIRVSTTYQIDKDSLPLQREKLINYCQYALDINDYVIFEDAGYSAKNTDRPAFQDMITRIKQKEFSQLIVWKIDRISRNLIDFCNMYEELKKYNCEFISINDKFDTSTATGEAMLKLVLVFAELERNLDSERVTFVMLNRAEKGLWNGGSVPLGYKYTDKGNFPVIEPNEANTIKYIYSLYLELNSTLKVASKLNDKKIKTKRGGKWTGKTVNDILRNPFYIGTYRYNVKTSGTRRWKDKDEWVVVENNHEGIIDSELFNKVNSMLTQNYRWNNNSQRLKIHTHIFSQILTCGKCGSSFIAGLDTARSDGYRPSRYTCYSNKQQINYESCNNFVSDITLLPFILNYISNFINLQNRITSKHSLRDIERILLRGKFFIDVECIDRKSLEETFLYFSLGFDDSNYTNTSSSIKQNILNPELNNLKKEKQKYETALKRLEDLYLYDEHEMSTKDYFFKKRDITSNLDEINQKIASLNNTTPSSYDVNFLKNASHFLMSNKLIEKRDIDYRHLLNIIDKETIRDFINTVIDQITIYDKKVSSITFKNGITHKFIYKTKSKQIAKPKEKFLYRSFENDVIEYLKENKSISRKEIEGLVNISRFGAASILEDLLANNIVEKKGNSVATRYFYIEK

SEQ ID NO: 29887 - DNA, 50 bp, Clostridium neonatale
  source 1..50: mol_type = genomic DNA
atcatatttgactatactttccgacatcctaaagtatagaaagatacgat

SEQ ID NO: 29888 - DNA, 40 bp, Clostridium neonatale
  source 1..40: mol_type = genomic DNA
ttcgtaatgatttactctacatcctaatgttgcaaaagcc

SEQ ID NO: 29889 - DNA, 40 bp, Clostridium neonatale
  source 1..40: mol_type = genomic DNA
ttcgtaatgatttactctagatcctaatgttgcaaaagcc

SEQ ID NO: 29890 - DNA, 50 bp, Clostridium neonatale
  source 1..50: mol_type = genomic DNA
atcatatttcagggtattttcatggatgctaaattacttgtacacaccat

SEQ ID NO: 29891 - protein, 464 aa, Blautia wexlerae
MNSTYFRPQPELFGLRVVKYIRCSHDGQVLHGDTLEAQDALLDEFIKVNRMVLIDTFIDEALTARKKFTRRKEFVRLLDGVRAHNFDMILFTKLDRWFRNIGDYHKIQEILEANGVQWKAITESYDTTTTNGRLHINIRLSVAQDECDRDSDRIKDVFAYKLKNKTYLSGSLPRGLKLDDEKHVIIDPEWKQFALDMFDRFEQTNSKRGTLLYLKEKYGIYLCYDTISRNLRNSLYKGMYRDDPDFCEPLIEPERFDRIQVLGKRNVRQRYSNRTYIFTGLLICSSCNHYLVGQTTHRTLSDGTEKHYPSYRCNQRYQSHSCDRNRSYREDYVEEYLLQHIRPALSEYVAEYEVTGTNPARKNPAAEAAKIRTKMQKLYELYMDDLIDRDTYKRDYSAFQEKLKELDSIVVAPSRDLADLKKLLEQDYEDIYRTFSPQEKNAFWKSFVQSITVHEDGEMDIVFL

SEQ ID NO: 29892 - DNA, 50 bp, Blautia wexlerae
  source 1..50: mol_type = genomic DNA
gtttctactaactacgcatcgcccgtcggtactgcatagttagtaaaaac

SEQ ID NO: 29893 - DNA, 40 bp, Blautia wexlerae
  source 1..40: mol_type = genomic DNA
cttgctatcaagatttccggtcggttcatcagcaaggata

SEQ ID NO: 29894 - DNA, 40 bp, Blautia wexlerae
  source 1..40: mol_type = genomic DNA
cttgctatcaagatttccgtgcggttcatcagcaaggata

SEQ ID NO: 29895 - DNA, 50 bp, Blautia wexlerae
  source 1..50: mol_type = genomic DNA
gtttgtactatagtcacttcaccctgctgtaatgctcacctagtaaacag

SEQ ID NO: 29896 - protein, 464 aa, Ruminococcus gnavus
MNSTYFRPQPELFGLRVVKYIRCSHDGQVLHGDTLEAQDALLDEFIKVNRMVLIDTFIDEALTARKKFTRRKEFVRLLDGVRAHNFDMILFTKLDRWFRNIGDYHKIQEILEANGVQWKAITESYDTTTTNGRLHINIRLSVAQDECDRDSDRIKDVFAYKLKNKTYLSGSLPRGLKLDDEKHVIIDPEWKQFALDMFDRFEQTNSKRGTLLYLKEKYGIYLCYDTISRNLRNSLYKGMYRDDPDFCEPLIEPERFDRIQVLGKRNVRQRYSNRTYIFTGLLICSSCNHYLVGQTTHRTLSDGTEKHYPSYRCNQRYQSHSCDRNRSYREDYVEEYLLQHIRPALSEYVAEYEVTGTNPVRKNPAAEAAKIRTKMQKLYELYMDDLIDRDTYKRDYSAFQEKLKELDSIVVAPSRDLADLKKLLEQDYEDIYRTFSPQEKNAFWKSFVQSITVHEDGEMDIVFL

SEQ ID NO: 29897 - DNA, 50 bp, Ruminococcus gnavus; identical to SEQ ID NO: 29892
  source 1..50: mol_type = genomic DNA

SEQ ID NO: 29898 - DNA, 40 bp, Ruminococcus gnavus
  source 1..40: mol_type = genomic DNA
ccgcgaatccaacgctcctgtcggctcatctgcaaggatc

SEQ ID NO: 29899 - DNA, 40 bp, Ruminococcus gnavus
  source 1..40: mol_type = genomic DNA
ccgcgaatccaacgctccttgcggctcatctgcaaggatc

SEQ ID NO: 29900 - DNA, 50 bp, Ruminococcus gnavus; identical to SEQ ID NO: 29895
  source 1..50: mol_type = genomic DNA

SEQ ID NO: 29901 - protein, 474 aa, Aeromonas sobria
MAAIIYSRISSLRQTVGHGIGRQESMALAYCERIGLAVADNVSDVCSGFHAKQMGGALGMLVKAIEDGSLTSSDCLVVESLDRLGRENTYDALERFMKIVRSGVDVHEVSTGIVYSKASPHLLHIAFAVMERAHNESLMKSQRAKANHARRREQARTEFVTTVTPGWIDVVNDVPVLNEYHKTVQLIFKMYLNGQSFKSIAMDLNNQEIELIPRRSGKGSRLSGWTDSSIRQILVSKAVCGYYPTDHEIIPDYYPACISEMDFQRVEDIRTRKAVSKQKSGIITFLSGICKCSCGLNMISYTTHWQTKNEKKTRRGLRCSARGLNSCSLAVVDTTTIEELFLKHLPDNTKLSSMFKVYYRKADALRARARALRKQQDNLIELVEAGSSSAKERFFELQQECSNLESEAQHFEDYKIGNIKIDSLTPDGIRKTNVGLAAAGVVCELHENHMVIKVKGDEVARTAYPDFTRTPKKD

SEQ ID NO: 29902 - DNA, 50 bp, Aeromonas sobria
  source 1..50: mol_type = genomic DNA
ttgtgtgtttgtgcgtggggttgtatgcttattagcgcactaacacagac

SEQ ID NO: 29903 - DNA, 40 bp, Aeromonas sobria
  source 1..40: mol_type = genomic DNA
aatggccatggcatcgtcgatacccggatcggtatcgaga

SEQ ID NO: 29904 - DNA, 40 bp, Aeromonas sobria
  source 1..40: mol_type = genomic DNA
aatggccatggcatcgtcgttacccggatcggtatcgaga

SEQ ID NO: 29905 - DNA, 50 bp, Aeromonas sobria
  source 1..50: mol_type = genomic DNA
ttgtgtatttttctgtttgtttgtttgtttgtttgcttttaagcacagag

SEQ ID NO: 29906 - protein, 559 aa, Morganella morganii
MLCYSYVRFSTPEQARGDSHRRQMEFAKNYCRLNNLTLVEDLSFKDFGVSAYRGDNLKTGALGKFLELVNSGHIPTGSTLIIESFDRLSRQTAIKAQAIFSDIISAGITIVTAMDNRSYNLQSVTDNPFDLMYSLMIMIRANEESETKSKRVKEAIKSNIKNKKIVASKLPYWIKHNKEKNLLELIPERAEIIQHIIEKYLAGLGINKLTRYLNDNIKPFAGKNWYPMYLQKLLRSTSLYGERQYNIDGTLHVMDNYYPAITTKNTFAIIQENLNARAYTRGGKIPSAITGIGIAHCGYCHAVLVSQSTKRKGKIVDGLRRARCNSSSKGTKCITTTFRISIVENAIAEYCSQHIDLSFLEPVSDNSRTQLAKYKLELSELNKKIKNYVGFISNGNISAAIANELSASENEKKTIENKIKELDLNLLSNNREEIIKKWKEIKLSLNSYNEENILKLRELIRASIKYIYVFQHGVWPEKELKVTPSGKEYYVHNDVFHIQITFKNGIRKMIELGDNIDDTEVNTNNRTITKNGILYTSDEYTKMLEDKIRMNISKNKNDN

SEQ ID NO: 29907 - DNA, 50 bp, Morganella morganii
  source 1..50: mol_type = genomic DNA
tgtttatcctacataaactttgtccaggcaaagtttatgtaggataaaca

SEQ ID NO: 29908 - DNA, 40 bp, Morganella morganii
  source 1..40: mol_type = genomic DNA
gttcactgttttggacgggcagccgcagttgagatccacc

SEQ ID NO: 29909 - DNA, 40 bp, Morganella morganii
  source 1..40: mol_type = genomic DNA
gttcactgttttggacgggttgccgcagttgagatccacc

SEQ ID NO: 29910 - DNA, 50 bp, Morganella morganii
  source 1..50: mol_type = genomic DNA
tgtatagccatttaaaacagtatcttggcagtttctttcaaggataaaca

SEQ ID NO: 29911 - protein, 559 aa, Morganella morganii
MLCYSYVRFSTPEQARGDSHRRQMEFAKNYCRLNNLTLVEDLSFKDFGVSAYRGDNLKTGALGKFLELVNSGHIPTGSTLIIESFDRLSRQTAIKAQAIFSDIISAGITIVTAMDNRSYNLQSVTDNPFDLMYSLMIMIRANEESETKSKRVKEAIKSNIKNKKIVASKLPYWIKHNKEKNLLELIPERAEIIQHIIEKYLAGLGINKLTRYLNDNIKPFAGKNWYPMYLQKLLRSTSLYGERQYNIDGTLHVMDNYYPAITTKNTFAIIQENLNARAYTRGGKIPSAITGIGIAHCGYCHAVLVSQSTKRKGKIVDGLRRARCNSSSKGTKCITTTFRISIVENAIAEYCSQHIDLSFLEPVSDNSRTQLAKYKLELSELNKKIKNYVDFISNGNISAAIANELSASENEKKTIENKIKELDLNLLSNNREEIIKKWKEIKLSLNSYNEENILKLRELIRASIKYIYVFQHGVWPEKELKVTPSGKEYYVHNDVFHIQITFKNGIRKMIELGDNIDDTEVNTNNRTITKNGILYTSDEYTKMLEDKIRMNISKNKNDN

SEQ ID NO: 29912 - DNA, 50 bp, Morganella morganii; identical to SEQ ID NO: 29907
  source 1..50: mol_type = genomic DNA

SEQ ID NO: 29913 - DNA, 40 bp, Morganella morganii; identical to SEQ ID NO: 29908
  source 1..40: mol_type = genomic DNA

SEQ ID NO: 29914 - DNA, 40 bp, Morganella morganii; identical to SEQ ID NO: 29909
  source 1..40: mol_type = genomic DNA

SEQ ID NO: 29915 - DNA, 50 bp, Morganella morganii; identical to SEQ ID NO: 29910
  source 1..50: mol_type = genomic DNA

SEQ ID NO: 29916 - protein, 479 aa, Streptococcus suis
MTKIALYLRLSVDEANTDESNSITHQRYLLNHFLDQEPKFKNWERLEFVDDGFSGTSLNRPAFKRMMADVKAGTIRNIIVKDLSRFMRDYLELGNYLENIFPFLGVRFIALNDHYDSLVSEHNGLDIDVPFRNLLNDFYAKDVSEKVKSAMNSMKRSGKNMSWLPPFGYIKDPNDRFKIIIDEEVAPIVRRIFRLCIEGMGTQKIAMLLNSEQTITPAERKMQVSQARYTKSIIITAEQKRNVWTRSSVLQILKNEAYKGTYLFNTRTTVNGKQIKRPESEWERLEKNHEAIVPSMDFDKAQQSLASRISGSKSQTFNQPEEVLLRGLVICEHCGHRLLRYSHYNNYDYFYCRYCRSQGQTMKSCRIDRIEEAIEKELKSRLPKNSPKLSKTNLIREAERLKTQKVSHFQDYKEGLMTRETYMEKRQNLDNSIMEIEEQLKVVGRENIAFDKKITREVIDTHIERIVVNGQGSFTVVYR

SEQ ID NO: 29917 - DNA, 50 bp, Streptococcus suis
  source 1..50: mol_type = genomic DNA
agtgtcatttacttgacataagagggggattgtgtcataataatgacagg

SEQ ID NO: 29918 - DNA, 40 bp, Streptococcus suis
  source 1..40: mol_type = genomic DNA
gctctggtccttaccaggcggttggtgcgatgtggaccag

SEQ ID NO: 29919 - DNA, 40 bp, Streptococcus suis
  source 1..40: mol_type = genomic DNA
gctctggtccttaccaggcctttggtgcgatgtggaccag

SEQ ID NO: 29920 - DNA, 50 bp, Streptococcus suis; identical to SEQ ID NO: 7575
  source 1..50: mol_type = genomic DNA

SEQ ID NO: 29921 - protein, 479 aa, Streptococcus pluranimalium
MTKIALYLRLSVDEANTDESNSITHQRYLLNHFLDQEPKFKNWERLEFVDDGFSGTSLNRPAFKRMMADVKAGTIRNIIVKDLSRFMRDYLELGNYLENIFPFLGVRFIALNDHYDSLVSEHNGLDIDVPFRNLLNDFYAKDVSEKVKSAMNSMKRSGKNMSWLPPFGYIKDPNDRFKIIIDEEVAPIVRRIFRLCIEGMGTQKIAMLLNSEQTITPAERKMQVSQARYTKSIIITAEQKRNVWTRSGILQILKNEAYKGTYLFNTRTTVNGKQIRRPELEWERLDNNHDAIVSSEDFDKAQQSLASRISGPKNQTCNQPEEVLLRGLVICEHCGHRLLRYSHYNNYDYFYCRYCRSQGQTMKSCRIDRIEEAIEKELKSRLPKNSPKLSKTNLIREAERLKTQKVSHFQDYKEGLMTRETYMEKRQNLDNSIMEIEEQLKVVGRENIAFDKKMTREVVDTHIERIVVNGQGSFTVVYR

SEQ ID NO: 29922 - DNA, 50 bp, Streptococcus pluranimalium; identical to SEQ ID NO: 29917
  source 1..50: mol_type = genomic DNA

SEQ ID NO: 29923 - DNA, 40 bp, Streptococcus pluranimalium
  source 1..40: mol_type = genomic DNA
gctctgggcattaccgggaggttggtgtgacgtacaagag

SEQ ID NO: 29924 - DNA, 40 bp, Streptococcus pluranimalium
  source 1..40: mol_type = genomic DNA
gctctgggcattaccgggactttggtgtgacgtacaagag

SEQ ID NO: 29925 - DNA, 50 bp, Streptococcus pluranimalium; identical to SEQ ID NO: 7575
  source 1..50: mol_type = genomic DNA

SEQ ID NO: 29926 - protein, 567 aa, Aeromonas salmonicida
MSRSPKAYSYVRFSTPKQAQGDSYRRQLKSAIDYCAEHNLQLDAKTIEDFGVSAFRGSNRTDGALGRFIDAVKGGEIEEGSYLLVESVDRLSRQAIEKALSQFLEILNAGVVIVTLSDNQVFRKGEVDFTKLIVSIVYMARANDESEMKSRRSRAAWSNGRKEARENNKVMKNSRLPSWLTREGDQIVPIPERAAIVNEMFEMAKSGCGYEQIAKAFLEKGYKTFGKEADWRPAGIQAVIKSQAVIGVFQPHVIDGGERVPDGEPILGYYPTIVSPTLFEEVQYLIGTRCKHSGSYRKGIYNNLFSGVLRCQCGEPLRFHNKGKAGSPRNYLVCPKQNITGCELPNMLYDKVEPQLLQAVSLLSAVMQQRRATTEKTLALKDELANLRKKLELEVKKRNKAAQSMLELDDDAVFRELFTQCKANCQALEGQISQLEDDLMSRELSEKTLGKMILPEDLNSTDQRQRFNSQLKAAIKEISVIKTDDSVAAVFTDLDGQFMLEQAFKPKLAGSSIRDRSGEELLRTTAEAPYIDANWVKGEIDEYESFQKQTDSDYDDDFEDFSSEESK

SEQ ID NO: 29927 - DNA, 50 bp, Aeromonas salmonicida
  source 1..50: mol_type = genomic DNA
ttaggttcttatacaaataatgtctcgcagtttttgggagaaatgccgta

SEQ ID NO: 29928 - DNA, 40 bp, Aeromonas salmonicida
  source 1..40: mol_type = genomic DNA
gcgggctttcttgatggtgtcgcagtttttgatgccatag

SEQ ID NO: 29929 - DNA, 40 bp, Aeromonas salmonicida
  source 1..40: mol_type = genomic DNA
gcgggctttcttgatggtggagcagtttttgatgccatag

SEQ ID NO: 29930 - DNA, 50 bp, Aeromonas salmonicida
  source 1..50: mol_type = genomic DNA
ttcatttctaattaaattactgtcgagtaatttttgaaaaaaataccata

SEQ ID NO: 29931 - protein, 496 aa, Chryseobacterium indologenes
MKTAYLYVRVSTDEQKRKGYSLPEQEDRLLKYCKYNNIEVKGIYREDYSAKNFNRPEWKELFSEIKKKSSGEDKNILFIKWDRFSRNVEYAYEMIGKLRKYKTIAMAIDQPIDFSVPESTVMLAVYLAVPEAENTRRAQNTANGIRRAKLMGRYPNKAPIGFINLTLMDGKKTIAPKEPESDIIKWSFHQVAQNDHKISEIMRMANEKGLICSRSHFFRILRNPVYCGLISVKLKSNEEQMIKGLHEPLISESLFYQVQSVINTKRKTTAKRDDLKAMFFLRGFLICPVCDRKLTGSIAQGSSKKYPYYHCHNRCRTRINAVFLNDCYQNKLQQLILSNNTIDLFKCILQDQNIKTLQASYLYNQNLIERKIKEEGQVLSQGRKLFLAGVLKIDDYNELKKENQVNIRHLKKEARDIFLKLKAIDKKNQIEDKELVEVFRKFSEFDISDKKSLVSLIPPVDIDYKTGDLSLDLNQAFSKILLKKSNRKTNKKNEFH

SEQ ID NO: 29932 - DNA, 50 bp, Chryseobacterium indologenes
  source 1..50: mol_type = genomic DNA
actatcaaatagttgtctccttcagttaactgggcaggatgtttttcaga

SEQ ID NO: 29933 - DNA, 40 bp, Chryseobacterium indologenes
  source 1..40: mol_type = genomic DNA
atcttcaaatgtcggtcttgtgacctcgacaggattcaaa

SEQ ID NO: 29934 - DNA, 40 bp, Chryseobacterium indologenes
  source 1..40: mol_type = genomic DNA
atcttcaaatgtcggtcttatgacctcgacaggattcaaa

SEQ ID NO: 29935 - DNA, 50 bp, Chryseobacterium indologenes
  source 1..50: mol_type = genomic DNA
acaaccaaataaatgtctttttcaattacctgggaactatctctttgaaa

SEQ ID NO: 29936 - protein, 518 aa, Clostridium butyricum
MNKVWNIGIYARVSTEKIGQSESVSAQIGNLKKWIIDMAKEDKENIYNLIDIYQDNGISGSSFDRDAFKKLKEDIDDGKINMVLTRDLSRFSRNYLEAGYLLDNYFKMKNIRFVAVLDNVDTIKREDDDIVPFKNILNEMYLKDSSRKIKSALRERMQRGSSIASKPPYGYKYEKIYNGEQKTNVLVPEGGETTETVKEIFSLYLKGWGAGKIATYLNQKGIATPSSRIENYARSKFKLWTNNTIFSILRNHKYGGFLVQQKYKKVSYKMKAVKKTSREEWVWSGEFDGIIDKNTFNRVQEMLEKRSKGYRYKGKVIHPFSSVLRCGTCGGSLSYRKKFQGYKCTLSQSGAKRCTCHSIKERDLILQIQQNIRTMIDKNINKEKYYNKIEDIKIEQDNAKELKEIENELNKLDVKFNKIYEDKLNDLISERNFTNFLNVIQKKQEKLIKRKEQIENIINSSEDNTDITKIYREELDKLFNLEEIERNFVETIIDKIIVNENVKTKEKTVDIYYKFSRN

SEQ ID NO: 29937 - DNA, 50 bp, Clostridium butyricum
  source 1..50: mol_type = genomic DNA
aagaccaataacagcagtgtgccaactgctttgtagacgataaaggttat

SEQ ID NO: 29938 - DNA, 40 bp, Clostridium butyricum; identical to SEQ ID NO: 29183
  source 1..40: mol_type = genomic DNA

SEQ ID NO: 29939 - DNA, 40 bp, Clostridium butyricum
  source 1..40: mol_type = genomic DNA
agagcctgctaataaggagtttgctacgtgtataggttta

SEQ ID NO: 29940 - DNA, 50 bp, Clostridium butyricum
  source 1..50: mol_type = genomic DNA
atgactagtgaagtcaatattccatttgctgtgtagctctaagaggtttt

SEQ ID NO: 29941 - protein, 463 aa, Coprococcus comes
MPSKIERCAIYIRVSTAEQMMHGKSLEAQKQYLTNYAKEHNMTVAGVYADEGKTARKELKKRKAIHSLLEDVKAGKIDVIIFWRIDRWFRNLSDFYKVQEVLDDNNVHWISTSEPGINMETRDGRLQLNVVLSIGQNEVDTTSERIKFVNEASIRQGKLIFGDVNMGYGYKSGIIDGVKRMVKDPDREDTVNAFYRFFFKHHAKGLSMRYIQENYDPDFTWANMRTLLSSEFYKGTYRGIPYCPAYLTESEWNNLQEIQNANVKRAPSGRIYLFSGMINCPICGRRLSARGSSSIINRKTGAKKVYCYYRCNKAFIDHKCSYRHMVSQNLIERYLIDHLEYEYNKFKIKCEKIEKEQEKKKKVQTPEKLQKELERLNLLFQKGRIEWDYYSKEYDRIENELNELLNAAPELEPDYAYLEELLNTDFRTMYYNLTQENRRAFWHSIIREIHLNTDHTVDSVDFL

SEQ ID NO: 29942 - DNA, 50 bp, Coprococcus comes
  source 1..50: mol_type = genomic DNA
tcttgtactaactggttgactccgtttggggtagtctagttagtacaaga

SEQ ID NO: 29943 - DNA, 40 bp, Coprococcus comes
  source 1..40: mol_type = genomic DNA
tttgactcttgttactggttttggggcggataaagttatg

SEQ ID NO: 29944 - DNA, 40 bp, Coprococcus comes
  source 1..40: mol_type = genomic DNA
tttgactcttgttactggttatggggcggataaagttatg

SEQ ID NO: 29945 - DNA, 50 bp, Coprococcus comes
  source 1..50: mol_type = genomic DNA
tagtttactatgatggtgactgcatatggggtaggcgtgacaggaaaaga

SEQ ID NO: 29946 - protein, 463 aa, Coprococcus comes
MPSKIERCAIYIRVSTAEQMMHGKSLEAQKQYLTNYAKEHNMTVAGVYADEGKTARKELKKRKAIHALLEDVKAGKIDVIIFWRIDRWFRNLSDFYKVQEVLDDNNVHWISTSEPGINMETRDGRLQLNVVLSIGQNEVDTTSERIKFVNEASIRQGKLIFGDVNMGYGYKSGIIDGVKRMVKDPDREDTVNAFYRFFFKHHAKGLSMRYIQENYDPDFTWANMRTLLSSEFYKGTYRGIPYCPAYLTESEWNNLQEIQNANVKRAPSGRIYLFSGMINCPICGRRLSARGGSSIINRKTGAKKVYCYYRCNKAFIDHKCTYKHMVSQNLIEQYLIDHLEYEYNKFKIKCEKIEKEQEKKKKIQTPEKLQKELERLNLLFQKGRIKWDYYSKEYDRIENELNELLNAAPELEPDYAYLEELLNTDFRTMYYNLTQENRRAFWHSIIREIHLNTDHTVDSVDFL

SEQ ID NO: 29947 - DNA, 50 bp, Coprococcus comes; identical to SEQ ID NO: 29942
  source 1..50: mol_type = genomic DNA

SEQ ID NO: 29948 - DNA, 40 bp, Coprococcus comes; identical to SEQ ID NO: 29943
  source 1..40: mol_type = genomic DNA

SEQ ID NO: 29949 - DNA, 40 bp, Coprococcus comes; identical to SEQ ID NO: 29944
  source 1..40: mol_type = genomic DNA

SEQ ID NO: 29950 - DNA, 50 bp, Coprococcus comes; identical to SEQ ID NO: 29945
  source 1..50: mol_type = genomic DNA

SEQ ID NO: 29951 - protein, 580 aa, Pseudomonas tolaasii
MPTGYAYIRYSTRRQGADDKDSVTRQKASIRAIAARHGVEVPEENFFYENGVSAYTGENSKTGKLKDLIDQIENLSIAPGDFVFVESIDRLSRQRLLQAKDLVYGILKKGVILVTTMDGYIYKLHEDQADIMKQDIMLTVISSRAHEESLTKSNRRKSAWKKAKTEAEETGIVFNKNRLPYGVIFDEKTNTLVIDKKAQEEIEFILENLKREGVTSTIKKANAFAAINWTQARVKDIFDTKYVLGYFMSQTKIDGKMVLDKHIENYYPKIVSASLFLEAKEAMSNRKVKKHQGRVTQNNANIFRHSCFCERCGKSLVFMNNYNSKGSRYFYMTCQQNIENGNCKNRFRYDLAVKLFLDTMQEFDRLNRKSVSLEPIDVTQYANLDEATLKEIEEMNKSLSVIIDGSSGAFKLAKKFVELSKSNKVEDTKTRQKLKKLRDHQSDLEVSVENLNKSVETIKSGIIPSAILNRLSKEEIELNEIKEEIEKLAISKNKSKVQELEFNNLDKTIDFLKTEEGRLNIINFLTSNSIRFSFEYISDTLNATAYVNNERIGQLSTQNDNKSAPLGIYGFDNLGNVFTQ

SEQ ID NO: 29952 - DNA, 50 bp, Pseudomonas tolaasii
  source 1..50: mol_type = genomic DNA
tgtgttagtattggtttgttggtcttgacctagtgcctgttactcacaca

SEQ ID NO: 29953 - DNA, 40 bp, Pseudomonas tolaasii
  source 1..40: mol_type = genomic DNA
cacgggcatgtggttggtcttgaagtaaatcccgaccatc

SEQ ID NO: 29954 - DNA, 40 bp, Pseudomonas tolaasii
  source 1..40: mol_type = genomic DNA
cacgggcatgtggttggtcctgaagtaaatcccgaccatc

SEQ ID NO: 29955 - DNA, 50 bp, Pseudomonas tolaasii
  source 1..50: mol_type = genomic DNA
tctgctaagggctgtttctatgtcctggcctagttccatgaactcacaca

SEQ ID NO: 29956 - protein, 513 aa, Hyphomicrobium sulfonivorans
MDKAKKPKAYSYLRFSTPEQAHGDSRRRQSELAARYADAHGLELDDRSFEDFGISAYRGKNAEVGALRTFREAAEDGLIEPGSFLLVENLDRLSRATPRKALRLLEEICEAGITLVTLTDGRRYDLKALDQDFTSLMVALLMASRAHDESLTKGKRVREAWSNKRKNAAERPLTARCPAWLRLDRTTNPPRWEVLEDRAKIVRRVFEMTAKGMGQHRIAHIFNEEGVPTFGSAAYWHRTYVKKLLENEAVIGIFVPHTQTYDDKKRRVRTAGEPVPGYFPPIVPLDLYEDVRAMRLEGRSHVSTKSARPVHMLAGLARCGLCGAAMTRVYKGAKNGQPKLVCTVAKAKGGCSYQTVSVDAVEDAIAASVDFVVLGAPSGDDQLDAALERLETLRDAVSEQIWNVVDALALSSGSPSLRERLSLLETEQERLTNEHDALLTKIAATSGASVERRLEAVRAAIASEGDKAEINALLRQVLKGVVVDRASGRLRFLWKHGGESELMFAWPEDGGGD

SEQ ID NO: 29957 - DNA, 50 bp, Hyphomicrobium sulfonivorans
  source 1..50: mol_type = genomic DNA
ctggggtccaatgtatttcacattagcatgatgtttgcaatagaccctcg

SEQ ID NO: 29958 - DNA, 40 bp, Hyphomicrobium sulfonivorans
  source 1..40: mol_type = genomic DNA
cccgggcgggccggtcatcagcaggttgtggccgcctgct

SEQ ID NO: 29959 - DNA, 40 bp, Hyphomicrobium sulfonivorans
  source 1..40: mol_type = genomic DNA
cccgggcgggccggtcatctacaggttgtggccgcctgct

SEQ ID NO: 29960 - DNA, 50 bp, Hyphomicrobium sulfonivorans
  source 1..50: mol_type = genomic DNA
cttgggtctgacccatatctgatttagatgatatttacttgagactctag

SEQ ID NO: 29961 - protein, 617 aa, Eisenbergiella massiliensis
MHMNEYNKITALYSRLSVGDEDRDGGESNSIVNQKAFLERYAQQQRLTNIRHYIDDDESGRFFDRSAYSRMMEDVENGKIGVCIMKDLTRWGRDYLQVGNAMEVFRRNNVRFIAVNNGIDSDNPDTLEFAPFINIMSEWYAKDISKKVKTGIRTKGASGKPIATEAPYGYMKDPNNKDFWIIDEEAAEVVRLIFRLFIGGKNRNQIAVYLKNEQILTPTFYLKQHDRGTAKSRPLNEENRYKWNKATLTKILTRQEYCGDVVNFKTTKHFRDKRNHYVDKSEWQITENVHEPIIDRADFETVQRILENAPVRRPNGDGEIHPLSGLMFCKDCGAKMHIRIDYRNGGKRHVAFCSEYHKGKAKNPKCNSPHIIDADLVMQTIADVLKKVAEYSISNREEFEALVRKNLDMQQTDKSKKQQKRIPQITTRLEQIDKVLNKLYEDNALGAIPQDRYEQMSQKYSEEYYTLKAELAELKEQLSAFEDAGGWAHKFLKLIERYAAFTDLTPAILNEFISRIEVHERDKKRAKQAVQHIGIYFSYIGKFENELTQLAEPTEEEIRQMREKIEEAQKEKSRAYHRNYSKEYRAKNLEKRREYERIKAREYRAKRKAQAAALPVS

SEQ ID NO: 29962 - DNA, 50 bp, Eisenbergiella massiliensis
  source 1..50: mol_type = genomic DNA
aaaagcacttgacaaaacgcttcatgtggtgcataatcttaactgtaagg

SEQ ID NO: 29963 - DNA, 40 bp, Eisenbergiella massiliensis; identical to SEQ ID NO: 28718
  source 1..40: mol_type = genomic DNA

SEQ ID NO: 29964 - DNA, 40 bp, Eisenbergiella massiliensis
  source 1..40: mol_type = genomic DNA
ggaatatggttcggcccgcaggggaacccgtgaggatatt

SEQ ID NO: 29965 - DNA, 50 bp, Eisenbergiella massiliensis
  source 1..50: mol_type = genomic DNA
aaaataactcctgaaaacactttgagtggtccatgaattacactgacagg

SEQ ID NO: 29966 - protein, 552 aa, Rhizobium leguminosarum
MTVRAYSYIRFSTPEQARGDSLRRQTEKAASWCAERGIELDDSLRDLGVSAYHGANRTNGALRSFLDLVESGKVSRGSYFIVESLDRISRETVMDAATRLFDLIRAGVIVVTLSDGQEYSEERLRSDWTPLVFSLIVMARAHEESRIKAERVGEAWKQKKAIARTAKTPITKRCPEWLYIENREFKVDGHRAGIVAGIFEATIEGFGRRMIARRLNELSIPPFRGKKGWQTSSIAKVLSSRAVLGEYQPHSGRHGARNRKPDGEPISDYYPVIIDEQTFWQAQAAIGNRKHGAAGRIGTAGAHILKGLAKCSECEGNMHIVNKGRPPRGGVYFVCDSAKRKMGCENDKHYRLDDVEYKVLHVSSMLVAKEIDFKRAEASQVSQVDVLTAQLNDKEAVRDRLLKLVAVAEFDDATNELFKRVTGEIKNIKGQLKDAKKELKMAQAEYDVAARKALLDDLLGDMKSDDVETIVATKVKLNSVLRTIVRDVVFSHRYGIVLTMIPRSYFQVGWGGGYHMLGSAQGMQVLLDQTPTDVALEKFLGHPITPFDRGEI

SEQ ID NO: 29967 - DNA, 50 bp, Rhizobium leguminosarum
  source 1..50: mol_type = genomic DNA
ccttaattaatgtagcataacgttagcaagttaggctacaataattttta

SEQ ID NO: 29968 - DNA, 40 bp, Rhizobium leguminosarum
  source 1..40: mol_type = genomic DNA
gcccggaggaccgaccatcagcagattatggccaccggcg

SEQ ID NO: 29969 - DNA, 40 bp, Rhizobium leguminosarum
  source 1..40: mol_type = genomic DNA
gcccggaggaccgaccatcgacagattatggccaccggcg

SEQ ID NO: 29970 - DNA, 50 bp, Rhizobium leguminosarum
  source 1..50: mol_type = genomic DNA
actttatacagtgtgcatatttctgacaagttaggggtaaataattttta

SEQ ID NO: 29971 - protein, 504 aa, Clostridium thermobutyricum
MKIAIYSRKSRETDSGQSIKNQISMCKNYFKIYSENPVFNVFSDDGFSGSNTNRPAFQNMMLLAKQKSFDIIAVYKIDRIARNITDFFSIYKSLEKYNIKIVSVTENFDPSTPIGKMMMTMLAGFADMERENIRQRVKDNLYELAKLGRWSGGKTPYGYKSVKINENGKNNYYLELIPTEKEKIQKIFELAISNIPYHIANQFSLNGKTIINILRNPVYMISDNLGSAYFKKNGFKVFGEPNGKGFIAYNRSRNNSEKLVAVGKHEGCVSSELWIKANIKLNDRAKVHKPRISEKTFLGNICKCACGAQLHIASSRIKANGKREYFFRCKNHRMDKTKCNFISFPVKKAEIEILNMLQLFIENKSLLEKYLKSSTPLTDISKLKEEISELKTKINNLNTKMNEFSEKLLLLNGAALIIINNKINDLSNEITNLNTELLSKENKILELSHANVNTKLLISKIKSELGKLKSDYSIQDKQAIIRSLFTDITIDEYGKIFFNFNDVI

SEQ ID NO: 29972 - DNA, 50 bp, Clostridium thermobutyricum
  source 1..50: mol_type = genomic DNA
tgatgtcatttaacgaatataggtcattctatggtttttatatgacaata

SEQ ID NO: 29973 - DNA, 40 bp, Clostridium thermobutyricum
  source 1..40: mol_type = genomic DNA
tgctatgcttgctactgttcaatcaatagctatgacaaca

SEQ ID NO: 29974 - DNA, 40 bp, Clostridium thermobutyricum
  source 1..40: mol_type = genomic DNA
tgctatgcttgctactgtttaatcaatagctatgacaaca

SEQ ID NO: 29975 - DNA, 50 bp, Clostridium thermobutyricum
  source 1..50: mol_type = genomic DNA
aaatgtcatcataggaaaataagttaagctatctctctttgatgacaata

SEQ ID NO: 29976 - protein, 478 aa, Paenibacillus larvae
MRVCKYRRVSTDMQREEGVSLSTQDERLDAFIKSQGWTVVADYADEGFSAKNMNRPAIQQLIQDLKRDKFDVVLVYRLDRLVRSVSDLHELLQIMDKHDVKFKSCTEVFDTTSATGRMFITIIATLAQWERETIAERVFDNMLARSEKGMRNGAPAPYGYIYKDGSLELVKEEAKWVKFIFDKYKTTGSQNIAKTLNKRGIKTRKGEVWSDFSIRYLLRNPIYAGYVRWNYRSLAKGKCTGDEVIQKIDQDNFQAIITKEEFDEIQILIKERSTVAFRSDNFYPYSGVAKCAKCGNSLTGAFKNKKSGGIYRFYKCAGRFRTGICDAPVISEEAIDIALMKCLDLPEFDLKYEEQNKIDREQLEKELTKIELKKSRIKELYLDGDISKNEYRKRMDSLIDDEIRIQKKLEIEEIEATYEEVLEWMSLIKESWNELSFETRKAAIRTIFSSLTVKIIKDPVFGRYPQLPVVEITNYKLK

SEQ ID NO: 29977 - DNA, 50 bp, Paenibacillus larvae
  source 1..50: mol_type = genomic DNA
tgggttacttatcgtatcaatggatcctcatgcatatgataagtaatcta

SEQ ID NO: 29978 - DNA, 40 bp, Paenibacillus larvae
  source 1..40: mol_type = genomic DNA
gggaatcaaatgaagaggctcctcatgcatcggacatcct

SEQ ID NO: 29979 - DNA, 40 bp, Paenibacillus larvae
  source 1..40: mol_type = genomic DNA
gggaatcaaatgaagaggcatctcatgcatcggacatcct

SEQ ID NO: 29980 - DNA, 50 bp, Paenibacillus larvae
  source 1..50: mol_type = genomic DNA
agggctacttaatattacaatataatctcatgcataacaacagaagtctg

SEQ ID NO: 29981 - protein, 509 aa, Pantoea ananatis
MIDKTYKIHKVRVAQYLRMSTNHQEFSLDNQAQFIKKYADEHNMEILHTYDDAGKSGVSTTGRHDFNKLVNDVLTKEINIDAVLVYDVSRFGRFKDPQEGIYYKYLLKMNNVDVIYCAENLPENSETETFILSSLMYAAGAYSKNLSIKVFAGHVNLVKRGYYQGGTPGYGLKRKLLDNNNKPKMLLAHGERKSLQTDRIVLVPGTKKEIELIKKIFNMFIFDGLNEYLIASLLNQEGYRFSDKTEWTRGRIHSVLINSRYTGRYIYNRTSQKLKTKRIKNPEEDWVEYNSFFKPIISEEKFRLAKEIIDNRSIKMSDEKILDCLKKILSKHGKISGFIIDEEDSTPSSSVIANRFGGLLNAYKLIDYTPERDYQYLEINSYLRKKHSDIVNKIQNEIISSEVKILENKLISVNKALSFSIVLSRCKKTGLNKHRWVVRLDRSLNPEISIIARMNSLNTEPVDYYILPSIEFLEHELKIKDNNNLLFEMYRFNDIKPFFDMLSTDKDVM

SEQ ID NO: 29982 - DNA, 50 bp, Pantoea ananatis
  source 1..50: mol_type = genomic DNA
ccacccatactccgatgatgcagcagtacctataatatcaattaatatga

SEQ ID NO: 29983 - DNA, 40 bp, Pantoea ananatis
  source 1..40: mol_type = genomic DNA
cacacgccaatgatgcagcaatatttacgcctcaaggctg

SEQ ID NO: 29984 - DNA, 40 bp, Pantoea ananatis
  source 1..40: mol_type = genomic DNA
cacacgccaatgatgcagccatatttacgcctcaaggctg

SEQ ID NO: 29985 - DNA, 50 bp, Pantoea ananatis
  source 1..50: mol_type = genomic DNA
ccccccaaattcccatgttgaagccatacctccaatgtgactatatttga

SEQ ID NO: 29986 - protein, 582 aa, Streptomyces alkaliterrae
MTPLRKHRPGAAPSLDHVRAVSYIRQSKRREDDSQASPVAQRDRCASLISSKGWKDAGHFEDVGKSGWDPSIHRPGFEEMMTAVRGGHVDAVVVFSLSRLTRRGALEAMRIIDELESHGVRLVSVEEPYLDTSTPVGVGILAIIAGLAQQESDMKSAYVSATKDTLRRAGSHVSGVAPYGFTTERGTLGKLSVIRLVPDPVEAPYVRDMAKWAADGLSASQIAKRLNEDGVPTKVETLGEAGIKRLTARRARGVSEPVDRPAWVSSTVLRILRDPRLAGYAMEWQGRVLPTKDADGKTVPGKNGKRVILRDEDGQPVQTHDALIPAEEWWQLQDVLNGRTRTVVRAGRRVPTLLAGHGLLFCDVCGSVMVADRRADKRYYKCNRAGGVVANHGGLVIDQEATDNETARQVWARLLTMDPDDPEDLEWLAEASRRFARQRDTSQRDAERAAVRAELEHVQESRRILHMDRLAGVYDDKTGTKMFHESMARLSAHEERTAERLAQLDASEGQTIEIPNEWTSVDGDPVGEGSAWAAWDLKTKREFLALFIDSVRIAKSVGRGRNANTLDRVILRWAESPEPADA

SEQ ID NO: 29987 - DNA, 50 bp, Streptomyces alkaliterrae
  source 1..50: mol_type = genomic DNA
tatgtgagtgacttgacgtctttgttgatcttcaccacactaggcacatg

SEQ ID NO: 29988 - DNA, 40 bp, Streptomyces alkaliterrae
  source 1..40: mol_type = genomic DNA
cgccggcactgccagcacgttgatcttcacgatgctcatg

SEQ ID NO: 29989 - DNA, 40 bp, Streptomyces alkaliterrae
  source 1..40: mol_type = genomic DNA
cgccggcactgccagcacgtggatcttcacgatgctcatg

SEQ ID NO: 29990 - DNA, 50 bp, Streptomyces alkaliterrae
  source 1..50: mol_type = genomic DNA
taggtgcctaccttgatgtctctgtggatcttcccctgagaatgcaggtg

SEQ ID NO: 29991 - protein, 560 aa, Anaerotignum lactatifermentans
MYYQSNTAAALQFPYTAMSSEELTALYCRLSRDDELQGDSNSIVNQKKILEKYAREHGYSNFKFYVDDGISGTTFNRPGFQQMIADIEAGLVKRVIIKDMSRFGRDYLQVGMYTEIMFPEHDIHFIAVNDGVDSTQGDNEFTPFRNIINEWYAKDTSKKIRAVMKVKGNAGEHLTVLPPYGYIKSSDDKKQWVKDEEAAQVVYEIGLYIMDGLGPSQIARKLTERKILTPAAYYASKGRTTNVTKKGSPYAWDSSTIADIMDRWREYLGHTVNFKTRKKSYKSKKTLLNPESEWKIFENTHEAIWTEAIADAARLARQTRRRPTKMGEMGMFSGMMFCADCGSIMYQCRATNFRRDQEYYLCSGYRKSRDVCGQTHSIRTVILEELVLQNLREIVSFASQRKDDFVKMVMDADMRQRNRGLAKRQKTLADAEKRITELDTIFKRLYEDTISGKLSDERFQKLSADYEKEQHQLQEVAAVLRGEIEAEEQKSANVERFLSVVERYTEIPELTPCILHEFVEKIVVHAASDPKGKNRTQEIDIYYKGIGALEVSKVTSSRQE

SEQ ID NO: 29992 - DNA, 50 bp, Anaerotignum lactatifermentans; identical to SEQ ID NO: 13367
  source 1..50: mol_type = genomic DNA

SEQ ID NO: 29993 - DNA, 40 bp, Anaerotignum lactatifermentans
  source 1..40: mol_type = genomic DNA
gctcatggggaacacctccttttgttttttctttattata

SEQ ID NO: 29994 - DNA, 40 bp, Anaerotignum lactatifermentans
  source 1..40: mol_type = genomic DNA
gctcatggggaacacctccagttgttttttctttattata

SEQ ID NO: 29995 - DNA, 50 bp, Anaerotignum lactatifermentans
  source 1..50: mol_type = genomic DNA
ttgcactaagagagggaggcacctagagcagcctccgaataagaaaacat

SEQ ID NO: 29996 - protein, 510 aa, Pantoea dispersa
MIDKTYKIHKVRVAQYLRMSTNLQEFSLDNQAQFIKKYADEHNMEILHTYDDAGKSGVSTTGRHDFNKLVNDVLTEEINIDAVLVYDVSRFGRFKDPQEGIYYKYLLKMNKVDVIYCAENLPENSETETFILSSLMYAAGAFSKNLSIKVFAGHVNLVKRGYYQGGTPGYGLKRKLLDNNNKPKMLLAHGERKSLQTDRIVLVPGTKKEIELIKKIFNMFIFDGLNEYLIASRLNQEGYRFSDKTEWTRGRIHSVLINSRYTGRYIYNRTSQKLKTKRIKNPEEDWVEYNSFFKPIISEEKFRLAKEIIDNRSIKMSDEKILDCLRKILSKHGKISGFIIDEENSSPSSSVIANRFGGLLNAYKLIDYTPERDYQYLEINSYLRKKHSDIVNKIQNEIMSSEVKILENKLISVNKALSFSIVLSRCKKTGLNKHRWVVRLDRSLNPEISIIARMNSLNTEPVDYYILPSIELIEQELKLKDNNNLLFEMYRFDDIKPFFNMLSTDDKDVI

SEQ ID NO: 29997 - DNA, 50 bp, Pantoea dispersa
  source 1..50: mol_type = genomic DNA
catactccgatgatgcagcaatacctataaatatcaattaacaggctgtt

SEQ ID NO: 29998 - DNA, 40 bp, Pantoea dispersa
  source 1..40: mol_type = genomic DNA
ccccatgatgcagcagtacctgcgcctgaaggccgatcat

SEQ ID NO: 29999 - DNA, 40 bp, Pantoea dispersa
  source 1..40: mol_type = genomic DNA
ccccatgatgcagcagtactggcgcctgaaggccgatcat

SEQ ID NO: 30000 - DNA, 50 bp, Pantoea dispersa
  source 1..50: mol_type = genomic DNA
aatacttcgttgttggagcattactgattaatatgctgaatcaagttgtt

SEQ ID NO: 30001 - protein, 585 aa, Eggerthella lenta
MARKNPKNPDATRPLSCVLYIRVSTKLQVEKGESIDAQRFELTRYAEAHGMRVLGEYVDAGFSGKNVRGRPQFRQMLDDIIKEQPGRRPTYVLVFKLSRFGRNAADTWNSLQMLQDYGVELCCVKDGIDSATTMGKAMLSIAAVFAEMERDNIRTQTMSGREEKARKGYWNGGQAPYGYRLVDRGGKFKELVVDEDEAKVVRKIFQMYAYENKGAMAIAAWLNNHGVRKDARGNATMETFGNTTIARMIVNPVYVGKIAYGRRRTEVIEGTRGETHVVKSDGYEVYDGRHEAIIDEATWAAAQAIVGTRKPNAKRHDDGHVNLLNGLLVCPECGRKMSSHPNRGKVKKDGTRGKTTYAYYCPHTSKARGATCTFSSQYPQEYVDAEVIEMVKLASRSDAFVEALRRRINDETDVEQLREDAERIGREQAANDKRMRMLMNQIDALDPADRSYERKFSDLQRRLDDLYDRDAGFQEALEETRAKIAAADKRRVGERRLLDELDRIPELLEEADEQTRFDIVHEAVSEVRILAGRNPRKERVVQSVTFKCPVRFFWEEVPGEADGYTAVTPDSFDSDGNFRDDETHV

SEQ ID NO: 30002 - DNA, 50 bp, Eggerthella lenta
  source 1..50: mol_type = genomic DNA
ttccgagatgacgagacacacgtcgaaacggttgcggttctatctcggaa

SEQ ID NO: 30003 - DNA, 40 bp, Eggerthella lenta
  source 1..40: mol_type = genomic DNA
ccctcatacggatcacatcgagacgatcgcgctggtggag

SEQ ID NO: 30004 - DNA, 40 bp, Eggerthella lenta
  source 1..40: mol_type = genomic DNA
ccctcatacggatcacatcctgacgatcgcgctggtggag

SEQ ID NO: 30005 - DNA, 50 bp, Eggerthella lenta
  source 1..50: mol_type = genomic DNA
ttcagagatcataggatacgcgtcctatcatttgtggaaatagctgggaa

SEQ ID NO: 30006 - protein, 485 aa, Mycobacteroides abscessus
MVGETQRQIRAGCYLRISSDPRDRREGVDRQREDTQALCEVKGWEAAGYYIDNDRSASNGKDRPEWDRLLADIEAGEIDAIAAWDQDRGWRMMSELEELRRFFKSLGRRVQFATTGQGDIDLYSPTGVLAVQIKTAVSEHEIAMMKVRMLRAARHKAEQGKPKWRKAFGYLPEIRPKHEDDGRRELDPVTAPLVQQAYATVLAGGSLMDITRDWNAREVYGLNGQAWTAATLSLFLRAPRNAGLRAHNGEIVGPGTWEPLVDESTWRAAQAVMNAPGRAPGRKSVRKHLLTGVLLCGKCARELDSRLSGRWAMQSGGAGSRAHSIVYACNTCRGCSIRAEHVEPMLYQLVSGRLARHDAVDLLKAEQHDAAEAEALRVERMTLLARLDEIADERADGELTGPQAKRATERIQAKLDDIERRQQDGERLRVFDGIPLGKPEVAAAVEKLSADRFRAVLDVLCVVTVQPVGKGGKAFKPERVKVVWR

SEQ ID NO: 30007 - DNA, 50 bp, Mycobacteroides abscessus
  source 1..50: mol_type = genomic DNA
aagagttgtttccgcagtcgataatgttattgactgcgcgaagtacacta

SEQ ID NO: 30008 - DNA, 40 bp, Mycobacteroides abscessus; identical to SEQ ID NO: 26638
  source 1..40: mol_type = genomic DNA

SEQ ID NO: 30009 - DNA, 40 bp, Mycobacteroides abscessus
  source 1..40: mol_type = genomic DNA
gaaggtcttcaggagatgacacttgcggcacagggccttc

SEQ ID NO: 30010 - DNA, 50 bp, Mycobacteroides abscessus
  source 1..50: mol_type = genomic DNA
tagacgggtaataccagtagataacattagtgagtgtttgctgtacagta

SEQ ID NO: 30011 - protein, 485 aa, Mycobacteroides abscessus
MVGGTQQRVRAGCYLRISSDPRDRREGVDRQREDTSALCEVKGWEAARYYVDNDRSASNGKERPEWDRLLADIKAGEIDAIAAWDQDRGWRMMSELEELRRFFKSLGRRVEFATTGQGDIDLYSPTGVLAVQIKTAVSEHEIAMMKVRMLRAARHKAEQGKPKWRKAFGYLPERRPKHEDDGRRELDPVTAPLVQQAYAAVLAGGSLTDITRDWNAREVYGLNGQPWTAATLSLFLRAPRNAGLRAHNGEIVGPGTWEPLIDEGTWRAAQAVMNAPGRAPGRKSVRKHLLTGVMLCGKCIRELDSRLSGRWAMQAHGAGPRAHSIVYACKTCRGCSIRAEHVEPLLYKLISARLARPDAVDLLKAEQHDAAEAEALRLERMTLLARLDEVADERADGLIDGRGYRRATERIQAKLDDIERRQQDGERLRVFDGIPLGKPEVADAVERLSADRFRAVLDVLCVVTVLPVGKGGKAFRPERVQVDWR

SEQ ID NO: 30012 - DNA, 50 bp, Mycobacteroides abscessus
  source 1..50: mol_type = genomic DNA
aagagttgtttccgcagtcgataatgttattgactgcgccaagtacacta

SEQ ID NO: 30013 - DNA, 40 bp, Mycobacteroides abscessus
  source 1..40: mol_type = genomic DNA
gaaggtcttcaggagatgatgcttgcggcacagggtcttc

SEQ ID NO: 30014 - DNA, 40 bp, Mycobacteroides abscessus
  source 1..40: mol_type = genomic DNA
gaaggtcttcaggagatgacacttgcggcacagggtcttc

SEQ ID NO: 30015 - DNA, 50 bp, Mycobacteroides abscessus; identical to SEQ ID NO: 30010
  source 1..50: mol_type = genomic DNA

SEQ ID NO: 30016 - protein, 485 aa, Mycobacteroides abscessus; identical to SEQ ID NO: 30006

SEQ ID NO: 30017 - DNA, 50 bp, Mycobacteroides abscessus; identical to SEQ ID NO: 30007
  source 1..50: mol_type = genomic DNA

SEQ ID NO: 30018 - DNA, 40 bp, Mycobacteroides abscessus
  source 1..40: mol_type = genomic DNA
gcaggtctttaacagatgatgcttacggcacagcgctttc

SEQ ID NO: 30019 - DNA, 40 bp, Mycobacteroides abscessus
  source 1..40: mol_type = genomic DNA
gcaggtctttaacagatgacacttacggcacagcgctttc

SEQ ID NO: 30020 - DNA, 50 bp, Mycobacteroides abscessus; identical to SEQ ID NO: 30010
  source 1..50: mol_type = genomic DNA

SEQ ID NO: 30021 - protein, 485 aa, Mycobacteroides abscessus
MVGGTQQRVRAGCYLRISSDPRDRREGVDRQREDTSALCEVKGWEAARYYIDNDRSASNGKDRPEWDRLLADIESGDIDAIAAWDQDRGWRMMSELEELRRFFKSLGRRVQFATTGQGDIDLYSPTGVLAVQIKTAVSEHEIAMMKVRMLRAARHKAEQGKPKWRKAFGYLPDTRAKHEDDGRRELDPVTAPLVQQAYAAILAGGSLMDITRDWNAREVYGLNGQPWTAATLSLFLRAPRNAGLRAHNREIVGPGTWEPLVDEATWRAAQAVMNAPGRAPGRKSVRKHLLTGVMSCGKCARELDSRLSGRWAMQAHGAGPRAHSIVYACKTCRGCSIRAEHVEPLLYQLISARLARPDAVDLLKAEQHDAAEAETLRLERMTLLARLDEVADERADGLIDGRGYRRATERIQAKLDDIERRQQDGERLRVFDAIPLGKPEVTNAVEKLSADRFRAVLDVLCVITVLPVGKGGKAFRPERVQVDWR

SEQ ID NO: 30022 - DNA, 50 bp, Mycobacteroides abscessus; identical to SEQ ID NO: 30007
  source 1..50: mol_type = genomic DNA

SEQ ID NO: 30023 - DNA, 40 bp, Mycobacteroides abscessus; identical to SEQ ID NO: 26638
  source 1..40: mol_type = genomic DNA

SEQ ID NO: 30024 - DNA, 40 bp, Mycobacteroides abscessus; identical to SEQ ID NO: 30009
  source 1..40: mol_type = genomic DNA

SEQ ID NO: 30025 - DNA, 50 bp, Mycobacteroides abscessus; identical to SEQ ID NO: 30010
  source 1..50: mol_type = genomic DNA

SEQ ID NO: 30026 - protein, 485 aa, Mycobacteroides abscessus; identical to SEQ ID NO: 30021

SEQ ID NO: 30027 - DNA, 50 bp, Mycobacteroides abscessus
  source 1..50: mol_type = genomic DNA
aagagttgtttccgcagtcgataattttattgactgcgcgaagtacacta

SEQ ID NO: 30028 - DNA, 40 bp, Mycobacteroides abscessus; identical to SEQ ID NO: 26638
  source 1..40: mol_type = genomic DNA

SEQ ID NO: 30029 - DNA, 40 bp, Mycobacteroides abscessus; identical to SEQ ID NO: 30009
  source 1..40: mol_type = genomic DNA

SEQ ID NO: 30030 - DNA, 50 bp, Mycobacteroides abscessus; identical to SEQ ID NO: 30010
  source 1..50: mol_type = genomic DNA

SEQ ID NO: 30031 - protein, 462 aa, Bacillus licheniformis
MTVGIYIRVSTEEQAREGFSISAQREKLKAYCVSQDWTDYKFYVDEGKSAKDTNRPYLKLMLDHIQQGLIDVVLVYRLDRLTRSVKDLYKLLDLFDKNNCIFRSATEVYDTGSATGRLFITLVAAMAQWERENLGERVTMGQVEKARQGQYSAPAPFGFKKQDETLVKDKKQGYILMDMIDKVKKGWSIRQIAKYLDQSYLPIRGYKWHIATILSILHNPALYGALRWKDELNETSHEGYLTKEEFEELQNILYSRQNFRKRQIESAHIFQMKLVCPQCGNRLGCERSVYFRKKDQKNVESLHYRCQSCALNERPSISVSEKKLEKALLLFMKNVKFDLEPVVKEEKNETTEIQNAIVKIERQREKFQKAWASDLMTDEEFTARMSETRKAHENFTKRLSEIQRATPLPIDIKKAKKLVNEFKINWAYLNTEEKREFVQSFIEKIEFTKKDQNPHILNVSFY

SEQ ID NO: 30032 - DNA, 50 bp, Bacillus licheniformis; identical to SEQ ID NO: 18262
  source 1..50: mol_type = genomic DNA

SEQ ID NO: 30033 - DNA, 40 bp, Bacillus licheniformis; identical to SEQ ID NO: 23058
  source 1..40: mol_type = genomic DNA

SEQ ID NO: 30034 - DNA, 40 bp, Bacillus licheniformis
  source 1..40: mol_type = genomic DNA
tttcgtgttcagatacacaattacgaagtgctcctgagag

SEQ ID NO: 30035 - DNA, 50 bp, Bacillus licheniformis
  source 1..50: mol_type = genomic DNA
aataaagttcaaatcaaatacataattttaaacaaaaaaaaaacagcaaa

SEQ ID NO: 30036 - protein, 630 aa, Klebsiella variicola
MPQLYSYIRWSTDRQDKGTTRNRQLAAAKAYAANAGLEMVEIEDPGVSAFRGKNTNTGKLGDFIDAVKQGAIASDSWLYVENLDRITRQNVTTAQKLFIELLELGLTLVTGMDKRVYTLDSVNKNPTELMISLLLFSRANEESETKSQRTLGNVETLIERHKNGLPVNIKSVGRHPFWIDDSGSQYEAVKKHPTYWNIAREAIDMFLSGSGVYSVKKYLDQKYPNGLKGKEWDYQVLKKMRDNRALIGERIVTIKGIPYKLENYYPWLCKDEAEFLLLEERKKQSHFKSKKNSVDKIKLLSGLSILRCNKCGGTMHSFMNHGKARYICTNGVHLQKGCSGWSITAQLVEHCTMIALLIGYMDKSRRSGTDTTVLEEELNKKEILIKDFDTQISNIVTAIAIAPDVSSLAHSLNEINSKRKELVLSVEKLKERLVSLQGKGSFEVDIMEFLILIQWAVFINMEDNDRDKIRKIIDAIIEYIVVDKTEECITIRIKYYGNDEVLVFGGVDRKPHWRFDIDFDTGKEGTLTVLENDLMKMPEIQKAVGYLRKLKESYVAMYDTAVTMLSEVGYPEIKGTQFWPNTGKHEKVTVAFEGVVYTISFNGRLPKAVTSALETTGLTRQQFIDEFKIQ

SEQ ID NO: 30037 - DNA, 50 bp, Klebsiella variicola
  source 1..50: mol_type = genomic DNA
gattttatttcttgattcttagggcaccctaatgatataaatccaatctt

SEQ ID NO: 30038 - DNA, 40 bp, Klebsiella variicola; identical to SEQ ID NO: 5513
  source 1..40: mol_type = genomic DNA

SEQ ID NO: 30039 - DNA, 40 bp, Klebsiella variicola
  source 1..40: mol_type = genomic DNA
gtccacgagatttttcgggtagcccagggagacgaagccg

SEQ ID NO: 30040 - DNA, 50 bp, Klebsiella variicola
  source 1..50: mol_type = genomic DNA
cattttcttattaaattcttagagtaccctaactttaaccattctaactt

SEQ ID NO: 30041 - protein, 500 aa, Mycobacteroides chelonae
MEKERAVLYARISLDKTGDEVGVQRQLRDMQALAQVRGYDVVDEITENNITASKDRYRPGYEKVWGLVRSGRVDHVIVWQTSRFVRSRKERAEVIEQFGKHNVDVVAVKGPSLDLRTAYGRGLADVMTAFDSMEGEVKAERVSAAITDLARQGKGWGFTPYGWDVENGVRVVNQHEAGVVVELVDRVLAGESLHEIHRDLTARGEPSPGYALWMKLPEVEREKRLATKRLKRKPTPLWPRSAIRTLLSRDANVGIRRYSANGTEMEAVGDWPPIVERAKHDRLRALLSDPRRRSHTGTRPGARKNLLTSGIGACGVCGAELRVSVRKSRRGENERYYSCAARGGCTARKQEFVDEMVTRTLVHRLSLPDALDWLTVGDDEAARKLADRIGELQSRLDDAADSFARGAITARQLERITERLAPELAEAQRERDAVARAIDKELLVPLAGDQAEVRWRALSLAQQRAVLEALGVGVVLKRRKKPGPGVEPESIEITWGNAKV

SEQ ID NO: 30042 - DNA, 50 bp, Mycobacteroides chelonae
  source 1..50: mol_type = genomic DNA
actgccctttactgcgtaactaggcaactggtaacttgttaagtggtagc

SEQ ID NO: 30043 - DNA, 40 bp, Mycobacteroides chelonae
  source 1..40: mol_type = genomic DNA
gcggtcggcgcattccaggcaactggtgataccaggtaaa

SEQ ID NO: 30044 - DNA, 40 bp, Mycobacteroides chelonae
  source 1..40: mol_type = genomic DNA
gcggtcggcgcattccaggccactggtgataccaggtaaa

SEQ ID NO: 30045 - DNA, 50 bp, Mycobacteroides chelonae
  source 1..50: mol_type = genomic DNA
actgccattagatttggaactaggccattggtaaccttagaggagatatc

SEQ ID NO: 30046 - protein, 524 aa, Bacillus velezensis
MIKNLDNIHHVAIYLRISQEKRGENVETLENHRQILIEFCKENEFTYEEFGEVISGGKSEIDQRVALKKLLQNIEKYDAIACFELTRISRNGLISQTVKQYCIDYDKPILTPYQSYDLANSETDRLLFDVGSMISSHEHSTIGKRSKANKIQMTKAGLHVSGNVPFGYIRNNSTKKLEIDEKTAPIIKYIFQLHSQGYGSFKIRDILNSEGYKSATGKAFSLPSIKRIIRNPVYKGTLVFNNRKKIKRNGKFEYDNIETYTIENAHPPIIPADEWDRANKDREERAVRAGQIREKPAIKSGVTLLKDLMYCGVCGKKMTIRKDYKTAVGYTLKKCEYLLSNGEKCTNCGKKLDAVIAQVLVALTKYSDDLSRMEDQLKNNEVTNFNEINQLKLDQIDKAIKETEQKQKNLIELAMEGLFSHNEIRQKKQELIAKLDELNAKKAEIIESIDSLSVEDEIKIIQEKRKLILNLKEDMDQEYGNEILKRFIKKIYFTREIPKEILKKSSANPLRKNYPFELKFEFYE

SEQ ID NO: 30047 - DNA, 50 bp, Bacillus velezensis
  source 1..50: mol_type = genomic DNA
atacttacaataaaaaacaatgtgcctacagcattttttattgtaagtat

SEQ ID NO: 30048 - DNA, 40 bp, Bacillus velezensis
  source 1..40: mol_type = genomic DNA
cacaacgggctttgccgtgccgacctttgtcgtcgacgcc

SEQ ID NO: 30049 - DNA, 40 bp, Bacillus velezensis
  source 1..40: mol_type = genomic DNA
cacaacgggctttgccgtgaagacctttgtcgtcgacgcc

SEQ ID NO: 30050 - DNA, 50 bp, Bacillus velezensis
  source 1..50: mol_type = genomic DNA
atacatacacacacacacaatgtgaatactgaatttaatactgttcattc

SEQ ID NO: 30051 - protein, 524 aa, Bacillus velezensis
MIKNFDNIHHVAIYLRISQEKRGENVETLENHRQILIEFCKENEFTYEEFGEVISGGKSEIDQRVALKKLLQNIEKYDAIACFELTRISRNGLISQTVKQYCIDYDKPILTPYQSYDLANSETDRLLFDVGSMISSHEHSTIGKRSKANKIQMTKAGLHVSGNVPFGYIRNNSTKKLEIDEKTAPIIKYIFQLHSQGYGSFKIRDILNSEGYKSATGKAFSLPSIKRIIRNPVYKGTLVFNNRKKIKRNGKFEYDNIETYTIENAHPPIIPADEWDRANKDREERAVRAGQIREKPAIKSGVTLLKDLMYCGVCGKKMIIRKDYKTAVGYTLKKCEYLLSNGEKCTNCGKKLDAVIAQVLVALTKYSDDLSRMEDQLKNNEVTNFNEINQLKLGQIDKAIKETEQKQKNLIELAMEGLFSHNEIRQKKQELIAKLDELNAKKAEIIESIDSLSVEDEIKIIQEKRKLILNLKEDMDQEYGNEILKRFIKKIYFTREIPKEILKKSSANPLRKNYPFELKFEFYE

SEQ ID NO: 30052 - DNA, 50 bp, Bacillus velezensis; identical to SEQ ID NO: 30047
  source 1..50: mol_type = genomic DNA

SEQ ID NO: 30053 - DNA, 40 bp, Bacillus velezensis
  source 1..40: mol_type = genomic DNA
cacaacaggctttgccgtgccgacctttgtcgttgacgcc

SEQ ID NO: 30054 - DNA, 40 bp, Bacillus velezensis
  source 1..40: mol_type = genomic DNA
cacaacaggctttgccgtgaagacctttgtcgttgacgcc

SEQ ID NO: 30055 - DNA, 50 bp, Bacillus velezensis; identical to SEQ ID NO: 30050
  source 1..50: mol_type = genomic DNA

SEQ ID NO: 30056 - protein, 543 aa, Croceicoccus sp
MQAAIAQVVTPLAAMEAAPRVYSYTRFSTPEQAEGDSRRRQYDGVLRWLERKNIERTRDGLAPLALDERLTLNDLGVSAYRGANTGEDKGLGGFLTACRTGLIPSGSFLIVESLDRVSRMTPRRVSRLLDDIVDAGVIVATLSDGQEYDADRLDNDPTALLIALMVSWRAHEESKVKGQRLSAAWAEKRQRVRDGRDDKLTSKGPSWLQWTSEGWRELQPNADAVRRIFGLTLGGMGENKIAQTLNAEGIPVMGRGKMWHRSTIAKILRSPAVIGTLVPGRIDHSDGKRLRRLEQPIPEAFPAVISEADWMAVRALKDGKAPAVRGRGAKAPLTNVFAGLARCPECGSSMTRVNKGKGPKGGKPKLVCTKAKVGAASHAYRSVNLDEVQDKLLSNWRSLMVDVPAGSAGAGLDCDHQDLTGTIDATELELDEVRRAYERSPSHVLRVRRRALEAALASYRADLDEVEHQRAMADHGLVIARLEALAEAIEPEAHGSAEPVNVGQINAALRTLFERVTVDYRTGFLRFHWRQGGETAMMFAWVD

SEQ ID NO: 30057 - DNA, 50 bp, Croceicoccus sp
  source 1..50: mol_type = genomic DNA
atgggtcttgtggcctactaagttagcacctagtgtgtctgtggacccga

SEQ ID NO: 30058 - DNA, 40 bp, Croceicoccus sp
  source 1..40: mol_type = genomic DNA
gccgggcgggccgaccatcagcaggttgtgaccgcccgcc

SEQ ID NO: 30059 - DNA, 40 bp, Croceicoccus sp
  source 1..40: mol_type = genomic DNA
gccgggcgggccgaccatcctcaggttgtgaccgcccgcc

SEQ ID NO: 30060 - DNA, 50 bp, Croceicoccus sp
  source 1..50: mol_type = genomic DNA
atggttcttaaaatctactaaattctgacttagagttattttagatctca

SEQ ID NO: 30061 - protein, 452 aa, Listeria monocytogenes
MKAAIYIRVSTQEQIENYSIQAQTEKLTALCRSKDWETYDIFIDGGYSGSNMNRPALNEMLSKLHEIDAVVVYRLDRLSRSQRDTITLIEEYFLKNNVEFVSLSETLDTSSPFGRAMIGILSVFAQLERETIRDRMVMGKIKRIEAGLPLTTAKGRTFGYDVIDTKLYINEEEAKQLQMIYDIFEEEKSITTLQKRLKKLGFKVKSYSSYNNWLTNDLYCGYVSYADKVHTKGVHEPIISEEQFYRVQEIFSRMGKNPNMNRDSASLLNNLVVCGKCGLGYVHRRKDTVSRGKKYHYRYYSCKTYKHTHELEKCGNKIWRADKLEELIIDRVNNYSFASRNVDKEDELDSLNEKLKTEHAKKKRLFDLYISGSYEVSELDVMMADIDAQINYYEAQIEANEELKKNKKIQENLADLATVDFDSLEFREKQLYLKSLINKIYIDGEQVTIEWL

SEQ ID NO: 30062 - DNA, 50 bp, Listeria monocytogenes
  source 1..50: mol_type = genomic DNA
tttagtacctcatttcctctcgttggaagaagaggaaacgagatactaaa

SEQ ID NO: 30063 - DNA, 40 bp, Listeria monocytogenes; identical to SEQ ID NO: 5118
  source 1..40: mol_type = genomic DNA

SEQ ID NO: 30064 - DNA, 40 bp, Listeria monocytogenes
  source 1..40: mol_type = genomic DNA
tttcggatcaagctatgagacacgcaaagagggaaccaaa

SEQ ID NO: 30065 - DNA, 50 bp, Listeria monocytogenes
  source 1..50: mol_type = genomic DNA
attaggaccttccttcctcatcttacaagatgagaagaatagatacttat

SEQ ID NO: 30066 - protein, 568 aa, Pseudomonas fragi
MIGCYDFPSDFLRLFIMSKAYAYVRYSRAIQATGDSENRQLTALELFETSTGTKIVEVVYDKGKSAFRGDNARSGNFKEMLDRMHSGAIRQGDYLVVESIDRITRQRVLDGVELLQGILKKGINIYTTVDKKTYSYNDPSRDFENLLMISLIAKRANEESETKSDRLLSAWKARKTKAENGEVIIKKGKSIPYGLRVVNDKFVIHEEEQKEIKKLFELLLKFGMNTALIKINETSNKKWSNGSLNKIIKHKTVIGCMTTHRIEYTADGKAKKILTGFIENYYPNIIKPSLFYKVIDVMSKRKQKNWSGRRAEQDFNIFKHCIFCSECGGKLYYDHRGSRYKDKIYPFFKCDNARIQKHICAAGNIRFEYVFGSLLECINMANRLANDFPKGFNGVTTQAIFLNSRVENLLASSDTSQDIEFENKQNELTSCRTKLSSLNAILTGADFKLPQVMLKEISNLEVRIEKLKIELELLATSVEVESLDIENSQSIIDLFMTDEGRAKLNTFFKRHEISFFVSHDKSTKQTNFEMRNLKGERVARAIKTYPLKNILGKFGLGDLQTMFDLSVN

SEQ ID NO: 30067 - DNA, 50 bp, Pseudomonas fragi
  source 1..50: mol_type = genomic DNA
ctcggtaaatacatttacccaatcatgattgggtgttatgattttccgag

SEQ ID NO: 30068 - DNA, 40 bp, Pseudomonas fragi
  source 1..40: mol_type = genomic DNA
gccaagggacaaaccgctgatgatgcggttacgccggggg

SEQ ID NO: 30069 - DNA, 40 bp, Pseudomonas fragi
  source 1..40: mol_type = genomic DNA
gccaagggacaaaccgctgaagatgcggttacgccggggg

SEQ ID NO: 30070 - DNA, 50 bp, Pseudomonas fragi
  source 1..50: mol_type = genomic DNA
ctcagaaaaactatttaccccaccaagataatgtgtgccatttttctgaa

SEQ ID NO: 30071 - protein, 656 aa, Vibrio parahaemolyticus
MMPTKSPSFVKPVVITYTRFSSNMQKDGLSEYRQDELTQRYVIDFCDEHNVDLNEVISLKDRGVSAYRGKNLTQGSLSEIIQKFESGELPKIYNENGEINTFLFIESLDRLSRADLHTATQTFLHLVSFCNIVVVADNERKIYSLHSLKQDMGMLDLFSALMTLSRSHNESRMKEMRSRENWSKKREEVIEYFSKSDEEREGLEYPLNLTKTCPWWMKPRKNNRGFELIEENRKAMMFFIDLLLEGYGLTSAIRRLNDAIDKGVFKVELTSRQKKANGFQIHTFYQVFKDEGNESLFGNLVIHKDYYPTEQDIQKGLYPKSKLGKKVRVPYKTVKGYYPALISEIDFLRIRQKMQDRQQSQTKPNKKVQNIAQGILKCPMCGYGYSYVADNRKNRFHHLVCNLSRAKKCRAFIYRYEYFEHNLLNYCRNLNISRVLGRDDSSDQISKIKEYENALERLSVSKKEVEKEIDQLVENISKITIPSLIEKTQEQYVLKEQQIGEIDLEIKRVQVELHKLNLINNNSVSINKTLHELIDKVSVEHDVDARERLNIELKKIIKSMHFIHDKAEGNILGRKMVLVQFLDGVNRFIPVDRKLQSKELYDVCPVIDAEHGITDQLILPFDYIEGREKGKYPDLEDMPKYWQENPTKYLKLLSEI

SEQ ID NO: 30072 - DNA, 50 bp, Vibrio parahaemolyticus
  source 1..50: mol_type = genomic DNA
tgcgtaagaagtttttggagtatcttgatagttaaaaaacttgtttagca

SEQ ID NO: 30073 - DNA, 40 bp, Vibrio parahaemolyticus; identical to SEQ ID NO: 23278
  source 1..40: mol_type = genomic DNA

SEQ ID NO: 30074 - DNA, 40 bp, Vibrio parahaemolyticus
  source 1..40: mol_type = genomic DNA
tgcaatgatcatcactttagggatcatccaaaccattgca

SEQ ID NO: 30075 - DNA, 50 bp, Vibrio parahaemolyticus
  source 1..50: mol_type = genomic DNA
tgcttaaagaataattgggttatagggatagttaaaaggactgagtagaa

SEQ ID NO: 30076 - protein, 665 aa, Vibrio parahaemolyticus
MPSKLASLNKPVVITYTRFSSNMQKDGLSEYRQDELTQRYVIDFCEEHNVDLNEVISLKDRGVSAYRGKNLTQGSLSEIIQKFESGELPKIYNDKGEINTFLFIESLDRLSRADLHTATQTFLHLVSFCNIVVVADNERKIYSLHSLKQDMGMLDLFSALMTLSRSHNESRMKEMRSRENWSKKREEVIEYFSKSEEEREGLEYPLNLTKTCPWWMKPRKNNRGFELIEENRKAMMFFIDLLLEGYGLTSAIRRLNDAIDKGVFKVELTTRQKKANGFQIHTFYQVFKDEGNESLFGNLVIHQDYYPSEQDIQKGLYPKSKLGKKVRVPIFTAKGYYPALISEIDFLRIRQKMEDRQQSQTKPNKKVQNIAQGILKCPLCGYGYSYVADNRKNRFHHLVCNLSRAKKCRAFIYRYEYFEHNLLNYCRNLNISRVLGRESGDDSDNIQITNLEQELERLTLSKKEIEKEISQLVENIAKITIPSLIEKTQEQYALKETQIDKINNDIKKIQVELHKLNLQRSNTETINNTIHDLIDKVSNEKDVEARERLNIELKKIIKTMTFVHEKAEGNHFKKKLIMIEFLDGFKRLIPIDKKLETIDLYKISPVADFDGQSDWGDKLLLPFDYLEGRESGKYPDVVDMPKYYQENPTKYLKVVKEVSQKLSEH

SEQ ID NO: 30077 - DNA, 50 bp, Vibrio parahaemolyticus; identical to SEQ ID NO: 30072
  source 1..50: mol_type = genomic DNA

SEQ ID NO: 30078 - DNA, 40 bp, Vibrio parahaemolyticus; identical to SEQ ID NO: 23278
  source 1..40: mol_type = genomic DNA

SEQ ID NO: 30079 - DNA, 40 bp, Vibrio parahaemolyticus; identical to SEQ ID NO: 30074
  source 1..40: mol_type = genomic DNA

SEQ ID NO: 30080 - DNA, 50 bp, Vibrio parahaemolyticus; identical to SEQ ID NO: 30075
  source 1..50: mol_type = genomic DNA

SEQ ID NO: 30081 - protein, 470 aa, Rhodococcus rhodochrous
MPRVVAYLRQSQDRDGNEYGISRQRDDVTRLVEARGWTVAEEYVDNDTSATSRKPRPAFDAMMDAVDRGEIDVIVSRHVDRLLRRLSELEHVLERCAPHGTTIVTAADGVDTSTDGGRLVARILASVGQGEVERKSARQKSAMAQAAAQGRWVGGRRAFGYESDGVTIRPDEAAAVRAGYAAVLAGEPLTDIARAWNAAGFTTTQAGGAWERSSVRDVLLNARNAGLRRHRPEGSHESYRKDPLAYVVGTAEWPALVPEETYRAVVALLTDPSRRTGTRGAKALLTGIGLCGVCDDGTTVHAGGARRTVRSYRCSAHNHMQRIAEPIEDFVGRVIVRRLSMPDALAVFSPTVEADVTPLRNEADVLRRRLDDVAADYGAALMTRSQFLTATERARARLAEIEDEITAAGSVDLIAPLVQSDDVEAAWAGLSNARKRAVIDVLADVVIHPPGRGVRTFRPETVEIRWRTEG

SEQ ID NO: 30082 - DNA, 50 bp, Rhodococcus rhodochrous
  source 1..50: mol_type = genomic DNA
ctacgcctcgcagggacgcagggtgtaactagggccatacaatagcggac

SEQ ID NO: 30083 - DNA, 40 bp, Rhodococcus rhodochrous
  source 1..40: mol_type = genomic DNA
ggccgatcgggcgttgcgcgtcgcctggacgttggcggac

SEQ ID NO: 30084 - DNA, 40 bp, Rhodococcus rhodochrous
  source 1..40: mol_type = genomic DNA
ggccgatcgggcgttgcgcaacgcctggacgttggcggac

SEQ ID NO: 30085 - DNA, 50 bp, Rhodococcus rhodochrous
  source 1..50: mol_type = genomic DNA
ctatgtctcccagagacgaaggggaaaacaagtgactttttatagctaac

SEQ ID NO: 30086 - protein, 506 aa, Escherichia albertii
MRTAITYLRFSSAIQGVEGADSTRRQNDLFKQWLKKNSDARIIASFSDEGLSGYKGKHLTGQFGDMLSRIEAGEFPEGTILLVEAIDRIGRLEHLETEALMNRILGNGIEIHTLQDGLIYTKDALADDLGISIIQRVKAYLAHQESKQKSFRVSQKWEQRAKLALAGEQRLTKMVPGWIDPETFKLNEHAETVRLIFKLLLDGESLHNIARHLQSNGIKSFSRRKDANGFSVHSVRTILKSETTIGTLPASQRNDRPAIPNYYEAAIDALTFSKAQEILDKNRKGRTPASNNPRTINIFKGLFRCECGATVHPTGVKNTYEGVYRCCRRFDGRCDIPQLKRKPFDKWMIENLLSMIAVGDDGESERKIASLQHEVEVVTARIKKATALLLEMDDITELKAQVKELNQKRTELQTTIDSMRRKASLTDKKLPQLKDIDLTTKAGRVECQLILSKHLESLTLGRGQVTVKLSNGTEIIVPTDPLPLTDGTAIFEIAEKNLLNIDVFQL

SEQ ID NO: 30087 - DNA, 50 bp, Escherichia albertii
  source 1..50: mol_type = genomic DNA
aaaccgaatagacttcattcaagggtcattgtattgtagctattcggcat

SEQ ID NO: 30088 - DNA, 40 bp, Escherichia albertii
  source 1..40: mol_type = genomic DNA
gcgaggtaaatcatcaaaggtcattgaagtcataatcgtt

SEQ ID NO: 30089 - DNA, 40 bp, Escherichia albertii
  source 1..40: mol_type = genomic DNA
gcgaggtaaatcatcaaagtgcattgaagtcataatcgtt

SEQ ID NO: 30090 - DNA, 50 bp, Escherichia albertii; identical to SEQ ID NO: 7690
  source 1..50: mol_type = genomic DNA

SEQ ID NO: 30091 - protein, 506 aa, Salmonella enterica
MRTVITYLRFSSATQGAEGADSTRRQNELFKQWLRKNSDAQVVASFNDEGLSGYKGKHLSGQFGDMLSRIESGEFPEGTILLVEAIDRIGRLEHLETEALMNRIIAHGIEIHTLQDGLIYTRDALSDDLGISIIQRVKSYLAHQESKQKSFRVSQKWEQRAKLALAGEQRLTKMVPGWIDPETFKLNEHAETVRLIFKLLLDGESLHNIARHLQANNISSFSRRKDANGFSVHSVRTILRSETTIGTLPASQRNDRPAIPNYYEAAIDAATFNKAQEILDKNRKGRTPASDNPLTINIFKGLFRCQCGASVHPTGTKNKYAGVYRCNNHLDGRCDVPPLKRKPFDKWMIDNFLGMIDVGNDGEAEGKIASLQHEVEIVTARIKKATALLLEMDDIDELKIQIKELNQRRTELQTTIDSMRRKASLTDKELPQLKDIDLTTKAGRVECQLILSKHLKGLTLGKGSVTITLQNDTEITIPTNPLPLNDGSPIFEIADKELLDIDAYQL

SEQ ID NO: 30092 - DNA, 50 bp, Salmonella enterica; identical to SEQ ID NO: 30087
  source 1..50: mol_type = genomic DNA

SEQ ID NO: 30093 - DNA, 40 bp, Salmonella enterica; identical to SEQ ID NO: 5263
  source 1..40: mol_type = genomic DNA

SEQ ID NO: 30094 - DNA, 40 bp, Salmonella enterica
  source 1..40: mol_type = genomic DNA
gcgacgaggtaaatcaaggtgcattgaagtcataatcgtt

SEQ ID NO: 30095 - DNA, 50 bp, Salmonella enterica; identical to SEQ ID NO: 7690
  source 1..50: mol_type = genomic DNA

SEQ ID NO: 30096 - protein, 506 aa, Salmonella enterica
MRSVITYLRFSSAIQGAEGADSTRRQNDLFKQWLKKNSDAQVVASFSDEGLSGYKGKHLTGQFGDMLARIESGEFPEGTLLLVEAIDRIGRLEHLETEALMNRIIAHGIEIHTLQDGLIYTRDALSDDLGISIIQRVKSYVAHQESKQKSFRVSQKWKQRAKLALAGEQRLTKMVPGWIDPDTFKCNEHAETVRLIFKLLLDGESLHNIARHLQANNISSFSRRKDANGFSVHSVRTILRSETTRGTLPASQRNDRPAIPNYYEAAIDASTFNKAQEILDKNRKGRTPASDNPLTINIFKGLFRCQCGASVHPTGTKNKYAGVYRCNNNPDGRCDVPPLKRKPFDKWMIDNFLGMIDVGNDGEAEGKIASLQHEVEIVTARIKKATALLLEMDDIDELKIQIKELNQRRTELQTTIDNMRRKASLTDKELPQLKDIDLTTKAGRVECQLILSKHLKGLTLGKDLVTVTLQNDTEIIVPTDPLPLNDGTSIFEIAEKELLEIDAYQL

SEQ ID NO: 30097 - DNA, 50 bp, Salmonella enterica; identical to SEQ ID NO: 30087
  source 1..50: mol_type = genomic DNA

SEQ ID NO: 30098 - DNA, 40 bp, Salmonella enterica; identical to SEQ ID NO: 5263
  source 1..40: mol_type = genomic DNA

SEQ ID NO: 30099 - DNA, 40 bp, Salmonella enterica; identical to SEQ ID NO: 30094
  source 1..40: mol_type = genomic DNA

SEQ ID NO: 30100 - DNA, 50 bp, Salmonella enterica; identical to SEQ ID NO: 7690
  source 1..50: mol_type = genomic DNA

SEQ ID NO: 30101 - protein, 506 aa, Salmonella enterica
MRHVITYLRFSSAIQGAEGADSTRRQNDLFKQWLKKNSDAQVVASFSDEGLSGYKGKHLTGQFGDMLARIESGEFPESTILLVESIDRIGRLEHLETEALMNRILGNGLEIHTLQDGLIYTKDALADDLGISIIQRVKAYIAHQESKQKSFRVSQKWGQRAKLALAGEQRLTRNVPGWIDPDTLKLNEHAETVRLIFKLLLDGESLHNIARHLQANNISSFSRRKDANGFSVHSVRTILRSETTIGTLPASQRNDRPAIPNYYEAAIDAATFNKAQEILDKNRKGRTPASDNPLTINIFKGLFRCQCGASVHPTGTKRTYQGVYRCNNHLDGRCHVPPLKRKPFDKWMLENFLGMIDVGNDGEAEGKIASLQHEVEIVTTRIKKATALLLEMDDIDELKIQLKELNQKRTELQTTIDNMRRKASLTDKELPQLKDIDLTTKAGRVECQLILSKHLKGLTLGKDSVIVTLQNDTEITIPTNPLPLNDGTSIFEIAEKELLEIDAYQL

SEQ ID NO: 30102 - DNA, 50 bp, Salmonella enterica; identical to SEQ ID NO: 30087
  source 1..50: mol_type = genomic DNA

SEQ ID NO: 30103 - DNA, 40 bp, Salmonella enterica; identical to SEQ ID NO: 5263
  source 1..40: mol_type = genomic DNA

SEQ ID NO: 30104 - DNA, 40 bp, Salmonella enterica; identical to SEQ ID NO: 30094
  source 1..40: mol_type = genomic DNA

SEQ ID NO: 30105 - DNA, 50 bp, Salmonella enterica; identical to SEQ ID NO: 7690
  source 1..50: mol_type = genomic DNA

SEQ ID NO: 30106 - protein, 506 aa, Salmonella enterica
MRTVITYLRFSSATQGAEGADSTRRQNELFKQWLRKNSDAQVVASFSDEGLSGYKGKHLTGQFGDMLARIESGEFSEGTVLLVEAIDRIGRLEHLETEALMNRIIAHGIEIHTLQDGLIYTRDALSDDLGISIIQRVKSYVAHQESKQKSFRVSQKWKQRAKLALAGEQRLTRNVPGWIDPDTFKCNEHAETVRLIFKLLLDGESLHNIARHLQSNDIKSFSRRKDANGFSVHSVRTVLRSESVIGTLPASQRNDRPAIPNYYEAAIDAATFNKAQEILDKNRKGRTPASDNPLTINIFKGLFRCQCGASVHPTGTKNKYAGVYRCNNHLDGRCDVPPLKRKPFDRWMIDNFLGMIDVGNDGESERKIAALQHEVEIVTARIKKATALLLEMDDITELKAQVKGLNQKRTEIQTTIDTLKRKTSLTDKELPQLKDIDLTTKAGRVECQLILSKHLKGLTLGKDSVTVTLQNDTEITIPTNPLPLNDGSPIFEIADKELLDIDAYQL

SEQ ID NO: 30107 - DNA, 50 bp, Salmonella enterica; identical to SEQ ID NO: 30087
  source 1..50: mol_type = genomic DNA

SEQ ID NO: 30108 - DNA, 40 bp, Salmonella enterica; identical to SEQ ID NO: 5263
  source 1..40: mol_type = genomic DNA

SEQ ID NO: 30109 - DNA, 40 bp, Salmonella enterica; identical to SEQ ID NO: 30094
  source 1..40: mol_type = genomic DNA

SEQ ID NO: 30110 - DNA, 50 bp, Salmonella enterica; identical to SEQ ID NO: 7690
  source 1..50: mol_type = genomic DNA

SEQ ID NO: 30111 - protein, 506 aa, Salmonella enterica
MRTVITYLRFSSATQGAEGADSTRRQNELFKQWLRKNSDAQVVASFSDEGLSGYKGKHLTGQFGDMLARIESGEFSEGTVLLVEAIDRIGRLEHLETEALMNRIIAHGIEIHTLQDGLIYTRDALSDDLGISIIQRVKSYVAHQESKQKSFRVSQKWKQRAKLALAGEQRLTRNVPGWIDPDTFKCNEHAETVRLIFKLLLDGESLHNIARHLQSNDIKSFSRRKDANGFSVHSVRTVLRSESVIGTLPASQRNDRPAIPNYYEAAIDAATFNKAQEILDKNRKGRTPASDNPLTINIFKGLFRCQCGASVHPTGTKNKYQGVYRCNNHLDGRCDVPPLKRKPFDRWMIDNFLGMIDVGNDGESERKIAALQHEVEIVTARIKKATALLLEMDDITELKTQVKGLNQKRTELQTTIDNMKRKASLTDKELPQLKDIDLTTKAGRVECQLILSKHLKGLTLGKDSVTVTLQNDTEITIPTNPLPLNDGSPIFEIADKELLDIDAYQL

SEQ ID NO: 30112 - DNA, 50 bp, Salmonella enterica; identical to SEQ ID NO: 30087
  source 1..50: mol_type = genomic DNA

SEQ ID NO: 30113 - DNA, 40 bp, Salmonella enterica; identical to SEQ ID NO: 5263
  source 1..40: mol_type = genomic DNA

SEQ ID NO: 30114 - DNA, 40 bp, Salmonella enterica; identical to SEQ ID NO: 30094
  source 1..40: mol_type = genomic DNA

SEQ ID NO: 30115 - DNA, 50 bp, Salmonella enterica; identical to SEQ ID NO: 7690
  source 1..50: mol_type = genomic DNA

SEQ ID NO: 30116 - protein, 506 aa, Salmonella enterica
MRHVITYLRYSSAIQGAEGADSTRRQNDLFKQWLKKNSDAQVVASFNDEGLSGYKGKHLSGQFGDMLSRIESGEFSEGTILLVEAIDRIGRLEHLETEALMNRILGNGIEIHTLQDGLIYTKDALADDLGISIIQRVKAYIAHQESKQKSFRVSQKWGQRAKLALAGKQRLTKMVPGWIDPETFEVNEHAETVRLIFKLLLDGESLHNIARHLQSNGIKSFSRRKDANGFSVHSVRTVLRSESVIGTLPASQRNDRPAIPNYYEAAIDASTFNKAQEILDKNRKGRTPASDNPLTINIFKGLFRCQCGASVHPTGTKNKYAGVYRCNNHLDGRCDVPPLKRKPFDKWMIDNFLGMIDVGNDGESERKIAALQHEVEIVTARIKKATALLLEMDDIDELKIQIKELNQRRTELQTTIDSMRRKTSLTDKELPQLKDIDLTTKAGRVECQLILSKHLKGLTLGKDSVTVTLQNDTEITIPTDPLPLNDGTSIFEIAEKELLEIDAYQL

SEQ ID NO: 30117 - DNA, 50 bp, Salmonella enterica; identical to SEQ ID NO: 30087
  source 1..50: mol_type = genomic DNA

SEQ ID NO: 30118 - DNA, 40 bp, Salmonella enterica; identical to SEQ ID NO: 5263
  source 1..40: mol_type = genomic DNA

SEQ ID NO: 30119 - DNA, 40 bp, Salmonella enterica; identical to SEQ ID NO: 30094
  source 1..40: mol_type = genomic DNA

SEQ ID NO: 30120 - DNA, 50 bp, Salmonella enterica; identical to SEQ ID NO: 7690
  source 1..50: mol_type = genomic DNA

SEQ ID NO: 30121 - protein, 506 aa, Shigella flexneri
MRTVITYLRFSSATQGAEGADSTRRQNELFKQWLRKNSDAQVVASFSDEGLSGYKGKHLTGQFGDMLARIEAGEFPAGAILLVESIDRIGRLEHLETEALMNRIIAHGIEIHTLQDGLIYTRDALSDDLGISIIQRVKSYLAHQESKQKSFRVSEKWKQRAKLALAGEQHLTRNVPGWIDPDTFKCNEHAETVRLIFKLLLDGESLHNIARHLQSNDIKSFSRRKDANGFSVHSVRTVLRSESVIGTLPASQRNDRPAIPNYYEAAIDASTFNKAQEILDKNRKGRTPASDNPLTINIFKGLFRCQCGASVHPTGTKNKYQGVYRCNSHLDGRCDVPPLKRKPFDRWMIDNFLGMIDVGNDGEAEKEIASLQHEVETVTARIKKATALLLEMDDITELKTQVKELNQKRTELQTTINTMKRKTSLSDKGLPQLKDIDLMTKAGRVECQLILSKHLKGLTLGKDSVTVTLQNDTEITIPTNPLPLNDGTSIFEIAEKNLLNIDTFQL

SEQ ID NO: 30122 - DNA, 50 bp, Shigella flexneri; identical to SEQ ID NO: 30087
  source 1..50: mol_type = genomic DNA

SEQ ID NO: 30123 - DNA, 40 bp, Shigella flexneri; identical to SEQ ID NO: 7688
  source 1..40: mol_type = genomic DNA

SEQ ID NO: 30124 - DNA, 40 bp, Shigella flexneri; identical to SEQ ID NO: 7689
  source 1..40: mol_type = genomic DNA

SEQ ID NO: 30125 - DNA, 50 bp, Shigella flexneri; identical to SEQ ID NO: 7690
  source 1..50: mol_type = genomic DNA

SEQ ID NO: 30126 - protein, 506 aa, Salmonella enterica
MRTVITYLRFSSATQGAEGADSTRRQNELFKQWLRKNSDAQVVASFSDEGLSGYKGKHLTGQFGDMLARIEAGEFPAGAILLVESIDRIGRLEHLETEALMNRIIAHGIEIHTLQDGLIYTRDALSDDLGISIIQRVKSYIAHQESKQKSFRVSQKWEQRAKLALAGEQRLTRNVPGWIDPDTFKCNEHAETVRLIFKLLLDGESLHNIARHLQSNDIKSFSRRKDANGFSVHSVRTVLRSESVIGTLPASQRNDRPAIPNYYEAAIDAATFNKAQEILDKNRKGRTPASDNPLTINIFKGLFRCQCGASVHPTGTKNKYAGVYRCNNHLDGRCDVPPLKRKPFDRWMIDNFLGMIDVGNDGESERKIAALQHEVEIVTARIKKATALLLEMDDITELKAQVKGLNQKRTEIQTTIDTLKRKTSLTDKELPQLKDIDLTTKAGRVECQLILSKHLKGLTLGKDSVTVTLQNDTEITIPTNPLPLNDGSPIFEIADKELLDIDAYQL

SEQ ID NO: 30127 - DNA, 50 bp, Salmonella enterica; identical to SEQ ID NO: 30087
  source 1..50: mol_type = genomic DNA

SEQ ID NO: 30128 - DNA, 40 bp, Salmonella enterica; identical to SEQ ID NO: 5263
  source 1..40: mol_type = genomic DNA

SEQ ID NO: 30129 - DNA, 40 bp, Salmonella enterica; identical to SEQ ID NO: 30094
  source 1..40: mol_type = genomic DNA

SEQ ID NO: 30130 - DNA, 50 bp, Salmonella enterica; identical to SEQ ID NO: 7690
  source 1..50: mol_type = genomic DNA

SEQ ID NO: 30131 - protein, 506 aa, Escherichia fergusonii
MRSVITYLRYSSAIQGAEGADSTRRQNDLFRQWLKKNIDAQVVASFSDEGLSGYKGKHLSGQFGDMLSRIESGEFPEGTILLVESIDRIGRLEHLETEALMNRILGNGLEIHTLQDGLIYTKDALADDLGISIIQRVKAYIAHQESKQKSFRVSQKWGQRAKLALAGEQRLTKMVPGWIDPETFKLNEHAETVRLIFKLLLDGESLHNIARHLQSNGIKSFSRRKDANGFSVHSVRTILRSETTIGTLPASQRNDRPAIPNYYEAAIDASTFNKAQEILDKNRTGRTPASDNPLTINIFKGLFRCQCGASVHPTGTKNKYAGVYRCNNHLDGRCDVPPLKRKPFDRWMIDNFLGMIDVGNDGEAEGKIASLQHEVEIVTARIKKATALLLEMDDIDELKIQLKELNQRRTELQTTIDSMRRKTSLSDKGLPQLKDIDLMTKAGRVECQLILSKHLKGLTLGKDSVTVTLQNDTEITIPTNPLPLNDGSPIFEIADKELLDVDTYRL

SEQ ID NO: 30132 - DNA, 50 bp, Escherichia fergusonii; identical to SEQ ID NO: 30087
  source 1..50: mol_type = genomic DNA

SEQ ID NO: 30133 - DNA, 40 bp, Escherichia fergusonii
  source 1..40: mol_type = genomic DNA
gcgacgaggtaaatcaagcgtcattgaagtcataatcgtt

SEQ ID NO: 30134 - DNA, 40 bp, Escherichia fergusonii
  source 1..40: mol_type = genomic DNA
gcgacgaggtaaatcaagctgcattgaagtcataatcgtt

SEQ ID NO: 30135 - DNA, 50 bp, Escherichia fergusonii; identical to SEQ ID NO: 7690
  source 1..50: mol_type = genomic DNA

SEQ ID NO: 30136 - protein, 506 aa, Escherichia fergusonii
MRSVITYLRYSSAIQGAEGADSTRRQNDLFRQWLKKNSDAQVVASFSDEGLSGYKGKHLSGQFGDMLSRIESGEFPEGTILLVESIDRIGRLEHLETEALMNRILGNGLEIHTLQDGLIYTKDALADDLGISIIQRVKAYIAHQESKQKSFRVSQKWEQRAKLALAGEQRLTRNVPGWIDPDTFKLNEHAETVRLIFKLLLDGESLHNIARHLQSNGIKSFSRRKDANGFSVHSVRTILRSETTIGTLPASQRNDRPAIPNYYEAAIDASTFNKAQEILGKNRTGRTPASDNPLTINIFKGLFRCQCGASVHPTGTKNKYAGVYRCNNHLDGRCDVPPLKRKPFDKWMLENFLGMIDVGNDGESERKIAALQHEVEIVTSRIKKATALLLEMDDITELKAQVKELNQKRTELQTTINTMKRKTSLSDKGLPQLKDIDLMTKAGRVECQLILSKHLKGLTLGKDSVTVTLQNDTEIIVPTDPLPLNDGTSIFEIAEKELLEIDAYQL

SEQ ID NO: 30137 - DNA, 50 bp, Escherichia fergusonii; identical to SEQ ID NO: 30087
  source 1..50: mol_type = genomic DNA

SEQ ID NO: 30138 - DNA, 40 bp, Escherichia fergusonii; identical to SEQ ID NO: 30133
  source 1..40: mol_type = genomic DNA

SEQ ID NO: 30139 - DNA, 40 bp, Escherichia fergusonii; identical to SEQ ID NO: 30134
  source 1..40: mol_type = genomic DNA

SEQ ID NO: 30140 - DNA, 50 bp, Escherichia fergusonii; identical to SEQ ID NO: 7690
  source 1..50: mol_type = genomic DNA

SEQ ID NO: 30141 - protein, 506 aa, Escherichia fergusonii
MRSVITYLRYSSAIQGAEGADSTRRQNDLFRQWLKKNIDAQVVASFSDEGLSGYKGKHLSGQFGDMLSRIESGEFPEGTILLVESIDRIGRLEHLETEALMNRILGNGLEIHTLQDGLIYTKDALADDLGISIIQRVKAYIAHQESKQKSFRVSQKWGQRAKLALAGEQRLTKMVPGWIDPETFKLNEHAETVRLIFKLLLDGESLHNIARHLQSNGIKSFSRRKDANGFSVHSVRTILRSETTIGTLPASQRNDRPAIPNYYEAAIDASTFNKAQEILDKNRTGRTPASDNPLTINIFKGLFRCQCGASVHPTGTKNKYAGVYRCNNHLDGRCDVPPLKRKPFDRWMIDNFLGMIDVGNDGEAEGKIASLQHEVEIVTARIKKATALLLEMDDIAELKIQLKELNQRRTELQTTIDSMRRKTSLSDKGLPQLKDIDLMTKAGRVECQLILSKHLKGLTLGKDSVTVTLQNDTEITIPTNPLPLNDGSPIFEIADKELLDVDTYRL

SEQ ID NO: 30142 - DNA, 50 bp, Escherichia fergusonii; identical to SEQ ID NO: 30087
  source 1..50: mol_type = genomic DNA

SEQ ID NO: 30143 - DNA, 40 bp, Escherichia fergusonii; identical to SEQ ID NO: 30133
  source 1..40: mol_type = genomic DNA

SEQ ID NO: 30144 - DNA, 40 bp, Escherichia fergusonii; identical to SEQ ID NO: 30134
  source 1..40: mol_type = genomic DNA

SEQ ID NO: 30145 - DNA, 50 bp, Escherichia fergusonii; identical to SEQ ID NO: 7690
  source 1..50: mol_type = genomic DNA

SEQ ID NO: 30146 - protein, 506 aa, Escherichia fergusonii
MRSVITYLRFSSATQGAEGADSTRRQNDLFKQWLKKNSDAQVVASFSDEGLSGYKGKHLTGQFGDMLARIESGEFPEGTLLLVEAIDRIGRLEHLETESLMNRIIAHGIEIHTLQDGLIYTRDALSDDLGISIIQRVKSYIAHQESKQKSFRVSQKWEQRAKLALAGEQRLTKMVPGWIDPDTFKLNEHAETVRLIFKLLLDGESLHNIARHLQSNDIKSFSRRKDANGFSVHSVRTVLRSVSAIGTLPASQRNDRPAIPNYYEAAIDAATFNKAQEILDKNRKGRTPASDNPLTINIFKGLFRCQCGASVHPTGTKNKYQGVYRCNNHLDGRCDVPPLKRKPFDKWMIDNFLGMIDVGNDGEAEGKIAALQHEVEIVTARIKKATALLLEMDDITELKTQVKGLNQKRTELQTTIDNMRRKASLTDKELPQLKDIDLTTKAGRVECQLILSKHLKGLTLGKDSVIVTLQNDTEITIPTNPLPLNDGTSIFEIAEKNLLNIDTFQL

SEQ ID NO: 30147 - DNA, 50 bp, Escherichia fergusonii; identical to SEQ ID NO: 30087
  source 1..50: mol_type = genomic DNA

SEQ ID NO: 30148 - DNA, 40 bp, Escherichia fergusonii; identical to SEQ ID NO: 5263
  source 1..40: mol_type = genomic DNA

SEQ ID NO: 30149 - DNA, 40 bp, Escherichia fergusonii; identical to SEQ ID NO: 30094
  source 1..40: mol_type = genomic DNA

SEQ ID NO: 30150 - DNA, 50 bp, Escherichia fergusonii; identical to SEQ ID NO: 7690
  source 1..50: mol_type = genomic DNA

SEQ ID NO: 30151 - protein, 506 aa, Salmonella enterica
MRTVITYLRFSSAIQGAEGADSTRRQNDLFKQWLKKNSDAQVVASFSDEGLSGYKGKHLTGQFGDMLARIESGEFPEGTILLVEAIDRIGRLEHLETEALMNRIIAHGIEIHTLQDGLIYTRDALSDDLGISIIQRVKSYVAHQESKQKSFRVSQKWKQRAKLALAGEQRLTKMVPGWIDPDTFKCNEHAETVRLIFKLLLDGESLHNIARHLQANNISSFSRRKDANGFSVHSVRTILRSETTRGTLPASQRNDRPAIPNYYEAAIDAATFNKAQEILDKNRKGRTPASDNPLTINIFKGLFRCQCGASVHPTGTKNKYAGVYRCNNNPDGRCDVPPLKRKPFDKWMIDNFLGMIDVGNDGEAEGKIASLQHEVEIVTARIKKATALLLEMDDIDELKIQLKELNQKRTELQTMIDNMRRKASLTDKELPQLKDIDLMTKAGRVECQLILSKHLKGLTLGKDSVTVTLQNDTEIIVPTDPLPLNDGTSIFEIAEKELLEIDAYQL

SEQ ID NO: 30152 - DNA, 50 bp, Salmonella enterica; identical to SEQ ID NO: 30087
  source 1..50: mol_type = genomic DNA

SEQ ID NO: 30153 - DNA, 40 bp, Salmonella enterica; identical to SEQ ID NO: 5263
  source 1..40: mol_type = genomic DNA

SEQ ID NO: 30154 - DNA, 40 bp, Salmonella enterica; identical to SEQ ID NO: 30094
  source 1..40: mol_type = genomic DNA

SEQ ID NO: 30155 - DNA, 50 bp, Salmonella enterica; identical to SEQ ID NO: 7690
  source 1..50: mol_type = genomic DNA

SEQ ID NO: 30156 - protein, 506 aa, Salmonella enterica
MRHVITYLRYSSAIQGAEGADSTRRQNELFKQWLRKNSDAQVVASFSDEGLSGYKGKHLTGQFGDMLARIEAGEFPASTILLVESIDRIGRLEHLETEALMNRILGNGIEIHTLQDGLIYTKDALADDLGISIIQRVKAYIAHQESKQKSFRVSQKWEQRAKLALAGEQRLTKMVPGWIDPDTFKCNEHAETVRLIFKLLLDGESLHNIARHLQANNISSFSRRKDANGFSVHSVRTILRSETTIGTLPASQRNDRPAIPNYYEAAIDVSTFNKAQEILDKNRKGRTPASDNPLTINIFKGLFRCQCGASVHPTGTKNKYQGVYRCNNHLDGRCDVQPLKRKPFDRWMIDNFLGMIDVGNDGESERKIAALQHEVEIVTARIKKATALLLEMDDIDELKIQLKELNQKRTELQTTIDNMRRKASLTDKELPQLKDIDLTTKAGRVECQLILSKHLKGLTLGKDTVTVTLQNDTEITIPTDPLPLNDGTSIFEIAEKNLLNIDTFQL

SEQ ID NO: 30157 - DNA, 50 bp, Salmonella enterica; identical to SEQ ID NO: 30087
  source 1..50: mol_type = genomic DNA

SEQ ID NO: 30158 - DNA, 40 bp, Salmonella enterica; identical to SEQ ID NO: 5263
  source 1..40: mol_type = genomic DNA

SEQ ID NO: 30159 - DNA, 40 bp, Salmonella enterica; identical to SEQ ID NO: 30094
  source 1..40: mol_type = genomic DNA

SEQ ID NO: 30160 - DNA, 50 bp, Salmonella enterica; identical to SEQ ID NO: 7690
  source 1..50: mol_type = genomic DNA

SEQ ID NO: 30161 - protein, 506 aa, Escherichia coli
MRSVITYLRFSSAIQGAEGADSTRRQNELFKQWLRKNSDAQVVASFSDEGLSGYKGKHLTGQFGDMLARIESGEFPEGTILLVESIDRIGRLEHLETEALMNRILGNGLEIHTLQDGLIYTKDALADDLGISIIQRVKAYIAHQESKQKSFRVSEKWKQRAKLALAGKQRLTKMVPGWIDPDTLKLNEHAETVRLIFKLLLSGESLHNIARHLQSNDIKSFSRRKDANGFSVHSVRTILRSETTIGTLPASQRNDRPAIPNYYEAAIDAATFNKAQEILDKNRKGRTPASDNPLTINIFKGLFRCQCGASVHPTGTKNKYAGVYRCNNHLDGRCDVPPLKRKPFDKWMLENFLGMIDVGNDGEAEGKIASLQYEVEIVTTRIKKATALLLEMDDIDELKIQLKELNQRRTELQTTIDNMRRKASLTDKELPQLKDIDLTTKAGRVECQLILSKHLKGLTLGKDSVIVTLQNDTEITIPTNPLPLNDGTSIFEIAEKELLEIDAYQL

SEQ ID NO: 30162 - DNA, 50 bp, Escherichia coli; identical to SEQ ID NO: 30087
  source 1..50: mol_type = genomic DNA

SEQ ID NO: 30163 - DNA, 40 bp, Escherichia coli; identical to SEQ ID NO: 20043
  source 1..40: mol_type = genomic DNA

SEQ ID NO: 30164 - DNA, 40 bp, Escherichia coli
  source 1..40: mol_type = genomic DNA
gcggcgaggtaaatcaaggtgcattgaagtcataatcatt

SEQ ID NO: 30165 - DNA, 50 bp, Escherichia coli; identical to SEQ ID NO: 7690
  source 1..50: mol_type = genomic DNA

SEQ ID NO: 30166 - protein, 506 aa, Escherichia coli
MRTVITYLRFSSAIQGAEGADSTRRQNDLFKQWLKKNSDAQVVASFSDEGLSGYKGKHLTGQFGDMLARIESGEFPEGTILLVESIDRIGRLEHLETEALMNRILGNGLEIHTLQDGLIYTKDALADDLGISIIQRVKAYIAHQESKQKSFRVSQKWEQRAKLALAGEQRLTKMVPGWIDPDTFKLNEHAETVRLIFKLLLSGESLHNIARHLQSNGIKSFSRRKDANGFSVHSVRTILRSETTIGTLPASQRNDRPAIPNYYEAAIDASTFNKAQEILGKNRIGRTPASDNPLTINIFKGLFRCQCGASVHPTGTKNKYQGVYRCNNHLDGRCDVPPLKRKPFDKWMLENFLGMIDVGNDGEAEGKIASLQHEVEIVTTRIKKATALLLEMDDIDELKIQIKELNQRRTELQTTIDNMRRKASLTDKELPQLKDIDLTTKAGRVECQLILSKHLKGLTLGKDSVIVTLQNDTEITIPTNPLPLNDGTSIFEIAEKELLEIDAYQL

SEQ ID NO: 30167 - DNA, 50 bp, Escherichia coli; identical to SEQ ID NO: 30087
  source 1..50: mol_type = genomic DNA

SEQ ID NO: 30168 - DNA, 40 bp, Escherichia coli; identical to SEQ ID NO: 20043
  source 1..40: mol_type = genomic DNA

SEQ ID NO: 30169 - DNA, 40 bp, Escherichia coli; identical to SEQ ID NO: 30164
  source 1..40: mol_type = genomic DNA

SEQ ID NO: 30170 - DNA, 50 bp, Escherichia coli; identical to SEQ ID NO: 7690
  source 1..50: mol_type = genomic DNA

SEQ ID NO: 30171 - protein, 506 aa, Escherichia coli
MRTVITYLRFSSATQGAEGADSTRRQNELFKQWLRKNSDAQVVASFSDEGLSGYKGKHLTGQFGDMLARIESGEFSEGTVLLVEAIDRIGRLEHLETEALMNRIIAHGIEIHTLQDGLIYTRDALSDDLGISIIQRVKSYVAHQESKQKSFRVSQKWKQRAKLALAGEQRLTKMVPGWIDPDTLKLNEHAETVRLIFKLLLDGESLHNIARHLQANNISSFSRRKDANGFSVHSVRTILRSETTIGTLPASQRNDRPAIPNYYEAAIDVSTFNKAQEILDKNRKGRTPASDNPLTINIFKGLFRCQCGASVHPTGTKNKYQGVYRCNNHLDGRCDVPPLKRKPFDRWMIDNFLGMIDVGNDGESERKIAALQHEVEIVTARIKKATALLLEMDDIDELKIQIKELNQRRTELQTTIDSMRRKASLTDKELPQLKDIDLTTKAGRVECQLILSKHLKGLTLGKDTVTVTLQNDTEITIPTDPLPLNDGTSIFEIAEKNLLNIDTFQL

SEQ ID NO: 30172 - DNA, 50 bp, Escherichia coli; identical to SEQ ID NO: 30087
  source 1..50: mol_type = genomic DNA

SEQ ID NO: 30173 - DNA, 40 bp, Escherichia coli; identical to SEQ ID NO: 20043
  source 1..40: mol_type = genomic DNA

SEQ ID NO: 30174 - DNA, 40 bp, Escherichia coli; identical to SEQ ID NO: 30164
  source 1..40: mol_type = genomic DNA

SEQ ID NO: 30175 - DNA, 50 bp, Escherichia coli; identical to SEQ ID NO: 7690
  source 1..50: mol_type = genomic DNA

SEQ ID NO: 30176 - protein, 506 aa, Escherichia coli
MRHVITYLRYSSAIQGAEGADSTRRQNNLFKQWLKKNSDAQVVASFSDEGLSGYKGKHLTGQFGDMLARIESGEFPAGTILLVESIDRIGRLEHLETEALMNRILGNGIEIHTLQDGLIYTKDALADDLGISIIQRVKAYIAHQESKQKSFRVSQKWEQRAKLALAGEQRLTKMVPGWIDPDTFKCNEHAETVRLIFKLLLDGESLHNIARHLQANNISSFSRRKDANGFSVHSVRTILRSVTTIGTLPASQRNDRPAIPNYYEAAIDAATFNKAQEVLDKNRKGRTPASDNPLTINIFKGLFRCQCGASVHPTGTKNKYAGVYRCNNHLDGRCDVPPLKRKPFDRWMIDNFLGMIDVGNDGEAEGKIAALQHEVEIVTARIKKATALLLEMDDITELKTQVKGLNQKRTELQTTIDNMRRKASLTDKELPQLKDIDLTTKAGRVECQLILSKHLKGLTLGKDSVTVTLQNDTEITIPTDPLPLNDGTSIFEIAEKNLLNIDTFQL

SEQ ID NO: 30177 - DNA, 50 bp, Escherichia coli; identical to SEQ ID NO: 30087
  source 1..50: mol_type = genomic DNA

SEQ ID NO: 30178 - DNA, 40 bp, Escherichia coli; identical to SEQ ID NO: 20043
  source 1..40: mol_type = genomic DNA

SEQ ID NO: 30179 - DNA, 40 bp, Escherichia coli; identical to SEQ ID NO: 30164
  source 1..40: mol_type = genomic DNA

SEQ ID NO: 30180 - DNA, 50 bp, Escherichia coli; identical to SEQ ID NO: 7690
  source 1..50: mol_type = genomic DNA

SEQ ID NO: 30181 - protein, 506 aa, Escherichia coli
MRSVITYLRFSSATQGAEGADSTRRQNELFKQWLRKNSDAQVVASFSDEGLSGYKGKHLTGQFGDMLARIEAGEFPAGAILLVESIDRIGRLEHLETEALMNRIIAHGIEIHTLQDGLIYTRDALSDDLGISIIQRVKSYLAHQESKQKSFRVSEKWKQRAKLALAGEQHLTRNVPGWIDPDTFKCNEHAETVRLIFKLLLDGESLHNIARHLQSNDIKSFSRRKDANGFSVHSVRTVLRSESVIGTLPASQRNDRPAIPNYYEAAIDAATFNKAQEILDKNRKGRTPASDNPLTINIFKGLFRCQCGASVHPTGTKNKYAGVYRCNNHLDGRCDVPPLKRKPFDKWMIDNFLGMIDVGNDGEAEGKIASLQHEVEIVTARIKKATALLLEMDDIDELKIQLKELNQRRTELQTTIDNMRRKASLTDKELPQLKDIDLTTKAGRVECQLILSKHLKGLTLGKDSVTVTLQNDTEITIPTNPLPLNDGTSIFEIAEKNLLNIDTFQL

SEQ ID NO: 30182 - DNA, 50 bp, Escherichia coli; identical to SEQ ID NO: 30087
  source 1..50: mol_type = genomic DNA

SEQ ID NO: 30183 - DNA, 40 bp, Escherichia coli; identical to SEQ ID NO: 20043
  source 1..40: mol_type = genomic DNA

SEQ ID NO: 30184 - DNA, 40 bp, Escherichia coli; identical to SEQ ID NO: 30164
  source 1..40: mol_type = genomic DNA

SEQ ID NO: 30185 - DNA, 50 bp, Escherichia coli; identical to SEQ ID NO: 7690
  source 1..50: mol_type = genomic DNA

SEQ ID NO: 30186 - protein, 506 aa, Escherichia coli
MRSVITYLRFSSAIQGAEGADSTRRQNDLFKQWLKKNSDAQVVASFSDEGLSGYKGKHLTGQFGDMLARIESGEFSEGTVLLVEAIDRIGRLEHLETEALMNRIIAHGIEIHTLQDGLIYTRDALSDDLGISIIQRVKSYVAHQESKQKSFRVSQKWKQRAKLALAGEQRLTKMVPGWIDPDTFKLNEHAETVRLIFKLLLSGESLHNIARHLQANNISSFSRRKDANGFSVHSVRTVLRSESVIGTLPASQRNDRPAIPNYYEAAIDAATFNKAQEILDKNRKGRTPASDNPLTINIFKGLFRCQCGASVHPTGTKNKYAGVYRCNNNPDGRCDVPPLKRKPFDKWMIDNFLGMIDVGNDGEAEGKIASLQHEVEIVTTRIKKATALLLEMDDITELKAQVKELNQKRTELQTTIDSMRRKTSLSDKGLPQLKDIDLMTKAGRVECQLILSKHLKGLTLGKDSVIVTLQNDTEIIVPTDPLPLNDGTSIFEIAEKELLEIDAYQL

SEQ ID NO: 30187 - DNA, 50 bp, Escherichia coli; identical to SEQ ID NO: 30087
  source 1..50: mol_type = genomic DNA

SEQ ID NO: 30188 - DNA, 40 bp, Escherichia coli; identical to SEQ ID NO: 20043
  source 1..40: mol_type = genomic DNA

SEQ ID NO: 30189 - DNA, 40 bp, Escherichia coli; identical to SEQ ID NO: 30164
  source 1..40: mol_type = genomic DNA

SEQ ID NO: 30190 - DNA, 50 bp, Escherichia coli; identical to SEQ ID NO: 7690
  source 1..50: mol_type = genomic DNA

SEQ ID NO: 30191 - protein, 506 aa, Escherichia coli
MRTVITYLRFSSATQGAEGADSTRRQNELFKQWLRKNSDAQVVASFNDEGLSGYKGKHLSGQFGDMLSRIESGEFPEGTILLVEAIDRIGRLEHLETEALMNRIIAHGIEIHTLQDGLIYTRDALSDDLGISIIQRVKSYLAHQESKQKSFRVSQKWKQRAKLALAGEQRLTKMVPGWIDPDTFKCNEHAETVRLIFKLLLDGESLHNIARHLQSNDIKSFSRRKDANGFSVHSVRTVLRSVSAIGTLPASQRNDRPAIPNYYEAAIDAATFNKAQEILDKNRKGRTPASDNPLTINIFKGLFRCQCGASVHPTGTKRTYQGVYRCNNHLDGRCDVQPLKRKPFDRWMIDNFLGMIDVGNDGESERKIAALQHEVEIVTARIKKATALLLEMDDITELKTQVRELNQKRTDIQTTIDTLKRKTSLSDKGLPQLKDIDLMTKAGRVECQLILSKHLKGLTLGKDSVTVTLQNDTEITIPTNPLPLNDGSPIFEIADKELLDIDAYQL

SEQ ID NO: 30192 - DNA, 50 bp, Escherichia coli; identical to SEQ ID NO: 30087
  source 1..50: mol_type = genomic DNA

SEQ ID NO: 30193 - DNA, 40 bp, Escherichia coli; identical to SEQ ID NO: 20043
  source 1..40: mol_type = genomic DNA

SEQ ID NO: 30194 - DNA, 40 bp, Escherichia coli; identical to SEQ ID NO: 30164
  source 1..40: mol_type = genomic DNA

SEQ ID NO: 30195 - DNA, 50 bp, Escherichia coli; identical to SEQ ID NO: 7690
  source 1..50: mol_type = genomic DNA

SEQ ID NO: 30196 - protein, 506 aa, Escherichia coli
MRSVITYLRFSSATQGAEGADSTRRQNELFKQWLRKNSDAQVVASFNDEGLSGYKGKHLSGQFGDMLSRIESGEFPEGTILLVEAIDRIGRLEHLETEALMNRIIAHGIEIHTLQDGLIYTRDALSDDLGISIIQRVKSYIAHQESKQKSFRVSQKWEQRAKLALAGEQRLTKMVPGWIDPDTFKLNEHAETVRLIFKLLLSGESLHNIARHLQSNGIKSFSRRKDANGFSVHSVRTVLRSESVIGTLPASQRNDRPAIPNYYEAAIDAATFNKAQEILDKNRKGRTPASDNPLTINIFKGLFRCQCGASVHPTGTKNKYAGVYRCNNHLDGRCDVPPLKRKPFDRWMIDNFLGMIDVGNDGESERKIAALQHEVEIVTARIKKATALLLEMDDIDELKIQLKELNQKRTELQTTIDNMRRKASLTDKELPQLKDIDLTTKAGRVECQLILSKHLKGLTLGKDSVIVTLQNDTEITIPTNPLPLNDGTSIFEIAEKELLEIDAYQL

SEQ ID NO: 30197 - DNA, 50 bp, Escherichia coli; identical to SEQ ID NO: 30087
  source 1..50: mol_type = genomic DNA

SEQ ID NO: 30198 - DNA, 40 bp, Escherichia coli; identical to SEQ ID NO: 20043
  source 1..40: mol_type = genomic DNA

SEQ ID NO: 30199 - DNA, 40 bp, Escherichia coli; identical to SEQ ID NO: 30164
  source 1..40: mol_type = genomic DNA

SEQ ID NO: 30200 - DNA, 50 bp, Escherichia coli; identical to SEQ ID NO: 7690
  source 1..50: mol_type = genomic DNA

SEQ ID NO: 30201 - protein, 506 aa, Escherichia coli
MRHVITYLRYSSATQGAEGADSTRRQNELFKQWLRKNSDAQVVASFNDEGLSGYKGKHLSGQFGDMLSRIESGEFSKGTILLVEAIDRIGRLEHLETEALMNRIIAHGIEIHTLQDGLIYTRDALSDDLGISIIQRVKSYLAHQESKQKSFRVSEKWKQRAKLALAGEQRLTKMVPGWIDPETFKLNEHAETVRLIFKLLLDGESLHNIARHLQANNISSFSRRKDANGFSVHSVRTILRSETTIGTLPASQRNDRPAIPNYYEAAIDAATFNKAQEILGKNRIGRTPASDNPLTINIFKGLFRCQCGASVHPTGTKNKYQGVYRCNNHLDGRCDVPPLKRKPFDKWMIDNFLGMIDVGNDGEAEGKIASLQHEVEIVTTRIKKATALLLEMDDIDELKIQLKELNQKRTELQTTIDNMRRKASLTDKELPQLKDIDLTTKAGRVECQLILSKHLKGLTLGKDTVTVTLQNDTEITIPTDPLPLNDGTSIFEIADKELLDIDAYQL

SEQ ID NO: 30202 - DNA, 50 bp, Escherichia coli; identical to SEQ ID NO: 30087
  source 1..50: mol_type = genomic DNA

SEQ ID NO: 30203 - DNA, 40 bp, Escherichia coli; identical to SEQ ID NO: 20043
  source 1..40: mol_type = genomic DNA

SEQ ID NO: 30204 - DNA, 40 bp, Escherichia coli; identical to SEQ ID NO: 30164
  source 1..40: mol_type = genomic DNA

SEQ ID NO: 30205 - DNA, 50 bp, Escherichia coli; identical to SEQ ID NO: 7690
  source 1..50: mol_type = genomic DNA

SEQ ID NO: 30206 - protein, 506 aa, Escherichia coli; identical to SEQ ID NO: 30091

SEQ ID NO: 30207 - DNA, 50 bp, Escherichia coli; identical to SEQ ID NO: 30087
  source 1..50: mol_type = genomic DNA

SEQ ID NO: 30208 - DNA, 40 bp, Escherichia coli; identical to SEQ ID NO: 20043
  source 1..40: mol_type = genomic DNA

SEQ ID NO: 30209 - DNA, 40 bp, Escherichia coli; identical to SEQ ID NO: 30164
  source 1..40: mol_type = genomic DNA

SEQ ID NO: 30210 - DNA, 50 bp, Escherichia coli; identical to SEQ ID NO: 7690
  source 1..50: mol_type = genomic DNA

SEQ ID NO: 30211 - protein, 506 aa, Escherichia coli
MRHVITYLRYSSAIQGAEGADSTRRQNELFKQWLRKNSDAQVVASFSDEGLSGYKGKHLTGQFGDMLARIEAGEFPAGTILLVESIDRIGRLEHLETEALMNRILGNGIEIHTLQDGLIYTKDALADDLGISIIQRVKAYIAHQESKQKSFRVSQKWEQRAKLALAGEQRLTKMVPGWIDPDTFKCNEHAETVRLIFKLLLDGESLHNIARHLQANNISSFSRRKDANGFSVHSVRTILRSETTRGTLPASQRNDRPAIPNYYEAAIDAATFNKAQEILDKNRKGRTPASDNPLTINIFKGLFRCQCGASVHPTGTKNKYAGVYRCNNNPDGRCDVPPLKRKPFDKWMIDNFLGMIDVGNDGEAEGKIASLQHEVEIVTARIKKATALLLEMDDIDELKIQIKELNQRRTELQTTIDNMRRKASLTDKELPQLKDIDLTTKAGRVECQLILSKHLKGLTLGKDSVTVTLQNDTEIIVPTDPLPLNDGTSIFEIAEKELLEIDAYQL

SEQ ID NO: 30212 - DNA, 50 bp, Escherichia coli; identical to SEQ ID NO: 30087
  source 1..50: mol_type = genomic DNA

SEQ ID NO: 30213 - DNA, 40 bp, Escherichia coli; identical to SEQ ID NO: 20043
  source 1..40: mol_type = genomic DNA

SEQ ID NO: 30214 - DNA, 40 bp, Escherichia coli; identical to SEQ ID NO: 30164
  source 1..40: mol_type = genomic DNA

SEQ ID NO: 30215 - DNA, 50 bp, Escherichia coli; identical to SEQ ID NO: 7690
  source 1..50: mol_type = genomic DNA

SEQ ID NO: 30216 - protein, 506 aa, Escherichia coli
MRSVITYLRFSSAIQGAEGADSTRRQNDLFKQWLKKNSDAQVVASFSDEGLSGYKGKHLTGQFGDMLARIESGEFPEGTILLVESIDRIGRLEHLETEALMNRILGNGLEIHTLQDGLIYTKDALADDLGISIIQRVKAYIAHQESKQKSFRVSEKWKQRAKLALAGEQRLTKMVPGWIDPDTLKLNEHAETVRLIFKLLLSGESLHNIARHLQSNGIKSFSRRKDANGFSVHSVRTILRSETTIGTLPASQRNDRPAIPNYYEAAIDAATFNKAQEILDKNRKGRTPASDNPLTINIFKGLFRCQCGASVHPTGTKNKYAGVYRCNNHLDGRCDVPPLKRKPFDKWMLENFLGMIDVGNDGEAEGKIASLQYEVEIVTTRIKKATALLLEMDDIDELKIQLKELNQRRTELQTTIDNMRRKASLTDKELPQLKDIDLTTKAGRVECQLILSKHLKGLTLGKDSVIVTLQNDTEITIPTNPLPLNDGTSIFEIAEKELLEIDAYQL

SEQ ID NO: 30217 - DNA, 50 bp, Escherichia coli; identical to SEQ ID NO: 30087
  source 1..50: mol_type = genomic DNA

SEQ ID NO: 30218 - DNA, 40 bp, Escherichia coli; identical to SEQ ID NO: 20043
  source 1..40: mol_type = genomic DNA

SEQ ID NO: 30219 - DNA, 40 bp, Escherichia coli; identical to SEQ ID NO: 30164
  source 1..40: mol_type = genomic DNA

SEQ ID NO: 30220 - DNA, 50 bp, Escherichia coli; identical to SEQ ID NO: 7690
  source 1..50: mol_type = genomic DNA

SEQ ID NO: 30221 - protein, 506 aa, Escherichia coli
MRSVITYLRYSSAIQGAEGADSTRRQNDLFRQWLKKNIDAQVVASFSDEGLSGYKGKHLSGQFGDMLSRIESGEFPEGTILLVESIDRIGRLEHLETEALMNRILGNGLEIHTLQDGLIYTKDALADDLGISIIQRVKAYIAHQESKQKSFRVSQKWGQRAKLALAGEQRLTKMVPGWIDPETFKLNEHAETVRLIFKLLLDGESLHNIARHLQSNGIKSFSRRKDANGFSVHSVRTILRSETTIGTLPASQRNDRPAIPNYYEAAIDASTFNKAQEILDKNRTGRTPASDNPLTINIFKGLFRCQCGASVHPTGTKNKYAGVYRCNNHLDGRCDVPPLKRKPFDRWMIDNFLGMIDVGNDGEAEGKIASLQHEVEIVTARIKKATALLLEMDDIDELKIQLKELNQRRTELQTTIDSMRRKTSLSDKGLPQLKDIDLMTKAGRVECQLILSKHLKGLTLGKDSVTVTLQNDTEITIPTNPLPLNDGSPIFEIADKELLDVDIYRL

SEQ ID NO: 30222 - DNA, 50 bp, Escherichia coli; identical to SEQ ID NO: 30087
  source 1..50: mol_type = genomic DNA

SEQ ID NO: 30223 - DNA, 40 bp, Escherichia coli; identical to SEQ ID NO: 20043
  source 1..40: mol_type = genomic DNA

SEQ ID NO: 30224 - DNA, 40 bp, Escherichia coli; identical to SEQ ID NO: 30164
  source 1..40: mol_type = genomic DNA

SEQ ID NO: 30225 - DNA, 50 bp, Escherichia coli; identical to SEQ ID NO: 7690
  source 1..50: mol_type = genomic DNA

SEQ ID NO: 30226 - protein, 506 aa, Escherichia coli
MRSVITYLRYSSAIQGAEGADSTRRQNDLFKQWLKKNSDAQVVASFSDEGLSGYKGKHLTGQFGDMLARIESGEFPECTILLVESIDRIGRLEHLETEALMNRILGNGLEIHTLQDGLIYTKDALADDLGISIIQRVKAYIAHQESKQKSFRVSQKWEQRAKLALAGEQRLTKMVPGWIDPDTFKLNEHAETVRLIFKLLLSGESLHNIARHLQSNGIKSFSRRKDANGFSVHSVRTILRSETTIGTLPASQRNDRPAIPNYYEAAIDAATFNKAQEILDKNRKGRTPASDNPLTINIFKGLFRCQCGASVHPTGTKNKYAGVYRCNNHLDGRCDVPPLKRKPFDRWMIDNFLGMIDVGNDGESERKIAALQHEVEIVTARIKKATALLLEMDDITELKAQVKGLNQKRTEIQTTIDTLKRKTSLTDKELPQLKDIDLMTKAGRVECQLILSKHLKGLTLGKDSVTVTLQNDTEIIVPTDPLPLNDGTSIFEIAEKELLEIDAYQL

SEQ ID NO: 30227 - DNA, 50 bp, Escherichia coli; identical to SEQ ID NO: 30087
  source 1..50: mol_type = genomic DNA

SEQ ID NO: 30228 - DNA, 40 bp, Escherichia coli; identical to SEQ ID NO: 20043
  source 1..40: mol_type = genomic DNA

SEQ ID NO: 30229 - DNA, 40 bp, Escherichia coli; identical to SEQ ID NO: 30164
  source 1..40: mol_type = genomic DNA

SEQ ID NO: 30230 - DNA, 50 bp, Escherichia coli; identical to SEQ ID NO: 7690
  source 1..50: mol_type = genomic DNA

SEQ ID NO: 30231 - protein, 506 aa, Escherichia coli
MRHVITYLRYSSATQGAEGADSTRRQNELFKQWLRKNSDAQVVASFNDEGLSGYKGKHLSGQFGDMLSRIESGEFSKGTILLVEAIDRIGRLEHLETEALMNRIIAHGIEIHTLQDGLIYTRDALSDDLGISIIQRVKSYLAHQESKQKSFRVSEKWKQRAKLALAGEQRLTKMVPGWIDPETFKLNEHAETVRLIFKLLLDGESLHNIARHLQANNISSFSRRKDANGFSVHSVRTILRSETTIGTLPASQRNDRPAIPNYYEAAIDAATFNKAQEILGKNRIGRTPASDNPLTINIFKGLFRCQCGASVHPTGTKNKYQGVYRCNNHLDGRCDVPPLKRKPFDKWMIDNFLGMIDVGNDGEAEGKIASLQHEVEIVTTRIKKATALLLEMDDIDELKIQLKELNQKRTELQTTIDNMRRKASLTDKELPQLKDIDLTTKAGRVECQLILSKHLKGLTLGKDTVTVTLQNDTEITIPTDPLPLNDGTSIFEIAEKNLLNIDTFQL

SEQ ID NO: 30232 - DNA, 50 bp, Escherichia coli; identical to SEQ ID NO: 30087
  source 1..50: mol_type = genomic DNA

SEQ ID NO: 30233 - DNA, 40 bp, Escherichia coli; identical to SEQ ID NO: 20043
  source 1..40: mol_type = genomic DNA

SEQ ID NO: 30234 - DNA, 40 bp, Escherichia coli; identical to SEQ ID NO: 30164
  source 1..40: mol_type = genomic DNA

SEQ ID NO: 30235 - DNA, 50 bp, Escherichia coli; identical to SEQ ID NO: 7690
  source 1..50: mol_type = genomic DNA

SEQ ID NO: 30236 - protein, 506 aa, Escherichia coli
MRSVITYLRYSSAIQGAEGADSTRRQNDLFKQWLKKNSDAQVVASFSDEGLSGYKGKHLTGQFGDMLARIESGEFSKGTILLVESIDRIGRLEHLETEALMNRILGNGLEIHTLQDGLIYTKDALVDDLGISIIQRVKAYIAHQESKQKSFRVSEKWKQRAKLALAGEQRLTKMVPGWIDPDTLKLNEHAETVRLIFKLLLSGESLHNIARHLQSNGIKSFSRRKDANGFSVHSVRTILRSETTIGTLPASQRNDRPAIPNYYEAAIDAATFNKAQEILDKNRKGRTPASDNPLTINIFKGLFRCQCGASVHPTGTKNKYAGVYRCNNNPDGRCDVPPLKRKPFDRWMLENFLGMIDVGNDGEAEGKIASLQHEVEIVTARIKKATALLLEMDDITELKAQVKGLNQKRTEIQTTIDTLKRKTSLTDKELPQLKDIDLTTKAGRVECQLILSKHLKGLTLGKDSVTVTLQNDTEITIPTNPLPLNDGTSIFEIAEKELLEIDAYQL

SEQ ID NO: 30237 - DNA, 50 bp, Escherichia coli; identical to SEQ ID NO: 30087
  source 1..50: mol_type = genomic DNA

SEQ ID NO: 30238 - DNA, 40 bp, Escherichia coli; identical to SEQ ID NO: 20043
  source 1..40: mol_type = genomic DNA

SEQ ID NO: 30239 - DNA, 40 bp, Escherichia coli; identical to SEQ ID NO: 30164
  source 1..40: mol_type = genomic DNA

SEQ ID NO: 30240 - DNA, 50 bp, Escherichia coli; identical to SEQ ID NO: 7690
  source 1..50: mol_type = genomic DNA

SEQ ID NO: 30241 - protein, 506 aa, Escherichia coli
MRTVITYLRFSSATQGAEGADSTRRQNELFKQWLRKNSDAQVVASFSDEGLSGYKGKHLTGQFGDMLARIESGEFSEGTVLLVEAIDRIGRLEHLETEALMNRIIAHGIEIHTLQDGLIYTRDALSDDLGISIIQRVKSYVAHQESKQKSFRVSQKWKQRAKLALAGEQRLTRNVPGWIDPDTFKCNEHAETVRLIFKLLLDGESLHNIARHLQSNDIKSFSRRKDANGFSVHSVRTVLRSESVIGTLPASQRNDRPAIPNYYEAAIDAATFNKAQEIFDKNRKGRTPASDNPLTINIFKGLFRCQCGASVHPTGTKNKYAGVYRCNNHLDGRCDVPPLKRKPFDRWMIDNFLGMIDVGNDGESERKIAALQHEVEIVTARIKKVTALLLEMDDITELKAQVKGLNQKRTEIQTTIDTLKRKTSLTDKELPQLKDIDLTTKAGRVECQLILSKHLKGLTLGKDSVTVTLQNDTEITIPTNPLPLNDGSPIFEIADKELLDIDAYQL

SEQ ID NO: 30242 - DNA, 50 bp, Escherichia coli; identical to SEQ ID NO: 30087
  source 1..50: mol_type = genomic DNA

SEQ ID NO: 30243 - DNA, 40 bp, Escherichia coli; identical to SEQ ID NO: 20043
  source 1..40: mol_type = genomic DNA

SEQ ID NO: 30244 - DNA, 40 bp, Escherichia coli; identical to SEQ ID NO: 30164
  source 1..40: mol_type = genomic DNA

SEQ ID NO: 30245 - DNA, 50 bp, Escherichia coli; identical to SEQ ID NO: 7690
  source 1..50: mol_type = genomic DNA

SEQ ID NO: 30246 - protein, 506 aa, Escherichia coli
MRSVITYLRYSSAIQGAEGADSTRRQNDLFKQWLKKNSDAQVVASFSDEGLSGYKGKHLTGQFGDMLARIESGEFSKGTILLVESIDRIGRLEHLETEALMNRILGNGLEIHTLQDGLIYTKDALADDLGISIIQRVKAYIAHQESKQKSFRVSEKWKQRAKLALAGEQRLTKMVPGWIDPDTLKLNEHAETVRLIFKLLLSGESLHNIARHLQSNGIKSFSRRKDANGFSVHSVRTILRSETTIGTLPASQRNDRPAIPNYYEAAIDAATFNKAQEILDKNRKGRTPASDNPLTINIFKGLFRCQCGASVHPTGTKNKYAGVYRCNNNPDGRCDVPPLKRKPFDRWMIDNFLGMIDVGNDGEAEGKIASLQHEVEIVTARIKKATALLLEMDDITELKTQVKGLNQKRTELQTTIDNMRRKASLTDKELPQLKDIDLTTKAGRVECQLILSKHLKGLTLGKDSVIVTLQNDTEITIPTNPLPLNDGTSIFEIAEKELLEIDAYQL

SEQ ID NO: 30247 - DNA, 50 bp, Escherichia coli; identical to SEQ ID NO: 30087
  source 1..50: mol_type = genomic DNA

SEQ ID NO: 30248 - DNA, 40 bp, Escherichia coli; identical to SEQ ID NO: 20043
  source 1..40: mol_type = genomic DNA

SEQ ID NO: 30249 - DNA, 40 bp, Escherichia coli; identical to SEQ ID NO: 30164
  source 1..40: mol_type = genomic DNA

SEQ ID NO: 30250 - DNA, 50 bp, Escherichia coli; identical to SEQ ID NO: 7690
  source 1..50: mol_type = genomic DNA

SEQ ID NO: 30251 - protein, 506 aa, Escherichia coli
MRTVITYLRFSSATQGAEGADSTRRQNDLFKQWLKKNSDAQVVASFSDEGLSGYKGKHLTGQFGDMLARIEAGEFPGGTILLVESIDRIGRLEHLETEALMNRIIAHGIEIHTLQDGLIYTRDALSDDLGISIIQRVKSYLAHQESKQKSFRVSEKWKQRAKLALAGKQRLTKMVPGWIDPDTLKLNEHAETVRLIFKLLLSGESLHNIARHLQSNGIKSFSRRKDANGFSVHSVRTILRSETTIGTLPASQRNDRPAIPNYYEAAIDAATFNKAQEILDKNRKGRTPASDNPLTINIFKGLFRCQCGASVHPTGTKNKYAGVYRCNNHLDGRCDVPPLKRKPFDKWMIDNFLGMIDVGNDGEAEGKIASLQHEVEIVTARIKKATALLLEMDDIDELKIQIKELNQRRTELQTTIDSMRRKASLTDKELPQLKDIDLTTKAGRVECQLILSKHLKGLTLGKDSVTVTLQNDTEITIPTNPLPLNDGTSIFEIADKELLDIDAYQL

SEQ ID NO: 30252 - DNA, 50 bp, Escherichia coli; identical to SEQ ID NO: 30087
  source 1..50: mol_type = genomic DNA

SEQ ID NO: 30253 - DNA, 40 bp, Escherichia coli; identical to SEQ ID NO: 20043
  source 1..40: mol_type = genomic DNA

SEQ ID NO: 30254 - DNA, 40 bp, Escherichia coli; identical to SEQ ID NO: 30164
  source 1..40: mol_type = genomic DNA

SEQ ID NO: 30255 - DNA, 50 bp, Escherichia coli; identical to SEQ ID NO: 7690
  source 1..50: mol_type = genomic DNA

SEQ ID NO: 30256 - protein, 506 aa, Escherichia coli
MRTVITYLRFSSATQGAEGADSTRRQNELFKQWLRKNSDAQVVASFNDEGLSGYKGKHLSGQFGDMLSRIESGEFPEGTILLVEAIDRIGRLEHLETEALMNRIIAHGIEIHTLQDGLIYTRDALSDDLGISIIQRVKSYLAHQESKQKSFRVSQKWEQRAKLALAGEQRLTKMVPGWIDPETFKLNEHAETVRLIFKLLLDGESLHNIARHLQANNISSFSRRKDANGFSVHSVRTILRSETTIGTLPASQRNDRPAIPNYYEAAIDAATFNKAQEILDKNRKGRTPASDNPLTINIFKGLFRCQCGASVHPTGTKNKYAGVYRCNSHLDGRCDVPPLKRKPFDKWMIDNFLGMIDVGNDGEAEGKIASLQHEVEIVTTRIKKATALLLEMDDITELKTQVKELNQKRTELQATIDSMRRKTSLSDKGLPQLKDIDLMTKEGRVECQLILSKHLKGLTLGKDSVTVTLQNDTEITIPTNPLPLNDGTSIFEIADKELLDIDAFRL

SEQ ID NO: 30257 - DNA, 50 bp, Escherichia coli; identical to SEQ ID NO: 30087
  source 1..50: mol_type = genomic DNA

SEQ ID NO: 30258 - DNA, 40 bp, Escherichia coli; identical to SEQ ID NO: 20043
  source 1..40: mol_type = genomic DNA

SEQ ID NO: 30259 - DNA, 40 bp, Escherichia coli; identical to SEQ ID NO: 30164
  source 1..40: mol_type = genomic DNA

SEQ ID NO: 30260 - DNA, 50 bp, Escherichia coli; identical to SEQ ID NO: 7690
  source 1..50: mol_type = genomic DNA

SEQ ID NO: 30261 - protein, 506 aa, Escherichia coli
MRHVITYLRYSSATQGAEGADSTRRQNELFKQWLRKNSDAQVVASFSDEGLSGYKGKHLTGQFGDMLARIEAGEFPAGTILLVESIDRIGRLEHLETEALMNRIIAHGIEIHTLQDGLIYTRDALSDDLGISIIQRVKSYIAHQESKQKSFRVSEKWKQRAKLALAGEQRLTKMVPGWIDPDTFKLNEHAETVRLIFKLLLSGESLHNIARHLQSNGIKSFSRRKDANGFSVHSVRTILRSETTIGTLPASQRNDRPAIPNYYEAAIDASTFNKAQEILGKNRIGRTPASDNPLTINIFKGLFRCQCGASVHPTGTKNKYQGVYRCNNHLDGRCDVPPLKRKPFDRWMIDNFLGMIDVGNDGEAEGKIASLQHEVEIVTTRIKKATALLLEMDDIDELKIQLKELNRKRTELQTTIDNMRRKTSLTDKELPQLKDIDLTTKAGRVECQLILSKHLKGLTLGKDSVIVTLQNDTEITIPTNPLPLHDGTSIFEIAEKELLEIDAYQL

SEQ ID NO: 30262 - DNA, 50 bp, Escherichia coli; identical to SEQ ID NO: 30087
  source 1..50: mol_type = genomic DNA

SEQ ID NO: 30263 - DNA, 40 bp, Escherichia coli; identical to SEQ ID NO: 20043
  source 1..40: mol_type = genomic DNA

SEQ ID NO: 30264 - DNA, 40 bp, Escherichia coli; identical to SEQ ID NO: 30164
  source 1..40: mol_type = genomic DNA

SEQ ID NO: 30265 - DNA, 50 bp, Escherichia coli; identical to SEQ ID NO: 7690
  source 1..50: mol_type = genomic DNA

SEQ ID NO: 30266 - protein, 506 aa, Escherichia coli
MRTVITYLRFSSATQGAEGADSTRRQNELFKQWLRKNSDAQVVASFSDEGLSGYKGKHLTGQFGDMLARIEAGEFPASTILLVESIDRIGRLEHLETEALMNRILGNGIEIHTLQDGLIYTKDALADDLGISIIQRVKAYIAHQESKQKSFRVSQKWEQRAKLALAGEQRLTKMVPGWIDPDTFKCNEHAETVRLIFKLLLSGESLHNIARHLQANNISSFSRRKDANGFSVHSVRTVLRSESVIGTLPASQRNDRPAIPNYYEAAIDAATFNKAQEILDKNRKGRTPASDNPLTINIFKGLFRCQCGASVHPTGTKNKYAGVYRCNNHLDGRCDVPPLKRKPFDKWMIDNFLGMIDVGNDGEAEGKIASLQHEVEIVTTRIKKATALLLEMDDITELKTQVKELNQKRTELQTTIDNMRRKASLTDKELPQLKDIDLTTKAGRVECQLILSKHLKGLTLGKDSVTVTLQNDTEIIVPTDPLPLNDGSPIFEIADKELLDIDAFRL

SEQ ID NO: 30267 - DNA, 50 bp, Escherichia coli; identical to SEQ ID NO: 30087
  source 1..50: mol_type = genomic DNA

SEQ ID NO: 30268 - DNA, 40 bp, Escherichia coli; identical to SEQ ID NO: 20043
  source 1..40: mol_type = genomic DNA

SEQ ID NO: 30269 - DNA, 40 bp, Escherichia coli; identical to SEQ ID NO: 30164
  source 1..40: mol_type = genomic DNA

SEQ ID NO: 30270 - DNA, 50 bp, Escherichia coli; identical to SEQ ID NO: 7690
  source 1..50: mol_type = genomic DNA

SEQ ID NO: 30271 - protein, 506 aa, Escherichia coli
MRTVITYLRFSSATQGAEGADSTRRQNELFKQWLRKNSDAQVVASFSDEGLSGYKGKHLTGQFGDMLARIESGEFSEGTVLLVEAIDRIGRLEHLETEALMNRIIAHGIEIHTLQDGLIYTRDALSDDLGISIIQRVKSYVAHQESKQKSFRVSQKWKQRAKLALAGEQRLTKMVPGWIDPDTLKLNEHAETVRLIFKLLLDGESLHNIARHLQANNISSFSRRKDANGFSVHSVRTILRSETTIGTLPASQRNDRPAIPNYYEAAIDVSTFNKAQEILDKNRKGRTPASDNPLTINIFKGLFRCQCGASVHPTGTKNKYQGVYRCNNHLDGRCDVQPLKRKPFDRWMIDNFLGMIDVGNDGESERKIAALQHEVEIVTARIKKATALLLEMDDIDELKIQLKELNQKRTELQTTIDNMRRKASLTDKELPQLKDIDLTTKAGRVECQLILSKHLKGLTLGKDSVTVTLQNDTEITIPTNPLPLNDGTSIFEIADKELLDIDAYQL

SEQ ID NO: 30272 - DNA, 50 bp, Escherichia coli; identical to SEQ ID NO: 30087
  source 1..50: mol_type = genomic DNA

SEQ ID NO: 30273 - DNA, 40 bp, Escherichia coli; identical to SEQ ID NO: 20043
  source 1..40: mol_type = genomic DNA

SEQ ID NO: 30274 - DNA, 40 bp, Escherichia coli; identical to SEQ ID NO: 30164
  source 1..40: mol_type = genomic DNA

SEQ ID NO: 30275 - DNA, 50 bp, Escherichia coli; identical to SEQ ID NO: 7690
  source 1..50: mol_type = genomic DNA

SEQ ID NO: 30276 - protein, 506 aa, Escherichia coli
MRSVITYLRYSSAIQGAEGADSTRRQNDLFRQWLKKNIDAQVVASFSDEGLSGYKGKHLSGQFGDMLSRIESGEFPEGTILLVESIDRIGRLEHLETEALMNRIIAHGIEIHTLQDGLIYTRDALSDDLGISIIQRVKSYVAHQESKQKSFRVSQKWKQRAKLALAGEQRLTRNVPGWIDPDTFKCNEHAETVRLIFKLLLDGESLHNIARHLQSNDIKSFSRRKDANGFSVHSVRTVLRSESVIGTLPASQRNDRPAIPNYYEAAIDAATFNKAQEILDKNRKGRTPASDNPLTINIFKGLFRCQCGASVHPTGTKNKYAGVYRCNNHLDGRCDVPPLKRKPFDRWMIDNFLGMIDVGNDGESERKIAALQHEVEIVTARIKKATALLLEMDDITELKAQVKGLNQKRTEIQTTIDTLKRKTSLTDKELPQLKDIDLTTKAGRVECQLILSKHLKGLTLGKDSVTVTLQNDTEITIPTNPLPLNDGSPIFEIADKELLDIDAYQL

SEQ ID NO: 30277 - DNA, 50 bp, Escherichia coli; identical to SEQ ID NO: 30087
  source 1..50: mol_type = genomic DNA

SEQ ID NO: 30278 - DNA, 40 bp, Escherichia coli; identical to SEQ ID NO: 20043
  source 1..40: mol_type = genomic DNA

SEQ ID NO: 30279 - DNA, 40 bp, Escherichia coli; identical to SEQ ID NO: 30164
  source 1..40: mol_type = genomic DNA

SEQ ID NO: 30280 - DNA, 50 bp, Escherichia coli; identical to SEQ ID NO: 7690
  source 1..50: mol_type = genomic DNA

SEQ ID NO: 30281 - protein, 506 aa, Escherichia coli
MRSVITYLRYSSAIQGAEGADSTRRQNDLFKQWLKKNSDAQVVASFSDEGLSGYKGKHLTGQFGDMLARIESGEFPEGTLLLVESIDRIGRLEHLETEALMNRILGNGLEIHTLQDGLIYTKDALADDLGISIIQRVKAYIAHQESKQKSFRVSQKWEQRAKLALAGEQRLTKMVPGWIDPDTFKLNEHAETVRLIFKLLLDGESLHNIARHLQSNDIKSFSRRKDANGFSVHSVRTVLRSESVIGTLPASQRNDRPAIPNYYEAAIDAATFNKAQEILDKNRKGRTPASDNPLTINIFKGLFRCQCGASVHPTGTKNKYQGVYRCNNHLDGRCDVPPLKRKPFDRWMIDNFLGMIDVGNDGESERKIAALQHEVEIVTSRIKKATALLLEMDDITELKAQVKELNQKRTELQTTINTMKRKTSLSDKGLPQLKDIDLMTKAGRVECQLILSKHLKGLTLGKDSVTVTLQNDTEITIPTNPLPLNDGSPIFEIADKELLDVDAYQL

SEQ ID NO: 30282 - DNA, 50 bp, Escherichia coli; identical to SEQ ID NO: 30087
  source 1..50: mol_type = genomic DNA

SEQ ID NO: 30283 - DNA, 40 bp, Escherichia coli; identical to SEQ ID NO: 20043
  source 1..40: mol_type = genomic DNA

SEQ ID NO: 30284 - DNA, 40 bp, Escherichia coli; identical to SEQ ID NO: 30164
  source 1..40: mol_type = genomic DNA

SEQ ID NO: 30285 - DNA, 50 bp, Escherichia coli; identical to SEQ ID NO: 7690
  source 1..50: mol_type = genomic DNA

SEQ ID NO: 30286 - protein, 506 aa, Escherichia coli
MRHVITYLRYSSAIQGAEGADSTRRQNDLFKQWLKKNSDAQVVASFNDEGLSGYKGKHLSGQFGDMLSRIESGEFSEGTILLVEAIDRIGRLEHLETEALMNRILGNGIEIHTLQDGLIYTKDALADDLGISIIQRVKAYIAHQESKQKSFRVSQKWGQRAKLALAGKQRLTKMVPGWIDPETFEVNEHAETVRLIFKLLLDGESLHNIARHLQANNISSFSRRKDANGFSVHSVRTILRSETTIGTLPASQRNDRPAIPNYYEAAIDAATFNKAQEILDKNRKGRTPASDNPLTINIFKGLFRCQCGASVHPTGTKNKYQGVYRCNNHLDGRCDVPPLKRKPFDRWMIDNFLGMIDVGNDGESERKIAALQHEVEIVTSRIKKATALLLEMDDITELKAQVKELNQKRTELQTTINTMKRKTSLSDKGLPQLKDIDLMTKAGRVECQLILSKHLKGLTLGKDSVTVTLQNDTEITIPTNPLPLNDGSPIFEIADKELLDVDAYQL

SEQ ID NO: 30287 - DNA, 50 bp, Escherichia coli; identical to SEQ ID NO: 30087
  source 1..50: mol_type = genomic DNA

SEQ ID NO: 30288 - DNA, 40 bp, Escherichia coli; identical to SEQ ID NO: 20043
  source 1..40: mol_type = genomic DNA

SEQ ID NO: 30289 - DNA, 40 bp, Escherichia coli; identical to SEQ ID NO: 30164
  source 1..40: mol_type = genomic DNA

SEQ ID NO: 30290 - DNA, 50 bp, Escherichia coli; identical to SEQ ID NO: 7690
  source 1..50: mol_type = genomic DNA

SEQ ID NO: 30291 - protein, 506 aa, Escherichia coli
MRSVITYLRYSSAIQGTEGADSTRRQNDLFRQWLKKNSDAQIVASFSDEGLSGYKGKHLTGQFGDMLARIESGEFPEGTILLVESIDRIGRLEHLETEALMNRILGNGLEIHTLQDGLIYTKDALADDLGISIIQRVKAYIAHQESKQKSFRVSQKWEQRAKLALAGEQRLTRNVPGWIDPDTFKLNEHAETVRLIFKLLLDGESLHNIARHLQSNGIKSFSRRKDANGFSVHSVRTILRSETTIGTLPASQRNDRPAIPNYYEAAIDASTFNKAQEILGKNRTGRTPASDNPLTINIFKGLFRCQCGASVHPTGTKNKYAGVYRCNNHLDGRCDVPPLKRKPFDKWMLENFLGMIDVGNDGESERKIAALQHEVEIVTSRIKKATALLLEMDDITELKAQVKELNQKRTELQTTINTMKRKTSLSDKGLPQLKDIDLMTKAGRVECQLILSKHLKGLTLGKDSVTVTLQNDTEIIVPTDPLPLNDGTSIFEIAEKELLEIDAYQL

SEQ ID NO: 30292 - DNA, 50 bp, Escherichia coli; identical to SEQ ID NO: 30087
  source 1..50: mol_type = genomic DNA

SEQ ID NO: 30293 - DNA, 40 bp, Escherichia coli; identical to SEQ ID NO: 20043
  source 1..40: mol_type = genomic DNA

SEQ ID NO: 30294 - DNA, 40 bp, Escherichia coli; identical to SEQ ID NO: 30164
  source 1..40: mol_type = genomic DNA

SEQ ID NO: 30295 - DNA, 50 bp, Escherichia coli; identical to SEQ ID NO: 7690
  source 1..50: mol_type = genomic DNA

SEQ ID NO: 30296 - protein, 506 aa, Escherichia coli
MRTVITYLRFSSATQGAEGADSTRRQNELFKQWLRKNSDAQVVASFSDEGLSGYKGKHLTGQFGDMLARIEAGEFPAGTVLLVEAIDRIGRLEHLETEALMNRIIAHGIEIHTLQDGLIYTRDALSDDLGISIIQRVKSYLAHQESKQKSFRVSQKWKQRAKLALAGEQRLTRNVPGWIDPDTFKCNEHAETVRLIFKLLLDGESLHNIARHLQANNISSFSRRKDANGFSVHSVRTVLRSESVIGTLPASQRNDRPAIPNYYEAAIDASTFNKAQEILGKNRIGRTPASDNPLTINIFKGLFRCQCGASVHPTGTKNKYQGVYRCNNHLDGRCDVPPLKRKPFDKWMIDNFLGMIDVGNDGEAEGKIAALQHEVEIVTTRIKKATALLLEMDDITELKTQVKELNQKRTELQTTIDNMRRKASLTDKELPQLKDIDLMTKAGRVECQLILSKHLKGLTLGKDSVTVTLQNDTEITIPTDPLPLNDGTSIFEIAEKNLLNIDTFQL

SEQ ID NO: 30297 - DNA, 50 bp, Escherichia coli; identical to SEQ ID NO: 30087
  source 1..50: mol_type = genomic DNA

SEQ ID NO: 30298 - DNA, 40 bp, Escherichia coli; identical to SEQ ID NO: 20043
  source 1..40: mol_type = genomic DNA

SEQ ID NO: 30299 - DNA, 40 bp, Escherichia coli; identical to SEQ ID NO: 30164
  source 1..40: mol_type = genomic DNA

SEQ ID NO: 30300 - DNA, 50 bp, Escherichia coli; identical to SEQ ID NO: 7690
  source 1..50: mol_type = genomic DNA

SEQ ID NO: 30301 - protein, 506 aa, Escherichia coli
MRHVITYLRYSSAIQGAEGADSTRRQNDLFKQWLKKNSDAQVVASFNDEGLSGYKGKHLSGQFGDMLSRIESGEFSAGTILLVESIDRIGRLEHLETEALMNRILGNGIEIHTLQDGLIYTKDALADDLGISIIQRVKAYIAHQESKQKSFRVSQKWEQRAKLALAGEQRLTKMVPGWIDPDTFKLNEHAETVRLIFKLLLDGESLHNIARHLQSNGIKSFSRRKDANGFSVHSVRTILRSVTTRGTLPASQRNDRPAIPNYYEAAIDAATFNKAQEILDKNRKGRTPASDNPLTINIFKGLFRCQCGASVHPTGTKNKYAGVYRCNNHLDGRCDVQPLKRKPFDRWMIDNFLGMIDVGNDGESERKIAALQHEVEIVTARIKKATALLLEMDDIDELKIQLKELNQKRTELQTTIDNMRRKASLTDKELPQLKDIDLTTKAGRVECQLILSKHLKGLTLGKDTVIVTLQNDTEITIPTDPLPLNDGTSIFEIAEKNLLNIDTFQL

SEQ ID NO: 30302 - DNA, 50 bp, Escherichia coli; identical to SEQ ID NO: 30087
  source 1..50: mol_type = genomic DNA

SEQ ID NO: 30303 - DNA, 40 bp, Escherichia coli; identical to SEQ ID NO: 20043
  source 1..40: mol_type = genomic DNA

SEQ ID NO: 30304 - DNA, 40 bp, Escherichia coli; identical to SEQ ID NO: 30164
  source 1..40: mol_type = genomic DNA

SEQ ID NO: 30305 - DNA, 50 bp, Escherichia coli; identical to SEQ ID NO: 7690
  source 1..50: mol_type = genomic DNA

SEQ ID NO: 30306 - protein, 506 aa, Salmonella enterica
MRTVITYLRFSSATQGAEGADSTRRQNELFKQWLRKNSDAQVVASFSDEGLSGYKGKHLTGQFGDMLARIESGEFSEGTVLLVEAIDRIGRLEHLETEALMNRIIAHGIEIHTLQDGLIYTRDALSDDLGISIIQRVKSYVAHQESKQKSFRVSQKWKQRAKLALAGEQRLTRNVPGWIDPDTFKCNEHAETVRLIFKLLLDGESLHNIARHLQSNDIKSFSRRKDANGFSVHSVRTVLRSESVIGTLPASQRNDRPAIPNYYEAAIDAATFNKAQEILDKNRKGRTPVSDNPLTINIFKGLFRCQCGASVHPTGTKNKYQGVYRCNNHLDGRCDVPPLKRKPFDRWMIDNFLGMIDVGNDGESERKIAALQHEVEIVTARIKKATALLLEMDDITELKTQVKGLNQKRTELQTTIDNMKRKASLTDKELPQLKDIDLTTKAGRVECQLILSKHLKGLTLGKDSVTVTLQNDTEITIPTNPLPLNDGSPIFEIADKELLDIDAYQL

SEQ ID NO: 30307 - DNA, 50 bp, Salmonella enterica; identical to SEQ ID NO: 30087
  source 1..50: mol_type = genomic DNA

SEQ ID NO: 30308 - DNA, 40 bp, Salmonella enterica; identical to SEQ ID NO: 5263
  source 1..40: mol_type = genomic DNA

SEQ ID NO: 30309 - DNA, 40 bp, Salmonella enterica; identical to SEQ ID NO: 30094
  source 1..40: mol_type = genomic DNA

SEQ ID NO: 30310 - DNA, 50 bp, Salmonella enterica; identical to SEQ ID NO: 7690
  source 1..50: mol_type = genomic DNA

SEQ ID NO: 30311 - protein, 506 aa, Salmonella enterica; identical to SEQ ID NO: 30231

SEQ ID NO: 30312 - DNA, 50 bp, Salmonella enterica; identical to SEQ ID NO: 30087
  source 1..50: mol_type = genomic DNA

SEQ ID NO: 30313 - DNA, 40 bp, Salmonella enterica; identical to SEQ ID NO: 5263
  source 1..40: mol_type = genomic DNA

SEQ ID NO: 30314 - DNA, 40 bp, Salmonella enterica; identical to SEQ ID NO: 30094
  source 1..40: mol_type = genomic DNA

SEQ ID NO: 30315 - DNA, 50 bp, Salmonella enterica; identical to SEQ ID NO: 7690
  source 1..50: mol_type = genomic DNA

SEQ ID NO: 30316 - protein, 506 aa, Escherichia coli
MRHVITYLRYSSATQGAEGADSTRRQNELFKQWLRKNSDAQVVASFNDEGLSGYKGKHLSGQFGDMLSRIESGEFSKGTILLVEAIDRIGRLEHLETEALMNRIIAHGIEIHTLQDGLIYTRDALSDDLGISIIQRVKSYLAHQESKQKSFRVSEKWKQRAKLALAGEQRLTKMVPGWIDPETFKLNEHAETVRLIFKLLLDGESLHNIARHLQANNISSFSRRKDANGFSVHSVRTILRSETTIGTLPASQRNDRPAIPNYYEAAIDAATFNKAQEILDKNRKGRTPASDNPLTINIFKGLFRCQCGASVHPTGTKNKYAGVYRCNNHLDGRCDVQPLKRKPFDRWMIDNFLGMIDVGNDGESERKIAALQHEVEIVTARIKKATALLLEMDDIDELKIQLKELNQKRTELQTTIDNMRRKASLTDKELPQLKDIDLTTKAGRVECQLILSKHLKGLTLGKDSVTVTLQNDTEIIVPTDPLPLNDGSPIFEIAEKNLLNIDTFQL

SEQ ID NO: 30317 - DNA, 50 bp, Escherichia coli; identical to SEQ ID NO: 30087
  source 1..50: mol_type = genomic DNA

SEQ ID NO: 30318 - DNA, 40 bp, Escherichia coli; identical to SEQ ID NO: 20043
  source 1..40: mol_type = genomic DNA

SEQ ID NO: 30319 - DNA, 40 bp, Escherichia coli; identical to SEQ ID NO: 30164
  source 1..40: mol_type = genomic DNA

SEQ ID NO: 30320 - DNA, 50 bp, Escherichia coli; identical to SEQ ID NO: 7690
  source 1..50: mol_type = genomic DNA

SEQ ID NO: 30321 - protein, 506 aa, Escherichia coli
MRTVITYLRFSSATQGAEGADSTRRQNDLFKQWLKKNSDAQVVASFSDEGLSGYKGKHLTGQFGDMLARIEAGEFPGGTILLVESIDRIGRLEHLETEALMNRIIAHGIEIHTLQDGLIYTRDALSDDLGISIIQRVKSYLAHQESKQKSFRVSEKWKQRAKLALAGEQRLTKMVPGWIDPDTFKCNEHAETVRLIFKLLLSGESLHNIARHLQANNISSFSRRKDANGFSIHSVRTVLRSESVIGTLPASQRNDRPAIPNYYEAAIDAATFNKAQEILDKNRKGRTPASDNPLTINIFKGLFRCQCGASVHPTGTKNKYQGVYRCNNHLDGRCDVPPLKRKPFDKWMIDNFLGMIDVGNDGEAEGKIASLQHEVEIVTTRIKKATALLLEMDDITELKAQVKELNQKRTELQTTIDSMRRKTSLTDKELPQLKDIDLTTKAGRVECQLILSKHLKGLTLGKDSVIVTLQNDTEITIPTNPLPLHDGTSIFEIAEKELLEIDAYQL

SEQ ID NO: 30322 - DNA, 50 bp, Escherichia coli; identical to SEQ ID NO: 30087
  source 1..50: mol_type = genomic DNA

SEQ ID NO: 30323 - DNA, 40 bp, Escherichia coli; identical to SEQ ID NO: 20043
  source 1..40: mol_type = genomic DNA

SEQ ID NO: 30324 - DNA, 40 bp, Escherichia coli; identical to SEQ ID NO: 30164
  source 1..40: mol_type = genomic DNA

SEQ ID NO: 30325 - DNA, 50 bp, Escherichia coli; identical to SEQ ID NO: 7690
  source 1..50: mol_type = genomic DNA

SEQ ID NO: 30326 - protein, 506 aa, Escherichia coli
MRTVITYLRFSSATQGAEGADSTRRQNDLFKQWLKKNSDAQVVASFSDEGLSGYKGKHLTGQFGDMLARIEAGEFPGGTILLVESIDRIGRLEHLETEALMNRIIAHGIEIHTLQDGLIYTRDALSDDLGISIIQRVKSYLAHQESKQKSFRVSEKWKQRAKLALAGKQRLTKMVPGWIDPDTLKLNEHAETVRLIFKLLLSGESLHNIARHLQSNGIKSFSRRKDANGFSVHSVRTILRSETTIGTLPASQRNDRPAIPNYYEAAIYAATFNKAQEILDKNRKGRTPASDNPLTINIFKGLFRCQCGASVHPTGTKNKYAGVYRCNNHLDGRCDVPPLKRKPFDKWMIDNFLGMIDVGNDGEAEGKIASLQHEVEIVTARIKKATALLLEMDDIDELKIQIKELNQRRTELQTTIDSMRRKASLTDKELPQLKDIDLTTKAGRVECQLILSKHLKGLTLGKGSVTITLQNDTEITIPTNPLPLNDGSPIFEIADKELLDIDAYQL

SEQ ID NO: 30327 - DNA, 50 bp, Escherichia coli; identical to SEQ ID NO: 30087
  source 1..50: mol_type = genomic DNA

SEQ ID NO: 30328 - DNA, 40 bp, Escherichia coli; identical to SEQ ID NO: 20043
  source 1..40: mol_type = genomic DNA

SEQ ID NO: 30329 - DNA, 40 bp, Escherichia coli; identical to SEQ ID NO: 30164
  source 1..40: mol_type = genomic DNA

SEQ ID NO: 30330 - DNA, 50 bp, Escherichia coli; identical to SEQ ID NO: 7690
  source 1..50: mol_type = genomic DNA

SEQ ID NO: 30331 - protein, 506 aa, Escherichia coli; identical to SEQ ID NO: 30326

SEQ ID NO: 30332 - DNA, 50 bp, Escherichia coli
  source 1..50: mol_type = genomic DNA
aaaccgaataggcttcattcaagggtcattgtattgtagctattcggcat

SEQ ID NO: 30333 - DNA, 40 bp, Escherichia coli; identical to SEQ ID NO: 20043
  source 1..40: mol_type = genomic DNA

SEQ ID NO: 30334 - DNA, 40 bp, Escherichia coli; identical to SEQ ID NO: 30164
  source 1..40: mol_type = genomic DNA

SEQ ID NO: 30335 - DNA, 50 bp, Escherichia coli; identical to SEQ ID NO: 7690
  source 1..50: mol_type = genomic DNA

SEQ ID NO: 30336 - protein, 506 aa, Escherichia coli
MRSVITYLRYSSAIQGAEGADSTRRQNDLFKQWLKKNSDAQVVASFSDEGLSGYKGKHLTGQFGDMLARIESGEFSKGTILLVESIDRIGRLEHLETEALMNRILGNGLEIHTLQDGLIYTKDALADDLGISIIQRVKAYIAHQESKQKSFRVSEKWKQRAKLALAGEQRLTKMVPGWIDPDTLKLNEHAETVRLIFKLLLSGESLHNIARHLQSNGIKSFSRRKDANGFSVHSVRTILRSETTIGTLPASQRNDRPAIPNYYEAAIDAATFNKAQEILDKNRKGRTPASDNPLTINIFKGLFRCQCGASVHPTGTKNKYQGVYRCNNHLDGRCDVPPLKRKPFDRWMIDNFLGMIDVGNDGEAEGKIASLQHEVEIVTARIKKATALLLEMDDITELKTQVKGLNQKRTELQTTIDNMRRKASLTDKELPQLKDIDLTTKAGRVECQLILSKHLKGLTLGKDSVIVTLQNDTEITIPTNPLPLNDGTSIFEIAEKELLEIDAYQL

SEQ ID NO: 30337 - DNA, 50 bp, Escherichia coli; identical to SEQ ID NO: 30087
  source 1..50: mol_type = genomic DNA

SEQ ID NO: 30338 - DNA, 40 bp, Escherichia coli; identical to SEQ ID NO: 20043
  source 1..40: mol_type = genomic DNA

SEQ ID NO: 30339 - DNA, 40 bp, Escherichia coli; identical to SEQ ID NO: 30164
  source 1..40: mol_type = genomic DNA

SEQ ID NO: 30340 - DNA, 50 bp, Escherichia coli; identical to SEQ ID NO: 7690
  source 1..50: mol_type = genomic DNA

SEQ ID NO: 30341 - protein, 506 aa, Escherichia coli
MRSVITYLRYSSAIQGAEGADSTRRQNDLFKQWLKKNSDAQVVASFSDEGLSGYKGKHLTGQFGDMLARIEAGGFSEGTILLVESIDRIGRLEHLETEALMNRILGNGIEIHTLQDGLIYTKDALADDLGISIIQRVKAYIAHQESKQKSFRVSQKWGQRAKLALAGKQRLTKMVPGWIDPETFKLNEHAETVRLIFKLLLDGESLHNIARHLQSNDIKSFSRRKDANGFSVHSVRTVLRSESVIGTLPASQRNDRPAIPNYYEAAIDAATFNKAQEILDKNRKGRTPASDNPLTINIFKGLFRCQCGASVHPTGTKNKYAGVYRCNNHLDGRCDVPPLKRKPFDRWMIDNFLGMIDVGNDGESERKIAALQHEVEIVTARIKKATALLLEMDDITELKAQVKGLNQKRTEIQTTIDTLKRKTSLTDKELPQLKDIDLTTKAGRVECQLILSKHLKGLTLGKDSVTVTLQNDTEITIPTNPLPLNDGSPIFEIADKELLDIDAYQL

SEQ ID NO: 30342 - DNA, 50 bp, Escherichia coli; identical to SEQ ID NO: 30087
  source 1..50: mol_type = genomic DNA

SEQ ID NO: 30343 - DNA, 40 bp, Escherichia coli; identical to SEQ ID NO: 20043
  source 1..40: mol_type = genomic DNA

SEQ ID NO: 30344 - DNA, 40 bp, Escherichia coli; identical to SEQ ID NO: 30164
  source 1..40: mol_type = genomic DNA

SEQ ID NO: 30345 - DNA, 50 bp, Escherichia coli; identical to SEQ ID NO: 7690
  source 1..50: mol_type = genomic DNA

SEQ ID NO: 30346 - protein, 506 aa, Escherichia coli
MRTVITYLRFSSATQGAEGADSTRRQNELFKQWLRKNSDAQVVASFNDEGLSGYKGKHLSGQFGDMLSRIESGEFPEGTILLVEAIDRIGRLEHLETEALMNRIIAHGIEIHTLQDGLIYTRDALSDDLGISIIQRVKSYLAHQESKQKSFRVSEKWKQRAKLALAGKQRLTKMVPGWIDHDTFKINEHAETVRLIFKLLLSGESLHNIARHLQSNGIKSFSRRKDANGFSVHSVRTILRSETTIGTLPASQRNDRPAIPNYYEAAIDAATFNKAQEILDKNRKGRTPASDNPLTINIFKGLFRCQCGASVHPTGTKNKYAGVYRCNNHLDGRCDVPPLKRKPFDRWMIDNFLGMIDVGNDGESERKIAALQHEVEIVTARIKKATALLLEMDDIDELKIQLKELNQKRTELQTTIDNMRRKASLTDKELPQLKDIDLMTKAGRVECQLILSKHLKGLTLGKDSVTVTLQNDTEIIVPTDPLPLNDGTSIFEIAEKELLEIDAYQL

SEQ ID NO: 30347 - DNA, 50 bp, Escherichia coli; identical to SEQ ID NO: 30087
  source 1..50: mol_type = genomic DNA

SEQ ID NO: 30348 - DNA, 40 bp, Escherichia coli; identical to SEQ ID NO: 20043
  source 1..40: mol_type = genomic DNA

SEQ ID NO: 30349 - DNA, 40 bp, Escherichia coli; identical to SEQ ID NO: 30164
  source 1..40: mol_type = genomic DNA

SEQ ID NO: 30350 - DNA, 50 bp, Escherichia coli; identical to SEQ ID NO: 7690
  source 1..50: mol_type = genomic DNA

SEQ ID NO: 30351 - protein, 506 aa, Escherichia coli
MRTAITYLRYSSAIQGAEGADSTRRQNDLFKQWLKKNSDAQIVASFSDEGLSGYKGKHLTGQFGDMLARIEAGEFPAGTILLVESIDRIGRLEHLETEALMNRILCNGIEIHTLQDGLVYTKDALADDLGISIIQRVKAYIAHQESKQKSFRVSQKWGQRAKLALAGKQRLTKMVPGWIDPETFKLNEHAETVRLIFKLLLDGESLHNIARHLQANNISSFSRRKDANGFSVHSVRTVLRSESVIGTLPASQRNDRPAIPNYYEAAIDAATFNKAQEILDKNRKGRTPASDNPLTINIFKGLFRCQCGASVHPTGTKNKYQGVYRCNNHLDGRCDVPPLKRKPFDRWMIDNFLGMIDVGNDGESERKIASLQHEVEIVTTRIKKATALLLEMDDIDELKIQLKELNQKRTELQTTIDNMRRKASLTDKELPQLKDIDLTTKVGRVECQLILSKHLKGLTLGKDSVTVTLQNDTEITIPTNPLPLNDGSPIFEIADKELLEIDAYQL

SEQ ID NO: 30352 - DNA, 50 bp, Escherichia coli; identical to SEQ ID NO: 30087
  source 1..50: mol_type = genomic DNA

SEQ ID NO: 30353 - DNA, 40 bp, Escherichia coli; identical to SEQ ID NO: 20043
  source 1..40: mol_type = genomic DNA

SEQ ID NO: 30354 - DNA, 40 bp, Escherichia coli; identical to SEQ ID NO: 30164
  source 1..40: mol_type = genomic DNA

SEQ ID NO: 30355 - DNA, 50 bp, Escherichia coli; identical to SEQ ID NO: 7690
  source 1..50: mol_type = genomic DNA

SEQ ID NO: 30356 - protein, 506 aa, Escherichia coli
MRSVITYLRFSSAIQGAEGADSTRRQNDLFKQWLKKNSDAQVVASFSDEGLSGYKGKHLTGQFGDMLARIESGEFSEGTVLLVEAIDRIGRLEHLETEALMNRIIAHGIEIHTLQDGLIYTRDALSDDLGISIIQRVKSYVAHQESKQKSFRVSQKWKQRAKLALAGEQRLTRNVPGWIDPDTFKCNEHAETVRLIFKLLLDGESLHNIARHLQSNDIKSFSRRKDANGFSVHSVRTVLRSESVIGTLPASQRNDRPAIPNYYEAAIDAATFNKAQEILDKNRKGRTPASDNPLTINIFKGLFRCQCGASVHPTGTKNKYQGVYRCNNHLDGRCDVPPLKRKPFDRWMIDNFLGMIDVGNDGESERKIASLQHEVEIVTTRIKKATALLLEMDDIDELKIQLKELNQKRTELQTTIDNMRRKASLTDKELPQLKDIDLTTKVGRVECQLILSKHLKGLTLGKDSVTVTLQNDTEITIPTNPLPLNDGSPIFEIADKELLDIDAYQL

SEQ ID NO: 30357 - DNA, 50 bp, Escherichia coli; identical to SEQ ID NO: 30087
  source 1..50: mol_type = genomic DNA

SEQ ID NO: 30358 - DNA, 40 bp, Escherichia coli; identical to SEQ ID NO: 20043
  source 1..40: mol_type = genomic DNA

SEQ ID NO: 30359 - DNA, 40 bp, Escherichia coli; identical to SEQ ID NO: 30164
  source 1..40: mol_type = genomic DNA

SEQ ID NO: 30360 - DNA, 50 bp, Escherichia coli; identical to SEQ ID NO: 7690
  source 1..50: mol_type = genomic DNA

SEQ ID NO: 30361 - protein, 506 aa, Escherichia coli
MRHVITYLRYSSAIQGAEGADSTRRQNDLFKQWLKKNSDAQVVASFNDEGLSGYKGKHLSGQFGDMLSRIESGEFSEGTVLLVEAIDRIGRLEHLETEALMNRIIAHGIEIHTLQDGLIYTRDALSDDLGISIIQRVKSYLAHQESKQKSFRVSQKWEQRAKLALAGEQRLTRNVPGWIDPDTFKCNEHAETVRLIFKLLLDGESLHNIARHLQSNDIKSFSRRKDANGFSVHSVRTVLRSESVIGTLPASQRNDRPAIPNYYEAAIDAATFNKAQEILDKNRKGRTPASDNPLTINIFKGLFRCQCGASVHPTGTKNKYQGVYRCNNHLDGRCDVPPLKRKPFDKWMIDNFLGMIDVGNDGEAEGKIASLQHEVEIVTTRIKKATALLLEMDDITELKAQVKELNQKRTELQTTIDSMRRKTSLSDKGLPQLKDIDLMTKAGRVECQLILSKHLKGLTLGKDSVIVTLQNDTEITIPTNPLPLNDGTSIFEIAEKELLEIDAYQL

SEQ ID NO: 30362 - DNA, 50 bp, Escherichia coli; identical to SEQ ID NO: 30087
  source 1..50: mol_type = genomic DNA

SEQ ID NO: 30363 - DNA, 40 bp, Escherichia coli; identical to SEQ ID NO: 20043
  source 1..40: mol_type = genomic DNA

SEQ ID NO: 30364 - DNA, 40 bp, Escherichia coli; identical to SEQ ID NO: 30164
  source 1..40: mol_type = genomic DNA

SEQ ID NO: 30365 - DNA, 50 bp, Escherichia coli; identical to SEQ ID NO: 7690
  source 1..50: mol_type = genomic DNA

SEQ ID NO: 30366 - protein, 506 aa, Escherichia coli
MRSVITYLRFSSAIQGAEGADSTRRQNDLFKQWLKKNSDAQVVASFSDEGLSGYKGKHLTGQFGDMLARIESGEFSEGTVLLVEAIDRIGRLEHLETEALMNRIIAHGIEIHTLQDGLIYTRDALSDDLGISIIQRVKSYVAHQESKQKSFRVSQKWKQRAKLALAGEQRLTKMVPGWIDPDTFKCNEHAETVRLIFKLLLDGESLHNIARHLQSNDIKSFSRRKDANGFSVHSVRTVLRSESVIGTLPASQRNDRPAIPNYYEAAIDASTFNKAQEILDKNRKGRTPASDNPLTINIFKGLFRCQCGASVHPTGTKNKYQGVYRCNNHLDGRCDVPPLKRKPFDKWMIDNFLGMIDVGNDGEAEGKIASLQHEVEIVTTRIKKATALLLEMDDIDELKIQLKELNQKRTELQTTIDNMRRKASLTDKELPQLKDIDLTTKAGRVECQLILSKHLKGLTLGKDSVTVTLQNDTEIIVPTDPLPLNDGTSIFEIAEKELLEIDAYQL

SEQ ID NO: 30367 - DNA, 50 bp, Escherichia coli; identical to SEQ ID NO: 30087
  source 1..50: mol_type = genomic DNA

SEQ ID NO: 30368 - DNA, 40 bp, Escherichia coli; identical to SEQ ID NO: 20043
  source 1..40: mol_type = genomic DNA

SEQ ID NO: 30369 - DNA, 40 bp, Escherichia coli; identical to SEQ ID NO: 30164
  source 1..40: mol_type = genomic DNA

SEQ ID NO: 30370 - DNA, 50 bp, Escherichia coli; identical to SEQ ID NO: 7690
  source 1..50: mol_type = genomic DNA

SEQ ID NO: 30371 - protein, 506 aa, Escherichia coli
MRTVITYLRFSSAIQGAEGADSTRRQNDLFKQWLKKNSDAQVVASFSDEGLSGYKGKHLTGQFGDMLARIESGEFPEGTILLVEAIDRIGRLEHLETEALMNRIIAHGIEIHTLQDGLIYTRDALSDDLGISIIQRVKSYVAHQESKQKSFRVSQKWKQRAKLALAGEQRLTKMVPGWIDPDTFKCNEHAETVRLIFKLLLDGESLHNIARHLQANNISSFSRRKDANGFSVHSVRTILRSETTRGTLPASQRNDRPAIPNYYEAAIDAATFNKAQEILDKNRKGRTPASDNPLTINIFKGLFRCQCGASVHPTGTKNKYQGVYRCNNHLDGRCDVPPLKRKPFDKWMIDNFLGMIDVGNDGEAEGKIAALQHEVEIVTARIKKATALLLEMDDIDELKIQLKELNQKRTELQTTIDNMRRKASLTDKELPQLKDIDLTTKAGRVECQLILSKHLKGLTLGKDTVTVTLQNDTEITIPTDPLPLNDGTSIFEIAEKNLLNIDTFQL

SEQ ID NO: 30372 - DNA, 50 bp, Escherichia coli; identical to SEQ ID NO: 30087
  source 1..50: mol_type = genomic DNA

SEQ ID NO: 30373 - DNA, 40 bp, Escherichia coli; identical to SEQ ID NO: 20043
  source 1..40: mol_type = genomic DNA

SEQ ID NO: 30374 - DNA, 40 bp, Escherichia coli; identical to SEQ ID NO: 30164
  source 1..40: mol_type = genomic DNA

SEQ ID NO: 30375 - DNA, 50 bp, Escherichia coli; identical to SEQ ID NO: 7690
  source 1..50: mol_type = genomic DNA

SEQ ID NO: 30376 - protein, 506 aa, Escherichia coli
MRHVITYLRYSSAIQGAEGADSTRRQNDLFKQWLKKNSDAQVVASFNDEGLSGYKGKHLSGQFGDMLSRIESGEFSEGTVLLVEAIDRIGRLEHLETEALMNRIIAHGIEIHTLQDGLIYTRDALSDDLGISIIQRVKSYIAHQESKQKSFRVSQKWEQRAKLALAGEQRLTRNVPGWIDPDTFKCNEHAETVRLIFKLLLDGESLHNIARHLQSNDIKSFSRRKDANGFSVHSVRTVLRSESVIGTLPASQRNDRPAIPNYYEAAIDAATFNKAQEILDKNRKGRTPASDNPLTINIFKGLFRCQCGASVHPTGTKNKYAGVYRCNNHLDGRCDVPPLKRKPFDRWMIDNFLGMIDVGNDGESERKIAALQHEVEIVTARIKKATALLLEMDDITELKAQVKGLNQKRTEIQTTIDTLKRKTSLTDKELPQLKDIDLTTKAGRVECQLILSKHLKGLTLGKDSVTVTLQNDTEITIPTNPLPLNDGSPIFEIADKELLDIDAYQL

SEQ ID NO: 30377 - DNA, 50 bp, Escherichia coli; identical to SEQ ID NO: 30087
  source 1..50: mol_type = genomic DNA

SEQ ID NO: 30378 - DNA, 40 bp, Escherichia coli; identical to SEQ ID NO: 20043
  source 1..40: mol_type = genomic DNA

SEQ ID NO: 30379 - DNA, 40 bp, Escherichia coli; identical to SEQ ID NO: 30164
  source 1..40: mol_type = genomic DNA

SEQ ID NO: 30380 - DNA, 50 bp, Escherichia coli; identical to SEQ ID NO: 7690
  source 1..50: mol_type = genomic DNA

SEQ ID NO: 30381 - protein, 506 aa, Escherichia coli
MRSVITYLRFSSAIQGAEGADSTRRQNDLFKQWLKKNSDAQVVASFSDEGLSGYKGKHLTGQFGDMLARIEAGEFPGGTILLVESIDRIGRLEHLETEALMNRIIAHGIEIHTLQDGLIYTRDALSDDLGISIIQRVKSYLAHQESKQKSFRVSEKWKQRAKLALAGKQRLTKMVPGWIDPDTFKCNEHAETVRLIFKLLLDGESLHNIARHLQANNISSFSRRKDANGFSVHSVRTILRSVTTIGTLPASQRNDRPAIPNYYEAAIDAATFNKAQEVLDKNRKGRTPASDNPLTINIFKGLFRCQCGASVHPTGTKNKYAGVYRCNNHLDGRCDVPPLKRKPFDRWMIDNFLGMIDVGNDGEAEGKIAALQHEVEIVTARIKKATALLLEMDDITELKTQVKGLNQKRTELQTTIDNMRRKASLTDKELPQLKDIDLTTKAGRVECQLILSKHLKGLTLGKDSVTVTLQNDTEIIVPTDPLPLNDGTSIFEIAEKELLEIDAYQL

SEQ ID NO: 30382 - DNA, 50 bp, Escherichia coli; identical to SEQ ID NO: 30087
  source 1..50: mol_type = genomic DNA

SEQ ID NO: 30383 - DNA, 40 bp, Escherichia coli; identical to SEQ ID NO: 20043
  source 1..40: mol_type = genomic DNA

SEQ ID NO: 30384 - DNA, 40 bp, Escherichia coli; identical to SEQ ID NO: 30164
  source 1..40: mol_type = genomic DNA

SEQ ID NO: 30385 - DNA, 50 bp, Escherichia coli; identical to SEQ ID NO: 7690
  source 1..50: mol_type = genomic DNA

SEQ ID NO: 30386 - protein, 506 aa, Escherichia coli
MRSVITYLRFSSAIQGAEGADSTRRQNDLFKQWLKKNSDAQVVASFSDEGLSGYKGKHLTGQFGDMLARIEAGEFSEGTVLLVEAIDRIGRLEHLETEALMNRIIAHGIEIHTLQDGLIYTRDALSDDLGISIIQRVKSYVAHQESKQKSFRVSQKWKQRAKLALAGEQRLTKMVPGWIDPDTFKCNEHAETVRLIFKLLLDGESLHNIARHLQSNDIKSFSRRKDANGFSVHSVRTVLRSVSAIGTLPASQRNDRPAIPNYYEAAIDAATFNKAQEILDKNRKGRTPASDNPLTINIFKGLFRCQCGASVHPTGTKNKYAGVYRCNNNPDGRCDVPPLKRKPFDKWMLENFLGMIDVGNDGEAEGKIASLQHEVEIVTTRIKKATALLLEMDDITELKAQVKELNQKRTELQTTIDSMRRKTSLTDKELPQLKDIDLTTKAGRVECQLILSKHLKGLTLGKDSVIVTLQNDTEITIPTNPLPLNDGTSIFEIAEKELLEIDAYQL

SEQ ID NO: 30387 - DNA, 50 bp, Escherichia coli; identical to SEQ ID NO: 30087
  source 1..50: mol_type = genomic DNA

SEQ ID NO: 30388 - DNA, 40 bp, Escherichia coli; identical to SEQ ID NO: 20043
  source 1..40: mol_type = genomic DNA

SEQ ID NO: 30389 - DNA, 40 bp, Escherichia coli; identical to SEQ ID NO: 30164
  source 1..40: mol_type = genomic DNA

SEQ ID NO: 30390 - DNA, 50 bp, Escherichia coli; identical to SEQ ID NO: 7690
  source 1..50: mol_type = genomic DNA

SEQ ID NO: 30391 - protein, 506 aa, Escherichia coli
MRHVITYLRYSSAIQGAEGADSTRRQNELFKQWLRKNSDAQVVASFSDEGLSGYKGKHLTGQFGDMLARIEAGEFPAGTILLVESIDRIGRLEHLETEALMNRILGNGIEIHTLQDGLIYTKDALADDLGISIIQRVKAYIAHQESKQKSFRVSQKWEQRAKLALAGEQRLTKMVPGWIDPDTFKCNEHAETVRLIFKLLLDGESLHNIARHLQANNISSFSRRKDANGFSVHSVRTILRSETTRGTLPASQRNDRPAIPNYYEAAIDAATFNKAQEILDKNRKGRTPASDNPLTINIFKGLFRCQCGASVHPTGTKNKYQGVYRCNNNPDGRCDVPPLKRKPFDKWMIDNFLGMIDVGNDGEAEGKIAALQHEVEIVTARIKKATALLLEMDDITELKTQVKGLNQKRTELQTTIDSMRRKTSLSDKGLPQLKDIDLMTKAGRVECQLILSKHLKGLTLGKDTVTVTLQNDTEITIPTDPLPLNDGTSIFEIAEKNLLNIDTFQL

SEQ ID NO: 30392 - DNA, 50 bp, Escherichia coli; identical to SEQ ID NO: 30087
  source 1..50: mol_type = genomic DNA

SEQ ID NO: 30393 - DNA, 40 bp, Escherichia coli; identical to SEQ ID NO: 20043
  source 1..40: mol_type = genomic DNA

SEQ ID NO: 30394 - DNA, 40 bp, Escherichia coli; identical to SEQ ID NO: 30164
  source 1..40: mol_type = genomic DNA

SEQ ID NO: 30395 - DNA, 50 bp, Escherichia coli; identical to SEQ ID NO: 7690
  source 1..50: mol_type = genomic DNA

SEQ ID NO: 30396 - protein, 506 aa, Escherichia coli
MRHVITYLRYSSAIQGAEGADSTRRQNDLFKQWLKKNSDAQVVASFNDEGLSGYKGKHLSGQFGDMLSRIESGEFSEGTILLVEAIDRIGRLEHLETEALMNRILGNGIEIHTLQDGLIYTKDALADDLGISIIQRVKAYIAHQESKQKSFRVSQKWEQRAKLALAGEQRLTKMVPGWIDPDTFKLNEHAETVRLIFKLLLDGESLHNIARHLQSNDIKSFSRRKDANGFSVHSVRTVLRSESVIGTLPASQRNDRPAIPNYYEAAIDAATFNKAQEILDKNRKGRTPASDNPLTINIFKGLFRCQCGASVHPTGTKRTYQGVYRCNNHLDGRCDVPPLKRKPFDKWMIDNFLGMIDVGNDGESERKIAALQHEVEIVTSRIKKATALLLEMDDITELKAQVKELNQKRTELQTTIDSMRRKTSLSDKGLPQLKDIDLMTKEGRVECQLILSKHLKGLTLGKDSVTVTLQNDTEIIVPTDPLPLNDGTSIFEIAEKELLEIAAYQL

SEQ ID NO: 30397 - DNA, 50 bp, Escherichia coli; identical to SEQ ID NO: 30087
  source 1..50: mol_type = genomic DNA

SEQ ID NO: 30398 - DNA, 40 bp, Escherichia coli; identical to SEQ ID NO: 20043
  source 1..40: mol_type = genomic DNA

SEQ ID NO: 30399 - DNA, 40 bp, Escherichia coli; identical to SEQ ID NO: 30164
  source 1..40: mol_type = genomic DNA

SEQ ID NO: 30400 - DNA, 50 bp, Escherichia coli; identical to SEQ ID NO: 7690
  source 1..50: mol_type = genomic DNA

SEQ ID NO: 30401 - protein, 506 aa, Escherichia coli
MRTVITYLRFSSATQGAEGADSTRRQNELFKQWLRKNSDAQVVASFSDEGLSGYKGKHLTGQFGDMLARIESGEFSEGTVLLVEAIDRIGRLEHLETEALMNRIIAHGIEIHTLQDGLIYTRDALSDDLGISIIQRVKSYVAHQESKQKSFRVSQKWKQRAKLALAGEQRLTKMVPGWIDPDTFKCNEHAETVRLIFKLLLDGESLHNIARHLQANNISSFSRRKDANGFSVHSVRTILRSETTRGTLPASQRNDRPAIPNYYEAAIDAATFNKAQEILDKNRKGRTPASDNPLTINIFKGLFRCQCGASVHPTGTKNKYQGVYRCNNHLDGRCDVPPLKRKPFDKWMIDNFLGMIDVGNDGEAEGKIAALQHEVEIVTARIKKATALLLEMDDIDELKIQIKELNHRRTELQTTIDSMRRKTSLTDKELPQLKDIDLTTKAGRVECQLILSKHLKGLTLGKDSVTVTLQNDTEITIPTNPLPLNDGSPIFEIADKELLDIDAYQL

SEQ ID NO: 30402 - DNA, 50 bp, Escherichia coli; identical to SEQ ID NO: 30087
  source 1..50: mol_type = genomic DNA

SEQ ID NO: 30403 - DNA, 40 bp, Escherichia coli; identical to SEQ ID NO: 20043
  source 1..40: mol_type = genomic DNA

SEQ ID NO: 30404 - DNA, 40 bp, Escherichia coli; identical to SEQ ID NO: 30164
  source 1..40: mol_type = genomic DNA

SEQ ID NO: 30405 - DNA, 50 bp, Escherichia coli; identical to SEQ ID NO: 7690
  source 1..50: mol_type = genomic DNA

SEQ ID NO: 30406 - protein, 506 aa, Escherichia coli
MRTVITYLRFSSAIQGAEGADSTRRQNDLFKQWLKKNSDAQVVASFSDEGLSGYKGKHLTGQFGDMLARIESGEFPEGTILLVEAIDRIGRLEHLETEALMNRIIAHGIEIHTLQDGLIYTRDALSDDLGISIIQRVKSYLAHQESKQKSFRVSEKWKQRAKLALAGKQRLTKMVPGWIDPDTLKLNEHAETVRLIFKLLLSGESLHNIARHLQANNISSFSRRKDANGFSVHSVRTVLRSESVIGTLPASQRNDRPAIPNYYEAAIDAATFNKAQEILDKNRKGRTPASDNPLTINIFKGLFRCQCGASVHPTGTKNKYAGVYRCNNHLDGRCDVPPLKRKPFDKWMIDNFLGMIDVGNDGEAEGKIASLQHEVEIVTTRIKKATALLLEMDDITELKTQVKELNQKRTELQTTIDSMRRKTSLSDKGLPQLKDIDLMTKEGRVECQLILSKHLKGLTLGKDSVTVTLQNDTEITIPTNPLPLNDGTSIFEIADKELLDIDAFRL

SEQ ID NO: 30407 - DNA, 50 bp, Escherichia coli; identical to SEQ ID NO: 30087
  source 1..50: mol_type = genomic DNA

SEQ ID NO: 30408 - DNA, 40 bp, Escherichia coli; identical to SEQ ID NO: 20043
  source 1..40: mol_type = genomic DNA

SEQ ID NO: 30409 - DNA, 40 bp, Escherichia coli; identical to SEQ ID NO: 30164
  source 1..40: mol_type = genomic DNA

SEQ ID NO: 30410 - DNA, 50 bp, Escherichia coli; identical to SEQ ID NO: 7690
  source 1..50: mol_type = genomic DNA

SEQ ID NO: 30411 - protein, 506 aa, Escherichia coli
MRSVITYLRYSSAIQGAEGADSTRRQNELFKQWLRKNSDAQVVASFSDEGLSGYKGKHLTGQFGDMLARIEAGEFPASTILLVESIDRIGRLEHLETEALMNRILGNGIEIHTLQDGLIYTKDALADDLGISIIQRVKAYIAHQESKQKSFRVSQKWEQRAKLALAGEQRLTKMVPGWIDPDTFKCNEHAETVRLIFKLLLDGESLHNIARHLQSNGIKSFSRRKDANGFSVHSVRTILRSETTIGTLPASQRNDRPAIPNYYEAAIDAATFNKAQEILDKNRKGRTPASDNPLTINIFKGLFRCQCGASVHPTGTKNKYAGVYRCNNHLDGRCDVPPLKRKPFDRWMIDNFLGMIDVGNDGESERKIAALQHEVEIVTARIKKATALLLEMDDIDELKIQLKELNQRRTELQTTIDSMRRKTSLTDKELPQLKDIDLTTKAGRVECQLILSKHLKGLTLGKDSVTVTLQNDTEITIPTNPLPLNDGSPIFEIADKELLDIDAYQL

SEQ ID NO: 30412 - DNA, 50 bp, Escherichia coli; identical to SEQ ID NO: 30087
  source 1..50: mol_type = genomic DNA

SEQ ID NO: 30413 - DNA, 40 bp, Escherichia coli; identical to SEQ ID NO: 20043
  source 1..40: mol_type = genomic DNA

SEQ ID NO: 30414 - DNA, 40 bp, Escherichia coli; identical to SEQ ID NO: 30164
  source 1..40: mol_type = genomic DNA

SEQ ID NO: 30415 - DNA, 50 bp, Escherichia coli; identical to SEQ ID NO: 7690
  source 1..50: mol_type = genomic DNA

SEQ ID NO: 30416 - protein, 506 aa, Escherichia coli
MRSVITYLRFSSATQGAEGADSTRRQNELFKQWLRKNSDAQVVASFNDEGLSGYKGKHLSGQFGDMLSRIESGEFPEGTILLVEAIDRIGRLEHLETEALMNRIIAHGIEIHTLQDGLIYTRDALSDDLGISIIQRVKSYIAHQESKQKSFRVSQKWEQRAKLALAGEQRLTKMVPGWIDPDTFKLNEHAETVRLIFKLLLSGESLHNIARHLQSNGIKSFSRRKDANGFSVHSVRTILRSETTIGTLPASQRNDRPAIPNYYEAAIDAATFNKAQEILDKNRKGRTPASDNPLTINIFKGLFRCQCGASVHPTGTKNKYAGVYRCNNHLDGRCDVPPLKRKPFDRWMIDNFLGMIDVGNDGESERKIAALQHEVEIVTARIKKATALLLEMDDIDELKIQLKELNQKRTELQTTIDNMRRKASLTDKELPQLKDIDLTTKAGRVECQLILSKHLKGLTLGKDSVTVTLQNDTEITIPTNPLPLNDGSPIFEIADKELLDIDAYQL

SEQ ID NO: 30417 - DNA, 50 bp, Escherichia coli; identical to SEQ ID NO: 30087
  source 1..50: mol_type = genomic DNA

SEQ ID NO: 30418 - DNA, 40 bp, Escherichia coli; identical to SEQ ID NO: 20043
  source 1..40: mol_type = genomic DNA

SEQ ID NO: 30419 - DNA, 40 bp, Escherichia coli; identical to SEQ ID NO: 30164
  source 1..40: mol_type = genomic DNA

SEQ ID NO: 30420 - DNA, 50 bp, Escherichia coli; identical to SEQ ID NO: 7690
  source 1..50: mol_type = genomic DNA

SEQ ID NO: 30421 - protein, 506 aa, Escherichia coli
MRTVITYLRFSSATQGAEGADSTRRQNELFKQWLRKNSDAQVVASFSDEGLSGYKGKHLTGQFGDMLARIESGEFPEGTLLLVEAIDRIGRLEHLETEALMNRIIAHGIEIHTLQDGLIYTRDALSDDLGISIIQRVKSYIAHQESKQKSFRVSQKWEQRAKLALAGEQRLTKMVPGWIDPDTFKLNEHAETVRLIFKLLLDGESLHNIARHLQANNISSFSRRKDANGFSVHSVRTILRSETTIGTLPASQRNDRPAIPNYYEAAIDVSTFNKAQEILDKNRKGRTPASDNPLTINIFKGLFRCQCGASVHPTGTKNKYQGVYRCNNHLDGRCDVQPLKRKPFDRWMIDNFLGMIDVGNDGESERKIAALQHEVEIVTARIKKATALLLEMDDIDELKIQLKELNQRRTELQTTIDNMRRKASLTDKELPQLKDIDLTTKAGRVECQLILSKHLKGLTLGKDSVTVTLQNDTEITIPTNPLPLNDGTSIFEIADKELLDIDAYQL

SEQ ID NO: 30422 - DNA, 50 bp, Escherichia coli; identical to SEQ ID NO: 30087
  source 1..50: mol_type = genomic DNA

SEQ ID NO: 30423 - DNA, 40 bp, Escherichia coli; identical to SEQ ID NO: 20043
  source 1..40: mol_type = genomic DNA

SEQ ID NO: 30424 - DNA, 40 bp, Escherichia coli; identical to SEQ ID NO: 30164
  source 1..40: mol_type = genomic DNA

SEQ ID NO: 30425 - DNA, 50 bp, Escherichia coli; identical to SEQ ID NO: 7690
  source 1..50: mol_type = genomic DNA

SEQ ID NO: 30426 - protein, 506 aa, Escherichia coli; identical to SEQ ID NO: 20056

SEQ ID NO: 30427 - DNA, 50 bp, Escherichia coli; identical to SEQ ID NO: 30087
  source 1..50: mol_type = genomic DNA

SEQ ID NO: 30428 - DNA, 40 bp, Escherichia coli; identical to SEQ ID NO: 20043
  source 1..40: mol_type = genomic DNA

SEQ ID NO: 30429 - DNA, 40 bp, Escherichia coli; identical to SEQ ID NO: 30164
  source 1..40: mol_type = genomic DNA

SEQ ID NO: 30430 - DNA, 50 bp, Escherichia coli; identical to SEQ ID NO: 7690
  source 1..50: mol_type = genomic DNA

SEQ ID NO: 30431 - protein, 506 aa, Escherichia coli
MRTVITYLRFSSAIQGAEGADSTRRQNDLFKQWLKKNSDAQVVASFSDEGLSGYKGKHLTGQFGDMLARIESGEFPEGTVLLVEAIDRIGRLEHLETEALMNRIIAHGIEIHTLQDGLIYTRDALSDDLGISIIQRVKSYVAHQESKQKSFRVSQKWKQRAKLALAGEQRLTKMVPGWIDPDTFKCNEHAETVRLIFKLLLDGESLHNIARHLQANNISSFSRRKDANGFSVHSVRTILRSETTRGTLPASQRNDRPAIPNYYEAAIDAATFNKAQEILDKNRKGRTPASDNPLTINIFKGLFRCQCGASVHPTGTKNKYQGVYRCNNHLDGRCDVPPLKRKPFDKWMIDNFLGMIDVGNDGEAEGKIAALQHEVEIVTARIKKATALLLEMDDIDELKIQLKELNQKRTELQTTIDNMRRKASLTDKELPQLKDIDLTTKAGRVECQLILSKHLKGLTLGKDTVTVTLQNDTEITIPTDPLPLNDGTSIFEIAEKNLLNIDTFQL

SEQ ID NO: 30432 - DNA, 50 bp, Escherichia coli; identical to SEQ ID NO: 30087
  source 1..50: mol_type = genomic DNA

SEQ ID NO: 30433 - DNA, 40 bp, Escherichia coli; identical to SEQ ID NO: 20043
  source 1..40: mol_type = genomic DNA

SEQ ID NO: 30434 - DNA, 40 bp, Escherichia coli; identical to SEQ ID NO: 30164
  source 1..40: mol_type = genomic DNA

SEQ ID NO: 30435 - DNA, 50 bp, Escherichia coli; identical to SEQ ID NO: 7690
  source 1..50: mol_type = genomic DNA

SEQ ID NO: 30436 - protein, 506 aa, Escherichia coli
MRSVITYLRFSSAIQGAEGADSTRRQNDLFKQWLKKNSDAQVVASFSDEGLSGYKGKHLTGQFGDMLARIESGEFPEGTILLVESIDRIGRLEHLETEALMNRILGNGLEIHTLQDGLIYTKDALADDLGISIIQRVKAYIAHQESKQKSFRVSEKWKQRAKLALAGEQRLTKMVPGWIDPDTLKLNEHAETVRLIFKLLLSGESLHNIARHLQSNGIKSFSRRKDANGFSVHSVRTILRSETTIGTLPASQRNDRPAIPNYYEAAIDAATFNKAQEILDKNRKGRTPASDNPLTINIFKGLFRCQCGASVHPTGTKNKYAGVYRCNNHLDGRCDVPPLKRKPFDKWMLENFLGMIDVGNDGEAEGKIASLQYEVEIVTTRIKKATALLLEMDDIDELKIQIKELNQRRTELQTTIDSMRRKASLTDKELPQLKDIDLTTKAGRVECQLILSKHLKGLTLGKGSVTITLQNDTEITIPTNPLPLNDGSPIFEIADKELLDIDAYQL

SEQ ID NO: 30437 - DNA, 50 bp, Escherichia coli; identical to SEQ ID NO: 30087
  source 1..50: mol_type = genomic DNA

SEQ ID NO: 30438 - DNA, 40 bp, Escherichia coli; identical to SEQ ID NO: 20043
  source 1..40: mol_type = genomic DNA

SEQ ID NO: 30439 - DNA, 40 bp, Escherichia coli; identical to SEQ ID NO: 30164
  source 1..40: mol_type = genomic DNA

SEQ ID NO: 30440 - DNA, 50 bp, Escherichia coli; identical to SEQ ID NO: 7690
  source 1..50: mol_type = genomic DNA

SEQ ID NO: 30441 - protein, 506 aa, Escherichia coli
MRSVITYLRFSSATQGAEGADSTRRQNELFKQWLRKNSDAQVVASFSDEGLSGYKGKHLTGQFGDMLARIEAGEFPAGAILLVESIDRIGRLEHLETEALMNRIIAHGIEIHTLQDGLIYTRDALSDDLGISIIQRVKSYLAHQESKQKSFRVSEKWKQRAKLALAGEQHLTRNVPGWIDPDTFKCNEHAETVRLIFKLLLDGESLHNIARHLQSNDIKSFSRRKDANGFSVHSVRTVLRSESVIGTLPASQRNDRPAIPNYYEAAIDAATFNKAQEILDKNRKGRTPASDNPLTINIFKGLFRCQCGASVHPTGTKNKYAGVYRCNNHLDGRCDVPPLKRKPFDKWMIDNFLGMIDVGNDGEAEGKIASLQHEVEIVTARIKKATALLLEMDDIDELKIQLKELNQRRTELQTTIDSMRRKTSLSDKGLPQLKDIDLMTKAGRVECQLILSKHLKGLTLGKDSVTVTLQNDTEITIPTNPLPLNDGTSIFEIAEKNLLNIDTFQL

SEQ ID NO: 30442 - DNA, 50 bp, Escherichia coli; identical to SEQ ID NO: 30087
  source 1..50: mol_type = genomic DNA

SEQ ID NO: 30443 - DNA, 40 bp, Escherichia coli; identical to SEQ ID NO: 20043
  source 1..40: mol_type = genomic DNA

SEQ ID NO: 30444 - DNA, 40 bp, Escherichia coli; identical to SEQ ID NO: 30164
  source 1..40: mol_type = genomic DNA

SEQ ID NO: 30445 - DNA, 50 bp, Escherichia coli; identical to SEQ ID NO: 7690
  source 1..50: mol_type = genomic DNA

SEQ ID NO: 30446 - protein, 506 aa, Escherichia coli
MRTVITYLRFSSATQGAEGADSTRRQNELFKQWLRKNSDAQVVASFNDEGLSGYKGKHLSGQFGDMLSRIESGEFPEGTILLVEAIDRIGRLEHLETEALMNRIIAHGIEIHTLQDGLIYTRDALSDDLGISIIQRVKSYLAHQESKQKSFRVSQKWEQRAKLALAGEQRLTKMVPGWIDPETFKLNEHAETVRLIFKLLLDGESLHNIARHLQANNISSFSRRKDANGFSVHSVRTILRSVTTIGTLPASQRNDRPAIPNYYEAAIDAATFNKAQEILDKNRKGRTPASDNPLTINIFKGLFRCQCGASVHPTGTKNKYAGVYRCNNHLDGRCDVPPLKRKPFDRWMIDNFLGMIDVGNDGESERKIAALQHEVEIVTSRIKKATALLLEMDDITELKTQVKELNQKRTELQTTIDSMRRKTSLSDKGLPQLKDIDLMTKAGRVECQLILSKHLKGLTLGKDSVTVTLQNDTEITIPTNPLPLNDGTSIFEIADKELLDIDAYQL

SEQ ID NO: 30447 - DNA, 50 bp, Escherichia coli; identical to SEQ ID NO: 30087
  source 1..50: mol_type = genomic DNA

SEQ ID NO: 30448 - DNA, 40 bp, Escherichia coli; identical to SEQ ID NO: 20043
  source 1..40: mol_type = genomic DNA

SEQ ID NO: 30449 - DNA, 40 bp, Escherichia coli; identical to SEQ ID NO: 30164
  source 1..40: mol_type = genomic DNA

SEQ ID NO: 30450 - DNA, 50 bp, Escherichia coli; identical to SEQ ID NO: 7690
  source 1..50: mol_type = genomic DNA

SEQ ID NO: 30451 - protein, 506 aa, Escherichia coli
MRSVITYLRYSSAIQGAEGADSTRRQNDLFKQWLKKNSDAQVVASFSDEGLSGYKGKHLTGQFGDMLARIESGEFSKGTILLVESIDRIGRLEHLETEALMNRIIAHGIEIHTLQDGLIYTRDALSDDLGISIIQRVKSYLAHQESKQKSFRVSEKWKQRAKLALAGKQRLTKMVPGWIDPDTLKLNEHAETVRLIFKLLLSGESLHNIARHLQSNGIKSFSRRKDANGFSVHSVRTILRSETTIGTLPASQRNDRPAIPNYYEAAIDAATFNKAQEILDKNRKGRTPASDNPLTINIFKGLFRCQCGASVHPTGTKNKYAGVYRCNNHLDGRCDVPPLKRKPFDKWMIDNFLGMIDVGNDGEAEGKIASLQHEVEIVTARIKKATALLLEMDDIDELKIQIKELNQRRTELQTTIDSMRRKASLTDKELPQLKDIDLTTKAGRVECQLILSKHLKGLTLGKDSVIVTLQNDTEITIPTNPLPLNDGTSIFEIAEKELLEIDAYQL

SEQ ID NO: 30452 - DNA, 50 bp, Escherichia coli; identical to SEQ ID NO: 30087
  source 1..50: mol_type = genomic DNA

SEQ ID NO: 30453 - DNA, 40 bp, Escherichia coli; identical to SEQ ID NO: 20043
  source 1..40: mol_type = genomic DNA

SEQ ID NO: 30454 - DNA, 40 bp, Escherichia coli; identical to SEQ ID NO: 30164
  source 1..40: mol_type = genomic DNA

SEQ ID NO: 30455 - DNA, 50 bp, Escherichia coli; identical to SEQ ID NO: 7690
  source 1..50: mol_type = genomic DNA

SEQ ID NO: 30456 - protein, 506 aa, Escherichia coli
MRTVITYLRFSSATQGAEGADSTRRQNELFKQWLRKNSDAQVVASFSDEGLSGYKGKHLTGQFGDMLARIESGEFSEGTVLLVEAIDRIGRLEHLETEALMNRIIAHGIEIHTLQDGLIYTRDALSDDLGISIIQRVKSYVAHQESKQKSFRVSQKWKQRAKLALAGEQRLTRNVPGWIDPDTFKCNEHAETVRLIFKLLLDGESLHNIARHLQSNDIKSFSRRKDANGFSVHSVRTVLRSESVIGTLPASQRNDRPAIPNYYEAAIDAATFNKAQEILDKNRKGRTPASDNPLTINIFKGLFRCQCGASVHPTGTKRTYQGVYRCNNHLDGRCDVQPLKRKPFDRWMIDNFLGMIDVGNDGESERKIAALQHEVEIVTARIKKATALLLEMDDIDELKIQLKELNQKRTELQTTIDNMRRKTSLTDKELPQLKDIDLTTKAGRVECQLILSKHLKGLTLGKDSVTVTLQNDTEITIPTNPLPLNDGSPIFEIADKELLDIDAYQL

SEQ ID NO: 30457 - DNA, 50 bp, Escherichia coli; identical to SEQ ID NO: 30087
  source 1..50: mol_type = genomic DNA

SEQ ID NO: 30458 - DNA, 40 bp, Escherichia coli; identical to SEQ ID NO: 20043
  source 1..40: mol_type = genomic DNA

SEQ ID NO: 30459 - DNA, 40 bp, Escherichia coli; identical to SEQ ID NO: 30164
  source 1..40: mol_type = genomic DNA

SEQ ID NO: 30460 - DNA, 50 bp, Escherichia coli; identical to SEQ ID NO: 7690
  source 1..50: mol_type = genomic DNA

SEQ ID NO: 30461 - protein, 506 aa, Escherichia coli
MRSVITYLRFSSAIQGAEGADSTRRQNDLFKQWLKKNSDAQVVASFSDEGLSGYKGKHLTGQFGDMLARIEAGEFPGGTILLVESIDRIGRLEHLETEALMNRIIAHGIEIHTLQDGLIYTRDALSDDLGISIIQRVKSYLAHQESKQKSFRVSEKWKQRAKLALAGKQRLTKMVPGWIDPDTLKLNEHAETVRLIFKLLLSGESLHNIARHLQSNGIKSFSRRKDANGFSVHSVRTILRSETTIGTLPASQRNDRPAIPNYYEAAIDAATFNKAQEILDKNRKGRTPASDNPLTINIFKGLFRCQCGASVHPTGTKNKYAGVYRCNNHLDGRCDVPPLKRKPFDRWMIDNFLGMIDVGNDGESERKIAALQHEVEIVTSRIKKATALLLEMDDITELKAQVKELNQKRTELQTTINTMKRKTSLSDKGLPQLKDIDLMTKAGRVECQLILSKHLKGLTLGKDSVTVTLQNDTEITIPTNPLPLNDGSPIFEIADKELLDVDAYQL

SEQ ID NO: 30462 - DNA, 50 bp, Escherichia coli; identical to SEQ ID NO: 30087
  source 1..50: mol_type = genomic DNA

SEQ ID NO: 30463 - DNA, 40 bp, Escherichia coli; identical to SEQ ID NO: 20043
  source 1..40: mol_type = genomic DNA

SEQ ID NO: 30464 - DNA, 40 bp, Escherichia coli; identical to SEQ ID NO: 30164
  source 1..40: mol_type = genomic DNA

SEQ ID NO: 30465 - DNA, 50 bp, Escherichia coli; identical to SEQ ID NO: 7690
  source 1..50: mol_type = genomic DNA

SEQ ID NO: 30466 - protein, 499 aa, Escherichia coli
MRFSSATQGAEGADSTRRQNELFKQWLRKNSDAQVVASFNDEGLSGYKGKHLSGQFGDMLSRIESGEFPEGTILLVEAIDRIGRLEHLETEALMNRIIAHGIEIHTLQDGLIYTRDALSDDLGISIIQRVKSYLAHQESKQKSFRVSQKWEQRAKLALAGEQRLTKMVPGWIDPETFKLNEHAETVRLIFKLLLDGESLHNIARHLQANNISSFSRRKDANGFSVHSVRTILRSETTIGTLPASQRNDRPAIPNYYEAAIDAATFNKAQEILDKNRKGRTPASDNPLTINIFKGLFRCQCGASVHPTGTKNKYAGVYRCNNHLDGRCDVPPLKRKPFDKWMIDNFLGMIDVGNDGEAEGKIASLQHEVEIVTARIKKATALLLEMDDIDELKIQIKELNQRRTELQTTIDSMRRKASLTDKELPQLKDIDLTTKAGRVECQLILSKHLKGLTLGKGSVTITLQNDTEITIPTNPLPLNDGSPIFEIADKELLDIDAYQL

SEQ ID NO: 30467 - DNA, 50 bp, Escherichia coli; identical to SEQ ID NO: 30087
  source 1..50: mol_type = genomic DNA

SEQ ID NO: 30468 - DNA, 40 bp, Escherichia coli; identical to SEQ ID NO: 20043
  source 1..40: mol_type = genomic DNA

SEQ ID NO: 30469 - DNA, 40 bp, Escherichia coli; identical to SEQ ID NO: 30164
  source 1..40: mol_type = genomic DNA

SEQ ID NO: 30470 - DNA, 50 bp, Escherichia coli; identical to SEQ ID NO: 7690
  source 1..50: mol_type = genomic DNA

SEQ ID NO: 30471 - protein, 506 aa, Escherichia coli
MRTVITYLRFSSATQGAEGADSTRRQNELFKQWLRKNSDAQVVASFSDEGLSGYKGKHLTGQFGDMLARIESGEFSEGTVLLVEAIDRIGRLEHLETEALMNRIIAHGIEIHTLQDGLIYTRDALSDDLGISIIQRVKSYVAHQESKQKSFRVSQKWKQRAKLALAGEQRLTKMVPGWIDPDTLKLNEHAENVRLIFKLLLDGESLHNIARHLQANNISSFSRRKDANGFSVHSVRTILRSETTIGTLPASQRNDRPAIPNYYEAAIDVSTFNKAQEILDKNRKGRTPASDNPLTINIFKGLFRCQCGASVHPTGTKNKYQGVYRCNNHLDGRCDVQPLKRKPFDRWMIDNFLGMIDVGNDGESERKIAALQHEVEIVTARIKKATALLLEMDDIDELKIQLKELNQKRTELQTTIDNMRRKASLTDKELPQLKDIDLTTKAGRVECQLILSKHLKGLTLGKDSVTVTLQNDTEITIPTNPLPLNDGTSIFEIADKELLDIDAYQL

SEQ ID NO: 30472 - DNA, 50 bp, Escherichia coli; identical to SEQ ID NO: 30087
  source 1..50: mol_type = genomic DNA

SEQ ID NO: 30473 - DNA, 40 bp, Escherichia coli; identical to SEQ ID NO: 20043
  source 1..40: mol_type = genomic DNA

SEQ ID NO: 30474 - DNA, 40 bp, Escherichia coli; identical to SEQ ID NO: 30164
  source 1..40: mol_type = genomic DNA

SEQ ID NO: 30475 - DNA, 50 bp, Escherichia coli; identical to SEQ ID NO: 7690
  source 1..50: mol_type = genomic DNA

SEQ ID NO: 30476 - protein, 506 aa, Escherichia coli
MRSVITYLRFSSATQGAEGADSTRRQNELFKQWLRKNSDAQVVASFNDEGLSGYKGKHLSGQFGDMLSRIESGEFSKGTILLVEAIDRIGRLEHLETEALMNRIIAHGIEIHTLQDGLIYTRDALSDDLGISIIQRVKSYLAHQESKQKSFRVSEKWKQRAKLALAGEQRLTKMVPGWIDPETFKLNEHAETVRLIFKLLLDGESLHNIARHLQANNISSFSRRKDANGFSVHSVRTILRSETTIGTLPASQRNDRPAIPNYYEAAIDAATFNKAQEILDKNRKGRTPASDNPLTINIFKGLFRCQCGASVHPTGTKNKYAGVYRCNNHLDGRCHVPPLKRKPFDKWMIDNFLGMIDVGNDGEAEGKIASLQHEVEIVTTRIKKATALLLEMDDIDELKIQLKELNQKRTELQTTIDNMRRKASLTDKELPQLKDIDLTTKAGRVECQLILSKHLKGLTLGKDSVTVTLQNDTEITIPTDPLPLNDGTSIFEIAEKNLLNIDTFQL

SEQ ID NO: 30477 - DNA, 50 bp, Escherichia coli; identical to SEQ ID NO: 30087
  source 1..50: mol_type = genomic DNA

SEQ ID NO: 30478 - DNA, 40 bp, Escherichia coli; identical to SEQ ID NO: 20043
  source 1..40: mol_type = genomic DNA

SEQ ID NO: 30479 - DNA, 40 bp, Escherichia coli; identical to SEQ ID NO: 30164
  source 1..40: mol_type = genomic DNA

SEQ ID NO: 30480 - DNA, 50 bp, Escherichia coli; identical to SEQ ID NO: 7690
  source 1..50: mol_type = genomic DNA

SEQ ID NO: 30481 - protein, 506 aa, Escherichia coli
MRHVITYLRYSSATQGAEGADSTRRQNELFKQWLRKNSDAQVVASFNDEGLSGYKGKHLSGQFGDMLSRIESGEFSKGTILLVEAIDRIGRLEHLETEALMNRIIAHGIEIHTLQDGLIYTRDALSDDLGISIIQRVKSYLAHQESKQKSFRVSQKWKQRAKLALAGEQRLTRNVPGWIDPDTFKCNEHAETVRLIFKLLLDGESLHNIARHLQSNDIKSFSRRKDANGFSVHSVRTVLRSESVIGTLPASQRNDRPAIPNYYEAAIDAATFNKAQEILDKNRKGRTPASDNPLTINIFKGLFRCQCGASVHPTGTKNKYAGVYRCNNHLDGRCDVPPLKRKPFDRWMIDNFLGMIDVGNDGESERKIAALQHEVEIVTARIKKATALLLEMDDITELKAQVKGLNQKRTEIQTTIDTLKRKTSLTDKELPQLKDIDLTTKAGRVECQLILSKHLKGLTLGKDSVTVTLQNDTEITIPTNPLPLNDGSPIFEIADKELLDIDAYQL

SEQ ID NO: 30482 - DNA, 50 bp, Escherichia coli; identical to SEQ ID NO: 30087
  source 1..50: mol_type = genomic DNA

SEQ ID NO: 30483 - DNA, 40 bp, Escherichia coli; identical to SEQ ID NO: 20043
  source 1..40: mol_type = genomic DNA

SEQ ID NO: 30484 - DNA, 40 bp, Escherichia coli; identical to SEQ ID NO: 30164
  source 1..40: mol_type = genomic DNA

SEQ ID NO: 30485 - DNA, 50 bp, Escherichia coli; identical to SEQ ID NO: 7690
  source 1..50: mol_type = genomic DNA

SEQ ID NO: 30486 - protein, 506 aa, Escherichia coli
MRSVITYLRFSSAIQGAEGADSTRRQNDLFKQWLKKNSDAQVVASFSDEGLSGYKGKHLTGQFGDMLARIESGEFPEGTLLLVEAIDRIGRLEHLETEALMNRIIAHGIEIHTLQDGLIYTRDALSDDLGISIIQRVKSYVAHQESKQKSFRVSQKWKQRAKLALAGEQRLTKMVPGWIDPDTFKCNEHAETVRLIFKLLLDGESLHNIARHLQANNISSFSRRKDANGFSVHSVRTILRSETTRGTLPASQRNDRPAIPNYYEAAIDASTFNKAQEILDKNRKGRTPASDNPLTINIFKGLFRCQCGASVHPTGTKNKYAGVYRCNNNPDGRCDVPPLKRKPFDKWMIDNFLGMIDVGNDGEAEGKIASLQHEVEIVTARIKKATALLLEMDDIDELKIQIKELNQRRTELQTTIDNMRRKASLTDKELPQLKDIDLTTKAGRVECQLILSKHLKGLTLGKDSVTVTLQNDTEIIVPTDPLPLNDGTSIFEIAEKELLEIDAYQL

SEQ ID NO: 30487 - DNA, 50 bp, Escherichia coli; identical to SEQ ID NO: 30087
  source 1..50: mol_type = genomic DNA

SEQ ID NO: 30488 - DNA, 40 bp, Escherichia coli; identical to SEQ ID NO: 20043
  source 1..40: mol_type = genomic DNA

SEQ ID NO: 30489 - DNA, 40 bp, Escherichia coli; identical to SEQ ID NO: 30164
  source 1..40: mol_type = genomic DNA

SEQ ID NO: 30490 - DNA, 50 bp, Escherichia coli; identical to SEQ ID NO: 7690
  source 1..50: mol_type = genomic DNA

SEQ ID NO: 30491 - protein, 506 aa, Escherichia coli
MRSVITYLRFSSATQGAEGADSTRRQNDLFKQWLKKNSDAQVVASFNDEGLSGYKGKHLSGQFGDMLSRIESGEFPEGTILLVEAIDRIGRLEHLETEALMNRIIAHGIEIHTLQDGLIYTRDALSDDLGISIIQRVKSYIAHQESKQKSFRVSQKWEQRAKLALAGEQRLTRNVPGWIDPDTFKCNEHAETVRLIFKLLLSGESLHNIARHLQSNGIKSFSRRKDANGFSVHSVRTILRSETTIGTLPASQRNDRPAIPNYYEAAIDASTFNKAQEILGKNRIGRTPASDNPLTINIFKGLFRCQCGASVHPTGTKNKYQGVYRCNNHLDGRCDVPPLKRKPFDKWMIDNFLGMIDVGNDGEAEKEIASLQHEVEIVTTRIKKATALLLEMDDIDELKIQLKELNQKRTELQTTIDNMRRKASLTDKELPQLKDIDLTTKVGRVECQLILSKHLKGLTLGKDSVTVTLQNDTEITIPTNPLPLNDGSPIFEIADKELLDIDAYQL

SEQ ID NO: 30492 - DNA, 50 bp, Escherichia coli; identical to SEQ ID NO: 30087
  source 1..50: mol_type = genomic DNA

SEQ ID NO: 30493 - DNA, 40 bp, Escherichia coli; identical to SEQ ID NO: 20043
  source 1..40: mol_type = genomic DNA

SEQ ID NO: 30494 - DNA, 40 bp, Escherichia coli; identical to SEQ ID NO: 30164
  source 1..40: mol_type = genomic DNA

SEQ ID NO: 30495 - DNA, 50 bp, Escherichia coli; identical to SEQ ID NO: 7690
  source 1..50: mol_type = genomic DNA

SEQ ID NO: 30496 - protein, 506 aa, Escherichia coli
MRTVITYLRFSSATQGAEGADSTRRQNDLFKQWLKKNSDAQVVASFSDEGLSGYKGKHLTGQFGDMLARIEAGEFPGGTILLVESIDRIGRLEHLETEALMNRIIAHGIEIHTLQDGLIYTRDALSDDLGISIIQRVKSYLAHQESKQKSFRVSEKWKQRAKLALAGKQRLTKMVPGWIDPDTLKLNEHAETVRLIFKLLLSGESLHNIARHLQSNGIKSFSRRKDANGFSVHSVRTILRSETTIGTLPASQRNDRPAIPNYYEAAIDAATFNKAQEILDKNRKGRTPASDNPLTINIFKGLFRCQCGASVHPTGTKNKYAGVYRCNNHLDGRCDVPPLKRKPFDKWMIDNFLGMIDVGNDGEAEGKIASLQHEVEIVTARIKKATALLLEMDDIDELKIQIKELNQRRTELQTTIDSMRRKASLTDKELPQLKDIDLTTKAGRVECQLILSKHLKGLTLGKGSVTITLQNDTEITIPTNPLPLNDGSPIFEIADKELLDIDAYQL

SEQ ID NO: 30497 - DNA, 50 bp, Escherichia coli; identical to SEQ ID NO: 30087
  source 1..50: mol_type = genomic DNA

SEQ ID NO: 30498 - DNA, 40 bp, Escherichia coli; identical to SEQ ID NO: 20043
  source 1..40: mol_type = genomic DNA

SEQ ID NO: 30499 - DNA, 40 bp, Escherichia coli; identical to SEQ ID NO: 30164
  source 1..40: mol_type = genomic DNA

SEQ ID NO: 30500 - DNA, 50 bp, Escherichia coli; identical to SEQ ID NO: 7690
  source 1..50: mol_type = genomic DNA

SEQ ID NO: 30501 - protein, 506 aa, Escherichia coli
MRTVITYLRFSSATQGAEGADSTRRQNELFKQWLRKNSDAQVVASFSDEGLSGYKGKHLTGQFGDMLARIESGEFSEGTVLLVEAIDRIGRLEHLETEALMNRIIAHGIEIHTLQDGLIYTRDALSDDLGISIIQRVKSYVAHQESKQKSFRVSQKWKQRAKLALAGEQRLTKMVPGWIDPDTFKLNEHAETVRLIFKLLLSGESLHNIARHLQANNISSFSRRKDANGFSVHSVRTVLRSESVIGTLPASQRNDRPAIPNYYEAAIDAATFNKAQEILDKNRKGRTPASDNPLTINIFKGLFRCQCGASVHPTGTKNKYAGVYRCNNNPDGRCDVPPLKRKPFDKWMIDNFLGMIDVGNDGEAEGKIASLQHEVEIVTTRIKKATALLLEMDDITELKAQVKELNQKRTELQTMIDNMRRKASLTDKELPQLKDIDLMTKAGRVECQLILSKHLKGLTLGKDSVTVTLQNDTEIIVPTDPLPLNDGTSIFEIAEKELLEIDAYQL

SEQ ID NO: 30502 - DNA, 50 bp, Escherichia coli; identical to SEQ ID NO: 30087
  source 1..50: mol_type = genomic DNA

SEQ ID NO: 30503 - DNA, 40 bp, Escherichia coli; identical to SEQ ID NO: 20043
  source 1..40: mol_type = genomic DNA

SEQ ID NO: 30504 - DNA, 40 bp, Escherichia coli; identical to SEQ ID NO: 30164
  source 1..40: mol_type = genomic DNA

SEQ ID NO: 30505 - DNA, 50 bp, Escherichia coli; identical to SEQ ID NO: 7690
  source 1..50: mol_type = genomic DNA

SEQ ID NO: 30506 - protein, 506 aa, Escherichia coli
MRTVITYLRFSSAIQGAEGADSTRRQNELFKQWLRKNSDAQVVASFSDEGLSGYKGKHLTGQFGDMLARIEAGEFPAGTILLVESIDRIGRLEHLETEALMNRILGNGIEIHTLQDGLIYTKDALADDLGISIIQRVKAYIAHQESKQKSFRVSQKWEQRAKLALAGEQRLTKMVPGWIDPDTFKCNEHAETVRLIFKLLLDGESLHNIARHLQANNISSFSRRKDANGFSVHSVRTILRSVTTRGTLPASQRNDRPAIPNYYEAAIDAATFNKAQEILDKNRKGRTPASDNPLTINIFKGLFRCQCGASVHPTGTKNKYAGVYRCNNHLDGRCDVPPLKRKPFDRWMIDNFLGMIDVGNDGEAEGKIAALQHEVEIVTARIKKATALLLEMDDITELKTQVKGLNQKRTELQTTIDSMRRKTSLSDKGLPQLKDIDLMTKEGRVECQLILSKHLKGLTLGKDSVTVTLQNDTEITIPTNPLPLNDGSPIFEIADKELLDIDAYQL

SEQ ID NO: 30507 - DNA, 50 bp, Escherichia coli; identical to SEQ ID NO: 30087
  source 1..50: mol_type = genomic DNA

SEQ ID NO: 30508 - DNA, 40 bp, Escherichia coli; identical to SEQ ID NO: 20043
  source 1..40: mol_type = genomic DNA

SEQ ID NO: 30509 - DNA, 40 bp, Escherichia coli; identical to SEQ ID NO: 30164
  source 1..40: mol_type = genomic DNA

SEQ ID NO: 30510 - DNA, 50 bp, Escherichia coli; identical to SEQ ID NO: 7690
  source 1..50: mol_type = genomic DNA

SEQ ID NO: 30511 - protein, 506 aa, Escherichia coli
MRSVITYLRFSSAIQGAEGADSTRRQNDLFKQWLKKNSDAQVVASFSDEGLSGYKGKHLTGQFGDMLARIESGEFPEGTLLLVEAIDRIGRLEHLETEALMNRIIAHGIEIHTLQDGLIYTRDALSDDLGISIIQRVKSYVAHQESKQKSFRVSQKWKQRAKLALAGEQRLTKMVPGWIDPDTFKCNEHAETVRLIFKLLLDGESLHNIARHLQANNISSFSRRKDANGFSVHSVRTILRSETTIGTLPASQRNDRPAIPNYYEAAIDVSTFNKAQEILDKNRKGRTPASDNPLTINIFKGLFRCQCGASVHPTGTKNKYAGVYRCNNNPDGRCDVPPLKRKPFDKWMIDNFLGMIDVGNDGEAEGKIASLQHEVEIVTARIKKATALLLEMDDIDELKIQIKELNQRRTELQTTIDNMRRKASLTDKELPQLKDIDLTTKAGRVECQLILSKHLKGLTLGKDSVTVTLQNDTEITIPTNPLPLNDGTSIFEIADKELLDIDAYQL

SEQ ID NO: 30512 - DNA, 50 bp, Escherichia coli; identical to SEQ ID NO: 30087
  source 1..50: mol_type = genomic DNA

SEQ ID NO: 30513 - DNA, 40 bp, Escherichia coli; identical to SEQ ID NO: 20043
  source 1..40: mol_type = genomic DNA

SEQ ID NO: 30514 - DNA, 40 bp, Escherichia coli; identical to SEQ ID NO: 30164
  source 1..40: mol_type = genomic DNA

SEQ ID NO: 30515 - DNA, 50 bp, Escherichia coli; identical to SEQ ID NO: 7690
  source 1..50: mol_type = genomic DNA

SEQ ID NO: 30516 - protein, 506 aa, Escherichia coli
MRSVITYLRFSSAIQGAEGADSTRRQNDLFKQWLRKNSDAQVVASFSDEGLSGYKGKHLTGQFGDMLARIESGEFAEGTVLLVEAIDRIGRLEHLETEALMNRIIAHGIEIHTLQDGLIYTRDALSDDLGISIIQRVKSYVAHQESKQKSFRVSQKWKQRAKLALAGEQRLTKMVPGWIDPDTFKCNEHAETVRLIFKLLLDGESLHNIARHLQANNISSFSRRKDANGFSVHSVRTILRSETTIGTLPASQRNDRPAIPNYYEAAIDVSTFNKAQEILDKNRKGRTPASDNPLTINIFKGLFRCQCGASVHPTGTKNKYQGVYRCNSHLDGRCDVPPLKRKPFDRWMIDNFLGMIDVGNDGEAEKEIASLQHEVETVTARIKKATALLLEMDDITELKTQVKELNQKRTELQTTINTMKRKTSLSDKGLPQLKDIDLMTKAGRVECQLILSKHLKGLTLGKDSVIVTLQNDTEITIPTNPLPLNDGTSIFEIAEKELLEIDAYQL

SEQ ID NO: 30517 - DNA, 50 bp, Escherichia coli; identical to SEQ ID NO: 30087
  source 1..50: mol_type = genomic DNA

SEQ ID NO: 30518 - DNA, 40 bp, Escherichia coli; identical to SEQ ID NO: 20043
  source 1..40: mol_type = genomic DNA

SEQ ID NO: 30519 - DNA, 40 bp, Escherichia coli; identical to SEQ ID NO: 30164
  source 1..40: mol_type = genomic DNA

SEQ ID NO: 30520 - DNA, 50 bp, Escherichia coli; identical to SEQ ID NO: 7690
  source 1..50: mol_type = genomic DNA

SEQ ID NO: 30521 - protein, 506 aa, Escherichia coli
MRSVITYLRYSSAIQGAEGADSTRRQNDLFKQWLKKNSDAQVVASFSDEGLSGYKGKHLSGQFGDMLSRIESGEFPEGTVLLVESIDRIGRLEHLETEALMNRILGNGLEIHTLQDGLIYTKDALADDLGISIIQRVKSYIAHQESKQKSFRVSQKWEQRAKLALAGEQRLTKMVPGWIDPDTFKLNEHAETVRLIFKLLLDGESLHNIARHLQSNGIKSFSRRKDANGFSVHSVRTVLRSVSAIGTLPASQRNDRPAIPNYYEAAIDAATFNKAQEILDKNRKGRTPASDNPLTINIFKGLFRCQCGASVHPTGTKNKYAGVYRCNNHLDGRCDVPPLKRKPFDKWVLENFLGMIDVGNDGESERKIAALQHEVEIVTARIKKATALLLEMDDIDELKIQLKELNQKRTELQTTIDSMRRKASLTDKELPQLKDIDLTTKAGRVECQLILSKHLKGLTLGKDSVTVTLQNDTEITIPTNPLPLNDGSPIFEIADKELLDIDAYQL

SEQ ID NO: 30522 - DNA, 50 bp, Escherichia coli; identical to SEQ ID NO: 30087
  source 1..50: mol_type = genomic DNA

SEQ ID NO: 30523 - DNA, 40 bp, Escherichia coli; identical to SEQ ID NO: 20043
  source 1..40: mol_type = genomic DNA

SEQ ID NO: 30524 - DNA, 40 bp, Escherichia coli; identical to SEQ ID NO: 30164
  source 1..40: mol_type = genomic DNA

SEQ ID NO: 30525 - DNA, 50 bp, Escherichia coli; identical to SEQ ID NO: 7690
  source 1..50: mol_type = genomic DNA

SEQ ID NO: 30526 - protein, 506 aa, Escherichia coli
MRSVITYLRFSSAIQGAEGADSTRRQNELFKQWLRKNSDAQVVASFSDEGLSGYKGKHLTGQFGDMLARIESGEFPEGTILLVESIDRIGRLEHLETEALMNRILGNGLEIHTLQDGLIYTKDALADDLGISIIQRVKAYIAHQESKQKSFRVSEKWKQRAKLALAGKQRLTKMVPGWIDPDTFKLNEHAETVRLIFKLLLSGESLHNIARHLQSNGIKSFSRRKDANGFSVHSVRTILRSETTIGTLPASQRNDRPAIPNYYEAAIDASTFNKAQEILGKNRIGRTPASDNPLTINIFKGLFRCQCGASVHPTGTKNKYQGVYRCNNHLDGRCDVPPLKRKPFDKWMIDNFLGMIDVGNDGEAEGKIASLQHEVEIVTTRIKKATALLLEMDDIDELKIQLKELNQKRTELQTTIDNMRRKASLTDKELPQLKDIDLTTKAGRVECQLILSKHLKGLTLGKDSVTVTLQNDTEITIPTNPLPLNDGSPIFEIADKELLDIDAYQL

SEQ ID NO: 30527 - DNA, 50 bp, Escherichia coli; identical to SEQ ID NO: 30087
  source 1..50: mol_type = genomic DNA

SEQ ID NO: 30528 - DNA, 40 bp, Escherichia coli; identical to SEQ ID NO: 20043
  source 1..40: mol_type = genomic DNA

SEQ ID NO: 30529 - DNA, 40 bp, Escherichia coli; identical to SEQ ID NO: 30164
  source 1..40: mol_type = genomic DNA

SEQ ID NO: 30530 - DNA, 50 bp, Escherichia coli; identical to SEQ ID NO: 7690
  source 1..50: mol_type = genomic DNA

SEQ ID NO: 30531 - protein, 506 aa, Escherichia coli; identical to SEQ ID NO: 30106

SEQ ID NO: 30532 - DNA, 50 bp, Escherichia coli; identical to SEQ ID NO: 30087
  source 1..50: mol_type = genomic DNA

SEQ ID NO: 30533 - DNA, 40 bp, Escherichia coli; identical to SEQ ID NO: 20043
  source 1..40: mol_type = genomic DNA

SEQ ID NO: 30534 - DNA, 40 bp, Escherichia coli; identical to SEQ ID NO: 30164
  source 1..40: mol_type = genomic DNA

SEQ ID NO: 30535 - DNA, 50 bp, Escherichia coli; identical to SEQ ID NO: 7690
  source 1..50: mol_type = genomic DNA

SEQ ID NO: 30536 - protein, 506 aa, Escherichia coli
MRHVITYLRYSSAIQGAEGADSTRRQNDLFKQWLKKNSDAQVVASFNDEGLSGYKGKHLSGQFGDMLSRIESGEFSEGTVLLVEAIDRIGRLEHLETEALMNRILGNGIEIHTLQDGLIYTKDALSDDLGISIIQRVKSYIAHQESKQKSFRVSQKWEQRAKLALAGEQRLTRNVPGWIDPDTFKCNEHAETVRLIFKLLLDGESLHNIARHLQSNDIKSFSRRKDANGFSVHSVRTVLRSESVIGTLPASQRNDRPAIPNYYEAAIDASTFNKAQEILGKNRIGRTPASDNPLTINIFKGLFRCQCGASVHPTGTKNKYAGVYRCNNHLDGRCDVPPLKRKPFDKWMIDNFLGMIDVGNDGEAEGKIASLQHEVEIVTTRIKKATALLLEMDDITELKTQLKELNQKRTELQTTIDSMRRKTSLSDKGLPQLKDIDLMTKEGRVECQLILSKHLKGLTLGKDSVTVTLQNDTEITIPTNPLPLNDGSPIFEIADKELLDIDAYQL

SEQ ID NO: 30537 - DNA, 50 bp, Escherichia coli; identical to SEQ ID NO: 30087
  source 1..50: mol_type = genomic DNA

SEQ ID NO: 30538 - DNA, 40 bp, Escherichia coli; identical to SEQ ID NO: 20043
  source 1..40: mol_type = genomic DNA

SEQ ID NO: 30539 - DNA, 40 bp, Escherichia coli; identical to SEQ ID NO: 30164
  source 1..40: mol_type = genomic DNA

SEQ ID NO: 30540 - DNA, 50 bp, Escherichia coli; identical to SEQ ID NO: 7690
  source 1..50: mol_type = genomic DNA

SEQ ID NO: 30541 - protein, 506 aa, Escherichia coli
MRHVITYLRYSSAIQGAEGADSTRRQNDLFKQWLKKNSDAQVVASFNDEGLSGYKGKHLSGQFGDMLSRIESGEFPEGTILLVEAIDRIGRLEHLETEALMNRIIAHGIEIHTLQDGLIYTRDALSDDLGISIIQRVKSYIAHQESKQKSFRVSEKWKQRAKLALAGKQRLTKMVPGWIDPDTFKLNEHAETVRLIFKLLLDGESLHNIARHLQANNISSFSRRKDANGFSVHSVRTILRSETTIGTLPASQRNDRPAIPNYYEAAIDAATFNKAQEILDKNRKGRTPASDNPLTINIFKGLFRCQCGASVHPTGTKNKYAGVYRCNNNPDGRCDVPPLKRKPFDKWMIDNFLGMIDVGNDGEAEGKIAALQHEVEIVTARIKKATALLLEMDDITELKTQVKGLNQKRTELQTTIDNMRRKASLTDKELPQLKDIDLTTKAGRVECQLILSKHLKGLTLGKDSVIVTLQNDTEITIPTNPLPLNDGTSIFEIAEKELLEIDAYQL

SEQ ID NO: 30542 - DNA, 50 bp, Escherichia coli; identical to SEQ ID NO: 30087
  source 1..50: mol_type = genomic DNA

SEQ ID NO: 30543 - DNA, 40 bp, Escherichia coli; identical to SEQ ID NO: 20043
  source 1..40: mol_type = genomic DNA

SEQ ID NO: 30544 - DNA, 40 bp, Escherichia coli; identical to SEQ ID NO: 30164
  source 1..40: mol_type = genomic DNA

SEQ ID NO: 30545 - DNA, 50 bp, Escherichia coli; identical to SEQ ID NO: 7690
  source 1..50: mol_type = genomic DNA

SEQ ID NO: 30546 - protein, 506 aa, Escherichia coli
MRSVITYLRFSSAIQGAEGADSTRRQNDLFKQWLKKNSDAQVVASFSDEGLSGYKGKHLTGQFGDMLARIESGEFSEGTVLLVEAIDRIGRLEHLETEALMNRIIAHGIEIHTLQDGLIYTRDALSDDLGISIIQRVKSYVAHQESKQKSFRVSQKWKQRAKLALAGEQRLTKMVPGWIDPDTFKLNEHAETVRLIFKLLLSGESLHNIARHLQANNISSFSRRKDANGFSVHSVRTVLRSESVIGTLPASQRNDRPAIPNYYEAAIDAATFNKAQEILDKNRKGRTPASDNPLTINIFKGLFRCQCGASVHPTGTKNKYAGVYRCNNNPDGRCDVPPLKRKPFDKWVIDNFLGMIDVGNDGEAEGKIASLQHEVEIVTTRIKKATALLLEMDDITELKAQVKELNQKRTELQTTIDSMRRKTSLSDKGLPQLKDIDLMTKAGRVECQLILSKHLKGLTLGKDSVIVTLQNDTEITIPTNPLPLNDGTSIFEIAEKELLEIDAYQL

SEQ ID NO: 30547 - DNA, 50 bp, Escherichia coli; identical to SEQ ID NO: 30087
  source 1..50: mol_type = genomic DNA

SEQ ID NO: 30548 - DNA, 40 bp, Escherichia coli; identical to SEQ ID NO: 20043
  source 1..40: mol_type = genomic DNA

SEQ ID NO: 30549 - DNA, 40 bp, Escherichia coli; identical to SEQ ID NO: 30164
  source 1..40: mol_type = genomic DNA

SEQ ID NO: 30550 - DNA, 50 bp, Escherichia coli; identical to SEQ ID NO: 7690
  source 1..50: mol_type = genomic DNA

SEQ ID NO: 30551 - protein, 506 aa, Escherichia coli
MRTAITYLRYSSAIQGAEGADSTRRQNDLFKQWLKKNSDAQIVASFSDEGLSGYKGKHLTGQFGDMLARIEAGEFPAGTILLVESIDRIGRLEHLETEALMNRILCNGIEIHTLQDGLVYTKDALADDLGISIIQRVKAYIAHQESKQKSFRVSQKWGQRAKLALAGKQRLTKMVPGWIDPETFKLNEHAETVRLIFKLLLDGESLHNIARHLQANNISSFSRRKDANGFSVHSVRTVLRSESVIGTLPASQRNDRPAIPNYYEAAIDAATFNKAQEILDKNRKGRTPASDNPLTINIFKGLFRCQCGASVHPTGTKNKYAGVYRCNNHLDGRCDVPPLKRKPFDKWVLENFLGMIDVGNDGESERKIAALQHEVEIVTARIKKATALLLEMDDIDELKIQLKELNQRRTELQTTIDSMRRKTSLTDKELPQLKDIDLTTKAGRVECQLILSKHLKGLTLGKGSVTITLQNDTEITIPTNPLPLNDGSPIFEIADKELLDIDAYQL

SEQ ID NO: 30552 - DNA, 50 bp, Escherichia coli; identical to SEQ ID NO: 30087
  source 1..50: mol_type = genomic DNA

SEQ ID NO: 30553 - DNA, 40 bp, Escherichia coli; identical to SEQ ID NO: 20043
  source 1..40: mol_type = genomic DNA

SEQ ID NO: 30554 - DNA, 40 bp, Escherichia coli; identical to SEQ ID NO: 30164
  source 1..40: mol_type = genomic DNA

SEQ ID NO: 30555 - DNA, 50 bp, Escherichia coli; identical to SEQ ID NO: 7690
  source 1..50: mol_type = genomic DNA

SEQ ID NO: 30556 - protein, 506 aa, Escherichia coli
MRSVITYLRFSSAIQGAEGADSTRRQNDLFKQWLKKNSDAQVVASFSDEGLSGYKGKHLTGQFGDMLARIESGEFSEGTVLLVEAIDRIGRLEHLETEALMNRIIAHGIEIHTLQDGLIYTRDALSDDLGISIIQRVKSYVAHQESKQKSFRVSQKWKQRAKLALAGEQRLTKMVPGWIDPDTFKCNKHAETVRLIFKLLLDGESLHNIARHLQANNISSFSRRKDANGFSVHSVRTILRSETTIGTLPASQRNDRPAIPNYYEAAIDASTFNKAQEILDKNRKGRTPASDNPLTINIFKGLFRCQCGASVHPTGTKNKYQGVYRCNNHLDGRCDVPPLKRKPFDKWMIDNFLGMIDVGNDGEAEGKIASLQHEVEIVTTRIKKATALLLEMDDITELKAQVKELNQKRTELQTTIDSMRRKTSLSDKGLPQLKDIDLMTKAGRVECQLILSKHLKGLTLGKDSVTVTLQNDTEITIPTNPLPLNDGTSIFEIAEKELLEIDAYQL

SEQ ID NO: 30557 - DNA, 50 bp, Escherichia coli; identical to SEQ ID NO: 30087
  source 1..50: mol_type = genomic DNA

SEQ ID NO: 30558 - DNA, 40 bp, Escherichia coli; identical to SEQ ID NO: 20043
  source 1..40: mol_type = genomic DNA

SEQ ID NO: 30559 - DNA, 40 bp, Escherichia coli; identical to SEQ ID NO: 30164
  source 1..40: mol_type = genomic DNA

SEQ ID NO: 30560 - DNA, 50 bp, Escherichia coli; identical to SEQ ID NO: 7690
  source 1..50: mol_type = genomic DNA

SEQ ID NO: 30561 - protein, 506 aa, Escherichia coli
MRSVITYLRFSSAIQGAEGADSTRRQNDLFKQWLKKNSDAQVVASFSDEGLSGYKGKHLTGQFGDMLARIESGEFPEGTLLLVEAIDRIGRLEHLETEALMNRIIAHGIEIHTLQDGLIYTRDALSDDLGISIIQRVKSYVAHQESKQKSFRVSQKWKQRAKLALAGEQRLTKMVPGWIDPDTFKCNEHAETVRLIFKLLLDGESLHNIARHLQSNDIKSFSRRKDANGFSVHSVRTVLRSESVIGTLPASQRNDRPAIPNYYEAAIDASTFNKAQEILDKNRKGRTPASDNPLTINIFKGLFRCQCGASVHPTGTKNKYAGVYRCNNNPDGRCDVPPLKRKPFDKWMIDNFLGMIDVGNDGESERKIAALQHEVEIVTARIKKATALLLEMDDITELKAQVKGLNQKRTEIQTTIDTLKRKTSLTDKELPQLKDIDLMTKAGRVECQLILSKHLKGLTLGKDSVIVTLQNDTEIIVPTDPLPLNDGTSIFEIAEKELLEIDAYQL

SEQ ID NO: 30562 - DNA, 50 bp, Escherichia coli; identical to SEQ ID NO: 30087
  source 1..50: mol_type = genomic DNA

SEQ ID NO: 30563 - DNA, 40 bp, Escherichia coli; identical to SEQ ID NO: 20043
  source 1..40: mol_type = genomic DNA

SEQ ID NO: 30564 - DNA, 40 bp, Escherichia coli; identical to SEQ ID NO: 30164
  source 1..40: mol_type = genomic DNA

SEQ ID NO: 30565 - DNA, 50 bp, Escherichia coli; identical to SEQ ID NO: 7690
  source 1..50: mol_type = genomic DNA

SEQ ID NO: 30566 - protein, 506 aa, Escherichia coli
MRTVITYLRFSSATQGAEGADSTRRQNELFKQWLRKNSDAQVVASFSDEGLSGYKGKHLTGQFGDMLARIESGEFSEGTVLLVEAIDRIGRLEHLETEALMNRIIAHGIEIHTLQDGLIYTRDALSDDLGISIIQRVKSYVAHQESKQKSFRVSQKWKQRAKLALAGEQRLTKMVPGWIDPDTLKLNEHAETVRLIFKLLLSGESLHNIARHLQANNISSFSRRKDANGFSVHSVRTVLRSESVIGTLPASQRNDRPAIPNYYEAAIDAATFNKAQEILDKNRKGRTPASDNPLTINIFKGLFRCQCGASVHPTGTKNKYAGVYRCNNHLDGRCDVPPLKRKPFDKWMIDNFLGMIDVGNDGEAEGKIASLQHEVEIVTTRIKKATALLLEMDDITELKTQVKELNQKRTELQTTIDSMRRKTSLSDKGLPQLKDIDLMTKEGRVECQLILSKHLKGLTLGKDSVTVTLQNDTEITIPTNPLPLNDGSPIFEIADKELLDIDAYQL

SEQ ID NO: 30567 - DNA, 50 bp, Escherichia coli; identical to SEQ ID NO: 30087
  source 1..50: mol_type = genomic DNA

SEQ ID NO: 30568 - DNA, 40 bp, Escherichia coli; identical to SEQ ID NO: 20043
  source 1..40: mol_type = genomic DNA

SEQ ID NO: 30569 - DNA, 40 bp, Escherichia coli; identical to SEQ ID NO: 30164
  source 1..40: mol_type = genomic DNA

SEQ ID NO: 30570 - DNA, 50 bp, Escherichia coli; identical to SEQ ID NO: 7690
  source 1..50: mol_type = genomic DNA

SEQ ID NO: 30571 - protein, 499 aa, Escherichia coli
MRFSSATQGAEGADSTRRQNELFKQWLRKNSDAQVVASFSDEGLSGYKGKHLTGQFGDMLARIESGEFSEGTVLLVEAIDRIGRLEHLETEALMNRIIAHGIEIHTLQDGLIYTRDALSDDLGISIIQRVKSYVAHQESKQKSFRVSQKWKQRAKLALAGEQRLTRNVPGWIDPDTFKCNEHAETVRLIFKLLLDGESLHNIARHLQANNISSFSRRKDANGFSVHSVRTILRSETTRGTLPASQRNDRPAIPNYYEAAIDAATFNKAQEILDKNRKGRTPASDNPLTINIFKGLFRCQCGASVHPTGTKNKYQGVYRCNNHLDGRCDVPPLKRKPFDKWMIDNFLGMIDVGNDGEAEGKIAALQHEVEIVTARIKKATALLLEMDDITELKTQVKGLNQKRTELQTTIDNMRRKASLTDKELPQLKDIDLTTKAGRVECQLILSKHLKGLTLGKDSVIVTLQNDTEITIPTDPLPLNDGTSIFEIAEKNLLNIDTFQL

SEQ ID NO: 30572 - DNA, 50 bp, Escherichia coli; identical to SEQ ID NO: 30087
  source 1..50: mol_type = genomic DNA

SEQ ID NO: 30573 - DNA, 40 bp, Escherichia coli; identical to SEQ ID NO: 20043
  source 1..40: mol_type = genomic DNA

SEQ ID NO: 30574 - DNA, 40 bp, Escherichia coli; identical to SEQ ID NO: 30164
  source 1..40: mol_type = genomic DNA

SEQ ID NO: 30575 - DNA, 50 bp, Escherichia coli; identical to SEQ ID NO: 7690
  source 1..50: mol_type = genomic DNA

SEQ ID NO: 30576 - protein, 506 aa, Escherichia coli
MRTVITYLRFSSAIQGAEGADSTRRQNDLFKQWLKKNSDAQVVASFSDEGLSGYKGKHLTGQFGDMLARIESGEFPEGTILLVEAIDRIGRLEHLETEALMNRIIAHGIEIHTLQDGLIYTRDALSDDLGISIIQRVKSYVAHQESKQKSFRVSQKWKQRAKLALAGEQRLTKMVPGWIDPDTFKCNEHAETVRLIFKLLLDGESLHNIARHLQANNISSFSRRKDANGFSVHSVRTILRSETTRGTLPASQRNDRPAIPNYYEAAIDAATFNKAQEILDKNRKGRTPASDNPLTINIFKGLFRCQCGASVHPTGTKNKYQGVYRCNNHLDGRCDVPPLKRKPFDKWMIDNFLGMIDVGNDGEAEGKIAALQHEVEIVTARIKKATALLLEMDDITELKTQVKGLNQKRTELQTTIDNMRRKASLTDKELPQLKDIDLTTKAGRVECQLILSKHLKGLTLGKDSVTVTLQNDTEITIPTNPLPLNDGTSIFEIAEKNLLNIDTFQL

SEQ ID NO: 30577 - DNA, 50 bp, Escherichia coli; identical to SEQ ID NO: 30087
  source 1..50: mol_type = genomic DNA

SEQ ID NO: 30578 - DNA, 40 bp, Escherichia coli; identical to SEQ ID NO: 20043
  source 1..40: mol_type = genomic DNA

SEQ ID NO: 30579 - DNA, 40 bp, Escherichia coli; identical to SEQ ID NO: 30164
  source 1..40: mol_type = genomic DNA

SEQ ID NO: 30580 - DNA, 50 bp, Escherichia coli; identical to SEQ ID NO: 7690
  source 1..50: mol_type = genomic DNA

SEQ ID NO: 30581 - protein, 506 aa, Escherichia coli
MRSVITYLRYSSAIQGAEGADSTRRQNDLFRQWLKKNIDAQVVASFSDEGLSGYKGKHLSGQFGDMLSRIESGEFPEGTILLVESIDRIGRLEHLETEALMNRILGNGLEIHTLQDGLIYTKDALADDLGISIIQRVKAYIAHQESKQKSFRVSQKWGQRAKLALAGEQRLTKMVPGWIDPETFKLNEHAETVRLIFKLLLDGESLHNIARHLQSNGIKSFSRRKDANGFSVHSVRTILRSETTIGTLPASQRNDRPAIPNYYEAAIDASTFNKAQEILDKNRKGRTPASDNPLTINIFKGLFRCQCGASVHPTGTKNKYAGVYRCNNHLDGRCDVQPLKRKPFDKWVLENFLGMIDVGNDGESERKIAALQHEVEIVTARIKKATALLLEMDDITELKTQVKGLNQKRTEIQTTIDTLKRKTSLSDKGLPQLKDIDLMTKAGRVECQLILSKHLKGLTLGKDSVTVTLQNDTEITIPTNPLPLNDGSPIFEIADKELLDVDIYRL

SEQ ID NO: 30582 - DNA, 50 bp, Escherichia coli; identical to SEQ ID NO: 30087
  source 1..50: mol_type = genomic DNA

SEQ ID NO: 30583 - DNA, 40 bp, Escherichia coli; identical to SEQ ID NO: 20043
  source 1..40: mol_type = genomic DNA

SEQ ID NO: 30584 - DNA, 40 bp, Escherichia coli; identical to SEQ ID NO: 30164
  source 1..40: mol_type = genomic DNA

SEQ ID NO: 30585 - DNA, 50 bp, Escherichia coli; identical to SEQ ID NO: 7690
  source 1..50: mol_type = genomic DNA

SEQ ID NO: 30586 - protein, 506 aa, Escherichia coli
MRSVITYLRFSSATQGAEGADSTRRQNELFKQWLRKNSDAQVVASFNDEGLSGYKGKHLSGQFGDMLSRIESGEFPEGTILLVEAIDRIGRLEHLETEALMNRIIAHGIEIHTLQDGLIYTRDALSDDLGISIIQRVKSYIAHQESKQKSFRVSQKWEQRAKLALAGEQRLTRNVPGWIDPDTFKCNEHAETVRLIFKLLLSGESLHHIARHLQANNISSFSRRKDANGFSVHSVRTILRSETTIGTLPASQRNDRPAIPNYYEAAIDASTFNKAQEILGKNRIGRTPASDNPLTINIFKGLFRCQCGASVHPTGTKNKYQGVYRCNNHLDGRCDVPPLKRKPFDRWMIDNFLGMIDVVSDGETERRIAALQHEVETLTARIKKATALLLEMDDITELKAQAKELNQKRTELQTTIDSMRRKTSLSDKGLPQLKDIDLTTKAGRVECQLILSKHLKGLTLGKDSVTVTLQNDTEITIPTNPLPLNDGSPIFEIADKELLDIDAYQL

SEQ ID NO: 30587 - DNA, 50 bp, Escherichia coli; identical to SEQ ID NO: 30087
  source 1..50: mol_type = genomic DNA

SEQ ID NO: 30588 - DNA, 40 bp, Escherichia coli; identical to SEQ ID NO: 20043
  source 1..40: mol_type = genomic DNA

SEQ ID NO: 30589 - DNA, 40 bp, Escherichia coli; identical to SEQ ID NO: 30164
  source 1..40: mol_type = genomic DNA

SEQ ID NO: 30590 - DNA, 50 bp, Escherichia coli; identical to SEQ ID NO: 7690
  source 1..50: mol_type = genomic DNA

SEQ ID NO: 30591 - protein, 506 aa, Escherichia coli
MRTVITYLRFSSAIQGAEGADSTRRQNELFKQWLRKNSDAQVVASFSDEGLSGYKGKHLTGQFGDMLARIEAGEFPAGTILLVESIDRIGRLEHLETEALMNRILGNGIEIHTLQDGLIYTKDALADDLGISIIQRVKAYIAHQESKQKSFRVSQKWEQRAKLALAGEQRLTKMVPGWIDPDTFKCNEHAETVRLIFKLLLDGESLHNIARHLQSNDIKSFSRRKDANGFSVHSVRTILRSETTRGTLPASQRNDRPAIPNYYEAAIDAATFNKAQEILDKNRKGRTPASDNPLTINIFKGLFRCQCGASVHPTGTKNKYQGVYRCNNHLDGRCDVPPLKRKPFDKWMIDNFLGMIDVGNDGESERKIAALQHEVEIVTARIKKATALLLEMDDITELKTQVKGLNQKRTELQTTIDNMRRKASLTDKELPQLKDIDLTTKAGRVECQLILSKHLKGLTLGKDSVTVTLQNDTEITIPTDPLPLNDGTSIFEIAEKNLLNIDTFQL

SEQ ID NO: 30592 - DNA, 50 bp, Escherichia coli; identical to SEQ ID NO: 30087
  source 1..50: mol_type = genomic DNA

SEQ ID NO: 30593 - DNA, 40 bp, Escherichia coli; identical to SEQ ID NO: 20043
  source 1..40: mol_type = genomic DNA

SEQ ID NO: 30594 - DNA, 40 bp, Escherichia coli; identical to SEQ ID NO: 30164
  source 1..40: mol_type = genomic DNA

SEQ ID NO: 30595 - DNA, 50 bp, Escherichia coli; identical to SEQ ID NO: 7690
  source 1..50: mol_type = genomic DNA

SEQ ID NO: 30596 - protein, 506 aa, Escherichia coli
MRTVITYLRFSSAIQGAEGADSTRRQNDLFKQWLKKNSDAQVVASFSDEGLSGYKGKHLTGQFGDMLARIESGEFPEGTILLVEAIDRIGRLEHLETEALMNRIIAHGIEIHTLQDGLIYTRDALSDDLGISIIQRVKSYVAHQESKQKSFRVSQKWKQRAKLALAGEQRLTKMVPGWIDPDTFKCNEHAETVRLIFKLLLSGESLHNIARHLQANNISSFSRRKDANGFSVHSVRTILRSETTRGTLPASQRNDRPAIPNYYEAAIDAATFNKAQEILDKNRKGRTPASDNPLTINIFKGLFRCQCGASVHPTGTKNKYQGVYRCNNHLDGRCDVPPLKRKPFDKWMIDNFLGMIDVGNDGEAEGKIAALQHEVEIVTARIKKATALLLEMDDITELKTQVKELNQRRTELQTTIDNMRRKTSLSDKELPQLKDIDLTTKAGRVECQLILSKHLKGLTLGKDSVTVTLQNDTEITIPTNPLPLNDGSPIFEIADKELLDIDAYQL

SEQ ID NO: 30597 - DNA, 50 bp, Escherichia coli; identical to SEQ ID NO: 30087
  source 1..50: mol_type = genomic DNA

SEQ ID NO: 30598 - DNA, 40 bp, Escherichia coli; identical to SEQ ID NO: 20043
  source 1..40: mol_type = genomic DNA

SEQ ID NO: 30599 - DNA, 40 bp, Escherichia coli; identical to SEQ ID NO: 30164
  source 1..40: mol_type = genomic DNA

SEQ ID NO: 30600 - DNA, 50 bp, Escherichia coli; identical to SEQ ID NO: 7690
  source 1..50: mol_type = genomic DNA

SEQ ID NO: 30601 - protein, 506 aa, Escherichia coli
MRHVITYLRYSSAIQGAEGADSTRRQNDLFKQWLKKNSDAQVVASFNDEGLSGYKGKHLSGQFGDMLSRIESGEFSEGTVLLVEAIDRIGRLEHLETEALMNRIIAHGIEIHTLQDGLIYTRDALSDDLGISIIQRVKSYIAHQESKQKSFRVSQKWEQRAKLALAGEQRLTRNVPGWIDPDTFKCNEHAETVRLIFKLLLDGESLHNIARHLQSNDIKSFSRRKDANGFSVHSVRTVLRSESVIGTLPASQRNDRPAIPNYYEAAIDAATFNKAQEILDKNRKGRTPASDNPLTINIFKGLFRCQCGASVHPTGTKNKYAGVYRCNNHLDGRCDVPPLKRKPFDKWMIDNFLGMIDVGNDGEAEGKIASLQHEVEIVTTRIKKATALLLEMDDITELKTQVKELNQKRTELQTTIDSMRRKTSLSDKGLPQLKDIDLMTKEGRVECQLILSKHLKGLTLGKDSVTVTLQNDTEITIPTNPLPLNDGSPIFEIADKELLDIDAYQL

SEQ ID NO: 30602 - DNA, 50 bp, Escherichia coli; identical to SEQ ID NO: 30087
  source 1..50: mol_type = genomic DNA

SEQ ID NO: 30603 - DNA, 40 bp, Escherichia coli; identical to SEQ ID NO: 20043
  source 1..40: mol_type = genomic DNA

SEQ ID NO: 30604 - DNA, 40 bp, Escherichia coli; identical to SEQ ID NO: 30164
  source 1..40: mol_type = genomic DNA

SEQ ID NO: 30605 - DNA, 50 bp, Escherichia coli; identical to SEQ ID NO: 7690
  source 1..50: mol_type = genomic DNA

SEQ ID NO: 30606 - protein, 506 aa, Escherichia coli
MRHVITYLRYSSATQGAEGADSTRRQNELFKQWLRKNSDAQVVASFNDEGLSGYKGKHLSGQFGDMLSRIESGEFSKGTILLVEAIDRIGRLEHLETEALMNRIIAHGIEIHTLQDGLIYTRDALSDDLGISIIQRVKSYLAHQESKQKSFRVSEKWKQRAKLALAGEQRLTKMVPGWIDPETFKLNEHAETVRLIFKLLLDGESLHNIARHLQANNISSFSRRKDANGFSVHSVRTILRSETTIGTLPASQRNDRPAIPNYYEAAIDAATFNKAQEILDKNRKGRTPASDNPLTINIFKGLFRCQCGASVHPTGTKNKYQGVYRCNNHLDGRCDVPPLKRKPFDKWMIDNFLGMIDVGNDGEAEGKIASLQHEVEIVTTRIKKATALLLEMDDIDELKIQLKELNQKRTELQTTIDNMRRKASLTDKELPQLKDIDLTTKAGRVECQLILSKHLKGLTLGKDTVTVTLQNDTEITIPTDPLPLNDGTSIFEIAEKNLLNIDTFQL

SEQ ID NO: 30607 - DNA, 50 bp, Escherichia coli; identical to SEQ ID NO: 30087
  source 1..50: mol_type = genomic DNA

SEQ ID NO: 30608 - DNA, 40 bp, Escherichia coli; identical to SEQ ID NO: 20043
  source 1..40: mol_type = genomic DNA

SEQ ID NO: 30609 - DNA, 40 bp, Escherichia coli; identical to SEQ ID NO: 30164
  source 1..40: mol_type = genomic DNA

SEQ ID NO: 30610 - DNA, 50 bp, Escherichia coli; identical to SEQ ID NO: 7690
  source 1..50: mol_type = genomic DNA

SEQ ID NO: 30611 - protein, 499 aa, Escherichia coli
MRFSSATQGAEGADSTRRQNELFKQWLRKNSDAQVVASFSDEGLSGYKGKHLTGQFGDMLARIEAGEFPAGAILLVESIDRIGRLEHLETEALMNRIIAHGIEIHTLQDGLIYTRDALSDDLGISIIQRVKSYLAHQESKQKSFRVSEKWKQRAKLALAGEQHLTRNVPGWIDPDTFKCNEHAETVRLIFKLLLDGESLHNIARHLQSNDIKSFSRRKDANGFSVHSVRTVLRSESVIGTLPASQRNDRPAIPNYYEAAIDASTFNKAQEILDKNRKGRTPASDNPLTINIFKGLFRCQCGASVHPTGTKNKYQGVYRCNSHLDGRCDVPPLKRKPFDRWMIDNFLGMIDVGNDGEAEKEIASLQHEVETVTARIKKATALLLEMDDITELKTQVKELNQKRTELQTTINTMKRKTSLSDKGLPQLKDIDLMTKAGRVECQLILSKHLKGLTLGKDSVTVTLQNDTEITIPTNPLPLNDGSPIFEIADKELLDIDAYQL

SEQ ID NO: 30612 - DNA, 50 bp, Escherichia coli; identical to SEQ ID NO: 30087
  source 1..50: mol_type = genomic DNA

SEQ ID NO: 30613 - DNA, 40 bp, Escherichia coli; identical to SEQ ID NO: 20043
  source 1..40: mol_type = genomic DNA

SEQ ID NO: 30614 - DNA, 40 bp, Escherichia coli; identical to SEQ ID NO: 30164
  source 1..40: mol_type = genomic DNA

SEQ ID NO: 30615 - DNA, 50 bp, Escherichia coli; identical to SEQ ID NO: 7690
  source 1..50: mol_type = genomic DNA

SEQ ID NO: 30616 - protein, 499 aa, Escherichia coli
MRFSSATQGAEGADSTRRQNELFKQWLRKNSDAQVVASFSDEGLSGYKGKHLTGQFGDMLARIESGEFSEGTVLLVEAIDRIGRLEHLETEALMNRIIAHGIEIHTLQDGLIYTRDALSDDLGISIIQRVKSYVAHQESKQKSFRVSQKWKQRAKLALAGEQRLTKMVPGWIDPDTFKCNEHAETVRLIFKLLLDGESLHNIARHLQANNISSFSRRKDANGFSVHSVRTILRSETTIGTLPASQRNDRPAIPNYYEAAIDAATFNKAQEILDKNRKGRTPASDNPLTINIFKGLFRCQCGASVHPTGTKNKYAGVYRCNNNPDGRCDVPPLKRKPFDKWMIDNFLGMIDVGNDGEAEGKIASLQHEVEIVTARIKKATALLLEMDDIDELKIQLKELNQKRTELQTMIDNMRRKASLTDKELPQLKDIDLMTKAGRVECQLILSKHLKGLTLGKDSVTVTLQNDTEIIVPTDPLPLNDGTSIFEIAEKELLEIDAYQL

SEQ ID NO: 30617 - DNA, 50 bp, Escherichia coli; identical to SEQ ID NO: 30087
  source 1..50: mol_type = genomic DNA

SEQ ID NO: 30618 - DNA, 40 bp, Escherichia coli; identical to SEQ ID NO: 20043
  source 1..40: mol_type = genomic DNA

SEQ ID NO: 30619 - DNA, 40 bp, Escherichia coli; identical to SEQ ID NO: 30164
  source 1..40: mol_type = genomic DNA

SEQ ID NO: 30620 - DNA, 50 bp, Escherichia coli; identical to SEQ ID NO: 7690
  source 1..50: mol_type = genomic DNA

SEQ ID NO: 30621 - protein, 506 aa, Escherichia coli; identical to SEQ ID NO: 30121

SEQ ID NO: 30622 - DNA, 50 bp, Escherichia coli; identical to SEQ ID NO: 30087
  source 1..50: mol_type = genomic DNA

SEQ ID NO: 30623 - DNA, 40 bp, Escherichia coli; identical to SEQ ID NO: 20043
  source 1..40: mol_type = genomic DNA

SEQ ID NO: 30624 - DNA, 40 bp, Escherichia coli; identical to SEQ ID NO: 30164
  source 1..40: mol_type = genomic DNA

SEQ ID NO: 30625 - DNA, 50 bp, Escherichia coli; identical to SEQ ID NO: 7690
  source 1..50: mol_type = genomic DNA

SEQ ID NO: 30626 - protein, 506 aa, Escherichia coli
MRSVITYLRYSSAIQGAEGADSTRRQNDLFRQWLKKNIDAQVVASFSDEGLSGYKGKHLSGQFGDMLSRIESGEFPEGTILLVESIDRIGRLEHLETEALMNRILGNGIEIHTLQDGLVYTKDALADDLGISIIQRVKAYIAHQESKQKSFRVSQKWKQRAKLALAGEQRLTKMVPGWIDPDTFKLNEHAETVRLIFKLLLSGESLHNIARHLQSNGIKSFSRRKDANGFSVHSVRTILRSETTIGTLPASQRNDRPAIPNYYECVVDMPTFNKAQEILDKNRKGRTPASDNPLTINIFKGLFRCQCGASVHPTGTKNKYAGVYRCNNHLDGRCDVQPLKRKPFDRWMIDNFLGMIDVGNDGESERKVAALQHEVEIVTSRIKKATALLLEMDDITELKAQVKELNQKRTELQTTINTMKRKTSLSDKGLPQLKDIDLMTKAGRVECQLILSKHLKGLTLGKGSVTVTLQNDTEIIVPTDPLPLNDGTSIFEIAEKELLDIDAYRL

SEQ ID NO: 30627 - DNA, 50 bp, Escherichia coli; identical to SEQ ID NO: 30087
  source 1..50: mol_type = genomic DNA

SEQ ID NO: 30628 - DNA, 40 bp, Escherichia coli; identical to SEQ ID NO: 20043
  source 1..40: mol_type = genomic DNA

SEQ ID NO: 30629 - DNA, 40 bp, Escherichia coli; identical to SEQ ID NO: 30164
  source 1..40: mol_type = genomic DNA

SEQ ID NO: 30630 - DNA, 50 bp, Escherichia coli; identical to SEQ ID NO: 7690
  source 1..50: mol_type = genomic DNA

SEQ ID NO: 30631 - protein, 506 aa, Escherichia coli
MRTVITYLRFSSATQGAEGADSTRRQNELFKQWLRKNSDAQVVASFSDEGLSGYKGKHLTGQFGDMLARIEAGEFPAGTVLLVEAIDRIGRLEHLETEALMNRIIAHGIEIHTLQDGLIYTRDALSDDLGISIIQRVKSYLAHQESKQKSFRVSQKWKQRAKLALAGEQRLTKMVPGWIDPDTFKCNEHAETVRLIFKLLLDGESLHNIARHLQSNDIKSFSRRKDANGFSVHSVRTVLRSVSAIGTLPASQRNDRPAIPNYYEAAIDAATFNKAQEILDKNRKGRTPASDNPLTINIFKGLFRCQCGASVHPTGTKNKYAGVYRCNSHLDGRCDVPPLKRKPFDKWMIDNFLGMIDVGNDGEAEGKIASLQHEVEIVTTRIKKATALLLEMDDITELKTQVKELNQKRTELQATIDSMRRKTSLSDKGLPQLKDIDLMTKEGRVECQLILSKHLKGLTLGKDSVTVTLQNDTEITIPTNPLPLNDGTSIFEIADKELLDIDAYQL

SEQ ID NO: 30632 - DNA, 50 bp, Escherichia coli; identical to SEQ ID NO: 30087
  source 1..50: mol_type = genomic DNA

SEQ ID NO: 30633 - DNA, 40 bp, Escherichia coli; identical to SEQ ID NO: 20043
  source 1..40: mol_type = genomic DNA

SEQ ID NO: 30634 - DNA, 40 bp, Escherichia coli; identical to SEQ ID NO: 30164
  source 1..40: mol_type = genomic DNA

SEQ ID NO: 30635 - DNA, 50 bp, Escherichia coli; identical to SEQ ID NO: 7690
  source 1..50: mol_type = genomic DNA

SEQ ID NO: 30636 - protein, 506 aa, Salmonella enterica
MRSVITYLRFSSAIQGAEGADSTRRQNDLFKQWLKKNSDAQVVASFSDEGLSGYKGKHLTGQFGDMLARIESGEFPEGTLLLVEAIDRIGRLEHLETEALMNRIIAHGIEIHTLQDGLIYTRDALSDDLGISIIQRVKSYVAHQESKQKSFRVSQKWKQRAKLALAGEQRLTKMVPGWIDPDTFKCNEHAETVRLIFKLLLDGESLHNIARHLQANNISSFSRRKDANGFSVHSVRTILRSETTRGTLPASQRNDRPAIPNYYEAAIDASTFNKAQEILDKNRKGRTPASDNPLTINIFKGLFRCQCGASVHPTGTKNKYAGVYRCNNHLDGRCDVPPLKRKPFDRWMIDNFLGMIDVGNDGESERKIAALQHEVEIVTARIKKATALLLEMDDITELKAQVKGLNQKRTEIQTTIDTLKRKTSLTDKELPQLKDIDLTTKAGRVECQLILSKHLKGLTLGKDSVTVTLQNDTEITIPTNPLPLNDGSPIFEIADKELLDIDAYQL

SEQ ID NO: 30637 - DNA, 50 bp, Salmonella enterica; identical to SEQ ID NO: 30087
  source 1..50: mol_type = genomic DNA

SEQ ID NO: 30638 - DNA, 40 bp, Salmonella enterica; identical to SEQ ID NO: 5263
  source 1..40: mol_type = genomic DNA

SEQ ID NO: 30639 - DNA, 40 bp, Salmonella enterica; identical to SEQ ID NO: 30094
  source 1..40: mol_type = genomic DNA

SEQ ID NO: 30640 - DNA, 50 bp, Salmonella enterica; identical to SEQ ID NO: 7690
  source 1..50: mol_type = genomic DNA

SEQ ID NO: 30641 - protein, 506 aa, Escherichia coli
MRTVITYLRFSSATQGAEGADSTRRQNELFKQWLRKNSDAQVVASFSDEGLSGYKGKHLTGQFGDMLARIESGEFSEGTVLLVEAIDRIGRLEHLETEALMNRIIAHGIEIHTLQDGLIYTRDALSDDLGISIIQRVKSYVAHQESKQKSFRVSQKWKQRAKLALAGEQRLTKMVPGWIDPDTFKCNEHAETVRLIFKLLLDGESLHNIARHLQANNISSFSRRKDANGFSVHSVRTILRSETTIGTLPASQRNDRPAIPNYYEAAIDAATFNKAQEILDKNRKGRTPASDNPLTINIFKGLFRCQCGASVHPTGTKNKYAGVYRCNNNPDGRCDVPPLKRKPFDKWMIDNFLGMIDVGNDGEAEGKIASLQHEVEIVTARIKKATALLLEMDDIDELKIQLKELNQKRTELQTMIDNMRRKASLTDKELPQLKDIDLMTKAGRVECQLILSKHLKGLTLGKDSVTVTLQNDTEIIVPTDPLPLNDGTSIFEIAEKELLEIDAYQL

SEQ ID NO: 30642 - DNA, 50 bp, Escherichia coli; identical to SEQ ID NO: 30087
  source 1..50: mol_type = genomic DNA

SEQ ID NO: 30643 - DNA, 40 bp, Escherichia coli; identical to SEQ ID NO: 20043
  source 1..40: mol_type = genomic DNA

SEQ ID NO: 30644 - DNA, 40 bp, Escherichia coli; identical to SEQ ID NO: 30164
  source 1..40: mol_type = genomic DNA

SEQ ID NO: 30645 - DNA, 50 bp, Escherichia coli; identical to SEQ ID NO: 7690
  source 1..50: mol_type = genomic DNA

SEQ ID NO: 30646 - protein, 506 aa, Escherichia coli
MRSVITYLRYSSAIQGAEGADSTRRQNDLFKQWLKKNGDAQIVASFSDEGLSGYKGKHLTGQFGDMLARIEAGEFPEGTILLVESIDRIGRLEHLETEALMNRILGNGIEIHTLQDGLIYTKDALADDLGISIIQRVKAYIAHQESKQKSFRVSQKWGHRAKLALAGEQRLTKMVPGWIDPDTFKINEHAETVRLIFKLLLDGESLHNIARHLQSNGIKSFSRRKDANGFSVHSVRTVLRSESVIGTLPASQRNDRPAIPNYYEAAIDAATFNKAQEILDKNRKGRTPASDNPLTINIFKGLFRCQCGASVHPTGTKNKYAGVYRCNNHLDGRCDVPPLKRKPFDKWMIDNFLGMIDVGNDGESERKIAALQHEVEIVTARIKKATALLLEMDDIDELKIQIKELNQRRTELQTTIDSMRRKASLTDKELPQLKDIDLTTKAGRVECQLILSKHLKGLTLGKDSVTVTLQNDTEITIPTNPLPLNDGSPIFEIADKELLDIDAYQL

SEQ ID NO: 30647 - DNA, 50 bp, Escherichia coli; identical to SEQ ID NO: 30087
  source 1..50: mol_type = genomic DNA

SEQ ID NO: 30648 - DNA, 40 bp, Escherichia coli; identical to SEQ ID NO: 20043
  source 1..40: mol_type = genomic DNA

SEQ ID NO: 30649 - DNA, 40 bp, Escherichia coli; identical to SEQ ID NO: 30164
  source 1..40: mol_type = genomic DNA

SEQ ID NO: 30650 - DNA, 50 bp, Escherichia coli; identical to SEQ ID NO: 7690
  source 1..50: mol_type = genomic DNA

SEQ ID NO: 30651 - protein, 506 aa, Escherichia coli
MRHVITYLRYSSATQGAEGADSTRRQNELFKQWLRKNSDAQVVASFNDEGLSGYKGKHLSGQFGDMLSRIESGEFSKGTILLVEAIDRIGRLEHLETEALMNRIIAHGIEIHTLQDGLIYTRDALSDDLGISIIQRVKSYLAHQESKQKSFRVSEKWKQRAKLALAGEQRLTKMVPGWIDPETFKLNEHAETVRLIFKLLLDGESLHNIARHLQANNISSFSRRKDANGFSVHSVRTILRSETTIGTLPASQRNDRPAIPNYYEAAIDAATFNKAQEILGKNRIGRTPASDNPLTINIFKGLFRCQCGASVHPTGTKNKYQGVYRCNNHLDGRCDVPPLKRKPFDKWMIDNFLGMIDVGNDGEVEGKIASLQHEVEIVTTRIKKATALLLEMDDIDELKIQLKELNQKRTELQTTIDNMRRKASLTDKELPQLKDIDLTTKAGRVECQLILSKHLKGLTLGKDTVTVTLQNDTEITIPTDPLPLNDGTSIFEIAEKNLLNIDTFQL

SEQ ID NO: 30652 - DNA, 50 bp, Escherichia coli; identical to SEQ ID NO: 30087
  source 1..50: mol_type = genomic DNA

SEQ ID NO: 30653 - DNA, 40 bp, Escherichia coli; identical to SEQ ID NO: 20043
  source 1..40: mol_type = genomic DNA

SEQ ID NO: 30654 - DNA, 40 bp, Escherichia coli; identical to SEQ ID NO: 30164
  source 1..40: mol_type = genomic DNA

SEQ ID NO: 30655 - DNA, 50 bp, Escherichia coli; identical to SEQ ID NO: 7690
  source 1..50: mol_type = genomic DNA

SEQ ID NO: 30656 - protein, 506 aa, Escherichia coli
MRSVITYLRFSSAIQGAEGADSTRRQNDLFKQWLKKNSDAQVVASFSDEGLSGYKGKHLTGQFGDMLARIESGEFPEGTLLLVEAIDRIGRLEHLETEALMNRIIAHGIEIHTLQDGLIYTRDALSDDLGISIIQRVKSYVAHQESKQKSFRVSQKWKQRAKLALAGEQRLTKMVPGWIDPDTFKCNEHAETVRLIFKLLLDGESLHNIARHLQANNISSFSRRKDANGFSVHSVRTILRSETTIGTLPASQRNDRPAIPNYYEPAIDASTFNKAQEILDKNRKGRTPASDNPLTINIFKGLFRCQCGASVHPTGTKNKYAGVYRCNSHLDGRCGVPPLKRKPFDKWMIDNFLGMIDVGNDGEAEKEIASLQHEVETVTARIKKATALLLEMDDIDELKIQLKELNQKRTELQTTIDSMRRKASLTDKELPQLKDIDLTTKAGRVECQLILSKHLESLTLGRGQVTVKLSNGTEIIVPTDPLPLTDGAAIFEIAEKNLLNIDTFQL

SEQ ID NO: 30657 - DNA, 50 bp, Escherichia coli; identical to SEQ ID NO: 30087
  source 1..50: mol_type = genomic DNA

SEQ ID NO: 30658 - DNA, 40 bp, Escherichia coli; identical to SEQ ID NO: 20043
  source 1..40: mol_type = genomic DNA

SEQ ID NO: 30659 - DNA, 40 bp, Escherichia coli; identical to SEQ ID NO: 30164
  source 1..40: mol_type = genomic DNA

SEQ ID NO: 30660 - DNA, 50 bp, Escherichia coli; identical to SEQ ID NO: 7690
  source 1..50: mol_type = genomic DNA

SEQ ID NO: 30661 - protein, 506 aa, Escherichia coli
MRSVITYLRFSSAIQGAEGADSTRRQNDLFKQWLKKNSDAQVVASFSDEGLSGYKGKHLTGQFGDMLARIEAGEFLAGTILLVESIDRIGRLEHLETEALMNRILCNGIEIHTLQDGLVYTKDALADDLGISIIQRVKAYIAHQESKQKSFRVSQKWKQRAKLALAGEQRLTKMVPGWIDPDTFKCNEHAETVRLIFKLLLDGESLHNIARHLQSNDIKSFSRRKDANGFSVHSVRTVLRSVSAIGTLPASQRNDRPAIPNYYEAAIDAATFNKAQEILDKNRKGRTPASDNPLTINIFKGLFRCQCGASVHPTGTKNKYAGVYRCNNNPDGRCDVPPLKRKPFDKWMIDNFLGMIDVGNDGEAEGKIASLQHEVEIVTTRIKKATALLLEMDDIDELKIQLKELNQKRTELQTTIDNMRRKASLTDKELPQLKDIDLMTKAGRVECQLILSKHLESLTLGRGQVTVKLSNGTEIIVPTDPLPLTDGAAIFEIAEKNLLNIDTFQL

SEQ ID NO: 30662 - DNA, 50 bp, Escherichia coli; identical to SEQ ID NO: 30087
  source 1..50: mol_type = genomic DNA

SEQ ID NO: 30663 - DNA, 40 bp, Escherichia coli; identical to SEQ ID NO: 20043
  source 1..40: mol_type = genomic DNA

SEQ ID NO: 30664 - DNA, 40 bp, Escherichia coli; identical to SEQ ID NO: 30164
  source 1..40: mol_type = genomic DNA

SEQ ID NO: 30665 - DNA, 50 bp, Escherichia coli; identical to SEQ ID NO: 7690
  source 1..50: mol_type = genomic DNA

SEQ ID NO: 30666 - protein, 506 aa, Escherichia coli
MRHVITYLRYSSAIQGAEGADSTRRQNELFKQWLRKNSDAQVVASFSDEGLSGYKGKHLTGQFGDMLARIESGEFSEGTVLLVEAIDRIGRLEHLETEALMNRIIAHGIEIHTLQDGLIYTRDALSDDLGISIIQRVKSYVAHQESKQKSFRVSQKWKQRAKLALAGEQRLTKMVPGWIDPDTFKCNEHAETVRLIFKLLLDGESLHNIARHLQANNISSFSRRKDANGFSVHSVRTVLRSESVIGTLPASQRNDRPAIPNYYEAAIDAATFNKAQEILDKNRKGRTPASDNPLTINIFKGLFRCQCGASVHPTGTKNKYQGVYRCNNHLDGRCDVQPLKRKPFDRWMIDNFLGMIDVGNDGESERKIAALQHEVEIVTARIKKATALLLEMDDITELKTQVKGLNQKRTELQTTIDNMRRKASLTDKELPQLKDIDLTTKAGRVECQLILSKHLKGLTLGKDSVTVTLQNDTEITIPTNPLPLNDGTSIFEIAEKELLEIDAYQL

SEQ ID NO: 30667 - DNA, 50 bp, Escherichia coli; identical to SEQ ID NO: 30087
  source 1..50: mol_type = genomic DNA

SEQ ID NO: 30668 - DNA, 40 bp, Escherichia coli; identical to SEQ ID NO: 20043
  source 1..40: mol_type = genomic DNA

SEQ ID NO: 30669 - DNA, 40 bp, Escherichia coli; identical to SEQ ID NO: 30164
  source 1..40: mol_type = genomic DNA

SEQ ID NO: 30670 - DNA, 50 bp, Escherichia coli; identical to SEQ ID NO: 7690
  source 1..50: mol_type = genomic DNA

SEQ ID NO: 30671 - protein, 506 aa, Escherichia coli
MRSVITYLRFSSAIQGAEGADSTRRQNDLFKQWLKKNSDAQVVASFSDEGLSGYKGKHLTGQFGDMLARIESGEFSEGTVLLVEAIDRIGRLEHLETEALMNRIIAHGIEIHTLQDGLIYTRDALSDDLGISIIQRVKSYVAHQESKQKSFRVSQKWKQRAKLALAGEQRLTRNVPGWIDPDTFKCNEHAETVRLIFKLLLDGESLHNIARHLQSNDIKSFSRRKDANGFSVHSVRTILRSETTIGTLPASQRNDRPAIPNYYEAAIDASTFNKAQEILDKNRKGRTPASDNPLTINIFKGLFRCQCGASVHPTGTKNKYQGVYRCNNHLDGRCDVPPLKRKPFDRWMIDNFLGMIDVGNDGESERKIAALQHEVEIVTARIKKATALLLEMDDITELKTQVKGLNQKRTEIQTTIDTLKRKTSLSDKGLPQLKDIDLMTKAGRVECQLILSKHLKGLTLGKDSVTVTLQNDTEITIPTDPLPLNDGTSIFEIADKELLDIDAYRL

SEQ ID NO: 30672 - DNA, 50 bp, Escherichia coli; identical to SEQ ID NO: 30087
  source 1..50: mol_type = genomic DNA

SEQ ID NO: 30673 - DNA, 40 bp, Escherichia coli; identical to SEQ ID NO: 20043
  source 1..40: mol_type = genomic DNA

SEQ ID NO: 30674 - DNA, 40 bp, Escherichia coli; identical to SEQ ID NO: 30164
  source 1..40: mol_type = genomic DNA

SEQ ID NO: 30675 - DNA, 50 bp, Escherichia coli; identical to SEQ ID NO: 7690
  source 1..50: mol_type = genomic DNA

SEQ ID NO: 30676 - protein, 506 aa, Escherichia coli
MRSVITYLRFSSAIQGAEGADSTRRQNDLFKQWLKKNSDAQVVASFSDEGLSGYKGKHLTGQFGDMLARIESGEFSEGTVLLVEAIDRIGRLEHLETEALMNRIIAHGIEIHTLQDGLIYTRDALSDDLGISIIQRVKSYVAHQESKQKSFRVSQKWKQRAKLALAGEQRLTKMVPGWIDPDTFKLNEHAETVRLIFKLLLSGESLHNIARHLQANNISSFSRRKDANGFSVHSVRTVLRSESVIGTLPASQRNDRPAIPNYYEAAIDAATFNKAQEILDKNRKGRTPASDNPLTINIFKGLFRCQCGASVHPTGTKNKYAGVYRCNNNPDGRCDVPPLKRKPFDKWMIDNFLGMIDVGNDGEAEGKIASLQHEVEIVTTRIKKATALLLEMDDITELKAQVKELNQKRTELQTTIDSMRRKTSLSDKGLPQLKDIDLMTKAGRVECQLILSKHLKGLTLGKDSVIVTLQNDTEITIPTNPLPLNDGTSIFEIAEKELLEIDAYQL

SEQ ID NO: 30677 - DNA, 50 bp, Escherichia coli; identical to SEQ ID NO: 30087
  source 1..50: mol_type = genomic DNA

SEQ ID NO: 30678 - DNA, 40 bp, Escherichia coli; identical to SEQ ID NO: 20043
  source 1..40: mol_type = genomic DNA

SEQ ID NO: 30679 - DNA, 40 bp, Escherichia coli; identical to SEQ ID NO: 30164
  source 1..40: mol_type = genomic DNA

SEQ ID NO: 30680 - DNA, 50 bp, Escherichia coli; identical to SEQ ID NO: 7690
  source 1..50: mol_type = genomic DNA

SEQ ID NO: 30681 - protein, 506 aa, Escherichia coli
MRSVITYLRFSSAIQGAEGADSTRRQNDLFKQWLKKNSDAQVVASFSDEGLSGYKGKHLTGQFGDMLARIESGEFPEGTLLLVEAIDRIGRLEHLETEALMNRIIAHGIEIHTLQDGLIYTRDALSDDLGISIIQRVKSYVAHQESKQKSFRVSQKWKQRAKLALAGEQRLTKMVPGWIDPDTFKCNEHAETVRLIFKLLLDGESLHNIARHLQANNISSFSRRKDANGFSVHSVRTILRSETTRGTLPASQRNDRPAIPNYYEAAIDASTFNKAQEILDKNRKGRTPASDNPLTINIFKGLFRCQCGASVHPTGTKNKYAGVYRCNNHLDGRCDVPPLKRKPFDKWMIDNFLGMIDVGNDGEAEGKIASLQHEVEIVTARIKKATALLLEMDDIDELKIQLKELNQKRTELQTMIDNMRRKASLTDKELPQLKDIDLMTKAGRVECQLILSKHLKGLTLGKDSVTVTLQNDTEIIVPTDPLPLNDGTSIFEIAEKELLEIDAYQL

SEQ ID NO: 30682 - DNA, 50 bp, Escherichia coli; identical to SEQ ID NO: 30087
  source 1..50: mol_type = genomic DNA

SEQ ID NO: 30683 - DNA, 40 bp, Escherichia coli; identical to SEQ ID NO: 20043
  source 1..40: mol_type = genomic DNA

SEQ ID NO: 30684 - DNA, 40 bp, Escherichia coli; identical to SEQ ID NO: 30164
  source 1..40: mol_type = genomic DNA

SEQ ID NO: 30685 - DNA, 50 bp, Escherichia coli; identical to SEQ ID NO: 7690
  source 1..50: mol_type = genomic DNA

SEQ ID NO: 30686 - protein, 506 aa, Escherichia coli
MRSVITYLRFSSAIQGAEGADSTRRQNDLFKQWLKKNSDAQVVASFSDEGLSGYKGKHLTGQFGDMLARIESGEFSEGTVLLVEAIDRIGRLEHLETEALMNRIIAHGIEIHTLQDGLIYTRDALSDDLGISIIQRVKSYVAHQESKQKSFRVSQKWKQRAKLALAGEQRLTRNVPGWIDPDTFKCNEHAETVRLIFKLLLDGESLHNIARHLQSNDIKSFSRRKDANGFSVHSVRTVLRSESVIGTLPASQRNDRPAIPNYYEAAIDAATFNKAQEILDKNRKGRTPASDNPLTINIFKGLFRCQCGASVHPTGTKNKYQGVYRCNNHLDGRCDVPPLKRKPFDRWMIDNFLGMIDVGNDGESERKIASLQHEVEIVTTRIKKATALLLEMDDIDELKIQLKELNQKRTELQTTIDNMRRKASLTDKELPQLKDIDLTTKVGRVECQLILSKHLKGLTLGKDSVIVTLQNDTEITIPTNPLPLNDGSPIFEIADKELLDIDAYQL

SEQ ID NO: 30687 - DNA, 50 bp, Escherichia coli; identical to SEQ ID NO: 30087
  source 1..50: mol_type = genomic DNA

SEQ ID NO: 30688 - DNA, 40 bp, Escherichia coli; identical to SEQ ID NO: 20043
  source 1..40: mol_type = genomic DNA

SEQ ID NO: 30689 - DNA, 40 bp, Escherichia coli; identical to SEQ ID NO: 30164
  source 1..40: mol_type = genomic DNA

SEQ ID NO: 30690 - DNA, 50 bp, Escherichia coli; identical to SEQ ID NO: 7690
  source 1..50: mol_type = genomic DNA

SEQ ID NO: 30691 - protein, 506 aa, Escherichia coli
MRTVITYLRFSSATQGAEGADSTRRQNELFKQWLRKNSDAQVVASFSDEGLSGYKGKHLTGQFGDMLARIEAGEFPAGAILLVESIDRIGRLEHLETEALMNRIIAHGIEIHTLQDGLIYTRDALSDDLGISIIQRVKSYLAHQESKQKSFRVSEKWKQRAKLALAGEQHLTRNVPGWIDPDTFKCNEHAETVRLIFKLLLDGESLHNIARHLQSNDIKSFSRRKDANGFSVHSVRTVLRSESVIGTLPASQRNDRPAIPNYYEAAIDASTFNKAQDILDKNRKGRTPASDNPLTINIFKGLFRCQCGASVHPTGTKNKYQGVYRCNSHLDGRCDVPPLKRKPFDRWMIDNFLGMIDVGNDGEAEKEIASLQHEVETVTARIKKATALLLEMDDITELKTQVKELNQKRTELQTTINTMKRKTSLSDKGLPQLKDIDLMTKAGRVECQLILSKHLKGLTLGKDSVTVTLQNDTEITIPTNPLPLNDGTSIFEIAEKNLLNIDTFQL

SEQ ID NO: 30692 - DNA, 50 bp, Escherichia coli; identical to SEQ ID NO: 30087
  source 1..50: mol_type = genomic DNA

SEQ ID NO: 30693 - DNA, 40 bp, Escherichia coli; identical to SEQ ID NO: 20043
  source 1..40: mol_type = genomic DNA

SEQ ID NO: 30694 - DNA, 40 bp, Escherichia coli; identical to SEQ ID NO: 30164
  source 1..40: mol_type = genomic DNA

SEQ ID NO: 30695 - DNA, 50 bp, Escherichia coli; identical to SEQ ID NO: 7690
  source 1..50: mol_type = genomic DNA

SEQ ID NO: 30696 - protein, 506 aa, Escherichia coli
MRHVITYLRYSSAIQGAEGADSTRRQNDLFKQWLKKNSDAQVVASFNDEGLSGYKGKHLSGQFGDMLSRIESGEFSEGTILLVEAIDRIGRLEHLETEALMNRIIAHGIEIHTLQDGLIYTRDALSDDLGISIIQRVKSYVAHQESKQKSFRVSQKWKQRAKLALAGEQRLTKMVPGWIDPDTFKCNEHAETVRLIFKLLLDGESLHNIARHLQANNISSFSRRKDANGFSVHSVRTVLRSESVIGTLPASQRNDRPAIPNYYEAAIDAATFNKAQEILDKNRKGRTPASDNPLTINIFKGLFRCQCGASVHPTGTKNKYAGVYRCNNHLDGRCDVPPLKRKPFDRWMIDNFLGMIDVGNDGESERKIAALQHEVEIVTARIKKATALLLEMDDITELKAQVKELNQKRTELQTTINTMKRKTSLSDKGLPQLKDIDLMTKAGRVECQLILSKHLKGLTLGKDSVTVTLQNDTEITIPTNPLPLNDGSPIFEIADKELLDIDAYQL

SEQ ID NO: 30697 - DNA, 50 bp, Escherichia coli; identical to SEQ ID NO: 30087
  source 1..50: mol_type = genomic DNA

SEQ ID NO: 30698 - DNA, 40 bp, Escherichia coli; identical to SEQ ID NO: 20043
  source 1..40: mol_type = genomic DNA

SEQ ID NO: 30699 - DNA, 40 bp, Escherichia coli; identical to SEQ ID NO: 30164
  source 1..40: mol_type = genomic DNA

SEQ ID NO: 30700 - DNA, 50 bp, Escherichia coli; identical to SEQ ID NO: 7690
  source 1..50: mol_type = genomic DNA

SEQ ID NO: 30701 - protein, 506 aa, Escherichia coli
MRHVITYLRYSSAIQGAEGADSTRRQNDLFKQWLKKNSDAQVVASFNDEGLSGYKGKHLSGQFGDMLSRIESGEFSKGTILLVEAIDRIGRLEHLETEALMNRIIAHGIEIHTLQDGLIYTRDALSDDLGISIIQRVKSYLAHQESKQKSFRVSQKWKQRAKLALAGEQRLTRNVPGWIDPETFKLNEHAETVRLIFKLLLDGESLHNIARHLQSNGIRSFSRRKDANGFSVHSVRTILRSETTIGTLPASQRNDRPAIPNYYEAAIDAATFNKAQEILDKNRKGRTPASDNPLTINIFKGLFRCQCGASVHPTGTKNKYQGVYRCNNHLDGRCDVPPLKRKPFDKWMIDNFLGMIDVGNDGEAEGKIAALQHEVEIVTARIKKATALLLEMDDITELKTQVKELNQRRTELQTTIDNMRRKTSLSDKELPQLKDIDLTTKAGRVECQLILSKHLKGLTLGKDSVTVTLQNDTEITIPTNPLPLNDGSPIFEIADKELLDIDAYQL

SEQ ID NO: 30702 - DNA, 50 bp, Escherichia coli; identical to SEQ ID NO: 30087
  source 1..50: mol_type = genomic DNA

SEQ ID NO: 30703 - DNA, 40 bp, Escherichia coli; identical to SEQ ID NO: 20043
  source 1..40: mol_type = genomic DNA

SEQ ID NO: 30704 - DNA, 40 bp, Escherichia coli; identical to SEQ ID NO: 30164
  source 1..40: mol_type = genomic DNA

SEQ ID NO: 30705 - DNA, 50 bp, Escherichia coli; identical to SEQ ID NO: 7690
  source 1..50: mol_type = genomic DNA

SEQ ID NO: 30706 - protein, 506 aa, Escherichia coli
MRTVITYLRFSSATQGAEGADSTRRQNELFKQWLRKNSDAQVVASFSDEGLSGYKGKHLTGQFGDMLARIEAGEFPAGAILLVESIDRIGRLEHLETEALMNRIIAHGIEIHTLQDGLIYTRDALSDDLGISIIQRVKSYLAHQESKQKSFRVSEKWKQRAKLALAGEQHLTRNVPGWIDPDTFKCNEHAETVRLIFKLLLDGESLHNIARHLQSNGIKSFSRRKDANGFSVHSVRTVLRSESVIGTLPASQRNDRPAIPNYYEAAIDAATFNKAQEILDKNRKGRTPASDNPLTINIFKGLFRCQCGASVHPTGTKNKYAGVYRCNNHLDGRCDVPPLKRKPFDRWMIDNFLGMIDVGNDGESERKIAALQHEVETVTARIKKATALLLEMDDIDELKIQLKELNQKRTELQTTIDSMRRKASLTDKELPQLKDIDLTTKAGRVECQLILSKHLKGLTLGKDSVTVTLQNDTEITIPTNPLPLNDGSPIFEIADKELLDIDAYQL

SEQ ID NO: 30707 - DNA, 50 bp, Escherichia coli; identical to SEQ ID NO: 30087
  source 1..50: mol_type = genomic DNA

SEQ ID NO: 30708 - DNA, 40 bp, Escherichia coli; identical to SEQ ID NO: 20043
  source 1..40: mol_type = genomic DNA

SEQ ID NO: 30709 - DNA, 40 bp, Escherichia coli; identical to SEQ ID NO: 30164
  source 1..40: mol_type = genomic DNA

SEQ ID NO: 30710 - DNA, 50 bp, Escherichia coli; identical to SEQ ID NO: 7690
  source 1..50: mol_type = genomic DNA

SEQ ID NO: 30711 - protein, 506 aa, Escherichia coli
MRHVITYLRYSSAIQGAEGADSTRRQNDLFKQWLKKNSDAQVVASFNDEGLSGYKGKHLSGQFGDMLSRIESGEFSEGTILLVEAIDRIGRLEHLETEALMNRIIAHGIEIHTLQDGLIYTRDALSDDLGISIIQRVKSYIAHQESKQKSFRVSEKWKQRAKLALAGKQRLTKMVPGWIDPDTFKLNEHAETVRLIFKLLLDGESLHNIARHLQSNGIKSFSRRKDANGFSVHSVRTILRSETTIGTLPASQRNDRPAIPNYYEAAIDAATFNKAQEILDKNRKGRTPASDNPLTINIFKGLFRCQCGASVHPTGTKNKYAGVYRCNNHLDGRCDVQPLKRKPFDRWMIDNFLGMIDVGNDGESERKIAALQHEVEIVTSRIKKATALLLEMDDITELKTQVKGLNQKRTELQTTIDNMRRKASLTDKELPQLKDIDLTTKAGRVECQLILSKHLKGLTLGKDSVIVTLQNDTEITIPTNPLPLNDGTSIFEIAEKELLEIDAYQL

SEQ ID NO: 30712 - DNA, 50 bp, Escherichia coli; identical to SEQ ID NO: 30087
  source 1..50: mol_type = genomic DNA

SEQ ID NO: 30713 - DNA, 40 bp, Escherichia coli; identical to SEQ ID NO: 20043
  source 1..40: mol_type = genomic DNA

SEQ ID NO: 30714 - DNA, 40 bp, Escherichia coli; identical to SEQ ID NO: 30164
  source 1..40: mol_type = genomic DNA

SEQ ID NO: 30715 - DNA, 50 bp, Escherichia coli; identical to SEQ ID NO: 7690
  source 1..50: mol_type = genomic DNA

SEQ ID NO: 30716 - protein, 506 aa, Escherichia coli
MRTVITYLRFSSATQGAEGADSTRRQNELFKQWLRKNSDAQVVASFSDEGLSGYKGKHLTGQFGDMLARIESGEFSEGTVLLVEAIDRIGRLEHLETEALMNRIIAHGIEIHTLQDGLIYTRDALSDDLGISIIQRVKSYVAHQESKQKSFRVSQKWKQRAKLALAGEQRLTRNVPGWIDPDTFKCNEHAETVRLIFKLLLDGESLHNIARHLQSNDIKSFSRRKDANGFSVHSVRTVLRSESVIGTLPASQRNDRPAIPNYYEAAIDAATFNKAQEILDKNRKGRTPASDNPLTINIFKGLFRCQCGASVHPTGTKNKYAGVYRCNNHLDGRCDVPPLKRKPFDRWMIDNFLGMIDVGNDGEAEGKIASLQHEVEIVTARIKKATALLLEMDDITELKAQVKGLNQKRTELQTTIDNMRRKASLTDKELPQLKDIDLTTKAGRVECQLILSKHLKGLTLGKDSVTVTLQNDTEITIPTNPLPLNDGSPIFEIADKELLDIDAYQL

SEQ ID NO: 30717 - DNA, 50 bp, Escherichia coli; identical to SEQ ID NO: 30087
  source 1..50: mol_type = genomic DNA

SEQ ID NO: 30718 - DNA, 40 bp, Escherichia coli; identical to SEQ ID NO: 20043
  source 1..40: mol_type = genomic DNA

SEQ ID NO: 30719 - DNA, 40 bp, Escherichia coli; identical to SEQ ID NO: 30164
  source 1..40: mol_type = genomic DNA

SEQ ID NO: 30720 - DNA, 50 bp, Escherichia coli; identical to SEQ ID NO: 7690
  source 1..50: mol_type = genomic DNA

SEQ ID NO: 30721 - protein, 506 aa, Escherichia coli
MRHVITYLRYSSAIQGAEGADSTRRQNDLFKQWLKKNSDAQVVASFNDEGLSGYKGKHLSGQFGDMLSRIESGEFSEGTILLVEAIDRIGRLEHLETEALMNRILGNGIEIHTLQDGLIYTKDALADDLGISIIQRVKAYIAHQESKQKSFRVSEKWKQRAKLALAGEQRLTKMVPGWIDPETFKLNEHAETVRLIFKLLLDGESLHNIARHLQANNISSFSRRKDANGFSVHSVRTILRSETTIGTLPASQRNDRPAIPNYYEAAIDAATFNKAQEILGKNRIGRTPASDNPLTINIFKGLFRCQCGASVHPTGTKNKYQGVYRCNNHLDGRCDVPPLKRKPFDKWMIDNFLGMIDVGNDGEAEGKIASLQHEVEIVTTRIKKATALLLEMDDIDELKIQIKELNQRRTELQTTIDSMRRKASLTDKELPQLKDIDLTTKAGRVECQLILSKHLKGLTLGKDSVTVTLQNDTEITIPTNPLPLNDGTSIFEIAEKNLLNIDTFQL

SEQ ID NO: 30722 - DNA, 50 bp, Escherichia coli; identical to SEQ ID NO: 30087
  source 1..50: mol_type = genomic DNA

SEQ ID NO: 30723 - DNA, 40 bp, Escherichia coli; identical to SEQ ID NO: 20043
  source 1..40: mol_type = genomic DNA

SEQ ID NO: 30724 - DNA, 40 bp, Escherichia coli; identical to SEQ ID NO: 30164
  source 1..40: mol_type = genomic DNA

SEQ ID NO: 30725 - DNA, 50 bp, Escherichia coli; identical to SEQ ID NO: 7690
  source 1..50: mol_type = genomic DNA

SEQ ID NO: 30726 - protein, 506 aa, Escherichia coli
MRTVITYLRFSSATQGAEGADSTRRQNELFKQWLRKNSDAQVVASFSDEGLSGYKGKHLTGQFGDMLARIESGEFSEGTVLLVEAIDRIGRLEHLETEALMNRIIAHGIEIHTLQDGLIYTRDALSDDLGISIIQRVKSYVAHQESKQKSFRVSQKWKQRAKLALAGEQRLTRNVPGWIDPDTFKCNEHAETVRLIFKLLLDGESLHNIARHLQSNDIKSFSRRKDANGFSVHSVRTVLRSESVIGTLPTSQRNDRPAIPNYYEAAIDAATFNKAQEILDKNRKGRTPASDNPLTINIFKGLFRCQCGASVHPTGTKNKYAGVYRCNNHLDGRCDVPPLKRKPFDRWMIDNFLGMIDVGNDGESERKIAALQHEVEIVTARIKKATALLLEMDDITELKAQVKGLNQKRTEIQTTIDTLKRKTSLTDKELPQLKDIDLTTKAGRVECQLILSKHLKGLTLGKDSVTVTLQNDTEITIPTNPLPLNDGSPIFEIADKELLDIDAYQL

SEQ ID NO: 30727 - DNA, 50 bp, Escherichia coli; identical to SEQ ID NO: 30087
  source 1..50: mol_type = genomic DNA

SEQ ID NO: 30728 - DNA, 40 bp, Escherichia coli; identical to SEQ ID NO: 20043
  source 1..40: mol_type = genomic DNA

SEQ ID NO: 30729 - DNA, 40 bp, Escherichia coli; identical to SEQ ID NO: 30164
  source 1..40: mol_type = genomic DNA

SEQ ID NO: 30730 - DNA, 50 bp, Escherichia coli; identical to SEQ ID NO: 7690
  source 1..50: mol_type = genomic DNA

SEQ ID NO: 30731 - protein, 506 aa, Escherichia coli
MRTVITYLRFSSAIQGAEGADSTRRQNDLFKQWLKKNSDAQVVASFSDEGLSGYKGKHLTGQFGDMLARIESGEFPAGTILLVESIDRIGRLEHLETEALMNRILGNGIEIHTLQDGLIYTKDALADDLGISIIQRVKAYIAHQESKQKSFRVSQKWEQRAKLALAGEQRLTKMVPGWIDPDTFKCNEHAETVRLIFKLLLDGESLHNIARHLQANNISSFSRRKDANGFSVHSVRTILRSETTIGTLPASQRNDRPAIPNYYEAAIDAATFNKAQEILDKNRKGRTPASDNPLTINIFKGLFRCQCGASVHPTGTKNKYAGVYRCNNHLDGRCDVQPLKRKPFDKWMIDNFLGMIDVGNDGEAEGKIASLQHEVEIVTARIKKATALLLEMDDIDELKIQLKELNQKRTELQTTIDNMRRKASLTDKELPQLKDIDLTTKAGRVECQLILSKHLKGLTLGKDSVTVTLQNDTEITIPTNPLPLNDGSPIFEIADKELLEIDAYQL

SEQ ID NO: 30732 - DNA, 50 bp, Escherichia coli; identical to SEQ ID NO: 30087
  source 1..50: mol_type = genomic DNA

SEQ ID NO: 30733 - DNA, 40 bp, Escherichia coli; identical to SEQ ID NO: 20043
  source 1..40: mol_type = genomic DNA

SEQ ID NO: 30734 - DNA, 40 bp, Escherichia coli; identical to SEQ ID NO: 30164
  source 1..40: mol_type = genomic DNA

SEQ ID NO: 30735 - DNA, 50 bp, Escherichia coli; identical to SEQ ID NO: 7690
  source 1..50: mol_type = genomic DNA

SEQ ID NO: 30736 - protein, 506 aa, Escherichia coli
MRSVITYLRFSSAIQGAEGADSTRRQNELFKQWLRKNSDAQVVASFSDEGLSGYKGKHLTGQFGDMLARIESGEFPEGTILLVESIDRIGRLEHLETEALMNRILGNGLEIHTLQDGLIYTKDALADDLGISIIQRVKAYIAHQESKQKSFRVSEKWKQRAKLALAGKQRLTKMVPGWIDPDTLKLNEHAETVRLIFKLLLSGESLHNIARHLQSNGIKSFSRRKDANGFSVHSVRTILRSETTIGTLPASQRNDRPAIPNYYEAAIDAATFNKAQEILDKNRKGRTPASDNPLTINIFKGLFRCQCGASVHPTGTKNKYAGVYRCNNHLDGRCDVPPLKRKPFDKWMLENFLGMIDVGNDGEAEGKIASLQYEVEIVTTRIKKATALLLEMDDIDELKIQLKELNQRRTELQTTIDNMRRKASLTDKELPQLKDIDLTTKAGRVECQLILSKHLKGLTLGKDSVIVTLQNDTEITIPTNPLPLNDGTSIFEIAEKELLEIDAYQL

SEQ ID NO: 30737 - DNA, 50 bp, Escherichia coli; identical to SEQ ID NO: 30087
  source 1..50: mol_type = genomic DNA

SEQ ID NO: 30738 - DNA, 40 bp, Escherichia coli; identical to SEQ ID NO: 20043
  source 1..40: mol_type = genomic DNA

SEQ ID NO: 30739 - DNA, 40 bp, Escherichia coli; identical to SEQ ID NO: 30164
  source 1..40: mol_type = genomic DNA

SEQ ID NO: 30740 - DNA, 50 bp, Escherichia coli; identical to SEQ ID NO: 7690
  source 1..50: mol_type = genomic DNA

SEQ ID NO: 30741 - protein, 506 aa, Escherichia coli
MRTVITYLRFSSAIQGAEGADSTRRQNDLFKQWLKKNSDAQVVASFSDEGLSGYKGKHLSGQFGDMLSRIESGEFSKGTILLVEAIDRIGRLEHLETEALMNRIIAHGIEIHTLQDGLIYTRDALSDDLGISIIQRVKSYLAHQESKQKSFRVSEKWKQRAKLALAGEQRLTKMVPGWIDPETFKLNEHAETVRLIFKLLLDGESLHNIARHLQANNISSFSRRKDANGFSVHSVRTILRSETTRGTLPASQRNDRPAIPNYYEAAIDAATFNKAQEILDKNRKGRTPASDNPLTINIFKGLFRCQCGASVHPTGTKNKYQGVYRCNNHLDGRCDVPPLKRKPFDKWMIDNFLGMIDVGNDGEAEGKIAALQHEVEIVTARIKKATALLLEMDDITELKTQVKGLNQKRTELQTTIDNMRRKASLTDKELPQLKDIDLTTKAGRVECQLILSKHLKGLTLGKDSVTVTLQNDTEITIPTDPLPLNDGTSIFEIAEKNLLNIDTFQL

SEQ ID NO: 30742 - DNA, 50 bp, Escherichia coli; identical to SEQ ID NO: 30087
  source 1..50: mol_type = genomic DNA

SEQ ID NO: 30743 - DNA, 40 bp, Escherichia coli; identical to SEQ ID NO: 20043
  source 1..40: mol_type = genomic DNA

SEQ ID NO: 30744 - DNA, 40 bp, Escherichia coli; identical to SEQ ID NO: 30164
  source 1..40: mol_type = genomic DNA

SEQ ID NO: 30745 - DNA, 50 bp, Escherichia coli; identical to SEQ ID NO: 7690
  source 1..50: mol_type = genomic DNA

SEQ ID NO: 30746 - protein, 506 aa, Escherichia coli
MRHVITYLRYSSAIQGAEGADSTRRQNELFKQWLRKNSDAQVVASFSDEGLSGYKGKHLTGQFGDMLARIEAGEFPAGTILLVESIDRIGRLEHLETEALMNRILGNGIEIHTLQDGLIYTKDALADDLGISIIQRVKAYIAHQESKQKSFRVSQKWEQRAKLALAGEQRLTKMVPGWIDPDTFKCNEHAETVRLIFKLLLDGESLHNIARHLQANNISSFSRRKDANGFSVHSVRTILRSETTRGTLPASQRNDRPAIPNYYEAAIDAATFNKAQEILDKNRKGRTPASDNPLTINIFKGLFRCQCGASVHPTGTKNKYAGVYRCNNHLDGRCDVPPLKRKPFDKWMLENFLGMIDVGNDGEAEGKIASLQHEVEIVTTRIKKATALLLEMDDIDELKIQLKELNQKRTELQTTIDNMRRKASLTDKELPQLKDIDLMTKAGRVECQLILSKHLKGLTLGKDSVTVTLQNDTEITIPTNPLPLNDGSPIFEIADKELLDIDAYQL

SEQ ID NO: 30747 - DNA, 50 bp, Escherichia coli; identical to SEQ ID NO: 30087
  source 1..50: mol_type = genomic DNA

SEQ ID NO: 30748 - DNA, 40 bp, Escherichia coli; identical to SEQ ID NO: 20043
  source 1..40: mol_type = genomic DNA

SEQ ID NO: 30749 - DNA, 40 bp, Escherichia coli; identical to SEQ ID NO: 30164
  source 1..40: mol_type = genomic DNA

SEQ ID NO: 30750 - DNA, 50 bp, Escherichia coli; identical to SEQ ID NO: 7690
  source 1..50: mol_type = genomic DNA

SEQ ID NO: 30751 - protein, 506 aa, Escherichia coli
MRTVITYLRFSSAIQGAEGADSTRRQNDLFKQWLKKNSDAQVVASFSDEGLSGYKGKHLTGQFGDMLARIESGEFPEGTILLVEAIDRIGRLEHLETEALMNRIIAHGIEIHTLQDGLIYTRDALSDDLGISIIQRVKSYVAHQESKQKSFRVSQKWKQRAKLALAGEQRLTKMVPGWIDPDTFKCNEHAETVRLIFKLLLDGESLHNIARHLQANNISSFSRRKDANGFSVHSVRTILRSETTRGTLPASQRNDRPAIPNYYEAAIDAATFNKAQEILDKNRKGRTPASDNPLTINIFKGLFRCQCGASVHPTGTKNKYAGVYRCNNNPDGRCDVPPLKRKPFDKWMLENFLGMIDVGNDGEAEGKIASLQHEVEIVTARIKKATALLLEMDDIDELKIQLKELNQKRTELQTMIDNMRRKASLTDKELPQLKDIDLMTKAGRVECQLILSKHLKGLTLGKDSVTVTLQNDTEIIVPTDPLPLNDGTSIFEIADKELLDIDAYQL

SEQ ID NO: 30752 - DNA, 50 bp, Escherichia coli; identical to SEQ ID NO: 30087
  source 1..50: mol_type = genomic DNA

SEQ ID NO: 30753 - DNA, 40 bp, Escherichia coli; identical to SEQ ID NO: 20043
  source 1..40: mol_type = genomic DNA

SEQ ID NO: 30754 - DNA, 40 bp, Escherichia coli; identical to SEQ ID NO: 30164
  source 1..40: mol_type = genomic DNA

SEQ ID NO: 30755 - DNA, 50 bp, Escherichia coli; identical to SEQ ID NO: 7690
  source 1..50: mol_type = genomic DNA

SEQ ID NO: 30756 - protein, 506 aa, Escherichia coli; identical to SEQ ID NO: 30156

SEQ ID NO: 30757 - DNA, 50 bp, Escherichia coli; identical to SEQ ID NO: 30087
  source 1..50: mol_type = genomic DNA

SEQ ID NO: 30758 - DNA, 40 bp, Escherichia coli; identical to SEQ ID NO: 20043
  source 1..40: mol_type = genomic DNA

SEQ ID NO: 30759 - DNA, 40 bp, Escherichia coli; identical to SEQ ID NO: 30164
  source 1..40: mol_type = genomic DNA

SEQ ID NO: 30760 - DNA, 50 bp, Escherichia coli; identical to SEQ ID NO: 7690
  source 1..50: mol_type = genomic DNA

SEQ ID NO: 30761 - protein, 506 aa, Escherichia coli
MRSVITYLRYSSAIQGAEGADSTRRQNDLFRQWLKKNIDAQVVASFSDEGLSGYKGKHLSGQFGDMLSRIESGEFPEGTILLVESIDRIGRLEHLETEALMNRIIAHGIEIHTLQDGLIYTRDALSDDLGISIIQRVKSYVAHQESKQKSFRVSQKWKQRAKLALAGEQRLTRNVPGWIDPDTFKCNEHAETVRLIFKLLLDGESLHNIARHLQSNDIKSFSRRKDANGFSVHSVRTVLRSESVIGTLPASQRNDRPAIPNYYEATIDAATFNKAQEILDKNRKGRTPASDNPLTINIFKGLFRCQCGASVHPTGTKNKYAGVYRCNNHLDGRCDVPPLKRKPFDRWMIDNFLGMIDVGNDGESERKIAALQHEVEIVTARIKKATALLLEMDDITELKAQVKGLNQKRTEIQTTIDTLKRKTSLTDKELPQLKDIDLTTKAGRVECQLILSKHLKGLTLGKDSVTVTLQNDTEITIPTNPLPLNDGSPIFEIADKELLDIDAYQL

SEQ ID NO: 30762 - DNA, 50 bp, Escherichia coli; identical to SEQ ID NO: 30087
  source 1..50: mol_type = genomic DNA

SEQ ID NO: 30763 - DNA, 40 bp, Escherichia coli; identical to SEQ ID NO: 20043
  source 1..40: mol_type = genomic DNA

SEQ ID NO: 30764 - DNA, 40 bp, Escherichia coli; identical to SEQ ID NO: 30164
  source 1..40: mol_type = genomic DNA

SEQ ID NO: 30765 - DNA, 50 bp, Escherichia coli; identical to SEQ ID NO: 7690
  source 1..50: mol_type = genomic DNA

SEQ ID NO: 30766 - protein, 506 aa, Escherichia coli
MRSVITYLRFSSATQGAEGADSTRRQNELFKQWLRKNSDAQVVASFSDEGLSGYKGKHLTGQFGDMLARIEAGEFPAGTVLLVEAIDRIGRLEHLETEALMNRIIAHGIEIHTLQDGLIYTRDALSDDLGISIIQRVKSYLAHQESKQKSFRVSQKWKQRAKLALAGEQRLTRNVPGWIDPDTFKCNEHAETVRLIFKLLLDGESLHNIARHLQANNISSFSRRKDANGFSVHSVRTVLRSESVIGTLPASQRNDRPAIPNYYEAAIDAATFNKAQEILDKNRKGRTPASDNPLTINIFKGLFRCQCGASVHPTGTKNKYAGVYRCNNHLDGRCDVPPLKRKPFDKWMIDNFLGMIDVGNDGEAEGKIASLQYEVEIVTARIKKATALLLEMDDITELKTQVKELNQKRTELQTTIDSMRRKTSLSDKGLPQLKDIDLMTKEGRVECQLILSKHLKGLTLGKDSVTVTLQNDTEITIPTNPLPLNDGTSIFEIADKELLDIDAYQL

SEQ ID NO: 30767 - DNA, 50 bp, Escherichia coli; identical to SEQ ID NO: 30087
  source 1..50: mol_type = genomic DNA

SEQ ID NO: 30768 - DNA, 40 bp, Escherichia coli; identical to SEQ ID NO: 20043
  source 1..40: mol_type = genomic DNA

SEQ ID NO: 30769 - DNA, 40 bp, Escherichia coli; identical to SEQ ID NO: 30164
  source 1..40: mol_type = genomic DNA

SEQ ID NO: 30770 - DNA, 50 bp, Escherichia coli; identical to SEQ ID NO: 7690
  source 1..50: mol_type = genomic DNA

SEQ ID NO: 30771 - protein, 506 aa, Escherichia coli
MRSVITYLRFSSAIQGAEGADSTRRQNDLFKQWLKKNSDAHVVASFSDEGLSGYKGKHLSGQFGDMLSRIESGEFSEGTILLVEAIDRIGRLEHLETEALMNRIIAHGIEIHTLQDGLIYTRDALSDDLGISIIQRVKSYIAHQESKQKSFRVSQKWGQRAKLALAGKQRLTKMVPGWIDPETFEVNEHAETVRLIFKLLLDGESLHNIARHLQANNISSFSRRKDANGFSVHSVRTILRSETTIGTLPASQRNDRPAIPNYYEAAIDAATFNKAQEILDKNRKGRTPASDNPLTINIFKGLFRCQCGASVHPTGTKNKYQGVYRCNNHLDGRCDVPPLKRKPFDRWMIDNFLGMIDVGNDGESERKIAALQHEVEIVTSRIKKATALLLEMDDITELKAQVKELNQKRTELQTTINTMKRKTSLSDKGLPQLKDIDLMTKAGRVECQLILSKHLKGLTLGKDSVTVTLQNDTEITIPTNPLPLNDGSPIFEIADKELLDVDAYQL

SEQ ID NO: 30772 - DNA, 50 bp, Escherichia coli; identical to SEQ ID NO: 30087
  source 1..50: mol_type = genomic DNA

SEQ ID NO: 30773 - DNA, 40 bp, Escherichia coli; identical to SEQ ID NO: 20043
  source 1..40: mol_type = genomic DNA

SEQ ID NO: 30774 - DNA, 40 bp, Escherichia coli; identical to SEQ ID NO: 30164
  source 1..40: mol_type = genomic DNA

SEQ ID NO: 30775 - DNA, 50 bp, Escherichia coli; identical to SEQ ID NO: 7690
  source 1..50: mol_type = genomic DNA

SEQ ID NO: 30776 - protein, 506 aa, Escherichia coli
MRTVITYLRFSSATQGAEGADSTRRQNELFKQWLRKNSDAQVVASFNDEGLSGYKGKHLSGQFGDMLSRIESGEFPEGTILLVEAIDRIGRLEHLETEALMNRIIAHGIEIHTLQDGLIYTRDALSDDLGISIIQRVKSYLAHQESKQKSFRVSEKWKQRAKLALAGKQRLTKMVPGWIDHDTFKINEHAETVRLIFKLLLSGESLHNIARHLQSNGIKSFSRRKDANGFSVHSVRTILRSETTIGTLPASQRNDRPAIPNYYEAAIDAATFNKAQEILDKNRKGRTPASDNPLTINIFKGLFRCQCGASVHPTGTKNKYAGVYRCNNHLDGRCDVPPLKRKPFDRWMIDNFLGMIDVGNDGEAEGKIASLQHEVEIVTARIKKATALLLEMDDIDELKIQIKELNQRRTELQTTIDNMRRKASLTDKELPQLKDIDLTTKAGRVECQLILSKHLKGLTLGKDSVIVTLQNDTEITIPTNPLPLNDGTSIFEIAEKELLEIDAYQL

SEQ ID NO: 30777 - DNA, 50 bp, Escherichia coli; identical to SEQ ID NO: 30087
  source 1..50: mol_type = genomic DNA

SEQ ID NO: 30778 - DNA, 40 bp, Escherichia coli; identical to SEQ ID NO: 20043
  source 1..40: mol_type = genomic DNA

SEQ ID NO: 30779 - DNA, 40 bp, Escherichia coli; identical to SEQ ID NO: 30164
  source 1..40: mol_type = genomic DNA

SEQ ID NO: 30780 - DNA, 50 bp, Escherichia coli; identical to SEQ ID NO: 7690
  source 1..50: mol_type = genomic DNA

SEQ ID NO: 30781 - protein, 506 aa, Escherichia coli
MRSVITYLRFSSAIQGAEGADSTRRQNDLFKQWLKKNSDAQVVASFSDEGLSGYKGKHLTGQFGDMLARIESGEFSEGTILLVEAIDRIGRLEHLETEALMNRILGNGLEIHTLQDGLIYTKDALADDLGISIIQRVKAYIAHQESKQKSFRVSQKWEQRAKLALAGEQRLTRNVPGWIDPDTFKCNEHAETVRLIFKLLLDGESLHNIARHLQSNDIKSFSRRKDANGFSVHSVRTVLRSESVIGTLPASQRNDRPAIPNYYEAAIDAATFNKAQEILNKNRTGRTPASDNPLTINIFKGLFRCQCGASVHPTGTKNKYAGVYRCNNHLDGRCDVPPLKRKPFDKWMIDNFLGMIDVGNDGEAEGKIASLQHEVEIVTTRIKKATALLLEMDDITELKAQVKELNQKRTELQTTINTMKRKTSLSDKGLPQLKDIDLMTKAGRVECQLILSKHLKGLTLGKDSVTVTLQNDTEIIVPTDPLPLNDGTSIFEIAEKELLDIDAYQL

SEQ ID NO: 30782 - DNA, 50 bp, Escherichia coli; identical to SEQ ID NO: 30087
  source 1..50: mol_type = genomic DNA

SEQ ID NO: 30783 - DNA, 40 bp, Escherichia coli; identical to SEQ ID NO: 20043
  source 1..40: mol_type = genomic DNA

SEQ ID NO: 30784 - DNA, 40 bp, Escherichia coli; identical to SEQ ID NO: 30164
  source 1..40: mol_type = genomic DNA

SEQ ID NO: 30785 - DNA, 50 bp, Escherichia coli; identical to SEQ ID NO: 7690
  source 1..50: mol_type = genomic DNA

SEQ ID NO: 30786 - protein, 506 aa, Escherichia coli
MRTVITYLRFSSATQGAEGADSTRRQNELFKQWLRKNSDAQVVASFSDEGLSGYKGKHLTGQFGDMLARIESGEFPEGTLLLVEAIDRIGRLEHLETEALMNRIIAHGIEIHTLQDGLIYTRDALSDDLGISIIQRVKSYVAHQESKQKSFRVSQKWKQRAKLALAGEQRLTKMVPGWIDPDTFKCNEHAETVRLIFKLLLDGESLHNIARHLQANNISSFSRRKDANGFSVHSVRTILRSETTRGTLPASQRNDRPAIPNYYEAAIDASTFNKAQEILDKNRKGRTPASDNPLTINIFKGLFRCQCGASVHPTGTKNKYAGVYRCNNNPDGRCDVPPLKRKPFDKWMIDNFLGMIDVGNDGEAEGKIASLQHEVEIVTARIKKATALLLEMDDIDELKIQLKELNQKRTELQTMIDNMRRKASLTDKELPQLKDIDLMTKAGRVECQLILSKHLKGLTLGKDSVTVTLQNDTEITIPTNPLPLNDGSPIFEIADKELLDIDAYQL

SEQ ID NO: 30787 - DNA, 50 bp, Escherichia coli; identical to SEQ ID NO: 30087
  source 1..50: mol_type = genomic DNA

SEQ ID NO: 30788 - DNA, 40 bp, Escherichia coli; identical to SEQ ID NO: 20043
  source 1..40: mol_type = genomic DNA

SEQ ID NO: 30789 - DNA, 40 bp, Escherichia coli; identical to SEQ ID NO: 30164
  source 1..40: mol_type = genomic DNA

SEQ ID NO: 30790 - DNA, 50 bp, Escherichia coli; identical to SEQ ID NO: 7690
  source 1..50: mol_type = genomic DNA

SEQ ID NO: 30791 - protein, 506 aa, Escherichia coli
MRTVITYLRFSSAIQGAEGADSTRRQNDLFKQWLKKNSDAQVVASFSDEGLSGYKGKHLTGQFGDMLARIESGEFPAGTILLVESIDRIGRLEHLETEALMNRILGNGIEIHTLQDGLIYTKDALADDLGISIIQRVKAYIAHQESKQKSFRVSQKWEQRAKLALAGEQRLTKMVPGWIDPDTFKCNEHAETVRLIFKLLLDGESLHNIARHLQANNISSFSRRKDANGFSVHSVRTILRSETTRGTLPASQRNDRPAIPNYYEAAIDAATFNKAQEILDKNRKGRTPASDNPLTINIFKGLFRCQCGASVHPTGTKNKYQGVYRCNNHLDGRCDVQPLKRKPFDRWMIDNFLGMIDVGNDGEAEGKIASLQHEVEIVTARIKKATALLLEMDDIDELKIQLKELNQKRTELQTMIDNMRRKASLTDKELPQLKDIDLMTKAGRVECQLILSKHLKGLTLGKDSVTVTLQNDTEIIVPTDPLPLNDGTSIFEIAEKELLEIDAYQL

SEQ ID NO: 30792 - DNA, 50 bp, Escherichia coli; identical to SEQ ID NO: 30087
  source 1..50: mol_type = genomic DNA

SEQ ID NO: 30793 - DNA, 40 bp, Escherichia coli; identical to SEQ ID NO: 20043
  source 1..40: mol_type = genomic DNA

SEQ ID NO: 30794 - DNA, 40 bp, Escherichia coli; identical to SEQ ID NO: 30164
  source 1..40: mol_type = genomic DNA

SEQ ID NO: 30795 - DNA, 50 bp, Escherichia coli; identical to SEQ ID NO: 7690
  source 1..50: mol_type = genomic DNA

SEQ ID NO: 30796 - protein, 506 aa, Escherichia coli
MRTVITYLRFSSAIQGAEGADSTRRQNDLFKQWLKKNSDAQVVASFSDEGLSGYKGKHLTGQFGDMLARIESGEFSEGTVLLVEAIDRIGRLEHLETEALMNRIIAHGIEIHTLQDGLIYTRDALSDDLGISIIQRVKSYVAHQESKQKSFRVSQKWKQRAKLALAGEQRLTKMVPGWIDPDTLKLNEHAETVRLIFKLLLDGESLHNIARHLQANNISSFSRRKDANGFSVHSVRTILRSETTIGTLPASQRNDRPAIPNYYEAAIDVSTFNKAQEILDKNRKGRTPASDNPLTINIFKGLFRCQCGASVHPTGTKNKYQGVYRCNNHLDGRCDVQPLKRKPFDRWMIDNFLGMIDVGNDGESERKIAALQHEVEIVTARIKKATALLLEMDDIDELKIQLKELNQKRTELQTTIDNMRRKASLTDKELPQLKDIDLITKAGRVECQLILSKHLKGLTLGKDTVTVTLQNDTEITIPTDPLPLNDGTSIFEIAEKNLLNIDTFQL

SEQ ID NO: 30797 - DNA, 50 bp, Escherichia coli; identical to SEQ ID NO: 30087
  source 1..50: mol_type = genomic DNA

SEQ ID NO: 30798 - DNA, 40 bp, Escherichia coli; identical to SEQ ID NO: 20043
  source 1..40: mol_type = genomic DNA

SEQ ID NO: 30799 - DNA, 40 bp, Escherichia coli; identical to SEQ ID NO: 30164
  source 1..40: mol_type = genomic DNA

SEQ ID NO: 30800 - DNA, 50 bp, Escherichia coli; identical to SEQ ID NO: 7690
  source 1..50: mol_type = genomic DNA

SEQ ID NO: 30801 - protein, 506 aa, Escherichia coli
MRTVITYLRFSSATQGAEGADSTRRQNELFKQWLRKNSDAQVVASFSDEGLSGYKGKHLTGQFGDMLARIESGEFSEGTVLLVEAIDRIGRLEHLETEALMNRIIAHGIEIHTLQDGLIYTRDALSDDLGISIIQRVKSYVAHQESKQKSFRVSQKWKQRAKLALAGEQRLTRNVPGWIDPETFKLNEHAETVRLIFKLLLDGESLHNIARHLQSNDIKSFSRRKDANGFSVHSVRTVLRSESVIGTLPASQRNDRPAIPNYYEAAIDAATFNKAQEILDKNRKGRTPASDNPLTINIFKGLFRCQCGASVHPTGTKNKYAGVYRCNNHLDGRCDVPPLKRKPFDRWMIDNFLGMIDVGNDGEAEGGIASLQHEVEIVTARIKKATALLLEMDDIDELKIQLKELNQKRTELQTTIDNMRRKASLTDKELPQLKDIDLTTKAGRVECQLILSKHLKGLTLGKDSVTVTLQNDTEITIPTNPLPLNDGSPIFEIADKELLDIDAYQL

SEQ ID NO: 30802 - DNA, 50 bp, Escherichia coli; identical to SEQ ID NO: 30087
  source 1..50: mol_type = genomic DNA

SEQ ID NO: 30803 - DNA, 40 bp, Escherichia coli; identical to SEQ ID NO: 20043
  source 1..40: mol_type = genomic DNA

SEQ ID NO: 30804 - DNA, 40 bp, Escherichia coli; identical to SEQ ID NO: 30164
  source 1..40: mol_type = genomic DNA

SEQ ID NO: 30805 - DNA, 50 bp, Escherichia coli; identical to SEQ ID NO: 7690
  source 1..50: mol_type = genomic DNA

SEQ ID NO: 30806 - protein, 506 aa, Escherichia coli
MRSVITYLRYSSAIQGAEGADSTRRQNDLFKQWLKKNSDAQVVASFSDEGLSGYKGKHLTGQFGDMLARIEAGGFSEGTILLVESIDRIGRLEHLETEALMNRILGNGIEIHTLQDGLIYTKDALADDLGISIIQRVKAYIAHQESKQKSFRVSQKWGQRAKLALAGKQRLTKMVPGWIDPETFKLNEHAETVRLIFKLLLDGESLHNIARHLQSNGIRSFSRRKDANGFSVHSVRTILRSETTIGTLPASQRNDRPAIPNYYEAAIDAATFNKAQEILDKNRKGRTPASDNPLTINIFKGLFRCQCGASVHPTGTKNKYAGVYRCNNHLDGRCDVPPLKRKPFDKWMIDNFLGMIDVGNDGEAEGKIASLQHEVEIVTARIKKATALLLEMDDIDELKIQLKELNQKRTELQTMIDNMRRKASLTDKELPQLKDIDLMTKAGRVECQLILSKHLKGLTLGKDSVTVTLQNDTEITIPTNPLPLNDGTSIFEIAEKELLEIDAYQL

SEQ ID NO: 30807 - DNA, 50 bp, Escherichia coli; identical to SEQ ID NO: 30087
  source 1..50: mol_type = genomic DNA

SEQ ID NO: 30808 - DNA, 40 bp, Escherichia coli; identical to SEQ ID NO: 20043
  source 1..40: mol_type = genomic DNA

SEQ ID NO: 30809 - DNA, 40 bp, Escherichia coli; identical to SEQ ID NO: 30164
  source 1..40: mol_type = genomic DNA

SEQ ID NO: 30810 - DNA, 50 bp, Escherichia coli; identical to SEQ ID NO: 7690
  source 1..50: mol_type = genomic DNA

SEQ ID NO: 30811 - protein, 506 aa, Escherichia coli
MRTVITYLRFSSAIQGAEGADSTRRQNDLFKQWLKKNSDAQVVASFSDEGLSGYKGKHLTGQFGDMLARIESGEFPEGTILLVEAIDRIGRLEHLETEALMNRILGNGIEIHTLQDGLVYTKDALADDLGISIIQRVKSYLAHQESKQKSFRVSEKWKQRAKLALAGKQRLTKMVPGWIDPDTFKLNEHAETVRLIFKLLLSGESLHNIARHLQANNISSFSRRKDANGFSVHSVRTILMSETTIGTLPASQRNDRPAIPNYYEAAIDAATFNKAQEILDKNRKGRTPASDNPLTINIFKGLFRCQCGASVHPTGTKRTYQGVYRCNNHLDGRCDVQPLKRKPFDRWMIDNFLGMIDVGNDGESERKIAALQHEVEIVTARIKKATALLLEMDDIDELKIQIKELNQRRTELQTTIDNMRRKASLTDKELPQLKDIDLTTKAGRVECQLILSKHLKGLTLGKDSVTVTLQNDTEITIPTNPLPLNDGTSIFEIAEKELLEIDAYQL

SEQ ID NO: 30812 - DNA, 50 bp, Escherichia coli; identical to SEQ ID NO: 30087
  source 1..50: mol_type = genomic DNA

SEQ ID NO: 30813 - DNA, 40 bp, Escherichia coli; identical to SEQ ID NO: 20043
  source 1..40: mol_type = genomic DNA

SEQ ID NO: 30814 - DNA, 40 bp, Escherichia coli; identical to SEQ ID NO: 30164
  source 1..40: mol_type = genomic DNA

SEQ ID NO: 30815 - DNA, 50 bp, Escherichia coli; identical to SEQ ID NO: 7690
  source 1..50: mol_type = genomic DNA

SEQ ID NO: 30816 - protein, 499 aa, Escherichia coli
MRFSSATQGAEGADSTRRQNELFKQWLRKNSDAQVVASFSDEGLSGYKGKHLTGQFGDMLARIESGEFSEGTVLLVEAIDRIGRLEHLETEALMNRIIAHGIEIHTLQDGLIYTRDALSDDLGISIIQRVKSYVAHQESKQKSFRVSQKWKQRAKLALAGEQRLTRNVPGWIDPDTFKCNEHAETVRLIFKLLLDGESLHNIARHLQSNDIKSFSRRKDANGFSVHSVRTVLRSESVIGTLPASQRNDRPAIPNYYEAAIDAATFNKAQEILDKNRKGRTPASDNPLTINIFKGLFRCQCGASVHPTGTKNKYAGVYRCNNHLDGRCDVPPLKRKPFDRWMIDNFLGMIDVGNDGESERKIAALQHEVEIVTARIKKATALLLEMDDITELKAQVKGLNQKRTEIQTTIDTLKRKTSLTDKELPQLKDIDLTTKAGRVECQLILSKHLKGLTLGKDSVTVTLQNDTEITIPTNPLPLNDGSPIFEIADKELLDIDAYQL

SEQ ID NO: 30817 - DNA, 50 bp, Escherichia coli; identical to SEQ ID NO: 30087
  source 1..50: mol_type = genomic DNA

SEQ ID NO: 30818 - DNA, 40 bp, Escherichia coli; identical to SEQ ID NO: 20043
  source 1..40: mol_type = genomic DNA

SEQ ID NO: 30819 - DNA, 40 bp, Escherichia coli; identical to SEQ ID NO: 30164
  source 1..40: mol_type = genomic DNA

SEQ ID NO: 30820 - DNA, 50 bp, Escherichia coli; identical to SEQ ID NO: 7690
  source 1..50: mol_type = genomic DNA

SEQ ID NO: 30821 - protein, 506 aa, Escherichia coli
MRHVITYLRYSSAIQGAEGADSTRRQNELFKQWLRKNSDAQVVASFSDEGLSGYKGKHLTGQFGDMLARIEAGEFPAGTILLVESIDRIGRLEHLETEALMNRILGNGIEIHTLQDGLIYTKDALADDLGISIIQRVKAYIAHQESKQKSFRVSQKWEQRAKLALAGEQRLTKMVPGWIDPDTFKCNEHAETVRLIFKLLLDGESLHNIARHLQANNISSFSRRKDANGFSVHSVRTILRSETTRGTLPASQRNDRPAIPNYYEAAIDAATFNKAQEILDKNRKGRTPASDNPLTINIFKGLFRCQCGASVHPTGTKNKYAGVYRCNNHLDGRCDVPPLKRKPFDKWMLENFLGMIDVGNDGEAEGKIASLQHEVEIVTTRIKKATALLLEMDDIDELKIQLKELNQKRTELQTTIDSMRRKTSLSDKGLPQLKDIDLMTKAGRVECQLILSKHLKGLTLGKDSVTVTLQNDTEITIPTNPLPLNDGSPIFEIADKELLDIDAYQL

SEQ ID NO: 30822 - DNA, 50 bp, Escherichia coli; identical to SEQ ID NO: 30087
  source 1..50: mol_type = genomic DNA

SEQ ID NO: 30823 - DNA, 40 bp, Escherichia coli; identical to SEQ ID NO: 20043
  source 1..40: mol_type = genomic DNA

SEQ ID NO: 30824 - DNA, 40 bp, Escherichia coli; identical to SEQ ID NO: 30164
  source 1..40: mol_type = genomic DNA

SEQ ID NO: 30825 - DNA, 50 bp, Escherichia coli; identical to SEQ ID NO: 7690
  source 1..50: mol_type = genomic DNA

SEQ ID NO: 30826 - protein, 506 aa, Escherichia coli
MRTVITYLRFSSAIQGAEGADSTRRQNDLFKQWLKKNSDAQVVASFSDEGLSGYKGKHLTGQFGDMLARIESGEFPEGTILLVEAIDRIGRLEHLETEALMNRIIAHGIEIHTLQDGLIYTRDALSDDLGISIIQRVKSYIAHQESKQKSFRVSQKWEQRAKLALAGEQRLTRNVPGWIDPDTFKCNEHAETVRLIFKLLLDGESLHNIARHLQSNDIKSFSRRKDANGFSVHSVRTVLRSESVIGTLPASQRNDRPAIPNYYEAAIDAATFNKAQEILDKNRKGRTPASDNPLTINIFKGLFRCQCGASVHPTGTKNKYAGVYRCNNHLDGRCDVPPLKRKPFDKWMIDNFLGMIDVGNDGEAEGKIASLQHEVEIVTTRIKKATALLLEMDDITELKTQVKELNQKRTELQTTIDSMRRKTSLSDKGLPQLKDIDLMTKEGRVECQLILSKHLKGLTLGKDSVTVTLQNDTEITIPTNPLPLNDGSPIFEIADKELLDIDAYQL

SEQ ID NO: 30827 - DNA, 50 bp, Escherichia coli; identical to SEQ ID NO: 30087
  source 1..50: mol_type = genomic DNA

SEQ ID NO: 30828 - DNA, 40 bp, Escherichia coli; identical to SEQ ID NO: 20043
  source 1..40: mol_type = genomic DNA

SEQ ID NO: 30829 - DNA, 40 bp, Escherichia coli; identical to SEQ ID NO: 30164
  source 1..40: mol_type = genomic DNA

SEQ ID NO: 30830 - DNA, 50 bp, Escherichia coli; identical to SEQ ID NO: 7690
  source 1..50: mol_type = genomic DNA

SEQ ID NO: 30831 - protein, 506 aa, Escherichia coli
MRSVITYLRYSSAIQGAEGADSTRRQNELFKQWLKKNSDAQIVASFSDEGLSGYKGKHLTGQFGDMLARIESGEFPQGAILLVESIDRIGRLEHLETEALMNRIIAHGIEIHTLQDGLIYTRDALSDDLGISIIQRVKSYLAHQESKQKSFRVSEKWKQRAKLALAGEQRLTKMVPGWIDPETFKLNEHAETVRLIFKLLLDGESLHNIARHLQSNDIKSFSRRKDANGFSVHSVRTVLRSESVIGTLPASQRNDRPAIPNYYEAAIDAATFNKAQEILDKNRKGRTPASDNPLTINIFKGLFRCQCGASVHPTGTKNKYAGVYRCNNHLDGRCDVPPLKRKPFDKWMIDNFLGMIDVGNDGEAEGKIASLQHEVEIVTARIKKATALLLEMDDIDELKIQLKELNQKRTELQTTIDNMRRKASLTDKELPQLKDIDLTTKAGRVECQLILSKHLKGLTLGKDSVTVTLQNDTEITIPTNPLPLNDGSPIFEIADKELLDIDAYQL

SEQ ID NO: 30832 - DNA, 50 bp, Escherichia coli; identical to SEQ ID NO: 30087
  source 1..50: mol_type = genomic DNA

SEQ ID NO: 30833 - DNA, 40 bp, Escherichia coli; identical to SEQ ID NO: 20043
  source 1..40: mol_type = genomic DNA

SEQ ID NO: 30834 - DNA, 40 bp, Escherichia coli; identical to SEQ ID NO: 30164
  source 1..40: mol_type = genomic DNA

SEQ ID NO: 30835 - DNA, 50 bp, Escherichia coli; identical to SEQ ID NO: 7690
  source 1..50: mol_type = genomic DNA

SEQ ID NO: 30836 - protein, 506 aa, Escherichia coli
MRTVITYLRFSSATQGAEGADSTRRQNELFKQWLRKNSDAQVVASFSDEGLSGYKGKHLTGQFGDMLARIESGEFSEGTVLLVEAIDRIGRLEHLETEALMNRIIAHGIEIHTLQDGLIYTRDALSDDLGISIIQRVKSYVAHQESKQKSFRVSQKWKQRAKLALAGEQRLTKMVPGWIDPDTFKCNEHAETVRLIFKLLLDGESLHNIARHLQANNISSFSRRKDANGFSVHSVRTILRSETTIGTLPASQRNDRPAIPNYYEAAIDAATFNKAQEILDKNRKGRTPASDNPLTINIFKGLFRCQCGASVHPTGTKNKYAGVYRCNNNPDGRCDVPPLKRKPFDKWMIDNFLGMIDVGNDGEAEGKIAALQHEVEIVTARIKKATALLLEMDDITELKTQVKGLNQKRTELQTTIDNMRRKASLTDKELPQLKDIDLMTKAGRVECQLILSKHLKGLTLGKDSVTVTLQNDTEIIVPTDPLPLNDGTSIFEIAEKELLEIDAYQL

SEQ ID NO: 30837 - DNA, 50 bp, Escherichia coli; identical to SEQ ID NO: 30087
  source 1..50: mol_type = genomic DNA

SEQ ID NO: 30838 - DNA, 40 bp, Escherichia coli; identical to SEQ ID NO: 20043
  source 1..40: mol_type = genomic DNA

SEQ ID NO: 30839 - DNA, 40 bp, Escherichia coli; identical to SEQ ID NO: 30164
  source 1..40: mol_type = genomic DNA

SEQ ID NO: 30840 - DNA, 50 bp, Escherichia coli; identical to SEQ ID NO: 7690
  source 1..50: mol_type = genomic DNA

SEQ ID NO: 30841 - protein, 506 aa, Escherichia coli
MRSVITYLRFSSAIQGAEGADSTRRQNDLFKQWLKKNSDAQVVASFSDEGLSGYKGKHLSGQFGDMLSRIESREFSEGTILLVEAIDRIGRLEHLETEALMNRIIAHGIEIHTLQDGLIYTRDALSDDLGISIIQRVKSYIAHQESKQKSFRVSQKWGQRAKLALAGKQRLTKMVPGWIDPETFEVNEHAETVRLIFKLLLDGESLHNIARHLQANNISSFSRRKDANGFSVHSVRTILRSETTIGTLPASQRNDRPAIPNYYEAAIDAATFNKAQEILDKNRKGRTPASDNPLTINIFKGLFRCQCGASVHPTGTKNKYQGVYRCNNHLDGRCDVPPLKRKPFDRWMIDNFLGMIDVGNDGESERKIAALQHEVEIVTSRIKKATALLLEMDDITELKAQVKELNQKRTELQTTINTMKRKTSLSDKGLPQLKDIDLMTKAGRVECQLILSKHLKGLTLGKDSVTVTLQNDTEITIPTNPLPLNDGSPIFEIADKELLDVDAYQL

SEQ ID NO: 30842 - DNA, 50 bp, Escherichia coli; identical to SEQ ID NO: 30087
  source 1..50: mol_type = genomic DNA

SEQ ID NO: 30843 - DNA, 40 bp, Escherichia coli; identical to SEQ ID NO: 20043
  source 1..40: mol_type = genomic DNA

SEQ ID NO: 30844 - DNA, 40 bp, Escherichia coli; identical to SEQ ID NO: 30164
  source 1..40: mol_type = genomic DNA

SEQ ID NO: 30845 - DNA, 50 bp, Escherichia coli; identical to SEQ ID NO: 7690
  source 1..50: mol_type = genomic DNA

SEQ ID NO: 30846 - protein, 506 aa, Escherichia coli
MRTVITYLRFSSATQGAEGADSTRRQNELFKQWLRKNSDAQVVASFSDEGLSGYKGKHLTGQFGDMLARIESGEFSEGTVLLVEAIDRIGRLEHLETEALMNRIIAHGIEIHTLQDGLIYTRDALSDDLGISIIQRVKSYVAHQESKQKSFRVSQKWKQRAKLALAGEQRLTRNVPGWIDPDTFKCNEHAETVRLIFKLLLDGESLHNIARHLQSNDIKSFSRRKDANGFSVHSVRTVLRSESVIGTLPASQRNDRPAIPNYYEPAIDASTFNKAQEILDKNRKGRTPASDNPLTINIFKGLFRCQCGASVHPTGTKNKYAGVYRCNSHLDGRCGVPPLKRKPFDKWMIDNFLGMIDVGNDGEAEKEIASLQHEVETVTARIKKATALLLEMDDIDELKIQLKELNQKRTELQTTIDSMRRKASLTDKELPQLKDIDLTTKAGRVECQLILSKHLKGLTLGKDSVTVTLQNDTEITIPTNPLPLNDGSPIFEIADKELLDIDAYQL

SEQ ID NO: 30847 - DNA, 50 bp, Escherichia coli; identical to SEQ ID NO: 30087
  source 1..50: mol_type = genomic DNA

SEQ ID NO: 30848 - DNA, 40 bp, Escherichia coli; identical to SEQ ID NO: 20043
  source 1..40: mol_type = genomic DNA

SEQ ID NO: 30849 - DNA, 40 bp, Escherichia coli; identical to SEQ ID NO: 30164
  source 1..40: mol_type = genomic DNA

SEQ ID NO: 30850 - DNA, 50 bp, Escherichia coli; identical to SEQ ID NO: 7690
  source 1..50: mol_type = genomic DNA

SEQ ID NO: 30851 - protein, 506 aa, Escherichia coli
MRTVITYLRFSSATQGAEGADSTRRQNELFKQWLRKNSDAQVVASFSDEGLSGYKGKHLTGQFGDMLARIEAGEFPAGTILLVESIDRIGRLEHLETEALMNRILGNGIEIHTLQDGLIYTKDALADDLGISIIQRVKAYIAHQESKQKSFRVSQKWEQRAKLALAGEQRLTKMVPGWIDPDTFKCNEHAETVRLIFKLLLDGESLHNIARHLQANNISSFSRRKDANGFSVHSVRTILRSVTTIGTLPASQRNDRPAIPNYYEAAIDAATFNKAQEILDKNRKGRTPASDNPLTINIFKGLFRCQCGASVHPTGTKNKYAGVYRCNNHLDGRCDVPPLKRKPFDKWMIDNFLGMIDVGNDGEAEGKIAALQHEVEIVTSRIKKATALLLEMDDITELKAQVKELNQKRTELQTTINTMKRKTSLSDKGLPQLKDIDLMTKAGRVECQLILSKHLKGLTLGKDSVIVTLQNDTEITIPTNPLPLNDGTSIFEIAEKELLEIDAYQL

SEQ ID NO: 30852 - DNA, 50 bp, Escherichia coli; identical to SEQ ID NO: 30087
  source 1..50: mol_type = genomic DNA

SEQ ID NO: 30853 - DNA, 40 bp, Escherichia coli; identical to SEQ ID NO: 20043
  source 1..40: mol_type = genomic DNA

SEQ ID NO: 30854 - DNA, 40 bp, Escherichia coli; identical to SEQ ID NO: 30164
  source 1..40: mol_type = genomic DNA

SEQ ID NO: 30855 - DNA, 50 bp, Escherichia coli; identical to SEQ ID NO: 7690
  source 1..50: mol_type = genomic DNA

SEQ ID NO: 30856 - protein, 506 aa, Escherichia coli
MRTVITYLRFSSATQGAEGADSTRRQNELFKQWLRKNSDAQVVASFSDEGLSGYKGKHLTGQFGDMLARIESGEFSEGTVLLVEAIDRIGRLEHLETEALMNRIIAHGIEIHTLQDGLIYTRDALSDDLGISIIQRVKSYVAHQESKQKSFRVSQKWKQRAKLALAGEQRLTKMVPGWIDPDTFKCNEHAETVRLIFKLLLDGESLHNIARHLQANNISSFSRRKDANGFSVHSVRTILRSETTIGTLPASQRNDRPAIPNYYEAAIDAATFNKAQEILDKNRKGRTPASDNPLTINIFKGLFRCQCGASVHPTGTKNKYAGVYRCNNNPDGRCDVPPLKRKPFDKWMIDNFLGMIDVGNDGEAEGKIASLQHEVEIVTTRIKKATALLLEMDDIDELKIQLKELNQKRTELQTTIDNMRRKASLTDKELPQLKDIDLMTKAGRVECQLILSKHLESLTLGRGQVTVKLSNGTEIIVPTDPLPLTDGAAIFEIAEKNLLNIDTFQL

SEQ ID NO: 30857 - DNA, 50 bp, Escherichia coli; identical to SEQ ID NO: 30087
  source 1..50: mol_type = genomic DNA

SEQ ID NO: 30858 - DNA, 40 bp, Escherichia coli; identical to SEQ ID NO: 20043
  source 1..40: mol_type = genomic DNA

SEQ ID NO: 30859 - DNA, 40 bp, Escherichia coli; identical to SEQ ID NO: 30164
  source 1..40: mol_type = genomic DNA

SEQ ID NO: 30860 - DNA, 50 bp, Escherichia coli; identical to SEQ ID NO: 7690
  source 1..50: mol_type = genomic DNA

SEQ ID NO: 30861 - protein, 506 aa, Escherichia coli
MRSVITYLRFSSAIQGAEGADSTRRQNDLFKQWLKKNSDAQVVASFSDEGLSGYKGKHLTGQFGDMLARIESGEFSEGTVLLVEAIDRIGRLEHLETEALMNRIIAHGIEIHTLQDGLIYTRDALSDDLGISIIQRVKSYVAHQESKQKSFRVSQKWKQRAKLALAGEQRLTKMVPGWIDPDTFKLNEHAETVRLIFKLLLSGESLHNIARHLQANNISSFSRRKDANGFSVHSVRTVLRSESVIGTLPASQRNDRPAIPNYYEAAIDASTFNKAQEILDKNRKGRTPASDNPLTINIFKGLFRCQCGASVHPTGTKNKYQGVYRCNSHLDGRCDVPPLKRKPFDRWMIDNFLGMIDVGNDGEAEKEIASLQHEVETVTARIKKATALLLEMDDITELKTQVKELNQKRTELQTTINTMKRKTSLSDKGLPQLKDIDLMTKAGRVECQLILSKHLKGLTLGKDSVIVTLQNDTEITIPTDPLPLNDGTSIFEIAEKNLLNIDTFQL

SEQ ID NO: 30862 - DNA, 50 bp, Escherichia coli; identical to SEQ ID NO: 30087
  source 1..50: mol_type = genomic DNA

SEQ ID NO: 30863 - DNA, 40 bp, Escherichia coli; identical to SEQ ID NO: 20043
  source 1..40: mol_type = genomic DNA

SEQ ID NO: 30864 - DNA, 40 bp, Escherichia coli; identical to SEQ ID NO: 30164
  source 1..40: mol_type = genomic DNA

SEQ ID NO: 30865 - DNA, 50 bp, Escherichia coli; identical to SEQ ID NO: 7690
  source 1..50: mol_type = genomic DNA

SEQ ID NO: 30866 - protein, 499 aa, Escherichia coli
MRFSSATQGAEGADSTRRQNELFKQWLRKNSDAQVVASFSDEGLSGYKGKHLTGQFGDMLARIESGEFSEGTVLLVEAIDRIGRLEHLETEALMNRIIAHGIEIHTLQDGLIYTRDALSDDLGISIIQRVKSYVAHQESKQKSFRVSQKWKQRAKLALAGEQRLTRNVPGWIDPDTFKCNEHAETVRLIFKLLLDGESLHNIARHLQSNDIKSFSRRKDANGFSVHSVRTVLRSESVIGTLPASQRNDRPAIPNYYEAAIDAATFNKAQEILDKNRKGRTPASDNPLTINIFKGLFRCQCGASVHPTGTKRTYQGVYRCNNHLDGRCDVPPLKRKPFDRWMIDNFLGMIDVGNDGEAEGKIASLQHEVEIVTARIKKATALLLEMDDITELKAQVKGLNQKRTELQTTIDNMRRKASLTDKELPQLKDIDLTTKAGRVECQLILSKHLKGLTLGKDSVTVTLQNDTEITIPTNPLPLNDGSPIFEIADKELLDIDAYQL

SEQ ID NO: 30867 - DNA, 50 bp, Escherichia coli; identical to SEQ ID NO: 30087
  source 1..50: mol_type = genomic DNA

SEQ ID NO: 30868 - DNA, 40 bp, Escherichia coli; identical to SEQ ID NO: 20043
  source 1..40: mol_type = genomic DNA

SEQ ID NO: 30869 - DNA, 40 bp, Escherichia coli; identical to SEQ ID NO: 30164
  source 1..40: mol_type = genomic DNA

SEQ ID NO: 30870 - DNA, 50 bp, Escherichia coli; identical to SEQ ID NO: 7690
  source 1..50: mol_type = genomic DNA

SEQ ID NO: 30871 - protein, 499 aa, Escherichia coli
MRFSSATQGAEGADSTRRQNELFKQWLRKNSDAQVVASFSDEGLSGYKGKHLTGQFGDMLARIEAGEFPSGTILLVESIDRIGRLEHLETEALMNRILGNGIEIHTLQDGLIYTKDALADDLGISIIQRVKAYIAHQESKQKSFRVSQKWEQRAKLALAGEQRLTKMVPGWIDPDTFKCNEHAETVRLIFKLLLSGESLHNIARHLQANNISSFSRRKDANGFSVHSVRTVLRSESVIGTLPASQRNDRPAIPNYYEAAIDAATFNKAQEILDKNRKGRTPASDNPLTINIFKGLFRCQCGASVHPTGTKNKYAGVYRCNNHLDGRCDVPPLKRKPFDKWMIDNFLGMIDVGNDGEAEGKIASLQHEVEIVTTRIKKATALLLEMDDITELKTQVKELNQKRTELQTTIDNMRRKASLTDKELPQLKDIDLTTKAGRVECQLILSKHLKGLTLGKDSVTVTLQNDTEIIVPTDPLPLNDGSPIFEIADKELLDIDAFRL

SEQ ID NO: 30872 - DNA, 50 bp, Escherichia coli; identical to SEQ ID NO: 30087
  source 1..50: mol_type = genomic DNA

SEQ ID NO: 30873 - DNA, 40 bp, Escherichia coli; identical to SEQ ID NO: 20043
  source 1..40: mol_type = genomic DNA

SEQ ID NO: 30874 - DNA, 40 bp, Escherichia coli; identical to SEQ ID NO: 30164
  source 1..40: mol_type = genomic DNA

SEQ ID NO: 30875 - DNA, 50 bp, Escherichia coli; identical to SEQ ID NO: 7690
  source 1..50: mol_type = genomic DNA

SEQ ID NO: 30876 - protein, 506 aa, Escherichia coli; identical to SEQ ID NO: 30566

SEQ ID NO: 30877 - DNA, 50 bp, Escherichia coli
  source 1..50: mol_type = genomic DNA
aaaccgaatagacttcattcaaggatcattgtattgtagctattcggcat

SEQ ID NO: 30878 - DNA, 40 bp, Escherichia coli; identical to SEQ ID NO: 20043
  source 1..40: mol_type = genomic DNA

SEQ ID NO: 30879 - DNA, 40 bp, Escherichia coli; identical to SEQ ID NO: 30164
  source 1..40: mol_type = genomic DNA

SEQ ID NO: 30880 - DNA, 50 bp, Escherichia coli; identical to SEQ ID NO: 7690
  source 1..50: mol_type = genomic DNA

SEQ ID NO: 30881 - protein, 506 aa, Escherichia coli
MRHVITYLRYSSAIQGAEGADSTRRQNDLFKQWLKKNSDAQVVASFNDEGLSGYKGKHLSGQFGDMLSRIESGEFSEGTVLLVEAIDRIGRLEHLETEALMNRILGNGIEIHTLQDGLIYTKDALSDDLGISIIQRVKSYIAHQESKQKSFRVSQKWEQRAKLALAGKQRLTKMVPGWIDPETFKLNEHAETVRLIFKLLLDGESLHNIARHLQSNDIKSFSRRKDANGFSVHSVRTVLRSESVIGTLPASQRNDRPAIPNYYEAAIDAATFNKAQEILDKNRKGRTPASDNPLTINIFKGLFRCQCGASVHPTGTKRTYQGVYRCNNHLDGRCDVQPLKRKPFDRWMIDNFLGMIDVGNDGESERKIAALQHEVEIVTARIKKATALLLEMDDIDELKIQLKELNQKRTELQTTIDNMRRKASLTDKELPQLKDIDLTTKAGRVECQLILSKHLKGLTLGKDSVTVTLQNDTEITIPTNPLPLNDGSPIFEIADKELLDIDAYQL

SEQ ID NO: 30882 - DNA, 50 bp, Escherichia coli; identical to SEQ ID NO: 30087
  source 1..50: mol_type = genomic DNA

SEQ ID NO: 30883 - DNA, 40 bp, Escherichia coli; identical to SEQ ID NO: 20043
  source 1..40: mol_type = genomic DNA

SEQ ID NO: 30884 - DNA, 40 bp, Escherichia coli; identical to SEQ ID NO: 30164
  source 1..40: mol_type = genomic DNA

SEQ ID NO: 30885 - DNA, 50 bp, Escherichia coli; identical to SEQ ID NO: 7690
  source 1..50: mol_type = genomic DNA

SEQ ID NO: 30886 - protein, 506 aa, Escherichia coli
MRTVITYLRFSSATQGAEGADSTRRQNELFKQWLRKNSDAQVVASFSDEGLSGYKGKHLTGQFGDMLARIEAGEFPASTILLVESIDRIGRLEHLETEALMNRILGNGIEIHTLQDGLIYTKDALADDLGISIIQRVKAYIAHQESKQKSFRVSQKWKQRAKLALAGEQHLTRNVPGWIDPDTFKCNEHAETVRLIFKLLLDGESLHNIARHLQSNDIKSFSRRKDANGFSVHSVRTVLRSESVIGTLPASQRNDRPAIPNYYEAAIDAATFNKAQEILDKNRKGRTPASDNPLTINIFKGLFRCQCGASVHPTGTKNKYAGVYRCNNHLDGRCDVPPLKRKPFDRWMIDNFLGMIDVGNDGESERKIAALQHEVEIVTARIKKATALLLEMDDITELKAQVKGLNQKRTEIQTTIDTLKRKTSLTDKELPQLKDIDLTTKAGRVECQLILSKHLKGLTLGKDSVTVTLQNDTEITIPTNPLPLNDGSPIFEIADKELLDVDAYQL

SEQ ID NO: 30887 - DNA, 50 bp, Escherichia coli; identical to SEQ ID NO: 30087
  source 1..50: mol_type = genomic DNA

SEQ ID NO: 30888 - DNA, 40 bp, Escherichia coli; identical to SEQ ID NO: 20043
  source 1..40: mol_type = genomic DNA

SEQ ID NO: 30889 - DNA, 40 bp, Escherichia coli; identical to SEQ ID NO: 30164
  source 1..40: mol_type = genomic DNA

SEQ ID NO: 30890 - DNA, 50 bp, Escherichia coli; identical to SEQ ID NO: 7690
  source 1..50: mol_type = genomic DNA

SEQ ID NO: 30891 - protein, 506 aa, Escherichia coli
MRTVITYLRFSSATQGAEGADSTRRQNELFKQWLRKNSDAQVVASFSDEGLSGYKGKHLTGQFGDMLARIEAGEFPAGAILLVESIDRIGRLEHLETEALMNRIIAHGIEIHTLQDGLIYTRDALSDDLGISIIQRVKSYLAHQESKQKSFRVSEKWKQRAKLALAGEQHLTRNVPGWIDPDTFKCNEHAETVRLIFKLLLDGESLHNIARHLQSNDIKSFSRRKDANGFSVHSVRTVLRSESVIGTLPASQRNDRPAIPNYYEAAIDASTFNKAQEILDKNRKGRTPASDNPLTINIFKGLFRCQCGASVHPTGTKNKYQGVYRCNSHLDGRCDVPPLKRKPFDRWMIDNFLGMIDVGNDGEAEKEIASLQHEVETVTARIKKATALLLEMDDIDELKIQIKELNQRRTELQTTIDSMRRKASLTDKELPQLKDIDLTTKAGRVECQLILSKHLKGLTLGKGSVTITLQNDTEITIPTNPLPLNDGSPIFEIADKELLDIDAYQL

SEQ ID NO: 30892 - DNA, 50 bp, Escherichia coli; identical to SEQ ID NO: 30087
  source 1..50: mol_type = genomic DNA

SEQ ID NO: 30893 - DNA, 40 bp, Escherichia coli; identical to SEQ ID NO: 20043
  source 1..40: mol_type = genomic DNA

SEQ ID NO: 30894 - DNA, 40 bp, Escherichia coli; identical to SEQ ID NO: 30164
  source 1..40: mol_type = genomic DNA

SEQ ID NO: 30895 - DNA, 50 bp, Escherichia coli; identical to SEQ ID NO: 7690
  source 1..50: mol_type = genomic DNA

SEQ ID NO: 30896 - protein, 506 aa, Escherichia coli
MRHVITYLRYSSAIQGAEGADSTRRQNDLFKQWLKKNSDAQVVASFNDEGLSGYKGKHLSGQFGDMLSRIESGEFSAGTILLVESIDRIGRLEHLETEALMNRILGNGIEIHTLQDGLIYTKDALADDLGISIIQRVKAYIAHQESKQKSFRVSQKWEQRAKLALAGEQRLTKMVPGWIDPDTFKLNEHAETVRLIFKLLLDGESLHNIARHLQSNGIKSFSRRKDANGFSVHSVRTILRSVTTRGTLPASQRNDRPAIPNYYEAAIDAATFNKAQEILDKNRKGRTPASDNPLTINIFKGLFRCQCGASVHPTGTKNKYQGVYRCNNHLDGRCDVPPLKRKPFDRWMIDNFLGMIDVGNDGESERKIAALQHEVEIVTSRIKKATALLLEMDDITELKAQVKELNQKRTELQTTINTMKRKTSLSDKGLPQLKDIDLMTKAGRVECQLILSKHLKGLTLGKDSVTVTLQNDTEITIPTNPLPLNDGSPIFEIADKELLDVDAYQL

SEQ ID NO: 30897 - DNA, 50 bp, Escherichia coli; identical to SEQ ID NO: 30087
  source 1..50: mol_type = genomic DNA

SEQ ID NO: 30898 - DNA, 40 bp, Escherichia coli; identical to SEQ ID NO: 20043
  source 1..40: mol_type = genomic DNA

SEQ ID NO: 30899 - DNA, 40 bp, Escherichia coli; identical to SEQ ID NO: 30164
  source 1..40: mol_type = genomic DNA

SEQ ID NO: 30900 - DNA, 50 bp, Escherichia coli; identical to SEQ ID NO: 7690
  source 1..50: mol_type = genomic DNA

SEQ ID NO: 30901 - protein, 506 aa, Escherichia coli
MRTVITYLRFSSATQGAEGADSTRRQNDLFKQWLKKNSDAQVVASFSDEGLSGYKGKHLTGQFGDMLARIEAGEFPGGTILLVESIDRIGRLEHLETEALMNRIIAHGIEIHTLQDGLIYTRDALSDDLGISIIQRVKSYLAHQESKQKSFRVSEKWKQRAKLALAGKQRLTKMVPGWIDPDTLKLNEHAETVRLIFKLLLSGESLHNIARHLQSNGIKSFSRRKDANGFSVHSVRTILRSETTIGTLPASQRNDRPAIPNYYEAAIDAATFNKAQEILDKNRKGRTPASDNPLTINIFKGLFRCQCGASVHPTGTKNKYAGVYRCNNHLDGRCDVPPLKRKPFDRWMIDNFLGMIDVGNDGEAEGKIASLQHEVEIVTARIKKATALLLEMDDITELKAQVKGLNQKRTELQTTIDNMRRKASLTDKELPQLKDIDLTTKAGRVECQLILSKHLKGLTLGKDSVTVTLQNDTEITIPTNPLPLNDGSPIFEIADKELLDIDAYQL

SEQ ID NO: 30902 - DNA, 50 bp, Escherichia coli; identical to SEQ ID NO: 30087
  source 1..50: mol_type = genomic DNA

SEQ ID NO: 30903 - DNA, 40 bp, Escherichia coli; identical to SEQ ID NO: 20043
  source 1..40: mol_type = genomic DNA

SEQ ID NO: 30904 - DNA, 40 bp, Escherichia coli; identical to SEQ ID NO: 30164
  source 1..40: mol_type = genomic DNA

SEQ ID NO: 30905 - DNA, 50 bp, Escherichia coli; identical to SEQ ID NO: 7690
  source 1..50: mol_type = genomic DNA

SEQ ID NO: 30906 - protein, 506 aa, Escherichia coli; identical to SEQ ID NO: 20056

SEQ ID NO: 30907 - DNA, 50 bp, Escherichia coli; identical to SEQ ID NO: 30087
  source 1..50: mol_type = genomic DNA

SEQ ID NO: 30908 - DNA, 40 bp, Escherichia coli; identical to SEQ ID NO: 23173
  source 1..40: mol_type = genomic DNA

SEQ ID NO: 30909 - DNA, 40 bp, Escherichia coli
  source 1..40: mol_type = genomic DNA
gcggcgaggtaaatcaaggtgcattgaagtaataatcatt

SEQ ID NO: 30910 - DNA, 50 bp, Escherichia coli; identical to SEQ ID NO: 7690
  source 1..50: mol_type = genomic DNA

SEQ ID NO: 30911 - protein, 506 aa, Escherichia coli
MRSVITYLRYSSAIQGAEGADSTRRQNDLFKQWLKKNSDAQVVASFSDEGLSGYKGKHLTGQFGDMLARIESGEFSKGTILLVESIDRIGRLEHLETEALMNRILGNGLEIHTLQDGLIYTKDALVDDLGISIIQRVKAYIAHQESKQKSFRVSEKWKQRAKLALAGEQRLTKMVPGWIDPDTLKLNEHAETVRLIFKLLLSGESLHNIARHLQSNGIKSFSRRKDANGFSVHSVRTILRSETTIGTLPASQRNDRPAIPNYYEAAIDAATFNKAQEILDKNRKGRTPASDNPLTINIFKGLFRCQCGASVHPTGTKNKYAGVYRCNNNPDGRCDVPPLKRKPFDRWMIDNFLGMIDVGNDGEAEGKIASLQHEVEIVTARIKKATALLLEMDDITELKTQVKGLNQKRTELQTTIDNMRRKASLTDKELPQLKDIDLTTKAGRVECQLILSKHLKGLTLGKDSVIVTLQNDTEITIPTNPLPLNDGTSIFEIAEKELLEIDAYQL

SEQ ID NO: 30912 - DNA, 50 bp, Escherichia coli; identical to SEQ ID NO: 30087
  source 1..50: mol_type = genomic DNA

SEQ ID NO: 30913 - DNA, 40 bp, Escherichia coli; identical to SEQ ID NO: 20043
  source 1..40: mol_type = genomic DNA

SEQ ID NO: 30914 - DNA, 40 bp, Escherichia coli; identical to SEQ ID NO: 30164
  source 1..40: mol_type = genomic DNA

SEQ ID NO: 30915 - DNA, 50 bp, Escherichia coli; identical to SEQ ID NO: 7690
  source 1..50: mol_type = genomic DNA

SEQ ID NO: 30916 - protein, 506 aa, Escherichia coli
MRHAITYLRYSSAIQGVEGADSTRRQNDLFKQWLKKNSDAQVVASFSDEGLSGYKGKHLTGQFGDMLARIESGEFPEGTILLVESIDRIGRLEHLETEALMNRILGNGIEIHTLQDGLIYTKDALADDLGISIIQRVKAYIAHQESKQKSFRVSQKWEQRAKLALAGEQRLTKMVPGWIDPETFKLNEHAETVRLIFKLLLDGESLHNIARHLQSNGIKSFSRRKDANGFSVHSVRTILRSETTIGTLPASQRNDRPAIPNYYECVVDMPTFNKAQEILDKNRKGRTPASDNPLTINIFKGLFRCQCGASVHPTGTKNKYAGVYRCNNHLDGRCDVPPLKRKPFDKWVLENFLGMIDVGNDGESERKIAALQHEVEIVTARIKKATALLLEMDDIDELKIQLKELNQKRTELQTTIDSMRRKASLTDKELPQLKDIDLTTKAGRVECQLILSKHLESLTLGRGQVTVKLSNGTEIIVPTDPLPLTDGAAIFEIAEKNLLNIDTFQL

SEQ ID NO: 30917 - DNA, 50 bp, Escherichia coli; identical to SEQ ID NO: 30087
  source 1..50: mol_type = genomic DNA

SEQ ID NO: 30918 - DNA, 40 bp, Escherichia coli; identical to SEQ ID NO: 20043
  source 1..40: mol_type = genomic DNA

SEQ ID NO: 30919 - DNA, 40 bp, Escherichia coli; identical to SEQ ID NO: 30164
  source 1..40: mol_type = genomic DNA

SEQ ID NO: 30920 - DNA, 50 bp, Escherichia coli; identical to SEQ ID NO: 7690
  source 1..50: mol_type = genomic DNA

SEQ ID NO: 30921 - protein, 506 aa, Escherichia coli
MRTVITYLRFSSAIQGAEGADSTRRQNDLFKQWLKKNSDAQVVASFSDEGLSGYKGKHLTGQFGDMLARIEAGEFPAGTILLVESIDRIGRLEHLETEALMNRILGNGIEIHTLQDGLIYTKDALADDLGISIIQRVKAYIAHQESKQKSFRVSQKWEQRAKLALAGEQRLTKMVPGWIDPDTFKCNEHAETVRLIFKLLLDGESLHNIARHLQSNGIKSFSRRKDANGFSVHSVRTVLRSESVIGTLPASQRNDRPAIPNYYEAAIDAATFNKAQEILDKNRKGRTPASDNPLTINIFKGLFRCQCGASVHPTGTKNKYAGVYRCNNHLDGRCDVPPLKRKPFDKWMIDNFLGMIDVGNDGEAEGKIASLQHEVEIVTARIKKATALLLEMDDITELKTQVKGLNQKRTELQTTIDNMRRKASLTDKELPQLKDIDLTTKAGRVECQLILSKHLKGLTLGKDSVTVTLQNDTEITIPTNPLPLNDGTSIFEIAEKNLLNIDTFQL

SEQ ID NO: 30922 - DNA, 50 bp, Escherichia coli; identical to SEQ ID NO: 30087
  source 1..50: mol_type = genomic DNA

SEQ ID NO: 30923 - DNA, 40 bp, Escherichia coli; identical to SEQ ID NO: 20043
  source 1..40: mol_type = genomic DNA

SEQ ID NO: 30924 - DNA, 40 bp, Escherichia coli; identical to SEQ ID NO: 30164
  source 1..40: mol_type = genomic DNA

SEQ ID NO: 30925 - DNA, 50 bp, Escherichia coli; identical to SEQ ID NO: 7690
  source 1..50: mol_type = genomic DNA

SEQ ID NO: 30926 - protein, 506 aa, Escherichia coli; identical to SEQ ID NO: 30136

SEQ ID NO: 30927 - DNA, 50 bp, Escherichia coli; identical to SEQ ID NO: 30087
  source 1..50: mol_type = genomic DNA

SEQ ID NO: 30928 - DNA, 40 bp, Escherichia coli; identical to SEQ ID NO: 20043
  source 1..40: mol_type = genomic DNA

SEQ ID NO: 30929 - DNA, 40 bp, Escherichia coli; identical to SEQ ID NO: 30164
  source 1..40: mol_type = genomic DNA

SEQ ID NO: 30930 - DNA, 50 bp, Escherichia coli; identical to SEQ ID NO: 7690
  source 1..50: mol_type = genomic DNA

SEQ ID NO: 30931 - protein, 506 aa, Escherichia coli
MRSVITYLRFSSAIQGAEGADSTRRQNDLFKQWLKKNSDAQVVASFSDEGLSGYKGKHLTGQFGDMLARIESGEFPEGTLLLVEAIDRIGRLEHLETEALMNRIIAHGIEIHTLQDGLIYTRDALSDDLGISIIQRVKSYVAHQESKQKSFRVSQKWKQRAKLALAGEQRLTKMVPGWIDPDTFKCNEHAETVRLIFKLLLDGESLHNIARHLQSNDIKSFSRRKDANGFSVHSVRTVLRSESVIGTLPASQRNDRPAIPNYYEAAIDASTFNKAQEILDKNRKGRTPASDNPLTINIFKGLFRCQCGASVHPTGTKNKYAGVYRCNNNPDGRCDVPPLKRKPFDKWMIDNFLGMIDVGNDGESERKIAALQHEVEIVTARIKKATALLLEMDDITELKAQVKGLNQKRTEIQTTIDTLKRKTSLTDKELPQLKDIDLTTKAGRVECQLILSKHLKGLTLGKDSVTVTLQNDTEIIVPTDPLPLNDGTSIFEIAEKELLEIDAYQL

SEQ ID NO: 30932 - DNA, 50 bp, Escherichia coli; identical to SEQ ID NO: 30087
  source 1..50: mol_type = genomic DNA

SEQ ID NO: 30933 - DNA, 40 bp, Escherichia coli; identical to SEQ ID NO: 20043
  source 1..40: mol_type = genomic DNA

SEQ ID NO: 30934 - DNA, 40 bp, Escherichia coli; identical to SEQ ID NO: 30164
  source 1..40: mol_type = genomic DNA

SEQ ID NO: 30935 - DNA, 50 bp, Escherichia coli; identical to SEQ ID NO: 7690
  source 1..50: mol_type = genomic DNA

SEQ ID NO: 30936 - protein, 506 aa, Escherichia coli
MRTVITYLRFSSATQGAEGADSTRRQNELFKQWLRKNSDAQVVASFSDEGLSGYKGKHLTGQFGDMLARIEAGEFPAGAILLVESIDRIGRLEHLETEALMNRIIAHGIEIHTLQDGLIYTRDALSDDLGISIIQRVKSYLAHQESKQKSFRVSEKWKQRAKLALAGEQRLTKMVPGWIDPETFKLNEHAETVRLIFKLLLDGESLHNIARHLQSNDIKSFSRRKDANGFSVHSVRTVLRSESVIGTLPASQRNDRPAIPNYYEAAIDAATFNKAQEILDKNRKGRTPASDNPLTINIFKGLFRCQCGASVHPTGTKNKYAGVYRCNNHLDGRCDVPPLKRKPFDKWMIDNFLGMIDVGNDGEAEKEIASLQHEVEIVTARIKKATALLLEMDDIDELKIQLKELNQKRTELQTTIDNMRRKASLTDKELPQLKDIDLTTKTGRVECQLILSKHLKGLTLGKDSVTVTLQNDTEITIPTNPLPLNDGSPIFEIADKELLDIDAYQL

SEQ ID NO: 30937 - DNA, 50 bp, Escherichia coli; identical to SEQ ID NO: 30087
  source 1..50: mol_type = genomic DNA

SEQ ID NO: 30938 - DNA, 40 bp, Escherichia coli; identical to SEQ ID NO: 20043
  source 1..40: mol_type = genomic DNA

SEQ ID NO: 30939 - DNA, 40 bp, Escherichia coli; identical to SEQ ID NO: 30164
  source 1..40: mol_type = genomic DNA

SEQ ID NO: 30940 - DNA, 50 bp, Escherichia coli; identical to SEQ ID NO: 7690
  source 1..50: mol_type = genomic DNA

SEQ ID NO: 30941 - protein, 506 aa, Escherichia coli
MRTVITYLRFSSAIQGAEGADSTRRQNDLFKQWLKKNSDAQVVASFSDEGLSGYKGKHLTGQFGDMLARIEAGEFPAGAILLVESIDRIGRLEHLETEALMNRIIAHGIEIHTLQDGLIYTRDALSDDLGISIIQRVKSYLAHQESKQKSFRVSEKWKQRAKLALAGEQRLTKMVPGWIDPDTLKLNEHAETVRLIFKLLLDGESLHNIARHLQSNDIKSFSRRKDANGFSVHSVRTILRSETTRGTLPASQRNDRPAIPNYYEAAIDAATFNKAQEILDKNRKGRTPASDNPLTINIFKGLFRCQCGASVHPTGTKNKYAGVYRCNNHLDGRCDVPPLKRKPFDRWMIDNFLGMIDVGNDGESERKIAALQHEVEIVTARIKKATALLLEMDDITELKAQVKELNQKRTELQTTIDSMRRKTSLTDKELPQLKDIDLTTKAGRVECQLILSKHLKGLTLGKDSVTVTLQNDTEITIPTNPLPLNDGSPIFEIAEKNLLNIDTFQL

SEQ ID NO: 30942 - DNA, 50 bp, Escherichia coli; identical to SEQ ID NO: 30087
  source 1..50: mol_type = genomic DNA

SEQ ID NO: 30943 - DNA, 40 bp, Escherichia coli; identical to SEQ ID NO: 20043
  source 1..40: mol_type = genomic DNA

SEQ ID NO: 30944 - DNA, 40 bp, Escherichia coli; identical to SEQ ID NO: 30164
  source 1..40: mol_type = genomic DNA

SEQ ID NO: 30945 - DNA, 50 bp, Escherichia coli; identical to SEQ ID NO: 7690
  source 1..50: mol_type = genomic DNA

SEQ ID NO: 30946 - protein, 506 aa, Escherichia coli
MRTVITYLRFSSATQGAEGADSTRRQNELFKQWLRKNSDAQVVASFSDEGLSGYKGKHLTGQFGDMLARIEAGEFPAGAILLVESIDRIGRLEHLETEALMNRIIAHGIEIHTLQDGLIYTRDALSDDLGISIIQRVKSYLAHQESKQKSFRVSEKWKQRAKLALAGEQHLTRNVPGWIDPDTFKCNEHAETVRLIFKLLLDGESLHNIARHLQSNDIKSFSRRKDANGFSVHSVRTVLRSESVIGTLPASQRNDRPAIPNYYEAAIDAATFNKAQEILDKNRKGRTPASDNPLTINIFKGLFRCQCGASVHPTGTKNKYQGVYRCNSHLDGRCDVPPLKRKPFDRWMIDNFLGMIDVGNDGEAEKEIASLQHEVETVTARIKKATALLLEMDDITELKTQVKELNQKRTELQTTINTMKRKTSLSDKGLPQLKDIDLMTKAGRVECQLILSKHLKGLTLGKDSVIVTLQNDTEITIPTNPLPLNDGTSIFEIAEKNLLNIDTFQL

SEQ ID NO: 30947 - DNA, 50 bp, Escherichia coli; identical to SEQ ID NO: 30087
  source 1..50: mol_type = genomic DNA

SEQ ID NO: 30948 - DNA, 40 bp, Escherichia coli; identical to SEQ ID NO: 20043
  source 1..40: mol_type = genomic DNA

SEQ ID NO: 30949 - DNA, 40 bp, Escherichia coli; identical to SEQ ID NO: 30164
  source 1..40: mol_type = genomic DNA

SEQ ID NO: 30950 - DNA, 50 bp, Escherichia coli; identical to SEQ ID NO: 7690
  source 1..50: mol_type = genomic DNA

SEQ ID NO: 30951 - protein, 506 aa, Escherichia coli
MRHAITYLRFSSAIQGAEGADSTRRQNDLFKQWLKKNSDAQVVASFSDEGLSGYKGKHLTGQFGDMLARIEAGEFPGGTILLVESIDRIGRLEHLETEALMNRIIAHGIEIHTLQDGLIYTRDALSDDLGISIIQRVKSYLAHQESKQKSFRVSEKWKQRAKLALAGEQRLTKMVPGWIDPDTFKLNEHAETVRLIFKLLLSGESLHNIARHLQSNGIKSFSRRKDANGFSVHSVRTVLRSESVIGTLPASQRNDRPAIPNYYEAAIDAATFNKAQEILDKNRKGRTPASDNPLTINIFKGLFRCQCGASVHPTGTKNKYAGVYRCNNHLDGRCDVPPLKRKPFDRWMIDNFLGMIDVGNDGESERKIAALQHEVEIVTARIKKATALLLEMDDIDELKIQLKELNQRRTELQTTIDSMRRKTSLTDKELPQLKDIDLTTKAGRVECQLILSKHLKGLTLGKGSVTITLQNDTEITIPTNPLPLNDGSPIFEIADKELLDIDAYQL

SEQ ID NO: 30952 - DNA, 50 bp, Escherichia coli; identical to SEQ ID NO: 30087
  source 1..50: mol_type = genomic DNA

SEQ ID NO: 30953 - DNA, 40 bp, Escherichia coli; identical to SEQ ID NO: 20043
  source 1..40: mol_type = genomic DNA

SEQ ID NO: 30954 - DNA, 40 bp, Escherichia coli; identical to SEQ ID NO: 30164
  source 1..40: mol_type = genomic DNA

SEQ ID NO: 30955 - DNA, 50 bp, Escherichia coli; identical to SEQ ID NO: 7690
  source 1..50: mol_type = genomic DNA

SEQ ID NO: 30956 - protein, 506 aa, Escherichia coli
MRTVITYLRFSSATQGAEGADSTRRQNELFKQWLRKNSDAQVVASFSDEGLSGYKGKHLTGQFGDMLARIESGEFPAGTILLVESIDRIGRLEHLETEALMNRIIAHGIEIHTLQDGLIYTRDALSDDLGISIIQRVKSYLAHQESKQKSFRVSEKWKQRAKLALAGEQRLTRNVPGWIDPDTFKCNEHAETVRLIFKLLLDGESLHNIARHLQSNDIKSFSRRKDANGFSVHSVRTVLRSVSAIGTLPASQRNDRPAIPNYYEAAIDAATFNKAQEILDKNRKGRTPASDNPLTINIFKGLFRCQCGASVHPTGTKNKYAGVYRCNNNPDGRCDVPPLKRKPFDKWMIDNFLGMIDVGNDGEAEGKIAALQHEVEIVTARIKKATALLLEMDDIDELKIQLKELNQKRTELQTTIDNMRRKASLTDKELPQLKDIDLTTKAGRVECQLILSKHLKGLTLGKDSVTVTLQNDTEITIPTNPLPLNDGTSIFEIAEKNLLNIDTFQL

SEQ ID NO: 30957 - DNA, 50 bp, Escherichia coli; identical to SEQ ID NO: 30087
  source 1..50: mol_type = genomic DNA

SEQ ID NO: 30958 - DNA, 40 bp, Escherichia coli; identical to SEQ ID NO: 20043
  source 1..40: mol_type = genomic DNA

SEQ ID NO: 30959 - DNA, 40 bp, Escherichia coli; identical to SEQ ID NO: 30164
  source 1..40: mol_type = genomic DNA

SEQ ID NO: 30960 - DNA, 50 bp, Escherichia coli; identical to SEQ ID NO: 7690
  source 1..50: mol_type = genomic DNA

SEQ ID NO: 30961 - protein, 506 aa, Escherichia coli
MRTVITYLRFSSATQGAEGADSTRRQNELFKQWLKKNSDAQVVASFSDEGLSGYKGKHLTGQFGDMLARIEAGEFPGGTILLVESIDRIGRLEHLETEALMNRIIAHGIEIHTLQDGLIYTRDALSDDLGISIIQRVKSYLAHQESKQKSFRVSEKWKQRAKLALAGKQRLTKMVPGWIDPDTLKLNEHAETVRLIFKLLLSGESLHNIARHLQSNGIKSFSRRKDANGFSVHSVRTILRSETTIGTLPASQRNDRPAIPNYYEAAIDAATFNKAQEILDKNRKGRTPASDNPLTINIFKGLFRCQCGASVHPTGTKNKYAGVYRCNNHLDGRCDVPPLKRKPFDKWMIDNFLGMIDVGNDGEAEGKIASLQHEVEIVTARIKKATALLLEMDDIDELKIQIKELNQRRTELQTTIDSMRRKASLTDKELPQLKDIDLTTKAGRVECQLILSKHLKGLTLGKGSVTITLQNDTEITIPTNPLPLNDGSPIFEIADKELLDIDAYQL

SEQ ID NO: 30962 - DNA, 50 bp, Escherichia coli; identical to SEQ ID NO: 30087
  source 1..50: mol_type = genomic DNA

SEQ ID NO: 30963 - DNA, 40 bp, Escherichia coli; identical to SEQ ID NO: 20043
  source 1..40: mol_type = genomic DNA

SEQ ID NO: 30964 - DNA, 40 bp, Escherichia coli; identical to SEQ ID NO: 30164
  source 1..40: mol_type = genomic DNA

SEQ ID NO: 30965 - DNA, 50 bp, Escherichia coli; identical to SEQ ID NO: 7690
  source 1..50: mol_type = genomic DNA

SEQ ID NO: 30966 - protein, 506 aa, Escherichia coli
MRHVITYLRYSSAIQGAEGADSTRRQNDLFKQWLKKNSDAQVVASFSDEGLSGYKGKHLTGQFGDMLARIESGEFPEGTILLVESIDRIGRLEHLETEALMNRILGNGLEIHTLQDGLIYTKDALADDLGISIIQRVKAYIAHQESKQKSFRVSQKWEQRAKLALAGKQRLTKMVPGWIDPDTLKLNEHAETVRLIFKLLLSGESLHNIARHLQSNGIKSFSRRKDANGFSVHSVRTILRSETTIGTLPASQRNDRPAIPNYYEAAIDASTFNKAQEILGKNRIGRTPASDNPLTINIFKGLFRCQCGASVHPTGTKKKYQGVYRCNNHLDGRCDVPPLKRKPFDRWMIDNFLGMIDVGNDGEAEGKIASLQHEVEIVTTRIKKATALLLEMDDIDELKIQLKELNRKRTELQTTIDNMRRKTSLTDKELPQLKDIDLTTKAGRVECQLILSKHLKGLTLGKDSVIVTLQNDTEITIPTNPLPLHDGTSIFEIAEKELLEIDAYQL

SEQ ID NO: 30967 - DNA, 50 bp, Escherichia coli; identical to SEQ ID NO: 30087
  source 1..50: mol_type = genomic DNA

SEQ ID NO: 30968 - DNA, 40 bp, Escherichia coli; identical to SEQ ID NO: 20043
  source 1..40: mol_type = genomic DNA

SEQ ID NO: 30969 - DNA, 40 bp, Escherichia coli; identical to SEQ ID NO: 30164
  source 1..40: mol_type = genomic DNA

SEQ ID NO: 30970 - DNA, 50 bp, Escherichia coli; identical to SEQ ID NO: 7690
  source 1..50: mol_type = genomic DNA

SEQ ID NO: 30971 - protein, 506 aa, Escherichia coli
MRSVITYLRFSSAIQGAEGADSTRRQNDLFKQWLKKNSDAQVVASFSDEGLSGYKGKHLTGQFGDMLARIESGEFPEGTILLVEAIDRIGRLEHLETEALMNRIIAHGIEIHTLQDGLIYTRDALSDDLGISIIQRVKSYVAHQESKQKSFRVSQKWKQRAKLALAGEQRLTKMVPGWIDPDTFKCNEHAETVRLIFKLLLDGESLHNIARHLQANNISSFSRRKDANGFSVHSVRTILRSETTRGTLPASQRNDRPAIPNYYEAAIDAATFNKAQEILDKNRKGRTPASDNPLTINIFKGLFRCQCGASVHPTGTKNKYAGVYRCNNHLDGRCDVPPLKRKPFDKWMLENFLGMIDVGNDGESERKIAALQHEVEIVTARIKKATALLLEMDDIDELKIQLKELNQKRTELQTTIDNMRRKASLTDKELPQLKDIDLMTKAGRVECQLILSKHLKGLTLGKDSVTVTLQNDTEITIPTNPLPLNDGSPIFEIADKELLDIDAFRL

SEQ ID NO: 30972 - DNA, 50 bp, Escherichia coli; identical to SEQ ID NO: 30087
  source 1..50: mol_type = genomic DNA

SEQ ID NO: 30973 - DNA, 40 bp, Escherichia coli; identical to SEQ ID NO: 20043
  source 1..40: mol_type = genomic DNA

SEQ ID NO: 30974 - DNA, 40 bp, Escherichia coli; identical to SEQ ID NO: 30164
  source 1..40: mol_type = genomic DNA

SEQ ID NO: 30975 - DNA, 50 bp, Escherichia coli; identical to SEQ ID NO: 7690
  source 1..50: mol_type = genomic DNA

SEQ ID NO: 30976 - protein, 506 aa, Escherichia coli
MRTVITYLRFSSATQGAEGADSTRRQNDLFKQWLKKNSDAQVVASFSDEGLSGYKGKHLTGQFGDMLARIESGEFPESTILLVESIDRIGRLEHLETEALMNRILGNGLEIHTLQDGLIYTKDALADDLGISIIQRVKAYIAHQESKQKSFRVSEKWKQRAKLALAGEQRLTKMVPGWIDPDTLKLNEHAETVRLIFKLLLSGESLHNIARHLQSNGIKSFSRRKDANGFSVHSVRTILRSETTIGTLPASQRNDRPAIPNYYEAAIDAATFNKAQEILDKNRKGRTPASDNPLTINIFKGLFRCQCGASVHPTGTKNKYAGVYRCNNHLDGRCDVPPLKRKPFDKWMLENFLGMIDVGNDGEAEGKIASLQHEVEIVTTRIKKATALLLEMDDIDELKIQIKELNQRRTELQTTIDNMRRKASLTDKELPQLKDIDLTTKAGRVECQLILSKHLKGLTLGKDSVTVTLQNDTEITIPTNPLPLNDGSPIFEIADKELLDIDAYQL

SEQ ID NO: 30977 - DNA, 50 bp, Escherichia coli; identical to SEQ ID NO: 30087
  source 1..50: mol_type = genomic DNA

SEQ ID NO: 30978 - DNA, 40 bp, Escherichia coli; identical to SEQ ID NO: 20038
  source 1..40: mol_type = genomic DNA

SEQ ID NO: 30979 - DNA, 40 bp, Escherichia coli
  source 1..40: mol_type = genomic DNA
gcggcgaggtaaatcaaagtgcattgaagtcataatcatt

SEQ ID NO: 30980 - DNA, 50 bp, Escherichia coli; identical to SEQ ID NO: 7690
  source 1..50: mol_type = genomic DNA

SEQ ID NO: 30981 - protein, 506 aa, Escherichia coli
MRHVITYLRYSSAIQGAEGADSTRRQNDLFKQWLKKNSDAQVVASFNDEGLSGYKGKHLSGQFGDMLSRIESGEFSEGTILLVEAIDRIGRLEHLETEALMNRILGNGIEIHTLQDGLIYTKDALADDLGISIIQRVKAYIAHQESKQKSFRVSQKWGQRAKLALAGKQRLTKMVPGWIDPETFEVNEHAETVRLIFKLLLDGESLHNIARHLQANNISSFSRRKDANGFSVHSVRTVLRSESVIGTLPASQRNDRPAIPNYYEAAIDAATFNKALEILDKNRKGRTPASDNPLTINIFKGLFRCQCGASVHPTGTKNKYAGVYRCNNHLDGRCDVPPLKRKPFDRWMIDNFLGMIDVGNDGESERKIAALQHEVEIVTSRIKKATALLLEMDDITELKTQVKELNQKRTALQTTIDNMRRKTSLTDKELPQLKDIDLTTKAGRVECQLILSKHLKGLTLGKDSVTVTLQNDTEITIPTNPLPLNDGTSIFEIADKELLGIDAYQL

SEQ ID NO: 30982 - DNA, 50 bp, Escherichia coli; identical to SEQ ID NO: 30087
  source 1..50: mol_type = genomic DNA

SEQ ID NO: 30983 - DNA, 40 bp, Escherichia coli; identical to SEQ ID NO: 20043
  source 1..40: mol_type = genomic DNA

SEQ ID NO: 30984 - DNA, 40 bp, Escherichia coli; identical to SEQ ID NO: 30164
  source 1..40: mol_type = genomic DNA

SEQ ID NO: 30985 - DNA, 50 bp, Escherichia coli; identical to SEQ ID NO: 7690
  source 1..50: mol_type = genomic DNA

SEQ ID NO: 30986 - protein, 506 aa, Escherichia coli
MRTVITYLRFSSATQGAEGADSTRRQNDLFKQWLKKNSDAQVVASFSDEGLSGYKGKHLTGQFGDMLARIEAGEFPGGTILLVESIDRIGRLEHLETEALMNRIIAHGIEIHTLQDGLIYTRDALSDDLGISIIQRVKSYLAHQESKQKSFRVSEKWKQRAKLALAGKQRLTKMVPGWIDPDTLKLNEHAETVRLIFKLLLSGESLHNIARHLQSNGIKSFSRRKDANGFSVHSVRTILRSETTIGTLPASQRNDRPAIPNYYEAAIDAATFNKAQEILDKNRKGRTPASDNPLTINIFKGLFRCQCGASVHPTGTKNKYAGVYRCNNHLDGRCDVPPLKRKPFDKWMIDNFLGMIDVGNDGEAEKEIASLQHEVETVTARIKKATALLLEMDDIDELKIQLKELNQKRTELQTTIDSMRRKASLTDKELPQLKDIDLTTKAGRVECQLILSKHLESLTLGRGQVTVKLSNGTEIIVPTDPLPLTDGAAIFEIAEKNLLNIDTFQL

SEQ ID NO: 30987 - DNA, 50 bp, Escherichia coli; identical to SEQ ID NO: 30087
  source 1..50: mol_type = genomic DNA

SEQ ID NO: 30988 - DNA, 40 bp, Escherichia coli; identical to SEQ ID NO: 20043
  source 1..40: mol_type = genomic DNA

SEQ ID NO: 30989 - DNA, 40 bp, Escherichia coli; identical to SEQ ID NO: 30164
  source 1..40: mol_type = genomic DNA

SEQ ID NO: 30990 - DNA, 50 bp, Escherichia coli; identical to SEQ ID NO: 7690
  source 1..50: mol_type = genomic DNA

SEQ ID NO: 30991 - protein, 506 aa, Escherichia coli
MRHVITYLRFSSAIQGAEGADSTRRQNDLFKQWLKKNSDAQVVASFNDEGLSGYKGKHLSGQFGDMLSRIESGEFSEGTVLLVEAIDRIGRLEHLETEALMNRIIAHGIEIHTLQDGLIYTRDALSDDLGISIIQRVKSYLAHQESKQKSFRVSEKWKQRAKLALAGEQRLTKMVPGWIDPETFKLNEHAETVRLIFKLLLDGESLHNIARHLQANNISSFSRRKDANGFSVHSVRTILRSETTIGTLPASQRNDRPAIPNYYEAAIDAATFNKAQEILDKNRKGRTPASDNPLTINIFKGLFRCQCGASVHPTGTKNKYAGVYRCNNHLDGRCDVPPLKRKPFDKWMIDNFLGMIDVGNDGESERKIAALQHEVEIVTTRIKKATALLLEMDDIDELKIQLKELNQKRTELQTTIDNMRRKASLTDKELPQLKDIDLTTKAGRVECQLILSKHLKGLTLGKDSVIVTLQNDTEITIPTNPLPLNDGTSIFEIAEKELLEIDAYQL

SEQ ID NO: 30992 - DNA, 50 bp, Escherichia coli; identical to SEQ ID NO: 30087
  source 1..50: mol_type = genomic DNA

SEQ ID NO: 30993 - DNA, 40 bp, Escherichia coli; identical to SEQ ID NO: 20043
  source 1..40: mol_type = genomic DNA

SEQ ID NO: 30994 - DNA, 40 bp, Escherichia coli; identical to SEQ ID NO: 30164
  source 1..40: mol_type = genomic DNA

SEQ ID NO: 30995 - DNA, 50 bp, Escherichia coli; identical to SEQ ID NO: 7690
  source 1..50: mol_type = genomic DNA

SEQ ID NO: 30996 - protein, 506 aa, Escherichia coli
MRSVITYLRFSSAIQGAEGADSTRRQNDLFKQWLKKNSDAQVVASFSDEGLSGYKGKHLTGQFGDMLARIESGEFPEGTILLVEAIDRIGRLEHLETEALMNRILGNGIEIHTLQDGLVYTKDALADDLGISIIQRVKSYIAHQESKQKSFRVSEKWKQRAKLALAGEQRLTRNVPGWIDPGTFTLNEHAETVRLIFKLLLSGESLHNIARHLQANNISSFSRRKDANGFSVHSVRTVLRSESVIGTLPASQRNDRPAIPNYYEAAIDAATFNKAQEILDKNRKGRTPASDNPLTINIFKGLFRCQCGASVHPTGTKNKYAGVYRCNNNPDGRCDVPPLKRKPFDKWMIDNFLGMIDVGNDGEAEGKIASLQHEVEIVTARIKKATALLLEMDDIDELKIQLKELNQKRTELQTMIDNMRRKASLTDKELPQLKDIDLMTKAGRVECQLILSKHLKGLTLGKDSVTVTLQNDTEIIVPTDPLPLNDGTSIFEIAEKELLEIDAYQL

SEQ ID NO: 30997 - DNA, 50 bp, Escherichia coli; identical to SEQ ID NO: 30087
  source 1..50: mol_type = genomic DNA

SEQ ID NO: 30998 - DNA, 40 bp, Escherichia coli; identical to SEQ ID NO: 20043
  source 1..40: mol_type = genomic DNA

SEQ ID NO: 30999 - DNA, 40 bp, Escherichia coli; identical to SEQ ID NO: 30164
  source 1..40: mol_type = genomic DNA

SEQ ID NO: 31000 - DNA, 50 bp, Escherichia coli; identical to SEQ ID NO: 7690
  source 1..50: mol_type = genomic DNA

SEQ ID NO: 31001 - protein, 506 aa, Escherichia coli
MRTVITYLRFSSAIQGAEGADSTRRQNDLFKQWLKKNSDAQVVASFSDEGLSGYKGKHLTGQFGDMLARIESGEFPEGTILLVEAIDRIGRLEHLETEALMNRIIAHGIEIHTLQDGLIYTRDALSDDLGISIIQRVKSYVAHQESKQKSFRVSQKWKQRAKLALAGEQRLTKMVPGWIDPDTFKCNKHAETVRLIFKLLLDGESLHNIARHLQANNISSFSRRKDANGFSVHSVRTILRSETTRGTLPASQRNDRPAIPNYYEAAIDAATFNKAQEILDKNRKGRTPASDNPLTINIFKGLFRCQCGASVHPTGTKNKYQGVYRCNNHLDGRCDVPPLKRKPFDKWMIDNFLGMIDVGNDGEAEGKIAALQHEVEIVTARIKKATALLLEMDDITELKTQVKGLNQKRTELQTTIDNMRRKASLTDKELPQLKDIDLTTKAGRVECQLILSKHLKGLTLGKDSVTVTLQNDTEITIPTDPLPLNDGTSIFEIAEKNLLNIDTFQL

SEQ ID NO: 31002 - DNA, 50 bp, Escherichia coli; identical to SEQ ID NO: 30087
  source 1..50: mol_type = genomic DNA

SEQ ID NO: 31003 - DNA, 40 bp, Escherichia coli; identical to SEQ ID NO: 20043
  source 1..40: mol_type = genomic DNA

SEQ ID NO: 31004 - DNA, 40 bp, Escherichia coli; identical to SEQ ID NO: 30164
  source 1..40: mol_type = genomic DNA

SEQ ID NO: 31005 - DNA, 50 bp, Escherichia coli; identical to SEQ ID NO: 7690
  source 1..50: mol_type = genomic DNA

SEQ ID NO: 31006 - protein, 506 aa, Escherichia coli
MRTVITYLRFSSATQGAEGADSTRRQNELFKQWLRKNSDAQVVASFSDEGLSGYKGKHLTGQFGDMLARIESGEFPESTILLVESIDRIGRLEHLETEALMNRILGNGLEIHTLQDGLIYTKDALADDLGISIIQRVKAYIAHQESKQKSFRVSEKWKQRAKLALAGEQRLTKMVPGWIDPDTLKLNEHAETVRLIFKLLLSGESLHNIARHLQSNGIKSFSRRKDANGFSVHSVRTILRSETTIGTLPASQRNDRPAIPNYYEAAIDAATFNKAQEILDKNRKGRTPASDNPLTINIFKGLFRCQCGASVHPTGTKNKYAGVYRCNNHLDGRCDVPPLKRKPFDKWMLENFLGMIDVGNDGEAEGKIASLQHEVEIVTTRIKKATALLLEMDDIDELKIQIKELNQRRTELQTTIDNMRRKASLTDKELPQLKDIDLTTKAGRVECQLILSKHLKGLTLGKDSVIVTLQNDTEITIPTNPLPLNDGSPIFEIADKELLDIDAYQL

SEQ ID NO: 31007 - DNA, 50 bp, Escherichia coli; identical to SEQ ID NO: 30087
  source 1..50: mol_type = genomic DNA

SEQ ID NO: 31008 - DNA, 40 bp, Escherichia coli; identical to SEQ ID NO: 20043
  source 1..40: mol_type = genomic DNA

SEQ ID NO: 31009 - DNA, 40 bp, Escherichia coli; identical to SEQ ID NO: 30164
  source 1..40: mol_type = genomic DNA

SEQ ID NO: 31010 - DNA, 50 bp, Escherichia coli; identical to SEQ ID NO: 7690
  source 1..50: mol_type = genomic DNA

SEQ ID NO: 31011 - protein, 506 aa, Escherichia coli
MRHVITYLRYSSAIQGAEGADSTRRQNDLFKQWLKKNSDAQVVASFNDEGLSGYKGKHLSGQFGDMLSRIESGEFSEGTILLVEAIDRIGRLEHLETEALMNRILGNGIEIHTLQDGLIYTKDALADDLGISIIQRVKAYIAHQESKQKSFRVSQKWGQRAKLALAGKQRLTKMVPGWIDPETFEVNEHAETVRLIFKLLLDGESLHNIARHLQANNISSFSRRKDANGFSVHSVRTILRSVTTIGTLPASQRNDRPAIPNYYEAAIDAATFNKAQEILDKNRKGRTPASDNPLTINIFKGLFRCQCGASVHPTGTKNKYAGVYRCNNHLDGRCDVPPLKRKPFDRWMIDNFLGMIDVGNDGEAEGKIAALQHEVEIVTARIKKATALLLEMDDITELKTQVKGLNQKRTELQTTIDNMRRKASLTDKELPQLKDIDLTTKAGRVECQLILSKHLKGLTLGKDSVIVTLQNDTEITIPTNPLPLNDGTSIFEIAEKELLEIDAYQL

SEQ ID NO: 31012 - DNA, 50 bp, Escherichia coli; identical to SEQ ID NO: 30087
  source 1..50: mol_type = genomic DNA

SEQ ID NO: 31013 - DNA, 40 bp, Escherichia coli; identical to SEQ ID NO: 20043
  source 1..40: mol_type = genomic DNA

SEQ ID NO: 31014 - DNA, 40 bp, Escherichia coli; identical to SEQ ID NO: 30164
  source 1..40: mol_type = genomic DNA

SEQ ID NO: 31015 - DNA, 50 bp, Escherichia coli; identical to SEQ ID NO: 7690
  source 1..50: mol_type = genomic DNA

SEQ ID NO: 31016 - protein, 506 aa, Escherichia coli
MRTVITYLRFSSATQGAEGADSTRRQNELFKQWLRKNSDAQVVASFSDEGLSGYKGKHLTGQFGDMLARIESGEFSEGTVLLVEAIDRIGRLEHLETEALMNRIIAHGIEIHTLQDGLIYTRDALSDDLGISIIQRVKSYVAHQESKQKSFRVSEKWKQRAKLALAGEQHLTRNVPGWIDPDTFKCNEHAETVRLIFKLLLDGESLHNIARHLQSNDIKSFSRRKDANGFSVHSVRTVLRSESVIGTLPASQRNDRPAIPNYYEAAIDAATFNKAQEILDKNRKGRTPASDNPLTINIFKGLFRCQCGASVHPTGTKNKYAGVYRCNNHLDGRCDVPPLKRKPFDRWMIDNFLGMIDVGNDGESERKIAALQHEVEIVTARIKKATALLLEMDDITELKAQVKGLNQKRTEIQTTIDTLKRKTSLTDKELPQLKDIDLTTKAGRVECQLILSKHLKGLTLGKDSVTVTLQNDTEITIPTNPLPLNDGTSIFEIAEKNLLNIDTFQL

SEQ ID NO: 31017 - DNA, 50 bp, Escherichia coli; identical to SEQ ID NO: 30087
  source 1..50: mol_type = genomic DNA

SEQ ID NO: 31018 - DNA, 40 bp, Escherichia coli; identical to SEQ ID NO: 20043
  source 1..40: mol_type = genomic DNA

SEQ ID NO: 31019 - DNA, 40 bp, Escherichia coli; identical to SEQ ID NO: 30164
  source 1..40: mol_type = genomic DNA

SEQ ID NO: 31020 - DNA, 50 bp, Escherichia coli; identical to SEQ ID NO: 7690
  source 1..50: mol_type = genomic DNA

SEQ ID NO: 31021 - protein, 506 aa, Escherichia coli
MRTVITYLRFSSAIQGAEGADSTRRQNDLFKQWLKKNSDAQVVASFSDEGLSGYKGKHLTGQFGDMLARIESGEFPEGTILLVEAIDRIGRLEHLETEALMNRIIAHGIEIHTLQDGLIYTRDALSDDLGISIIQRVKSYVAHQESKQKSFRVSQKWKQRAKLALAGEQRLTKMVPGWIDPDTFKCNEHAETVRLIFKLLLDGESLHNIARHLQANNISSFSRRKDANGFSVHSVRTILRSETTIGTLPASQRNDRPAIPNYYEAAIDAATFNKAQEILDKNRKGRTPASDNPLTINIFKGLFRCQCGASVHPTGTKNKYAGVYRCNNNPDGRCDVPPLKRKPFDRWMIDNFLGMIDVGNDGESERKIAALQHEVEIVTARIKKATALLLEMDDITELKAQVKGLNQKRTEIQTTIDALKRKTSLTDKELPQLKDIDLTTKAGRVECQLILSKHLKGLTLGKDSVTVTLQNDTEITIPTNPLPLNDGSPIFEIADKELLDIDAYQL

SEQ ID NO: 31022 - DNA, 50 bp, Escherichia coli; identical to SEQ ID NO: 30087
  source 1..50: mol_type = genomic DNA

SEQ ID NO: 31023 - DNA, 40 bp, Escherichia coli; identical to SEQ ID NO: 20043
  source 1..40: mol_type = genomic DNA

SEQ ID NO: 31024 - DNA, 40 bp, Escherichia coli; identical to SEQ ID NO: 30164
  source 1..40: mol_type = genomic DNA

SEQ ID NO: 31025 - DNA, 50 bp, Escherichia coli; identical to SEQ ID NO: 7690
  source 1..50: mol_type = genomic DNA

SEQ ID NO: 31026 - protein, 506 aa, Escherichia coli
MRTVITYLRFSSAIQGAEGADSTRRQNDLFKQWLKKNSDAQVVASFSDEGLSGYKGKHLTGQFGDMLARIESGEFPEGTILLVEAIDRIGRLEHLETEALMNRIIAHGIEIHTLQDGLIYTRDALSDDLGISIIQRVKSYVAHQESKQKSFRVSQKWKQRAKLALAGEQRLTKMVPGWIDPDTFKCNEHAETVRLIFKLLLDGESLHNIARHLQANNISSFSRRKDANGFSVHSVRTILRSETTIGTLPASQRNDRPAIPNYYEAAIDAATFNKAQEILDKNRKGRTPASDNPLTINIFKGLFRCQCGASVHPTGTKNKYAGVYRCNNNPDGRCDVPPLKRKPFDKWMIDNFLGMIDVGNDGEAEGKIASLQHEVEIVTTRIKKATALLLEMDDIDELKIQLKELNQKRTELQTTIDNMRRKASLTDKELPQLKDIDLMTKAGRVECQLILSKHLESLTLGRGQVTVKLSNGTEIIVPTDPLPLTDGAAIFEIAEKNLLNIDTFQL

SEQ ID NO: 31027 - DNA, 50 bp, Escherichia coli; identical to SEQ ID NO: 30087
  source 1..50: mol_type = genomic DNA

SEQ ID NO: 31028 - DNA, 40 bp, Escherichia coli; identical to SEQ ID NO: 20043
  source 1..40: mol_type = genomic DNA

SEQ ID NO: 31029 - DNA, 40 bp, Escherichia coli; identical to SEQ ID NO: 30164
  source 1..40: mol_type = genomic DNA

SEQ ID NO: 31030 - DNA, 50 bp, Escherichia coli; identical to SEQ ID NO: 7690
  source 1..50: mol_type = genomic DNA

SEQ ID NO: 31031 - protein, 506 aa, Escherichia coli
MRTVITYLRFSSATQGAEGADSTRRQNELFKQWLRKNSDAQVVASFSDEGLSGYKGKHLTGQFGDMLARIEAGEFPASTILLVESIDRIGRLEHLETEALMNRILGNGIEIHTLQDGLIYTKDALADDLGISIIQRVKAYIAHQESKQKSFRVSQKWKQRAKLALAGEQHLTRNVPGWIDPDTFKCNEHAETVRLIFKLLLDGESLHNIARHLQSNDIKSFSRRKDANGFSVHSVRTVLRSESVIGTLPASQRNDRPAIPNYYEAAIDAATFNKAQEILDKNRKGRTPASDNPLTINIFKGLFRCQCGASVHPTGTKNKYAGVYRCNNHLDGRCDVPPLKRKPFDRWMIDNFLGMIDVGNDGESERKIAALQHEVEIVTARIKKATALLLEMDDITELKAQVKGLNQKRTEIQTTIDTLKRKTSLTDKELPQLKDIDLTTKAGRVECQLILSKHLKGLTLGKDSVTVTLQNDTEITIPTNPLPLNDGSPIFEIADKELLDIDAYQL

SEQ ID NO: 31032 - DNA, 50 bp, Escherichia coli; identical to SEQ ID NO: 30087
  source 1..50: mol_type = genomic DNA

SEQ ID NO: 31033 - DNA, 40 bp, Escherichia coli; identical to SEQ ID NO: 20043
  source 1..40: mol_type = genomic DNA

SEQ ID NO: 31034 - DNA, 40 bp, Escherichia coli; identical to SEQ ID NO: 30164
  source 1..40: mol_type = genomic DNA

SEQ ID NO: 31035 - DNA, 50 bp, Escherichia coli; identical to SEQ ID NO: 7690
  source 1..50: mol_type = genomic DNA

SEQ ID NO: 31036 - protein, 506 aa, Escherichia coli
MRTVITYLRFSSAIQGAEGADSTRRQNDLFKQWLKKNSDAQVVASFSDEGLSGYKGKHLTGQFGDMLARIEAGEFPASTILLVESIDRIGRLEHLETEALMNRILGNGIEIHTLQDGLIYTKDALADDLGISIIQRVKAYIAHQESKQKSFRVSQKWEQRAKLALAGEQRLTKMVPGWIDPDTFKCNEHAETVRLIFKLLLDGESLHNIARHLQANNISSFSRRKDANGFSVHSVRTILRSETTIGTLPASQRNDRPAIPNYYEAAIDVSTFNKAQEILDKNRKGRTPASDNPLTINIFKGLFRCQCGASVHPTGTKNKYAGVYRCNNHLDGRCDVPPLKRKPFDKWMIDNFLGMIDVGNDGEAEGKIASLQHEVEIVTTRIKKATALLLEMDDITELKTQVKELNQKRTELQTTIDSMRRKTSLSDKGLPQLKDIDLMTKEGRVECQLILSKHLKGLTLGKDSVTVTLQNDTEITIPTNPLPLNDGTSIFEIADKELLDIDAFRL

SEQ ID NO: 31037 - DNA, 50 bp, Escherichia coli; identical to SEQ ID NO: 30087
  source 1..50: mol_type = genomic DNA

SEQ ID NO: 31038 - DNA, 40 bp, Escherichia coli; identical to SEQ ID NO: 20043
  source 1..40: mol_type = genomic DNA

SEQ ID NO: 31039 - DNA, 40 bp, Escherichia coli; identical to SEQ ID NO: 30164
  source 1..40: mol_type = genomic DNA

SEQ ID NO: 31040 - DNA, 50 bp, Escherichia coli; identical to SEQ ID NO: 7690
  source 1..50: mol_type = genomic DNA

SEQ ID NO: 31041 - protein, 506 aa, Escherichia coli; identical to SEQ ID NO: 30106

SEQ ID NO: 31042 - DNA, 50 bp, Escherichia coli; identical to SEQ ID NO: 30087
  source 1..50: mol_type = genomic DNA

SEQ ID NO: 31043 - DNA, 40 bp, Escherichia coli; identical to SEQ ID NO: 20038
  source 1..40: mol_type = genomic DNA

SEQ ID NO: 31044 - DNA, 40 bp, Escherichia coli; identical to SEQ ID NO: 30979
  source 1..40: mol_type = genomic DNA

SEQ ID NO: 31045 - DNA, 50 bp, Escherichia coli; identical to SEQ ID NO: 7690
  source 1..50: mol_type = genomic DNA

SEQ ID NO: 31046 - protein, 506 aa, Escherichia coli
MRTVITYLRFSSATQGAEGADSTRRQNELFKQWLRKNSDAQVVASFSDEGLSGYKGKHLTGQFGDMLARIEAGEFPAGAILLVESIDRIGRLEHLETEALMNRIIAHGIEIHTLQDGLIYTRDALSDDLGISIIQRVKSYLAHQESKQKSFRVSEKWKQRAKLALAGEQHLTRNVPGWIDPDTFKCNEHAETVRLIFKLLLDGESLHNIARHLQSNDIKSFSRRKDANGFSVHSVRTVLRSESVIGTLPASQRNDRPAIPNYYEAAIDASTFNKAQEILDKNRKGRTPASDNPLTINIFKGLFRCQCGASVHPTGTKNKYQGVYRCNSHLDGRCDVPPLKRKPFDRWMIDNFLGMIDVGNDGEAEKEIASLQHEVETVTARIKKATALLLEMDDITELKTQVKELNQKRTELQTTINTMKRKTSLSDKGLPQLKDIDLMTKAGRVECQLILSKHLKGLTLGKDSVTVTLQNDTEITIPTDPLPLNDGTSIFEIAEKNLLNIDTFQL

SEQ ID NO: 31047 - DNA, 50 bp, Escherichia coli; identical to SEQ ID NO: 30087
  source 1..50: mol_type = genomic DNA

SEQ ID NO: 31048 - DNA, 40 bp, Escherichia coli; identical to SEQ ID NO: 20043
  source 1..40: mol_type = genomic DNA

SEQ ID NO: 31049 - DNA, 40 bp, Escherichia coli; identical to SEQ ID NO: 30164
  source 1..40: mol_type = genomic DNA

SEQ ID NO: 31050 - DNA, 50 bp, Escherichia coli; identical to SEQ ID NO: 7690
  source 1..50: mol_type = genomic DNA

SEQ ID NO: 31051 - protein, 506 aa, Escherichia coli
MRTVITYLRFSSATQGAEGADSTRRQNELFKQWLRKNSDAQVVASFSDEGLSGYKGKHLTGQFGDMLARIESGEFSEGTVLLVEAIDRIGRLEHLETEALMNRIIAHGIEIHTLQDGLIYTRDALSDDLGISIIQRVKSYVAHQESKQKSFRVSQKWKQRAKLALAGEQRLTRNVPGWIDPDTFKCNEHAETVRLIFKLLLDGESLHNIARHLQSNDIKSFSRRKDANGFSVHSVRTVLRSESVIGTLPASQRNDRPAIPNYYEAAIDAATFNKAQEILDKNRKGRTPASDNPLTINIFKGLFRCQCGASVHPTGTKNKYAGVYRCNNHLDGRCDVPPLKRKPFDKWMLENFLGMIDVGNDGEAEGKIASLQHEVEIVTTRIKKATALLLEMDDIDELKIQLKELNQKRTELQTTIDNMRRKASLTDKELPQLKDIDLTTKAGRVECQLILSKHLKGLTLGKDSVTVTLQNDTEITIPTDPLPLNDGTSIFEIAEKNLLNIDAYQL

SEQ ID NO: 31052 - DNA, 50 bp, Escherichia coli; identical to SEQ ID NO: 30087
  source 1..50: mol_type = genomic DNA

SEQ ID NO: 31053 - DNA, 40 bp, Escherichia coli; identical to SEQ ID NO: 20043
  source 1..40: mol_type = genomic DNA

SEQ ID NO: 31054 - DNA, 40 bp, Escherichia coli; identical to SEQ ID NO: 30164
  source 1..40: mol_type = genomic DNA

SEQ ID NO: 31055 - DNA, 50 bp, Escherichia coli; identical to SEQ ID NO: 7690
  source 1..50: mol_type = genomic DNA

SEQ ID NO: 31056 - protein, 506 aa, Escherichia coli
MRHVITYLRYSSAIQGAEGADSTRRQNDLFKQWLKKNSDAQVVASFNDEGLSGYKGKHLSGQFGDMLSRIESGEFSEGTILLVEAIDRIGRLEHLETEALMNRILGNGLEIHTLQDGLIYTKDALADDLGISIIQRVKAYIAHQESKQKSFRVSQKWGQRAKLALAGEQRLTKMVPGWIDPDTFKLNEHAETVRLIFKLLLDGESLHNIARHLQSNGIKSFSRRKDANGFSVHSVRTILRSVTTIGTLPASQRNDRPAIPNYYEAAIDASTFNKAQEILDKNRKGRTPASDNPLTINIFKGLFRCQCGASVHPTGTKNKYAGVYRCNNHLDGRCDVQPLKRKPFDRWMIDNFLGMIDVGNDGESERKIAALQHEVEIVTARIKKATALLLEMDDIDELKIQLKELNQKRTELQTTIDSMRRKASLTDKELPQLKDIDLTTKAGRVECQLILSKHLESLTLGRGQVTVKLSNGTEIIVPTDPLPLTDGAAIFEIAEKNLLNIDTFQL

SEQ ID NO: 31057 - DNA, 50 bp, Escherichia coli; identical to SEQ ID NO: 30087
  source 1..50: mol_type = genomic DNA

SEQ ID NO: 31058 - DNA, 40 bp, Escherichia coli; identical to SEQ ID NO: 20043
  source 1..40: mol_type = genomic DNA

SEQ ID NO: 31059 - DNA, 40 bp, Escherichia coli; identical to SEQ ID NO: 30164
  source 1..40: mol_type = genomic DNA

SEQ ID NO: 31060 - DNA, 50 bp, Escherichia coli; identical to SEQ ID NO: 7690
  source 1..50: mol_type = genomic DNA

SEQ ID NO: 31061 - protein, 426 aa, Escherichia coli
MLVESIDRIGRLEHLETEALMNRILGNGIEIHTLQDGLIYTKDALADDLGISIIQRVKAYIAHQESKQKSFRVSQKWEQRAKLALAGEQRLTKMVPGWIDPDTFKCNEHAETVRLIFKLLLDGESLHNIARHLQSNDIKSFSRRKDANGFSVHSVRTILRSETTRGTLPASQRNDRPAIPNYYEAAIDAATFNKAQEILDKNRKGRTPASDNPLTINIFKGLFRCQCGASVHPTGTKNKYQGVYRCNNHLDGRCDVPPLKRKPFDKWMIDNFLGMIDVGNDGESERKIAALQHEVEIVTARIKKATALLLEMDDITELKTQVKGLNQKRTELQTTIDNMRRKASLTDKELPQLKDIDLTTKAGRVECQLILSKHLKGLTLGKDSVTVTLQNDTEITIPTDPLPLNDGTSIFEIAEKNLLNIDTFQL

SEQ ID NO: 31062 - DNA, 50 bp, Escherichia coli; identical to SEQ ID NO: 30087
  source 1..50: mol_type = genomic DNA

SEQ ID NO: 31063 - DNA, 40 bp, Escherichia coli; identical to SEQ ID NO: 20043
  source 1..40: mol_type = genomic DNA

SEQ ID NO: 31064 - DNA, 40 bp, Escherichia coli; identical to SEQ ID NO: 30164
  source 1..40: mol_type = genomic DNA

SEQ ID NO: 31065 - DNA, 50 bp, Escherichia coli; identical to SEQ ID NO: 7690
  source 1..50: mol_type = genomic DNA

SEQ ID NO: 31066 - protein, 506 aa, Escherichia coli; identical to SEQ ID NO: 30941

SEQ ID NO: 31067 - DNA, 50 bp, Escherichia coli; identical to SEQ ID NO: 30087
  source 1..50: mol_type = genomic DNA

SEQ ID NO: 31068 - DNA, 40 bp, Escherichia coli; identical to SEQ ID NO: 23173
  source 1..40: mol_type = genomic DNA

SEQ ID NO: 31069 - DNA, 40 bp, Escherichia coli; identical to SEQ ID NO: 30909
  source 1..40: mol_type = genomic DNA

SEQ ID NO: 31070 - DNA, 50 bp, Escherichia coli; identical to SEQ ID NO: 7690
  source 1..50: mol_type = genomic DNA

SEQ ID NO: 31071 - protein, 506 aa, Escherichia coli
MRTVITYLRFSSATQGAEGADSTRRQNELFKQWLRKNSDAQVVASFSDEGLSGYKGKHLTGQFGDMLARIESGEFSEGTVLLVEAIDRIGRLEHLETEALMNRIIAHGIEIHTLQDGLIYTRDALSDDLGISIIQRVKSYVAHQESKQKSFRVSQKWKQRAKLALAGEQRLTRNVPGWIDPDTFKCNEHAETVRLIFKLLLDGESLHNIARHLQSNDIKSFSRRKDANGFSVHSVRTILRSETTIGTLPASQRNDRPAIPNYYEAAIDASTFNKAQEILDKNRKGRTPASDNPLTINIFKGLFRCQCGASVHPTGTKNKYAGVYRCNSHLDGRCGVPPLKRKPFDKWMIDNFLGMIDVGNDGEAEKEIASLQHEVEIVTARIKKATALLLEMDDIDELKIQLKELNQKRTELQTTIDNMRRKASLTDKELPQLKDIDLTTKAGRVECQLILSKHLKGLTLGKDSVTVTLQNDTEITIPTNPLPLNDGSPIFEIADKELLDIDAYQL

SEQ ID NO: 31072 - DNA, 50 bp, Escherichia coli; identical to SEQ ID NO: 30087
  source 1..50: mol_type = genomic DNA

SEQ ID NO: 31073 - DNA, 40 bp, Escherichia coli; identical to SEQ ID NO: 20043
  source 1..40: mol_type = genomic DNA

SEQ ID NO: 31074 - DNA, 40 bp, Escherichia coli; identical to SEQ ID NO: 30164
  source 1..40: mol_type = genomic DNA

SEQ ID NO: 31075 - DNA, 50 bp, Escherichia coli; identical to SEQ ID NO: 7690
  source 1..50: mol_type = genomic DNA

SEQ ID NO: 31076 - protein, 506 aa, Escherichia coli
MRHVITYLRYSSAIQGAEGADSTRRQNDLFKQWLKKNSDAQVVASFSDEGLSGYKGKHLTGQFGDMLARIESGEFPAGTILLVESIDRIGRLEHLETEALMNRILGNGIEIHTLQDGLIYTKDALADDLGISIIQRVKAYIAHQESKQKSFRVSQKWEQRAKLALAGEQRLTKMVPGWIDPDTFKCNEHAETVRLIFKLLLDGESLHNIARHLQANNISSFSRRKDANGFSVHSVRTILRSVTTIGTLPASQRNDRPAIPNYYEAAIDAATFNKAQEVLDKNRKGRTPASDNPLTINIFKGLFRCQCGASVHPTGTKNKYAGVYRCNNHLDGRCDVPPLKRKPFDRWMIDNFLGMIDVGNDGEAKGKIAALQHEVEIVTARIKKATALLLEMDDITELKTQVKGLNQKRTELQTTIDNMRRKASLTDKELPQLKDIDLTTKAGRVECQLILSKHLKGLTLGKDSVTVTLQNDTEITIPTDPLPLNDGTSIFEIAEKNLLNIDTFQL

SEQ ID NO: 31077 - DNA, 50 bp, Escherichia coli; identical to SEQ ID NO: 30087
  source 1..50: mol_type = genomic DNA

SEQ ID NO: 31078 - DNA, 40 bp, Escherichia coli; identical to SEQ ID NO: 20043
  source 1..40: mol_type = genomic DNA

SEQ ID NO: 31079 - DNA, 40 bp, Escherichia coli; identical to SEQ ID NO: 30164
  source 1..40: mol_type = genomic DNA

SEQ ID NO: 31080 - DNA, 50 bp, Escherichia coli; identical to SEQ ID NO: 7690
  source 1..50: mol_type = genomic DNA

SEQ ID NO: 31081 - protein, 506 aa, Escherichia coli
MRTVITYLRFSSAIQGAEGADSTRRQNDLFKQWLKKNSDAQVVASFSDEGLSGYKGKHLSGQFGDMLSRIESGEFPEGTILLVEAIDRIGRLEHLETEALMNRIIAHGIEIHTLQDGLIYTRDALSDDLGISIIQRVKSYVAHQESKQKSFRVSQKWKQRAKLALAGEQRLTKMVPGWIDPDTFKCNEHAETVRLIFKLLLDGESLHNIARHLQANNISSFSRRKDANGFSVHSVRTILRSETTRGTLPASQRNDRPAIPNYYEAAIDAATFNKAQEILDKNRKGRTPASDNPLTINIFKGLFRCQCGASVHPTGTKNKYQGVYRCNNHLDGRCDVPPLKRKPFDKWMIDNFLGMIDVGNDGEAEGKIAALQHEVEIVTARIKKATALLLEMDDITELKTQVKGLNQKRTELQTTIDNMRRKASLTDKELPQLKDIDLTTKAGRVECQLILSKHLKGLTLGKDSVIVTLQNDTEITIPTDPLPLNDGTSIFEIAEKNLLNIDTFQL

SEQ ID NO: 31082 - DNA, 50 bp, Escherichia coli; identical to SEQ ID NO: 30087
  source 1..50: mol_type = genomic DNA

SEQ ID NO: 31083 - DNA, 40 bp, Escherichia coli; identical to SEQ ID NO: 20043
  source 1..40: mol_type = genomic DNA

SEQ ID NO: 31084 - DNA, 40 bp, Escherichia coli; identical to SEQ ID NO: 30164
  source 1..40: mol_type = genomic DNA

SEQ ID NO: 31085 - DNA, 50 bp, Escherichia coli; identical to SEQ ID NO: 7690
  source 1..50: mol_type = genomic DNA

SEQ ID NO: 31086 - protein, 506 aa, Escherichia coli
MRTVITYLRFSSATQGAEGADSTRRQNELFKQWLRKNSDAQVVASFNDEGLSGYKGKHLSGQFGDMLSRIESGEFPEGTILLVEAIDRIGRLEHLETEALMNRIIAHGIEIHTLQDGLIYTRDALSDDLGISIIQRVKSYLAHQESKQKSFRVSEKWKQRAKLALAGKQRLTKMVPGWIDPDTLKLNEHAETVRLIFKLLLSGESLHNIARHLQANNISSFSRRKDANGFSVHSVRTVLRSESVIGTLPASQRNDRPAIPNYYEAAIDAATFNKAQEILDKNRKGRTPASDNPLTINIFKGLFRCQCGASVHPTGTKNKYAGVYRCNSHLDGRCDVPPLKRKPFDKWMIDNFLGMIDVGNDGEAEGKIASLQHEVEIVTTRIKKATALLLEMDDITELKTQVKELNQKRTELQATIDSMRRKTSLSDKGLPQLKDIDLMTKEGRVECQLILSKHLKGLTLGKDSVTVTLQNDTEITIPTNPLPLNDGTSIFEIADKELLDIDAFRL

SEQ ID NO: 31087 - DNA, 50 bp, Escherichia coli; identical to SEQ ID NO: 30087
  source 1..50: mol_type = genomic DNA

SEQ ID NO: 31088 - DNA, 40 bp, Escherichia coli; identical to SEQ ID NO: 20043
  source 1..40: mol_type = genomic DNA

SEQ ID NO: 31089 - DNA, 40 bp, Escherichia coli; identical to SEQ ID NO: 30164
  source 1..40: mol_type = genomic DNA

SEQ ID NO: 31090 - DNA, 50 bp, Escherichia coli; identical to SEQ ID NO: 7690
  source 1..50: mol_type = genomic DNA

SEQ ID NO: 31091 - protein, 506 aa, Escherichia coli
MRTVITYLRFSSATQGAEGADSTRRQNELFKQWLRKNSDAQVVASFSDEGLSGYKGKHLTGQFGDMLARIEAGEFPAGTILLVESIDRIGRLEHLETEALMNRILGNGIEIHTLQDGLIYTKDALADDLGISIIQRVKAYIAHQESKQKSFRVSQKWEQRAKLALAGEQRLTKMVPGWIDPEILKLNEHAETVRLIFKLLLDGESLHNIARHLQSNGIKSFSRRKDANGFSVHSVRTILRSETTIGTLPASQRNDRPAIPNYYEAAIDAATFNKAQEILDKNRKGRTPASDNPLTINIFKGLFRCQCGASVHPTGTKNKYAGVYRCNNNPDGRCDVPPLKRKPFDKWMIDNFLGMIDVGNDGEAEGKIASLQHEVEIVTTRIKKATALLLEMDDIDELKIQIKELNQRRTELQTTIDSMRRKASLTDKELPQLKDIDLTTKAGRVECQLILSKHLKGLTLGKDSVTVTLQNDTEITIPTNPLPLNDGSPIFEIADKELLDIDAYQL

SEQ ID NO: 31092 - DNA, 50 bp, Escherichia coli; identical to SEQ ID NO: 30087
  source 1..50: mol_type = genomic DNA

SEQ ID NO: 31093 - DNA, 40 bp, Escherichia coli; identical to SEQ ID NO: 23173
  source 1..40: mol_type = genomic DNA

SEQ ID NO: 31094 - DNA, 40 bp, Escherichia coli; identical to SEQ ID NO: 30909
  source 1..40: mol_type = genomic DNA

SEQ ID NO: 31095 - DNA, 50 bp, Escherichia coli; identical to SEQ ID NO: 7690
  source 1..50: mol_type = genomic DNA

SEQ ID NO: 31096 - protein, 506 aa, Escherichia coli
MRTVITYLRFSSATQGAEGADSTRRQNELFKQWLRKNSDAQVVASFSDEGLSGYKGKHLTGQFGDMLARIEAGEFPAGAILLVESIDRIGRLEHLETEALMNRIIAHGIEIHTLQDGLIYTRDALSDDLGISIIQRVKSYLAHQESKQKSFRVSEKWKQRAKLALAGEQHLTRNVPGWIDPDTFKCNEHAETVRLIFKLLLDGESLHNIARHLQSNGIKSFSRRKDANGFSVHSVRTILRSETTIGTLPASQRNDRPAIPNYYEAAIDAATFNKAQEILGKNRIGRTPASDNPLTINIFKGLFRCQCGASVHPTGTKNKYQGVYRCNNHLDGRCDVPPLKRKPFDKWMIDNFLGMIDVGNDGEAEGKIASLQHEVEIVTTRIKKATALLLEMDDIDELKIQLKELNQKRTELQTTIDNMRRKASLTDKELPQLKDIDLTTKAGRVECQLILSKHLKGLTLGKDSVIVTLQNDTEITIPTNPLPLNDGTSIFEIAEKELLEIDAYQL

SEQ ID NO: 31097 - DNA, 50 bp, Escherichia coli; identical to SEQ ID NO: 30087
  source 1..50: mol_type = genomic DNA

SEQ ID NO: 31098 - DNA, 40 bp, Escherichia coli; identical to SEQ ID NO: 20043
  source 1..40: mol_type = genomic DNA

SEQ ID NO: 31099 - DNA, 40 bp, Escherichia coli; identical to SEQ ID NO: 30164
  source 1..40: mol_type = genomic DNA

SEQ ID NO: 31100 - DNA, 50 bp, Escherichia coli; identical to SEQ ID NO: 7690
  source 1..50: mol_type = genomic DNA

SEQ ID NO: 31101 - protein, 506 aa, Escherichia coli
MRHVITYLRYSSAIQGAEGADSTRRQNDLFKQWLKKNSDAQVVASFNDEGLSGYKGKHLSGQFGDMLSRIESGEFPEGTILLVEAIDRIGRLEHLETEALMNRIIAHGIEIHTLQDGLIYTRDALSDDLGISIIQRVKSYIAHQESKQKSFRVSQKWEQRAKLALAGEQRLTRNVPGWIDPDTFKCNEHAETVRLIFKLLLSGESLHNIARHLQSNGIKSFSRRKDANGFSVHSVRTILRSETTIGTLPASQRNDRPAIPNYYEAAIDASTFNKAQEILGKNRKGRTPASDNPLTINIFKGLFRCQCGASVHPTGTKNKYAGVYRCNNHLDGRCDVPPLKRKPFDKWMLENFLGMIDVGNDGEAEGKIASLQHEVEIVTTRIKKATALLLEMDDIDELKIQLKELNQKRTELQTTIDNMRRKASLTDKELPQLKDIDLMTKAGRVECQLILSKHLKGLTLGKDSVTVTLQNDTEITIPTNPLPLNDGSPIFEIADKELLDIDAYQL

SEQ ID NO: 31102 - DNA, 50 bp, Escherichia coli; identical to SEQ ID NO: 30087
  source 1..50: mol_type = genomic DNA

SEQ ID NO: 31103 - DNA, 40 bp, Escherichia coli
  source 1..40: mol_type = genomic DNA
gcggcgaggtaaatcaagggtcattgaggtcataatcatt

SEQ ID NO: 31104 - DNA, 40 bp, Escherichia coli
  source 1..40: mol_type = genomic DNA
gcggcgaggtaaatcaaggtgcattgaggtcataatcatt

SEQ ID NO: 31105 - DNA, 50 bp, Escherichia coli; identical to SEQ ID NO: 7690
  source 1..50: mol_type = genomic DNA

SEQ ID NO: 31106 - protein, 506 aa, Escherichia coli
MRTVITYLRFSSATQGAEGADSTRRQNELFKQWLRKNSDAQVVASFSDEGLSGYKGKHLTGQFGDMLARIEAGEFPAGAILLVESIDRIGRLEHLETEALMNRIIAHGIEIHTLQDGLIYTRDALSDDLGISIIQRVKSYLAHQESKQKSFRVSEKWKQRAKLALAGEQHLTRNVPGWIDPDTFKCNEHAETVRLIFKLLLDGESLHNIARHLQSNDIKSFSRRKDANGFSVHSVRTVLRSESVIGTLPASQRNDRPAIPNYYEAAIDASTFNKAQEILDKNRKGRTPASDNPLTINIFKGLFRCQCGASVHPTGTKNKYQGVYRCNSHLDGRCDVPPLKRKPFDRWMIDNFLGMIDVGNDGEAEKEIASLQHEVETVTARIKKATALLLEMDDITELKTQVKELNQKRTELQTTINTMKRKTSLSDKGLPQLKDIDLMTKAGRVECQLILSKHLKGLTLGKDSVIVMLQNDTEITIPTDPLPLNDGTSIFEIAEKNLLNIDTFQL

SEQ ID NO: 31107 - DNA, 50 bp, Escherichia coli; identical to SEQ ID NO: 30087
  source 1..50: mol_type = genomic DNA

SEQ ID NO: 31108 - DNA, 40 bp, Escherichia coli; identical to SEQ ID NO: 20043
  source 1..40: mol_type = genomic DNA

SEQ ID NO: 31109 - DNA, 40 bp, Escherichia coli; identical to SEQ ID NO: 30164
  source 1..40: mol_type = genomic DNA

SEQ ID NO: 31110 - DNA, 50 bp, Escherichia coli; identical to SEQ ID NO: 7690
  source 1..50: mol_type = genomic DNA

SEQ ID NO: 31111 - protein, 499 aa, Escherichia coli
MRFSSATQGAEGADSTRRQNELFKQWLRKNSDAQVVASFSDEGLSGYKGKHLTGQFGDMLARIESGEFSEGTVLLVEAIDRIGRLEHLETEALMNRIIAHGIEIHTLQDGLIYTRDALSDDLGISIIQRVKSYVAHQESKQKSFRVSQKWKQRAKLALAGEQRLTRNVPGWIDPDTFKCNEHAETVRLIFKLLLDGESLHNIARHLQANNISSFSRRKDANGFSVHSVRTILRSETTRGTLPASQRNDRPAIPNYYEAAIDASTFNKAQEILDKNRKGRTPASDNPLTINIFKGLFRCQCGASVHPTGTKNKYAGVYRCNNNPDGRCDVPPLKRKPFDKWMIDNFLGMIDVGNDGEAEGKIASLQHEVEIVTARIKKATALLLEMDDIDELKIQIKELNQRRTELQTTIDNMRRKASLTDKELPQLKDIDLTTKAGRVECQLILSKHLKGLTLGKDSVTVTLQNDTEIIVPTDPLPLNDGTSIFEIAEKNLLNIDTFQL

SEQ ID NO: 31112 - DNA, 50 bp, Escherichia coli; identical to SEQ ID NO: 30087
  source 1..50: mol_type = genomic DNA

SEQ ID NO: 31113 - DNA, 40 bp, Escherichia coli; identical to SEQ ID NO: 20043
  source 1..40: mol_type = genomic DNA

SEQ ID NO: 31114 - DNA, 40 bp, Escherichia coli; identical to SEQ ID NO: 30164
  source 1..40: mol_type = genomic DNA

SEQ ID NO: 31115 - DNA, 50 bp, Escherichia coli; identical to SEQ ID NO: 7690
  source 1..50: mol_type = genomic DNA

SEQ ID NO: 31116 - protein, 499 aa, Escherichia coli; identical to SEQ ID NO: 30816

SEQ ID NO: 31117 - DNA, 50 bp, Escherichia coli
  source 1..50: mol_type = genomic DNA
aaaccgaatagacttcattcaaggttcattgtattgtagctattcggcat

SEQ ID NO: 31118 - DNA, 40 bp, Escherichia coli; identical to SEQ ID NO: 20043
  source 1..40: mol_type = genomic DNA

SEQ ID NO: 31119 - DNA, 40 bp, Escherichia coli; identical to SEQ ID NO: 30164
  source 1..40: mol_type = genomic DNA

SEQ ID NO: 31120 - DNA, 50 bp, Escherichia coli; identical to SEQ ID NO: 7690
  source 1..50: mol_type = genomic DNA

SEQ ID NO: 31121 - protein, 506 aa, Escherichia coli
MRTVITYLRFSSATQGAEGADSTRRQNELFKQWLRKNSDAQVVASFSDEGLSGYKGKHLTGQFGDMLARIEAGEFPAGTILLVESIDRIGRLEHLETEALMNRILGNGIEIHTLQDGLIYTKDALADDLGISIIQRVKAYIAHQESKQKSFRVSQKWEQRAKLALAGEQRLTKMVPGWIDPDTFKCNEHAETVRLIFKLLLSGESLHNIARHLQANNISSFSRRKDANGFSVHSVRTVLRSESVIGTLPASQRNDRPAIPNYYEAAIDAATFNKAQEILDKNRKGRTPASDNPLTINIFKGLFRCQCGASVHPTGTKNKYAGVYRCNNHLDGRCDVPPLKRKPFDKWMIDNFLGMIDVGNDGEAEGKIASLQHEVEIVTTRIKKATALLLEMDDITELKTQVKELNQKRTELQTTIDNMRRKASLTDKELPQLKDIDLTTKAGRVECQLILSKHLKGLTLGKDSVTVTLQNDTEIIVPTDPLPLNDGSPIFEIADKELLDIDAFRL

SEQ ID NO: 31122 - DNA, 50 bp, Escherichia coli; identical to SEQ ID NO: 30087
  source 1..50: mol_type = genomic DNA

SEQ ID NO: 31123 - DNA, 40 bp, Escherichia coli; identical to SEQ ID NO: 20043
  source 1..40: mol_type = genomic DNA

SEQ ID NO: 31124 - DNA, 40 bp, Escherichia coli; identical to SEQ ID NO: 30164
  source 1..40: mol_type = genomic DNA

SEQ ID NO: 31125 - DNA, 50 bp, Escherichia coli; identical to SEQ ID NO: 7690
  source 1..50: mol_type = genomic DNA

SEQ ID NO: 31126 - protein, 506 aa, Escherichia coli
MRHVITYLRYSSAIQGAEGADSTRRQNDLFKQWLKKNSDAQVVASFNDEGLSGYKGKHLSGQFGDMLSRIESGEFSEGTVLLVEAIDRIGRLEHLETEALMNRILGNGIEIHTLQDGLIYTKDALSDDLGISIIQRVKSYIAHQESKQKSFRVSQKWEQRAKLALAGEQRLTRNVPGWIDPDTFKCNEHAETVRLIFKLLLSGESLHNIARHLQSNGIKSFSRRKDANGFSVHSVRTILRSETTIGTLPASQRNDRPAIPNYYEAAIDASTFNKAQEILGKNRIGRTPASDNPLTINIFKGLFRCQCGASVHPTGTKNKYQGVYRCNNHLDGRCDVPPLKRKPFDKWMLENFLGMIDVGNDGEAEGKIASLQHEVEIVTTRIKKATALLLEMDDIDELKIQLKELNQKRTELQTTIDNMRRKASLTDKELPQLKDIDLTTKVGRVECQLILSKHLKGLTLGKDSVTVTLQNDTEITIPTNPLPLNDGSPIFEIADKELLDIDAYQL

SEQ ID NO: 31127 - DNA, 50 bp, Escherichia coli; identical to SEQ ID NO: 30087
  source 1..50: mol_type = genomic DNA

SEQ ID NO: 31128 - DNA, 40 bp, Escherichia coli; identical to SEQ ID NO: 20043
  source 1..40: mol_type = genomic DNA

SEQ ID NO: 31129 - DNA, 40 bp, Escherichia coli; identical to SEQ ID NO: 30164
  source 1..40: mol_type = genomic DNA

SEQ ID NO: 31130 - DNA, 50 bp, Escherichia coli; identical to SEQ ID NO: 7690
  source 1..50: mol_type = genomic DNA

SEQ ID NO: 31131 - protein, 506 aa, Escherichia coli
MRHVITYLRYSSATQGAEGADSTRRQNELFKQWLRKNSDAQVVASFNDEGLSGYKGKHLSGQFGDMLSRIESGEFSKGTILLVEAIDRIGRLEHLETEALMNRIIAHGIEIHTLQDGLIYTRDALSDDLGISIIQRVKSYLAHQESKQKSFRVSEKWKQRAKLALAGEQRLTKMVPGWIDPETFKLNEHAETVRLIFKLLLDGESLHNIARHLQANNISSFSRRKDANGFSVHSVRTVLRSESVIGTLPASQRNDRPAIPNYYEAAIDAATFNKAQEILDKNRKGRTPASDNPLTINIFKGLFRCQCGASVHPTGTKNKYAGVYRCNNHLDGRCDVPPLKRKPFDKWMIDNFLGMIDVGNDGESEGKIAALQHEVEIVTTRIKKATALLLEMDDITELKTQVKELNQKRTELQTTIDNMRRKASLTDKELPQLKDIDLTTKAGRVECQLILSKHLKGLTLGKDSVTVTLQNDTEITIPTNPLPLNDGTSIFEIADKELLDIDAFRL

SEQ ID NO: 31132 - DNA, 50 bp, Escherichia coli; identical to SEQ ID NO: 30087
  source 1..50: mol_type = genomic DNA

SEQ ID NO: 31133 - DNA, 40 bp, Escherichia coli; identical to SEQ ID NO: 20043
  source 1..40: mol_type = genomic DNA

SEQ ID NO: 31134 - DNA, 40 bp, Escherichia coli; identical to SEQ ID NO: 30164
  source 1..40: mol_type = genomic DNA

SEQ ID NO: 31135 - DNA, 50 bp, Escherichia coli; identical to SEQ ID NO: 7690
  source 1..50: mol_type = genomic DNA

SEQ ID NO: 31136 - protein, 506 aa, Escherichia coli
MRSVITYLRYSSAIQGVEGADSTRRQNDLFKQWLKKNNDAQVLASFNDEAVSGYKGKHLTGQFGDMLARIESGEFPEGTILLVESIDRIGRLEHLETEALMNRILSNGLEIHTLQDGLVYTKDALADDLGISIIQRVKAYIAHQESKQKSFRVSQKWEQRAKLALAGEQRLTKMVPGWIDPETFKLNEHAETVRLIFKLLLDGESLHNIARHLQSNGIKSFSRRKDANGFSVHSVRTILRSETTIGTLPASQRNDRPAIPNYYEAAIDASTFNKAQEILDKNRKGRTPASDNPLTINIFKGLFRCQCGASVHPTGTKNKYAGVYRCNNHLDGRCDVPPLKRKPFDKWMIDNFLGMIDVGNDGEAEKEIASLQHEVETVTARIKKATALLLEMDDITELKAQVKELNQKRTELQTTIDTLKRKTSLTDKELPQLKDIDLMTKAGRVECQLILSKHLKGLTLGKDSVTVTLQNDTEITIPTDPLPLNDGSPILEIAEKNLLEIDGFQL

SEQ ID NO: 31137 - DNA, 50 bp, Escherichia coli; identical to SEQ ID NO: 30087
  source 1..50: mol_type = genomic DNA

SEQ ID NO: 31138 - DNA, 40 bp, Escherichia coli; identical to SEQ ID NO: 20043
  source 1..40: mol_type = genomic DNA

SEQ ID NO: 31139 - DNA, 40 bp, Escherichia coli; identical to SEQ ID NO: 30164
  source 1..40: mol_type = genomic DNA

SEQ ID NO: 31140 - DNA, 50 bp, Escherichia coli; identical to SEQ ID NO: 7690
  source 1..50: mol_type = genomic DNA

SEQ ID NO: 31141 - protein, 506 aa, Escherichia coli
MRTVITYLRFSSAIQGAEGADSTRRQNDLFKQWLKKNSDAQVVASFSDEGLSGYKGKHLTGQFGDMLARIESGEFPEGTILLVEAIDRIGRLEHLETEALMNRIIAHGIEIHTLQDGLIYTRDALSDDLGISIIQRVKSYVAHQESKQKSFRVSQKWKQRAKLALAGEQRLTKMVPGWIDPDTFKCNEHAETVRLIFKLLLDGESLHNIARHLQANNISSFSRRKDANGFSVHSVRTILRSETTRGTLPASQRNDRPAIPNYYEAAIDAATFNKAQEILDKNRKGRTPASDNPLTINIFKGLFRCQCGASVHPTGTKNKYQGVYRCNNHLDGRCDVPPLKRKPFDKWMIDNFLGMIDVGNDGESERKIAALQHEVEIVTARIKKATALLLEMDDITELKTQVKGLNQKRTELQTTIDNMRRKASLTDKELPQLKDIDLTTKAGRVECQLILSKHLKGLTLGKDTVTVTLQNDTEITIPTDPLPLNDGTSIFEIAEKNLLNIDTFQL

SEQ ID NO: 31142 - DNA, 50 bp, Escherichia coli; identical to SEQ ID NO: 30087
  source 1..50: mol_type = genomic DNA

SEQ ID NO: 31143 - DNA, 40 bp, Escherichia coli; identical to SEQ ID NO: 20043
  source 1..40: mol_type = genomic DNA

SEQ ID NO: 31144 - DNA, 40 bp, Escherichia coli; identical to SEQ ID NO: 30164
  source 1..40: mol_type = genomic DNA

SEQ ID NO: 31145 - DNA, 50 bp, Escherichia coli; identical to SEQ ID NO: 7690
  source 1..50: mol_type = genomic DNA

SEQ ID NO: 31146 - protein, 506 aa, Escherichia coli
MRHVITYLRYSSAIQGAEGADSTRRQNDLFKQWLKKNSDAQVVASFNDEGLSGYKGKHLSGQFGDMLSRIESGEFSEGTVLLVEAIDRIGRLEHLETEALMNRIIAHGIEIHTLQDGLIYTRDALSDDLGISIIQRVKSYIAHQESKQKSFRVSQKWEQRAKLALAGEQRLTRNVPGWIDPDTFKCNEHAETVRLIFKLLLSGESLHNIARHLQSNGIKSFSRRKDANGFSVHSVRTILRSETTIGTLPASQRNDRPAIPNYYEAAIDASTFNKAQEILGKNRIGRTPASDNPLTINIFKGLFRCQCGASVHPTGTKNKYQGVYRCNNHLDGRCDVPPLKRKPFDKWMLENFLGMIDVGNDGEAEGKIASLQHEVEIVTTRIKKATALLLEMDDIDELKIQLKELNQKRTELQTTIDNMRRKASLTDKELPQLKDIDLTTKVGRVECQLILSKHLKGLTLGKDSVTVTLQNDTEITIPTNPLPLNDGSPIFEIADKELLDIDAYQL

SEQ ID NO: 31147 - DNA, 50 bp, Escherichia coli; identical to SEQ ID NO: 30087
  source 1..50: mol_type = genomic DNA

SEQ ID NO: 31148 - DNA, 40 bp, Escherichia coli; identical to SEQ ID NO: 20043
  source 1..40: mol_type = genomic DNA

SEQ ID NO: 31149 - DNA, 40 bp, Escherichia coli; identical to SEQ ID NO: 30164
  source 1..40: mol_type = genomic DNA

SEQ ID NO: 31150 - DNA, 50 bp, Escherichia coli; identical to SEQ ID NO: 7690
  source 1..50: mol_type = genomic DNA

SEQ ID NO: 31151 - protein, 506 aa, Escherichia coli
MRSVITYLRFSSAIQGAEGADSTRRQNDLFKQWLKKNSDAQVVASFSDEGLSGYKGKHLTGQFGDMLARIESGEFPEGTILLVESIDRIGRLEHLETEALMNRILGNGLEIHTLQDGLIYTKDALADDLGISIIQRVKAYIAHQESKQKSFRVSEKWKQRAKLALAGEQRLTKMVPGWIDPDTLKLNEHAETVRLIFKLLLSGESLHNIARHLQSNGIKSFSRRKDANGFSVHSVRTILRSETTIGTLPASQRNDRPAIPNYYEAAIDAATFNKAQEILDKNRKGRTPASDNPLTINIFKGLFRCQCGASVHPTGTKNKYAGVYRCNNHLDGRCDVPPLKRKPFDKWMLENFLGMIDVGNDGEAEGKIASLQHEVEIVTTRIKKATALLLEMDDIDELKIQIKELNQRRTELQTTIDNMRRKASLTDKELPQLKDIDLTTKAGRVECQLILSKHLKGLTLGKDSVIVTLQNDTEITIPTNPLPLNDGTSIFEIAEKELLEIDAYQL

SEQ ID NO: 31152 - DNA, 50 bp, Escherichia coli; identical to SEQ ID NO: 30087
  source 1..50: mol_type = genomic DNA

SEQ ID NO: 31153 - DNA, 40 bp, Escherichia coli; identical to SEQ ID NO: 20043
  source 1..40: mol_type = genomic DNA

SEQ ID NO: 31154 - DNA, 40 bp, Escherichia coli; identical to SEQ ID NO: 30164
  source 1..40: mol_type = genomic DNA

SEQ ID NO: 31155 - DNA, 50 bp, Escherichia coli; identical to SEQ ID NO: 7690
  source 1..50: mol_type = genomic DNA

SEQ ID NO: 31156 - protein, 506 aa, Escherichia coli
MRHVITYLRYSSATQGAEGADSTRRQNELFKQWLRKNSDAQVVASFNDEGLSGYKGKHLSGQFGDMLSRIESGEFSKGTILLVEAIDRIGRLEHLETEALMNRIIAHGIEIHTLQDGLIYTRDALSDDLGISIIQRVKSYLAHQESKQKSFRVSEKWKQRAKLALAGEQRLTKMVPGWIDPETFKLNEHAETVRLIFKLLLDGESLHNIARHLQANNISSFSRRKDANGFSVHSVRTILRSETTIGTLPASQRNDRPAIPNYYEAAIDAATFNKAQEILGKNRIGRTPASDNPLTINIFKGLFRCQCGASVHPTGTKNKYQGVYRCNNHLDGRCDVPPLKRKPFDKWMIDNFLGMIDVGNDGEAEGKIASLQHEVEIVTARIKKATALLLEMDDIDELKIQLKELNQKRTELQTTIDNMRRKASLTDKELPQLKDIDLITKAGRVECQLILSKHLKGLTLGKDTVTVTLQNDTEITIPTDPLPLNDGTSIFEIAEKNLLNIDTFQL

SEQ ID NO: 31157 - DNA, 50 bp, Escherichia coli; identical to SEQ ID NO: 30087
  source 1..50: mol_type = genomic DNA

SEQ ID NO: 31158 - DNA, 40 bp, Escherichia coli; identical to SEQ ID NO: 20043
  source 1..40: mol_type = genomic DNA

SEQ ID NO: 31159 - DNA, 40 bp, Escherichia coli; identical to SEQ ID NO: 30164
  source 1..40: mol_type = genomic DNA

SEQ ID NO: 31160 - DNA, 50 bp, Escherichia coli; identical to SEQ ID NO: 7690
  source 1..50: mol_type = genomic DNA

SEQ ID NO: 31161 - protein, 506 aa, Escherichia coli
MRSVITYLRYSSAIQGAEGADSTRRQNDLFKQWLKKNSDAQVVASFSDEGLSGYKGKHLTGQFGDMLARIESGEFPESTILLVESIDRIGRLEHLETEALMNRILGNGLEIHTLQDGLIYTKDALADDLGISIIQRVKAYIAHQESKQKSFRVSQKWEQRAKLALAGEQRLTKMVPGWIDPDTFKLNEHAETVRLIFKLLLSGESLHNIARHLQSNGIKSFSRRKDANGFSVHSVRTILRSETTIGTLPASQRNDRPAIPNYYEAAIDASTFNKAQEILDKNRKGRTPASDNPLTINIFKGLFRCQCGASVHPTGTKNKYAGVYRCNNHLDGRCDVPPLKRKPFDKWMIDNFLGMIDVGNDGEAEGKIASLQHEVEIVTARIKKATALLLEMDDITELKTQVKELNQKRTELQTTIDSMRRKTSLSDKGLPQLKDIDLMTKEGRVECQLILSKHLKGLTLGKDSVTVTLQNDTEITIPTNPLPLNDGTSIFEIADKELLDIDAYQL

SEQ ID NO: 31162 - DNA, 50 bp, Escherichia coli; identical to SEQ ID NO: 30087
  source 1..50: mol_type = genomic DNA

SEQ ID NO: 31163 - DNA, 40 bp, Escherichia coli; identical to SEQ ID NO: 20043
  source 1..40: mol_type = genomic DNA

SEQ ID NO: 31164 - DNA, 40 bp, Escherichia coli; identical to SEQ ID NO: 30164
  source 1..40: mol_type = genomic DNA

SEQ ID NO: 31165 - DNA, 50 bp, Escherichia coli; identical to SEQ ID NO: 7690
  source 1..50: mol_type = genomic DNA

SEQ ID NO: 31166 - protein, 506 aa, Escherichia coli
MRTVITYLRFSSAIQGAEGADSTRRQNELFKQWLRKNSDAQVVASFSDEGLSGYKGKHLTGQFGDMLARIEAGEFPAGTILLVESIDRIGRLEHLETEALMNRILGNGIEIHTLQDGLIYTKDALADDLGISIIQRVKAYIAHQESKQKSFRVSQKWEQRAKLALAGEQRLTKMVPGWIDPDTFKCNEHAETVRLIFKLLLDGESLHNIARHLQSNDIKSFSRRKDANGFSVHSVRTILRSETTRGTLPASQRNDRPAIPNYYEAAIDAATFNKAQEILDKNRKGRTPASDNPLTINIFKGLFRCQCGASVHPTGTKNKYQGVYRCNNHLDGRCDVPPLKRKPFDKWMIDNFLGMIDVGNDGEAEGKIAALQHEVEIVTARIKKATALLLEMDDITELKTQVKGLNQKRTELQTTIDNMRRKASLTDKELPQLKDIDLTTKAGRVECQLILSKHLKGLTLGKDSVTVTLQNDTEITIPTDPLPLNDGTSIFEIAEKNLLNIDTFQL

SEQ ID NO: 31167 - DNA, 50 bp, Escherichia coli; identical to SEQ ID NO: 30087
  source 1..50: mol_type = genomic DNA

SEQ ID NO: 31168 - DNA, 40 bp, Escherichia coli; identical to SEQ ID NO: 7688
  source 1..40: mol_type = genomic DNA

SEQ ID NO: 31169 - DNA, 40 bp, Escherichia coli; identical to SEQ ID NO: 7689
  source 1..40: mol_type = genomic DNA

SEQ ID NO: 31170 - DNA, 50 bp, Escherichia coli; identical to SEQ ID NO: 7690
  source 1..50: mol_type = genomic DNA

SEQ ID NO: 31171 - protein, 506 aa, Escherichia coli
MRTVITYLRFSSATQGAEGADSTRRQNELFKQWLRKNSDAQVVASFSDEGLSGYKGKHLTGQFGDMLARIEAGEFPGGTILLVESIDRIGRLEHLETEALMNRIIAHGIEIHTLQDGLIYTRDALSDDLGISIIQRVKSYLAHQESKQKSFRVSEKWKQRAKLALAGKQRLTKMVPGWIDPDTLKLNEHAETVRLIFKLLLSGESLHNIARHLQSNGIKSFSRRKDANGFSVHSVRTILRSETTIGTLPASQRNDRPAIPNYYEAAIDAATFNKAQEILDKNRKGRTPASDNPLTINIFKGLFRCQCGASVHPTGTKNKYAGVYRCNNHLDGRCDVPPLKRKPFDKWMIDNFLGMIDVGNDGEAEGKIASLQHEVEIVTARIKKATALLLEMDDIDELKIQIKELNQRRTELQTTIDSMRRKASLTDKELPQLKDIDLTTKAGRVECQLILSKHLKGLTLGKGSVTITLQNDTEITIPTNPLPLNDGSPIFEIADKELLDIDAYQL

SEQ ID NO: 31172 - DNA, 50 bp, Escherichia coli; identical to SEQ ID NO: 30087
  source 1..50: mol_type = genomic DNA

SEQ ID NO: 31173 - DNA, 40 bp, Escherichia coli; identical to SEQ ID NO: 7688
  source 1..40: mol_type = genomic DNA

SEQ ID NO: 31174 - DNA, 40 bp, Escherichia coli; identical to SEQ ID NO: 7689
  source 1..40: mol_type = genomic DNA

SEQ ID NO: 31175 - DNA, 50 bp, Escherichia coli; identical to SEQ ID NO: 7690
  source 1..50: mol_type = genomic DNA

SEQ ID NO: 31176 - protein, 506 aa, Escherichia coli; identical to SEQ ID NO: 20056

SEQ ID NO: 31177 - DNA, 50 bp, Escherichia coli; identical to SEQ ID NO: 30087
  source 1..50: mol_type = genomic DNA

SEQ ID NO: 31178 - DNA, 40 bp, Escherichia coli; identical to SEQ ID NO: 7688
  source 1..40: mol_type = genomic DNA

SEQ ID NO: 31179 - DNA, 40 bp, Escherichia coli; identical to SEQ ID NO: 7689
  source 1..40: mol_type = genomic DNA

SEQ ID NO: 31180 - DNA, 50 bp, Escherichia coli; identical to SEQ ID NO: 7690
  source 1..50: mol_type = genomic DNA

SEQ ID NO: 31181 - protein, 506 aa, Escherichia coli; identical to SEQ ID NO: 30416

SEQ ID NO: 31182 - DNA, 50 bp, Escherichia coli; identical to SEQ ID NO: 30087
  source 1..50: mol_type = genomic DNA

SEQ ID NO: 31183 - DNA, 40 bp, Escherichia coli; identical to SEQ ID NO: 7688
  source 1..40: mol_type = genomic DNA

SEQ ID NO: 31184 - DNA, 40 bp, Escherichia coli; identical to SEQ ID NO: 7689
  source 1..40: mol_type = genomic DNA

SEQ ID NO: 31185 - DNA, 50 bp, Escherichia coli; identical to SEQ ID NO: 7690
  source 1..50: mol_type = genomic DNA

SEQ ID NO: 31186 - protein, 506 aa, Escherichia coli; identical to SEQ ID NO: 30676

SEQ ID NO: 31187 - DNA, 50 bp, Escherichia coli; identical to SEQ ID NO: 30087
  source 1..50: mol_type = genomic DNA

SEQ ID NO: 31188 - DNA, 40 bp, Escherichia coli; identical to SEQ ID NO: 7688
  source 1..40: mol_type = genomic DNA

SEQ ID NO: 31189 - DNA, 40 bp, Escherichia coli; identical to SEQ ID NO: 7689
  source 1..40: mol_type = genomic DNA

SEQ ID NO: 31190 - DNA, 50 bp, Escherichia coli; identical to SEQ ID NO: 7690
  source 1..50: mol_type = genomic DNA

SEQ ID NO: 31191 - protein, 506 aa, Escherichia coli
MRTVITYLRFSSATQGAEGADSTRRQNELFKQWLRKNSDAQVVASFNDEGLSGYKGKHLSGQFGDMLSRIESGEFPEGTILLVEAIDRIGRLEHLETEALMNRIIAHGIEIHTLQDGLIYTRDALSDDLGISIIQRVKSYLAHQESKQKSFRVSEKWKQRAKLALAGKQRLTKMVPGWIDPDTLKLNEHAETVRLIFKLLLSGESLHNIARHLQANNISSFSRRKDANGFSVHSVRTVLRSESVIGTLPASQRNDRPAIPNYYEAAIDAATFNKAQEILDKNRKGRTPASDNPLTINIFKGLFRCQCGASVHPTGTKNKYAGVYRCNNHLDGRCDVPPLKRKPFDKWMIDNFLGMIDVGNDGEAEGKIASLQHEVEIVTTRIKKATALLLEMDDITELKTQVRELNQKRTDIQTAIDTLKRKTSLSDKGLPQLKDIDLMTKAGRVECQLILSKHLKGLTLGKDSVTVTLQNDTEITIPTNPLPLNDGTSIFEIADKELLDIDAYQL

SEQ ID NO: 31192 - DNA, 50 bp, Escherichia coli; identical to SEQ ID NO: 30087
  source 1..50: mol_type = genomic DNA

SEQ ID NO: 31193 - DNA, 40 bp, Escherichia coli; identical to SEQ ID NO: 7688
  source 1..40: mol_type = genomic DNA

SEQ ID NO: 31194 - DNA, 40 bp, Escherichia coli; identical to SEQ ID NO: 7689
  source 1..40: mol_type = genomic DNA

SEQ ID NO: 31195 - DNA, 50 bp, Escherichia coli; identical to SEQ ID NO: 7690
  source 1..50: mol_type = genomic DNA

SEQ ID NO: 31196 - protein, 506 aa, Escherichia coli
MRSVITYLRFSSAIQGAEGADSTRRQNDLFKQWLKKNSDAQVVASFSDEGLSGYKGKHLTGQFGDMLARIEAGEFSEGTVLLVEAIDRIGRLEHLETEALMNRIITHGIEIHTLQDGLIYTRDALSDDLGISIIQRVKSYVAHQESKQKSFRVSQKWKQRAKLALAGEQRLTKMVPGWIDPDTFKCNEHAETVRLIFKLLLDGESLHNIARHLQSNDIKSFSRRKDANGFSVHSVRTVLRSESVIGTLPASQRNDRPAIPNYYEAAIDASTFNKAQEILDKNRKGRTPASDNPLTINIFKGLFRCQCGASVHPTGTKNKYAGVYRCNNHLDGRCDVPPLKRKPFDKWMLENFLGMIDVGNDGEAEGKIASLQHEVEIVTTRIKKATALLLEMDDITELKAQVKELNQKRTELQTTIDSMRRKTSLTDKELPQLKDIDLTTKAGRVECQLILSKHLKGLTLGKDSVIVTLQNDTEITIPTNPLPLNDGTSIFEIAEKELLEIDAYQL

SEQ ID NO: 31197 - DNA, 50 bp, Escherichia coli; identical to SEQ ID NO: 30087
  source 1..50: mol_type = genomic DNA

SEQ ID NO: 31198 - DNA, 40 bp, Escherichia coli; identical to SEQ ID NO: 7688
  source 1..40: mol_type = genomic DNA

SEQ ID NO: 31199 - DNA, 40 bp, Escherichia coli; identical to SEQ ID NO: 7689
  source 1..40: mol_type = genomic DNA

SEQ ID NO: 31200 - DNA, 50 bp, Escherichia coli; identical to SEQ ID NO: 7690
  source 1..50: mol_type = genomic DNA

SEQ ID NO: 31201 - protein, 506 aa, Escherichia coli
MRHVITYLRYSSAIQGAEGADSTRRQNDLFKQWLKKNSDAQVVASFNDEGLSGYKGKHLSGQFGDMLSRIESGEFSAGTILLVESIDRIGRLEHLETEALMNRILGNGIEIHTLQDGLIYTKDALADDLGISIIQRVKAYIAHQESKQKSFRVSQKWEQRAKLALAGEQRLTKMVPGWIDPDTFKLNEHAETVRLIFKLLLDGESLHNIARHLQSNGIKSFSRRKDANGFSVHSVRTILRSVTTRGTLPASQRNDRPAIPNYYEAAIDAATFNKAQEILDKNRKGRTPASDNPLTINIFKGLFRCQCGASVHPTGTKNKYAGVYRCNNHLDGRCDVPPLKRKPFDKWMLENFLGMIDVGNDGEAEGKIASLQHEVEIVTTRIKKATALLLEMDDIDELKIQLKELNQKRTELQTTIDNMRRKASLTDKELPQLKDIDLMTKAGRVECQLILSKHLKGLTLGKDSVTVTLQNDTEITIPTNPLPLNDGSPIFEIADKELLDIDAYQL

SEQ ID NO: 31202 - DNA, 50 bp, Escherichia coli; identical to SEQ ID NO: 30087
  source 1..50: mol_type = genomic DNA

SEQ ID NO: 31203 - DNA, 40 bp, Escherichia coli; identical to SEQ ID NO: 20043
  source 1..40: mol_type = genomic DNA

SEQ ID NO: 31204 - DNA, 40 bp, Escherichia coli; identical to SEQ ID NO: 30164
  source 1..40: mol_type = genomic DNA

SEQ ID NO: 31205 - DNA, 50 bp, Escherichia coli; identical to SEQ ID NO: 7690
  source 1..50: mol_type = genomic DNA

SEQ ID NO: 31206 - protein, 506 aa, Escherichia coli
MRTVITYLRFSSATQGAEGADSTRRQNELFKQWLRKNSDAQVVASFSDEGLSGYKGKHLTGQFGDMLARIEAGEFPASTILLVESIDRIGRLEHLETEALMNRILGNGIEIHTLQDGLIYTKDALADDLGISIIQRVKAYIAHQESKQKSFRVSQKWEQRAKLALAGEQRLTKMVPGWIDPDTFKCNEHAETVRLIFKLLLDGESLHNIARHLQANNISSFSRRKDANGFSVHSVRTILRSETTRGTLPASQRNDRPAIPNYYEAAIDAATFNKAQEILDKNRKGRTPASDNPLTINIFKGLFRCQCGASVHPTGTKNKYAGVYRCNNNPDGRCDVPPLKRKPFDKWMIDNFLGMIDVGNDGEAEGKIAALQHEVEIVTARIKKATALLLEMDDITELKTQVKGLNQKRTELQTTIDNMRRKASLTDKELPQLKDIDLTTKAGRVECQLILSKHLKGLTLGKDSVIVTLQNDTEITIPTNPLPLNDGTSIFEIAEKELLEIDAYQL

SEQ ID NO: 31207 - DNA, 50 bp, Escherichia coli; identical to SEQ ID NO: 30087
  source 1..50: mol_type = genomic DNA

SEQ ID NO: 31208 - DNA, 40 bp, Escherichia coli; identical to SEQ ID NO: 20043
  source 1..40: mol_type = genomic DNA

SEQ ID NO: 31209 - DNA, 40 bp, Escherichia coli; identical to SEQ ID NO: 30164
  source 1..40: mol_type = genomic DNA

SEQ ID NO: 31210 - DNA, 50 bp, Escherichia coli; identical to SEQ ID NO: 7690
  source 1..50: mol_type = genomic DNA

SEQ ID NO: 31211 - protein, 506 aa, Escherichia coli
MRHVITYLRYSSAIQGAEGADSTRRQNDLFKQWLKKNSDAQVVASFNDEGLSGYKGKHLSGQFGDMLSRIESGEFSKGTILLVEAIDRIGRLEHLETEALMNRIIAHGIEIHTLQDGLIYTRDALSDDLGISIIQRVKSYLAHQESKQKSFRVSEKWKQRAKLALAGEQRLTKMVPGWIDPETFKLNEHAETVRLIFKLLLDGESLHNIARHLQANNISSFSRRKDANGFSVHSVRTILRSETTRGTLPASQRNDRPAIPNYYEAAIDAATFNKAQEILDKNRKGRTPASDNPLTINIFKGLFRCQCGASVHPTGTKNKYQGVYRCNNHLDGRCDVPPLKRKPFDKWMIDNFLGMIDVGNDGEAEGKIAALQHEVEIVTARIKKATALLLEMDDITELKTQVKGLNQKRTELQTTIDNMRRKASLTDKELPQLKDIDLTTKAGRVECQLILSKHLKGLTLGKDSVTVTLQNDTEITIPTDPLPLNDGTSIFEIAEKNLLNIDTFQL

SEQ ID NO: 31212 - DNA, 50 bp, Escherichia coli; identical to SEQ ID NO: 30087
  source 1..50: mol_type = genomic DNA

SEQ ID NO: 31213 - DNA, 40 bp, Escherichia coli; identical to SEQ ID NO: 20043
  source 1..40: mol_type = genomic DNA

SEQ ID NO: 31214 - DNA, 40 bp, Escherichia coli; identical to SEQ ID NO: 30164
  source 1..40: mol_type = genomic DNA

SEQ ID NO: 31215 - DNA, 50 bp, Escherichia coli; identical to SEQ ID NO: 7690
  source 1..50: mol_type = genomic DNA

SEQ ID NO: 31216 - protein, 506 aa, Escherichia coli
MRHVITYLRYSSAIQGAEGADSTRRQNDLFKQWLKKNSDAQVVASFNDEGLSGYKGKHLSGQFGDMLSRIESGEFSEGTILLVEAIDRIGRLEHLETEALMNRIIAHGIEIHTLQDGLIYTRDALSDDLGISIIQRVKSYLAHQESKQKSFRVSQKWEQRAKLALAGEQRLTKMVPGWIDPETFKLNEHAETVRLIFKLLLDGESLHNIARHLQANNISSFSRRKDANGFSVHSVRTILRSETTIGTLPASQRNDRPAIPNYYEAAIDAATFNKAQEILDKNRKGRTPASDNPLTINIFKGLFRCQCGASVHPTGTKNKYAGVYRCNNHLDGRCDVPPLKRKPFDKWMIDNFLGMIDVGNDGEAEGKIASLQHEVEIVTARIKKATALLLEMDDIDELKIQIKELNQRRTELQTTIDSMRRKASLTDKELPQLKDIDLTTKAGRVECQLILSKHLKGLTLGKGSVTITLQNDTEITIPTNPLPLNDGSPIFEIADKELLDIDAYQL

SEQ ID NO: 31217 - DNA, 50 bp, Escherichia coli; identical to SEQ ID NO: 30087
  source 1..50: mol_type = genomic DNA

SEQ ID NO: 31218 - DNA, 40 bp, Escherichia coli; identical to SEQ ID NO: 20043
  source 1..40: mol_type = genomic DNA

SEQ ID NO: 31219 - DNA, 40 bp, Escherichia coli; identical to SEQ ID NO: 30164
  source 1..40: mol_type = genomic DNA

SEQ ID NO: 31220 - DNA, 50 bp, Escherichia coli; identical to SEQ ID NO: 7690
  source 1..50: mol_type = genomic DNA

SEQ ID NO: 31221 - protein, 506 aa, Escherichia coli
MRHVITYLRYSSATQGAEGADSTRRQNDLFKQWLKKNSDAQVVASFSDEGLSGYKGKHLTGQFGDMLARIEAGEFPGGTILLVESIDRIGRLEHLETEALMNRIIAHGIEIHTLQDGLIYTRDALSDDLGISIIQRVKSYLAHQESKQKSFRVSEKWKQRAKLALAGKQRLTKMVPGWIDPDTLKLNEHAETVRLIFKLLLSGESLHNIARHLQSNGIKSFSRRKDANGFSVHSVRTILRSETTIGTLPASQRNDRPAIPNYYEAAIDAATFNKAQEILDKNRKGRTPASDNPLTINIFKGLFRCQCGASVHPTGTKNKYAGVYRCNNHLDGRCDVPPLKRKPFDKWMIDNFLGMIDVGNDGEAEGKIASLQHEVEIVTARIKKATALLLEMDDIDELKIQIKELNQRRTELQTTIDSMRRKASLTDKELPQLKDIDLTTKAGRVECQLILSKHLKGLTLGKGSVTITLQNDTEITIPTNPLPLNDGSPIFEIADKELLDIDAYQL

SEQ ID NO: 31222 - DNA, 50 bp, Escherichia coli; identical to SEQ ID NO: 30087
  source 1..50: mol_type = genomic DNA

SEQ ID NO: 31223 - DNA, 40 bp, Escherichia coli; identical to SEQ ID NO: 20043
  source 1..40: mol_type = genomic DNA

SEQ ID NO: 31224 - DNA, 40 bp, Escherichia coli; identical to SEQ ID NO: 30164
  source 1..40: mol_type = genomic DNA

SEQ ID NO: 31225 - DNA, 50 bp, Escherichia coli; identical to SEQ ID NO: 7690
  source 1..50: mol_type = genomic DNA

SEQ ID NO: 31226 - protein, 506 aa, Escherichia coli
MRHVITYLRYSSAIQGAEGADSTRRQNDLFKQWLRKNSDAQVVASFNDEGLSGYKGKHLSGQFGDMLSRIESGEFSKGTILLVEAIDRIGRLEHLETEALMNRIIAHGIEIHTLQDGLIYTRDALSDDLGISIIQRVKSYLAHQESKQKSFRVSEKWKQRAKLALAGEQRLTKMVPGWIDPETFKLNEHAETVRLIFKLLLDGESLHNIARHLQSNDIKSFSRRKDANGFSVHSVRTVLRSESVIGTLPASQRNDRPAIPNYYEAAIDAATFNKAQEILDKNRKGRTPASDNPLTINIFKGLFRCQCGASVHPTGTKNKYAGVYRCNNHLDGRCDVPPLKRKPFDRWMIDNFLGMIDVGNDGESERKIAALQHEVEIVTARIKKATALLLEMDDITELKAQVKGLNQKRTEIQTTIDTLKRKTSLTDKELPQLKDIDLTTKAGRVECQLILSKHLKGLTLGKDSVTVTLQNDTEITIPTNPLPLNDGSPIFEIADKELLDIDAYQL

SEQ ID NO: 31227 - DNA, 50 bp, Escherichia coli; identical to SEQ ID NO: 30087
  source 1..50: mol_type = genomic DNA

SEQ ID NO: 31228 - DNA, 40 bp, Escherichia coli; identical to SEQ ID NO: 20043
  source 1..40: mol_type = genomic DNA

SEQ ID NO: 31229 - DNA, 40 bp, Escherichia coli; identical to SEQ ID NO: 30164
  source 1..40: mol_type = genomic DNA

SEQ ID NO: 31230 - DNA, 50 bp, Escherichia coli; identical to SEQ ID NO: 7690
  source 1..50: mol_type = genomic DNA

SEQ ID NO: 31231 - protein, 506 aa, Escherichia coli
MRSVITYLRFSSAIQGAEGADSTRRQNDLFKQWLKKNSDAQVVASFSDEGLSGYKGKHLTGQFGDMLARIESGEFSEGTVLLVEAIDRIGRLEHLETEALMNRIIAHGIEIHTLQDGLIYTRDALSDDLGISIIQRVKSYVAHQESKQKSFRVSQKWKQRAKLALAGEQRLTRNVPGWIDPDTFKCNEHAETVRLIFKLLLDGESLHNIARHLQSNDIKSFSRRKDANGFSVHSVRTILRSETTIGTLPASQRNDRPAIPNYYEAAIDASTFNKAQEILDKNRKGRTPASDNPLTINIFKGLFRCQCGASVHPTGTKNKYQGVYRCNNHLDGRCDVPPLKRKPFDKWMIDNFLGMIDVGNDGEAEGKIAALQHEVEIVTARIKKATALLLEMDDITELKAQVKGLNQKRTEIQTTIDTLKRKTSLTDKELPQLKDIDLTTKAGRVECQLILSKHLKGLTLGKDSVTVTLQNDTEITIPTDPLPLNDGTSIFEIADKELLDIDAYRL

SEQ ID NO: 31232 - DNA, 50 bp, Escherichia coli; identical to SEQ ID NO: 30087
  source 1..50: mol_type = genomic DNA

SEQ ID NO: 31233 - DNA, 40 bp, Escherichia coli; identical to SEQ ID NO: 20043
  source 1..40: mol_type = genomic DNA

SEQ ID NO: 31234 - DNA, 40 bp, Escherichia coli; identical to SEQ ID NO: 30164
  source 1..40: mol_type = genomic DNA

SEQ ID NO: 31235 - DNA, 50 bp, Escherichia coli; identical to SEQ ID NO: 7690
  source 1..50: mol_type = genomic DNA

SEQ ID NO: 31236 - protein, 506 aa, Escherichia coli
MRHVITYLRYSSAIQGAEGADSTRRQNELFKQWLRKNSDAQVVASFSDEGLSGYKGKHLTGQFGDMLARIEAGEFPAGTILLVESIDRIGRLEHLETEALMNRILGNGIEIHTLQDGLIYTKDALADDLGISIIQRVKAYIAHQESKQKSFRVSQKWEQRAKLALAGEQRLTKMVPGWIDPDTFKLNEHAETVRLIFKLLLDGESLHNIARHLQANNISSFSRRKDANGFSVHSVRTILRSETTRGTLPASQRNDRPAIPNYYEAAIDAATFNKAQEILDKNRKGRTPASDNPLTINIFKGLFRCQCGASVHPTGTKNKYAGVYRCNNHLDGRCDVPPLKRKPFDKWMLENFLGMIDVGNDGEAEGKIASLQHEVEIVTTRIKKATALLLEMDDIDELKIQLKELNQKRTELQTTIDSMRRKASLTDKELPQLKDIDLTTKAGRVECQLILSKHLKGLTLGKDSVTVTLQNDTEITIPTNPLPLNDGTSIFEIADKELLDIDAYQL

SEQ ID NO: 31237 - DNA, 50 bp, Escherichia coli; identical to SEQ ID NO: 30087
  source 1..50: mol_type = genomic DNA

SEQ ID NO: 31238 - DNA, 40 bp, Escherichia coli; identical to SEQ ID NO: 20043
  source 1..40: mol_type = genomic DNA

SEQ ID NO: 31239 - DNA, 40 bp, Escherichia coli; identical to SEQ ID NO: 30164
  source 1..40: mol_type = genomic DNA

SEQ ID NO: 31240 - DNA, 50 bp, Escherichia coli; identical to SEQ ID NO: 7690
  source 1..50: mol_type = genomic DNA

SEQ ID NO: 31241 - protein, 506 aa, Escherichia coli
MRTVITYLRFSSAIQGAEGADSTRRQNDLFKQWLKKNSDAQVVASFSDEGLSGYKGKHLTGQFGDMLARIESGEFPEGTILLVEAIDRIGRLEHLETEALMNRIIAHGIEIHTLQDGLIYTRDALSDDLGISIIQRVKSYVAHQESKQKSFRVSQKWKQRAKLALAGEQRLTKMVPGWIDPDTFKCNEHAETVRLIFKLLLDGESLHNIARHLQANNISSFSRRKDANGFSVHSVRTILRSETTRGTLPASQRNDRPAIPNYYEAAIDAATFNKAQEILDKNRKGRTPASDNPLTINIFKGLFRCQCGASVHPTGTKNKYQGVYRCNNHLDGRCDVPPLKRKPFDKWMIDNFLGMIDVGNDGESERKIAALQHEVEIVTARIKKATALLLEMDDITELKAQVKGLNQKRTEIQTTIDTLKRKTSLTDKELPQLKDIDMTTKAGRVECQLILSKHLKGLTLGKDSVTVTLQNDTEITIPTNPLPLNDGSPIFEIADKELLDIDAYQL

SEQ ID NO: 31242 - DNA, 50 bp, Escherichia coli; identical to SEQ ID NO: 30087
  source 1..50: mol_type = genomic DNA

SEQ ID NO: 31243 - DNA, 40 bp, Escherichia coli; identical to SEQ ID NO: 20043
  source 1..40: mol_type = genomic DNA

SEQ ID NO: 31244 - DNA, 40 bp, Escherichia coli; identical to SEQ ID NO: 30164
  source 1..40: mol_type = genomic DNA

SEQ ID NO: 31245 - DNA, 50 bp, Escherichia coli; identical to SEQ ID NO: 7690
  source 1..50: mol_type = genomic DNA

SEQ ID NO: 31246 - protein, 506 aa, Escherichia coli
MRSVITYLRFSSAIQGAEGADSTRRQNDLFKQWLKKNSDAQVVASFSDEGLSGYKGKHLTGQFGDMLARIEAGEFLAGTILLVESIDRIGRLEHLETEALMNRILGNGIEIHTLQDGLVYTKDALADDLGISIIQRVKSYIAHQESKQKSFRVSQKWKQRAKLALAGEQRLTRNVPGWIDPDTFKCNEHAETVRLIFKLLLDGESLHNIARHLQSNDIKSFSRRKDANGFSVHSVRTVLRSESVIGTLPASQRNDRPAIPNYYEAAIDAATFNKAQEILDKNRKGRTPASDNPLTINIFKGLFRCQCGASVHPTGTKRTYQGVYRCNNHLDGRCDVQPLKRKPFDRWMIDNFLGMIDVGNDGESERKIAALQHEVEIVTARIKKATALLLEMDDIDELKIQLKELNQKRTELQTTIDNMRRKTSLTDKELPQLKDIDLTTKAGRVECQLILSKHLKGLTLGKDSVTVTLQNDTEITIPTNPLPLNDGSPIFEIADKELLDIDAYQL

SEQ ID NO: 31247 - DNA, 50 bp, Escherichia coli; identical to SEQ ID NO: 30087
  source 1..50: mol_type = genomic DNA

SEQ ID NO: 31248 - DNA, 40 bp, Escherichia coli; identical to SEQ ID NO: 20043
  source 1..40: mol_type = genomic DNA

SEQ ID NO: 31249 - DNA, 40 bp, Escherichia coli; identical to SEQ ID NO: 30164
  source 1..40: mol_type = genomic DNA

SEQ ID NO: 31250 - DNA, 50 bp, Escherichia coli; identical to SEQ ID NO: 7690
  source 1..50: mol_type = genomic DNA

SEQ ID NO: 31251 - protein, 506 aa, Escherichia coli
MRTVITYLRFSSATQGAEGADSTRRQNELFKQWLRKNSDAQVVASFSDEGLSGYKGKHLTGQFGDMLARIESGEFTAGTILLVESIDRIGRLEHLETEALMNRILGNGIEIHTLQDGLIYTKDALADDLGISIIQRVKAYIAHQESKQKSFRVSQKWEQRAKLALAGEQRLTKMVPGWIDPDTFKLNEHAETVRLIFKLLLDGESLHNIARHLQSNGIKSFSRRKDANGFSVHSVRTILRSETTTGTLPASQRNDRPAIPNYYEAAIDAATFNKAQEILDKNRKGRTPASDNPLTINIFKGLFRCQCGASVHPTGTKNKYQGVYRCNNHLDGRCDVPPLKRKPFDKWMIDNFLGMIDVGNDGEAEGKIAALQHEVEIVTARIKKATALLLEMDDITELKTQVKGLNQKRTELQTTIDNMRRKASLTDKELPQLKDIDLTTKAGRVECQLILSKHLKGLTLGKDSVIVTLQNDTEITIPTNPLPLNDGTSIFEIAEKNLLNIDTFQL

SEQ ID NO: 31252 - DNA, 50 bp, Escherichia coli; identical to SEQ ID NO: 30087
  source 1..50: mol_type = genomic DNA

SEQ ID NO: 31253 - DNA, 40 bp, Escherichia coli; identical to SEQ ID NO: 20043
  source 1..40: mol_type = genomic DNA

SEQ ID NO: 31254 - DNA, 40 bp, Escherichia coli; identical to SEQ ID NO: 30164
  source 1..40: mol_type = genomic DNA

SEQ ID NO: 31255 - DNA, 50 bp, Escherichia coli; identical to SEQ ID NO: 7690
  source 1..50: mol_type = genomic DNA

SEQ ID NO: 31256 - protein, 499 aa, Escherichia coli
MRFSSATQGAEGADSTRRQNELFKQWLRKNSDAQVVASFSDEGLSGYKGKHLTGQFGDMLARIEAGEFPAGAILLVESIDRIGRLEHLETEALMNRIIAHGIEIHTLQDGLIYTKDALSDDLGISIIQRVKSYIAHQESKQKSFRVSQKWEQRAKLALAGEQRLTRNVPGWIDPDTFKCNEHAETVRLIFKLLLSGESLHNIARHLQSNGIKSFSRRKDANGFSVHSVRTVLRSESVIGTLPASQRNDRPAIPNYYEAAIDASTFNKAQEILDKNRKGRTPASDNPLTINIFKGLFRCQCGASVHPTGTKNKYQGVYRCNSHLDGRCDVPPLKRKPFDRWMIDNFLGMIDVGNDGEAEKEIASLQHEVETVTARIKKATALLLEMDDITELKTQVKELNQKRTELQTTINTMKRKTSLSDKGLPQLKDIDLMTKVGRVECQLILSKHLKGLTLGKDSVTVTLQNDTEITIPTNPLPLNDGSPIFEIADKELLDIDAYQL

SEQ ID NO: 31257 - DNA, 50 bp, Escherichia coli; identical to SEQ ID NO: 30087
  source 1..50: mol_type = genomic DNA

SEQ ID NO: 31258 - DNA, 40 bp, Escherichia coli; identical to SEQ ID NO: 20043
  source 1..40: mol_type = genomic DNA

SEQ ID NO: 31259 - DNA, 40 bp, Escherichia coli; identical to SEQ ID NO: 30164
  source 1..40: mol_type = genomic DNA

SEQ ID NO: 31260 - DNA, 50 bp, Escherichia coli; identical to SEQ ID NO: 7690
  source 1..50: mol_type = genomic DNA

SEQ ID NO: 31261 - protein, 506 aa, Escherichia coli
MRTVITYLRFSSATQGAEGADSTRRQNELFKQWLRKNSDAQVVASFSDEGLSGYKGKHLTGQFGDMLARIESGEFSEGTVLLVEAIDRIGRLEHLETEALMNRIIAHGIEIHTLQDGLIYTRDALSDDLGISIIQRVKSYVAHQESKQKSFRVSQKWKQRAKLALAGEQRLTKMVPGWIDPDTFKCNEHAETVRLIFKLLLDGESLHNIARHLQANNISSFSRRKDANGFSVHSVRTILRSETTIGTLPASQRNDRPAIPNYYEAAIDAATFNKAQEILDKNRKGRTPASDNPLTINIFKGLFRCQCGASVHPTGTKNKYAGVYRCNNNPDGRCDVPPLKRKPFDKWMIDNFLGMIDVGNDREAEGKIASLQHEVEIVTARIKKATALLLEMDDIDELKIQLKELNQKRTELQTMIDNMRRKASLTDKELPQLKDIDLMTKAGRVECQLILSKHLKGLTLGKDSVTVTLQNDTEIIVPTDPLPLNDGTSIFEIAEKELLEIDAYQL

SEQ ID NO: 31262 - DNA, 50 bp, Escherichia coli; identical to SEQ ID NO: 30087
  source 1..50: mol_type = genomic DNA

SEQ ID NO: 31263 - DNA, 40 bp, Escherichia coli; identical to SEQ ID NO: 20043
  source 1..40: mol_type = genomic DNA

SEQ ID NO: 31264 - DNA, 40 bp, Escherichia coli; identical to SEQ ID NO: 30164
  source 1..40: mol_type = genomic DNA

SEQ ID NO: 31265 - DNA, 50 bp, Escherichia coli; identical to SEQ ID NO: 7690
  source 1..50: mol_type = genomic DNA

SEQ ID NO: 31266 - protein, 506 aa, Escherichia coli
MRSVITYLRFSSAIQGAEGADSTRRQNELFKQWLRKNSDAQVVASFNDEGLSGYKGKHLSGQFGDMLSRIESGEFPEGTILLVEAIDRIGRLEHLETEALMNRIIAHGIEIHTLQDGLIYTRDALSDDLGISIIQRVKSYIAHQESKQKSFRVSQKWKQRAKLALAGEQRLTRNVPGWIDPETFKLNEHAETVRLIFKLLLDGESLHNIARRLQNNGIKSFSRRKDANGFSVHSVRTILRSETTIGTLPASQRNDRPAIPNYYEAAIDASTFNKAQEILGKNRTGRTPASDNPLTINIFKGLFRCQCGASVHPTGTKNKYAGVYRCNNHLDGRCDVPPLKRKPFDKWMLENFLGMIDVGNDGESERKIAALQHEVEIVTSRIKKATALLLEMDDISELKAQVKELNQKRTELQTTIDTLKRKTSLSDKGLPQLKDIDLMTKAGRVECQLILSKHLKGLTLCEGSVVVTLQNDTEITVPTDPLPLNDGASIFEIAEKELLEIDAYQL

SEQ ID NO: 31267 - DNA, 50 bp, Escherichia coli; identical to SEQ ID NO: 30087
  source 1..50: mol_type = genomic DNA

SEQ ID NO: 31268 - DNA, 40 bp, Escherichia coli; identical to SEQ ID NO: 20043
  source 1..40: mol_type = genomic DNA

SEQ ID NO: 31269 - DNA, 40 bp, Escherichia coli; identical to SEQ ID NO: 30164
  source 1..40: mol_type = genomic DNA

SEQ ID NO: 31270 - DNA, 50 bp, Escherichia coli; identical to SEQ ID NO: 7690
  source 1..50: mol_type = genomic DNA

SEQ ID NO: 31271 - protein, 506 aa, Escherichia coli
MRTVITYLRFSSATQGAEGADSTRRQNELFKQWLRKNSDAQVVASFSDEGLSGYKGKHLTGQFGDMLARIEAGEFPASTILLVESIDRIGRLEHLETEALMNRILGNGIEIHTLQDGLIYTKDALADDLGISIIQRVKAYIAHQESKQKSFRVSQKWKQRAKLALAGEQHLTRNVPGWIDPDTFKCNEHAETVRLIFKLLLDGESLHNIARHLQSNDIKSFSRRKDANGFSVHSVRTVLRSESVIGTLPASQRNDRPAIPNYYEAAIDAATFNKAQEILDKNRKGRTPASDNPLTINIFKGLFRCQCGASVHPTGTKNKYQGVYRCNNHLDGRCDVPPLKRKPFDKWMIDNFLGMIDVGNDGEAEGKIAALQHEVEIVTARIKKATALLLEMDDITELKTQVKGLNQKRTELQTTIDNMRRKASLTDKELPQLKDIDLTTKAGRVECQLILSKHLKGLTLGKDSVTVTLQNDTEITIPTDPLPLNDGTSIFEIAEKNLLNIDTFQL

SEQ ID NO: 31272 - DNA, 50 bp, Escherichia coli; identical to SEQ ID NO: 30087
  source 1..50: mol_type = genomic DNA

SEQ ID NO: 31273 - DNA, 40 bp, Escherichia coli; identical to SEQ ID NO: 20043
  source 1..40: mol_type = genomic DNA

SEQ ID NO: 31274 - DNA, 40 bp, Escherichia coli; identical to SEQ ID NO: 30164
  source 1..40: mol_type = genomic DNA

SEQ ID NO: 31275 - DNA, 50 bp, Escherichia coli; identical to SEQ ID NO: 7690
  source 1..50: mol_type = genomic DNA

SEQ ID NO: 31276 - protein, 499 aa, Escherichia coli
MRFSSATQGAEGADSTRRQNELFKQWLRKNSDAQVVASFNDEGLSGYKGKHLSGQFGDMLSRIESGEFPEGTILLVEAIDRIGRLEHLETEALMNRIIAHGIEIHTLQDGLIYTRDALSDDLGISIIQRVKSYLAHQESKQKSFRVSEKWKQRAKLALAGKQRLTKMVPGWIDPGTFTLNEHAETVRLIFKLLLSGESLHNIARHLQANSISSFSRRKDANGFSVHSVRTILRSETTIGTLPASQRNDRPAIPNYYEAAIDAATFNKAQEILDKNRKGRTPASDNPLTINIFKGLFRCQCGASVHPTGTKNKYAGVYRCNNNPDGRCDVPPLKRKPFDKWMIDNFLGMIDVGNDGEAEGKIASLQHEVEIVTTRIKKATALLLEMDDIDELKIQLKELNQKRTELQTTIDNMRRKASLTDKELPQLKDIDLTTKAGRVECQLILSKHLKGLTLGKDSVTVTLQNDTEITIPTNPLPLNDGSPIFEIADKELLDIDAYQL

SEQ ID NO: 31277 - DNA, 50 bp, Escherichia coli; identical to SEQ ID NO: 30087
  source 1..50: mol_type = genomic DNA

SEQ ID NO: 31278 - DNA, 40 bp, Escherichia coli; identical to SEQ ID NO: 20043
  source 1..40: mol_type = genomic DNA

SEQ ID NO: 31279 - DNA, 40 bp, Escherichia coli; identical to SEQ ID NO: 30164
  source 1..40: mol_type = genomic DNA

SEQ ID NO: 31280 - DNA, 50 bp, Escherichia coli; identical to SEQ ID NO: 7690
  source 1..50: mol_type = genomic DNA

SEQ ID NO: 31281 - protein, 506 aa, Escherichia coli
MRTVITYLRFSSATQGAEGADSTRRQNELFKQWLRKNSDAQVVASFNDEGLSGYKGKHLSGQFGDMLSRIESGEFPEGTILLVEAIDRIGRLEHLETEALMNRIIAHGIEIHTLQDGLIYTRDALSDDLGISIIQRVKSYLAHQESKQKSFRVSEKWKQRAKLALAGKQRLTKMVPGWIDPGTFTLNEHAETVRLIFKLLLSGESLHNIARHLQANSISSFSRRKDANGFSVHSVRTILRSETTIGTLPASQRNDRPAIPNYYEAAIDAATFNKAQEILDKNRKGRTPASDNPLTINIFKGLFRCQCGASVHPTGTKNKYAGVYRCNNNPDGRCDVPPLKRKPFDKWMIDNFLGMIDVGNDGEAEGKIASLQHEVEIVTTRIKKATALLLEMDDIDELKIQLKELNQKRTELQTTIDNMRRKASLTDKELPQLKDIDLTTKAGRVECQLILSKHLKGLTLGKDSVTVTLQNDTEITIPTNPLPLNDGSPIFEIADKELLDIDAYQL

SEQ ID NO: 31282 - DNA, 50 bp, Escherichia coli; identical to SEQ ID NO: 30087
  source 1..50: mol_type = genomic DNA

SEQ ID NO: 31283 - DNA, 40 bp, Escherichia coli; identical to SEQ ID NO: 20043
  source 1..40: mol_type = genomic DNA

SEQ ID NO: 31284 - DNA, 40 bp, Escherichia coli; identical to SEQ ID NO: 30164
  source 1..40: mol_type = genomic DNA

SEQ ID NO: 31285 - DNA, 50 bp, Escherichia coli; identical to SEQ ID NO: 7690
  source 1..50: mol_type = genomic DNA

SEQ ID NO: 31286 - protein, 506 aa, Escherichia coli; identical to SEQ ID NO: 30591

SEQ ID NO: 31287 - DNA, 50 bp, Escherichia coli
  source 1..50: mol_type = genomic DNA
aaaccgaatagacttcattcaaggggcattgtattgtagctattcggcat

SEQ ID NO: 31288 - DNA, 40 bp, Escherichia coli; identical to SEQ ID NO: 20043
  source 1..40: mol_type = genomic DNA

SEQ ID NO: 31289 - DNA, 40 bp, Escherichia coli; identical to SEQ ID NO: 30164
  source 1..40: mol_type = genomic DNA

SEQ ID NO: 31290 - DNA, 50 bp, Escherichia coli; identical to SEQ ID NO: 7690
  source 1..50: mol_type = genomic DNA

SEQ ID NO: 31291 - protein, 506 aa, Escherichia coli
MRTVITYLRFSSATQGAEGADSTRRQNELFKQWLRKNSDAQVVASFSDEGLSGYKGKHLTGQFGDMLARIEAGEFPAGAILLVESIDRIGRLEHLETEALMNRIIAHGIEIHTLQDGLIYTRDALSDDLGISIIQRVKSYLAHQESKQKSFRVSEKWKQRAKLALAGEQRLTKMVPGWIDPETFKLNEHAETVRLIFKLLLDGESLHNIARHLQSNDIKSFSRRKDANGFSVHSVRTVLRSESVIGTLPASQRNDRPAIPNYYEAAIDASTFNKAQEILDKNRKGRTPASDNPLTINIFKGLFRCQCGASVHPTGTKNKYQGVYRCNSHLDGRCDVPPLKRKPFDRWMIDNFLGMIDVGNDGEAEKEIASLQHEVETVTARIKKATALLLEMDDITELKTQVKELNQKRTELQTTINTMKRKTSLSDKGLPQLKDIDLMTKAGRVECQLILSKHLKGLTLGKDSVTVTLQNDTEITIPTNPLPLNDGTSIFEIAEKNLLNIDTFQL

SEQ ID NO: 31292 - DNA, 50 bp, Escherichia coli; identical to SEQ ID NO: 30087
  source 1..50: mol_type = genomic DNA

SEQ ID NO: 31293 - DNA, 40 bp, Escherichia coli; identical to SEQ ID NO: 20043
  source 1..40: mol_type = genomic DNA

SEQ ID NO: 31294 - DNA, 40 bp, Escherichia coli; identical to SEQ ID NO: 30164
  source 1..40: mol_type = genomic DNA

SEQ ID NO: 31295 - DNA, 50 bp, Escherichia coli; identical to SEQ ID NO: 7690
  source 1..50: mol_type = genomic DNA

SEQ ID NO: 31296 - protein, 506 aa, Escherichia coli
MRTVITYLRFSSATQGAEGADSTRRQNELFKQWLRKNSDAQVVASFNDEGLSGYKGKHLSGQFGDMLSRIESGEFPEGTILLVEAIDRIGRLEHLETEALMNRIIAHGIEIHTLQDGLIYTRDALSDDLGISIIQRVKSYLAHQESKQKSFRVSEKWKQRAKLALAGKQRLTKMVPGWIDPDTLKCNEHAETVRLIFKLLLSGESLHNIARHLQANNISSFSRRKDANGFSVHSVRTVLRSESVIGTLPASQRNDRPAIPNYYEAAIDAATFNKAQEILDKNRKGRTPASDNPLTINIFKGLFRCQCGASVHPTGTKNKYAGVYRCNNHLDGRCDVPPLKRKPFDKWMIDNFLGMIDVGNDGEAEGKIASLQHEVEIVTTRIKKATALLLEMDDITELKTQVKELNQKRTELQTTIDSMRRKTSLSDKGLPQLKDIDLMTKEGRVECQLILSKHLKGLTLGKDSVTVTLQNDTEITIPTNPLPLNDGTSIFEIADKELLDIDAFRL

SEQ ID NO: 31297 - DNA, 50 bp, Escherichia coli; identical to SEQ ID NO: 30087
  source 1..50: mol_type = genomic DNA

SEQ ID NO: 31298 - DNA, 40 bp, Escherichia coli; identical to SEQ ID NO: 20043
  source 1..40: mol_type = genomic DNA

SEQ ID NO: 31299 - DNA, 40 bp, Escherichia coli; identical to SEQ ID NO: 30164
  source 1..40: mol_type = genomic DNA

SEQ ID NO: 31300 - DNA, 50 bp, Escherichia coli; identical to SEQ ID NO: 7690
  source 1..50: mol_type = genomic DNA

SEQ ID NO: 31301 - protein, 506 aa, Escherichia coli
MRTVITYLRFSSATQGAEGADSTRRQNELFKQWLRKNSDAQVVASFSDEGLSGYKGKHLTGQFGDMLARIESGEFSEGTVLLVEAIDRIGRLEHLETEALMNRIIAHGIEIHTLQDGLIYTRDALSDDLGISIIQRVKSYVAHQESKQKSFRVSQKWKQRAKLALAGEQRLTRNVPGWIDPDTFKCNEHAETVRLIFKLLLDGESLHNIARHLQANNISSFSRRKDANGFSVHSVRTILRSETTRGTLPASQRNDRPAIPNYYEAAIDASTFNKAQEILDKNRKGRTPASDNPLTINIFKGLFRCQCGASVHPTGTKNKYAGVYRCNNNPDGRCDVPPLKRKPFDKWMIDNFLGMIDVGNDGEAEGKIASLQHEVEIVTARIKKATALLLEMDDIDELKIQIKELNQRRTELQTTIDNMRRKASLTDKELPQLKDIDLTTKAGRVECQLILSKHLKGLTLGKDTVTVTLQNDTEITIPTDPLPLNDGTSIFEIAEKNLLNIDTFQL

SEQ ID NO: 31302 - DNA, 50 bp, Escherichia coli; identical to SEQ ID NO: 30087
  source 1..50: mol_type = genomic DNA

SEQ ID NO: 31303 - DNA, 40 bp, Escherichia coli; identical to SEQ ID NO: 20043
  source 1..40: mol_type = genomic DNA

SEQ ID NO: 31304 - DNA, 40 bp, Escherichia coli; identical to SEQ ID NO: 30164
  source 1..40: mol_type = genomic DNA

SEQ ID NO: 31305 - DNA, 50 bp, Escherichia coli; identical to SEQ ID NO: 7690
  source 1..50: mol_type = genomic DNA

SEQ ID NO: 31306 - protein, 506 aa, Escherichia coli
MRSVITYLRFSSAIQGAEGADSTRRQNELFKQWLRKNSDAQVVASFNDEGLSGYKGKHLSGQFGDMLSRIESGEFPEGTILLVEAIDRIGRLEHLETEALMNRIIAHGIEIHTLQDGLIYTRDALSDDLGISIIQRVKSYIAHQESKQKSFRVSQKWEQRAKLALAGEQRLTRNVPGWIDPETFKLNEHAETVRLIFNLLLSGESLHNIARHLQANNISSFSRRKDANGFSVHSVRTILRSETTIGTLPASQRNDRPAIPNYYEAAIDASTFNKAQEILCKNRTGRTPASDNPLTINLFKGLFRCQCGASVHPTGTKNKYAGVYRCNNHLDGRCDVPPLKRKPFDKWMIDNFLGMIDVVSDGESERKIAALQHEVETVTARIKKATALLLEMDDITELKAQVKELNQKRTELQTTIDTLKRKTSLSDKGLPQLKDIDLTTKAGRVECQLILSKHLKGLTLGKDSVTVTLQNDTEITIPTDPLPLNDGSPILEIAEKELLEIDAYQL

SEQ ID NO: 31307 - DNA, 50 bp, Escherichia coli; identical to SEQ ID NO: 30087
  source 1..50: mol_type = genomic DNA

SEQ ID NO: 31308 - DNA, 40 bp, Escherichia coli; identical to SEQ ID NO: 20043
  source 1..40: mol_type = genomic DNA

SEQ ID NO: 31309 - DNA, 40 bp, Escherichia coli; identical to SEQ ID NO: 30164
  source 1..40: mol_type = genomic DNA

SEQ ID NO: 31310 - DNA, 50 bp, Escherichia coli; identical to SEQ ID NO: 7690
  source 1..50: mol_type = genomic DNA

SEQ ID NO: 31311 - protein, 506 aa, Escherichia coli
MRHVITYLRYSSAIQGAEGADSTRRQNDLFKQWLKKNSDAQVVASFNDEGLSGYKGKHLSGQFGDMLSRIESGEFSEGTVLLVEAIDRIGRLEHLETEALMNRILGNGIEIHTLQDGLIYTKDALSDDLGISIIQRVKSYIAHQESKQKSFRVSQKWEQRAKLALAGEQRLTRNVPGWIDPDTFKCNEHAETVRLIFKLLLSGESLHNIARHLQSNGIKSFSRRKDANGFSVHSVRTILRSETTIGTLPASQRNDRPAIPNYYEAAIDASTFNKAQEILGKNRIGRTPASDNPLTINIFKGLFRCQCGASVHPTGTKNKYQGVYRCNNHLDGRCDVPPLKRKPFDKWMLENFLGMIDVGNDGEAEGKIASLQHEVEIVTTRIKKATALLLEMDDIDELKIQLKELNQKRTELQTTIDNMRRKASLTDKELPQLKDIDLTTKVGRVECQLILSKHLKGLTLGKDSVTVTLQNDTEITIPTNPLPLNDGSPIFEIAEKNLLNIDTFQL

SEQ ID NO: 31312 - DNA, 50 bp, Escherichia coli; identical to SEQ ID NO: 30087
  source 1..50: mol_type = genomic DNA

SEQ ID NO: 31313 - DNA, 40 bp, Escherichia coli; identical to SEQ ID NO: 20043
  source 1..40: mol_type = genomic DNA

SEQ ID NO: 31314 - DNA, 40 bp, Escherichia coli; identical to SEQ ID NO: 30164
  source 1..40: mol_type = genomic DNA

SEQ ID NO: 31315 - DNA, 50 bp, Escherichia coli; identical to SEQ ID NO: 7690
  source 1..50: mol_type = genomic DNA

SEQ ID NO: 31316 - protein, 506 aa, Escherichia coli
MRTVITYLRFSSATQGAEGADSTRRQNELFKQWLRKNSDAQVVASFSDEGLSGYKGKHLTGQFGDMLARIEAGEFPAGAILLVESIDRIGRLEHLETEALMNRIIAHGIEIHTLQDGLIYTRDALSDDLGISIIQRVKSYLAHQESKQKSFRVSEKWKQRAKLALAGEQHLTRNVPGWIDPDTFKCNEHAETVRLIFKLLLDGESLHNIARHLQSNDIKSFSRRKDANGFSVHSVRTVLRSESVIGTLPASQRNDRPAIPNYYEAAIDASTFNKTQEILDKNRKGRTPASDNPLTINIFKGLFRCQCGASVHPTGTKNKYQGVYRCNSHLDGRCDVPPLKRKPFDRWMIDNFLGMIDVGNDGEAEKEIASLQHEVETVTARIKKATALLLEMDDITELKTQVKELNQKRTELQTTINTMKRKTSLSDKGLPQLKDIDLMTKAGRVECQLILSKHLKGLTLGKDSVTVTLQNDTEITIPTNPLPLNDGTSIFEIAEKNLLNIDTFQL

SEQ ID NO: 31317 - DNA, 50 bp, Escherichia coli; identical to SEQ ID NO: 30087
  source 1..50: mol_type = genomic DNA

SEQ ID NO: 31318 - DNA, 40 bp, Escherichia coli; identical to SEQ ID NO: 20043
  source 1..40: mol_type = genomic DNA

SEQ ID NO: 31319 - DNA, 40 bp, Escherichia coli; identical to SEQ ID NO: 30164
  source 1..40: mol_type = genomic DNA

SEQ ID NO: 31320 - DNA, 50 bp, Escherichia coli; identical to SEQ ID NO: 7690
  source 1..50: mol_type = genomic DNA

SEQ ID NO: 31321 - protein, 506 aa, Escherichia coli
MRTVITYLRFSSATQGAEGADSTRRQNELFKQWLRKNSDAQVVASFSDEGLSGYKGKHLTGQFGDMLARIEAGEFPASTILLVESIDRIGRLEHLETEALMNRILGNGIEIHTLQDGLIYTKDALADDLGISIIQRVKAYIAHQESKQKSFRVSQKWKQRAKLALAGEQHLTRNVPGWIDPDTFKCNEHAETVRLIFKLLLDGESLHNIARHLQSNDIKSFSRRKDANGFSVHSVRTVLRSESVIGTLPASQRNDRPAIPNYYEAAIDAATFNKAQEILDKNRKGRTPASDNPLTINIFKGLFRCQCGASVHPTGTKNKYAGVYRCNNHLDGRCDVPPLKRKPFDRWMIDNFLGMIDVGNDGESEGKIAALQHEVEIVTARIKKATALLLEMDDITELKAQVKGLNQKRTEIQTTIDTLKRKTSLTDKELPQLKDIDLTTKAGRVECQLILSKHLKGLTLGKDSVTVTLQNDTEITIPTNPLPLNDGSPIFEIADKELLDIDAYQL

SEQ ID NO: 31322 - DNA, 50 bp, Escherichia coli; identical to SEQ ID NO: 30087
  source 1..50: mol_type = genomic DNA

SEQ ID NO: 31323 - DNA, 40 bp, Escherichia coli; identical to SEQ ID NO: 20043
  source 1..40: mol_type = genomic DNA

SEQ ID NO: 31324 - DNA, 40 bp, Escherichia coli; identical to SEQ ID NO: 30164
  source 1..40: mol_type = genomic DNA

SEQ ID NO: 31325 - DNA, 50 bp, Escherichia coli; identical to SEQ ID NO: 7690
  source 1..50: mol_type = genomic DNA

SEQ ID NO: 31326 - protein, 506 aa, Escherichia coli
MRTVITYLRFSSATQGAEGADSTRRQNELFKQWLRKNSDAQVVASFSDEGLSGYKGKHLTGQFGDMLARIESGEFSEGTILLVEAIDRIGRLEHLETEALMNRIIAHGIEIHTLQDGLIYTRDALSDDLGISIIQRVKSYVAHQESKQKSFRVSQKWKQRAKLALAGEQRLTKMVPGWIDPETFKLNEHAETVRLIFKLLLDGESLHNIARHLQANNISSFSRRKDANGFSVHSVRTILRSETTIGTLPASQRNDRPAIPNYYEAAIDAATFNKAQEILDKNRKGRTPASDNPLTINIFKGLFRCQCGASVHPTGTKNKYQGVYRCNNHLDGRCDVPPLKRKPFDKWMIDNFLGMIDVGNDGEAEGKIASLQHEVEIVTTRIKKATALLLEMDDIDELKIQLKELNQKRTELQTTIDNMRRKASLTDKELPQLKDIDLTTKAGRVECQLILSKHLKGLTLGKDTVTVTLQNDTEITIPTDPLPLNDGTSIFEIAEKNLLNIDTFQL

SEQ ID NO: 31327 - DNA, 50 bp, Escherichia coli; identical to SEQ ID NO: 30087
  source 1..50: mol_type = genomic DNA

SEQ ID NO: 31328 - DNA, 40 bp, Escherichia coli; identical to SEQ ID NO: 20043
  source 1..40: mol_type = genomic DNA

SEQ ID NO: 31329 - DNA, 40 bp, Escherichia coli; identical to SEQ ID NO: 30164
  source 1..40: mol_type = genomic DNA

SEQ ID NO: 31330 - DNA, 50 bp, Escherichia coli; identical to SEQ ID NO: 7690
  source 1..50: mol_type = genomic DNA

SEQ ID NO: 31331 - protein, 506 aa, Escherichia coli
MRSVITYLRFSSAIQGAEGADSTRRQNDLFKQWLKKNSDAQVVASFSDEGLSGYKGKHLTGQFGDMLARIESGEFSEGTVLLVEAIDRIGRLEHLETEALMNRIIAHGIEIHTLQDGLIYTRDALSDDLGISIIQRVKSYVAHQESKQKSFRVSQKWKQRAKLALAGEQRLTKMVPGWIDPDTFKCNEHAETVRLIFKLLLDGESLHNIARHLQANNISSFSRRKDANGFSVHSVRTILRSETTIGTLPASQRNDRPAIPNYYEAAIDVSTFNKAQEILDKNRKGRTPASDNPLTINIFKGLFRCQCGASVHPTGTKNKYQGVYRCNSHLDGRCDVPPLKRKPFDRWMIDNFLGMIDVGNDGEAEKEIASLQHEVETVTARIKKATALLLEMDDITELKTQVKELNQKRTELQTTINTMKRKTSLSDKGLPQLKDIDLMTKAGRVECQLILSKHLKGLTLGKDSVIVTLQNDTEITIPTNPLPLNDGTSIFEIAEKELLEIDAYQL

SEQ ID NO: 31332 - DNA, 50 bp, Escherichia coli; identical to SEQ ID NO: 30087
  source 1..50: mol_type = genomic DNA

SEQ ID NO: 31333 - DNA, 40 bp, Escherichia coli; identical to SEQ ID NO: 20043
  source 1..40: mol_type = genomic DNA

SEQ ID NO: 31334 - DNA, 40 bp, Escherichia coli; identical to SEQ ID NO: 30164
  source 1..40: mol_type = genomic DNA

SEQ ID NO: 31335 - DNA, 50 bp, Escherichia coli; identical to SEQ ID NO: 7690
  source 1..50: mol_type = genomic DNA

SEQ ID NO: 31336 - protein, 506 aa, Escherichia coli
MRTVITYLRFSSAIQGAEGADSTRRQNDLFKQWLKKNSDAQVVASFSDEGLSGYKGKHLTGQFGDMLSRIESGEFPEGTILLVEAIDRIGRLEHLETEALMNRIIAHGIEIHTLQDGLIYTRDALSDDLGISIIQRVKSYLAHQESKQKSFRVSQKWEQRAKLALAGEQRLTKMVPGWIDPDTFKCNEHAETVRLIFKLLLDGESLHNIARHLQANNISSFSRRKDANGFSVHSVRTILRSETTIGTLPASQRNDRPAIPNYYEAAIDAATFNKAQEILDKNRKGRTPASDNPLTINIFKGLFRCQCGASVHPTGTKNKYAGVYRCNNNPDGRCDVPPLKRKPFDRWMIDNFLGMIDVGNDGESERKIAALQHEVEIVTARIKKATALLLEMDDITELKAQVKGLNQKRTELQTTINTMKRKTSLSDKGLPQLKDIDLTTKAGRVECQLILSKHLKGLTLGKDSVTVTLQNDTEITIPTNPLPLNDGTSIFEIAEKELLEIDAYQL

SEQ ID NO: 31337 - DNA, 50 bp, Escherichia coli; identical to SEQ ID NO: 30087
  source 1..50: mol_type = genomic DNA

SEQ ID NO: 31338 - DNA, 40 bp, Escherichia coli; identical to SEQ ID NO: 20043
  source 1..40: mol_type = genomic DNA

SEQ ID NO: 31339 - DNA, 40 bp, Escherichia coli; identical to SEQ ID NO: 30164
  source 1..40: mol_type = genomic DNA

SEQ ID NO: 31340 - DNA, 50 bp, Escherichia coli; identical to SEQ ID NO: 7690
  source 1..50: mol_type = genomic DNA

SEQ ID NO: 31341 - protein, 506 aa, Escherichia coli
MRTVITYLRFSSATQGAEGADSTRRQNELFKQWLRKNSDAQVVASFSDEGLSGYKGKHLTGQFGDMLARIESGEFPESTILLVESIDRIGRLEHLETEALMNRILGNGLEIHTLQDGLIYTKDALADDLGISIIQRVKAYIAHQESKQKSFRVSEKWKQRAKLALAGEQRLTKMVPGWIDPDTLKLNEHAETVRLIFKLLLSGESLHNIARHLQSNGIKSFSRRKDANGFSVHSVRTVLRSESVIGTLPASQRNDRPAIPNYYEAAIDAATFNKAQEILDKNRKGRTPASDNPLTINIFKGLFRCQCGASVHPTGTKNKYAGVYRCNNHLDGRCDVPPLKRKPFDRWMIDNFLGMIDVGNDGESERKIASLQHEVEIVTTRIKKATALLLEMDDIDELKIQIKELNQRRTELQTTIDNMRRKASLTDKELPQLKDIDLTTKAGRVECQLILSKHLKGLTLGKDSVIVTLQNDTEITIPTNPLPLNDGTSIFEIAEKELLEIDAYQL

SEQ ID NO: 31342 - DNA, 50 bp, Escherichia coli; identical to SEQ ID NO: 30087
  source 1..50: mol_type = genomic DNA

SEQ ID NO: 31343 - DNA, 40 bp, Escherichia coli; identical to SEQ ID NO: 20043
  source 1..40: mol_type = genomic DNA

SEQ ID NO: 31344 - DNA, 40 bp, Escherichia coli; identical to SEQ ID NO: 30164
  source 1..40: mol_type = genomic DNA

SEQ ID NO: 31345 - DNA, 50 bp, Escherichia coli; identical to SEQ ID NO: 7690
  source 1..50: mol_type = genomic DNA

SEQ ID NO: 31346 - protein, 506 aa, Escherichia coli
MRTVITYLRYSSAIQGAEGADSTRRQNDLFKQWLKKNSDAQVVASFSDEGLSGYKGKHLTGQFGDMLARIESGEFPEGTILLVEAIDRIGRLEHLETEALMNRIIAHGIEIHTLQDGLIYTRDALSDDLGISIIQRVKSYVAHQESKQKSFRVSQKWKQRAKLALAGEQRLTKMVPGWIDPDTFKCNEHAETVRLIFKLLLDGESLHNIARHLQANNISSFSRRKDANGFSVHSVRTILRSETTRGTLPASQRNDRPAIPNYYEAAIDAATFNKAQEILDKNRKGRTPASDNPLTINIFKGLFRCQCGASVHPTGTKNKYQGVYRCNNHLDGRCDVPPLKRKPFDKWMIDNFLGMIDVGNDGEAEGKIAALQHEVEIVTARIKKATALLLEMDDITELKTQVKGLNQKRTELQTTIDNMRRKASLTDKELPQLKDIDLTTKAGRVECQLILSKHLKGLTLGKDSVIVTLQNDTEITIPTDPLPLNDGTSIFEIAEKNLLNIDTFQL

SEQ ID NO: 31347 - DNA, 50 bp, Escherichia coli; identical to SEQ ID NO: 30087
  source 1..50: mol_type = genomic DNA

SEQ ID NO: 31348 - DNA, 40 bp, Escherichia coli; identical to SEQ ID NO: 20043
  source 1..40: mol_type = genomic DNA

SEQ ID NO: 31349 - DNA, 40 bp, Escherichia coli; identical to SEQ ID NO: 30164
  source 1..40: mol_type = genomic DNA

SEQ ID NO: 31350 - DNA, 50 bp, Escherichia coli; identical to SEQ ID NO: 7690
  source 1..50: mol_type = genomic DNA

SEQ ID NO: 31351 - protein, 506 aa, Escherichia coli
MRSVITYLRYSSAIQGAEGADSTRRQNDLFKQWLKKNSDAQVVASFSDEGLSGYKGKHLTGQFGDMLARIESGEFPESTILLVESIDRIGRLEHLETEALMNRILGNGLEIHTLQDGLIYTKDALADDLGISIIQRVKAYIAHQESKQKSFRVSEKWKQRAKLALAGEQRLTKMVPGWIDPDTFKLNEHAETVRLIFKLLLSGESLHNIARHLQSNGIKSFSRRKDANGFSVHSVRTILRSETTIGTLPASQRNDRPAIPNYYEAAIDASTFNKAQEILDKNRKGRTPASDNPLTINIFKGLFRCQCGASVHPTGTKNKYAGVYRCNNHLDGRCDVQPLKRKPFDRWMIDNFLGMIDVGNDGKSKRKIASLQHEVEIVTARIKKATALLLEMDDITELKAQVKELNQKRTELQTTIDTLKRKTSLTDKELPQLKDIDLMTKAGRVECQLILSKHLKGLTLGKDSVTVTLQNDTEITIPTNPLPLNDGSPIFEIADKELLDIDAYQL

SEQ ID NO: 31352 - DNA, 50 bp, Escherichia coli; identical to SEQ ID NO: 30087
  source 1..50: mol_type = genomic DNA

SEQ ID NO: 31353 - DNA, 40 bp, Escherichia coli; identical to SEQ ID NO: 20043
  source 1..40: mol_type = genomic DNA

SEQ ID NO: 31354 - DNA, 40 bp, Escherichia coli; identical to SEQ ID NO: 30164
  source 1..40: mol_type = genomic DNA

SEQ ID NO: 31355 - DNA, 50 bp, Escherichia coli; identical to SEQ ID NO: 7690
  source 1..50: mol_type = genomic DNA

SEQ ID NO: 31356 - protein, 506 aa, Escherichia coli
MRTVITYLRFSSAIQGAEGADSTRRQNDLFKQWLKKNSDAQVVASFSDEGLSGYKGKHLTGQFGDMLARIESGEFPEGTILLVEAIDRIGRLEHLETEALMNRIIAHGIEIHTLQDGLIYTRDALSDDLGISIIQRVKSYVAHQESKQKSFRVSQKWKQRAKLALAGEQRLTKMVPGWIDPDTFKCNEHAETVRLIFKLLLDGESLHNIARHLQANNISSFSRRKDANGFSVHSVRTILRSETTRGTLPASQRNDRPAIPNYYEAAIDAATFNKAQEILDKNRKGRTPASDNPLTINIFKGLFRCQCGASVHPTGTKNKYAGVYRCNNHLDGRCDVPPLKRKPFDKWMIDNFLGMIDVGNDGEAEGKIASLQHEVEIVTTRIKKATALLLEMDDITELKTQVKELNQKRTELQTTIDSMRRKTSLSDKGLPQLKDIDLMTKEGRVECQLILSKHLKGLTLGKDSVTVTLQNDTEITIPTDPLPLNDGTSIFEIAEKNLLNIDTFQL

SEQ ID NO: 31357 - DNA, 50 bp, Escherichia coli; identical to SEQ ID NO: 30087
  source 1..50: mol_type = genomic DNA

SEQ ID NO: 31358 - DNA, 40 bp, Escherichia coli; identical to SEQ ID NO: 20043
  source 1..40: mol_type = genomic DNA

SEQ ID NO: 31359 - DNA, 40 bp, Escherichia coli; identical to SEQ ID NO: 30164
  source 1..40: mol_type = genomic DNA

SEQ ID NO: 31360 - DNA, 50 bp, Escherichia coli; identical to SEQ ID NO: 7690
  source 1..50: mol_type = genomic DNA

SEQ ID NO: 31361 - protein, 506 aa, Escherichia marmotae
MRHVITYLRYSSATQGAEGADSTRRQNELFKQWLRKNSDAQVVASFNDEGLSGYKGKHLSGQFGDMLSRIESGEFSKGTILLVEAIDRIGRLEHLETEALMNRIIAHGIEIHTLQDGLIYTRDALSDDLGISIIQRVKSYLAHQESKQKSFRVSEKWKQRAKLALAGEQRLTKMVPGWIDPETFKLNEHAETVRLIFKLLLDGESLHNIARHLQANNISSFSRRKDANGFSVHSVRTILRSETTIGTLPASQRNDRPAIPNYYEAAIDAATFNKAQEILDKNRKGRTPASDNPLTINIFKGLFRCQCGASVHPTGTKNKYAGVYRCNNHLDGRCDVPPLKRKPFDRWMIDNFLGMIDVGNDGEAEGKIASLQHEVEIVTARIKKATALLLEMDDITELKAQVKGLNQKRTEIQTTIDTLKRKTSLTDKELPQLKDIDLTTKAGRVECQLILSKHLKGLTLGKDSVTVTLQNDTEITIPTNPLPLNDGSPIFEIADKELLDIDAYQL

SEQ ID NO: 31362 - DNA, 50 bp, Escherichia marmotae; identical to SEQ ID NO: 30087
  source 1..50: mol_type = genomic DNA

SEQ ID NO: 31363 - DNA, 40 bp, Escherichia marmotae
  source 1..40: mol_type = genomic DNA
gcggcgaggtaaatcaagggtcattgaagtcataatcgtt

SEQ ID NO: 31364 - DNA, 40 bp, Escherichia marmotae
  source 1..40: mol_type = genomic DNA
gcggcgaggtaaatcaaggtgcattgaagtcataatcgtt

SEQ ID NO: 31365 - DNA, 50 bp, Escherichia marmotae; identical to SEQ ID NO: 7690
  source 1..50: mol_type = genomic DNA

SEQ ID NO: 31366 - protein, 506 aa, Escherichia coli
MRTAITYLRYSSAIQGAEGADSTRRQNDLFKQWLKKNSDAQIVASFSDEGLSGYKGKHLTGQFGDMLARIEAGEFPAGTLLLVESIDRIGRLEHLETEALMNRILCNGIEIHTLQDGLVYTKDALADDLGISIIQRVKAYIAHQESKQKSFRVSQKWGQRAKLALAGKQRLTKMVPGWIDPETFKLNEHAETVRLIFKLLLDGESLHNIARHLQANNISSFSRRKDANGFSVHSVRTVLRSESVIGTLPASQRNDRPAIPNYYEAAIDAATFNKAQEILDKNRKGRTPASDNPLTINIFKGLFRCQCGASVHPTGTKNKYAGVYRCNNNPDGRCDVPPLKRKPFDKWMIDNFLGMIDVGNDGESEGKIAALQHEVEIVTTRIKKATALLLEMDDITELKTQVKELNQKRTELQTTIDNMRRKASLTDKELPQLKDIDLTTKAGRVECQLILSKHLKGLTLGKDSVTVTLQNDTEITIPTNPLPLNDGTSIFEIADKELLDIDAFRL

SEQ ID NO: 31367 - DNA, 50 bp, Escherichia coli; identical to SEQ ID NO: 30087
  source 1..50: mol_type = genomic DNA

SEQ ID NO: 31368 - DNA, 40 bp, Escherichia coli; identical to SEQ ID NO: 20043
  source 1..40: mol_type = genomic DNA

SEQ ID NO: 31369 - DNA, 40 bp, Escherichia coli; identical to SEQ ID NO: 30164
  source 1..40: mol_type = genomic DNA

SEQ ID NO: 31370 - DNA, 50 bp, Escherichia coli; identical to SEQ ID NO: 7690
  source 1..50: mol_type = genomic DNA

SEQ ID NO: 31371 - protein, 506 aa, Escherichia coli
MRTVITYLRFSSATQGAEGADSTRRQNELFKQWLRKNSDAQVVASFSDEGLSGYKGKHLTGQFGDMLARIESGEFSEGTVLLVEAIDRIGRLEHLETEALMNRIIAHGIEIHTLQDGLIYTRDALSDDLGISIIQRVKSYVAHQESKQKSFRVSQKWKQRAKLALAGEQRLTKMVPGWIDPDTLKLNEHAETVRLIFKLLLDGESLHNIARHLQANNISSFSRRKDANGFSVHSVRTILRSETTIGTLPASQRNDRPAIPNYYEAAIDVSTFNKAQEILDKNRKGRTPASDNPLTINIFKGLFRCQCGASVHPTGTKNKYQGVYRCNNHLDGRCDVQPLKRKPFDRWMIDNFLGMIDVGNDGESERKIAALQHEVEIVTARIKKATALLLEMDDITELKTQVKGLNQKRTELQTTIDNMRRKASLTDKELPQLKDIDLTTKAGRVECQLILSKHLKGLTLGKDSVTVTLQNDTEITIPTNPLPLNDGTSIFEIADKELLDIDAYQL

SEQ ID NO: 31372 - DNA, 50 bp, Escherichia coli; identical to SEQ ID NO: 30087
  source 1..50: mol_type = genomic DNA

SEQ ID NO: 31373 - DNA, 40 bp, Escherichia coli; identical to SEQ ID NO: 20043
  source 1..40: mol_type = genomic DNA

SEQ ID NO: 31374 - DNA, 40 bp, Escherichia coli; identical to SEQ ID NO: 30164
  source 1..40: mol_type = genomic DNA

SEQ ID NO: 31375 - DNA, 50 bp, Escherichia coli; identical to SEQ ID NO: 7690
  source 1..50: mol_type = genomic DNA

SEQ ID NO: 31376 - protein, 499 aa, Escherichia coli
MRFSSATQGAEGADSTRRQNELFKQWLRKNSDAQVVASFSDEGLSGYKGKHLTGQFGDMLARIESGEFPEGTILLVESIDRIGRLEHLETEALMNRILGNGLEIHTLQDGLIYTKDALADDLGISIIQRVKAYIAHQESKQKSFRVSQKWEQRAKLALAGEQRLTKMVPGWIDPDTFKLNEHAETVRLIFKLLLSGESLHNIARHLQSNGIKSFSRRKDANGFSVHSVRTILRSETTIGTLPASQRNDRPAIPNYYEAAIDAATFNKAQEILDKNRKGRTPASDNPLTINIFKGLFRCQCGASVHPTGTKNKYAGVYRCNNHLDGRCDVPPLKRKPFDKWVLENFLGMIDVGNDGESERKIAALQHEVEIVTARIKKATALLLEMDDIDELKIQLKELNQKRTELQTTIDSMRRKASLTDKELPQLKDIDLTTKAGRVECQLILSKHLKGLTLGKDSVTVTLQNDTEITIPTNPLPLNDGTSIFEIAEKELLEIDAYQL

SEQ ID NO: 31377 - DNA, 50 bp, Escherichia coli; identical to SEQ ID NO: 30087
  source 1..50: mol_type = genomic DNA

SEQ ID NO: 31378 - DNA, 40 bp, Escherichia coli; identical to SEQ ID NO: 20043
  source 1..40: mol_type = genomic DNA

SEQ ID NO: 31379 - DNA, 40 bp, Escherichia coli; identical to SEQ ID NO: 30164
  source 1..40: mol_type = genomic DNA

SEQ ID NO: 31380 - DNA, 50 bp, Escherichia coli; identical to SEQ ID NO: 7690
  source 1..50: mol_type = genomic DNA

SEQ ID NO: 31381 - protein, 506 aa, Escherichia coli
MRSVITYLRFSSAIQGAEGADSTRRQNDLFKQWLKKNSDAQVVASFSDEGLSGYKGKHLSGQFGDMLSRIESGEFSEGTILLVEAIDRIGRLEHLETEALMNRIIAHGIEIHTLQDGLIYTRDALSDDLGISIIQRVKSYIAHQESKQKSFRVSQKWGQRAKLALAGKQRLTKMVPGWIDPETFEVNEHAETVRLIFKLLLDGESLHNIARHLQANNISSFSRRKDANGFSVHSVRTILRSETTIGTLPASQRNDRPAIPNYYEAAIDAATFNKAQEILDKNRKGRTPASDNPLTINIFKGLFRCQCGASVHPTGTKNKYQGVYRCNNHLDGRCDVPPLKRKPFDRWMIDNFLGMIDVGNDGESERKIAALQHEVEIVTSRIKKATALLLEMDDITELKAQVKELNQKRTELQTTINTMKRKTSLSDKGLPQLKDIDLMTKAGRVECQLILSKHLKGLTLGKDSVTVTLQNDTEITIPTNPLPLNDGSPIFEIADKELLDVDAYQL

SEQ ID NO: 31382 - DNA, 50 bp, Escherichia coli; identical to SEQ ID NO: 30087
  source 1..50: mol_type = genomic DNA

SEQ ID NO: 31383 - DNA, 40 bp, Escherichia coli
  source 1..40: mol_type = genomic DNA
gcggcaaggtaaatcaagggtcattgaagtcataatcatt

SEQ ID NO: 31384 - DNA, 40 bp, Escherichia coli
  source 1..40: mol_type = genomic DNA
gcggcaaggtaaatcaaggtgcattgaagtcataatcatt

SEQ ID NO: 31385 - DNA, 50 bp, Escherichia coli; identical to SEQ ID NO: 7690
  source 1..50: mol_type = genomic DNA

SEQ ID NO: 31386 - protein, 506 aa, Escherichia coli
MRHVITYLRYSSAIQGAEGADSTRRQNDLFKQWLKKNSDAQVVASFNDEGLSGYKGKHLSGQFGDMLSRIESGEFPEGTILLVEAIDRIGRLEHLETEALMNRIIAHGIEIHTLQDGLIYTRDALSDDLGISIIQRVKSYIAHQESKQKSFRVSEKWKQRAKLALAGKQRLTKMVPGWIDPDTFKLNEHAETVRLIFKLLLDGESLHNIARHLQANNISSFSRRKDANGFSVHSVRTILRSETTIGTLPASQRNDRPAIPNYYEAAIDAATFNKAQEILDKNRKGRTPASDNPLTINIFKGLFRCQCGASVHPTGTKNKYAGVYRCNNNPDGRCDVPPLKRKPFDKWMIDNFLGMIDVGNDGEAEGKIAALQHEVEIVTARIKKATALLLEMDDITELKTQVKGLNQKRTELQTTIDNMRRKASLTDKELPQLKDIDLTTKAGRVECQLILSKHLKGLTLGKDSVIVTLQNDTEITIPTNPLPLNDGTSIFEIADKELLDVDAYQL

SEQ ID NO: 31387 - DNA, 50 bp, Escherichia coli; identical to SEQ ID NO: 30087
  source 1..50: mol_type = genomic DNA

SEQ ID NO: 31388 - DNA, 40 bp, Escherichia coli; identical to SEQ ID NO: 20043
  source 1..40: mol_type = genomic DNA

SEQ ID NO: 31389 - DNA, 40 bp, Escherichia coli; identical to SEQ ID NO: 30164
  source 1..40: mol_type = genomic DNA

SEQ ID NO: 31390 - DNA, 50 bp, Escherichia coli; identical to SEQ ID NO: 7690
  source 1..50: mol_type = genomic DNA

SEQ ID NO: 31391 - protein, 506 aa, Escherichia coli
MRSVITYLRYSSAIQGAEGADSTRRQNDLFKQWLKKNSDAQVVASFSDEGLSGYKGKHLTGQFGDMLARIESGEFSKGTILLVESIDRIGRLEHLETEALMNRILGNGLEIHTLQDGLIYTKDALADDLGISIIQRVKSYLAHQESKQKSFRVSEKWKQRAKLALAGEQRLTKMVPGWIDPETFKLNEHAETVRLIFKLLLDGESLHNIARHLQANNISSFSRRKDANGFSVHSVRTILRSETTIGTLPASQRNDRPAIPNYYEAAIDAATFNKAQEILGKNRIGRTPASDNPLTINIFKGLFRCQCGASVHPTGTKNKYQGVYRCNNHLDGRCDVPPLKRKPFDKWMIDNFLGMIDVGNDGEAEGKIASLQHEVEIVTTRIKKATALLLEMDDIDELKIQLKELNQKRTELQTTIDNMRRKASLTDKELPQLKDIDLTTKAGRVECQLILSKHLKGLTLGKDTVTVTLQNDTEITIPTDPLPLNDGTSIFEIAEKNLLNIDTFQL

SEQ ID NO: 31392 - DNA, 50 bp, Escherichia coli; identical to SEQ ID NO: 30087
  source 1..50: mol_type = genomic DNA

SEQ ID NO: 31393 - DNA, 40 bp, Escherichia coli; identical to SEQ ID NO: 20043
  source 1..40: mol_type = genomic DNA

SEQ ID NO: 31394 - DNA, 40 bp, Escherichia coli; identical to SEQ ID NO: 30164
  source 1..40: mol_type = genomic DNA

SEQ ID NO: 31395 - DNA, 50 bp, Escherichia coli; identical to SEQ ID NO: 7690
  source 1..50: mol_type = genomic DNA

SEQ ID NO: 31396 - protein, 506 aa, Escherichia coli
MRHVITYLRYSSAIQGAEGADSTRRQNDLFKQWLKKNSDAQVVASFSDEGLSGYKGKHLTGQFGDMLARIESGEFPEGTILLVESIDRIGRLEHLETESLMNRIIAHGIEIHTLQDGLIYTRDALSDDLGISIIQRVKSYIAHQESKQKSFRVSQKWKQRAKLALAGEQRLTRNVPGWIDPDTFKLNEHAETVRLIFKLLLSGESLHNIARHLQSNGIKSFSRRKDANGFSVHSVRTILRSETTIGTLPASQRNDRPAIPNYYEAAIDASTFNKAQEILGKNRIGRTPASDNPLTINIFKGLFRCQCGASVHPTGTKNKYQGVYRCNNHLDGRCDVPPLKRKPFDKWMIDNFLGMIDVGNDGEAEGKIASLQHEVEIVTARIKKATALLLEMDDIDELKIQLKELNQKRTELQTMIDNMRRKASLTDKELPQLKDIDLMTKAGRVECQLILSKHLKGLTLGKDSVTVTLQNDTEIIVPTDPLPLNDGTSIFEIAEKELLEIDAYQL

SEQ ID NO: 31397 - DNA, 50 bp, Escherichia coli; identical to SEQ ID NO: 30087
  source 1..50: mol_type = genomic DNA

SEQ ID NO: 31398 - DNA, 40 bp, Escherichia coli; identical to SEQ ID NO: 20043
  source 1..40: mol_type = genomic DNA

SEQ ID NO: 31399 - DNA, 40 bp, Escherichia coli; identical to SEQ ID NO: 30164
  source 1..40: mol_type = genomic DNA

SEQ ID NO: 31400 - DNA, 50 bp, Escherichia coli; identical to SEQ ID NO: 7690
  source 1..50: mol_type = genomic DNA

SEQ ID NO: 31401 - protein, 506 aa, Escherichia coli
MRTVITYLRFSSATQGAEGADSTRRQNELFKQWLRKNSDAQVVASFSDEGLSGYKGKHLTGQFGDMLARIEAGEFPAGAILLVESIDRIGRLEHLETEALMNRIIAHGIEIHTLQDGLIYTRDALSDDLGISIIQRVKSYLAHQESKQKSFRVSEKWKQRAKLALAGKQRLTKMVPGWIDPDTLKLNEHAETVRLIFKLLLSGESLHNIARHLQANNISSFSRRKDANGFSVHSVRTVLRSESVIGTLPASQRNDRPAIPNYYEAAIDAATFNKAQEILDKNRKGRTPASDNPLTINIFKGLFRCQCGASVHPTGTKNKYAGVYRCNNHLDGRCDVPPLKRKPFDKWMIDNFLGMIDVGNDGEAEGKIASLQHEVEIVTTRIKKATALLLEMDDITELKTQVKELNQKRTELQTTIDSMRRKTSLSDKGLPQLKDIDLMTKEGRVECQLILSKHLKGLTLGKDSVTVTLQNDTEITIPTNPLPLNDGSPIFEIADKELLDIDAYQL

SEQ ID NO: 31402 - DNA, 50 bp, Escherichia coli; identical to SEQ ID NO: 30087
  source 1..50: mol_type = genomic DNA

SEQ ID NO: 31403 - DNA, 40 bp, Escherichia coli; identical to SEQ ID NO: 20043
  source 1..40: mol_type = genomic DNA

SEQ ID NO: 31404 - DNA, 40 bp, Escherichia coli; identical to SEQ ID NO: 30164
  source 1..40: mol_type = genomic DNA

SEQ ID NO: 31405 - DNA, 50 bp, Escherichia coli; identical to SEQ ID NO: 7690
  source 1..50: mol_type = genomic DNA

SEQ ID NO: 31406 - protein, 506 aa, Escherichia coli
MRHVITYLRYSSATQGAEGADSTRRQNELFKQWLRKNSDAQVVASFSDEGLSGYKGKHLTGQFGDMLARIEAGEFPEGTILLVESIDRIGRLEHLETEALMNRILGNGIEIHTLQDGLIYTKDALADDLGISIIQRVKAYIAHQESKQKSFRVSQKWGQRAKLALAGKQRLTKMVPGWIDPDTFKLNEHAETVRLIFKLLLDGESLHNIARHLQSNGIKSFSRRKDANGFSVHSVRTVLRSESVIGTLPASQRNDRPAIPNYYEAAIDAATFNKAQEILDKNRKGRTPASDNPLTINIFKGLFRCQCGASVHPTGTKNKYQGVYRCNSHLDGRCDVPPLKRKPFDRWMIDNFLGMIDVGNDGEAEKEIASLQHEVETVTARIKKATALLLEMDDITELKTQVKELNQKRTELQTTIDNMRRKASLTDKELPQLKDIDLTTKVGRVECQLILSKHLKGLTLGKDSVTVTLQNDTEITIPTNPLPLNDGTSIFEIADKELLDIDAYQL

SEQ ID NO: 31407 - DNA, 50 bp, Escherichia coli; identical to SEQ ID NO: 30087
  source 1..50: mol_type = genomic DNA

SEQ ID NO: 31408 - DNA, 40 bp, Escherichia coli; identical to SEQ ID NO: 20043
  source 1..40: mol_type = genomic DNA

SEQ ID NO: 31409 - DNA, 40 bp, Escherichia coli; identical to SEQ ID NO: 30164
  source 1..40: mol_type = genomic DNA

SEQ ID NO: 31410 - DNA, 50 bp, Escherichia coli; identical to SEQ ID NO: 7690
  source 1..50: mol_type = genomic DNA

SEQ ID NO: 31411 - protein, 506 aa, Escherichia coli
MRTVITYLRFSSAIQGAEGADSTRRQNDLFKQWLKKNSDAQVVASFSDEGLSGYKGKHLTGQFGDMLARIESGEFPEGTILLVEAIDRIGRLEHLETEALMNRIIAHGIEIHTLQDGLIYTRDALSDDLGISIIQRVKSYVAHQESKQKSFRVSQKWKQRAKLALAGEQRLTKMVPGWIDPDTFKCNEHAETVRLIFKLLLDGESLHNIARHLQANNISSFSRRKDANGFSVHSVRTILRSETTIGTLPASQRNDRPAIPNYYEAAIDASTFNKAQEILGKNRIGRTPASDNPLTINIFKGLFRCQCGASVHPTGTKNKYQGVYRCNNHLDGRCDVPPLKRKPFDKWMIDNFLGMIDVGNDGEAEGKIASLQHEVEIVTTRIKKATALLLEMDDIDELKIQLKELNQKRTELQTTIDNMRRKASLTDKELPQLKDIDLTTKAGRVECQLILSKHLKGLTLGKDTVTVTLQNDTEITIPTDPLPLNDGTSIFEIAEKNLLNIDTFQL

SEQ ID NO: 31412 - DNA, 50 bp, Escherichia coli; identical to SEQ ID NO: 30087
  source 1..50: mol_type = genomic DNA

SEQ ID NO: 31413 - DNA, 40 bp, Escherichia coli; identical to SEQ ID NO: 20043
  source 1..40: mol_type = genomic DNA

SEQ ID NO: 31414 - DNA, 40 bp, Escherichia coli; identical to SEQ ID NO: 30164
  source 1..40: mol_type = genomic DNA

SEQ ID NO: 31415 - DNA, 50 bp, Escherichia coli; identical to SEQ ID NO: 7690
  source 1..50: mol_type = genomic DNA

SEQ ID NO: 31416 - protein, 506 aa, Escherichia coli
MRTVITYLRFSSATQGAEGADSTRRQNELFKQWLRKNSDAQVVASFSDEGLSGYKGKHLTGQFGDMLARIESGEFSEGTVLLVEAIDRIGRLEHLETEALMNRIIAHGIEIHTLQDGLIYTRDALSDDLGISIIQRVKSYVAHQESKQKSFRVSQKWKQRAKLALAGEQRLTRNVPGWIDPDTFKCNEHAETVRLIFKLLLDGESLHNIARHLQSNDIKSFSRRKDANGFSVHSVRTVLRSESVIGTLPASQRNDRPAIPNYYEAAIDASTFNKAQEILDKNRKGRTPASDNPLTINIFKGLFRCQCGASVHPTGTKNKYAGVYRCNNHLDGRCDVPPLKRKPFDRWMIDNFLGMIDVGNDGESERKIAALQHEVEIVTARIKKATALLLEMDDITELKAQVKGLNQKRTEIQTTIDTLKRKTSLTDKELPQLKDIDLTTKAGRVECQLILSKHLKGLTLGKDSVTVTLQNDTEITIPTNPLPLNDGSPIFEIADKELLDIDAYQL

SEQ ID NO: 31417 - DNA, 50 bp, Escherichia coli; identical to SEQ ID NO: 30087
  source 1..50: mol_type = genomic DNA

SEQ ID NO: 31418 - DNA, 40 bp, Escherichia coli; identical to SEQ ID NO: 20043
  source 1..40: mol_type = genomic DNA

SEQ ID NO: 31419 - DNA, 40 bp, Escherichia coli; identical to SEQ ID NO: 30164
  source 1..40: mol_type = genomic DNA

SEQ ID NO: 31420 - DNA, 50 bp, Escherichia coli; identical to SEQ ID NO: 7690
  source 1..50: mol_type = genomic DNA

SEQ ID NO: 31421 - protein, 506 aa, Salmonella enterica
MRHVITYLRYSSAIQGAEGADSTRRQNELFKQWLRKNSDAQVVASFSDEGLSGYKGKHLTGQFGDMLARIEAGEFPASTILLVESIDRIGRLEHLETEALMNRILGNGIEIHTLQDGLIYTKDALADDLGISIIQRVKAYIAHQESKQKSFRVSQKWEQRAKLALAGEQRLTKMVPGWIDPDTFKCNEHAETVRLIFKLLLDGESLHNIARHLQANNISSFSRRKDANGFSVHSVRTVLRSVSTIGTLPASQRNDRPAIPNYYEAAIDAATFNKAQEILDKNRKGRTPASDNPLTINIFKGLFRCQCGASVHPTGTKNKYQGVYRCNNHLDGRCDVQPLKRKPFDRWMIDNFLGMIDVGNDGESERKIAALQHEVEIVTARIKKATALLLEMDDIDELKIQLKELNQKRTELQTTIDNMRRKASLTDKELPQLKDIDLTTKAGRVECQLILSKHLKGLTLGKDTVTVTLQNDTEITIPTDPLPLNDGTSIFEIAEKELLEIDAYQL

SEQ ID NO: 31422 - DNA, 50 bp, Salmonella enterica; identical to SEQ ID NO: 30087
  source 1..50: mol_type = genomic DNA

SEQ ID NO: 31423 - DNA, 40 bp, Salmonella enterica; identical to SEQ ID NO: 5263
  source 1..40: mol_type = genomic DNA

SEQ ID NO: 31424 - DNA, 40 bp, Salmonella enterica; identical to SEQ ID NO: 30094
  source 1..40: mol_type = genomic DNA

SEQ ID NO: 31425 - DNA, 50 bp, Salmonella enterica; identical to SEQ ID NO: 7690
  source 1..50: mol_type = genomic DNA

SEQ ID NO: 31426 - protein, 506 aa, Escherichia coli
MRHVITYLRYSSAIQGAEGADSTRRQNDLFKQWLKKNSDAQVVASFNDEGLSGYKGKHLSGQFGDMLSRIESGEFSEGTILLVEAIDRIGRLEHLETEALMNRIIAHGIEIHTLQDGLIYTRDALSDDLGISIIQRVKSYVAHQESKQKSFRVSQKWKQRAKLALAGEQRLTKMVPGWIDPDTFKCNEHAETVRLIFKLLLDGESLHNIARHLQANNISSFSRRKDANGFSVHSVRTVLRSESVIGTLPASQRNDRPAIPNYYEAAIDAATFNKAQEILDKNRKGRTPASDNPLTINIFKGLFRCQCGASVHPTGTKNKYAGVYRCNNHLDGRCDVPPLKRKPFDRWMIDNFLGMIDVGNDGESERKIAALQHEVEIVTARIKKATALLLEMDDITELKAQVKELNQKRTELQTTIDNMRRKASLTDKELPQLKDIDLTTKAGRVECQLILSKHLKGLTLGKDSVTVTLQNDTEITIPTNPLPLNDGSPIFEIADKELLDIDAYQL

SEQ ID NO: 31427 - DNA, 50 bp, Escherichia coli; identical to SEQ ID NO: 30087
  source 1..50: mol_type = genomic DNA

SEQ ID NO: 31428 - DNA, 40 bp, Escherichia coli; identical to SEQ ID NO: 20043
  source 1..40: mol_type = genomic DNA

SEQ ID NO: 31429 - DNA, 40 bp, Escherichia coli; identical to SEQ ID NO: 30164
  source 1..40: mol_type = genomic DNA

SEQ ID NO: 31430 - DNA, 50 bp, Escherichia coli; identical to SEQ ID NO: 7690
  source 1..50: mol_type = genomic DNA

SEQ ID NO: 31431 - protein, 506 aa, Escherichia coli
MRHVITYLRYSSAIQGAEGADSTRRQNELFKQWLRKNSDAQVVASFSDEGLSGYKGKHLTGQFGDMLARIEAGEFPASTILLVESIDRIGRLEHLETEALMNRILGNGIEIHTLQDGLIYTKDALADDLGISIIQRVKAYIAHQESKQKSFRVSQKWEQRAKLALAGEQRLTKMVPGWIDPDTFKCNEHAETVRLIFKLLLDGESLHNIARHLQANNISSFSRRKDANGFSVHSVRTILRSETTIGTLPASQRNDRPAIPNYYEAAIDVSTFNKAQEILDKNRKGRTPASDNPLTINIFKGLFRCQCGASVHPTGTKNKYQGVYRCNNHLDGRCDVQPLKRKPFDRWMIDNFLGMIDVGNDGESERKIAALQHEVEIVTARIKKATALLLEMDDIDELKIQLKELNQKRTELQTTIDNMRRKASLSDKGLPQLKDIDLMTKAGRVECQLILSKHLKGLTLGKDSVTVTLQNDTEIIVPTDPLPLNDGTSIFEIAEKELLEIDAYQL

SEQ ID NO: 31432 - DNA, 50 bp, Escherichia coli; identical to SEQ ID NO: 30087
  source 1..50: mol_type = genomic DNA

SEQ ID NO: 31433 - DNA, 40 bp, Escherichia coli; identical to SEQ ID NO: 20043
  source 1..40: mol_type = genomic DNA

SEQ ID NO: 31434 - DNA, 40 bp, Escherichia coli; identical to SEQ ID NO: 30164
  source 1..40: mol_type = genomic DNA

SEQ ID NO: 31435 - DNA, 50 bp, Escherichia coli; identical to SEQ ID NO: 7690
  source 1..50: mol_type = genomic DNA

SEQ ID NO: 31436 - protein, 506 aa, Escherichia coli
MRHVITYLRYSSAIQGAEGADSTRRQNELFKQWLRKNSDAQVVASFSDEGLSGYKGKHLTGQFGDMLARIEAGEFPASTILLVESIDRIGRLEHLETEALMNRILGNGIEIHTLQDGLIYTKDALADDLGISIIQRVKAYIAHQESKQKSFRVSQKWKQRAKLALAGEQHLTRNVPGWIDPDTFKCNEHAETVRLIFKLLLDGESLHNIARHLQSNDIKSFSRRKDANGFSVHSVRTVLRSESVIGTLPASQRNDRPAIPNYYEAAIDAATFNKAQEILDKNRKGRTPASDNPLTINIFKGLFRCQCGASVHPTGTKNKYAGVYRCNNHLDGRCDVPPLKRKPFDRWMIDNFLGMIDVGNDGESERKIAALQHEVEIVTARIKKATALLLEMDDITELKAQVKGLNQKRTEIQTTIDTLKRKTSLTDKELPQLKDIDLTTKAGRVECQLILSKHLKGLTLGKDSVTVTLQNDTEITIPTNPLPLNDGSPIFEIADKELLDIDAYQL

SEQ ID NO: 31437 - DNA, 50 bp, Escherichia coli; identical to SEQ ID NO: 30087
  source 1..50: mol_type = genomic DNA

SEQ ID NO: 31438 - DNA, 40 bp, Escherichia coli; identical to SEQ ID NO: 20043
  source 1..40: mol_type = genomic DNA

SEQ ID NO: 31439 - DNA, 40 bp, Escherichia coli; identical to SEQ ID NO: 30164
  source 1..40: mol_type = genomic DNA

SEQ ID NO: 31440 - DNA, 50 bp, Escherichia coli; identical to SEQ ID NO: 7690
  source 1..50: mol_type = genomic DNA

SEQ ID NO: 31441 - protein, 506 aa, Escherichia coli
MRTVITYLRFSSAIQGAEGADSTRRQNDLFKQWLKKNSDAQVVASFSDEGLSGYKGKHLSGQFGDMLSRIESGEFSKGTILLVEAIDRIGRLEHLETEALMNRIIAHGIEIHTLQDGLIYTRDALSDDLGISIIQRVKSYLAHQESKQKSFRVSQKWEQRAKLALAGEQRLTKMVPGWIDPDTFKLNEHAETVRLIFKLLLDGESLHNIARHLQSNGIKSFSRRKDANGFSVHSVRTILRSETTTGTLPASQRNDRPAIPNYYEAAIDVSTFNKAQEILDKNRKGRTPASDNPLTINIFKGLFRCQCGASVHPTGTKNKYQGVYRCNNHLDGRCDVQPLKRKPFDRWMIDNFLGMIDVGNDGESERKIAALQHEVEIVTARIKKATALLLEMDDIDELKIQLKELNQKRTELQTTIDNMRRKASLTDKELPQLKDIDLTTKAGRVECQLILSKHLKGLTLGKDTVTVTLQNDTEITIPTDPLPLNDGTSIFEIAEKNLLNIDTFQL

SEQ ID NO: 31442 - DNA, 50 bp, Escherichia coli; identical to SEQ ID NO: 30087
  source 1..50: mol_type = genomic DNA

SEQ ID NO: 31443 - DNA, 40 bp, Escherichia coli; identical to SEQ ID NO: 20043
  source 1..40: mol_type = genomic DNA

SEQ ID NO: 31444 - DNA, 40 bp, Escherichia coli; identical to SEQ ID NO: 30164
  source 1..40: mol_type = genomic DNA

SEQ ID NO: 31445 - DNA, 50 bp, Escherichia coli; identical to SEQ ID NO: 7690
  source 1..50: mol_type = genomic DNA

SEQ ID NO: 31446 - protein, 506 aa, Escherichia coli
MRTVITYLRFSSATQGAEGADSTRRQNELFKQWLRKNSDAQVVASFSDEGLSGYKGKHLTGQFGDMLARIESGEFSEGTVLLVEAIDRIGRLEHLETEALMNRIIAHGIEIHTLQDGLIYTRDALSDDLGISIIQRVKSYVAHQESKQKSFRVSQKWKQRAKLALAGEQRLTRNVPGWIDPDTFKCNEHAETVRLIFKLLLDGESLHNIARHLQSNDIKSFSRRKDANGFSVHSVRTVLRSESVIGTLPASQRNDRPAIPNYYEAAIDAATFNKAQEILDKNRKGRTPASDNPLTINIFKGLFRCQCGASVHPTGTKNKYAGVYRCNNHLDGRCDVPPLKRKPFDRWMIDNFLGMIDVGNDGESERKIAALQHEVKIVTARIKKATALLLEMDDITELKAQVKGLNQKRTEIQTTIDTLKRKTSLTDKELPQLKDIDLTTKAGRVECQLILSKHLKGLTLGKDSVTVTLQNDTEITIPTNPLPLNDGSPIFEIADKELLDIDAYQL

SEQ ID NO: 31447 - DNA, 50 bp, Escherichia coli; identical to SEQ ID NO: 30087
  source 1..50: mol_type = genomic DNA

SEQ ID NO: 31448 - DNA, 40 bp, Escherichia coli; identical to SEQ ID NO: 20043
  source 1..40: mol_type = genomic DNA

SEQ ID NO: 31449 - DNA, 40 bp, Escherichia coli; identical to SEQ ID NO: 30164
  source 1..40: mol_type = genomic DNA

SEQ ID NO: 31450 - DNA, 50 bp, Escherichia coli; identical to SEQ ID NO: 7690
  source 1..50: mol_type = genomic DNA

SEQ ID NO: 31451 - protein, 506 aa, Escherichia coli
MRHVITYLRYSSAIQGAEGADSTRRQNDLFKQWLKKNSDAQVVASFNDEGLSGYKGKHLSGQFGDMLSRIESGEFSEGTVLLVEAIDRIGRLEHLETEALMNRIIAHGIEIHTLQDGLIYTRDALSDDLGISIIQRVKSYIAHQESKQKSFRVSQKWEQRAKLALAGEQRLTKMVPGWIDPDTFKLNEHAETVRLIFKLLLSGESLHNIARHLQSNGIKSFSRRKDANGFSVHSVRTVLRSESVIGTLPASQRNDRPAIPNYYEAAIDAATFNKAQEILDKNRKGRTPASDNPLTINIFKGLFRCQCGASVHPTGTKNKYQGVYRCNNHLDGRCDVPPLKRKPFDRWMIDNFLGMIDVGNDGESERKIAALQHEVEIVTARIKKATALLLEMDDITELKTQVKGLNQKRTELQTTIDNMRRKASLTDKELPQLKDIDLTTKAGRVECQLILSKHLKGLTLGKDSVTVTLQNDTEITIPTNPLPLNDGTSIFEIADKELLDIDAYQL

SEQ ID NO: 31452 - DNA, 50 bp, Escherichia coli; identical to SEQ ID NO: 30087
  source 1..50: mol_type = genomic DNA

SEQ ID NO: 31453 - DNA, 40 bp, Escherichia coli; identical to SEQ ID NO: 20043
  source 1..40: mol_type = genomic DNA

SEQ ID NO: 31454 - DNA, 40 bp, Escherichia coli; identical to SEQ ID NO: 30164
  source 1..40: mol_type = genomic DNA

SEQ ID NO: 31455 - DNA, 50 bp, Escherichia coli; identical to SEQ ID NO: 7690
  source 1..50: mol_type = genomic DNA

SEQ ID NO: 31456 - protein, 506 aa, Escherichia coli
MRSVITYLRFSSAIQGAEGADSTRRQNDLFKQWLKKNSDAQVVASFNDEGLSGYKGKHLSGQFGDMLSRIESGEFSEGTVLLVEAIDRIGRLEHLETEALMNRIIAHGIEIHTLQDGLIYTRDALSDDLGISIIQRVKSYLAHQESKQKSFRVSEKWKQRAKLALAGEQHLTRNVPGWIDPDTFKCNEHAETVRLIFKLLLDGESLHNIARHLQSNDIKSFSRRKDANGFSVHSVRTVLRSESVIGTLPASQRNDRPAIPNYYEAAIDASTFNKAQEILDKNRKGRTPASDNPLTINIFKGLFRCQCGASVHPTGTKNKYQGVYRCNSHLDGRCDVPPLKRKPFDRWMIDNFLGMIDVGNDGEAEKEIASLQHEVETVTARIKKATALLLEMDDITELKTQVKELNQKRTELQTTINTMKRKTSLSDKGLPQLKDIDLMTKAGRVECQLILSKHLKGLTLGKDSVTVTLQNDTEITIPTNPLPLNDGTSIFEIAEKNLLNIDTFQL

SEQ ID NO: 31457 - DNA, 50 bp, Escherichia coli; identical to SEQ ID NO: 30087
  source 1..50: mol_type = genomic DNA

SEQ ID NO: 31458 - DNA, 40 bp, Escherichia coli; identical to SEQ ID NO: 20043
  source 1..40: mol_type = genomic DNA

SEQ ID NO: 31459 - DNA, 40 bp, Escherichia coli; identical to SEQ ID NO: 30164
  source 1..40: mol_type = genomic DNA

SEQ ID NO: 31460 - DNA, 50 bp, Escherichia coli; identical to SEQ ID NO: 7690
  source 1..50: mol_type = genomic DNA

SEQ ID NO: 31461 - protein, 506 aa, Escherichia coli; identical to SEQ ID NO: 30151

SEQ ID NO: 31462 - DNA, 50 bp, Escherichia coli; identical to SEQ ID NO: 30087
  source 1..50: mol_type = genomic DNA

SEQ ID NO: 31463 - DNA, 40 bp, Escherichia coli; identical to SEQ ID NO: 20043
  source 1..40: mol_type = genomic DNA

SEQ ID NO: 31464 - DNA, 40 bp, Escherichia coli; identical to SEQ ID NO: 30164
  source 1..40: mol_type = genomic DNA

SEQ ID NO: 31465 - DNA, 50 bp, Escherichia coli; identical to SEQ ID NO: 7690
  source 1..50: mol_type = genomic DNA

SEQ ID NO: 31466 - protein, 499 aa, Escherichia coli
MRFSSATQGAEGADSTRRQNELFKQWLRKNSDAQVVASFSDEGLSGYKGKHLTGQFGDMLARIEAGEFPASTILLVESIDRIGRLEHLETEALMNRILGNGIEIHTLQDGLIYTKDALADDLGISIIQRVKAYIAHQESKQKSFRVSQKWKQRAKLALAGEQHLTRNVPGWIDPDTFKCNEHAETVRLIFKLLLDGESLHNIARHLQSNDIKSFSRRKDANGFSVHSVRTVLRSESVIGTLPASQRNDRPAIPNYYEAAIDAATFNKAQEILDKNRKGRTPASDNPLTINIFKGLFRCQCGASVHPTGTKNKYAGVYRCNNHLDGRCDVPPLKRKPFDRWMIDNFLGMIDVGNDGESEGKIAALQHEVEIVTARIKKATALLLEMDDITELKAQVKGLNQKRTEIQTTIDTLKRKTSLTDKELPQLKDIDLTTKAGRVECQLILSKHLKGLTLGKDSVTVTLQNDTEITIPTNPLPLNDGSPIFEIADKELLDIDAYQL

SEQ ID NO: 31467 - DNA, 50 bp, Escherichia coli; identical to SEQ ID NO: 30087
  source 1..50: mol_type = genomic DNA

SEQ ID NO: 31468 - DNA, 40 bp, Escherichia coli; identical to SEQ ID NO: 20043
  source 1..40: mol_type = genomic DNA

SEQ ID NO: 31469 - DNA, 40 bp, Escherichia coli; identical to SEQ ID NO: 30164
  source 1..40: mol_type = genomic DNA

SEQ ID NO: 31470 - DNA, 50 bp, Escherichia coli; identical to SEQ ID NO: 7690
  source 1..50: mol_type = genomic DNA

SEQ ID NO: 31471 - protein, 506 aa, Escherichia coli
MRSVITYLRFSSATQGAEGADSTRRQNELFKQWLRKNSDAQVVASFNDEGLSGYKGKHLSGQFGDMLSRIESGEFPEGTILLVEAIDRIGRLEHLETEALMNRIIAHGIEIHTLQDGLIYTRDALSDDLGISIIQRVKSYLAHQESKQKSFRVSEKWKQRAKLALAGKQRLTKMVPGWIDHDTFKINEHAETVRLIFKLLLDGESLHNIARHLQSNGIKSFSRRKDANGFSVHSVRTVLRSESVIGTLPASQRNDRPAIPNYYEAAIDVSTFNKAQEILDKNRKGRTPASDNPLTINIFKGLFRCQCGASVHPTGTKNKYQGVYRCNNHLDGRCDVQPLKRKPFDRWMIDNFLGMIDVGNDGESERKIAALQHEVEIVTARIKKATALLLEMDDIDELKIQLKELNQKRTELQTTIDNMRRKASLTDKELPQLKDIDLTTKAGRVECQLILSKHLKGLTLGKDSVTVTLQNDTEITIPTNPLPLNDGTSIFEIADKELLDIDAYQL

SEQ ID NO: 31472 - DNA, 50 bp, Escherichia coli; identical to SEQ ID NO: 30087
  source 1..50: mol_type = genomic DNA

SEQ ID NO: 31473 - DNA, 40 bp, Escherichia coli; identical to SEQ ID NO: 20043
  source 1..40: mol_type = genomic DNA

SEQ ID NO: 31474 - DNA, 40 bp, Escherichia coli; identical to SEQ ID NO: 30164
  source 1..40: mol_type = genomic DNA

SEQ ID NO: 31475 - DNA, 50 bp, Escherichia coli; identical to SEQ ID NO: 7690
  source 1..50: mol_type = genomic DNA

SEQ ID NO: 31476 - protein, 506 aa, Escherichia coli
MRSVITYLRYSSAIQGAEGADSTRRQNELFKQWLKKNSDAQIVASFSDEGLSGYKGKHLTGQFGDMLARIESGEFPQGAILLVESIDRIGRLEHLETEALMNRIIAHGIEIHTLQDGLIYTRDALSDDLGISIIQRVKSYLAHQESKQKSFRVSEKWKQRAKLALAGEQRLTKMVPGWIDPETFKLNEHAETVRLIFKLLLDGESLHNIARHLQSNDIKSFSRRKDANGFSVHSVRTVLRSESVIGTLPASQRNDRPAIPNYYEAAIDAATFNKAQEILDKNRKGRTPASDNPLTINIFKGLFRCQCGASVHPTGTKNKYAGVYRCNNHLDGRCDVPPLKRKPFDKWMIDNFLGMIDVGNDGEAEGKITSLQHEVEIVTARIKKATALLLEMDDIDELKIQLKELNQKRTELQTTIDNMRRKASLTDKELPQLKDIDLTTKAGRVECQLILSKHLKGLTLGKDSVIVTLQNDTEITIPTDPLPLNDGTSIFEIAEKNLLNIDTFQL

SEQ ID NO: 31477 - DNA, 50 bp, Escherichia coli; identical to SEQ ID NO: 30087
  source 1..50: mol_type = genomic DNA

SEQ ID NO: 31478 - DNA, 40 bp, Escherichia coli; identical to SEQ ID NO: 20043
  source 1..40: mol_type = genomic DNA

SEQ ID NO: 31479 - DNA, 40 bp, Escherichia coli; identical to SEQ ID NO: 30164
  source 1..40: mol_type = genomic DNA

SEQ ID NO: 31480 - DNA, 50 bp, Escherichia coli; identical to SEQ ID NO: 7690
  source 1..50: mol_type = genomic DNA

SEQ ID NO: 31481 - protein, 506 aa, Escherichia coli
MRSVITYLRYSSAIQGAEGADSTRRQNDLFKQWLKKNSDAQVVASFSDEGLSGYKGKHLTGQFGDMLARIESGEFPEGTILLVESIDRIGRLEHLETEALMNRILGNGLEIHTLQDGLIYTKDALADDLGISIIQRVKAYIAHQESKQKSFRVSQKWEQRAKLALAGEQRLTKMVPGWIDPDTFKLNEHAETVRLIFKLLLSGESLHNIARHLQSNGIKSFSRRKDANGFSVHSVRTILRSETTIGTLPASQRNDRPAIPNYYEAAIDASTFNKAQEILGKNRIGRTPASDNPLTINIFKGLFRCQCGASVHPTGTKNKYQGVYRCNNHLDGRCDVPPLKRKPFDKWMLENFLGMIDVGNDGEAEGKIASLQHEVEIVTTRIKKATALLLEMDDIDELKIQLKELNQKRTELQTTIDNMRRKASLTDKELPQLKDIDLTTKAGRVECQLILSKHLKGLTLGKDSVIVTLQNDTEITIPTNPLPLNDGSPIFEIADKELLDIDAYQL

SEQ ID NO: 31482 - DNA, 50 bp, Escherichia coli; identical to SEQ ID NO: 30087
  source 1..50: mol_type = genomic DNA

SEQ ID NO: 31483 - DNA, 40 bp, Escherichia coli; identical to SEQ ID NO: 20043
  source 1..40: mol_type = genomic DNA

SEQ ID NO: 31484 - DNA, 40 bp, Escherichia coli; identical to SEQ ID NO: 30164
  source 1..40: mol_type = genomic DNA

SEQ ID NO: 31485 - DNA, 50 bp, Escherichia coli; identical to SEQ ID NO: 7690
  source 1..50: mol_type = genomic DNA

SEQ ID NO: 31486 - protein, 506 aa, Escherichia coli
MRHVITYLRYSSAIQGAEGADSTRRQNDLFKQWLKKNSDAQVVASFNDEGLSGYKGKHLSGQFGDMLSRIESGEFSEGTILLVEAIDRIGRLEHLETEALMNRILGNGIEIHTLQDGLVYTKDALADDLGISIIQRVKSYLAHQESKQKSFRVSEKWKQRAKLALAGEQRLTRNVPGWIDPDTFKLNEHAETVRLIFKLLLSGESLHNIARHLQSNGIKSFSRRKDANGFSVHSVRTVLRSESVIGTLPASQRNDRPAIPNYYEAAIDAATFNKAQEILDKNRKGRTPASDNPLTINIFKGLFRCQCGASVHPTGTKNKYAGVYRCNNHLDGRCDVPPLKRKPFDKWMIDNFLGMIDVGNDGESERKIAALQHEVEIVTARIKKATALLLEMDDIDELKIQLKELNQKRTELQTTIDNMRRKASLTDKELPQLKDIDLTTKAGRVECQLILSKHLKGLTLGKDSVTVTLQNDTEITIPTNPLPLNDGSPIFEIADKELLDIDAYQL

SEQ ID NO: 31487 - DNA, 50 bp, Escherichia coli; identical to SEQ ID NO: 30087
  source 1..50: mol_type = genomic DNA

SEQ ID NO: 31488 - DNA, 40 bp, Escherichia coli; identical to SEQ ID NO: 20043
  source 1..40: mol_type = genomic DNA

SEQ ID NO: 31489 - DNA, 40 bp, Escherichia coli; identical to SEQ ID NO: 30164
  source 1..40: mol_type = genomic DNA

SEQ ID NO: 31490 - DNA, 50 bp, Escherichia coli; identical to SEQ ID NO: 7690
  source 1..50: mol_type = genomic DNA

SEQ ID NO: 31491 - protein, 499 aa, Escherichia coli
MRFSSATQGAEGADSTRRQNELFKQWLRKNSDAQVVASFSDEGLSGYKGKHLTGQFGDMLARIESGEFSEGTVLLVEAIDRIGRLEHLETEALMNRIIAHGIEIHTLQDGLIYTRDALSDDLGISIIQRVKSYVAHQESKQKSFRVSQKWKQRAKLALAGEQRLTRNVPGWIDPDTFKCNEHAETVRLIFKLLLDGESLHNIARHLQSNDIKSFSRRKDANGFSVHSVRTVLRSESVIGTLPASQRNDRPAIPNYYEAAIDAATFNKAQEILDKNRKGRTPASDNPLTINIFKGLFRCQCGASVHPTGTKRTYQGVYRCNNHLDGRCDVPPLKRKPFDKWMIDNFLGMIDVGNDGEAEGKIAALQHEVEIVTARIKKATALLLEMDDITELKAQVKGLNQKRTEIQTTIDTLKRKTSLTDKELPQLKDIDLTTKAGRVECQLILSKHLKGLTLGKDSVTVTLQNDTEITIPTNPLPLNDGSPIFEIADKELLDIDAYQL

SEQ ID NO: 31492 - DNA, 50 bp, Escherichia coli; identical to SEQ ID NO: 30087
  source 1..50: mol_type = genomic DNA

SEQ ID NO: 31493 - DNA, 40 bp, Escherichia coli; identical to SEQ ID NO: 20043
  source 1..40: mol_type = genomic DNA

SEQ ID NO: 31494 - DNA, 40 bp, Escherichia coli; identical to SEQ ID NO: 30164
  source 1..40: mol_type = genomic DNA

SEQ ID NO: 31495 - DNA, 50 bp, Escherichia coli; identical to SEQ ID NO: 7690
  source 1..50: mol_type = genomic DNA

SEQ ID NO: 31496 - protein, 506 aa, Escherichia coli
MRHVITYLRYSSAIQGAEGADSTRRQNDLFKQWLKKNSDAQVVASFNDEGLSGYKGKHLSGQFGDMLSRIESGEFSEGTILLVEAIDRIGRLEHLETEALMNRILGNGIEIHTLQDGLIYTKDALADDLGISIIQRVKAYIAHQESKQKSFRVSQKWGQRAKLALAGKQRLTKMVPGWIDPETFEVNEHAETVRLIFKLLLDGESLHNIARHLQANNISSFSRRKDANGFSVHSVRTVLRSESVIGTLPASQRNDRPAIPNYYEAAIDAATFNKAQEILDKNRKGRTPASDNPLTINIFKGLFRCQCGASVHPTGTKNKYAGVYRCNNHLDGRCDVPPLKRKPFDRWMIDNFLGMIDVGNDGESERKIAALQHEVEIVTSRIKKATALLLEMDDITELKTQVKELNQKRTALQTTIDNMRRKTSLTDKELPQLKDIDLTTKAGRVECQLILSKHLKGLTLGKDSVTVTLQNDTEITIPTNPLPLNDGTSIFEIADKELLGIDAYQL

SEQ ID NO: 31497 - DNA, 50 bp, Escherichia coli; identical to SEQ ID NO: 30087
  source 1..50: mol_type = genomic DNA

SEQ ID NO: 31498 - DNA, 40 bp, Escherichia coli; identical to SEQ ID NO: 20043
  source 1..40: mol_type = genomic DNA

SEQ ID NO: 31499 - DNA, 40 bp, Escherichia coli; identical to SEQ ID NO: 30164
  source 1..40: mol_type = genomic DNA

SEQ ID NO: 31500 - DNA, 50 bp, Escherichia coli; identical to SEQ ID NO: 7690
  source 1..50: mol_type = genomic DNA

SEQ ID NO: 31501 - protein, 506 aa, Escherichia coli
MRTVITYLRFSSATQGAEGADSTRRQNELFKQWLRKNSDAQVVASFSDEGLSGYKGKHLTGQFGDMLARIESGEFSEGTVLLVEAIDRIGRLEHLETEALMNRIIAHGIEIHTLQDGLIYTRDALSDDLGISIIQRVKSYVAHQESKQKSFRVSQKWKQRAKLALAGEQRLTKMVPGWIDPDTLKLNEHAETVRLIFKLLLDGESLHNIARHLQANNISSFSRRKDANGFSVHSVRTVLRSESVIGTLPASQRNDRPAIPNYYEAAIDAATFNKAQEILDKNRKGRTPASDNPLTINIFKGLFRCQCGASVHPTGTKNKYQGVYRCNNHLDGRCDVPPLKRKPFDRWMIDNFLGMIDVGNDGESERKIAALQHEVEIVTARIKKATALLLEMDDITELKTQVKGLNQKRTELQTTIDNMRRKASLTDKELPQLKDIDLTTKAGRVECQLILSKHLKGLTLGKDSVTVTLQNDTEITIPTNPLPLNDGSPIFEIADKELLDIDAYQL

SEQ ID NO: 31502 - DNA, 50 bp, Escherichia coli; identical to SEQ ID NO: 30087
  source 1..50: mol_type = genomic DNA

SEQ ID NO: 31503 - DNA, 40 bp, Escherichia coli; identical to SEQ ID NO: 20043
  source 1..40: mol_type = genomic DNA

SEQ ID NO: 31504 - DNA, 40 bp, Escherichia coli; identical to SEQ ID NO: 30164
  source 1..40: mol_type = genomic DNA

SEQ ID NO: 31505 - DNA, 50 bp, Escherichia coli; identical to SEQ ID NO: 7690
  source 1..50: mol_type = genomic DNA

SEQ ID NO: 31506 - protein, 506 aa, Escherichia coli
MRHVITYLRYSSAIQGAEGADSTRRQNDLFKQWLKKNSDAQVVASFNDEGLSGYKGKHLSGQFGDMLSRIESGEFSEGTVLLVEAIDRIGRLEHLETEALMNRIIAHGIEIHTLQDGLIYTRDALSDDLGISIIQRVKSYIAHQESKQKSFRVSQKWEQRAKLALAGEQRLTRNVPGWIDPDTFKCNEHAETVRLIFKLLLDGESLHNIARHLQSNGIKSFSRRKDANGFSVHSVRTILRSETTIGTLPASQRNDRPAIPNYYEAAIDASTFNKAQEILGKNRIGRTPASDNPLTINIFKGLFRCQCGASVHPTGTKNKYQGVYRCNNHLDGRCDVPPLKRKPFDKWMIDNFLGMIDVGNDGEAEGKIASLQHEVEIVTTRIKKATALLLEMDDIDELKIQLKELNQKRTELQTTIDNMRRKASLTDKELPQLKDIDLTTKAGRVECQLILSKHLKGLTLGKDSVTVTLQNDTEITIPTNPLPLNDGSPIFEIADKELLDIDAYQL

SEQ ID NO: 31507 - DNA, 50 bp, Escherichia coli; identical to SEQ ID NO: 30087
  source 1..50: mol_type = genomic DNA

SEQ ID NO: 31508 - DNA, 40 bp, Escherichia coli; identical to SEQ ID NO: 20043
  source 1..40: mol_type = genomic DNA

SEQ ID NO: 31509 - DNA, 40 bp, Escherichia coli; identical to SEQ ID NO: 30164
  source 1..40: mol_type = genomic DNA

SEQ ID NO: 31510 - DNA, 50 bp, Escherichia coli; identical to SEQ ID NO: 7690
  source 1..50: mol_type = genomic DNA

SEQ ID NO: 31511 - protein, 506 aa, Escherichia coli
MRTVITYLRFSSATQGAEGADSTRRQNELFKQWLRKNSDAQVVASFSDEGLSGYKGKHLTGQFGDMLARIESGEFSEGTVLLVEAIDRIGRLEHLETEALMNRIIAHGIEIHTLQDGLIYTRDALSDDLGISIIQRVKSYVAHQESKQKSFRVSQKWKQRAKLALAGEQRLTRNVPGWIDPDTFKCNEHAETVRLIFKLLLDGESLHNIARHLQSNDIKSFSRRKDANGFSVHSVRTVLRSESVIGTLPASQRNDRPAIPNYYEAAIDAATFNKAQEILDKNRKGRTPASDNPLTINIFKGLFRCQCGASVHPTGTKNKYAGVYRCNNNPDGRCDVPPLKRKPFDKWMIDNFLGMIDVGNDGEAEGKIASLQHEVEIVTARIKKATALLLEMDDITELKAQVKGLNQKRTEIQTTIDTLKRKTSLTDKELPQLKDIDLTTKAGRVECQLILSKHLKGLTLGKDSVTVTLQNDTEITIPTNPLPLNDGSPIFEIADKELLDIDAYQL

SEQ ID NO: 31512 - DNA, 50 bp, Escherichia coli; identical to SEQ ID NO: 30087
  source 1..50: mol_type = genomic DNA

SEQ ID NO: 31513 - DNA, 40 bp, Escherichia coli; identical to SEQ ID NO: 20043
  source 1..40: mol_type = genomic DNA

SEQ ID NO: 31514 - DNA, 40 bp, Escherichia coli; identical to SEQ ID NO: 30164
  source 1..40: mol_type = genomic DNA

SEQ ID NO: 31515 - DNA, 50 bp, Escherichia coli; identical to SEQ ID NO: 7690
  source 1..50: mol_type = genomic DNA

SEQ ID NO: 31516 - protein, 506 aa, Escherichia coli; identical to SEQ ID NO: 31381

SEQ ID NO: 31517 - DNA, 50 bp, Escherichia coli; identical to SEQ ID NO: 30087
  source 1..50: mol_type = genomic DNA

SEQ ID NO: 31518 - DNA, 40 bp, Escherichia coli; identical to SEQ ID NO: 20043
  source 1..40: mol_type = genomic DNA

SEQ ID NO: 31519 - DNA, 40 bp, Escherichia coli; identical to SEQ ID NO: 30164
  source 1..40: mol_type = genomic DNA

SEQ ID NO: 31520 - DNA, 50 bp, Escherichia coli; identical to SEQ ID NO: 7690
  source 1..50: mol_type = genomic DNA

SEQ ID NO: 31521 - protein, 506 aa, Escherichia coli
MRHVITYLRYSSATQGAEGADSTRRQNELFKQWLRKNSDAQVVASFNDEGLSGYKGKHLSGQFGDMLSRIESGEFSKGTILLVEAIDRIGRLEHLETEALMNRIIAHGIEIHTLQDGLIYTRDALSDDLGISIIQRVKSYLAHQESKQKSFRVSEKWKQRAKLALAGEQRLTKMVPGWIDPETFKLNEHAETVRLIFKLLLDGESLHNIARHLQANNISSFSRRKDANGFSVHSVRTILRSETTIGTLPASQRNDRPAIPNYYEAAIDAATFNKAQEILGKNRIGRTPASDNPLTINIFKGLFRCQCGASVHPTGTKNKYQGVYRCNNHLDGRCDVPPLKRKPFDKWMIDNFLGMIDVGNDGEAEGKIASLQHEVEIVTTRIKKATALLLEMDDITELKAQVKELNQKRTELQTTIDSMRRKTSLSDKGLPQLKDIDLMTKAGRVECQLILSKHLKGLTLGKDSVTVTLQNDTEITIPTNPLPLNDGTSIFEIAEKELLEIDAYQL

SEQ ID NO: 31522 - DNA, 50 bp, Escherichia coli; identical to SEQ ID NO: 30087
  source 1..50: mol_type = genomic DNA

SEQ ID NO: 31523 - DNA, 40 bp, Escherichia coli; identical to SEQ ID NO: 20043
  source 1..40: mol_type = genomic DNA

SEQ ID NO: 31524 - DNA, 40 bp, Escherichia coli; identical to SEQ ID NO: 30164
  source 1..40: mol_type = genomic DNA

SEQ ID NO: 31525 - DNA, 50 bp, Escherichia coli; identical to SEQ ID NO: 7690
  source 1..50: mol_type = genomic DNA

SEQ ID NO: 31526 - protein, 506 aa, Escherichia coli
MRSVITYLRFSSAIQGAEGADSTRRQNDLFKQWLKKNSDAQVVASFSDEGLSGYKGKHLTGQFGDMLARIESGEFPEGTLLLVEAIDRIGRLEHLETEALMNRIIAHGIEIHTLQDGLIYTRDALSDDLGISIIQRVKSYVAHQESKQKSFRVSQKWKQRAKLALAGEQRLTKMVPGWIDPDTFKCNEHAETVRLIFKLLLDGESLHNIARHLQANNISSFSRRKDANGFSVHSVRTILRSETTRGTLPASQRNDRPAIPNYYEAAIDASTFNKAQEILDKNRKGRTPASDNPLTINIFKGLFRCQCGASVHPTGTKNKYAGVYRCNNHLDGRCDVPPLKRKPFDRWMIDNFLGMIDVGNDGESERKIAALQHEVEIVTARIKKATALLLEMDDIDELKIQIKELNQRRTELQTTIDNMRRKASLTDKELPQLKDIDLTTKAGRVECQLILSKHLKGLTLGKDSVTVTLQNDTEITIPTNPLPLNDGSPIFEIADKELLDIDAYQL

SEQ ID NO: 31527 - DNA, 50 bp, Escherichia coli; identical to SEQ ID NO: 30087
  source 1..50: mol_type = genomic DNA

SEQ ID NO: 31528 - DNA, 40 bp, Escherichia coli; identical to SEQ ID NO: 20043
  source 1..40: mol_type = genomic DNA

SEQ ID NO: 31529 - DNA, 40 bp, Escherichia coli; identical to SEQ ID NO: 30164
  source 1..40: mol_type = genomic DNA

SEQ ID NO: 31530 - DNA, 50 bp, Escherichia coli; identical to SEQ ID NO: 7690
  source 1..50: mol_type = genomic DNA

SEQ ID NO: 31531 - protein, 506 aa, Escherichia coli
MRSVITYLRFSSATQGAEGADSTRRQNELFKQWLRKNSDAQVVASFNDEGLSGYKGKHLSGQFGDMLSRIESGEFPEGTILLVEAIDRIGRLEHLETEALMNRIIAHGIEIHTLQDGLIYTRDALSDDLGISIIQRVKSYIAHQESKQKSFRVSQKWEQRAKLALAGEQRLTKMVPGWIDPDTFKLNEHAETVRLIFKLLLSGESLHNIARHLQSNGIKSFSRRKDANGFSVHSVRTVLRSESVIGTLPASQRNDRPAIPNYYEAAIDAATFNKAQEILDKNRKGRTPASDNPLTINIFKGLFRCQCGASVHPTGTKNKYAGVYRCNNHLDGRCDVPPLKRKPFDRWMIDNFLGMIDVGNDGESERKIAALQHEVEIVTARIKKATALLLEMDDIDELKIQLKELNQKRTELQTTIDNMRRKASLTDKELPQLKDIDLTTKAGRVECQLILSKHLKGLTLGKDSVTVTLQNDTEITIPTNPLPLNDGSPIFEIADKELLDIDAYQL

SEQ ID NO: 31532 - DNA, 50 bp, Escherichia coli; identical to SEQ ID NO: 30087
  source 1..50: mol_type = genomic DNA

SEQ ID NO: 31533 - DNA, 40 bp, Escherichia coli; identical to SEQ ID NO: 20043
  source 1..40: mol_type = genomic DNA

SEQ ID NO: 31534 - DNA, 40 bp, Escherichia coli; identical to SEQ ID NO: 30164
  source 1..40: mol_type = genomic DNA

SEQ ID NO: 31535 - DNA, 50 bp, Escherichia coli; identical to SEQ ID NO: 7690
  source 1..50: mol_type = genomic DNA

SEQ ID NO: 31536 - protein, 506 aa, Escherichia coli
MRSVITYLRYSSAIQGAEGADSTRRQNDLFKQWLKKNSDAQVVASFSDEGLSGYKGKHLTGQFGDMLARIESGEFSKGTILLVESIDRIGRLEHLETEALMNRILGNGLEIHTLQDGLIYTKDALADDLGISIIQRVKAYIAHQESKQKSFRVSEKWKQRAKLALAGEQRLTKMVPGWIDPDTLKLNEHAETVRLIFKLLLSGESLHNIARHLQSNGIKSFSRRKDANGFSVHSVRTILRSETTIGTLPASQRNDRPAIPNYYEAAIDAATFNKAQEILDKNRKGRTPASDNPLTINIFKGLFRCQCGASVHPTGTKNKYAGVYRCNNNPDGRCDVPPLKRKPFDRWMIDNFLGMIDVGNDGEAEGKIASLQHEVEIVTARIKKATALLLEMDDITELKTQVKGLNQKRTELQTTIDNMRRKASLTDKELPQLKDIDLTTKAGRVECQLILSKHLKGLTLGKDSVIVTLQNDTEITIPTNPLPLNDGSPIFEIADKELLDIDAYQL

SEQ ID NO: 31537 - DNA, 50 bp, Escherichia coli; identical to SEQ ID NO: 30087
  source 1..50: mol_type = genomic DNA

SEQ ID NO: 31538 - DNA, 40 bp, Escherichia coli; identical to SEQ ID NO: 20043
  source 1..40: mol_type = genomic DNA

SEQ ID NO: 31539 - DNA, 40 bp, Escherichia coli; identical to SEQ ID NO: 30164
  source 1..40: mol_type = genomic DNA

SEQ ID NO: 31540 - DNA, 50 bp, Escherichia coli; identical to SEQ ID NO: 7690
  source 1..50: mol_type = genomic DNA

SEQ ID NO: 31541 - protein, 506 aa, Escherichia coli
MRTVITYLRFSSATQGAEGADSTRRQNELFKQWLRKNSDAQVVASFNDEGLSGYKGKHLSGQFGDMLSRIESGEFPEGTILLVEAIDRIGRLEHLETEALMNRIIAHGIEIHTLQDGLIYTRDALSDDLGISIIQRVKSYLAHQESKQKSFRVSQKWKQRAKLALAGEQRLTKMVPGWIDPDTFKCNEHAETVRLIFKLLLDGESLHNIARHLQANNISSFSRRKDANGFSVHSVRTILRSETTIGTLPASQRNDRPAIPNYYEAAIDAATFNKAQEILDKNRKGRTPASDNPLTINIFKGLFRCQCGASVHPTGTKNKYQGVYRCNNHLDGRCDVQPLKRKPFDRWMIDNFLGMIDVGNDGESERKIAALQHEVEIVTARIKKATALLLEMDDITELKTQVRELNQKRTDIQTTIDTLKRKTSLSDKGLPQLKDIDLMTKAGRVECQLILSKHLKGLTLGKDSVTVTLQNDTEITIPTNPLPLNDGSPIFEIADKELLDVDAYQL

SEQ ID NO: 31542 - DNA, 50 bp, Escherichia coli; identical to SEQ ID NO: 30087
  source 1..50: mol_type = genomic DNA

SEQ ID NO: 31543 - DNA, 40 bp, Escherichia coli; identical to SEQ ID NO: 20043
  source 1..40: mol_type = genomic DNA

SEQ ID NO: 31544 - DNA, 40 bp, Escherichia coli; identical to SEQ ID NO: 30164
  source 1..40: mol_type = genomic DNA

SEQ ID NO: 31545 - DNA, 50 bp, Escherichia coli; identical to SEQ ID NO: 7690
  source 1..50: mol_type = genomic DNA

SEQ ID NO: 31546 - protein, 506 aa, Escherichia coli
MRSVITYLRYSSAIQGAEGADSTRRQNELFKQWLKKNSDAQIVASFSDEGLSGYKGKHLTGQFGDMLARIESGEFPQGAILLVESIDRIGRLEHLETEALMNRIIAHGIEIHTLQDGLIYTRDALSDDLGISIIQRVKSYLAHQESKQKSFRVSEKWKQRAKLALAGEQRLTKMVPGWIDPETFKLNEHAETVRLIFKLLLDGESLHNIARHLQSNDIKSFSRRKDANGFSVHSVRTVLRSESVIGTLPASQRNDRPAIPNYYEAAIDAATFNKAQEILDKNRKGRTPASDNPLTINIFKGLFRCQCGASVHPTGTKNKYAGVYRCNNHLDGRCDVPPLKRKPFDKWMIDNFLGMIDVGNDGEAEKEIASLQHEVEIVTARIKKATALLLEMDDIDELKIQLKELNQKRTELQTTIDNMRRKASLTDKELPQLKDIDLTTKTGRVECQLILSKHLKGLTLGKDSVTVTLQNDTEITIPTNPLPLNDGSPIFEIADKELLDIDAYQL

SEQ ID NO: 31547 - DNA, 50 bp, Escherichia coli; identical to SEQ ID NO: 30087
  source 1..50: mol_type = genomic DNA

SEQ ID NO: 31548 - DNA, 40 bp, Escherichia coli; identical to SEQ ID NO: 20043
  source 1..40: mol_type = genomic DNA

SEQ ID NO: 31549 - DNA, 40 bp, Escherichia coli; identical to SEQ ID NO: 30164
  source 1..40: mol_type = genomic DNA

SEQ ID NO: 31550 - DNA, 50 bp, Escherichia coli; identical to SEQ ID NO: 7690
  source 1..50: mol_type = genomic DNA

SEQ ID NO: 31551 - protein, 509 aa, Escherichia coli
MRSVITYLRFSSATQGAEGAEGADSTRRQNELFKQWLRKNSDAQVVASFNDEGLSGYKGKHLSGQFGDMLSRIESGEFPEGTILLVEAIDRIGRLEHLETEALMNRIIAHGIEIHTLQDGLIYTRDALSDDLGISIIQRVKSYIAHQESKQKSFRVSQKWEQRAKLALAGEQRLTKMVPGWIDPETFKLNEHAETVRLIFKLLLDGESLHNIARHLQANNISSFSRRKDANGFSVHSVRTILRSETTIGTLPASQRNDRPAIPNYYEAAIDAATFNKAQEILDKNRKGRTPASDNPLTINIFKGLFRCQCGASVHPTGTKNKYAGVYRCNNHLDGRCDVQPLKRKPFDRWMIDNFLGMIDVGNDGESERKIAALQHEVEIVTARIKKATALLLEMDDITELKTQVKGLNQKRTELQTTIDNMRRKASLTDKELPQLKDIDLTTKAGRVECQLILSKHLKGLTLGKDSVIVTLQNDTEITIPTNPLPLNDGTSIFEIAEKELLEIDAYQL

SEQ ID NO: 31552 - DNA, 50 bp, Escherichia coli; identical to SEQ ID NO: 30087
  source 1..50: mol_type = genomic DNA

SEQ ID NO: 31553 - DNA, 40 bp, Escherichia coli; identical to SEQ ID NO: 20043
  source 1..40: mol_type = genomic DNA

SEQ ID NO: 31554 - DNA, 40 bp, Escherichia coli; identical to SEQ ID NO: 30164
  source 1..40: mol_type = genomic DNA

SEQ ID NO: 31555 - DNA, 50 bp, Escherichia coli; identical to SEQ ID NO: 7690
  source 1..50: mol_type = genomic DNA

SEQ ID NO: 31556 - protein, 506 aa, Escherichia coli; identical to SEQ ID NO: 30591

SEQ ID NO: 31557 - DNA, 50 bp, Escherichia coli; identical to SEQ ID NO: 31117
  source 1..50: mol_type = genomic DNA

SEQ ID NO: 31558 - DNA, 40 bp, Escherichia coli; identical to SEQ ID NO: 20043
  source 1..40: mol_type = genomic DNA

SEQ ID NO: 31559 - DNA, 40 bp, Escherichia coli; identical to SEQ ID NO: 30164
  source 1..40: mol_type = genomic DNA

SEQ ID NO: 31560 - DNA, 50 bp, Escherichia coli; identical to SEQ ID NO: 7690
  source 1..50: mol_type = genomic DNA

SEQ ID NO: 31561 - protein, 506 aa, Escherichia coli
MRHVITYLRYSSAIQGAEGADSTRRQNDLFKQWLKKNSDAQVVASFNDEGLSGYKGKHLSGQFGDMLSRIESGEFSEGTILLVEAIDRIGRLEHLETEALMNRILGNGIEIHTLQDGLIYTKDALADDLGISIIQRVKAYIAHQESKQKSFRVSQKWGQRAKLALAGKQRLTKMVPGWIDPETFEVNEHAETVRLIFKLLLDGESLHNIARHLQANNISSFSRRKDANGFSVHSVRTILRSETTIGTLPASQRNDRPAIPNYYEAAIDAATFNKAQEILDKNRKGRTPASDNPLTINIFKGLFRCQCGASVHPTGTKNKYQGVYRCNNHLDGRCDVPPLKRKPFDKWMIDNFLGMIDVGNDGEAEGKIASLQHEVEIVTARIKKATALLLEMDDIDELKIQLKELNQKRTELQTTIDNMRRKASLTDKELPQLKDIDLTTKAGRVECQLILSKHLKGLTLGKDSVTVTLQNDTEITIPTNPLPLNDGSPIFEIADKELLEIDAYQL

SEQ ID NO: 31562 - DNA, 50 bp, Escherichia coli; identical to SEQ ID NO: 30087
  source 1..50: mol_type = genomic DNA

SEQ ID NO: 31563 - DNA, 40 bp, Escherichia coli; identical to SEQ ID NO: 20043
  source 1..40: mol_type = genomic DNA

SEQ ID NO: 31564 - DNA, 40 bp, Escherichia coli; identical to SEQ ID NO: 30164
  source 1..40: mol_type = genomic DNA

SEQ ID NO: 31565 - DNA, 50 bp, Escherichia coli; identical to SEQ ID NO: 7690
  source 1..50: mol_type = genomic DNA

SEQ ID NO: 31566 - protein, 506 aa, Escherichia coli
MRHVITYLRYSSAIQGAEGADSTRRQNDLFKQWLKKNSDAQVVASFNDEGLSGYKGKHLTGQFGDMLARIEAGEFPAGTILLVESIDRIGRLEHLETEALMNRILGNGIEIHTLQDGLIYTKDALADDLGISIIQRVKAYIAHQESKQKSFRVSQKWEQRAKLALAGKQRLTKMVPGWIDPDTFKLNEHAETVRLIFKLLLDGESLHNIARHLQSNGIKSFSRRKDANGFSVHSVRTILRSVTTIGTLPASQRNDRPAIPNYYEAAIDAATFNKAQEILDKNRKGRTPASDNPLTINIFKGLFRCQCGASVHPTGTKNKYAGVYRCNNHLDGRCDVPPLKRKPFDRWMIDNFLGMIDVGNDGESERKIAALQHEVEIVTARIKKATALLLEMDDITELKTQVKELNQKRTALQTTIDNMRRKTSLTDKELPQLKDIDLTTKAGRVECQLILSKHLKGLTLGKDSVTVTLQNDTEITIPTNPLPLNDGSPIFEIADKELLDIDAYQL

SEQ ID NO: 31567 - DNA, 50 bp, Escherichia coli; identical to SEQ ID NO: 30087
  source 1..50: mol_type = genomic DNA

SEQ ID NO: 31568 - DNA, 40 bp, Escherichia coli; identical to SEQ ID NO: 20043
  source 1..40: mol_type = genomic DNA

SEQ ID NO: 31569 - DNA, 40 bp, Escherichia coli; identical to SEQ ID NO: 30164
  source 1..40: mol_type = genomic DNA

SEQ ID NO: 31570 - DNA, 50 bp, Escherichia coli; identical to SEQ ID NO: 7690
  source 1..50: mol_type = genomic DNA

SEQ ID NO: 31571 - protein, 499 aa, Escherichia coli
MRFSSATQGAEGADSTRRQNELFKQWLRKNSDAQVVASFNDEGLSGYKGKHLSGQFGDMLSRIESGEFPEGTILLVEAIDRIGRLEHLETEALMNRIIAHGIEIHTLQDGLIYTRDALSDDLGISIIQRVKSYLAHQESKQKSFRVSEKWKQRAKLALAGEQRLTKMVPGWIDPETFKLNEHAETVRLIFKLLLDGESLHNIARHLQANNISSFSRRKDANGFSVHSVRTILRSETTIGTLPASQRNDRPAIPNYYEAAIDAATFNKAQEILGKNRIGRTPASDNPLTINIFKGLFRCQCGASVHPTGTKNKYQGVYRCNNHLDGRCDVPPLKRKPFDKWMIDNFLGMIDVGNDGEAEGKIAALQHEVEIVTARIKKATALLLEMDDIDELKIQLKELNQKRTELQTTIDSMRRKTSLSDKGLPQLKDIDLMTKAGRVECQLILSKHLKGLTLGKDSVTVTLQNDTEITIPTNPLPLNDGSPIFEIADKELLEIDAYQL

SEQ ID NO: 31572 - DNA, 50 bp, Escherichia coli; identical to SEQ ID NO: 30087
  source 1..50: mol_type = genomic DNA

SEQ ID NO: 31573 - DNA, 40 bp, Escherichia coli; identical to SEQ ID NO: 20043
  source 1..40: mol_type = genomic DNA

SEQ ID NO: 31574 - DNA, 40 bp, Escherichia coli; identical to SEQ ID NO: 30164
  source 1..40: mol_type = genomic DNA

SEQ ID NO: 31575 - DNA, 50 bp, Escherichia coli; identical to SEQ ID NO: 7690
  source 1..50: mol_type = genomic DNA

SEQ ID NO: 31576 - protein, 506 aa, Escherichia coli
MRSVITYLRFSSAIQGAEGADSTRRQNDLFKQWLKKNSDAQVVASFSDEGLSGYKGKHLTGQFGDMLARIESGEFSEGTVLLVEAIDRIGRLEHLETEALMNRIIAHGIEIHTLQDGLIYTRDALSDDLGISIIQRVKSYVAHQESKQKSFRVSQKWKQRAKLALAGEQRLTRNVPGWIDPDTFKCNEHAETVRLIFKLLLDGESLHNIARHLQANNISSFSRRKDANGFSVHSVRTVLRSESVIGTLPASQRNDRPAIPNYYEAAIDAATFNKAQEILDKNRKGRTPASDNPLTINIFKGLFRCQCGASVHPTGTKNKYAGVYRCNNNPDGRCDVPPLKRKPFDKWMIDNFLGMIDVGNDGEAEGKIASLQHEVEIVTTRIKKATALLLEMDDITELKAQVKELNQKRTELQTTIDSMRRKTSLSDKGLPQLKDIDIMTKAGRVECQLILSKHLKGLTLGKDSVIVTLQNDTEITIPTNPLPLNDGTSIFEIAEKELLEIDAYQL

SEQ ID NO: 31577 - DNA, 50 bp, Escherichia coli; identical to SEQ ID NO: 30087
  source 1..50: mol_type = genomic DNA

SEQ ID NO: 31578 - DNA, 40 bp, Escherichia coli; identical to SEQ ID NO: 20043
  source 1..40: mol_type = genomic DNA

SEQ ID NO: 31579 - DNA, 40 bp, Escherichia coli; identical to SEQ ID NO: 30164
  source 1..40: mol_type = genomic DNA

SEQ ID NO: 31580 - DNA, 50 bp, Escherichia coli; identical to SEQ ID NO: 7690
  source 1..50: mol_type = genomic DNA

SEQ ID NO: 31581 - protein, 506 aa, Escherichia coli
MRTVITYLRFSSATQGAEGADSTRRQNELFKQWLRKNSDAQVVASFSDEGLSGYKGKHLTGQFGDMLARIESGEFSEGTVLLVEAIDRIGRLEHLETEALMNRIIAHGIEIHTLQDGLIYTRDALSDDLGISIIQRVKSYVAHQESKQKSFRVSQKWKQRAKLALAGEQRLTRNVPGWIDPDTFKCNEHAETVRLIFKLLLDGESLHNIARHLQANNISSFSRRKDANGFSVHSVRTILRSETTRGTLPASQRNDRPAIPNYYEAAIDASTFNKAQEILDKNRKGRTPASDNPLTINIFKGLFRCQCGASVHPTGTKNKYAGVYRCNNNPDGRCDVPPLKRKPFDKWMIDNFLGMIDVGNDGEAEGKIASLQHEVEIVTARIKKATALLLEMDDIDELKIQIKELNQRRTELQTTIDNMRRKASLTDKELPQLKDIDLTTKAGRVECQLILSKHLKGLTLGKDSVTVTLQNDTEIIVPTDPLPLNDGTSIFEIAEKNLLNIDTFQL

SEQ ID NO: 31582 - DNA, 50 bp, Escherichia coli; identical to SEQ ID NO: 30087
  source 1..50: mol_type = genomic DNA

SEQ ID NO: 31583 - DNA, 40 bp, Escherichia coli; identical to SEQ ID NO: 20043
  source 1..40: mol_type = genomic DNA

SEQ ID NO: 31584 - DNA, 40 bp, Escherichia coli; identical to SEQ ID NO: 30164
  source 1..40: mol_type = genomic DNA

SEQ ID NO: 31585 - DNA, 50 bp, Escherichia coli; identical to SEQ ID NO: 7690
  source 1..50: mol_type = genomic DNA

SEQ ID NO: 31586 - protein, 506 aa, Escherichia coli
MRTAITYLRYSSAIQGAEGADSTRRQNDLFKQWLKKNSDAQIVASFSDEGLSGYKGKHLTGQFGDMLARIEAGEFPAGTILLVESIDRIGRLEHLETEALMNRILCNGIEIHTLQDGLVYTKDALADDLGISIIQRVKAYIAHQESKQKSFRVSQKWGQRAKLALAGKQRLTKMVPGWIDPETFKLNEHAETVRLIFKLLLDGESLHNIARHLQANNISSFSRRKDANGFSVHSVRTVLRSESVTGTLPASQRNDRPAIPNYYEAAIDAATFNKAQEILDKNRKGRTPASDNPLTINIFKGLFRCQCGASVHPTGTKNKYQGVYRCNNHLDGRCDVPPLKRKPFDKWMIDNFLGMIDVGNDGEAEGKIAALQHEVEIVTARIKKATALLLEMDDITELKTQVKGLNQKRTELQTTIDNMRRKASLTDKELPQLKDIDLTTKAGRVECQLILSKHLKGLTLGKDSVTVTLQNDTEITIPTDPLPLNDGTSIFEIAEKNLLNIDTFQL

SEQ ID NO: 31587 - DNA, 50 bp, Escherichia coli
  source 1..50: mol_type = genomic DNA
aaaccgaatagacttcattcaagggtcattgtattgtagatattcggcat

SEQ ID NO: 31588 - DNA, 40 bp, Escherichia coli; identical to SEQ ID NO: 20043
  source 1..40: mol_type = genomic DNA

SEQ ID NO: 31589 - DNA, 40 bp, Escherichia coli; identical to SEQ ID NO: 30164
  source 1..40: mol_type = genomic DNA

SEQ ID NO: 31590 - DNA, 50 bp, Escherichia coli; identical to SEQ ID NO: 7690
  source 1..50: mol_type = genomic DNA

SEQ ID NO: 31591 - protein, 506 aa, Escherichia coli
MRTVITYLRFSSAIQGAEGADSTRRQNDLFKQWLKKNSDAQVVASFSDEGLSGYKGKHLTGQFGDMLARIESGEFPEGTILLVEAIDRIGRLEHLETEALMNRIIAHGIEIHTLQDGLIYTRDALSDDLGISIIQRVKSYVAHQESKQKSFRVSQKWKQRAKLALAGEQRLTKMVPGWIDPDTFKCNEHAETVRLIFKLLLDGESLHNIARHLQANNISSFSRRKDANGFSVHSVRTILRSETTRGTLPASQRNDRPAIPNYYEAAIDAATFNKAQEILDKNRKGRTPASDNPLTINIFKGLFRCQCGASVHPTGTKNKYQGVYRCNNHLDGRCDVPPLKRKPFDKWMIDNFLGMIDVGNDGEAEGKIASLQHEVEIVTTRIKKATALLLEMDDITELKTQVKGLNQKRTELQTTIDNMRRKASLTDKELPQLKDIDLTTKAGRVECQLILSKHLKGLTLGKDSVIVTLQNDTEITIPTDPLPLNDGTSIFEIAEKNLLNIDTFQL

SEQ ID NO: 31592 - DNA, 50 bp, Escherichia coli; identical to SEQ ID NO: 30087
  source 1..50: mol_type = genomic DNA

SEQ ID NO: 31593 - DNA, 40 bp, Escherichia coli; identical to SEQ ID NO: 20043
  source 1..40: mol_type = genomic DNA

SEQ ID NO: 31594 - DNA, 40 bp, Escherichia coli; identical to SEQ ID NO: 30164
  source 1..40: mol_type = genomic DNA

SEQ ID NO: 31595 - DNA, 50 bp, Escherichia coli; identical to SEQ ID NO: 7690
  source 1..50: mol_type = genomic DNA

SEQ ID NO: 31596 - protein, 506 aa, Escherichia coli
MRHVITYLRYSSAIQGAEGADSTRRQNDLFKQWLKKNSDAQVVASFNDEGLSGYKGKHLSGQFGDMLSRIESGEFPEGTILLVEAIDRIGRLEHLETEALMNRIIAHGIEIHTLQDGLIYTRDALSDDLGISIIQRVKSYIAHQESKQKSFRVSEKWKQRAKLALAGKQRLTKMVPGWIDPDTFKLNEHAETVRLIFKLLLDGESLHNIARHLQANNISSFSRRKDANGFSVHSVRTILRSETTIGTLPASQRNDRPAIPNYYEAAIDASTFNKAQEILDKNRKGRTPASDNPLTINIFKGLFRCQCGASVHPTGTKNKYQGVYRCNSHLDGRCDVPPLKRKPFDRWMIDNFLGMIDVGNDGEAEKEIASLQHEVETVTARIKKATALLLEMDDITELKTQVKELNQKRTELQTTINTMKRKTSLSDKGLPQLKDIDLMTKAGRVECQLILSKHLKGLTLGKDSVTVTLQNDTEITIPTNPLPLNDGTSIFEIAEKNLLNIDTFQL

SEQ ID NO: 31597 - DNA, 50 bp, Escherichia coli; identical to SEQ ID NO: 30087
  source 1..50: mol_type = genomic DNA

SEQ ID NO: 31598 - DNA, 40 bp, Escherichia coli; identical to SEQ ID NO: 20043
  source 1..40: mol_type = genomic DNA

SEQ ID NO: 31599 - DNA, 40 bp, Escherichia coli; identical to SEQ ID NO: 30164
  source 1..40: mol_type = genomic DNA

SEQ ID NO: 31600 - DNA, 50 bp, Escherichia coli; identical to SEQ ID NO: 7690
  source 1..50: mol_type = genomic DNA

SEQ ID NO: 31601 - protein, 506 aa, Escherichia coli
MRSVITYLRFSSATQGAEGADSTRRQNELFKQWLRKNSDAQVVASFSDEGLSGYKGKHLTGQFGDMLARIEAGEFPAGAILLVESIDRIGRLEHLETEALMNRIIAHGIEIHTLQDGLIYTRDALSDDLGISIIQRVKSYLAHQESKQKSFRVSEKWKQRAKLALAGEQHLTRNVPGWIDPDTFKCNEHAETVRLIFKLLLDGESLHNIARHLQSNDIKSFSRRKDANGFSVHSVRTVLRSESVIGTLPASQRNDRPAIPHYYEAAIDAATFNKAQEILDKNRKGRTPASDNPLTINIFKGLFRCQCGASVHPTGTKNKYAGVYRCNNHLDGRCDVPPLKRKPFDKWMIDNFLGMIDVGNDGEAEGKIASLQHEVEIVTARIKKATALLLEMDDIDELKIQLKELNQRRTELQTTIDNMRRKASLTDKELPQLKDIDLTTKAGRVECQLILSKHLKGLTLGKDSVTVTLQNDTEITIPTNPLPLNDGTSIFEIAEKNLLNIDTFQL

SEQ ID NO: 31602 - DNA, 50 bp, Escherichia coli; identical to SEQ ID NO: 30087
  source 1..50: mol_type = genomic DNA

SEQ ID NO: 31603 - DNA, 40 bp, Escherichia coli; identical to SEQ ID NO: 20043
  source 1..40: mol_type = genomic DNA

SEQ ID NO: 31604 - DNA, 40 bp, Escherichia coli; identical to SEQ ID NO: 30164
  source 1..40: mol_type = genomic DNA

SEQ ID NO: 31605 - DNA, 50 bp, Escherichia coli; identical to SEQ ID NO: 7690
  source 1..50: mol_type = genomic DNA

SEQ ID NO: 31606 - protein, 506 aa, Escherichia coli
MRTVITYLRFSSAIQGAEGADSTRRQNDLFKQWLKKNSDAQVVASFSDEGLSGYKGKHLTGQFGDMLARIESGEFPEGTILLVESIDRIGRLEHLETEALMNRILGNGLEIHTLQDGLIYTKDALADDLGISIIQRVKAYIAHQESKQKSFRVSQKWGQRAKLALAGKQRLTKMVPGWIDPDTLKLNEHAETVRLIFKLLLDGESLHNIARHLQSNDIKSFSRRKDANGFSVHSVRTVLRSESVIGTLPASQRNDRPAIPNYYEAAIDASTFNKAQEILDKNRKGRTPASDNPLTINIFKGLFRCQCGASVHPTGTKRTYQGVYRCNNHLDGRCHVPPLKRKPFDKWMIDNFLGMIDVGNDGEAEGKIASLQHEVEIVTTRIKKATALLLEMDDIDELKIQLKELNQKRTELQTTIDNMRRKASLTDKELPQLKDIDLTTKAGRVECQLILSKHLKGLTLGKDSVTVTLQNDTEITIPTNPLPLNDGSPIFEIADKELLDIDAYQL

SEQ ID NO: 31607 - DNA, 50 bp, Escherichia coli; identical to SEQ ID NO: 30087
  source 1..50: mol_type = genomic DNA

SEQ ID NO: 31608 - DNA, 40 bp, Escherichia coli; identical to SEQ ID NO: 20043
  source 1..40: mol_type = genomic DNA

SEQ ID NO: 31609 - DNA, 40 bp, Escherichia coli; identical to SEQ ID NO: 30164
  source 1..40: mol_type = genomic DNA

SEQ ID NO: 31610 - DNA, 50 bp, Escherichia coli; identical to SEQ ID NO: 7690
  source 1..50: mol_type = genomic DNA

SEQ ID NO: 31611 - protein, 506 aa, Escherichia coli; identical to SEQ ID NO: 30511

SEQ ID NO: 31612 - DNA, 50 bp, Escherichia coli; identical to SEQ ID NO: 30087
  source 1..50: mol_type = genomic DNA

SEQ ID NO: 31613 - DNA, 40 bp, Escherichia coli
  source 1..40: mol_type = genomic DNA
gcggcgaggtaaatcaagagtcattgaagtcataatcatt

SEQ ID NO: 31614 - DNA, 40 bp, Escherichia coli
  source 1..40: mol_type = genomic DNA
gcggcgaggtaaatcaagatgcattgaagtcataatcatt

SEQ ID NO: 31615 - DNA, 50 bp, Escherichia coli; identical to SEQ ID NO: 7690
  source 1..50: mol_type = genomic DNA

SEQ ID NO: 31616 - protein, 506 aa, Escherichia coli
MRTVITYLRFSSAIQGAEGADSTRRQNDLFKQWLKKNSDAQVVASFSDEGLSGYKGKHLTGQFGDMLARIESGEFPEGTILLVEAIDRIGRLEHLETEALMNRIIAHGIEIHTLQDGLIYTRDALSDDLGISIIQRVKSYVAHQESKQKSFRVSQKWKQRAKLALAGEQRLTKMVPGWIDPDTFKCNEHAETVRLIFKLLLDGESLHNIARHLQANNISSFSRRKDANGFSVHSVRTILRSETTRGTLPASQRNDRPAIPNYYEAAIDAATFNKAQEILDKNRKGRTPASDNPLTINIFKGLFRCQCGASVHPTGTKNKYQGVYRCNNHLDGRCGVPPLKRKPFDKWMIDNFLGMIDVGNDGEAEKEIASLQHEVEIVTARIKKATALLLEMDDITELKTQVKGLNQKRTELQTTIDNMRRKASLTDKELPQLKDIDLTTKAGRVECQLILSKHLKGLTLGKDTVTVTLQNDTEITIPTDPLPLNDGTSIFEIAEKNLLNIDTFQL

SEQ ID NO: 31617 - DNA, 50 bp, Escherichia coli; identical to SEQ ID NO: 30087
  source 1..50: mol_type = genomic DNA

SEQ ID NO: 31618 - DNA, 40 bp, Escherichia coli; identical to SEQ ID NO: 20038
  source 1..40: mol_type = genomic DNA

SEQ ID NO: 31619 - DNA, 40 bp, Escherichia coli; identical to SEQ ID NO: 30979
  source 1..40: mol_type = genomic DNA

SEQ ID NO: 31620 - DNA, 50 bp, Escherichia coli; identical to SEQ ID NO: 7690
  source 1..50: mol_type = genomic DNA

SEQ ID NO: 31621 - protein, 506 aa, Escherichia coli
MRSVITYLRFSSAIQGAEGADSTRRQNDLFKQWLKKNSDAQVVASFSDEGLSGYKGKHLTGQFGDMLARIESGEFSEGTVLLVEAIDRIGRLEHLETEALMNRIIAHGIEIHTLQDGLIYTRDALSDDLGISIIQRVKSYVAHQESKQKSFRVSQKWKQRAKLALAGEQRLTRNVPGWIDPDTFKCNEHAETVRLIFKLLLDGESLHNIARHLQANNISSFSRRKDANGFSVHSVRTVLRSESVIGTLPASQRNDRPAIPNYYEAAIDAATFNKAQEILDKNRKGRTPASDNPLTINIFKGLFRCQCGASVHPTGTKNKYAGVYRCNNNPDGRCDVPPLKRKPFDKWMIDNFLGMIDVGNDGEAEGKIASLQHEVEIVTTRIKKATALLLEMDDITELKAQVKELNQKRTELQTTIDSMRRKTSLSDKGLPQLKDIDLMTKAGRVECQLILSKHLKGLTLGKDSVIVTLQNDTEITIPTNPLPLNDGTSIFEIAEKELLEIDAYQL

SEQ ID NO: 31622 - DNA, 50 bp, Escherichia coli; identical to SEQ ID NO: 30087
  source 1..50: mol_type = genomic DNA

SEQ ID NO: 31623 - DNA, 40 bp, Escherichia coli; identical to SEQ ID NO: 20043
  source 1..40: mol_type = genomic DNA

SEQ ID NO: 31624 - DNA, 40 bp, Escherichia coli; identical to SEQ ID NO: 30164
  source 1..40: mol_type = genomic DNA

SEQ ID NO: 31625 - DNA, 50 bp, Escherichia coli; identical to SEQ ID NO: 7690
  source 1..50: mol_type = genomic DNA

SEQ ID NO: 31626 - protein, 506 aa, Escherichia coli
MRTVITYLRYSSAIQGAEGADSTRRQNDLFKQWLKKNSDAQVVASFSDEGLSGYKGKHLTGQFGDMLARIESGEFPEGTILLVEAIDRIGRLEHLETEALMNRIIAHGIEIHTLQDGLIYTRDALSDDLGISIIQRVKSYVAHQESKQKSFRVSQKWKQRAKLALAGEQRLTRNVPGWIDPDTFKCNEHAETVRLIFKLLLDGESLHNIARHLQSNDIKSFSRRKDANGFSVHSVRTVLRSESVIGTLPASQRNDRPAIPNYYEAAIDASTFNKAQEILDKNRKGRTPASDNPLTINIFKGLFRCQCGASVHPTGTKNKYAGVYRCNNHLDGRCDVPPLKRKPFDKWMLENFLGMIDVGNDGEAEGKIASLQHEVEIVTTRIKKATALLLEMDDIDELKIQLKELNQKRTELQTTIDNMRRKASLTDKELPQLKDIDLTTKAGRVECQLILSKHLKGLTLGKDSVTVTLQNDTEITIPTNPLPLNDGSPIFEIADKELLDIDAYQL

SEQ ID NO: 31627 - DNA, 50 bp, Escherichia coli; identical to SEQ ID NO: 30087
  source 1..50: mol_type = genomic DNA

SEQ ID NO: 31628 - DNA, 40 bp, Escherichia coli; identical to SEQ ID NO: 20043
  source 1..40: mol_type = genomic DNA

SEQ ID NO: 31629 - DNA, 40 bp, Escherichia coli; identical to SEQ ID NO: 30164
  source 1..40: mol_type = genomic DNA

SEQ ID NO: 31630 - DNA, 50 bp, Escherichia coli; identical to SEQ ID NO: 7690
  source 1..50: mol_type = genomic DNA

SEQ ID NO: 31631 - protein, 506 aa, Escherichia coli
MRHVITYLRYSSAIQGAEGADSTRRQNDLFKQWLKKNSDAQVVASFSDEGLSGYKGKHLTGQFGDMLARIESGEFPAGTILLVESIDRIGRLEHLETEALMNRILGNGIEIHTLQDGLIYTKDALADDLGISIIQRVKAYIAHQESKQKSFRVSQKWGQRAKLALAGEQRLTKMVPGWIDPDTFKCNEHAETVRLIFKLLLDGESLHNIARHLQSNDIKSFSRRKDANGFSVHSVRTVLRSESVIGTLPASQRNDRPAIPNYYEAAIDAATFNKAQEILDKNRKGRTPASDNPLTINIFKGLFRCQCGASVHPTGTKNKYAGVYRCNNHLDGRCDVPPLKRKPFDRWMIDNFLGMIDVGNDGESERKIAALQHEVEIVTARIKKATALLLEMDDITELKTQVKGLNQKRTELQTTIDNMRRKASLTDKELPQLKDIDLTTKAGRVECQLILSKHLKGLTLGKDSVIVTLQNDTEITIPTNPLPLNDGSPIFEIADKELLDIDAYQL

SEQ ID NO: 31632 - DNA, 50 bp, Escherichia coli; identical to SEQ ID NO: 30087
  source 1..50: mol_type = genomic DNA

SEQ ID NO: 31633 - DNA, 40 bp, Escherichia coli; identical to SEQ ID NO: 20043
  source 1..40: mol_type = genomic DNA

SEQ ID NO: 31634 - DNA, 40 bp, Escherichia coli; identical to SEQ ID NO: 30164
  source 1..40: mol_type = genomic DNA

SEQ ID NO: 31635 - DNA, 50 bp, Escherichia coli; identical to SEQ ID NO: 7690
  source 1..50: mol_type = genomic DNA

SEQ ID NO: 31636 - protein, 506 aa, Escherichia coli
MRHVITYLRYSSAIQGAEGADSTRRQNELFKQWLRKNSDAQVVASFSDEGLSGYKGKHLTGQFGDMLARIEAGEFPAGTILLVESIDRIGRLEHLETEALMNRILGNGIEIHTLQDGLIYTRDALSDDLGISIIQRVKAYIAHQESKQKSFRVSQKWEQRAKLALAGEQRLTKMVPGWIDPDTFKCNEHAETVRLIFKLLLDGESLHNIARHLQANNISSFSRRKDANGFSVHSVRTILRSETTRGTLPASQRNDRPAIPNYYEAAIDAATFNKAQEILDKNRKGRTPASDNPLTINIFKGLFRCQCGASVHPTGTKNKYAGVYRCNNHLDGRCDVPPLKRKPFDRWMIDNFLGMIDVGNDGESERKIAALQHEVEIVTARIKKATALLLEMDDIDELKIQLKELNQKRTELQTTIDSMRRKTSLSDKGLPQLKDIDLMTKAGRVECQLILSKHLKGLTLGKDSVTVTLQNDTEITIPTNPLPLNDGTSIFEIADKELLDIDAYQL

SEQ ID NO: 31637 - DNA, 50 bp, Escherichia coli; identical to SEQ ID NO: 30087
  source 1..50: mol_type = genomic DNA

SEQ ID NO: 31638 - DNA, 40 bp, Escherichia coli; identical to SEQ ID NO: 20043
  source 1..40: mol_type = genomic DNA

SEQ ID NO: 31639 - DNA, 40 bp, Escherichia coli; identical to SEQ ID NO: 30164
  source 1..40: mol_type = genomic DNA

SEQ ID NO: 31640 - DNA, 50 bp, Escherichia coli; identical to SEQ ID NO: 7690
  source 1..50: mol_type = genomic DNA

SEQ ID NO: 31641 - protein, 506 aa, Escherichia coli
MRHVITYLRYSSAIQGAEGADSTRRQNDLFKQWLKKNSDAQVVASFNDEGLSGYKGKHLSGQFGDMLSRIESGEFSAGTILLVESIDRIGRLEHLETEALMNRILGNGIEIHTLQDGLIYTKDALADDLGISIIQRVKAYIAHQESKQKSFRVSQKWEQRAKLALAGEQRLTKMVPGWIDPDTFKLNEHAETVRLIFKLLLDGESLHNIARHLQSNGIKSFSRRKDANGFSVHSVRTILRSVTTRGTLPASQRNDRPAIPNYYEAAIDAATFNKAQEILDKNRKGRTPASDNPLTINIFKGLFRCQCGASVHPTGTKNKYQGVYRCNNHLDGRCDVPPLKRKPFDRWMIDNFLGMIDVGNDGESERKIAALQHEVEIVTSRIKKATALLLEMDDITELKAQVKELNQKRTELQTTINTMKRKTSLSDKGLPQLKDIDLMTKAGRVECQLILSKHLKGLTLGKDSVTVTLQNDTEITIPTNPLPLNDGSPIFEIADKELLDIDAYQL

SEQ ID NO: 31642 - DNA, 50 bp, Escherichia coli; identical to SEQ ID NO: 30087
  source 1..50: mol_type = genomic DNA

SEQ ID NO: 31643 - DNA, 40 bp, Escherichia coli; identical to SEQ ID NO: 20043
  source 1..40: mol_type = genomic DNA

SEQ ID NO: 31644 - DNA, 40 bp, Escherichia coli; identical to SEQ ID NO: 30164
  source 1..40: mol_type = genomic DNA

SEQ ID NO: 31645 - DNA, 50 bp, Escherichia coli; identical to SEQ ID NO: 7690
  source 1..50: mol_type = genomic DNA

SEQ ID NO: 31646 - protein, 506 aa, Escherichia coli
MRSVITYLRFSSAIQGAEGADSTRRQNDLFKQWLKKNSDAQVVASFSDEGLSGYKGKHLTGQFGDMLARIEAGEFSEGTVLLVEAIDRIGRLEHLETEALMNRIIAHGIEIHTLQDGLIYTRDALSDDLGISIIQRVKSYVAHQESKQKSFRVSQKWKQRAKLALAGEQRLTRNVPGWIDPDTFKCNEHAETVRLIFKLLLSGESLHNIARHLQANNISSFSRRKDANGFSVHSVRTVLRSESVIGTLPASQRNDRPAIPNYYEAAIDAATFNKAQEILDKNRKGRTPASDNPLTINIFKGLFRCQCGASVHPTGTKNKYAGVYRCNNNPDGRCDVPPLKRKPFDKWMLENFLGMIDVGNDGEAEGKIASLQHEVEIVTTRIKKATALLLEMDDITELKAQVKELNQKRTELQTTIDSMRRKTSLTDKELPQLKDIDLTTKAGRVECQLILSKHLKGLTLGKDSVIVTLQNDTEITIPTNPLPLNDGTSIFEIAEKELLEIDAYQL

SEQ ID NO: 31647 - DNA, 50 bp, Escherichia coli; identical to SEQ ID NO: 30087
  source 1..50: mol_type = genomic DNA

SEQ ID NO: 31648 - DNA, 40 bp, Escherichia coli; identical to SEQ ID NO: 20043
  source 1..40: mol_type = genomic DNA

SEQ ID NO: 31649 - DNA, 40 bp, Escherichia coli; identical to SEQ ID NO: 30164
  source 1..40: mol_type = genomic DNA

SEQ ID NO: 31650 - DNA, 50 bp, Escherichia coli; identical to SEQ ID NO: 7690
  source 1..50: mol_type = genomic DNA

SEQ ID NO: 31651 - protein, 506 aa, Escherichia coli
MRSVITYLRFSSATQGAEGADSTRRQNELFKQWLRKNSDAQVVASFNDEGLSGYKGKHLSGQFGDMLSRIESGEFSKGTILLVEAIDRIGRLEHLETEALMNRIIAHGIEIHTLQDGLIYTRDALSDDLGISIIQRVKSYLAHQESKQKSFRVSEKWKQRAKLALAGEQRLTKMVPGWIDPETFKLNEHAETVRLIFKLLLDGESLHNIARHLQANNISSFSRRKDANGFSVHSVRTILRSETTRGTLPASQRNDRPAIPNYYEAAIDAATFNKAQEILDKNRKGRTPASDNPLTINIFKGLFRCQCGASVHPTGTKNKYAGVYRCNNHLDGRCHVPPLKRKPFDKWMIDNFLGMIDVGNDGEAEGKIASLQHEVEIVTTRIKKATALLLEMDDIDELKIQLKELNQKRTELQTTIDNMRRKASLTDKELPQLKDIDLTTKAGRVECQLILSKHLKGLTLGKDSVTVTLQNDTEITIPTDPLPLNDGTSIFEIAEKNLLNIDTFQL

SEQ ID NO: 31652 - DNA, 50 bp, Escherichia coli; identical to SEQ ID NO: 30087
  source 1..50: mol_type = genomic DNA

SEQ ID NO: 31653 - DNA, 40 bp, Escherichia coli; identical to SEQ ID NO: 20043
  source 1..40: mol_type = genomic DNA

SEQ ID NO: 31654 - DNA, 40 bp, Escherichia coli; identical to SEQ ID NO: 30164
  source 1..40: mol_type = genomic DNA

SEQ ID NO: 31655 - DNA, 50 bp, Escherichia coli; identical to SEQ ID NO: 7690
  source 1..50: mol_type = genomic DNA

SEQ ID NO: 31656 - protein, 506 aa, Escherichia coli
MRTVITYLRFSSATQGAEGADSTRRQNELFKQWLRKNSDAQVVASFNDEGLSGYKGKHLSGQFGDMLSRIESGEFPEGTILLVEAIDRIGRLEHLETEALMNRIIAHGIEIHTLQDGLIYTRDALSDDLGISIIQRVKSYLAHQESKQKSFRVSEKWKQRAKLALAGKQRLTKMVPGWIDPDTLKLNEHAETVRLIFKLLLSGESLHNIARHLQANNISSFSRRKDANGFSVHSVRTVLRSESVIGTLPASQRNDRPAIPNYYEAAIDAATFNKAQEILDKNRKGRTPASDNPLTINIFKGLFRCQCGASVHPTGTKNKYAGVYRCNNHLDGRCDVPPLKRKPFDKWMIDNFLGMIDVGNDGEAEGKIASLQHEVEIVTTRIKKATALLLEMDDITELKTQVKELNQKRTELQTTIDSMRRKTSLSDKGLPQLKDIDLMTKEGRVECQLILSKHLKGLTLGKDSVTVTLQNDTEITIPTNPLPLNDGTSIFEIADKELLDIDAFRL

SEQ ID NO: 31657 - DNA, 50 bp, Escherichia coli; identical to SEQ ID NO: 30087
  source 1..50: mol_type = genomic DNA

SEQ ID NO: 31658 - DNA, 40 bp, Escherichia coli; identical to SEQ ID NO: 20043
  source 1..40: mol_type = genomic DNA

SEQ ID NO: 31659 - DNA, 40 bp, Escherichia coli; identical to SEQ ID NO: 30164
  source 1..40: mol_type = genomic DNA

SEQ ID NO: 31660 - DNA, 50 bp, Escherichia coli; identical to SEQ ID NO: 7690
  source 1..50: mol_type = genomic DNA

SEQ ID NO: 31661 - protein, 506 aa, Escherichia coli
MRSVITYLRFSSATQGAEGADSTRRQNELFKQWLRKNSDAQVVASFNDEGLSGYKGKHLSGQFGDMLSRIESGEFSEGTILLVEAIDRIGRLEHLETEALMNRILGNGIEIHTLQDGLIYTKDALADDLGISIIQRVKAYIAHQESKQKSFRVSQKWGQRAKLALAGKQRLTKMVPGWIDPETFEVNEHAETVRLIFKLLLDGESLHNIARHLQANNISSFSRRKDANGFSVHSVRTILRSETTIGTLPASQRNDRPAIPNYYEAAIDAATFNKAQEILDKNRKGRTPASDNPLTINIFKGLFRCQCGASVHPTGTKNKYQGVYRCNNHLDGRCDVPPLKRKPFDRWMIDNFLGMIDVGNDGESERKIAALQHEVEIVTARIKKATALLLEMDDITELKTQVKGLNQKRTELQTTIDNMRRKASLTDKELPQLKDIDLTTKAGRVECQLILSKHLKGLTLGKDSVTVTLQNDTEITIPTNPLPLNDGTSIFEIAEKELLEIDAYQL

SEQ ID NO: 31662 - DNA, 50 bp, Escherichia coli; identical to SEQ ID NO: 30087
  source 1..50: mol_type = genomic DNA

SEQ ID NO: 31663 - DNA, 40 bp, Escherichia coli; identical to SEQ ID NO: 20043
  source 1..40: mol_type = genomic DNA

SEQ ID NO: 31664 - DNA, 40 bp, Escherichia coli; identical to SEQ ID NO: 30164
  source 1..40: mol_type = genomic DNA

SEQ ID NO: 31665 - DNA, 50 bp, Escherichia coli; identical to SEQ ID NO: 7690
  source 1..50: mol_type = genomic DNA

SEQ ID NO: 31666 - protein, 506 aa, Escherichia coli
MRSVITYLRFSSATQGAEGADSTRRQNELFKQWLRKNSDAQVVASFNDEGLSGYKGKHLSGQFGDMLSRIESGEFSEGTILLVEAIDRIGRLEHLETEALMNRILGNGIEIHTLQDGLIYTKDALADDLGISIIQRVKAYIAHQESKQKSFRVSQKWGQRAKLALAGEQRLTKMVPGWIDPETFKANEHAETVRLIFKLLLDGESLHNIARHLQANNISSFSRRKDANGFSVHSVRTILRSETTIGTLPASQRNDRPAIPNYYEAAIDVSTFNKAQEILDKNRKGRTPASDNPLTINIFKGLFRCQCGASVHPTGTKNKYQGVYRCNNHLDGRCDVQPLKRKPFDRWMIDNFLGMIDVGNDGESERKIAALQHEVEIVTARIKKATALLLEMDDIDELKIQLKELNQKRTELQTTIDNMRRKASLTDKELPQLKDIDLTTKAGRVECQLILSKHLKGLTLGKDTVTVTLQNDTEITIPTDPLPLNDGTSIFEIAEKNLLNIDTFQL

SEQ ID NO: 31667 - DNA, 50 bp, Escherichia coli; identical to SEQ ID NO: 30087
  source 1..50: mol_type = genomic DNA

SEQ ID NO: 31668 - DNA, 40 bp, Escherichia coli; identical to SEQ ID NO: 20043
  source 1..40: mol_type = genomic DNA

SEQ ID NO: 31669 - DNA, 40 bp, Escherichia coli; identical to SEQ ID NO: 30164
  source 1..40: mol_type = genomic DNA

SEQ ID NO: 31670 - DNA, 50 bp, Escherichia coli; identical to SEQ ID NO: 7690
  source 1..50: mol_type = genomic DNA

SEQ ID NO: 31671 - protein, 506 aa, Escherichia coli
MRSVITYLRYSSAIQGAEGADSTRRQNDLFKQWLKKNGDAQIVASFSDEGLSGYKGKHLTGQFGDMLARIEAGEFPEGTILLVESIDRIGRLEHLETEALMNRILGNGIEIHTLQDGLIYTKDALADDLGISIIQRVKAYIAHQESKQKSFRVSQKWGHRAKLALAGEQRLTKMVPGWIDPDTFKCNEHAETVRLIFKLLLDGESLHNIARHLQANNISSFSRRKDANGFSVHSVRTILRSETTRGTLPASQRNDRPAISNYYEAAIDAATFNKAQEILDKNRKGRTPASDNPLTINIFKGLFRCQCGASVHPTGTKNKYAGVYRCNNHLDGRCDVPPLKRKPFDKWMIDNFLGMIDVGNDGESERKIAALQHEVEIVTARIKKATALLLEMDDIDELKIQIKELNQRRTELQTTIDSMRRKTSLTDKELPQLKDIDLTTKAGRVECQLILSKHLKGLTLGKDSVTVTLQNDTEITIPTNPLPLNDGSPIFEIADKELLDIDAYQL

SEQ ID NO: 31672 - DNA, 50 bp, Escherichia coli; identical to SEQ ID NO: 30087
  source 1..50: mol_type = genomic DNA

SEQ ID NO: 31673 - DNA, 40 bp, Escherichia coli; identical to SEQ ID NO: 20043
  source 1..40: mol_type = genomic DNA

SEQ ID NO: 31674 - DNA, 40 bp, Escherichia coli; identical to SEQ ID NO: 30164
  source 1..40: mol_type = genomic DNA

SEQ ID NO: 31675 - DNA, 50 bp, Escherichia coli; identical to SEQ ID NO: 7690
  source 1..50: mol_type = genomic DNA

SEQ ID NO: 31676 - protein, 506 aa, Escherichia coli
MRTVITYLRFSSATQGAEGADSTRRQNDLFKQWLKKNSDAQVVASFSDEGLSGYKGKHLTGQFGDMLARIESGEFPEGTILLVEAIDRIGRLEHLETEALMNRIIAHGIEIHTLQDGLIYTRDALSDDLGISIIQRVKSYVAHQESKQKSFRVSQKWKQRAKLALAGKQRLTKMVPGWIDPETLKINEHAETVRLIFKLLLDGESLHNIARHLQANNISSFSRRKDANGFSVHSVRTILRSETTIGTLPASQRNDRPAIPNYYEAAIDASTFNKAQEILDKNRKGRTPASDNPLTINIFKGLFRCQCGASVHPTGTKNKYAGVYRCNNHLDGRCDVPPLKRKPFDRWMIDNFLGMIDVVSDGETERRLAELQHEVEIVTARIKKATALLLEMDDIDELKIQLKELNQKRTELQTTIDNMRRKASLTDKELPQLKDIDLTTKAGRVECQLILSKHLKGLTLGKDSVTVTLQNDTEITIPTNPLPLNDGSPIFEIADKELLDIDAYQL

SEQ ID NO: 31677 - DNA, 50 bp, Escherichia coli; identical to SEQ ID NO: 30087
  source 1..50: mol_type = genomic DNA

SEQ ID NO: 31678 - DNA, 40 bp, Escherichia coli; identical to SEQ ID NO: 20043
  source 1..40: mol_type = genomic DNA

SEQ ID NO: 31679 - DNA, 40 bp, Escherichia coli; identical to SEQ ID NO: 30164
  source 1..40: mol_type = genomic DNA

SEQ ID NO: 31680 - DNA, 50 bp, Escherichia coli; identical to SEQ ID NO: 7690
  source 1..50: mol_type = genomic DNA

SEQ ID NO: 31681 - protein, 506 aa, Escherichia coli
MRTVITYLRFSSAIQGAEGADSTRRQNDLFKQWLKKNSDAQVVASFSDEGLSGYKGKHLTGQFGDMLARIEAGEFPASTILLVESIDRIGRLEHLETEALMNRILGNGIEIHTLQDGLIYTKDALADDLGISIIQRVKAYIAHQESKQKSFRVSQKWEQRAKLALAGEQRLTKMVPGWIDPDTFKCNEHAETVRLIFKLLLDGESLHNIARHLQANNISSFSRRKDANGFSVHSVRTILRSETTIGTLPASQRNDRPAIPNYYEASIDVSTFNKAQEILDKNRKGRTPASDNPLTINIFKGLFRCQCGASVHPTGTKNKYAGVYRCNNHLDGRCDVPPLKRKPFDKWMIDNFLGMIDVGNDGEAEGKIASLQHEVEIVTTRIKKATALLLEMDDITELKTQVKELNQKRTELQTMIDNMRRKASLTDKELPQLKDIDLMTKAGRVECQLILSKHLKGLTLGKDSVTVTLQNDTEITIPTNPLPLNDGTSIFEIADKELLDIDAFRL

SEQ ID NO: 31682 - DNA, 50 bp, Escherichia coli; identical to SEQ ID NO: 30087
  source 1..50: mol_type = genomic DNA

SEQ ID NO: 31683 - DNA, 40 bp, Escherichia coli; identical to SEQ ID NO: 20043
  source 1..40: mol_type = genomic DNA

SEQ ID NO: 31684 - DNA, 40 bp, Escherichia coli; identical to SEQ ID NO: 30164
  source 1..40: mol_type = genomic DNA

SEQ ID NO: 31685 - DNA, 50 bp, Escherichia coli; identical to SEQ ID NO: 7690
  source 1..50: mol_type = genomic DNA

SEQ ID NO: 31686 - protein, 506 aa, Escherichia coli
MRSVITYLRYSSAIQGAEGADSTRRQNDLFKQWLKKNSDAQVVASFSDEGLSGYKGKHLTGQFGDMLARIEAGEFPASTILLVESIDRIGRLEHLETEALMNRILGNGIEIHTLQDGLIYTKDALADDLGISIIQRVKAYIAHQESKQKSFRVSQKWEQRAKLALAGEQRLTKMVPGWIDPDTFKCNEHAETVRLIFKLLLDGESLHNIARHLQANNISSFSRRKDANGFSVHSVRTILRSETTIGTLPASQRNDRPAIPNYYEAAIDVSTFNKAQEILDKNRKGRTPASDNPLTINIFKGLFRCQCGASVHPTGTKNKYAGVYRCNNNPDGRCDVPPLKRKPFDRWMIDNFLGMIDVGNDGEAEGKIASLQHEVEIVTARIKKATALLLEMDDITELKTQVKGLNQKRTELQTTIDNMRRKASLTDKELPQLKDIDLTTKAGRVECQLILSKHLKGLTLGKDSVTVTLQNDTEITIPTNPLPLNDGSPIFEIADKELLDIDAYQL

SEQ ID NO: 31687 - DNA, 50 bp, Escherichia coli; identical to SEQ ID NO: 30087
  source 1..50: mol_type = genomic DNA

SEQ ID NO: 31688 - DNA, 40 bp, Escherichia coli; identical to SEQ ID NO: 20043
  source 1..40: mol_type = genomic DNA

SEQ ID NO: 31689 - DNA, 40 bp, Escherichia coli; identical to SEQ ID NO: 30164
  source 1..40: mol_type = genomic DNA

SEQ ID NO: 31690 - DNA, 50 bp, Escherichia coli; identical to SEQ ID NO: 7690
  source 1..50: mol_type = genomic DNA

SEQ ID NO: 31691 - protein, 506 aa, Escherichia coli
MRSVITYLRFSSAIQGAEGADSTRRQNDLFKQWLKKNSDAQVVASFSDEGLSGYKGKHLSGQFGDMLSRIESGEFSEGTILLVEAIDRIGRLEHLETEALMNRIIAHGIEIHTLQDGLIYTRDALSDDLGISIIQRVKSYIAHQESKQKSFRVSQKWGQRAKLALAGKQRLTKMVPGWIDPETFEVNEHAETVRLIFKLLLDGESLHNIARHLQANNISSFSRRKDANGFSVHSVRTILRSETTIGTLPASQRNDRPAIPNYYEAAIDAATFNKAQEILDKNRKGRTPASDNPLTINIFKGLFRCQCGASVHPTGTKNKYQGVYRCNNHLDGRCDVPPLKRKPFDKWMIDNFLGMIDVGNDGEAEGKIAALQHEVEIVTARIKKATALLLEMDDIDELKIQLKELNQKRTELQTTIDNMRRKASLTDKELPQLKDIDLTTKAGRVECQLILSKHLKGLTLGKDTVTVTLQNDTEITIPTDPLPLNDGTSIFEIAEKNLLNIDTFQL

SEQ ID NO: 31692 - DNA, 50 bp, Escherichia coli; identical to SEQ ID NO: 30087
  source 1..50: mol_type = genomic DNA

SEQ ID NO: 31693 - DNA, 40 bp, Escherichia coli; identical to SEQ ID NO: 20043
  source 1..40: mol_type = genomic DNA

SEQ ID NO: 31694 - DNA, 40 bp, Escherichia coli; identical to SEQ ID NO: 30164
  source 1..40: mol_type = genomic DNA

SEQ ID NO: 31695 - DNA, 50 bp, Escherichia coli; identical to SEQ ID NO: 7690
  source 1..50: mol_type = genomic DNA

SEQ ID NO: 31696 - protein, 506 aa, Escherichia coli; identical to SEQ ID NO: 30251

SEQ ID NO: 31697 - DNA, 50 bp, Escherichia coli
  source 1..50: mol_type = genomic DNA
aaaccgaatagacctcattcaagggtcattgtattgtagctattcggcat

SEQ ID NO: 31698 - DNA, 40 bp, Escherichia coli
  source 1..40: mol_type = genomic DNA
gcggcgaggcaaatcaagggtcattgaagtcataatcatt

SEQ ID NO: 31699 - DNA, 40 bp, Escherichia coli
  source 1..40: mol_type = genomic DNA
gcggcgaggcaaatcaaggtgcattgaagtcataatcatt

SEQ ID NO: 31700 - DNA, 50 bp, Escherichia coli; identical to SEQ ID NO: 7690
  source 1..50: mol_type = genomic DNA

SEQ ID NO: 31701 - protein, 499 aa, Escherichia coli
MRFSSATQGAEGADSTRRQNELFKQWLRKNSDAQVVASFNDEGLSGYKGKHLSGQFGDMLSRIESGEFPEGTILLVEAIDRIGRLEHLETEALMNRIIAHGIEIHTLQDGLIYTRDALSDDLGISIIQRVKSYLAHQESKQKSFRVSEKWKQRAKLTLAGEQRLTKMVPGWIDPDTFKCNEHAETVRLIFKLLLDGESLHNIARHLQSNDIKSFSRRKDANGFSVHSVRTVLRSESVIGTLPASQRNDRPAIPNYYEAAIDAATFNKAQEILDKNRKGRTPASDNPLTINIFKGLFRCQCGASVHPTGTKNKYAGVYRCNNNPDGRCDVPPLKRKPFDKWMIDNFLGMIDVGNDGEAEGKIASLQHEVEIVTARIKKATALLLEMDDIDELKIQLKELNQKRTELQTMIDNMRRKASLTDKELPQLKDIDLMTKAGRVECQLILSKHLKGLTLGKDSVTVTLQNDTEIIVPTDPLPLNDGTSIFEIAEKELLEIDAYQL

SEQ ID NO: 31702 - DNA, 50 bp, Escherichia coli; identical to SEQ ID NO: 30087
  source 1..50: mol_type = genomic DNA

SEQ ID NO: 31703 - DNA, 40 bp, Escherichia coli; identical to SEQ ID NO: 20043
  source 1..40: mol_type = genomic DNA

SEQ ID NO: 31704 - DNA, 40 bp, Escherichia coli; identical to SEQ ID NO: 30164
  source 1..40: mol_type = genomic DNA

SEQ ID NO: 31705 - DNA, 50 bp, Escherichia coli; identical to SEQ ID NO: 7690
  source 1..50: mol_type = genomic DNA

SEQ ID NO: 31706 - protein, 506 aa, Escherichia coli
MRHVITYLRYSSAIQGAEGADSTRRQNDLFKQWLKKNSDAQVVASFNDEGLSGYKGKHLSGQFGDMLSRIESGEFPEGTILLVEAIDRIGRLEHLETEALMNRIIAHGIEIHTLQDGLIYTRDALSDDLGISIIQRVKSYIAHQESKQKSFRVSEKWKQRAKLALAGKQRLTKMVPGWIDPDTFKLNEHAETVRLIFKLLLDGESLHNIARHLQANNISSFSRRKDANGFSVHSVRTILRSETTIGTLPASQRNDRPAIPNYYEAAIDAATFNKAQEILDKNRKGRTPASDNPLTINIFKGLFRCQCGASVHPTGTKNKYAGVYRCNNNPDGRCDVPPLKRKPFDKWMIDNFLGMIDVGNDGEAEGKIAALQHEVEIVTARIKKATALLLEMDDITELKTQVKGLNQKRTELQTTIDNMRRKASLTDKELPQLKDIDLTTKAGRVECQLILSKHLKGLTLGKDTVTVTLQNDTEITIPTDPLPLNDGTSIFEIAEKNLLNIDTFQL

SEQ ID NO: 31707 - DNA, 50 bp, Escherichia coli; identical to SEQ ID NO: 30087
  source 1..50: mol_type = genomic DNA

SEQ ID NO: 31708 - DNA, 40 bp, Escherichia coli; identical to SEQ ID NO: 20043
  source 1..40: mol_type = genomic DNA

SEQ ID NO: 31709 - DNA, 40 bp, Escherichia coli; identical to SEQ ID NO: 30164
  source 1..40: mol_type = genomic DNA

SEQ ID NO: 31710 - DNA, 50 bp, Escherichia coli; identical to SEQ ID NO: 7690
  source 1..50: mol_type = genomic DNA

SEQ ID NO: 31711 - protein, 506 aa, Escherichia coli
MRHVITYLRYSSAIQGAEGADSTRRQNELFKQWLRKNSDAQVVASFSDEGLSGYKGKHLTGQFGDMLARIEAGEFPAGTILLVESIDRIGRLEHLETEALMNRILGNGLEIHTLQDGLIYTKDALADDLGISIIQRVKAYIAHQESKQKSFRVSQKWEQRAKLALAGEQRLTKMVPGWIDPDTFKCNEHAETVRLIFKLLLDGESLHNIARHLQSNDIKSFSRRKDANGFSVHSVRTVLRSESVIGTLPASQRNDRPAIPNYYEAAIDAATFNKAQEILDKNRKGRTPASDNPLTINIFKGLFRCQCGASVHPTGTKNKYQGVYRCNNHLDGRCDVPPLKRKPFDKWMIDNFLGMIDVGNDGEAEGKIAALQHEVEIVTARIKKATALLLEMDDIDELKIQLKELNQKRTELQTTIDNMRRKASLTDKELPQLKDIDLMTKAGRVECQLILSKHLKGLTLGKDSVTVTLQNDTEITIPTNPLPLNDGTSIFEIAEKELLEIDAYQL

SEQ ID NO: 31712 - DNA, 50 bp, Escherichia coli; identical to SEQ ID NO: 30087
  source 1..50: mol_type = genomic DNA

SEQ ID NO: 31713 - DNA, 40 bp, Escherichia coli; identical to SEQ ID NO: 20043
  source 1..40: mol_type = genomic DNA

SEQ ID NO: 31714 - DNA, 40 bp, Escherichia coli; identical to SEQ ID NO: 30164
  source 1..40: mol_type = genomic DNA

SEQ ID NO: 31715 - DNA, 50 bp, Escherichia coli; identical to SEQ ID NO: 7690
  source 1..50: mol_type = genomic DNA

SEQ ID NO: 31716 - protein, 506 aa, Escherichia coli
MRTVITYLRYSSAIQGAEGADSTRRQNDLFKQWLKKNSDAQVVASFSDEGLSGYKGKHLTGQFGDMLARIESGEFPEGTILLVEAIDRIGRLEHLETEALMNRIIAHGIEIHTLQDGLIYTRDALSDDLGISIIQRVKSYVAHQESKQKSFRVSQKWKQRAKLALAGEQRLTKMVPGWIDPDTFKCNEHAETVRLIFKLLLSGESLHNIARHLQANNISSFSRRKDANGFSVHSVRTVLRSESVIGTLPASQRNDRPAIPNYYEAAIDAATFNKAQEILDKNRKGRTPASDNPLTINIFKGLFRCQCGASVHPTGTKNKYQGVYRCNNHLDGRCDVPPLKRKPFDKWMIDNFLGMIDVGNDGEAEGKIASLQHEVEIVTTRIKKATALLLEMDDITELKAQVKELNQKRTELQTTIDSMRRKTSLTDKELPQLKDIDLTTKAGRVECQLILSKHLKGLTLGKDSVIVTLQNDTEITIPTNPLPLHDGTSIFEIAEKELLEIDAYQL

SEQ ID NO: 31717 - DNA, 50 bp, Escherichia coli; identical to SEQ ID NO: 30087
  source 1..50: mol_type = genomic DNA

SEQ ID NO: 31718 - DNA, 40 bp, Escherichia coli; identical to SEQ ID NO: 20043
  source 1..40: mol_type = genomic DNA

SEQ ID NO: 31719 - DNA, 40 bp, Escherichia coli; identical to SEQ ID NO: 30164
  source 1..40: mol_type = genomic DNA

SEQ ID NO: 31720 - DNA, 50 bp, Escherichia coli; identical to SEQ ID NO: 7690
  source 1..50: mol_type = genomic DNA

SEQ ID NO: 31721 - protein, 506 aa, Escherichia coli
MRHVITYLRYSSAIQGAEGADSTRRQNDLFKQWLKKNSDAQVVASFNDEGLSGYKGKHLSGQFGDMLSRIESGEFSEGTILLVEAIDRIGRLEHLETEALMNRILGNGIEIHTLQDGLIYTKDALADDLGISIIQRVKAYIAHQESKQKSFRVSQKWEQRAKLALAGEQRLTKMVPGWIDPDTFKLNEHAETVRLIFKLLLDGESLHNIARHLQSNDIKSFSRRKDANGFSVHSVRTILRSETTIGTLPASQRNDRPAIPNYYEAAIDVSTFNKAQEILDKNRKGRTPASDNPLTINIFKGLFRCQCGASVHPTGTKNKYAGVYRCNNHLDGRCDVPPLKRKPFDRWMIDNFLGMIDVGNDGESERKIAALQHEVEIVTARIKKATALLLEMDDITELKAQVKGLNQKRTEIQTTIDTLKRKTSLTDKELPQLKDIDLTTKAGRVECQLILSKHLKGLTLGKDSVTVTLQNDTEITIPTNPLPLNDGSPIFEIADKELLDIDAYQL

SEQ ID NO: 31722 - DNA, 50 bp, Escherichia coli; identical to SEQ ID NO: 30087
  source 1..50: mol_type = genomic DNA

SEQ ID NO: 31723 - DNA, 40 bp, Escherichia coli; identical to SEQ ID NO: 20043
  source 1..40: mol_type = genomic DNA

SEQ ID NO: 31724 - DNA, 40 bp, Escherichia coli; identical to SEQ ID NO: 30164
  source 1..40: mol_type = genomic DNA

SEQ ID NO: 31725 - DNA, 50 bp, Escherichia coli; identical to SEQ ID NO: 7690
  source 1..50: mol_type = genomic DNA

SEQ ID NO: 31726 - protein, 506 aa, Escherichia coli
MRSVITYLRYSSAIQGAEGADSTRRQNDLFKQWLKKNSDAQVVASFSDEGLSGYKGKHLTGQFGDMLARIESGEFSKGTILLVESIDRIGRLEHLETEALMNRILGNGLEIHTLQDGLIYTKDALVDDLGISIIQRVKAYIAHQESKQKSFRVSEKWKQRAKLALAGEQRLTKMVPGWIDPDTLKLNEHAETVRLIFKLLLSGESLHNIARHLQSNGIKSFSRRKDANGFSVHSVRTILRSETTIGTLPASQRNDRPAIPNYYEAAIDAATFNKAQEILDKNRKGRTPASDNPLTINIFKGLFRCQCGASVHPTGTKNKYAGVYRCNNNPDGRCDVPPLKRKPFDRWMLENFLGMIDVGNDGEAEGKIASLQHEVEIVTARIKKATALLLEMDDITELKAQVKGLNQKRTEIQTTIDTLKRKTSLTDKELPQLKDIDLTTKAGRVECQLILSKHLKGLTLGKDSVTVTLQNDTEITIPTNPLPLNDGSPIFEIADKELLDIDAYQL

SEQ ID NO: 31727 - DNA, 50 bp, Escherichia coli; identical to SEQ ID NO: 30087
  source 1..50: mol_type = genomic DNA

SEQ ID NO: 31728 - DNA, 40 bp, Escherichia coli; identical to SEQ ID NO: 20043
  source 1..40: mol_type = genomic DNA

SEQ ID NO: 31729 - DNA, 40 bp, Escherichia coli; identical to SEQ ID NO: 30164
  source 1..40: mol_type = genomic DNA

SEQ ID NO: 31730 - DNA, 50 bp, Escherichia coli; identical to SEQ ID NO: 7690
  source 1..50: mol_type = genomic DNA

SEQ ID NO: 31731 - protein, 506 aa, Escherichia coli
MRTVITYLRFSSAIQGAEGADSTRRQNDLFKQWLKKNSDAQVVASFSDEGLSGYKGKHLSGQFGDMLSRIESGEFSKGTILLVEAIDRIGRLEHLETEALMNRIIAHGIEIHTLQDGLIYTRDALSDDLGISIIQRVKSYLAHQESKQKSFRVSEKWKQRAKLALAGEQRLTKMVPGWIDPETFKLNEHAETVRLIFKLLLDGESLHNIARHLQANNISSFSRRKDANGFSVHSVRTILRSETTRGTLPASQRNDRPAIPNYYEAAIDAATFNKAQEILDKNRKGRTPASDNPLTINIFKGLFRCQCGASVHPTGTKNKYQGVYRCNNHLDGRCDVPPLKRKPFDKWMIDNFLGMIDVGNDGEAEGKIAALQHEVEIVTARIKKATALLLEMDDITELKTQVKGLNQKRTELQTTIDNMRRKASLTDKELPLLKDIDLTTKAGRVECQLILSKHLKGLTLGKDSVTVTLQNDTEITIPTDPLPLNDGTSIFEIAEKNLLNIDTFQL

SEQ ID NO: 31732 - DNA, 50 bp, Escherichia coli; identical to SEQ ID NO: 30087
  source 1..50: mol_type = genomic DNA

SEQ ID NO: 31733 - DNA, 40 bp, Escherichia coli; identical to SEQ ID NO: 20043
  source 1..40: mol_type = genomic DNA

SEQ ID NO: 31734 - DNA, 40 bp, Escherichia coli; identical to SEQ ID NO: 30164
  source 1..40: mol_type = genomic DNA

SEQ ID NO: 31735 - DNA, 50 bp, Escherichia coli; identical to SEQ ID NO: 7690
  source 1..50: mol_type = genomic DNA

SEQ ID NO: 31736 - protein, 506 aa, Escherichia coli
MRTVITYLRFSSATQGAEGADSTRRQNELFKQWLRKNSDAQVVASFNDEGLSGYKGKHLSGQFGDMLSRIESGEFPEGTILLVEAIDRIGRLEHLETEALMNRIIAHGIEIHTLQDGLIYTRDALSDDLGISIIQRVKSYLAHQESKQKSFRVSQKWEQRAKLALAGEQRLTKMVPGWIDPETFKLNEHAETVRLIFKLLLDGESLHNIARHLQANNISSFSRRKDANGFSVHSVRTILRSETTIGTLPASQRNDRPAIPNYYEAAIDAATFNKAQEILDKNRKGRTPASDNPLTINIFKGLFRCQCGASVHPTGTKNKYAGVYRCNNHLDGRCDVPPLKRKPFDKWMIDNFLGMIDVGNDGEAEGKIASLQHEVEIVTARIKKATALLLEMDDITELKAQVKELNQKRTELQTTIDSMRRKTSLSDKGLPQLKDIDLMTKAGRVECQLILSKHLKGLTLGKDSVIVTLQNDTEITIPTNPLPLNDGTSIFEIAEKELLEIDAYQL

SEQ ID NO: 31737 - DNA, 50 bp, Escherichia coli; identical to SEQ ID NO: 30087
  source 1..50: mol_type = genomic DNA

SEQ ID NO: 31738 - DNA, 40 bp, Escherichia coli; identical to SEQ ID NO: 20043
  source 1..40: mol_type = genomic DNA

SEQ ID NO: 31739 - DNA, 40 bp, Escherichia coli; identical to SEQ ID NO: 30164
  source 1..40: mol_type = genomic DNA

SEQ ID NO: 31740 - DNA, 50 bp, Escherichia coli; identical to SEQ ID NO: 7690
  source 1..50: mol_type = genomic DNA

SEQ ID NO: 31741 - protein, 506 aa, Escherichia coli
MRSVITYLRFSSATQGAEGADSTRRQNELFKQWLRKNSDAQVVASFNDEGLSGYKGKHLSGQFGDMLSRIESGEFPEGTILLVEAIDRIGRLEHLETEALMNRIIAHGIEIHTLQDGLIYTRDALSDDLGISIIQRVKSYLAHQESKQKSFRVSEKWKQRAKLALAGKQRLTKMVPGWIDHDTFKINEHAETVRLIFKLLLDGESLHNIARHLQSNGIKSFSRRKDANGFSVHSVRTVLRSESVIGTLPASQRNDRPAIPNYYEAAIDAATFNKAQEILDKNRKGRTPASDNPLTINIFKGLFRCQCGASVHPTGTKNKYAGVYRCNNHLDGRCDVPPLKRKPFDKWMIDNFLGMIDVGNDGESERKIAALQHEVEIVTARIKKATALLLEMDDIDELKIQLKELNQKRTELQTTIDNMRRKASLTDKELPQLKDIDLTTKAGRVECQLILSKHLKGLTLGKDSVTVTLQNDTEITIPTNPLPLNDGSPIFEIADKELLDIDAYQL

SEQ ID NO: 31742 - DNA, 50 bp, Escherichia coli; identical to SEQ ID NO: 30087
  source 1..50: mol_type = genomic DNA

SEQ ID NO: 31743 - DNA, 40 bp, Escherichia coli; identical to SEQ ID NO: 20043
  source 1..40: mol_type = genomic DNA

SEQ ID NO: 31744 - DNA, 40 bp, Escherichia coli; identical to SEQ ID NO: 30164
  source 1..40: mol_type = genomic DNA

SEQ ID NO: 31745 - DNA, 50 bp, Escherichia coli; identical to SEQ ID NO: 7690
  source 1..50: mol_type = genomic DNA

SEQ ID NO: 31746 - protein, 506 aa, Escherichia coli
MRSVITYLRFSSAIQGAEGADSTRRQNDLFKQWLRKNSDAQVVASFSDEGLSGYKGKHLTGQFGDMLARIEAGEFLAGTILLVESIDRIGRLEHLETEALMNRIIAHGIEIHTLQDGLIYTRDALSDDLGISIIQRVKSYLAHQESKQKSFRVSEKWKQRAKLALAGKQRLTKMVPGWIDPDTLKLNEHAETVRLIFKLLLSGESLHNIARHLQSNGIKSFSRRKDANGFSVHSVRTILRSETTIGTLPASQRNDRPAIPNYYEAAIDAATFNKAQEILDKNRKGRTPASDNPLTINIFKGLFRCQCGASVHPTGTKNKYAGVYRCNNHLDGRCDVPPLKRKPFDKWMIDNFLGMIDVGNDGEAEGKIASLQHEVEIVTARIKKATALLLEMDDIDELKIQIKELNQRRTELQTTIDSMRRKASLTDKELPQLKDIDLTTKAGRVECQLILSKHLKGLTLGKGSVTITLQNDTEITIPTNPLPLNDGSPIFEIADKELLDIDAYQL

SEQ ID NO: 31747 - DNA, 50 bp, Escherichia coli; identical to SEQ ID NO: 30087
  source 1..50: mol_type = genomic DNA

SEQ ID NO: 31748 - DNA, 40 bp, Escherichia coli; identical to SEQ ID NO: 20043
  source 1..40: mol_type = genomic DNA

SEQ ID NO: 31749 - DNA, 40 bp, Escherichia coli; identical to SEQ ID NO: 30164
  source 1..40: mol_type = genomic DNA

SEQ ID NO: 31750 - DNA, 50 bp, Escherichia coli; identical to SEQ ID NO: 7690
  source 1..50: mol_type = genomic DNA

SEQ ID NO: 31751 - protein, 506 aa, Escherichia coli
MRSVITYLRFSSAIQGAEGADSTRRQNDLFKQWLKKNSDAQVVASFSDEGLSGYKGKHLTGQFGDMLARIESGEFPEGTILLVESIDRIGRLEHLETEALMNRILGNGLEIHTLQDGLIYTKDALADDLGISIIQRVKAYIAHQESKQKSFRVSEKWKQRAKLALAGEQRLTKMVPGWIDPDTLKLNEHAETVRLIFKLLLSGESLHNIARHLQSNGIKSFSRRKDANGFSVHSVRTILRSETTIGTLPASQRNDRPAIPNYYEAAIDAATFNKAQEILDKNRKGRTPASDNPLTINIFKGLFRCQCGASVHPTGTKNKYAGVYRCNNHLDGRCDVPPLKRKPFDKWMLENFLGMIDVGNDGEAEGKIASLQHEVEIVTARIKKATALLLEMDDIDELKIQLKELNQKRTELQTMIDNMRRKASLTDKELPQLKDIDLTTKAGRVECQLILSKHLKGLTLGKDSVIVTLQNDTEITIPTNPLPLNDGTSIFEIAEKELLEIDAYQL

SEQ ID NO: 31752 - DNA, 50 bp, Escherichia coli; identical to SEQ ID NO: 30087
  source 1..50: mol_type = genomic DNA

SEQ ID NO: 31753 - DNA, 40 bp, Escherichia coli; identical to SEQ ID NO: 20043
  source 1..40: mol_type = genomic DNA

SEQ ID NO: 31754 - DNA, 40 bp, Escherichia coli; identical to SEQ ID NO: 30164
  source 1..40: mol_type = genomic DNA

SEQ ID NO: 31755 - DNA, 50 bp, Escherichia coli; identical to SEQ ID NO: 7690
  source 1..50: mol_type = genomic DNA

SEQ ID NO: 31756 - protein, 506 aa, Escherichia coli
MRSVITYLRFSSATQGAEGADSTRRQNELFKQWLRKNSDAQVVASFSDEGLSGYKGKHLTGQFGDMLARIEAGEFPAGAILLVESIDRIGRLEHLETEALMNRIIAHGIEIHTLQDGLIYTRDALSDDLGISIIQRVKSYLAHQESKQKSFRVSEKWKQRAKLALAGEQRLTKMVPGWIDPDTFKCNEHAETVRLIFKLLLSGESLHNIARHLQANNISSFSRRKDANGFSVHSVRTILRSETTIGTLPASQRNDRPAIPNYYEAAIDVSTFNKAQEILDKNRKGRTPASDNPLTINIFKGLFRCQCGASVHPTGTKNKYAGVYRCNNHLDGRCDVQPLKRKPFDRWMIDNFLGMIDVGNDGESERKIAALQHEVEIVTARIKKATALLLEMDDIDELKIQLKELNQKRTELQTTIDNMRRKASLTDKELPQLKDIDLTTKAGRVECQLILSKHLKGLTLGKDSVTVTLQNDTEITIPTDPLPLNDGTSIFEIAEKELLDIDAYQL

SEQ ID NO: 31757 - DNA, 50 bp, Escherichia coli; identical to SEQ ID NO: 30087
  source 1..50: mol_type = genomic DNA

SEQ ID NO: 31758 - DNA, 40 bp, Escherichia coli; identical to SEQ ID NO: 20043
  source 1..40: mol_type = genomic DNA

SEQ ID NO: 31759 - DNA, 40 bp, Escherichia coli; identical to SEQ ID NO: 30164
  source 1..40: mol_type = genomic DNA

SEQ ID NO: 31760 - DNA, 50 bp, Escherichia coli; identical to SEQ ID NO: 7690
  source 1..50: mol_type = genomic DNA

SEQ ID NO: 31761 - protein, 506 aa, Escherichia coli
MRTVITYLRFSSATQGAEGADSTRRQNELFKQWLRKNSDAQVVASFSDEGLSGYKGKHLTGQFGDMLARIEAGEFPAGAILLVESIDRIGRLEHLETEALMNRIIAHGIEIHTLQDGLIYTRDALSDDLGISIIQRVKSYLAHQESKQKSFRVSEKWKQRAKLALAGEQHLTRNVPGWIDPDTFKCNEHAETVRLIFKLLLDGESLHNIARHLQSNDIKSFSRRKDANGFSVHSVRTVLRSESVIGTLPASQRNDRPAIPNYYEAAIDASTFNKAQEILDKNRKGRTPASDNPLTINIFKGLFRCQCGASVHPTGTKNKYQGVYRCNSHLDGRCDVPPLKRKPFDRWMIDNFLGMIDVGNDGEAEKEIASLQHEVETVTARIKKATALLLEMDDITELKTQVKELNQKRTELQTTINTMKRKTSLSDKGLPQLKDIDLMTKAGRVECQLILSKHLKGLTLGKDSVTVTLQNDTEITISTNPLPLNDGTSIFEIAEKNLLNIDTFQL

SEQ ID NO: 31762 - DNA, 50 bp, Escherichia coli; identical to SEQ ID NO: 30087
  source 1..50: mol_type = genomic DNA

SEQ ID NO: 31763 - DNA, 40 bp, Escherichia coli; identical to SEQ ID NO: 20043
  source 1..40: mol_type = genomic DNA

SEQ ID NO: 31764 - DNA, 40 bp, Escherichia coli; identical to SEQ ID NO: 30164
  source 1..40: mol_type = genomic DNA

SEQ ID NO: 31765 - DNA, 50 bp, Escherichia coli; identical to SEQ ID NO: 7690
  source 1..50: mol_type = genomic DNA

SEQ ID NO: 31766 - protein, 506 aa, Escherichia coli
MRHVITYLRYSSAIQGAEGADSTRRQNDLFKQWLKKNSDAQVVASFNDEGLSGYKGKHLSGQFGDMLSRIESGEFSKGTILLVEAIDRIGRLEHLETEALMNRIIAHGIEIHTLQDGLIYTRDALSDDLGISIIQRVKSYLAHQESKQKSFRVSEKWKQRAKLALAGEQRLTKMVPGWIDPETFKLNEHAETVRLIFKLLLDGESLHNIARHLQANNISSFSRRKDANGFSVHSVRTILRSVTTIGTLPASQRNDRPAIPNYYEAAIDAATFNKAQEILDKNRKGRTPASDNPLTINIFKGLFRCQCGASVHPTGTKNKYAGVYRCNNHLDGRCDVPPLKRKPFDRWMIDNFLGMIDVGNDGEAEGKIAALQHEVEIVTARIKKATALLLEMDDITELKTQVKGLNQKRTELQTTIDNMRRKASLTDKELPQLKDIDLTTKAGRVECQLILSKHLKGLTLGKDSVIVTLQNDTEITIPTDPLPLNDGTSIFEIAEKNLLNIDTFQL

SEQ ID NO: 31767 - DNA, 50 bp, Escherichia coli; identical to SEQ ID NO: 30087
  source 1..50: mol_type = genomic DNA

SEQ ID NO: 31768 - DNA, 40 bp, Escherichia coli; identical to SEQ ID NO: 20043
  source 1..40: mol_type = genomic DNA

SEQ ID NO: 31769 - DNA, 40 bp, Escherichia coli; identical to SEQ ID NO: 30164
  source 1..40: mol_type = genomic DNA

SEQ ID NO: 31770 - DNA, 50 bp, Escherichia coli; identical to SEQ ID NO: 7690
  source 1..50: mol_type = genomic DNA

SEQ ID NO: 31771 - protein, 506 aa, Escherichia coli
MRSVITYLRFSSATQGAEGADSTRRQNELFKQWLRKNSDAQVVASFNDEGLSGYKGKHLTGQFGDMLARIESGEFPEGTILLVEAIDRIGRLEHLETEALMNRILGNGIEIHTLQDGLIYTKDALADDLGISIIQRVKAYIAHQESKQKSFRVSQKWEQRAKLALAGEQRLTRNVPGWIDPDTFKCNEHAETVRLIFKLLLSGESLHNIARHLQSNGIKSFSRRKDANGFSVHSVRTVLRSESVIGTLPASQRNDRPAIPNYYEAAIDASTFNKAQEILDKNRKGRTPASDNPLTINIFKGLFRCQCGASVHPTGTKNKYAGVYRCNNHLDGRCDVPPLKRKPFDKWMIDNFLGMIDVGNDGEAEGKIASLQHEVEIVTARIKKATALLLEMDDITELKAQVKELNQKRTELQTTIDNMRRKASLTDKELPQLKDIDLTTKAGRVECQLILSKHLKGLTLGKDSVIVTLQNDTEITIPTNPLPLNDGTSIFEIAEKELLDIDAYQL

SEQ ID NO: 31772 - DNA, 50 bp, Escherichia coli; identical to SEQ ID NO: 30087
  source 1..50: mol_type = genomic DNA

SEQ ID NO: 31773 - DNA, 40 bp, Escherichia coli; identical to SEQ ID NO: 20043
  source 1..40: mol_type = genomic DNA

SEQ ID NO: 31774 - DNA, 40 bp, Escherichia coli; identical to SEQ ID NO: 30164
  source 1..40: mol_type = genomic DNA

SEQ ID NO: 31775 - DNA, 50 bp, Escherichia coli; identical to SEQ ID NO: 7690
  source 1..50: mol_type = genomic DNA

SEQ ID NO: 31776 - protein, 506 aa, Escherichia coli
MRSVITYLRYSSAIQGVEGADSTRRQNDLFRQWLKKNSDAQIVASFSDEGLSGYKGKHLTGQFGDMLARIESGEFPEGTILLVESIDRIGRLEHLETEALMNRILGNGLEIHTLQDGLIYTKDALADDLGISIIQRVKAYIAHQESKQKSFRVSQKWKQRAKLALAGEQRLTRNVPGWIDPDTFKLNEHAETVRLIFKLLLDGESLHNIARHLQSNGIKSFSRRKDANGFSVHSVRTILRSETTIGTLPASQRNDRPAIPNYYEAAIDASTFNKAQEILGKNRTGRTPASDNPLTINIFKGLFRCQCGASVHPTGTKNKYAGVYRCNNHLDGRCDVPPLKRKPFDKWMLENFLGMIDVGNDGESERKIAALQHEVEIVTSRIKKATALLLEMDDISELKAQVKELNQKRTELQTTIDTLKRKTSLSDKGLPQLKDIDLMTKAGRVECQLILSKHLKGLTLCEGSVVVTLQNDTEITVPTDPLPLNDGASIFEIAEKELLEIDAYQL

SEQ ID NO: 31777 - DNA, 50 bp, Escherichia coli
  source 1..50: mol_type = genomic DNA
aaaccgaatagacgtcattcaagggtcattgtattgtagctattcggcat

SEQ ID NO: 31778 - DNA, 40 bp, Escherichia coli; identical to SEQ ID NO: 20043
  source 1..40: mol_type = genomic DNA

SEQ ID NO: 31779 - DNA, 40 bp, Escherichia coli; identical to SEQ ID NO: 30164
  source 1..40: mol_type = genomic DNA

SEQ ID NO: 31780 - DNA, 50 bp, Escherichia coli; identical to SEQ ID NO: 7690
  source 1..50: mol_type = genomic DNA

SEQ ID NO: 31781 - protein, 506 aa, Escherichia coli
MRSVITYLRFSSAIQGAEGADSTRRQNDLFKQWLKKNSDAQVVASFSDEGLSGYKGKHLTGQFGDMLARIESGEFSEGTVLLVEAIDRIGRLEHLETEALMNRIIAHGIEIHTLQDGLIYTRDALSDDLGISIIQRVKSYVAHQESKQKSFRVSQKWKQRAKLALAGEQRLTRNVPGWIDPDTFKCNEHAETVRLIFKLLLDGESLHNIARHLQSNDIKSFSRRKDANGFSVHSVRTVLRSESVIGTLPASQRNDRPAIPNYYEAAIDAATFNKAQEILDKNRKGRTPASDNPLTINIFKGLFRCQCGASVHPTGTKNKYAGVYRCNNNPDGRCDVPPLKRKPFDKWMIDNFLGMIDVGNDGESERKIAALQHEVEIVTARIKKATALLLEMDDIDELKIQLKELNQKRTELQTTIDSMRRKTSLSDKGLPQLKDIDLMTKAGRVECQLILSKHLKGLTLGKDSVIVTLQNDTEITIPTNPLPLNDGTSIFEIAEKELLEIDAYQL

SEQ ID NO: 31782 - DNA, 50 bp, Escherichia coli; identical to SEQ ID NO: 30087
  source 1..50: mol_type = genomic DNA

SEQ ID NO: 31783 - DNA, 40 bp, Escherichia coli; identical to SEQ ID NO: 20043
  source 1..40: mol_type = genomic DNA

SEQ ID NO: 31784 - DNA, 40 bp, Escherichia coli; identical to SEQ ID NO: 30164
  source 1..40: mol_type = genomic DNA

SEQ ID NO: 31785 - DNA, 50 bp, Escherichia coli; identical to SEQ ID NO: 7690
  source 1..50: mol_type = genomic DNA

SEQ ID NO: 31786 - protein, 506 aa, Escherichia coli
MRTVITYLRFSSAIQGAEGADSTRRQNDLFKQWLKKNSDAQVVASFSDEGLSGYKGKHLTGQFGDMLARIESGEFPEGTILLVEAIDRIGRLEHLETEALMNRIIAHGIEIHTLQDGLIYTRDALSDDLGISIIQRVKSYVAHQESKQKSFRVSQKWKQRAKLALAGEQRLTKMVPGWIDPDTFKCNEHAETVRLIFKLLLDGESLHNIARHLQANNISSFSRRKDANGFSVHSVRTILRSETTRGTLPASQRNDRPAIPNYYEAAIDAATFNKAQEILDKNRKGRTPASDNPLTINIFKGLFRCQCGASVHPTGTKNKYQGVYRCNNHLDGRCDVPPLKRKPFDKWMIDNFLGMIDVGNDGEAEGKIASLQHEVEIVTARIKKATALLLEMDDIDELKIQLKELNQRRTELQTTIDSMRRKTSLSDKGLPQLKDIDLMTKAGRVECQLILSKHLKGLTLGKDSVTVTLQNDTEITIPTNPLPLNDGTSIFEIAEKNLLNIDTFQL

SEQ ID NO: 31787 - DNA, 50 bp, Escherichia coli
  source 1..50: mol_type = genomic DNA
aaaccgaatagacttcattcaagggtcattgtattgtagccattcggcat

SEQ ID NO: 31788 - DNA, 40 bp, Escherichia coli; identical to SEQ ID NO: 20043
  source 1..40: mol_type = genomic DNA

SEQ ID NO: 31789 - DNA, 40 bp, Escherichia coli; identical to SEQ ID NO: 30164
  source 1..40: mol_type = genomic DNA

SEQ ID NO: 31790 - DNA, 50 bp, Escherichia coli; identical to SEQ ID NO: 7690
  source 1..50: mol_type = genomic DNA

SEQ ID NO: 31791 - protein, 505 aa, Escherichia coli
MRSVITYLRFSSAIQGVEGADSTRRQNDLFKQWLKKNSDAQVVASFSDEGLSGYKGKHLTGQFGDMLARIETGEFPEGTILLVESIDRIGRLEHLETEALMNRILGNGLEIHTLQDGLIYTKDALADDLGISIIQRVKAYIAHQESKQKSFRVSQKWAQRAKLALAGEQRLTRNVPGWIDPDTFKCNEHAETVRLIFKLLLDGESLHNIARHLQSNGIPSFSRHRANGFSVHSVRTVLRSESVIGTLPASQRNDRPAIPNYYEAAVSISTFNKAQEILDKNRKGRTPASDNPLTINIFKGLFRCQCGASVHPTGTKRTYQGVYRCNNHLDGRCHVPPLKRKPFDKWMLENFLGMIDVGNDGESERKIAALQHEVEIVTSRIKKATALLLEMDDITELKAQARELNQRRTELQTAIDSMKRKTSLSDKGLPQLKDVDLTTKAGRVECQLILSKHLKGLTLGKDSVTVTLQNDTEIIVPTDPLPLNDGSPIFEIAEKDLLEIDGFQL

SEQ ID NO: 31792 - DNA, 50 bp, Escherichia coli; identical to SEQ ID NO: 30087
  source 1..50: mol_type = genomic DNA

SEQ ID NO: 31793 - DNA, 40 bp, Escherichia coli; identical to SEQ ID NO: 20043
  source 1..40: mol_type = genomic DNA

SEQ ID NO: 31794 - DNA, 40 bp, Escherichia coli; identical to SEQ ID NO: 30164
  source 1..40: mol_type = genomic DNA

SEQ ID NO: 31795 - DNA, 50 bp, Escherichia coli; identical to SEQ ID NO: 7690
  source 1..50: mol_type = genomic DNA

SEQ ID NO: 31796 - protein, 506 aa, Escherichia coli
MRTVITYLRFSSATQGAEGADSTRRQNDLFKQWLKKNSDAQVVASFSDEGLSGYKGKHLTGQFGDMLARIEAGEFPGGTILLVESIDRIGRLEHLETEALMNRIIAHGIEIHTLQDGLIYTRDALSDDLGISIIQRVKSYLAHQESKQKSFRVSQKWKQRAKLALAGEQRLTRNVPGWIDPDTFKCNEHAETVRLIFKLLLDGESLHNIARHLQSNDIKSFSRRKDANGFSVHSVRTVLRSESVIGTLPASQRNDRPAIPNYYEAAIDAATFNKAQEILDKNRKGRTPASDNPLTINIFKGLFRCQCGASVHPTGTKNKYAGVYRCNNHLDGRCDVPPLKRKPFDRWMIDNFLGMIDVGNDGEAEGKIASLQHEVEIVTARIKKATALLLEMDDITELKAQVKGLNQKRTELQTTIDNMRRKASLTDKELPQLKDIDLTTKAGRVECQLILSKHLKGLTLGKDSVTVTLQNDTEITIPTNPLPLNDGSPIFEIADKELLDIDAYQL

SEQ ID NO: 31797 - DNA, 50 bp, Escherichia coli; identical to SEQ ID NO: 30087
  source 1..50: mol_type = genomic DNA

SEQ ID NO: 31798 - DNA, 40 bp, Escherichia coli; identical to SEQ ID NO: 20043
  source 1..40: mol_type = genomic DNA

SEQ ID NO: 31799 - DNA, 40 bp, Escherichia coli; identical to SEQ ID NO: 30164
  source 1..40: mol_type = genomic DNA

SEQ ID NO: 31800 - DNA, 50 bp, Escherichia coli; identical to SEQ ID NO: 7690
  source 1..50: mol_type = genomic DNA

SEQ ID NO: 31801 - protein, 506 aa, Shigella sonnei
MRTVITYLRFSSAIQGAEGADSTRRQNDLFKQWLKKNGDAQIVASFSDEGLSGYKGKHLTGQFGDMLARIEAGEFPEGTILLVESIDRIGRLEHLETEALMNRILGNGIEIHTLQDGLIYTKDALADDLGISIIQRVKAYIAHQKSKQKSFRVSQKWGQRAKLALAGEQRLTKMVPGWIDPETFKLNEHAETVRLIFKLLLDGESLHNIARHLQSNGIKSFSRRKDANGFSVHSVRTILRSETTIGTLPASQRNDRPAIPNYYEGVVDIPTFNKAQEILDKNRKGRTPASDNPLTINIFKGLFRCQCGASVHPTGTKNKYAGVYRCNNHLDGRCDVPPLKRKPFDRWMIDNFLGMIDVGNDGESERKIAALQHEVEIVTARIKKATALLLEMDDIDELKIQLKELNQKRTELQTTIDNMRRKASLTDKELPQLKDIDLMTKAGRVECQLILSKHLKGLTLGKDSVTVTLQNDTEITIPTNPLPLNDGSPIFEIADKELLDIDAYQL

SEQ ID NO: 31802 - DNA, 50 bp, Shigella sonnei; identical to SEQ ID NO: 30087
  source 1..50: mol_type = genomic DNA

SEQ ID NO: 31803 - DNA, 40 bp, Shigella sonnei; identical to SEQ ID NO: 20043
  source 1..40: mol_type = genomic DNA

SEQ ID NO: 31804 - DNA, 40 bp, Shigella sonnei; identical to SEQ ID NO: 30164
  source 1..40: mol_type = genomic DNA

SEQ ID NO: 31805 - DNA, 50 bp, Shigella sonnei; identical to SEQ ID NO: 7690
  source 1..50: mol_type = genomic DNA

SEQ ID NO: 31806 - protein, 506 aa, Escherichia coli; identical to SEQ ID NO: 30126

SEQ ID NO: 31807 - DNA, 50 bp, Escherichia coli; identical to SEQ ID NO: 30087
  source 1..50: mol_type = genomic DNA

SEQ ID NO: 31808 - DNA, 40 bp, Escherichia coli; identical to SEQ ID NO: 20043
  source 1..40: mol_type = genomic DNA

SEQ ID NO: 31809 - DNA, 40 bp, Escherichia coli; identical to SEQ ID NO: 30164
  source 1..40: mol_type = genomic DNA

SEQ ID NO: 31810 - DNA, 50 bp, Escherichia coli; identical to SEQ ID NO: 7690
  source 1..50: mol_type = genomic DNA

SEQ ID NO: 31811 - protein, 506 aa, Escherichia coli
MRTVITYLRFSSAIQGAEGADSTRRQNDLFKQWLRKNSDAQVVASFSDEGLSGYKGKHLTGQFGDMLARIEAGEFPAGAILLVESIDRIGRLEHLETEALMNRIIAHGIEIHTLQDGLIYTRDALSDDLGISIIQRVKSYLAHQESKQKSFRVSEKWKQRAKLALAGEQRLTKMVPGWIDPDTFKCNKHAETVRLIFKLLLDGESLHNIARHLQSNDIKSFSRRKDANGFSVHSVRTVLRSESVIGTLPASQRNDRPAIPNYYEAAIDASTFNKAQEILDKNRKGRTPASDNPLTINIFKGLFRCQCGASVHPTGTKNKYQGVYRCNSHLDGRCDVPPLKRKPFDKWMIDNFLGMIDVGNDGEAEGKIASLQHEVEIVTARIKKATALLLEMDDIDELKIQIKELNQRRTELQTTIDSMRRKASLTDKELSQLKDIDLTTKAGRVECQLILSKHLKGLTLGKDTVTVTLQNDTEITIPTDPLPLNDGTSIFEIAEKNLLNIDTFQL

SEQ ID NO: 31812 - DNA, 50 bp, Escherichia coli; identical to SEQ ID NO: 30087
  source 1..50: mol_type = genomic DNA

SEQ ID NO: 31813 - DNA, 40 bp, Escherichia coli; identical to SEQ ID NO: 20043
  source 1..40: mol_type = genomic DNA

SEQ ID NO: 31814 - DNA, 40 bp, Escherichia coli; identical to SEQ ID NO: 30164
  source 1..40: mol_type = genomic DNA

SEQ ID NO: 31815 - DNA, 50 bp, Escherichia coli; identical to SEQ ID NO: 7690
  source 1..50: mol_type = genomic DNA

SEQ ID NO: 31816 - protein, 506 aa, Escherichia coli
MRHVITYLRYSSATQGAEGADSTRRQNELFKQWLRKNSDAQVVASFNDEGLSGYKGKHLSGQFGDMLSRIESGEFSKGTILLVEAIDRIGRLEHLETEALMNRIIAHGIEIHTLQDGLIYTRDALSDDLGISIIQRVKSYLAHQESKQKSFRVSEKWKQRAKLALAGEQRLTKMVPGWIDPETFKLNEHAETVRLIFKLLLDGESLHNIARHLQANNISSFSRRKDANGFSVHSVRTILRSETTIGTLPASQRNDRPAIPNYYEAAIDAATFNKAQEILDKNRKGRTPASDNPLTINIFKGLFRCQCGASVHPTGTKNKYAGVYRCNNHLDGRCDVQPLKRKPFDRWMIDNFLGMIDVGNDGESERKIAALQHEVEIVTARIKKATALLLEMDDIDELKIQLKELNQKRTELQTTIDNMRRKASLTDKELPQLKDIDLTTKAGRVECQLILSKHLKGLTLGKDTVTVTLQNDTEITIPTDPLPLNDGTSIFEIAEKNLLNIDTFQL

SEQ ID NO: 31817 - DNA, 50 bp, Escherichia coli; identical to SEQ ID NO: 30087
  source 1..50: mol_type = genomic DNA

SEQ ID NO: 31818 - DNA, 40 bp, Escherichia coli; identical to SEQ ID NO: 20043
  source 1..40: mol_type = genomic DNA

SEQ ID NO: 31819 - DNA, 40 bp, Escherichia coli; identical to SEQ ID NO: 30164
  source 1..40: mol_type = genomic DNA

SEQ ID NO: 31820 - DNA, 50 bp, Escherichia coli; identical to SEQ ID NO: 7690
  source 1..50: mol_type = genomic DNA

SEQ ID NO: 31821 - protein, 506 aa, Escherichia coli
MRTVITYLRFSSATQGAEGADSTRRQNELFKQWLRKNSDAQVVASFNDEGLSGYKGKHLSGQFGDMLSRIESGEFPEGTILLVEAIDRIGRLEHLETEALMNRIIAHGIEIHTLQDGLIYTRDALSDDLGISIIQRVKSYLAHQESKQKSFRVSEKWKQRAKLALAGKQRLTKMVPGWIDPDTLKLNEHAETVRLIFKLLLDGESLHNIARHLQSNDIKSFSRRKDANGFSVHSVRTVLRSESVIGTLPASQRNDRPAIPNYYEAAIDAATFNKAQEILDKNRKGRTPASDNPLTINIFKGLFRCQCGASVHPTGTKNKYAGVYRCNNNPDGRCDVPPLKRKPFDKWMIDNFLGMIDVGNDGEAEGKLASLQHEVEIVTARIKKATALLLEMDDIDELKIQLKELNQKRTELQTTIDNMRRKASLTDKELPQLKDIDLTTKAGRVECQLILSKHLKGLTLGKDSVTVTLQNDTEITIPTNPLPLNDGSPIFEIADKELLDIDAYQL

SEQ ID NO: 31822 - DNA, 50 bp, Escherichia coli; identical to SEQ ID NO: 30087
  source 1..50: mol_type = genomic DNA

SEQ ID NO: 31823 - DNA, 40 bp, Escherichia coli; identical to SEQ ID NO: 20043
  source 1..40: mol_type = genomic DNA

SEQ ID NO: 31824 - DNA, 40 bp, Escherichia coli; identical to SEQ ID NO: 30164
  source 1..40: mol_type = genomic DNA

SEQ ID NO: 31825 - DNA, 50 bp, Escherichia coli; identical to SEQ ID NO: 7690
  source 1..50: mol_type = genomic DNA

SEQ ID NO: 31826 - protein, 506 aa, Escherichia coli
MRTVITYLRFSSATQGAEGADSTRRQNELFKQWLRKNSDAQVVASFSDEGLSGYKGKHLTGQFGDMLARIESGEFPEGTVLLVESIDRIGRLEHLETEALMNRIIAHGIEIHTLQDGLIYTRDALSDDLGISIIQRVKSYVAHQESKQKSFRVSQKWKQRAKLALAGEQRLTRNVPGWIDPDTFKCNEHAETVRLIFKLLLDGESLHNIARHLQSNDIKSFSRRKDANGFSVHSVRTVLRSESVIGTLPASQRNDRPAIPNYYEAAIDAATFNKAQEILDKNRKGRTPASDNPLTINIFKGLFRCQCGASVHPTGTKNKYAGVYRCNNHLDGRCDVPPLKRKPFDRWMIDNFLGMIDVGNDGESERKIAALQHEVEIVTARIKKATALLLEMDDITELKAQVKGLNQKRTEIQTTIDTLKRKTSLTDKELPQLKDIDLTTKAGRVECQLILSKHLKGLTLGKDSVTVTLQNDTEITIPTNPLPLNDGSPIFEIADKELLDIDAYQL

SEQ ID NO: 31827 - DNA, 50 bp, Escherichia coli; identical to SEQ ID NO: 30087
  source 1..50: mol_type = genomic DNA

SEQ ID NO: 31828 - DNA, 40 bp, Escherichia coli; identical to SEQ ID NO: 20043
  source 1..40: mol_type = genomic DNA

SEQ ID NO: 31829 - DNA, 40 bp, Escherichia coli; identical to SEQ ID NO: 30164
  source 1..40: mol_type = genomic DNA

SEQ ID NO: 31830 - DNA, 50 bp, Escherichia coli; identical to SEQ ID NO: 7690
  source 1..50: mol_type = genomic DNA

SEQ ID NO: 31831 - protein, 506 aa, Escherichia coli
MRHVITYLRYSSAIQGAEGADSTRRQNDLFKQWLKKNSDAQVVASFNDEGLSGYKGKHLSGQFGDMLSRIESGEFSEGTILLVEAIDRIGRLEHLETEALMNRILGNGIEIHTLQDGLIYTKDALADDLGISIIQRVKAYIAHQESKQKSFRVSQKWEQRAKLALAGEQRLTKMVPGWIDPDTFKLNEHAETVRLIFKLLLSGESLHNIARHLQSNGIKSFSRRKDANGFSVHSVRTILRSETTIGTLPASQRNDRPAIPNYYEAAIDAATFNKAQEILDKNRKGRTPASDNPLTINIFKGLFRCQCGASVHPTGTKNKYQGVYRCNNHLDGRCDVPPLKRKPFDKWMIDNFLGMIDVGNDGEAEGKIAALQHEVEIVTARIKKATALLLEMDDIDELKIQLKELNQKRTELQTTIDSMRRKTSLTDKELPQLKDIDLTTKAGRVECQLILSKHLKGLTLGKDSVIVTLQNDTEITIPTNPLPLNDGTSIFEIAEKELLEIDAYQL

SEQ ID NO: 31832 - DNA, 50 bp, Escherichia coli; identical to SEQ ID NO: 30087
  source 1..50: mol_type = genomic DNA

SEQ ID NO: 31833 - DNA, 40 bp, Escherichia coli; identical to SEQ ID NO: 20043
  source 1..40: mol_type = genomic DNA

SEQ ID NO: 31834 - DNA, 40 bp, Escherichia coli; identical to SEQ ID NO: 30164
  source 1..40: mol_type = genomic DNA

SEQ ID NO: 31835 - DNA, 50 bp, Escherichia coli; identical to SEQ ID NO: 7690
  source 1..50: mol_type = genomic DNA

SEQ ID NO: 31836 - protein, 499 aa, Escherichia coli
MRFSSATQGAEGADSTRRQNELFKQWLRKNSDAQVVASFSDEGLSGYKGKHLTGQFGDMLARIESGEFAEGTVLLVEAIDRIGRLEHLETEALMNRIIAHGIEIHTLQDGLIYTRDALSDDLGISIIQRVKSYVAHQESKQKSFRVSQKWKQRAKLALAGEQRLTKMVPGWIDPDTLKLNEHAETVRLIFKLLLSGESLHNIARHLQANNISSFSRRKDANGFSVHSVRTVLRSESVIGTLPASQRNDRPAIPNYYEAAIDAATFNKAQEILDKNRKGRTPASDNPLTINIFKGLFRCQCGASVHPTGTKNKYAGVYRCNNHLDGRCDVPPLKRKPFDKWMIDNFLGMIDVGNDGEAEGKIASLQHEVEIVTTRIKKATALLLEMDDITELKTQVKELNQKRTELQTTIDSMRRKTSLSDKGLPQLKDIDLMTKEGRVECQLILSKHLKGLTLGKDSVTVTLQNDTEITIPTNPLPLNDGSPIFEIADKELLDIDAYQL

SEQ ID NO: 31837 - DNA, 50 bp, Escherichia coli; identical to SEQ ID NO: 30087
  source 1..50: mol_type = genomic DNA

SEQ ID NO: 31838 - DNA, 40 bp, Escherichia coli; identical to SEQ ID NO: 20043
  source 1..40: mol_type = genomic DNA

SEQ ID NO: 31839 - DNA, 40 bp, Escherichia coli; identical to SEQ ID NO: 30164
  source 1..40: mol_type = genomic DNA

SEQ ID NO: 31840 - DNA, 50 bp, Escherichia coli; identical to SEQ ID NO: 7690
  source 1..50: mol_type = genomic DNA

SEQ ID NO: 31841 - protein, 506 aa, Escherichia coli
MRSVITYLRFSSAIQGAEGADSTRRQNDLFKQWLKKNSDAQVVASFSDEGLSGYKGKHLTGQFGDMLARIESGEFPEGTLLLVEAIDRIGRLEHLETEALMNRIIAHGIEIHTLQDGLIYTRDALSDDLGISIIQRVKSYVAHQESKQKSFRVSQKWKQRAKLALAGEQRLTKMVPGWIDPDTFKCNEHAETVRLIFKLLLDGESLHNIARHLQANNISSFSRRKDANGFSVHSVRTILRSETTRGTLPASQRNDRPAIPNYYEAAIDAATFNKAQEILDKNRKGRTPASDNPLTINIFKGLFRCQCGASVHPTGTKNKYAGVYRCNNNPDGRCDVPPLKRKPFDKWMIDNFLGMIDVGNDGEAEGKIASLQHEVEIVTARIKKATALLLEMDDIDELKIQLKELNQKRTELQTMIDNMRRKASLTDKELPQLKDIDLMTKAGRVECQLILSKHLKGLTLGKDSVTVTLQNDTEIIVPTDPLPLNDGTSIFEIAEKELLEIDAYQL

SEQ ID NO: 31842 - DNA, 50 bp, Escherichia coli; identical to SEQ ID NO: 30087
  source 1..50: mol_type = genomic DNA

SEQ ID NO: 31843 - DNA, 40 bp, Escherichia coli; identical to SEQ ID NO: 20043
  source 1..40: mol_type = genomic DNA

SEQ ID NO: 31844 - DNA, 40 bp, Escherichia coli; identical to SEQ ID NO: 30164
  source 1..40: mol_type = genomic DNA

SEQ ID NO: 31845 - DNA, 50 bp, Escherichia coli; identical to SEQ ID NO: 7690
  source 1..50: mol_type = genomic DNA

SEQ ID NO: 31846 - protein, 506 aa, Escherichia coli
MRSVITYLRFSSAIQGAEGADSTRRQNDLFNQWLKKNSDAQVVASFSDEGLSGYKGKHLSGQFGDMLSRIESGEFSEGTILLVEAIDRIGRLEHLETEALMNRIIAHGIEIHTLQDGLIYTRDALSDDLGISIIQRVKSYIAHQESKQKSFRVSQKWGQRAKLALAGKQRLTKMVPGWIDPETFEVNEHAETVRLIFKLLLDGESLHNIARHLQANNISSFSRRKDANGFSVHSVRTILRSETTIGTLPASQRNDRPAIPNYYEAAIDAATFNKAQEILDKNRKGRTPASDNPLTINIFKGLFRCQCGASVHPTGTKNKYQGVYRCNNHLDGRCDVPPLKRKPFDRWMIDNFLGMIDVGNDGESERKIAALQHEVEIVTSRIKKATALLLEMDDITELKAQVKELNQKRTELQTTINTMKRKTSLSDKGLPQLKDIDLMTKAGRVECQLILSKHLKGLTLGKDSVTVTLQNDTEITIPTNPLPLNDGSPIFEIADKELLDVDAYQL

SEQ ID NO: 31847 - DNA, 50 bp, Escherichia coli; identical to SEQ ID NO: 30087
  source 1..50: mol_type = genomic DNA

SEQ ID NO: 31848 - DNA, 40 bp, Escherichia coli; identical to SEQ ID NO: 20043
  source 1..40: mol_type = genomic DNA

SEQ ID NO: 31849 - DNA, 40 bp, Escherichia coli; identical to SEQ ID NO: 30164
  source 1..40: mol_type = genomic DNA

SEQ ID NO: 31850 - DNA, 50 bp, Escherichia coli; identical to SEQ ID NO: 7690
  source 1..50: mol_type = genomic DNA

SEQ ID NO: 31851 - protein, 506 aa, Escherichia coli
MRHVITYLRYSSAIQGAEGADSTRRQNDLFKQWLKKNSDAQVVASFNDEGLSGYKGKHLSGQFGDMLSRIESGEFSEGTVLLVEAIDRIGRLEHLETEALMNRIIAHGIEIHTLQDGLIYTRDALSDDLGISIIQRVKSYIAHQESKQKSFRVSQKWEQRAKLALAGEQRLTRNVPGWIAPDTFKCNEHAETVRLIFKLLLDGESLHNIARHLQSNDIKSFSRRKDANGFSVHSVRTVLRSESVIGTLPASQRNDRPAIPNYYEAAIDAATFNKAQEILDKNRKGRTPASDNPLTINIFKGLFRCQCGASVHPTGTKNKYAGVYRCNNHLDGRCDVPPLKRKPFDKWMIDNFLGMIDVGNDGEAEGKIASLQHEVEIVTTRIKKATALLLEMDDITELKTQVKELNQKRTELQTTIDSMRRKTSLSDKGLPQLKDIDLMTKEGRVECQLILSKHLKGLTLGKDSVTVTLQNDTEITIPTNPLPLNDGSPIFEIADKELLDIDAYQL

SEQ ID NO: 31852 - DNA, 50 bp, Escherichia coli; identical to SEQ ID NO: 30087
  source 1..50: mol_type = genomic DNA

SEQ ID NO: 31853 - DNA, 40 bp, Escherichia coli; identical to SEQ ID NO: 20043
  source 1..40: mol_type = genomic DNA

SEQ ID NO: 31854 - DNA, 40 bp, Escherichia coli; identical to SEQ ID NO: 30164
  source 1..40: mol_type = genomic DNA

SEQ ID NO: 31855 - DNA, 50 bp, Escherichia coli; identical to SEQ ID NO: 7690
  source 1..50: mol_type = genomic DNA

SEQ ID NO: 31856 - protein, 499 aa, Escherichia coli
MRFSSATQGAEGADSTRRQNELFKQWLRKNSDAQVVASFNDEGLSGYKGKHLSGQFGDMLSRIESGEFPEGTILLVEAIDRIGRLEHLETEALMNRIIAHGIEIHTLQDGLIYTRDALSDDLGISIIQRVKSYLAHQESKQKSFRVSEKWKQRAKLALAGKQRLTKMVPGWIDPGTFTLNEHAETVRLIFKLLLSGESLHNIARHLQANSISSFSRRKDANGFSVHSVRTILRSETTIGTLPASQRNDRPAIPNYYEAAIDAATFNKAQEILDKNRKGRTPASDNPLTINIFKGLFRCQCGASVHPTGTKNKYAGVYRCNNHLDGRCDVPPLKRKPFDRWMIDNFLGMIDVGNDGESERKIAALQHEVEIVTARIKKATALLLEMDDITELKAQVKGLNQKRTEIQTTIDTLKRKTSLTDKELPQLKDIDLTTKAGRVECQLILSKHLKGLTLGKDSVTVTLQNDTEITIPTNPLPLNDGSPIFEIADKELLDIDAYQL

SEQ ID NO: 31857 - DNA, 50 bp, Escherichia coli; identical to SEQ ID NO: 30087
  source 1..50: mol_type = genomic DNA

SEQ ID NO: 31858 - DNA, 40 bp, Escherichia coli; identical to SEQ ID NO: 20043
  source 1..40: mol_type = genomic DNA

SEQ ID NO: 31859 - DNA, 40 bp, Escherichia coli; identical to SEQ ID NO: 30164
  source 1..40: mol_type = genomic DNA

SEQ ID NO: 31860 - DNA, 50 bp, Escherichia coli; identical to SEQ ID NO: 7690
  source 1..50: mol_type = genomic DNA

SEQ ID NO: 31861 - protein, 506 aa, Escherichia coli
MRTVITYLRFSSATQGAEGADSTRRQNELFKQWLRKNSDAQVVASFSDEGLSGYKGKHLTGQFGDMLARIEAGEFPAGTILLVESIDRIGRLEHLETEALMNRILGNGIEIHTLQDGLIYTKDALADDLGISIIQRVKAYIAHQESKQKSFRVSQKWGQRAKLALAGEQRLTKMVPGWIDPDTFKCNEHAETVRLIFKLLLDGESLHNIARHLQANNISSFSRRKDANGFSVHSVRTILRSETTIGTLPASQRNDRPAIPNYYEAAIDAATFNKAQEILDKNRKGRTPASDNPLTINIFKGLFRCQCGASVHPTGTKNKYAGVYRCNNNPDGRCDVPPLKRKPFDKWMIDNFLGMIDVGNDGEAEGKIASLQHEVEIVTARIKKATALLLEMDDIDELKIQLKELNQKRTELQTMIDNMRRKASLTDKELPQLKDIDLMTKAGRVECQLILSKHLKGLTLGKDSVTVTLQNDTEIIVPTDPLPLNDGTSIFEIAEKELLEIDAYQL

SEQ ID NO: 31862 - DNA, 50 bp, Escherichia coli; identical to SEQ ID NO: 30087
  source 1..50: mol_type = genomic DNA

SEQ ID NO: 31863 - DNA, 40 bp, Escherichia coli; identical to SEQ ID NO: 20043
  source 1..40: mol_type = genomic DNA

SEQ ID NO: 31864 - DNA, 40 bp, Escherichia coli; identical to SEQ ID NO: 30164
  source 1..40: mol_type = genomic DNA

SEQ ID NO: 31865 - DNA, 50 bp, Escherichia coli; identical to SEQ ID NO: 7690
  source 1..50: mol_type = genomic DNA

SEQ ID NO: 31866 - protein, 506 aa, Escherichia coli
MRSVITYLRFSSAIQGAEGADSTRRQNDLFKQWLKKNSDAQVVASFSDEGLSGYKGKHLTGQFGDMLARIESGEFSEGTVLLVEAIDRIGRLEHLETEALMNRIIAHGIEIHTLQDGLIYTRDALSDDLGISIIQRVKSYVAHQESKQKSFRVSQKWEQRAKLALAGEQRLTRNVPGWIDPDTFKCNEHAETVRLIFKLLLDGESLHNIARHLQSNDIKSFSRRKDANGFSVHSVRTILRSETTIGTLPASQRNDRPAIPNYYEAAIDASTFNKAQEILDKNRKGRTPASDNPLTINIFKGLFRCQCGASVHPTGTKNKYQGVYRCNNHLDGRCDVPPLKRKPFDRWMIDNFLGMIDVGNDGESERKIAALQHEVEIVTARIKKATALLLEMDDITELKAQVKGLNQKRTEIQTTIDTLKRKTSLTDKELPQLKDIDLTTKAGRVECQLILSKHLKGLTLGKDSVTVTLQNDTEITIPTNPLPLNDGSPIFEIADKELLDIDAYQL

SEQ ID NO: 31867 - DNA, 50 bp, Escherichia coli; identical to SEQ ID NO: 30087
  source 1..50: mol_type = genomic DNA

SEQ ID NO: 31868 - DNA, 40 bp, Escherichia coli; identical to SEQ ID NO: 20043
  source 1..40: mol_type = genomic DNA

SEQ ID NO: 31869 - DNA, 40 bp, Escherichia coli; identical to SEQ ID NO: 30164
  source 1..40: mol_type = genomic DNA

SEQ ID NO: 31870 - DNA, 50 bp, Escherichia coli; identical to SEQ ID NO: 7690
  source 1..50: mol_type = genomic DNA

SEQ ID NO: 31871 - protein, 506 aa, Escherichia coli
MRSVITYLRYSSTIQGAEGADSTRRQNDLFRQWLKKNIDAQVVASFSDEGLSGYKGKHLSGQFGDMLSRIESGEFPEGTILLVESIDRIGRLEHLETEALMNRIIAHGIEIHTLQDGLIYTRDALSDDLGISIIQRVKSYVAHQESKQKSFRVSQKWKQRAKLALAGEQRLTRNVPGWIDPDTFKCNEHAETVRLIFKLLLDGESLHNIARHLQSNDIKSFSRRKDANGFSVHSVRTVLRSESVIGTLPASQRNDRPAIPNYYEAAIDAATFNKAQEILDKNRKGRTPASDNPLTINIFKGLFRCQCGASVHPTGTKNKYAGVYRCNNHLDGRCDVPPLKRKPFDRWMIDNFLGMIDVGNDGESERKIAALQHEVEIVTARIKKATALLLEMDDITELKAQVKGLNQKRTEIQTTIDTLKRKTSLTDKELPQLKDIDLTTKAGRVECQLILSKHLKGLTLGKDSVTVTLQNDTEITIPTNPLPLNDGSPIFEIADKELLDIDAYQL

SEQ ID NO: 31872 - DNA, 50 bp, Escherichia coli; identical to SEQ ID NO: 30087
  source 1..50: mol_type = genomic DNA

SEQ ID NO: 31873 - DNA, 40 bp, Escherichia coli; identical to SEQ ID NO: 20043
  source 1..40: mol_type = genomic DNA

SEQ ID NO: 31874 - DNA, 40 bp, Escherichia coli; identical to SEQ ID NO: 30164
  source 1..40: mol_type = genomic DNA

SEQ ID NO: 31875 - DNA, 50 bp, Escherichia coli; identical to SEQ ID NO: 7690
  source 1..50: mol_type = genomic DNA

SEQ ID NO: 31876 - protein, 506 aa, Escherichia coli
MRTVITYLRFSSAIQGAEGADSTRRQNDLFKQWLKKNSDAQVVASFSDEGLSGYKGKHLTGQFGDMLARIESGEFPEGTILLVEAIDRIGRLEHLETEALMNRIIAHGIEIHTLQDGLIYTRDALSDDLGISIIQRVKSYVAHQESKQKSFRVSQKWKQRAKLALAGEQRLTKMVPGWIDPDTFKCNEHAETVRLIFKLLLDGESLHNIARHLQANNISSFSRRKDANGFSVHSVRTILRSETTRGTLPASQRNDRPAIPNYYEAAIDAATFNKAQEILDKNRKGRTPASDNPLTINIFKGLFRCQCGASVHPTGTKNKYAGVYRCNNNPDGRCDVPPLKRKPFDKWMIDNFLGMIDVGNDGEAEGEIASLQHEVEIVTARIKKATALLLEMDDIDELKIQLKELNQKRTELQTMIDNMRRKASLTDKELPQLKDIDLMTKAGRVECQLILSKHLKGLTLGKDSVTVTLQNDTEIIVPTDPLPLNDGTSIFEIAEKELLEIDAYQL

SEQ ID NO: 31877 - DNA, 50 bp, Escherichia coli; identical to SEQ ID NO: 30087
  source 1..50: mol_type = genomic DNA

SEQ ID NO: 31878 - DNA, 40 bp, Escherichia coli; identical to SEQ ID NO: 20043
  source 1..40: mol_type = genomic DNA

SEQ ID NO: 31879 - DNA, 40 bp, Escherichia coli; identical to SEQ ID NO: 30164
  source 1..40: mol_type = genomic DNA

SEQ ID NO: 31880 - DNA, 50 bp, Escherichia coli; identical to SEQ ID NO: 7690
  source 1..50: mol_type = genomic DNA

SEQ ID NO: 31881 - protein, 506 aa, Escherichia coli
MRSVITYLRFSSAIQGAEGADSTRRQNDLFKQWLKKNSDAQVVASFSDEGLSGYKGKHLTGQFGDMLARIESGEFPEGTLLLVEAIDRIGRLEHLETEALMNRIIAHGIEIHTLQDGLIYTRDALSDDLGISIIQRVKSYVAHQESKQKSFRVSQKWKQRAKLALAGEQRLTKMVPGWIDPDTFKCNEHAETVRLIFKLLLDGESLHNIARHLQSNDIKSFSRRKDANGFSVHSVRTVLRSESVIGTLPASQRNDRPAIPNYYEAAIDASTFNKAQEILDKNRKGRTPASDNPLTINIFKGLFRCQCGASVHPTGTKNKYQGVYRCNNHLDGRCDVPPLKRKPFDKWMIDNFLGMIDVGNDGEAEGKIASLQHEVEIVTARIKKATALLLEMDDIDELKIQIKELNQRRTELQTTIDNMRRKASLTDKELPQLKDIDLTTKAGRVECQLILSKHLKGLTLGKDSVTVTLQNDTEIIVPTDPLPLNDGTSIFEIAEKELLEIDAYQL

SEQ ID NO: 31882 - DNA, 50 bp, Escherichia coli; identical to SEQ ID NO: 30087
  source 1..50: mol_type = genomic DNA

SEQ ID NO: 31883 - DNA, 40 bp, Escherichia coli; identical to SEQ ID NO: 20043
  source 1..40: mol_type = genomic DNA

SEQ ID NO: 31884 - DNA, 40 bp, Escherichia coli; identical to SEQ ID NO: 30164
  source 1..40: mol_type = genomic DNA

SEQ ID NO: 31885 - DNA, 50 bp, Escherichia coli; identical to SEQ ID NO: 7690
  source 1..50: mol_type = genomic DNA

SEQ ID NO: 31886 - protein, 499 aa, Escherichia coli
MRFSSATQGAEGADSTRRQNELFKQWLRKNSDAQVVASFSDEGLSGYKGKHLTGQFGDMLARIEAGEFPAGTILLVESIDRIGRLEHLETEALMNRILGNGIEIHTLQDGLIYTKDALADDLGISIIQRVKAYIAHQESKQKSFRVSQKWEQRAKLALAGEQRLTKMVPGWIDPDTFKCNEHAETVRLIFKLLLDGESLHNIARHLQANNISSFSRRKDANGFSVHSVRTILRSVTTIGTLPASQRNDRPAIPNYYEAAIDAATFNKAQEILDKNRKGRTPASDNPLTINIFKGLFRCQCGASVHPTGTKNKYAGVYRCNNHLDGRCDVPPLKRKPFDRWMIDNFLGMIDVGNDGEAEGKIAALQHEVEIVTTRIKKATALLLEMDDITELKAQVKELNQKRTELQTTIDSMRRKTSLTDKELPQLKDIDLTTKAGRVECQLILSKHLKGLTLGKDSVIVTLQNDTEITIPTNPLPLHDGTSIFEIAEKELLEIDAYQL

SEQ ID NO: 31887 - DNA, 50 bp, Escherichia coli; identical to SEQ ID NO: 30087
  source 1..50: mol_type = genomic DNA

SEQ ID NO: 31888 - DNA, 40 bp, Escherichia coli; identical to SEQ ID NO: 20043
  source 1..40: mol_type = genomic DNA

SEQ ID NO: 31889 - DNA, 40 bp, Escherichia coli; identical to SEQ ID NO: 30164
  source 1..40: mol_type = genomic DNA

SEQ ID NO: 31890 - DNA, 50 bp, Escherichia coli; identical to SEQ ID NO: 7690
  source 1..50: mol_type = genomic DNA

SEQ ID NO: 31891 - protein, 506 aa, Escherichia coli
MRTVITYLRFSSATQGAEGADSTRRQNDLFKQWLKKNSDAQVVASFSDEGLSGYKGKHLTGQFGDMLARIESGEFPESTILLVESIDRIGRLEHLETEALMNRILGNGLEIHTLQDGLIYTKDALADDLGISIIQRVKAYIAHQESKQKSFRVSEKWKQRAKLALAGEQRLTKMVPGWIDPDTLKLNEHAETVRLIFKLLLSGESLHNIARHLQSNGIKSFSRRKDANGFSVHSVRTILRSETTIGTLPASQRNDRPAIPNYYEAAIDAATFNKAQEILDKNRKGRTPASDNPLTINIFKGLFRCQCGASVHPTGTKNKYAGVYRCNNHLDGRCDVPPLKRKPFDKWMLENFLGMIDVGNDGEAEGKIASLQHEVEIVTTRIKKATALLLEMDDIDELKIQIKELNQRRTELQTTIDNMRRKASLTDKELPQLKDIDLTTKAGRVECQLILSKHLKGLTLGKDSVIVTLQNDTEITIPTNPLPLNDGTSIFEIAEKELLEIDAYQL

SEQ ID NO: 31892 - DNA, 50 bp, Escherichia coli; identical to SEQ ID NO: 30087
  source 1..50: mol_type = genomic DNA

SEQ ID NO: 31893 - DNA, 40 bp, Escherichia coli; identical to SEQ ID NO: 7688
  source 1..40: mol_type = genomic DNA

SEQ ID NO: 31894 - DNA, 40 bp, Escherichia coli; identical to SEQ ID NO: 7689
  source 1..40: mol_type = genomic DNA

SEQ ID NO: 31895 - DNA, 50 bp, Escherichia coli; identical to SEQ ID NO: 7690
  source 1..50: mol_type = genomic DNA

SEQ ID NO: 31896 - protein, 506 aa, Escherichia coli
MRHVITYLRYSSATQGAEGADSTRRQNELFKQWLRKNSDAQVVASFNDEGLSGYKGKHLSGQFGDMLSRIESGEFSKGTILLVEAIDRIGRLEHLETEALMNRIIAHGIEIHTLQDGLIYTRDALSDDLGISIIQRVKSYIAHQESKQKSFRVSQKWEQRAKLALAGEQRLTKMVPGWIDPDTFKCNEHAETVRLIFKLLLDGESLHNIARHLQSNDIKSFSRRKDANGFSVHSVRTVLRSESVIGTLPASQRNDRPAIPNYYEAAIDAATFNKAQEILGKNRIGRTPASDNPLTINIFKGLFRCQCGASVHPTGTKNKYQGVYRCNNHLDGRCDVPPLKRKPFDKWMIDNFLGMIDVGNDGEAEGKIASLQHEVEIVTTRIKKATALLLEMDDITELKAQVKELNQKRTELQTTIDSMRRKTSLSDKGLPQLKDIDLMTKAGRVECQLILSKHLKGLTLGKDTVTVTLQNDTEITIPTDPLPLNDGTSIFEIAEKNLLNIDTFQL

SEQ ID NO: 31897 - DNA, 50 bp, Escherichia coli; identical to SEQ ID NO: 30087
  source 1..50: mol_type = genomic DNA

SEQ ID NO: 31898 - DNA, 40 bp, Escherichia coli; identical to SEQ ID NO: 20043
  source 1..40: mol_type = genomic DNA

SEQ ID NO: 31899 - DNA, 40 bp, Escherichia coli; identical to SEQ ID NO: 30164
  source 1..40: mol_type = genomic DNA

SEQ ID NO: 31900 - DNA, 50 bp, Escherichia coli; identical to SEQ ID NO: 7690
  source 1..50: mol_type = genomic DNA

SEQ ID NO: 31901 - protein, 506 aa, Escherichia coli
MRTVITYLRFSSATQGAEGADSTRRQNDLFKQWLKKNSDAQVVASFSDEGLSGYKGKHLTGQFGDMLARIEAGEFPGGTILLVESIDRIGRLEHLETEALMNRIIAHGIEIHTLQDGLIYTRDALSDDLGISIIQRVKSYLAHQESKQKSFRVSQKWEQRAKLALAGEQRLTKMVPGWIDPDTLKLNEHAETVRLIFKLLLSGESLHNIARHLQSNGIKSFSRRKDANGFSVHSVRTILRSETTIGTLPASQRNDRPAIPNYYEAAIDAATFNKAQEILDKNRKGRTPASDNPLTINIFKGLFRCQCGASVHPTGTKNKYAGVYRCNNHLDGRCDVPPLKRKPFDKWMIDNFLGMIDVGNDGEAEGKIASLQHEVEIVTARIKKATALLLEMDDIDELKTQVKELNQKRTELQTTIDSMRRKTSLSDKGLPQLKDIDLMTKEGRVECQLILSKHLKGLTLGKDSVTVTLQNDTEITIPTNPLPLNDGTSIFEIADKELLDIDAYQL

SEQ ID NO: 31902 - DNA, 50 bp, Escherichia coli; identical to SEQ ID NO: 30087
  source 1..50: mol_type = genomic DNA

SEQ ID NO: 31903 - DNA, 40 bp, Escherichia coli; identical to SEQ ID NO: 20043
  source 1..40: mol_type = genomic DNA

SEQ ID NO: 31904 - DNA, 40 bp, Escherichia coli; identical to SEQ ID NO: 30164
  source 1..40: mol_type = genomic DNA

SEQ ID NO: 31905 - DNA, 50 bp, Escherichia coli; identical to SEQ ID NO: 7690
  source 1..50: mol_type = genomic DNA

SEQ ID NO: 31906 - protein, 506 aa, Escherichia coli
MRTVITYLRFSSATQGAEGADSTRRQNELFKQWLRKNSDAQVVASFSDEGLSGYKGKHLTGQFGDMLARIEAGEFPAGTILLVESIDRIGRLEHLETEALMNRILGNGIEIHTLQDGLIYTKDALADDLGISIIQRVKAYIAHQESKQKSFRVSQKWGQRAKLALAGEQRLTKMVPGWIDPDTFKLNEHAETVRLIFKLLLSGESLHNIARHLQANNISSFSRRKDANGFSVHSVRTILRSVTTRGTLPASQRNDRPAIPNYYEAAIDAATFNKAQEILDKNRKGRTPASDNPLTINIFKGLFRCQCGASVHPTGTKNKYAGVYRCNNHLDGRCDVPPLKRKPFDKWMIDNFLGMIDVGNDGEAEGKIASLQHEVEIVTARIKKATALLLEMDDIDELKIQLKELNQKRTELQTTIDSMRRKASLTDKELPQLKDIDLTTKAGRVECQLILSKHLKGLTLGKDSVTVTLQNDTEITIPTNPLPLNDGTSIFEIADKELLDIDAYQL

SEQ ID NO: 31907 - DNA, 50 bp, Escherichia coli; identical to SEQ ID NO: 30087
  source 1..50: mol_type = genomic DNA

SEQ ID NO: 31908 - DNA, 40 bp, Escherichia coli; identical to SEQ ID NO: 20043
  source 1..40: mol_type = genomic DNA

SEQ ID NO: 31909 - DNA, 40 bp, Escherichia coli; identical to SEQ ID NO: 30164
  source 1..40: mol_type = genomic DNA

SEQ ID NO: 31910 - DNA, 50 bp, Escherichia coli; identical to SEQ ID NO: 7690
  source 1..50: mol_type = genomic DNA

SEQ ID NO: 31911 - protein, 506 aa, Escherichia coli
MRSVITYLRFSSAIQGAEGADSTRRQNDLFKQWLKKNSDAQVVASFSDEGLSGYKGKHLTGQFGDMLARIESGEFPEGTILLVESIDRIGRLEHLETEALMNRILGNGLEIHTLQDGLIYTKDALADDLGISIIQRVKAYIAHQESKQKSFRVSEKWKQRAKLALAGEQRLTKMVPGWIDPDTLKLNEHAETVRLIFKLLLSGESLHNIARHLQSNGIKSFSRRKDANGFSVHSVRTILRSETTIGTLPASQRNDRPAIPNYYEAAIDAATFNKAQEILDKNRKGRTPASDNPLTINIFKGLFRCQCGASVHPTGTKNKYAGVYRCNNHLDGRCDVPPLKRKPFDKWMLENFLGMIDVGNDGEAEGKIASLQYEVEIVTTRIKKATALLLEMDDIDELKIQLKELNQRRTELQTTIDNMRRKASLTDKELPQLKDIDLMTKAGRVECQLILSKHLKGLTLGKDSVTVTLQNDTEITIPTNPLPLNDGSPIFEIADKELLDIDAYQL

SEQ ID NO: 31912 - DNA, 50 bp, Escherichia coli; identical to SEQ ID NO: 30087
  source 1..50: mol_type = genomic DNA

SEQ ID NO: 31913 - DNA, 40 bp, Escherichia coli; identical to SEQ ID NO: 20043
  source 1..40: mol_type = genomic DNA

SEQ ID NO: 31914 - DNA, 40 bp, Escherichia coli; identical to SEQ ID NO: 30164
  source 1..40: mol_type = genomic DNA

SEQ ID NO: 31915 - DNA, 50 bp, Escherichia coli; identical to SEQ ID NO: 7690
  source 1..50: mol_type = genomic DNA

SEQ ID NO: 31916 - protein, 506 aa, Escherichia coli
MRHVITYLRYSSATQGAEGADSTRRQNELFKQWLRKNSDAQVVASFNDEGLSGYKGKHLSGQFGDMLSRIESGEFSKGTILLVEAIDRIGRLEHLETEALMNRIIAHGIEIHTLQDGLIYTRDALSDDLGISIIQRVKSYLAHQESKQKSFRVSEKWKQRAKLALAGEQRLTKMVPGWIDPETFKLNEHAETVRLIFKLLLDGESLHNIARHLQANNISSFSRRKDANGFSVHSVRTILRSETTIGTLPASQRNDRPAIPNYYEAAIDAATFNKAQEILGKNRIGRTPASDNPLTINIFKGLFRCQCGASVHPTGTKNKYAGVYRCNNNPDGRCDVPPLKRKPFDKWMIDNFLGMIDVGNDGEAEGKIAALQHEVEIVTARIKKATALLLEMDDITELKTQVKGLNQKRTELQTTIDNMRRKASLTDKELPQLKDIDLTTKAGRVECQLILSKHLKGLTLGKDSVIVTLQNDTEITIPTNPLPLNDGTSIFEIAEKELLEIDAYQL

SEQ ID NO: 31917 - DNA, 50 bp, Escherichia coli; identical to SEQ ID NO: 30087
  source 1..50: mol_type = genomic DNA

SEQ ID NO: 31918 - DNA, 40 bp, Escherichia coli; identical to SEQ ID NO: 20043
  source 1..40: mol_type = genomic DNA

SEQ ID NO: 31919 - DNA, 40 bp, Escherichia coli; identical to SEQ ID NO: 30164
  source 1..40: mol_type = genomic DNA

SEQ ID NO: 31920 - DNA, 50 bp, Escherichia coli; identical to SEQ ID NO: 7690
  source 1..50: mol_type = genomic DNA

SEQ ID NO: 31921 - protein, 506 aa, Escherichia coli
MRTVITYLRFSSATQGAEGADSTRRQNELFKQWLRKNSDAQVVASFSDEGLSGYKGKHLTGQFGDMLARIESGEFSEGTVLLVEAIDRIGRLEHLETEALMNRIIAHGIEIHTLQDGLIYTRDALSDDLGISIIQRVKSYVAHQESKQKSFRVSQKWKQRAKLALAGEQRLTRNVPGWIDPDTFKCNEHAETVRLIFKLLLDGESLHNIARHLQSNDIKSFSRRKDANGFSVHSVRTVLRSESVIGTLPASQRNDRPAIPNYYEAAIDAATFNKAQEILDKNRKGRTPASDNPLTINIFKGLFRCQCGASVHPTGTKRTYQGVYRCNNHLDGRCDVPPLKRKPFDRWMIDNFLGMIDVGNDGEAEGKIASLQHEVEIVTARIKKATALLLEMDDITELKAQVKGLNQKRTELQTTIDNMRRKASLTDKELPQLKDIDLTTKAGRVECQLILSKHLKGLTLGKDSVTVTLQNDTEITIPTNPLPLNDGSPIFEIADKELLDIDAYQL

SEQ ID NO: 31922 - DNA, 50 bp, Escherichia coli; identical to SEQ ID NO: 30087
  source 1..50: mol_type = genomic DNA

SEQ ID NO: 31923 - DNA, 40 bp, Escherichia coli; identical to SEQ ID NO: 20043
  source 1..40: mol_type = genomic DNA

SEQ ID NO: 31924 - DNA, 40 bp, Escherichia coli; identical to SEQ ID NO: 30164
  source 1..40: mol_type = genomic DNA

SEQ ID NO: 31925 - DNA, 50 bp, Escherichia coli; identical to SEQ ID NO: 7690
  source 1..50: mol_type = genomic DNA

SEQ ID NO: 31926 - protein, 506 aa, Escherichia coli
MRHVITYLRYSSAIQGAEGADSTRRQNDLFKQWLKKNSDAQVVASFNDEGLSGYKGKHLSGQFGDMLSRIESGEFSEGTVLLVEAIDRIGRLEHLETEALMNRIIAHGIEIHTLQDGLIYTRDALSDDLGISIIQRVKSYIAHQESKQKSFRVSQKWEQRAKLALAGEQRLTRNVPGWIDPDTFKCNEHAETVRLIFKLLLSGESLHNIARHLQSNGIKSFSRRKDANGFSVHSVRTILRSETTIGTLPASQRNDRPAIPNYYEAAIDASTFNKAQEILGKNRIGRTPASDNPLTINIFKGLFRCQCGASVHPTGTKNKYQGVYRCNNHLDGRCDVPPLKRKPFDKWMIDNFLGMIDVGNDGEAEGKIASLQHEVEIVTTRIKKATALLLEMDDIDELKIQLKELNQKRTELQTTIDNMRRKASLTDKELPQLKDIDLTTKAGRVECQLILSKHLKGLTLGKDTVTVTLQNDTEITIPTDPLPLNDGTSIFEIAEKNLLNIDTFQL

SEQ ID NO: 31927 - DNA, 50 bp, Escherichia coli; identical to SEQ ID NO: 30087
  source 1..50: mol_type = genomic DNA

SEQ ID NO: 31928 - DNA, 40 bp, Escherichia coli; identical to SEQ ID NO: 20043
  source 1..40: mol_type = genomic DNA

SEQ ID NO: 31929 - DNA, 40 bp, Escherichia coli; identical to SEQ ID NO: 30164
  source 1..40: mol_type = genomic DNA

SEQ ID NO: 31930 - DNA, 50 bp, Escherichia coli; identical to SEQ ID NO: 7690
  source 1..50: mol_type = genomic DNA

SEQ ID NO: 31931 - protein, 506 aa, Escherichia coli
MRTVITYLRFSSAIQGAEGADSTRRQNDLFKQWLKKNSDAQVVASFSDEGLSGYKGKHLTGQFGDMLARIESGEFPEGTILLVEAIDRIGRLEHLETEALMNRIIAHGIEIHTLQDGLIYTRDALSDDLGISIIQRVKSYVAHQESKQKSFRVSQKWKQRAKLALAGEQRLTKMVPGWIDPDTFKCNEHAETVRLIFKLLLDGESLHNIARHLQSNDIKSFSRRKDANGFSVHSVRTVLRSESVIGTLPASQRNDRPAIPNYYEAAIDAATFNKAQEILDKNRKGRTPASDNPLTINIFKGLFRCQCGASVHPTGTKNKYQGVYRCNNHLDGRCDVPPLKRKPFDKWMIDNFLGMIDVGNDGEAEGKIASLQHEVEIVTTRIKKATALLLEMDDITELKAQVKELNQKRTELQTTIDSMRRKTSLSDKGLPQLKDIDLMTKAGRVECQLILSKHLKGLTLGKDSVTVTLQNDTEITIPTNPLPLNDGTSIFEIAEKELLEIDAYQL

SEQ ID NO: 31932 - DNA, 50 bp, Escherichia coli; identical to SEQ ID NO: 30087
  source 1..50: mol_type = genomic DNA

SEQ ID NO: 31933 - DNA, 40 bp, Escherichia coli; identical to SEQ ID NO: 20043
  source 1..40: mol_type = genomic DNA

SEQ ID NO: 31934 - DNA, 40 bp, Escherichia coli; identical to SEQ ID NO: 30164
  source 1..40: mol_type = genomic DNA

SEQ ID NO: 31935 - DNA, 50 bp, Escherichia coli; identical to SEQ ID NO: 7690
  source 1..50: mol_type = genomic DNA

SEQ ID NO: 31936 - protein, 506 aa, Escherichia coli
MRTVITYLRYSSAIQGAEGADSTRRQNDLFKQWLKKNSDAQVVASFSDEGLSGYKGKHLTGQFGDMLARIESGEFPEGTILLVEAIDRIGRLEHLETEALMNRIIAHGIEIHTLQDGLIYTRDALSDDLGISIIQRVKSYVAHQESKQKSFRVSQKWKQRAKLALAGEQRLTKMVPGWIDPDTFKCNEHAETVRLIFKLLLSGESLHNIARHLQANNISSFSRRKDANGFSVHSVRTVLRSESVIGTLPASQRNDRPAIPNYYEAAIDAATFNKAQEILDKNRKGRTPASDNPLTINIFKGLFRCQCGASVHPTGTKNKYQGVYRCNNHLDGRCDVPPLKRKPFDKWMIDNFLGMIDVGNDGEAEGKIASLQHEVEIVTARIKKATALLLEMDDIDELKIQLKELNQRRTELQTTIDSMRRKTSLSDKGLPQLKDIDLMTKAGRVECQLILSKHLKGLTLGKDSVTVTLQNDTEITIPTNPLPLNDGTSIFEIAEKNLLNIDTFQL

SEQ ID NO: 31937 - DNA, 50 bp, Escherichia coli; identical to SEQ ID NO: 30087
  source 1..50: mol_type = genomic DNA

SEQ ID NO: 31938 - DNA, 40 bp, Escherichia coli; identical to SEQ ID NO: 20043
  source 1..40: mol_type = genomic DNA

SEQ ID NO: 31939 - DNA, 40 bp, Escherichia coli; identical to SEQ ID NO: 30164
  source 1..40: mol_type = genomic DNA

SEQ ID NO: 31940 - DNA, 50 bp, Escherichia coli; identical to SEQ ID NO: 7690
  source 1..50: mol_type = genomic DNA

SEQ ID NO: 31941 - protein, 506 aa, Escherichia coli
MRHVITYLRYSSAIQGAEGADSTRRQNELFKQWLRKNSDAQVVASFSDEGLSGYKGKHLTGQFGDMLARIEAGEFPAGTILLVESIDRIGRLEHLETEALMNRILGNGIEIHTLQDGLIYTKDALADDLGISIIQRVKAYIAHQESKQKSFRVSQKWEQRAKLALAGEQRLTKMVPGWIDPDTFKCNEHAETVRLIFKLLLDGESLHNIARHLQANNISSFSRRKDANGFSVHSVRTILRSETTRGTLPASQRNDRPAIPNYYEAAIDAATFNKAQEILDKNRKGRTPASDNPLTINIFKGLFRCQCGASVHPTGTKNKYAGVYRCNNHLDGRCDVPPLKRKPFDKWMLENFLGMIDVGNDGEAEGKIASLQHEVEIVTTRIKKATALLLEMDDIDELKIQLKELNQKRTELQTTIDSMRRKTSLTDKELPQLKDIDLMTKAGRVECQLILSKHLKGLTLGKDSVTVTLQNDTEITIPTNPLPLNDGSPIFEIADKELLDIDAYQL

SEQ ID NO: 31942 - DNA, 50 bp, Escherichia coli; identical to SEQ ID NO: 30087
  source 1..50: mol_type = genomic DNA

SEQ ID NO: 31943 - DNA, 40 bp, Escherichia coli; identical to SEQ ID NO: 20043
  source 1..40: mol_type = genomic DNA

SEQ ID NO: 31944 - DNA, 40 bp, Escherichia coli; identical to SEQ ID NO: 30164
  source 1..40: mol_type = genomic DNA

SEQ ID NO: 31945 - DNA, 50 bp, Escherichia coli; identical to SEQ ID NO: 7690
  source 1..50: mol_type = genomic DNA

SEQ ID NO: 31946 - protein, 506 aa, Escherichia coli
MRHVITYLRYSSAIQGAEGADSTRRQNDLFKQWLKKNSDAQVVASFSDEGLSGYKGKHLTGQFGDMLARIESGEFPAGTILLVESIDRIGRLEHLETEALMNRILGNGIEIHTLQDGLIYTKDALADDLGISIIQRVKAYIAHQESKQKSFRVSQKWEQRAKLALAGEQRLTKMVPGWIDPDTFKCNEHAETVRLIFKLLLDGESLHNIARHLQANNISSFSRRKDANGFSVHSVRTILRSETTRGTLPASQRNDRPAIPNYYEAAIDAATFNKAQEILDKNRKGRTPASDNPLTINIFKGLFRCQCGASVHPTGTKNKYQGVYRCNNHLDGRCDVPPLKRKPFDKWMIDNFLGMIDVGNDGEAEGKIAALQHEVEIVTARIKKATALLLEMDDIDELKIQLKELNQKRTELQTTIDNMRRKASLTDKELPQLKDIDLTTKAGRVECQLILSKHLKGLTLGKDTVTVTLQNDTEITIPTDPLPLNDGTSIFEIAEKNLLNIDTFQL

SEQ ID NO: 31947 - DNA, 50 bp, Escherichia coli; identical to SEQ ID NO: 30087
  source 1..50: mol_type = genomic DNA

SEQ ID NO: 31948 - DNA, 40 bp, Escherichia coli; identical to SEQ ID NO: 20043
  source 1..40: mol_type = genomic DNA

SEQ ID NO: 31949 - DNA, 40 bp, Escherichia coli; identical to SEQ ID NO: 30164
  source 1..40: mol_type = genomic DNA

SEQ ID NO: 31950 - DNA, 50 bp, Escherichia coli; identical to SEQ ID NO: 7690
  source 1..50: mol_type = genomic DNA

SEQ ID NO: 31951 - protein, 506 aa, Escherichia coli
MRTVITYLRFSSAIQGAEGADSTRRQNDLFKQWLKKNSDAQVVASFSDEGLSGYKGKHLTGQFGDMLARIESGEFPEGTVLLVEAIDRIGRLEHLETEALMNRIIAHGIEIHTLQDGLIYTRDALSDDLGISIIQRVKSYVAHQESKQKSFRVSQKWKQRAKLALAGEQRLTKMVPGWIDPDTFKCNEHAETVRLIFKLLLDGESLHNIARHLQANNISSFSRRKDANGFSVHSVRTILRSETTRGTLPASQRNDRPAIPNYYEAAIDAATFNKAQEILDKNRKGRTPASDNPLTINIFKGLFRCQCGASVHPTGTKNKYQGVYRCNNHLDGRCDVPPLKRKPFDKWMIDNFLGMIDVGNDGESERKIAALQHEVEIVTARIKKATALLLEMDDIDELKIQLKELNQKRTELQTTIDNMRRKASLTDKELPQLKDIDLTTKAGRVECQLILSKHLKGLTLGKDSVTVTLQNDTEITIPTNPLPLNDGTSIFEIAEKELLEIDAYQL

SEQ ID NO: 31952 - DNA, 50 bp, Escherichia coli; identical to SEQ ID NO: 30087
  source 1..50: mol_type = genomic DNA

SEQ ID NO: 31953 - DNA, 40 bp, Escherichia coli; identical to SEQ ID NO: 20043
  source 1..40: mol_type = genomic DNA

SEQ ID NO: 31954 - DNA, 40 bp, Escherichia coli; identical to SEQ ID NO: 30164
  source 1..40: mol_type = genomic DNA

SEQ ID NO: 31955 - DNA, 50 bp, Escherichia coli; identical to SEQ ID NO: 7690
  source 1..50: mol_type = genomic DNA

SEQ ID NO: 31956 - protein, 506 aa, Escherichia coli
MRSVITYLRFSSAIQGAEGADSTRRQNDLFKQWLKKNSDAQVVASFSDEGLSGYKGKHLTGQFGDMLARTESGEFPEGTILLVESIDRIGRLEHLETEALMNRILGNGLEIHTLQDGLIYTKDALADDLGISIIQRVKAYIAHQESKQKSFRVSQKWGQRAKLALAGEQRLTRNVPGWIDPDTLKLNEHAETVRLIFKLLLDGESLHNIARHLQSNDIKSFSRRKDANGFSVHSVRTVLRSESVIGTLPASQRNDRPAIPNYYEAAIDASTFNKAQEILDKNRKGRTPASDNPLTINIFKGLFRCQCGASVHPTGTKRTYQGVYRCNNHLDGRCHVPPLKRKPFDKWMLENFLGMIDVGNDGESERKIAALQHEVEIVTSRIKKATALLLEMDDITELKAQVKELNQKRTELQTTIDTLKRKTSLTDKELPQLKDIDLTTKAGRVECQLILSKHLKGLTLGKDSVIVTLQNDTEITIPTNPLPLNDGTSIFEIAEKELLEIDAYQL

SEQ ID NO: 31957 - DNA, 50 bp, Escherichia coli; identical to SEQ ID NO: 30087
  source 1..50: mol_type = genomic DNA

SEQ ID NO: 31958 - DNA, 40 bp, Escherichia coli; identical to SEQ ID NO: 20043
  source 1..40: mol_type = genomic DNA

SEQ ID NO: 31959 - DNA, 40 bp, Escherichia coli; identical to SEQ ID NO: 30164
  source 1..40: mol_type = genomic DNA

SEQ ID NO: 31960 - DNA, 50 bp, Escherichia coli; identical to SEQ ID NO: 7690
  source 1..50: mol_type = genomic DNA

SEQ ID NO: 31961 - protein, 506 aa, Escherichia coli
MRSVITYLRFSSAIQGAEGADSTRRQNDLFKQWLKKNSDAQVVASFSDEGLSGYKGKHLTGQFGDMLARIESGEFPEGTILLVESIDRIGRLEHLETEALMNRILGNGLEIHTLQDGLIYTKDALADDLGISIIQRVKAYIAHQESKQKSFRVSQKWGQRAKLALAGEQRLTRNVPGWIDPDTLKLNEHAETVRLIFKLLLDGESLHNIARHLQSNDIKSFSRRKDANGFSVHSVRTVLRSESVIGTLPASQRNDRPAIPNYYEAAIDASTFNKAQEILDKNRKGRTPASDNPLTINIFKGLFRCQCGASVHPTGTKRTYQGVYRCNNHLDGRCHVPPLKRKPFDKWMLENFLGMIDVGNDGESERKIAALQHEVEIVTSRIKKATALLLEMDDITELKAQVKELNQKRTELQTTIDTLKRKTSLTDKELPQLKDIDLTTKAGRVECQLILSKHLKGLTLGKDSVIVTLQNDTEITIPTNPLPLNDGTSIFEIAEKELLEIDAYQL

SEQ ID NO: 31962 - DNA, 50 bp, Escherichia coli; identical to SEQ ID NO: 30087
  source 1..50: mol_type = genomic DNA

SEQ ID NO: 31963 - DNA, 40 bp, Escherichia coli; identical to SEQ ID NO: 20043
  source 1..40: mol_type = genomic DNA

SEQ ID NO: 31964 - DNA, 40 bp, Escherichia coli; identical to SEQ ID NO: 30164
  source 1..40: mol_type = genomic DNA

SEQ ID NO: 31965 - DNA, 50 bp, Escherichia coli; identical to SEQ ID NO: 7690
  source 1..50: mol_type = genomic DNA

SEQ ID NO: 31966 - protein, 506 aa, Escherichia coli
MRSVITYLRYSSAIQGAEGADSTRRQNDLFKQWLKKNSDAQVVASFSDEGLSGYKGKHLTGQFGDMLARIESGEFTAGTILLVESIDRIGRLEHLETEALMNRILGNGIEIHTLQDGLIYTKDALADDLGISIIQRVKAYIAHQESKQKSFRVSQKWEQRAKLALAGEQRLTKMVPGWIDPDTFKLNEHAETVRLIFKLLLDGESLHNIARHLQSNGIKSFSRRKDANGFSVHSVRTILRSVTTRGTLPASQRNDRPAIPNYYEAAIDAATFNKAQEILDKNRKGRTPASDNPLTINIFKGLFRCQCGASVHPTGTKNKYAGVYRCNNHLDGRCDVPPLKRKPFDKWMIDNFLGMIDVGNDGEAEGKIASLQHEVEIVTARIKKATALLLEMDDIDELKIQIKELNQRRTELQTTIDSMRRKASLTDKELPQLKDIDLTTKAGRVECQLILSKHLKGLTLGKGSVTITLQNDTEITIPTNPLPLNDGSPIFEIADKELLDIDAYQL

SEQ ID NO: 31967 - DNA, 50 bp, Escherichia coli; identical to SEQ ID NO: 30087
  source 1..50: mol_type = genomic DNA

SEQ ID NO: 31968 - DNA, 40 bp, Escherichia coli; identical to SEQ ID NO: 20043
  source 1..40: mol_type = genomic DNA

SEQ ID NO: 31969 - DNA, 40 bp, Escherichia coli; identical to SEQ ID NO: 30164
  source 1..40: mol_type = genomic DNA

SEQ ID NO: 31970 - DNA, 50 bp, Escherichia coli; identical to SEQ ID NO: 7690
  source 1..50: mol_type = genomic DNA

SEQ ID NO: 31971 - protein, 506 aa, Escherichia coli
MRTVITYLRFSSATQGAEGADSTRRQNELFKQWLRKNSDAQVVASFSDEGLSGYKGKHLTGQFGDMLARIEAGEFPAGAILLVESIDRIGRLEHLETEALMNRIIAHGIEIHTLQDGLIYTRDALSDDLGISIIQRVKSYLAHQESKQKSFRVSEKWKQRAKLALAGEQHLTRNVPGWIDPDTFKCNEHAETVRLIFKLLLDGESLHNIARHLQSNDIKSFSRRKDANGFSVHSVRTVLRSESVIGTLPASQRNDRPAIPNYYEAAIDASTFNKAQEILDKNRKGRTPASDNPLTINIFKGLFRCQCGASVHPTGTKNKYQGVYRCNSHLDGRCDVPPLKRKPFDRWMIDNFLGMIDVGNDGEAEGEIASLQHEVEIVTTRIKKATALLLEMDDIDELKIQLKELNQKRTELQTTIDNMRRKASLTDKELPQLKDIDLTTKAGRVECQLILSKHLKGLTLGKDTVTVTLQNDTEITIPTDPLPLNDGTSIFEIAEKNLLNIDTFQL

SEQ ID NO: 31972 - DNA, 50 bp, Escherichia coli; identical to SEQ ID NO: 30087
  source 1..50: mol_type = genomic DNA

SEQ ID NO: 31973 - DNA, 40 bp, Escherichia coli; identical to SEQ ID NO: 20043
  source 1..40: mol_type = genomic DNA

SEQ ID NO: 31974 - DNA, 40 bp, Escherichia coli; identical to SEQ ID NO: 30164
  source 1..40: mol_type = genomic DNA

SEQ ID NO: 31975 - DNA, 50 bp, Escherichia coli; identical to SEQ ID NO: 7690
  source 1..50: mol_type = genomic DNA

SEQ ID NO: 31976 - protein, 506 aa, Escherichia coli
MRHVITYLRYSSATQGAEGADSTRRQNELFKQWLRKNSDAQVVASFNDEGLSGYKGKHLSGQFGDMLSRIESGEFSKGTILLVEAIDRIGRLEHLETEALMNRIIAHGIEIHTLQDGLIYTRDALSDDLGISIIQRVKSYLAHQESKQKSFRVSEKWKQRAKLALAGEQRLTKMVPGWIDPETFKLNEHAETVRLIFKLLLDGESLHNIARHLQDNNISSFSRRKDANGFSVHSVRTILRSETTIGTLPASQRNDRPAIPNYYEAAIDAATFNKAQEILGKNRIGRTPASDNPLTINIFKGLFRCQCGTSVHPTGTKNKYQGVYRCNNHLDGRCDVPPLKRKPFDKWMIDNFLGMIDVGNDGEAEGKIASLQHEVEIVTTRIKKATALLLEMDDIDELKIQLKELNQKRTELQTTIDNMKRKTSLTDKELPQLKDIDLTTKAGRVECQLILSKHLKGLTLGKDTVTVTLQNDTEITIPTDPLPLNDGTSIFEIAEKELLDIDAYQL

SEQ ID NO: 31977 - DNA, 50 bp, Escherichia coli; identical to SEQ ID NO: 30087
  source 1..50: mol_type = genomic DNA

SEQ ID NO: 31978 - DNA, 40 bp, Escherichia coli; identical to SEQ ID NO: 20043
  source 1..40: mol_type = genomic DNA

SEQ ID NO: 31979 - DNA, 40 bp, Escherichia coli; identical to SEQ ID NO: 30164
  source 1..40: mol_type = genomic DNA

SEQ ID NO: 31980 - DNA, 50 bp, Escherichia coli; identical to SEQ ID NO: 7690
  source 1..50: mol_type = genomic DNA

SEQ ID NO: 31981 - protein, 506 aa, Escherichia coli
MRTVITYLRFSSATQGAEGADSTRRQNELFKQWLRKNSDAQVVASFSDEGLSGYKGKHLTGQFGDMLARIEAGEFPAGTILLVESIDRIGRLEHLETEALMNRILGNGIEIHTLQDGLIYTKDALADDLGISIIQRVKAYIAHQESKQKSFRVSQKWEQRAKLALAGEQRLTKMVPGWIDPDTFKCNEHAETVRLIFKLLLDGESLHNIARHLQANNISSFSRRKDANGFSVHSVRTILRSETTIGTLPASQRNDRPAIPNYYEAAIDAATFNKAQEILDKNRKGRTPASDNPLTINIFKGLFRCQCGASVHPTGTKNKYAGVYRCNNHLDGRCDVPPLKRKPFDRWMIDNFLGMIDVGNDGEAEGKIAALQHEVEIVTARIKKATALLLEMDDITELKTQVKGLNQKRTELQTTIDSMRRKTSLSDKGLPQLKDIDLTTKAGRVECQLILSKHLKGLTLGKDSVTVTLQNDTEITIPTNPLPLNDGSPIFEIADKELLEIDAYQL

SEQ ID NO: 31982 - DNA, 50 bp, Escherichia coli; identical to SEQ ID NO: 30087
  source 1..50: mol_type = genomic DNA

SEQ ID NO: 31983 - DNA, 40 bp, Escherichia coli; identical to SEQ ID NO: 20043
  source 1..40: mol_type = genomic DNA

SEQ ID NO: 31984 - DNA, 40 bp, Escherichia coli; identical to SEQ ID NO: 30164
  source 1..40: mol_type = genomic DNA

SEQ ID NO: 31985 - DNA, 50 bp, Escherichia coli; identical to SEQ ID NO: 7690
  source 1..50: mol_type = genomic DNA

SEQ ID NO: 31986 - protein, 506 aa, Escherichia coli
MRHVITYLRYSSATQGAEGADSTRRQNELFKQWLRKNSDAQVVASFNDEGLSGYKGKHLSGQFGDMLSRIESGEFSKGTILLVEAIDRIGRLEHLETEALMNRIIAHGIEIHTLQDGLIYTRDALSDDLGISIIQRVKSYLAHQESKQKSFRVSEKWKQRAKLALAGEQRLTKMVPGWIDPETFKLNEHAETVRLIFKLLLDGESLHNIARHLQSNDIKSFSRRKDANGFSVHSVRTVLRSESVIGTLPASQRNDRPAIPNYYEAAIDAATFNKAQEILDKNRKGRTPASDNPLTINIFKGLFRCQCGASVHPTGTKNKYQGVYRCNNHLDGRCDVPPLKRKPFDRWMIDNFLGMIDVGNDGESERKIASLQHEVEIVTTRIKKATALLLEMDDITELKAQVKELNQKRTELQTTIDNMRRKASLTDKELPQLKDIDLTTKAGRVECQLILSKHLKGLTLGKDTVTVTLQNDTEITIPTDPLPLNDGTSIFEIAEKNLLNIDTFQL

SEQ ID NO: 31987 - DNA, 50 bp, Escherichia coli; identical to SEQ ID NO: 30087
  source 1..50: mol_type = genomic DNA

SEQ ID NO: 31988 - DNA, 40 bp, Escherichia coli; identical to SEQ ID NO: 20043
  source 1..40: mol_type = genomic DNA

SEQ ID NO: 31989 - DNA, 40 bp, Escherichia coli; identical to SEQ ID NO: 30164
  source 1..40: mol_type = genomic DNA

SEQ ID NO: 31990 - DNA, 50 bp, Escherichia coli; identical to SEQ ID NO: 7690
  source 1..50: mol_type = genomic DNA

SEQ ID NO: 31991 - protein, 506 aa, Escherichia coli
MRTVITYLRFSSATQGAEGADSTRRQNELFKQWLRKNSDAQVVASFSDEGLSGYKGKHLTGQFGDMLARIESGEFPESTILLVESIDRIGRLEHLETEALMNRILGNGLEIHTLQDGLIYTKDALADDLGISIIQRVKAYIAHQESKQKSFRVSEKWKQRAKLALAGEQRLTKMVPGWIDPDTLKLNEHAETVRLIFKLLLSGESLHNIARHLQSNGIKSFSRRKDANGFSVHSVRTILRSETTIGTLPASQRNDRPAIPNYYEAAIDAATFNKAQEILDKNRKGRTPASDNPLTINIFKGLFRCQCGASVHPTGTKNKYAGVYRCNNHLDGRCDVPPLKRKPFDKWMLENFLGMIDVGNDGEAEGKIASLQHEVEIVTTRIKKATALLLEMDDIDELKIQLKELNQRRTELQTTIDNMRRKASLTDKELPQLKDIDLTTKAGRVECQLILSKHLKGLTLGKDSVTVTLQNDTEITIPTNPLPLNDGSPIFEIADKELLDIDAYQL

SEQ ID NO: 31992 - DNA, 50 bp, Escherichia coli; identical to SEQ ID NO: 30087
  source 1..50: mol_type = genomic DNA

SEQ ID NO: 31993 - DNA, 40 bp, Escherichia coli; identical to SEQ ID NO: 20043
  source 1..40: mol_type = genomic DNA

SEQ ID NO: 31994 - DNA, 40 bp, Escherichia coli; identical to SEQ ID NO: 30164
  source 1..40: mol_type = genomic DNA

SEQ ID NO: 31995 - DNA, 50 bp, Escherichia coli; identical to SEQ ID NO: 7690
  source 1..50: mol_type = genomic DNA

SEQ ID NO: 31996 - protein, 506 aa, Escherichia coli
MRTVITYLRFSSAIQGAEGADSTRRQNDLFKQWLKKNSDAQVVASFSDEGLSGYKGKHLTGQFGDMLARIESGEFPGGTILLVESIDRIGRLEHLETEALMNRILGNGIEIHTLQDGLVYTKDALADDLGISIIQRVKSYIAHQESKQKSFRVSEKWKQRAKLALAGEQRLTRNVPGWIDPDTFTLNEHAETVRLIFKLLLSGESLHNIARHLQSNGIKSFSRRKDANGFSVHSVRTILRSETTIGTLPASQRNDRPAIPNYYEAAIDAATFNKAQEILDKNRKGRTPASDNPLTINIFKGLFRCQCGASVHPTGTKNKYQGVYRCNNHLDGRCDVPPLKRKPFDKWMIDNFLGMIDVGNDGEAEGKIASLQHEVEIVTTRIKKATALLLEMDDIDELKIQIKELNQRRTELQTTIDNMRRKASLSDKELPQLKDIDLTTKAGRVECQLILSKHLKGLTLGKDSVIVTLQNDTEITIPTNPLPLNDGTSIFEIAEKELLEIDAYQL

SEQ ID NO: 31997 - DNA, 50 bp, Escherichia coli; identical to SEQ ID NO: 30087
  source 1..50: mol_type = genomic DNA

SEQ ID NO: 31998 - DNA, 40 bp, Escherichia coli; identical to SEQ ID NO: 20043
  source 1..40: mol_type = genomic DNA

SEQ ID NO: 31999 - DNA, 40 bp, Escherichia coli; identical to SEQ ID NO: 30164
  source 1..40: mol_type = genomic DNA

SEQ ID NO: 32000 - DNA, 50 bp, Escherichia coli; identical to SEQ ID NO: 7690
  source 1..50: mol_type = genomic DNA

SEQ ID NO: 32001 - protein, 506 aa, Escherichia coli
MRSVITYLRFSSAIQGAEGADSTRRQNDLFKQWLKKNSDAQVVASFSDEGLSGYKGKHLTGQFGDMLARIESGEFSEGTVLLVEAIDRIGRLEHLETEALMNRIIAHGIEIHTLQDGLIYTRDALSDDLGISIIQRVKSYVAHQESKQKSFRVSQKWKQRAKLALAGEQRLTKMVPGWIDPDTFKCNKHAETVRLIFKLLLDGESLHNIARHLQANNISSFSRRKDANGFSVHSVRTILRSETTRGTLPASQRNDRPAIPNYYEAAIDAATFNKAQEILDKNRKGRTPASDNPLTINIFKGLFRCQCGASVHPTGTKNKYQGVYRCNNHLDGRCDVPPLKRKPFDKWMIDNFLGMIDVGNDGEAEGKIASLQHEVEIVTTRIKKATALLLEMDDITELKAQVKELNQKRTELQTTIDSMRRKTSLSDKGLPQLKDIDLMTKAGRVECQLILSKHLKGLTLGKDSVTVTLQNDTEITIPTNPLPLNDGTSIFEIAEKELLEIDAYQL

SEQ ID NO: 32002 - DNA, 50 bp, Escherichia coli; identical to SEQ ID NO: 30087
  source 1..50: mol_type = genomic DNA

SEQ ID NO: 32003 - DNA, 40 bp, Escherichia coli; identical to SEQ ID NO: 20043
  source 1..40: mol_type = genomic DNA

SEQ ID NO: 32004 - DNA, 40 bp, Escherichia coli; identical to SEQ ID NO: 30164
  source 1..40: mol_type = genomic DNA

SEQ ID NO: 32005 - DNA, 50 bp, Escherichia coli; identical to SEQ ID NO: 7690
  source 1..50: mol_type = genomic DNA

SEQ ID NO: 32006 - protein, 506 aa, Escherichia coli; identical to SEQ ID NO: 31891

SEQ ID NO: 32007 - DNA, 50 bp, Escherichia coli; identical to SEQ ID NO: 30087
  source 1..50: mol_type = genomic DNA

SEQ ID NO: 32008 - DNA, 40 bp, Escherichia coli; identical to SEQ ID NO: 20043
  source 1..40: mol_type = genomic DNA

SEQ ID NO: 32009 - DNA, 40 bp, Escherichia coli; identical to SEQ ID NO: 30164
  source 1..40: mol_type = genomic DNA

SEQ ID NO: 32010 - DNA, 50 bp, Escherichia coli; identical to SEQ ID NO: 7690
  source 1..50: mol_type = genomic DNA

SEQ ID NO: 32011 - protein, 506 aa, Escherichia coli
MRTVITYLRFSSATQGAEGADSTRRQNELFKQWLRKNSDAQVVASFSDEGLSGYKGKHLTGQFGDMLARIEAGEFPAGAILLVESIDRIGRLEHLETEALMNRIIAHGIEIHTLQDGLIYTRDALSDDLGISIIQRVKSYLAHQESKQKSFRVSEKWKQRAKLALAGEQHLTRNVPGWIDPDTFKCNEHAETVRLIFKLLLDGESLHNIARHLQSNDIKSFSRRKDANGFSVHSVRTVLRSESVIGTLPASQRNDRPAIPNYYEAAIDASTFNKAQEILDKNRKGRTPASDNPLTINIFKGLFRCQCGASVHPTGTKNKYQGVYRCNSHLDGRCDVPPLKRKPFDRWMIDNFLGMIDVGNDGEAEKEIASLQHEVETVTARIKKATALLLEMDDITELKTQVKELNQKRTELQTTINTMKRKTSLSDKGLPQLKDIDLMTKAGRVECQLILSKHLKGLTLGKDSVTVTLQNDTEITIPTNPLPLNDGSPIFEIADKELLDIDAYQL

SEQ ID NO: 32012 - DNA, 50 bp, Escherichia coli; identical to SEQ ID NO: 30087
  source 1..50: mol_type = genomic DNA

SEQ ID NO: 32013 - DNA, 40 bp, Escherichia coli; identical to SEQ ID NO: 20043
  source 1..40: mol_type = genomic DNA

SEQ ID NO: 32014 - DNA, 40 bp, Escherichia coli; identical to SEQ ID NO: 30164
  source 1..40: mol_type = genomic DNA

SEQ ID NO: 32015 - DNA, 50 bp, Escherichia coli; identical to SEQ ID NO: 7690
  source 1..50: mol_type = genomic DNA

SEQ ID NO: 32016 - protein, 506 aa, Escherichia coli
MRTVITYLRFSSAIQGAEGADSTRRQNDLFKQWLKKNSDAQVVASFNDEGLSGYKGKHLSGQFGDMLSRIESGEFSKGTILLVEAIDRIGRLEHLETEALMNRIIAHGIEIHTLQDGLIYTRDALSDDLGISIIQRVKSYLAHQESKQKSFRVSEKWKQRAKLALAGEQRLTKMVPGWIDPETFKLNEHAETVRLIFKLLLDGESLHNIARHLQANNISSFSRRKDANGFSVHSVRTILRSETTRGTLPASQRNDRPAIPNYYEAAIDAATFNKAQEILDKNRKGRTPASDNPLTINIFKGLFRCQCGASVHPTGTKNKYQGVYRCNNHLDGRCDVPPLKRKPFDKWMIDNFLGMIDVGNDGEAEGKIAALQHEVEIVTARIKKATALLLEMDDITELKTQVKGLNQKRTELQTTIDNMRRKASLTDKELPQLKDIDLTTKAGRVECQLILSKHLKGLTLGKDSVTVTLQNDTEITIPTDPLPLNDGTSIFEIAEKNLLNIDTFQL

SEQ ID NO: 32017 - DNA, 50 bp, Escherichia coli; identical to SEQ ID NO: 30087
  source 1..50: mol_type = genomic DNA

SEQ ID NO: 32018 - DNA, 40 bp, Escherichia coli; identical to SEQ ID NO: 20043
  source 1..40: mol_type = genomic DNA

SEQ ID NO: 32019 - DNA, 40 bp, Escherichia coli; identical to SEQ ID NO: 30164
  source 1..40: mol_type = genomic DNA

SEQ ID NO: 32020 - DNA, 50 bp, Escherichia coli; identical to SEQ ID NO: 7690
  source 1..50: mol_type = genomic DNA

SEQ ID NO: 32021 - protein, 506 aa, Shigella boydii
MRTVITYLRFSSATQGAEGADSTRRQNELFKQWLRKNSDAQVVASFSDEGLSGYKGKHLTGQFGDMLARIEAGEFPAGAILLVESIDRIGRLEHLETEALMNRIIAHGIEIHTLQDGLIYTRDALSDDLGISIIQRVKSYLAHQESKQKSFRVSEKWKQRAKLALAGEQHLTRNVPGWIDPDTFKCNEHAETVRLIFKLLLDGESLHNIARHLQSNDIKSFSRRKDANGFSVHSVRTVLRSESVIGTLPASQRNDRPAIPNYYEAAIDAATFNKAQEILDKNRKGRTPASDNPLTINIFKGLFRCQCGASVHPTGTKNKYAGVYRCNNHLDGRCDVPPLKRKPFDKWMIDNFLGMIDVGNDGEAEGKIASLQHEVEIVTARIKKATALLLEMDDIDELKIQLKELNQKRTELQTMIDNMRRKASLTDKELPQLKDIDLMTKAGRVECQLILSKHLKGLTLGKDSVTVTLQNDTEIIVPTDPLPLNDGTSIFEIAEKELLEIDAYQL

SEQ ID NO: 32022 - DNA, 50 bp, Shigella boydii; identical to SEQ ID NO: 30087
  source 1..50: mol_type = genomic DNA

SEQ ID NO: 32023 - DNA, 40 bp, Shigella boydii; identical to SEQ ID NO: 20043
  source 1..40: mol_type = genomic DNA

SEQ ID NO: 32024 - DNA, 40 bp, Shigella boydii; identical to SEQ ID NO: 30164
  source 1..40: mol_type = genomic DNA

SEQ ID NO: 32025 - DNA, 50 bp, Shigella boydii; identical to SEQ ID NO: 7690
  source 1..50: mol_type = genomic DNA

SEQ ID NO: 32026 - protein, 506 aa, Escherichia coli
MRSVITYLRFSSAIQGAEGADSTRRQNDLFKQWLKKNSDAQVVASFSDEGLSGYKGKHLTGQFGDMLARIESGEFPEGTLLLVEAIDRIGRLEHLETEALMNRIIAHGIEIHTLQDGLIYTRDALSDDLGISIIQRVKSYVAHQESKQKSFRVSQKWKQRAKLALAGEQRLTKMVPGWIDPDTFKLNEHAETVRLIFKLLLSGESLHNIARHLQANNISSFSRRKDANGFSVHSVRTVLRSESVIGTLPASQRNDRPAIPNYYEAAIDASTFNKAQEILDKNRKGRTPASDNPLTINIFKGLFRCQCGASVHPTGTKNKYAGVYRCNNNPDGRCDVPPLKRKPFDKWMIDNFLGMIDVGNDGEAEGKIASLQHEVEIVTTRIKKATALLLEMDDITELKAQVKELNQKRTELQTTIDSMRRKTSLSDKGLPQLKDIDLMTKAGRVECQLILSKHLKGLTLGKDSVTVTLQNDTEIIVPTDPLPLNDGTSIFEIAEKELLEIDAYQL

SEQ ID NO: 32027 - DNA, 50 bp, Escherichia coli; identical to SEQ ID NO: 30087
  source 1..50: mol_type = genomic DNA

SEQ ID NO: 32028 - DNA, 40 bp, Escherichia coli; identical to SEQ ID NO: 20043
  source 1..40: mol_type = genomic DNA

SEQ ID NO: 32029 - DNA, 40 bp, Escherichia coli; identical to SEQ ID NO: 30164
  source 1..40: mol_type = genomic DNA

SEQ ID NO: 32030 - DNA, 50 bp, Escherichia coli; identical to SEQ ID NO: 7690
  source 1..50: mol_type = genomic DNA

SEQ ID NO: 32031 - protein, 506 aa, Escherichia coli
MRTVITYLRFSSATQGAEGADSTRRQNELFKQWLRKNSDAQVVASFSDEGLSGYKGKHLTGQFGDMLARIEAGEFPAGTILLVESIDRIGRLEHLETEALMNRILGNGIEIHTLQDGLIYTKDALADDLGISIIQRVKAYIAHQESKQKSFRVSQRWGQRAKLALAGKQRLTKMVPGWIDPETFKLNEHAETVRLIFKLLLDGESLHNIARHLQSNGIKSFSRRKDANGFSVHSVRTILRSETTIGTLPASQRNDRPAIPNYYEGVVDIPTFNKAQEILDKNRKGRTPASDNPLTINIFKGLFRCQCGASVHPTGTKNKYAGVYRCNNHLDGRCDVQPLKRKPFDRWMIDNFLGMIDVGNDGESERKIAALQHEVEIVTARIKKATALLLEMDDITELKTQVKGLNQKRTELQTTIDSMRRKTSLSDKGLPQLKDIDLTTKAGRVECQLILSKHLKGLTLGKDTVTVTLQNDTEITIPTNPLPLNDGSPIFEIADKELLDIDAYQL

SEQ ID NO: 32032 - DNA, 50 bp, Escherichia coli; identical to SEQ ID NO: 30087
  source 1..50: mol_type = genomic DNA

SEQ ID NO: 32033 - DNA, 40 bp, Escherichia coli; identical to SEQ ID NO: 20043
  source 1..40: mol_type = genomic DNA

SEQ ID NO: 32034 - DNA, 40 bp, Escherichia coli; identical to SEQ ID NO: 30164
  source 1..40: mol_type = genomic DNA

SEQ ID NO: 32035 - DNA, 50 bp, Escherichia coli; identical to SEQ ID NO: 7690
  source 1..50: mol_type = genomic DNA

SEQ ID NO: 32036 - protein, 506 aa, Escherichia coli
MRSVITYLRYSSAIQGAEGADSTRRQNDLFKQWLKKNSDAQVVASFSDEGLSGYKGKHLTGQFGDMLARIESGEFPESTILLVESIDRIGRLEHLETEALMNRILGNGLEIHTLQDGLIYTKDALADDLGISIIQRVKAYIAHQESKQKSFRVSQKWEQRAKLALAGEQRLTKMVPGWIDPDTFKLNEHAETVRLIFKLLLSGESLHNIARHLQSNGIKSFSRRKDANGFSVHSVRTILRSETTIGTLPASQRNDRPAIPNYYEAAIDASTFNKAQEILGKNRIGRTPASDNPLTINIFKGLFRCQCGASVHPTGTKNKYAGVYRCNNHLDGRCDVPPLKRKPFDRWMIDNFLGMIDVGNDGEAEGKIASLQHEVEIVTTRIKKATALLLEMDDIDELKIQLKELNRKRTELQTTIDNMRRKTSLTDKELPQLKDIDLTTKAGRVECQLILSKHLKGLTLGKDSVIVTLQNDTEITIPTNPLPLHDGTSIFEIAEKELLEIDAYQL

SEQ ID NO: 32037 - DNA, 50 bp, Escherichia coli; identical to SEQ ID NO: 30087
  source 1..50: mol_type = genomic DNA

SEQ ID NO: 32038 - DNA, 40 bp, Escherichia coli; identical to SEQ ID NO: 20043
  source 1..40: mol_type = genomic DNA

SEQ ID NO: 32039 - DNA, 40 bp, Escherichia coli; identical to SEQ ID NO: 30164
  source 1..40: mol_type = genomic DNA

SEQ ID NO: 32040 - DNA, 50 bp, Escherichia coli; identical to SEQ ID NO: 7690
  source 1..50: mol_type = genomic DNA

SEQ ID NO: 32041 - protein, 506 aa, Escherichia coli
MRHVITYLRYSSATQGAEGADSTRRQNELFKQWLRKNSDAQVVASFNDEGLSGYKGKHLSGQFGDMLSRIESGEFSKGTILLVEAIDRIGRLEHLETEALMNRIIAHGIEIHTLQDGLIYTRDALSDDLGISIIQRVKSYLAHQESKQKSFRVSEKWKQRAKLALAGEQRLTKMVPGWIDPETFKLNEHAETVRLIFKLLLDGESLHNIARHLQANNISSFSRRKDANGFSVHSVRTILRSETTRGTLPASQRNDRPAIPNYYEAAIDAATFNKAQEILDKNRKGRTPASDNPLTINIFKGLFRCQCGASVHPTGTKNKYQGVYRCNNHLDGRCDVPPLKRKPFDKWMIDNFLGMIDVGNDGEAEGKIASLQHEVEIVTARIKKATALLLEMDDIDELKIQLKELNQKRTELQTTIDNMRRKASLTDKELPQLKDIDLTTKAGRVECQLILSKHLKGLTLGKDSVTVTLQNDTEITIPTNPLPLNDGSPIFEIADKELLDIDAYQL

SEQ ID NO: 32042 - DNA, 50 bp, Escherichia coli; identical to SEQ ID NO: 30087
  source 1..50: mol_type = genomic DNA

SEQ ID NO: 32043 - DNA, 40 bp, Escherichia coli; identical to SEQ ID NO: 20043
  source 1..40: mol_type = genomic DNA

SEQ ID NO: 32044 - DNA, 40 bp, Escherichia coli; identical to SEQ ID NO: 30164
  source 1..40: mol_type = genomic DNA

SEQ ID NO: 32045 - DNA, 50 bp, Escherichia coli; identical to SEQ ID NO: 7690
  source 1..50: mol_type = genomic DNA

SEQ ID NO: 32046 - protein, 506 aa, Escherichia coli
MRHVITYLRYSSAIQGAEGADSTRRQNDLFKQWLKKNSDAQVVASFNDEGLSGYKGKHLSGQFGDMLSRIESGEFPGGTILLVEAIDRIGRLEHLETEALMNRILGNGIEIHTLQDGLIYTKDALADDLGISIIQRVKSYIAHQESKQKSFRVSQKWKQRAKLALAGEQRLTKMVPGWIDPETFEVNEHAETVRLIFKLLLDGESLHNIARHLQANNISSFSRRKDANGFSVHSVRTVLRSESVIGTLPASQRNDRPAIPNYYEAAIDAATFNKAQEILDKNRKGRTPASDNPLTINIFKGLFRCQCGASVHPTGTKNKYAGVYRCNNNPDGRCDVPPLKRKPFDKWMIDNFLGMIDVGNDGEAEGKIASLQHEVEIVTTRIKKATALLLEMDDIDELKIQLKELNQKRTELQTTIDNMRRKASLTDKELPQLKDIDLMTKAGRVECQLILSKHLESLTLGRGQVTVKLSNGTEIIVPTDPLPLTDGAAIFEIAEKNLLNIDTFQL

SEQ ID NO: 32047 - DNA, 50 bp, Escherichia coli; identical to SEQ ID NO: 30087
  source 1..50: mol_type = genomic DNA

SEQ ID NO: 32048 - DNA, 40 bp, Escherichia coli; identical to SEQ ID NO: 20043
  source 1..40: mol_type = genomic DNA

SEQ ID NO: 32049 - DNA, 40 bp, Escherichia coli; identical to SEQ ID NO: 30164
  source 1..40: mol_type = genomic DNA

SEQ ID NO: 32050 - DNA, 50 bp, Escherichia coli; identical to SEQ ID NO: 7690
  source 1..50: mol_type = genomic DNA

SEQ ID NO: 32051 - protein, 499 aa, Escherichia coli
MRFSSATQGAEGADSTRRQNELFKQWLRKNSDAQVVASFSDEGLSGYKGKHLTGQFGDMLARIEAGEFPAGTVLLVEAIDRIGRLEHLETEALMNRIIAHGIEIHTLQDGLIYTRDALSDDLGISIIQRVKSYLAHQESKQKSFRVSQKWKQRAKLALAGEQRLTRNVPGWIDPDTFKCNEHAETVRLIFKLLLDGESLHNIARHLQANNISSFSRRKDANGFSVHSVRTVLRSESVIGTLPASQRNDRPAIPNYYEAAIDAATFNKAQEILDKNRKGRTPASDNPLTINIFKGLFRCQCGASVHPTGTKNKYAGVYRCNSHLDGRCDVPPLKRKPFDKWMIDNFLGMIDVGNDGEAEGKIASLQHEVEIVTARIKKATALLLEMDDITELKTQVKELNQKRTELQTTIDSMRRKTSLSDKGLPQLKDIDLMTKEGRVECQLILSKHLKGLTLGKDSVTVTLQNDTEITIPTNPLPLNDGTSIFEIADKELLDIDAYQL

SEQ ID NO: 32052 - DNA, 50 bp, Escherichia coli; identical to SEQ ID NO: 30087
  source 1..50: mol_type = genomic DNA

SEQ ID NO: 32053 - DNA, 40 bp, Escherichia coli; identical to SEQ ID NO: 20043
  source 1..40: mol_type = genomic DNA

SEQ ID NO: 32054 - DNA, 40 bp, Escherichia coli; identical to SEQ ID NO: 30164
  source 1..40: mol_type = genomic DNA

SEQ ID NO: 32055 - DNA, 50 bp, Escherichia coli; identical to SEQ ID NO: 7690
  source 1..50: mol_type = genomic DNA

SEQ ID NO: 32056 - protein, 506 aa, Escherichia coli
MRTVITYLRFSSATQGAEGADSTRRQNELFKQWLRKNSDAQVVASFNDEGLSGYKGKHLSGQFGDMLSRIESGEFPEGTILLVEAIDRIGRLEHLETEALMNRIIAHGIEIHTLQDGLIYTRDALSDDLGISIIQRVKSYLAHQESKQKSFRVSEKWKQRAKLALAGKQRLTKMVPGWIDHDTFKINEHAETVRLIFKLLLDGESLHNIARHLQSNGIKSFSRRKDANGFSVHSVRTVLRSESVIGTLPASQRNDRPAIPNYYEAAIDAATFNKAQEILDKNRKGRTPASDNPLTINIFKGLFRCQCGASVHPTGTKNKYAGVYRCNNHLDGRCDVPPLKRKPFDRWMIDNFLGMIDVGNDGESERKIAALQHEVEIVTARIKKATALLLEMDDIDELKIQLKELNQKRTELQTTIDSMRRKTSLSDKGLPQLKDIDLMTKAGRVECQLILSKHLKGLTLGKDSVTVTLQNDTEITIPTNPLPLNDGSPIFEIADKELLDIDAFRL

SEQ ID NO: 32057 - DNA, 50 bp, Escherichia coli; identical to SEQ ID NO: 30087
  source 1..50: mol_type = genomic DNA

SEQ ID NO: 32058 - DNA, 40 bp, Escherichia coli; identical to SEQ ID NO: 20043
  source 1..40: mol_type = genomic DNA

SEQ ID NO: 32059 - DNA, 40 bp, Escherichia coli; identical to SEQ ID NO: 30164
  source 1..40: mol_type = genomic DNA

SEQ ID NO: 32060 - DNA, 50 bp, Escherichia coli; identical to SEQ ID NO: 7690
  source 1..50: mol_type = genomic DNA

SEQ ID NO: 32061 - protein, 506 aa, Escherichia coli; identical to SEQ ID NO: 30131

SEQ ID NO: 32062 - DNA, 50 bp, Escherichia coli; identical to SEQ ID NO: 30087
  source 1..50: mol_type = genomic DNA

SEQ ID NO: 32063 - DNA, 40 bp, Escherichia coli; identical to SEQ ID NO: 20043
  source 1..40: mol_type = genomic DNA

SEQ ID NO: 32064 - DNA, 40 bp, Escherichia coli; identical to SEQ ID NO: 30164
  source 1..40: mol_type = genomic DNA

SEQ ID NO: 32065 - DNA, 50 bp, Escherichia coli; identical to SEQ ID NO: 7690
  source 1..50: mol_type = genomic DNA

SEQ ID NO: 32066 - protein, 506 aa, Escherichia coli
MRTVITYLRFSSAIQGAEGADSTRRQNDLFKQWLKKNSDAQVVASFSDEGLSGYKGKHLTGQFGDMLARIESGEFPEGSILLVEAIDRIGRLEHLETEALMNRIIAHGIEIHTLQDGLIYTRDAISDDLGISIIQRVKSYIAHQESKQKSFRVSEKWKQRAKLALAGEQRLTKMVPGWIDPDTFKCNEHAETVRLIFKLLLDGESLHNIARHLQANNISSFSRRKDANGFSVHSVRTVLRSESVIGTLPASQRNDRPAIPNYYEAAIDAATFNKAQEILDKNRKGRTPASDNPLTINIFKGLFRCQCGASVHPTGTKNKYAGVYRCNNNPDGRCDVPPLKRKPFDKWMIDNFLGMIDVGNDGESEGKIAALQHEVEIVTTRIKKATALLLEMDDITELKTQVKELNQKRTELQTTIDNMRRKASLTDKELPQLKDIDLTTKAGRVECQLILSKHLKGLTLGKDSVTVTLQNDTEITIPTNPLPLNDGTSIFEIADKELLDIDAFRL

SEQ ID NO: 32067 - DNA, 50 bp, Escherichia coli; identical to SEQ ID NO: 30087
  source 1..50: mol_type = genomic DNA

SEQ ID NO: 32068 - DNA, 40 bp, Escherichia coli; identical to SEQ ID NO: 20043
  source 1..40: mol_type = genomic DNA

SEQ ID NO: 32069 - DNA, 40 bp, Escherichia coli; identical to SEQ ID NO: 30164
  source 1..40: mol_type = genomic DNA

SEQ ID NO: 32070 - DNA, 50 bp, Escherichia coli; identical to SEQ ID NO: 7690
  source 1..50: mol_type = genomic DNA

SEQ ID NO: 32071 - protein, 506 aa, Escherichia coli
MRHVITYLRYSSAIQGAEGADSTRRQNELFKQWLRKNSDAQVVASFSDEGLSGYKGKHLTGQFGDMLARIEAGEFPASTILLVESIDRIGRLEHLETEALMNRILGNGIEIHTLQDGLIYTKDALADDLGISIIQRVKAYIAHQESKQKSFRVSQKWEQRAKLALAGEQRLTKMVPGWIDPDTFKCNEHAETVRLIFKLLLDGESLHNIARHLQANNISSFSRRKDANGFSVHSVRTILRSETTIGTLPASQRNDRPAIPNYYEAAIDVSTFNKAQEILDKNRKGRTPASDNPLTINIFKGLFRCQCGASVHPTGTKNKYQGVYRCNNHLDGRCDVPPLKRKPFDKWMIDNFLGMIDVGNDGEAEGKIASLQHEVEIVTTRIKKATALLLEMDDITELKAQVKELNQKRTELQTTIDSMRRKTSLSDKGLPQLKDIDLMTKAGRVECQLILSKHLKGLTLGKDSVTVTLQNDTEITIPTNPLPLNDGTSIFEIAEKELLEIDAYQL

SEQ ID NO: 32072 - DNA, 50 bp, Escherichia coli; identical to SEQ ID NO: 30087
  source 1..50: mol_type = genomic DNA

SEQ ID NO: 32073 - DNA, 40 bp, Escherichia coli; identical to SEQ ID NO: 20043
  source 1..40: mol_type = genomic DNA

SEQ ID NO: 32074 - DNA, 40 bp, Escherichia coli; identical to SEQ ID NO: 30164
  source 1..40: mol_type = genomic DNA

SEQ ID NO: 32075 - DNA, 50 bp, Escherichia coli; identical to SEQ ID NO: 7690
  source 1..50: mol_type = genomic DNA

SEQ ID NO: 32076 - protein, 597 aa, Enterobacter hormaechei
MGHADLLTLDQWRGILMSSKQKLYSYVRWSSEKQSSGTSFERQTSRAKSFALEHDLEYVEIKDAGISAFKGQNTTQGKLGVFITQVEKGVIPKDSWLYVENLDRLTREDATTANELFLRLLRMGLTIVTGMDNKVFTREGVNRNPTDLMISILMFMRAHEESKTKSDRVNSHVLALLAREKQGLPVNIKAVGRHPFWIDDSGPSNEKVKKHPDYWQPAQEAVKLFLEGYGAFYVTDYLNKKYAPPPAFKNKTRKAGGWSQQALNKMRSNEALVGVKLFNLAGKNYRLENYYPPLCTPGEFAQLQDIKANNNRYSGKVSTAISLLGGMQIIRCGHCNGTMTAFLQRGQLRYICEYGRAGGNCNAWSVKAAIVERCLMPVLITGFLMGAYKTHSDLTSLDEESDELKEKLNKIQSQQDHVIDAITEFGRTTKFDAKYKELEKEEQVISGKLQQLAQLKALYATTKDFSENIAGFVAEQCHWLIISDVHNSRREQLRENVRRVIKSVIVTKKNRCIRIEFQLITGEPFVFTGSKSLDYEVFLPCRIHDIPPDATEDEKSEWKRSDHEYNKNFLKLWYEVVNKGFLSHYPEIDGKDFWPKR

SEQ ID NO: 32077 - DNA, 50 bp, Enterobacter hormaechei
  source 1..50: mol_type = genomic DNA
aatgtattatttttgacttttgggcagcctaaagatataaatcctacttt

SEQ ID NO: 32078 - DNA, 40 bp, Enterobacter hormaechei
  source 1..40: mol_type = genomic DNA
gtccaccaggttcttcgggcagccgagggagacaaagccg

SEQ ID NO: 32079 - DNA, 40 bp, Enterobacter hormaechei
  source 1..40: mol_type = genomic DNA
gtccaccaggttcttcgggttgccgagggagacaaagccg

SEQ ID NO: 32080 - DNA, 50 bp, Enterobacter hormaechei
  source 1..50: mol_type = genomic DNA
aatgtaatgttcttgacttttgggttggttaaagaatatctgcggactat

SEQ ID NO: 32081 - protein, 597 aa, Klebsiella aerogenes
MGHADLLTLDQWRGILMSSKQKLYSYVRWSSEKQSAGTSSERQTSRAMRFAEENELEYVEIKDAGVSAFKGKNTTQGKLGLFISEVDKGVIPRDSWLYVENLDRLTREDVLTANELFLRLLRMGLTIVTGMDNRVFTRESVNNNPMDLMASILMFMRAHEESKTKSDRVTSHVLALLERQRKGLPVNIKAIGKHPFWIDDSGSAHEKVKKHPDFWLPAQEAVRLFLEGHGAFYVTDYLNQNYPVPPAFKKTQRREGGWPLQAIKKMRANMALVGTRIFNLSGKEYRLENYYPPLCTLGEFAQLQDIKANNKRYSGKTSTAINLLGGMKILRCGHCKGTMTAFLQRGQLRYICEYGRSGGNCTAWSLKASIVERCLMPVLITGFLIGAYKTHSDLSLLDKQTNELKEQLKKVQSQQDNVIDAIADLGRTPKLDAKFKALENEEQRVSGKLQQLHQAKSLYASTKDFSENIVDFVAGECHWMIISDVHNPKREALRERIRSVINEAIVTKDNRCIRIEFRFPTGETFVFAGSRPGEYEVFLPRKVHDIPPDATEQEINEWERSDYEYNKNFLKLWYEVVNKNLLSHYPAIDGKDFWPKR

SEQ ID NO: 32082 - DNA, 50 bp, Klebsiella aerogenes; identical to SEQ ID NO: 32077
  source 1..50: mol_type = genomic DNA

SEQ ID NO: 32083 - DNA, 40 bp, Klebsiella aerogenes; identical to SEQ ID NO: 24223
  source 1..40: mol_type = genomic DNA

SEQ ID NO: 32084 - DNA, 40 bp, Klebsiella aerogenes
  source 1..40: mol_type = genomic DNA
gtctaccaggtttttcgggttgcccagggagacgaagccg

SEQ ID NO: 32085 - DNA, 50 bp, Klebsiella aerogenes; identical to SEQ ID NO: 32080
  source 1..50: mol_type = genomic DNA

SEQ ID NO: 32086 - protein, 597 aa, Klebsiella quasipneumoniae
MGHADLLTLDQWRGILMSSKQKLYSYVRWSSEKQSAGTSSERQTSRAMRFAEENELEYVEIKDAGVSAFKGKNTTQGKLGLFISEVDKGVIPRDSWLYVENLDRLTREDVLTANELFLRLLRMGLTIVTGMDNRVFTRESVNNNPMDLMASILMFMRAHEESKTKSDRVTSHVLALLERQRKGLPVNIKAIGKHPFWIDDSGSAHEKVKKHPDFWLPAQEAVRLFLEGHGAFYVTDYLNQNYPVPPAFKKTQRREGGWPLQAIKKMRANMALVGTRIFNLSGKEYRLENYYPPLCTLGEFAQLQDIKANNKRYSGKTSTAINLLGGMKILRCGHCKGTMTAFLQRGQLRYICEYGRSGGNCTAWSLKASIVERCLMPVLITGFLIGAYKTHSDLSLLDKQTNELKEQLKKVQSQQDNVIDAIADLGRTPKLDAKFKALENEEQRVSGKLQQLHQAKSLYASTKDFSENIVDFVAGECHWMIISDVHNPKREALRERIRSVINEAIVTKDNRCIRIEFRFPTGETFVFAGSRPGEYEVFLPRKVHDIPPDATEQEINEWERSDYEYNKNFLKLWYQVVNKNLLSHYPAIDGKDFWPKR

SEQ ID NO: 32087 - DNA, 50 bp, Klebsiella quasipneumoniae; identical to SEQ ID NO: 32077
  source 1..50: mol_type = genomic DNA

SEQ ID NO: 32088 - DNA, 40 bp, Klebsiella quasipneumoniae; identical to SEQ ID NO: 5518
  source 1..40: mol_type = genomic DNA

SEQ ID NO: 32089 - DNA, 40 bp, Klebsiella quasipneumoniae
  source 1..40: mol_type = genomic DNA
gtccacgaggtttttcgggttgcccagggagacgaagccg

SEQ ID NO: 32090 - DNA, 50 bp, Klebsiella quasipneumoniae; identical to SEQ ID NO: 32080
  source 1..50: mol_type = genomic DNA

SEQ ID NO: 32091 - protein, 597 aa, Enterobacter mori
MGHADLLTLDQWRGILMSSKQKLYSYVRWSSEKQSSGTSFERQTSRAKSFALEHDLEYVEIKDAGISAFKGQNTTQGKLGVFITQVEKGVIPKDSWLYVENLDRLTREDATTANELFLRLLRMGLTIVTGMDNKVFTREGVNRNPTDLMISILMFMRAHEESKTKSDRVNSHVLALLAREKQGLPVNIKAVGRHPFWIDDSGPSNEKVKKHPDYWQPAQEAVKLFLEGYGAFYVTDYLNKKYAPPPAFKNKTRKAGGWSQQALNKMRSNEALVGVKLFNLAGKNYRLENYYPPLCTPGEFAQLQDIKANNNRYSGKVSTAISLLGGMQIIRCGHCNGTMTAFLQRGQLRYICEYGRAGGNCNAWSVKASIVERCLMPVLITGFLMGAYKTHSDLTSLDEESDELKEKLNKIQSQQDHVIDAITEFGRTTKFDAKYKELEKEEQVISGKLQQLAQLKALYATTKDFSENIAGFVAEQCHWLIISDVHNSRREQLRENVRRVIKSVIVTKKNRCIRIEFQLITGEPFVFTGSKSLDYEVFLPRRIHDIPPDATEDEKSEWKRSDHEYNKNFLKLWYEVVNKGFLSHYPEIDGKDFWPRR

SEQ ID NO: 32092 - DNA, 50 bp, Enterobacter mori; identical to SEQ ID NO: 32077
  source 1..50: mol_type = genomic DNA

SEQ ID NO: 32093 - DNA, 40 bp, Enterobacter mori
  source 1..40: mol_type = genomic DNA
atccaccaggtttttcgggcagccgagggagacgaagccg

SEQ ID NO: 32094 - DNA, 40 bp, Enterobacter mori
  source 1..40: mol_type = genomic DNA
atccaccaggtttttcgggttgccgagggagacgaagccg

SEQ ID NO: 32095 - DNA, 50 bp, Enterobacter mori; identical to SEQ ID NO: 32080
  source 1..50: mol_type = genomic DNA

SEQ ID NO: 32096 - protein, 597 aa, Escherichia coli; identical to SEQ ID NO: 32081

SEQ ID NO: 32097 - DNA, 50 bp, Escherichia coli; identical to SEQ ID NO: 32077
  source 1..50: mol_type = genomic DNA

SEQ ID NO: 32098 - DNA, 40 bp, Escherichia coli; identical to SEQ ID NO: 9013
  source 1..40: mol_type = genomic DNA

SEQ ID NO: 32099 - DNA, 40 bp, Escherichia coli
  source 1..40: mol_type = genomic DNA
atcaacaaggtttttcggattgccaagggaaacaaagccg

SEQ ID NO: 32100 - DNA, 50 bp, Escherichia coli; identical to SEQ ID NO: 32080
  source 1..50: mol_type = genomic DNA

SEQ ID NO: 32101 - protein, 597 aa, Klebsiella aerogenes
MGHVDLLTLDQWRGILMSSKQKLYSYVRWSSEKQSTGTSFERQTARAKQYAHDNGLEYVEIKDAGVSAFKGKNSTQGQLGEFIASVEKGLIPKDSWLYVENFDRITREEVTDANALFLRLINMGLTIVTGMDQRVFTRESVNKNPTDLMLSILMFMRAHEESKTKSDRVNSHVLALLAREKQGLPVNIKAVGRHPFWIDDSGPDNEKVKKHPDYWQPVQDAVRLFLEGHGAFYVTNYLNENYSPPPAFKNKTRKAGGWSQQALNKMRSNQALVGTRIFTLSGKPYQLENYYPPLCTPGEFAQLQDIKANNNRYSGKVSTAISLLGGMQIIRCGHCNGTMTAFLQRGQLRYICEYGRAGGSCNAWSVKASIVERCLMPVLVTGFLIGAYKTHSDLTSLDEESDELKEKLNKIQSQQDHVIDAIAEFGRTTKFDAKYKELEKEEQVISGKLQQLGQLKALYATTKDFSENIAGFVAEQCHWLIISDVHNSRREQLRENVRRVIKSVIVTKKNRCIRIEFQLITGEPFVFTGSKSPDYEVFLPRRIHDIPPDATEDEKSEWKRSDHEYNKHFLKLWYEVVNKDFLSHYPEINGKDFWPKR

SEQ ID NO: 32102 - DNA, 50 bp, Klebsiella aerogenes; identical to SEQ ID NO: 32077
  source 1..50: mol_type = genomic DNA

SEQ ID NO: 32103 - DNA, 40 bp, Klebsiella aerogenes; identical to SEQ ID NO: 24223
  source 1..40: mol_type = genomic DNA

SEQ ID NO: 32104 - DNA, 40 bp, Klebsiella aerogenes; identical to SEQ ID NO: 32084
  source 1..40: mol_type = genomic DNA

SEQ ID NO: 32105 - DNA, 50 bp, Klebsiella aerogenes; identical to SEQ ID NO: 32080
  source 1..50: mol_type = genomic DNA

SEQ ID NO: 32106 - protein, 518 aa, Priestia filamentosa
MTIRHVAIYLRISRDKKEGIDTLSNHRDILIDFCRSSHWTYERYEEIVSGGGSELENRPELYRLLNDIDLFDGILVFELSRLSRNGLVSQQIKQVCIDYDKKIITPYQIYDLANNHNDRLLYDFGSVIASQEHALIGKRSKTNKKIMAKSGLHVSGSVPFGYVRNPHTKKLEIHQEQAEIVKLIFQLHAKGYGSFSIRNILNERGYRTAKGGYFELPTIKRIIRNPAYKGTNVFNDRKKVKEKDRFIYKIVETIQVPNAWDPIIPPEEWEKANADRKKRADHAETTREKAANKTGVTLLKDLLYCGVCGKKMTIRKDKGSKYMLKRCEYLLPSGEKCPNRGVMLKYVEEDVVEHIKQYKDEIISILYSLKLEEWSGTEKDYNNHLEQIEKEIRRIRTEEENLLNLAIKGLFSEEQILTKRQELLNTLHTFTAQKEAIIDELTNLKKLDTKERLQTAVEGIHGLEIVLENDMSEEANRSMKRIIHKIYYKRVLPEDLLKKSTRNKERKLYPFTLNIHYK

SEQ ID NO: 32107 - DNA, 50 bp, Priestia filamentosa
  source 1..50: mol_type = genomic DNA
atacatattattagatgcttggtaggtacgaacatttttattgatcctat

SEQ ID NO: 32108 - DNA, 40 bp, Priestia filamentosa
  source 1..40: mol_type = genomic DNA
agcatccacaacaaaggtaggtacggcgtaccctgatgta

SEQ ID NO: 32109 - DNA, 40 bp, Priestia filamentosa
  source 1..40: mol_type = genomic DNA
agcatccacaacaaaggtatatacggcgtaccctgatgta

SEQ ID NO: 32110 - DNA, 50 bp, Priestia filamentosa
  source 1..50: mol_type = genomic DNA
atatatatatatatatgcttgaattaaacaaatattaggtctcatcctat

SEQ ID NO: 32111 - protein, 495 aa, Clostridium butyricum
MKAAIYARYSSDNQREESIEAQIRAINEFAERENIQIVKTYIDEARSATTDDRPQFLKMIKESELGLFDTLIVHKLDRFSRNRYDSAFYKKKLKDNNVRLISVLEHLDNSPESIILESVLEGMAEYYSVNLSREVMKGMRETALQCKHNGGLPPLGYDVAKDKTYIINPNEAKAVKLIYELYSNGVGYNLILSRLNELGYKTKKGKFFGKNSLYSILTNEKYNGIYVFNKSSKKINGKRNSHKHKLDEEIIKIKDGMPKIIDDDLWNEVKKKMDNNKAHRGAAQAKKIYLLSGLIYCGKCGHAMTGNSRHSGRNKTLYETYECSNRKRTKQCDMRAINKSLAEKIVIDALYDNIFSKKAIENLTRKILTYAQEQNKTITEDIITYKKELKDVDSKIDNIVEAIADGLYSPVMKEKLTSLESKKNALLIRIDEAEREAILTSPSKEMIKKYLSKDSDIKEKTPQQQKKVVQNYIKKVTIYDDEVITDTIVTCLGIG

SEQ ID NO: 32112 - DNA, 50 bp, Clostridium butyricum
  source 1..50: mol_type = genomic DNA
attgtgacttgtcttggtataggtgaagcaccacctttgaaatccaccac

SEQ ID NO: 32113 - DNA, 40 bp, Clostridium butyricum
  source 1..40: mol_type = genomic DNA
gctcttatttggtggaggcgaggcgtacagaacccgtgtc

SEQ ID NO: 32114 - DNA, 40 bp, Clostridium butyricum
  source 1..40: mol_type = genomic DNA
gctcttatttggtggaggccaggcgtacagaacccgtgtc

SEQ ID NO: 32115 - DNA, 50 bp, Clostridium butyricum
  source 1..50: mol_type = genomic DNA
acaaggcctggaactggtataggtcaaccacctcctcccacatcctcaac

SEQ ID NO: 32116 - protein, 525 aa, Pseudomonas aeruginosa; identical to SEQ ID NO: 20281

SEQ ID NO: 32117 - DNA, 50 bp, Pseudomonas aeruginosa
  source 1..50: mol_type = genomic DNA
catatccatcttgaatcttctttctcgcaagacaacacgaaatagacaca

SEQ ID NO: 32118 - DNA, 40 bp, Pseudomonas aeruginosa; identical to SEQ ID NO: 20283
  source 1..40: mol_type = genomic DNA

SEQ ID NO: 32119 - DNA, 40 bp, Pseudomonas aeruginosa; identical to SEQ ID NO: 20284
  source 1..40: mol_type = genomic DNA

SEQ ID NO: 32120 - DNA, 50 bp, Pseudomonas aeruginosa
  source 1..50: mol_type = genomic DNA
catattcttgagacctcttcttgcaagatagagatccacgtatagacact

SEQ ID NO: 32121 - protein, 567 aa, Caloranaerobacter azorensis
MIIIKKAALYIRVSTHHQIDRDSLPFQRQELINYSKYLLGIDDYEIFEDAGYSGKNMDRPAFQDMMARIRQGEFTHLLVWKIDRISRNLKDFTEMYEEIKKYGVTFISKNEQFDTSSAMGEAMLKIILVFAELERKLTAERVSSIMLSRAEKGLWNGAQCPLGYKWDDEKKFPVPDEEEAKVVQFIYDKYEELRSAFQVMKILNTNNIKTKRGGTWTSKTVVDIIRNPFYKGTYRYNYRESARGKKKDKSEWIIVDDNHEAIISKEQWERCNKIMDFNASRNTALLRKNTHTHIFSGLVKCKKCGRGFNAALDQPRSDGYRPSIYRCQGKSRALGCDAKMVSEITLGPFVINYLANLSKAQQKLTKKHNLKDLEKILLSGKTFKNIAGIETKGLESIYISILYSNLDNVLIDMPKNKDVKKENISEMEILKKEKEKYERAIDRLQNLYLFSEESMSEKDFLLQKHKLKNKIDDINKKLHELHEEHSNQVAYNDISFLQKASHFMISNELLNKKTIDYKNMVMTIDKKLIKDFINTVIDKVIVDDGKVSSICFKNGLTHKFIYRDKDI

SEQ ID NO: 32122 - DNA, 50 bp, Caloranaerobacter azorensis
  source 1..50: mol_type = genomic DNA
ttcatgtttactcaaacctccggacaaccgtatgtttgagtaaaaaaggt

SEQ ID NO: 32123 - DNA, 40 bp, Caloranaerobacter azorensis
  source 1..40: mol_type = genomic DNA
gtcgtgttcattcatctgacaaccccaagtttctatataa

SEQ ID NO: 32124 - DNA, 40 bp, Caloranaerobacter azorensis
  source 1..40: mol_type = genomic DNA
gtcgtgttcattcatctgaataccccaagtttctatataa

SEQ ID NO: 32125 - DNA, 50 bp, Caloranaerobacter azorensis
  source 1..50: mol_type = genomic DNA
tttgtgttttatataacctcctgaatctgttatgttttttaaaaaaaatt

SEQ ID NO: 32126 - protein, 572 aa, Flavonifractor plautii
MTNTRNLGTIEVANPVLAVAPLKEDAEMQRATDKITALYCRLSQEDANEGESNSIQNQKAILLQYAKEHRFPNPTFFVDDGYSGTNYDRPGFQAMLAEIEAGKVAVCCTKDLSRLGRNSSLTGLYINFTFPKYGVRYIAINDHFDTIDPNSTDNDVAGIKNWFNEFFAKDTSRKIRAVQKAKGERGVPLTTNVPFGYLKDPNDKTRWIVDEAAAQVVKHIFRLCMEGRGPMQIAKVLQEEKVLNPTAYKRRAGIKTPSPETADPYHWNTNTIVHILERREYTGCTVNFKTYTNSIWDKKQRDTPLEKQAVFYGTHPVIIEQEVFDKVQEIRQQRHRRTKTGKSSLFSGMVYCADCGAKMRYCTTNYFEKRQDHFVCANYRSNTGSCSAHYIRAVVLEDLVWMHMKAVISYVTRHESYFRAVMEHKLRLSSEEAIRANKKRLAQADKRLTELDRLFIRIYEDNVAGKLSDERFAMMSQSYEDEQMQLKAEIQTLQQDIEVQERQIENLEQFIQRVHKYEDLQELTPYALRELVKAIYIGAPDKSSGKRRQNIRISYDLVGFIPVDELMKQETA

SEQ ID NO: 32127 - DNA, 50 bp, Flavonifractor plautii
  source 1..50: mol_type = genomic DNA
ttactttcttatggcccccggacatcgggcaggtgctcataagaaagtaa

SEQ ID NO: 32128 - DNA, 40 bp, Flavonifractor plautii
  source 1..40: mol_type = genomic DNA
taacatacgcccccggccgtctggccgggggcgtattgtt

SEQ ID NO: 32129 - DNA, 40 bp, Flavonifractor plautii
  source 1..40: mol_type = genomic DNA
taacatacgcccccggccgaatggccgggggcgtattgtt

SEQ ID NO: 32130 - DNA, 50 bp, Flavonifractor plautii
  source 1..50: mol_type = genomic DNA
ttcctttctagccaccccctgcctaagtgcaggtgcaccccagagtgtgg

SEQ ID NO: 32131 - protein, 572 aa, Flavonifractor plautii
MTNTRNLGTIEVANPVLAVAPLKEDAEMQRATDKITALYCRLSQEDANEGESNSIQNQKAILLQYAKEHRFPNPTFFVDDGYSGTNYDRPGFQAMLAEIEAGKVAVCCTKDLSRLGRNSSLTGLYINFTFPKYGVRYIAINDHFDTIDPNSTDNDVAGIKNWFNEFFAKDTSRKIRAVQKAKGERGVPLTTNVPFGYLKDPNDKTRWIVDEAAAQVVKHIFRLCMEGRGPMQIAKVLQEEKVLNPTAYKRRAGIKTPSPETADPYHWNTNTIVHILERREYTGCTVNFKTYTNSIWDKKQRDTPLEKQAVFYGTHPVIIEQEVFDKVQEIRQQRHRRTKTGKSSLFSGMVYCADCGAKMRYCTTNYFEKRQDHFVCANYRSNTGSCSAHYIRAVVLEDLVWMHMKAVISYVTRHESYFRAVMEHKLRLSSEEAIRANKKRLAQADKRRTELDRLFIRIYEDNVAGKLSDERFAMMSQSYEDEQMQLKAEIQTLQQDIEVQERQIENLEQFIQRVHKYEDLQELTPYALRELVKAIYIGAPDKSSGKRRQNIRISYDLVGFIPVDELMKQETA

SEQ ID NO: 32132 - DNA, 50 bp, Flavonifractor plautii; identical to SEQ ID NO: 32127
  source 1..50: mol_type = genomic DNA

SEQ ID NO: 32133 - DNA, 40 bp, Flavonifractor plautii
  source 1..40: mol_type = genomic DNA
atgaagcaagccccgccgatctcggcggggcttgttgctt

SEQ ID NO: 32134 - DNA, 40 bp, Flavonifractor plautii
  source 1..40: mol_type = genomic DNA
atgaagcaagccccgccgaaatcggcggggcttgttgctt

SEQ ID NO: 32135 - DNA, 50 bp, Flavonifractor plautii; identical to SEQ ID NO: 32130
  source 1..50: mol_type = genomic DNA

SEQ ID NO: 32136 - protein, 531 aa, Robinsoniella peoriensis
MKPYYIYLRKSRTDREAELHGEGETLARHEKVLLEFARRNQMQVSKVFREIVSGETIAARPQMQALLLDVEQGLCEGVLVMEIERLARGDTKDQGIVAEAFKYGNVKIVTPMKTYDPANEFDEEYFEFGLFMSRREYKTINRRIQRGRIASVKEGKFISSIAPYGYDKVPIENDKGYTLMINPKEAEVIRMIFNWYTAGIMQPDGTCRRLSTAAICHKLDLLHLKPQIKDHWSPSSIRDILKNPVYTGSIRWAYRKEMRILKNGMIERHRTTSNDYIQCKGLHEAIISQEIFDTAQKRMQSNRKSPTKCSNLLKNPLAGIIICGKCNTPMTRLAPNKKTNYAFIKCPNRDCDNISAPLDLLEKQLLAALDYWLQNCVLNLNHRNNPAYGGNELHFLKNSIDELKKEQTALDKQLDLTYSYLEREIYTEVEFQKRKSFISSQINALRSDLSTLQFEYEQLLCIPHSSSPEAIRQTKYTFVDIYWLLESVTGKNQLLKAVLEKVEYLKTERNKRGEKSRANFQLTIYPKIPKV

SEQ ID NO: 32137 - DNA, 50 bp, Robinsoniella peoriensis
  source 1..50: mol_type = genomic DNA
gacctgtattcctgatgtacgtatgtgcaggtacgcttaaggtacaggta

SEQ ID NO: 32138 - DNA, 40 bp, Robinsoniella peoriensis
  source 1..40: mol_type = genomic DNA
tgccattggcgggccgtatgtgtatccccattcataagtc

SEQ ID NO: 32139 - DNA, 40 bp, Robinsoniella peoriensis
  source 1..40: mol_type = genomic DNA
tgccattggcgggccgtatatgtatccccattcataagtc

SEQ ID NO: 32140 - DNA, 50 bp, Robinsoniella peoriensis
  source 1..50: mol_type = genomic DNA
tacaagtatagtgtatgtacatatatgtacgtacgtaatatgcacatgta

SEQ ID NO: 32141 - protein, 452 aa, Listeria monocytogenes
MKAAIYIRVSTQEQIENYSIQAQTEKLTALCRSKDWDVYDIFIDGGYSGSNMNRPALNEMLSKLHEIDAVVVYRLDRLSRSQRDTITLIEEYFLKNNVEFVSLSETLDTSSPFGRAMIGILSVSAQLERETIRDRMVMGKIKRIEAGLPLTTAKGRTFGYDVIDTKLYINEEEAKQLQMIYDIFEEEKSITTLQKRLKKLGFKVKSYSSYNNWLTNDLYCGYVSYADKVHTKGVHEPIISEEQFYRVQEIFSRMGKNPNMNRDSASLLNNLVVCGKCGLGFVHRRKDTVSRGKKYHYRYYSCKTYKHTHELEKCGNKIWRADKLEELIIDRVNNYSFASRNVDKEDELDSLNEKLKTEHVKKKRLFDLYISGSYEVSELDAMMADIDAQINYYEAQIEANEELKKNKKIQENLADLATVDFDSLEFREKQLYLKSLINKIYIDGEQVTIEWL

SEQ ID NO: 32142 - DNA, 50 bp, Listeria monocytogenes
  source 1..50: mol_type = genomic DNA
tttagttcctcgttttctctcgttggaagaagaataaacgagataccaaa

SEQ ID NO: 32143 - DNA, 40 bp, Listeria monocytogenes; identical to SEQ ID NO: 1298
  source 1..40: mol_type = genomic DNA

SEQ ID NO: 32144 - DNA, 40 bp, Listeria monocytogenes; identical to SEQ ID NO: 1299
  source 1..40: mol_type = genomic DNA

SEQ ID NO: 32145 - DNA, 50 bp, Listeria monocytogenes; identical to SEQ ID NO: 1300
  source 1..50: mol_type = genomic DNA

SEQ ID NO: 32146 - protein, 452 aa, Listeria monocytogenes; identical to SEQ ID NO: 7751

SEQ ID NO: 32147 - DNA, 50 bp, Listeria monocytogenes
  source 1..50: mol_type = genomic DNA
tttagttcctcgtttcctctcgttggaagaagaataaacgagataccaaa

SEQ ID NO: 32148 - DNA, 40 bp, Listeria monocytogenes; identical to SEQ ID NO: 1298
  source 1..40: mol_type = genomic DNA

SEQ ID NO: 32149 - DNA, 40 bp, Listeria monocytogenes; identical to SEQ ID NO: 1299
  source 1..40: mol_type = genomic DNA

SEQ ID NO: 32150 - DNA, 50 bp, Listeria monocytogenes; identical to SEQ ID NO: 1300
  source 1..50: mol_type = genomic DNA

SEQ ID NO: 32151 - protein, 452 aa, Listeria monocytogenes; identical to SEQ ID NO: 7751

SEQ ID NO: 32152 - DNA, 50 bp, Listeria monocytogenes
  source 1..50: mol_type = genomic DNA
tttagttcctcgtttcctctcgttggaagaagaagaaatgagatacccaa

SEQ ID NO: 32153 - DNA, 40 bp, Listeria monocytogenes; identical to SEQ ID NO: 1298
  source 1..40: mol_type = genomic DNA

SEQ ID NO: 32154 - DNA, 40 bp, Listeria monocytogenes; identical to SEQ ID NO: 1299
  source 1..40: mol_type = genomic DNA

SEQ ID NO: 32155 - DNA, 50 bp, Listeria monocytogenes; identical to SEQ ID NO: 1300
  source 1..50: mol_type = genomic DNA

SEQ ID NO: 32156 - protein, 452 aa, Listeria monocytogenes
MKAAIYIRVSTQEQIENYSIQAQTEKLTALCRSKDWDVYDIFIDGGYSGSNMNRPALNEMLSKLHEIDAVVVYRLDRLSRSQRDTITLIEEYFLKNNVEFVSLSETLDTSSPFGRAMIGILSVFAQLERETIRDRMVMGKIKRIEAGLPLTTAKGRTFGYDVIDTKLYINEEEAKQLQMIYDIFEEEKSITSLQKRLKKLGFKVKSYSSYNNWLTNDLYCGYVSYADKVHTKGVHEPIISEEQFYRVQEIFSRMGKNPNMNRDSASLLNNLVMCSKCGLGFVHRRKDTVSRGKKYHYRYYSCKTYKHTHELEKCGNKIWRADKLEELIIDSVNNYSFASRNVDKEDELDNLNEKLKTEHTKKKRLFDLYISGSYEVSELDAMMADIDAQINYYEAQIEANEELKKNKKIQENLADLATVDFDSLEFREKQLYLKSLINKIYIDGEQVTIEWL

SEQ ID NO: 32157 - DNA, 50 bp, Listeria monocytogenes; identical to SEQ ID NO: 32147
  source 1..50: mol_type = genomic DNA

SEQ ID NO: 32158 - DNA, 40 bp, Listeria monocytogenes; identical to SEQ ID NO: 1298
  source 1..40: mol_type = genomic DNA

SEQ ID NO: 32159 - DNA, 40 bp, Listeria monocytogenes; identical to SEQ ID NO: 1299
  source 1..40: mol_type = genomic DNA

SEQ ID NO: 32160 - DNA, 50 bp, Listeria monocytogenes; identical to SEQ ID NO: 1300
  source 1..50: mol_type = genomic DNA

SEQ ID NO: 32161 - protein, 452 aa, Listeria monocytogenes
MKAAIYIRVSTQEQIENYSIQAQTEKLTALCRSKDWDVYDIFIDGGYSGSNMKRPALNEMLSKLHEIDAVVVYRLDRLSRSQRDTITLIEEYFLKNNVEFVSLSETLDTSSPFGRAMIGILSVFAQLERETIRDRMVMGKIKRIESGLPLTTAKGRTFGYDVVDTKLYINEEEAKQLQMIYDIFEEEKSITFLQKRLKKLGFKVKSYSSYNNWLTNDLYCGYVSYKDKVHTKGIHEPIISEEQFYRVQEIFSRMGKNPNMNKESASLLNNLVVCSKCGLSFVHRRKDTVSRGKKYHYRYYSCKTYKHTHELEKCGNKIWRADKLEELIIDRVNNYSFASRNVDKEDELDNLNEKLKTEHTKKKRLFDLYISASYEVSELDAMMADIDAQINYYEAQIEANEELKKNKKIQENLADLATVDFDSLEFREKQLYLKSLINKIYIDGEQVTIEWL

SEQ ID NO: 32162 - DNA, 50 bp, Listeria monocytogenes; identical to SEQ ID NO: 32147
  source 1..50: mol_type = genomic DNA

SEQ ID NO: 32163 - DNA, 40 bp, Listeria monocytogenes; identical to SEQ ID NO: 1298
  source 1..40: mol_type = genomic DNA

SEQ ID NO: 32164 - DNA, 40 bp, Listeria monocytogenes; identical to SEQ ID NO: 1299
  source 1..40: mol_type = genomic DNA

SEQ ID NO: 32165 - DNA, 50 bp, Listeria monocytogenes; identical to SEQ ID NO: 1300
  source 1..50: mol_type = genomic DNA

SEQ ID NO: 32166 - protein, 452 aa, Listeria monocytogenes
MKAAIYIRVSTQEQIENYSIQAQTEKLTALCRSKDWDVYDIFIDGGYSGSNMNRPALNEMLSKLHEIDAVVVYRLDRLSRSQRDTITLIEEYFLKNNVEFVSLSETLDTSSPFGRAMIGILSVFAQLERETIRDRMVMGKIKRIEAGLPLTTAKGRTFGYDVIDTKLYINEEEAKQLQMIYDIFEEEKSITSLQKRLKKLGFKVKSYSSYNNWLTNDLYCGYVSYADKVHTKGVHEPIISEEQFYRVQEIFSRMGKNPNMNRDSASLLNNLVVCGKCGLGYVHRRKDTVSRGKKYHYRYYSCKTYKHTHELEKCGNKIWRADKLEELIIDRVNNYSFASRNVDKEDELDSLNEKLKTEHAKKKRLFDLYISGSYEVSELDAMMADIDAQINYYEAQIEANEELKKNKKIQENLADLATVDFDSLEFREKQLYLKSLINKIYIDGEQVTIEWL

SEQ ID NO: 32167 - DNA, 50 bp, Listeria monocytogenes; identical to SEQ ID NO: 32142
  source 1..50: mol_type = genomic DNA

SEQ ID NO: 32168 - DNA, 40 bp, Listeria monocytogenes; identical to SEQ ID NO: 1298
  source 1..40: mol_type = genomic DNA

SEQ ID NO: 32169 - DNA, 40 bp, Listeria monocytogenes; identical to SEQ ID NO: 1299
  source 1..40: mol_type = genomic DNA

SEQ ID NO: 32170 - DNA, 50 bp, Listeria monocytogenes; identical to SEQ ID NO: 1300
  source 1..50: mol_type = genomic DNA

SEQ ID NO: 32171 - protein, 452 aa, Listeria monocytogenes; identical to SEQ ID NO: 7851

SEQ ID NO: 32172 - DNA, 50 bp, Listeria monocytogenes; identical to SEQ ID NO: 32147
  source 1..50: mol_type = genomic DNA

SEQ ID NO: 32173 - DNA, 40 bp, Listeria monocytogenes; identical to SEQ ID NO: 1298
  source 1..40: mol_type = genomic DNA

SEQ ID NO: 32174 - DNA, 40 bp, Listeria monocytogenes; identical to SEQ ID NO: 1299
  source 1..40: mol_type = genomic DNA

SEQ ID NO: 32175 - DNA, 50 bp, Listeria monocytogenes; identical to SEQ ID NO: 1300
  source 1..50: mol_type = genomic DNA

SEQ ID NO: 32176 - protein, 452 aa, Listeria monocytogenes
MKAAIYIRVSTQEQIENYSIQAQTEKLTALCRSKDWDVYDIFIDGGYSGSNMNRPALNEMLSKLHEIDAVVVYRLDRLSRSQRDTITLIEEYFLKNNVEFVSLSETLDTSSPFGRAMIGILSVFAQLERETIRDRMVMGKIKRIEAGLPLTTAKGRTFGYNVIDTKLYINEEEAKQLQMIYDIFEEEKSITTLQKRLKKLGFKVKSYSSYNNWLTNDLYCGYVSYADKVHTKGVHEPIISEEQFYRVQEIFSRMGKNPNMNRDSASLLNNLVVCGKCGLGFVHRRKDTVSRGKKYHYRYYSCKTYKHTHELEKCGNKIWRADKLEELIIDRVNNYSFASRNVDKEDELDSLNEKLKTEHTKKKRLFDLYISGSYEVSELDGMMADIDARINYYEAQIEANEELKKNKKIQENLADLATVDFDSLEFREKQLYLKSLINKIYIDGEQVTIEWL

SEQ ID NO: 32177 - DNA, 50 bp, Listeria monocytogenes
  source 1..50: mol_type = genomic DNA
tttagttcctcgttttctctcgttggaagaagaagaaacgagatacccaa

SEQ ID NO: 32178 - DNA, 40 bp, Listeria monocytogenes; identical to SEQ ID NO: 1298
  source 1..40: mol_type = genomic DNA

SEQ ID NO: 32179 - DNA, 40 bp, Listeria monocytogenes; identical to SEQ ID NO: 1299
  source 1..40: mol_type = genomic DNA

SEQ ID NO: 32180 - DNA, 50 bp, Listeria monocytogenes; identical to SEQ ID NO: 1300
  source 1..50: mol_type = genomic DNA

SEQ ID NO: 32181 - protein, 452 aa, Listeria monocytogenes; identical to SEQ ID NO: 7761

SEQ ID NO: 32182 - DNA, 50 bp, Listeria monocytogenes
  source 1..50: mol_type = genomic DNA
tttagttcctcgttttctctcgttggaagaagaagaaacgagaaactaaa

SEQ ID NO: 32183 - DNA, 40 bp, Listeria monocytogenes; identical to SEQ ID NO: 1298
  source 1..40: mol_type = genomic DNA

SEQ ID NO: 32184 - DNA, 40 bp, Listeria monocytogenes; identical to SEQ ID NO: 1299
  source 1..40: mol_type = genomic DNA

SEQ ID NO: 32185 - DNA, 50 bp, Listeria monocytogenes; identical to SEQ ID NO: 1300
  source 1..50: mol_type = genomic DNA

SEQ ID NO: 32186 - protein, 452 aa, Listeria monocytogenes
MKAAIYIRVSTQEQIENYSIQAQTEKLTALCRSKDWDVYDIFIDGGYSGSNMNRPALNEMLSKLHEIDAVVVYRLDRLSRSQRDTITLIEEYFLKNNVEFVSLSETLDTSSPFGRAMIGILSVFAQLERETIRDRMVMGKIKSIEAGLPLTTAKGRTFGYDVIDTKLYINEEEAKQLQMIYDIFEEEKSITTLQKRLKKLGFKVKSYSSYNNWLTNDLYCGYVSYADKVHTKGVHEPIISEEQFYRVQEIFSRMGKNPNMNRDSASLLNNLVVCGKCGLGFVHRRKDTVSRGKKYHYRYYSCKTYKHTHELEKCGNKIWRADKLEELIIDRVNNYSFASRNVDKEDELDSLNEKLKTEHVKKKRLFDLYISGSYEVSELDAMMADIDAQINYYEAQIEANEELKKNKKIQENLADLATVDFDSLEFREKQLYLKSLINKIYIDGEQVTIEWL

SEQ ID NO: 32187 - DNA, 50 bp, Listeria monocytogenes; identical to SEQ ID NO: 32142
  source 1..50: mol_type = genomic DNA

SEQ ID NO: 32188 - DNA, 40 bp, Listeria monocytogenes; identical to SEQ ID NO: 1298
  source 1..40: mol_type = genomic DNA

SEQ ID NO: 32189 - DNA, 40 bp, Listeria monocytogenes; identical to SEQ ID NO: 1299
  source 1..40: mol_type = genomic DNA

SEQ ID NO: 32190 - DNA, 50 bp, Listeria monocytogenes; identical to SEQ ID NO: 1300
  source 1..50: mol_type = genomic DNA

SEQ ID NO: 32191 - protein, 452 aa, Listeria monocytogenes
MKAAIYIRVSTQEQIENYSIQAQTEKLTALCSSKDWDVYDIFIDGGYSGSNMNRPALNEMLSKLHEIDAVVVYRLDRLSRSQRDTITLIEEYFLKNNVEFVSLSETLDTSSPFGRAMIGILSVFAQLERETIRDRMVMGKIKRIEAGLPLTTAKGRTFGYDVIDTKLYINEEEAKQLQMIYDIFEEEKSITSLQKRLKKLGFKVKSYSSYNNWLTNDLYCGYVSYADKVHTKGVHEPIISEEQFYRVQEIFSRMGKNPNMNRDSASLLNNLVVCSKCGLGFVHRRKDTVSRGKKYHYRYYSCKTYKHTHELEKCGNKIWRADKLEELIIDRVNNYSFASRNVDKEDELDNLNEKLKTEHTKKKRLFDLYISGSYEVSELDAMMADIDAQINYYEAQIEANEELKKNKKIQENLADLATVDFDSLEFREKQLYLKSLINKIYIDGEQVTIEWL

SEQ ID NO: 32192 - DNA, 50 bp, Listeria monocytogenes; identical to SEQ ID NO: 32147
  source 1..50: mol_type = genomic DNA

SEQ ID NO: 32193 - DNA, 40 bp, Listeria monocytogenes; identical to SEQ ID NO: 1298
  source 1..40: mol_type = genomic DNA

SEQ ID NO: 32194 - DNA, 40 bp, Listeria monocytogenes; identical to SEQ ID NO: 1299
  source 1..40: mol_type = genomic DNA

SEQ ID NO: 32195 - DNA, 50 bp, Listeria monocytogenes; identical to SEQ ID NO: 1300
  source 1..50: mol_type = genomic DNA

SEQ ID NO: 32196 - protein, 452 aa, Listeria monocytogenes; identical to SEQ ID NO: 7861

SEQ ID NO: 32197 - DNA, 50 bp, Listeria monocytogenes; identical to SEQ ID NO: 32182
  source 1..50: mol_type = genomic DNA

SEQ ID NO: 32198 - DNA, 40 bp, Listeria monocytogenes; identical to SEQ ID NO: 1298
  source 1..40: mol_type = genomic DNA

SEQ ID NO: 32199 - DNA, 40 bp, Listeria monocytogenes; identical to SEQ ID NO: 1299
  source 1..40: mol_type = genomic DNA

SEQ ID NO: 32200 - DNA, 50 bp, Listeria monocytogenes; identical to SEQ ID NO: 1300
  source 1..50: mol_type = genomic DNA

SEQ ID NO: 32201 - protein, 452 aa, Listeria monocytogenes; identical to SEQ ID NO: 7751

SEQ ID NO: 32202 - DNA, 50 bp, Listeria monocytogenes; identical to SEQ ID NO: 32177
  source 1..50: mol_type = genomic DNA

SEQ ID NO: 32203 - DNA, 40 bp, Listeria monocytogenes; identical to SEQ ID NO: 1298
  source 1..40: mol_type = genomic DNA

SEQ ID NO: 32204 - DNA, 40 bp, Listeria monocytogenes; identical to SEQ ID NO: 1299
  source 1..40: mol_type = genomic DNA

SEQ ID NO: 32205 - DNA, 50 bp, Listeria monocytogenes; identical to SEQ ID NO: 1300
  source 1..50: mol_type = genomic DNA

SEQ ID NO: 32206 - protein, 452 aa, Listeria monocytogenes
MKAAIYIRVSTQEQIENYSIQAQTEKLTALCRSKDWDVYDIFIDGGYSGSNMNRPALNEMLSKLHEIDAVVVYRLDRLSRSQRDTITLIEEYFLKNNVEFVSLSETLDTSSPFGRAMIGILSVFAQLERETIRDRMVMGKIKRIEAGLPLTTAKGRTFGYDVIDTKLYINEEEAKQLQMIYDIFEEEKSITSLQKRLKKLGFKVKSYSSYNNWLTNDLYCGYVSYADKVHTKGVHEPIISEEQFYRVQEIFSRMGKNPNMNRDSASLLNNLVVCSKCGLGFVHRRKDTVSRGKKYHYRYYSCKTYKHTHELEKCGNKIWRADKLEELIIDSVNNYSFASRNVDKEDELDNLNEKLKTEHTKKKRLFDLYISGSYEVSELDAMMADIDAQINYYEAQIEANEELKKNKKIQENLADLATVDFDSLEFREKQLYLKSLINKIYIDGEQVTIEWL

SEQ ID NO: 32207 - DNA, 50 bp, Listeria monocytogenes; identical to SEQ ID NO: 32147
  source 1..50: mol_type = genomic DNA

SEQ ID NO: 32208 - DNA, 40 bp, Listeria monocytogenes; identical to SEQ ID NO: 1298
  source 1..40: mol_type = genomic DNA

SEQ ID NO: 32209 - DNA, 40 bp, Listeria monocytogenes; identical to SEQ ID NO: 1299
  source 1..40: mol_type = genomic DNA

SEQ ID NO: 32210 - DNA, 50 bp, Listeria monocytogenes; identical to SEQ ID NO: 1300
  source 1..50: mol_type = genomic DNA

SEQ ID NO: 32211 - protein, 452 aa, Listeria monocytogenes; identical to SEQ ID NO: 20351

SEQ ID NO: 32212 - DNA, 50 bp, Listeria monocytogenes; identical to SEQ ID NO: 32142
  source 1..50: mol_type = genomic DNA

SEQ ID NO: 32213 - DNA, 40 bp, Listeria monocytogenes; identical to SEQ ID NO: 1298
  source 1..40: mol_type = genomic DNA

SEQ ID NO: 32214 - DNA, 40 bp, Listeria monocytogenes; identical to SEQ ID NO: 1299
  source 1..40: mol_type = genomic DNA

SEQ ID NO: 32215 - DNA, 50 bp, Listeria monocytogenes; identical to SEQ ID NO: 1300
  source 1..50: mol_type = genomic DNA

SEQ ID NO: 32216 - protein, 452 aa, Listeria monocytogenes
MKAAIYIRVSTQEQIENYSIQAQTEKLTALCRSKDWDVYDIFIDGGYSGSNMNRPALNEMLSKLHEIDAVVVYRLDRLSRSQRDTITLIEEYFLKNNVEFVSLSETLDTSSPFGRAMIGILSVFAQLERETIRDRMVMGKIKRIEAGLPLTTAKGRTFGYDVIDTKLYINEEEAKQLQMIYDIFEEEKSITSLQKRLKKLGFKVKSYSSYNNWLTNDLYCGYVSYADKVHTKGVHEPIISEEQFYRVQEIFSRMGKNPNMNRDSASLLNNLVVCSKCGLGFVHRRKDTVSRGKKYHYRYYSCKTYKHTHELEKCGNKIWRADKLEELIIDRVNNYSFASRNVDKEDELDNLNEKLKTEHTKKKRLFDLYISGSYEVSELDAMMTDIDAQINYYEAQIEANEELKKNKKIQENLADLATVDFDSLEFREKQLYLKSLINKIYIDGEQVTIEWL

SEQ ID NO: 32217 - DNA, 50 bp, Listeria monocytogenes; identical to SEQ ID NO: 32147
  source 1..50: mol_type = genomic DNA

SEQ ID NO: 32218 - DNA, 40 bp, Listeria monocytogenes; identical to SEQ ID NO: 1298
  source 1..40: mol_type = genomic DNA

SEQ ID NO: 32219 - DNA, 40 bp, Listeria monocytogenes; identical to SEQ ID NO: 1299
  source 1..40: mol_type = genomic DNA

SEQ ID NO: 32220 - DNA, 50 bp, Listeria monocytogenes; identical to SEQ ID NO: 1300
  source 1..50: mol_type = genomic DNA

SEQ ID NO: 32221 - protein, 452 aa, Listeria monocytogenes
MKAAIYIRVSTQEQVENYSIQAQTEKLTALCRSKDWDVYDTFIDGGYSGSNMNRPALNEMLSKLHEIDAVVVYRLDRLSRSQRDTITLIEEYFLKNNVEFVSLSETLDTSSPFGRAMIGILSVFAQLERETIRDRMVMGKIKRIEAGLPLTTAKGRTFGYNVIDTKLYINEEEAKQLQLIYDIFEEEKSITTLQKRLKKLGFKVKSYSSYNNWLTNDLYCGYVSYADKVHTKGVHEPIISEEQFYRVQEIFSRMGKNPNMNRDSASLLNNLVVCGKCGLGYVHRRKDTVSRGKKYHYRYYSCKTYKHTHELEKCGNKIWRADKLEELIIDRVNNYSFASRNVDKEDELDSLNEKLKTEHAKKKRLFDLYISGSYEVSELDGMMADIDAQINYYEAQIEANEELKKNKKIQENLADLATVDFDSLEFREKQLYLKSLINKIYIDGEQVTIEWL

SEQ ID NO: 32222 - DNA, 50 bp, Listeria monocytogenes; identical to SEQ ID NO: 32177
  source 1..50: mol_type = genomic DNA

SEQ ID NO: 32223 - DNA, 40 bp, Listeria monocytogenes; identical to SEQ ID NO: 1298
  source 1..40: mol_type = genomic DNA

SEQ ID NO: 32224 - DNA, 40 bp, Listeria monocytogenes; identical to SEQ ID NO: 1299
  source 1..40: mol_type = genomic DNA

SEQ ID NO: 32225 - DNA, 50 bp, Listeria monocytogenes; identical to SEQ ID NO: 1300
  source 1..50: mol_type = genomic DNA

SEQ ID NO: 32226 - protein, 452 aa, Listeria monocytogenes
MKAAIYIRVSTQEQIENYSIQAQTEKLTALCRSKDWDVYDIFIDGGYSGSNMNRPALNEMLSKLHEIDAVVVYRLDRLSRSQRDTITLIEEYFLKNNVEFVSLSETLDTSSPFGRAMIGILSVFAQLERETIRDRMVMGKIKRIEAGLPLTTAKGRTFGYDVIDTKLYINEEEAKQLQMIYDIFEEEKSITSLQKRLKKLGFKVKSYSSYNNWLTNDLYCGYVSYADKVHTKGVHEPIISEEQFYRVQEIFSRMGKNPNMNRDSASLLNNLVVCSKCGLGFVHRRKDTVSRGKKYHYRYYSCKTYKHTHELEKCGNKIWRADKLEELIIDRVNNYSFASRNVDKEDELDSLNEKLKTEHAKKKRLFDLYISGSYEVSELDGMMADIDAQINYYEAQIEANEELKKNKKIQENLADLATVDFDSLEFREKQLYLKSLINKIYIDGEQVTIEWL

SEQ ID NO: 32227 - DNA, 50 bp, Listeria monocytogenes; identical to SEQ ID NO: 32142
  source 1..50: mol_type = genomic DNA

SEQ ID NO: 32228 - DNA, 40 bp, Listeria monocytogenes; identical to SEQ ID NO: 1298
  source 1..40: mol_type = genomic DNA

SEQ ID NO: 32229 - DNA, 40 bp, Listeria monocytogenes; identical to SEQ ID NO: 1299
  source 1..40: mol_type = genomic DNA

SEQ ID NO: 32230 - DNA, 50 bp, Listeria monocytogenes; identical to SEQ ID NO: 1300
  source 1..50: mol_type = genomic DNA

SEQ ID NO: 32231 - protein, 452 aa, Listeria monocytogenes; identical to SEQ ID NO: 7791

SEQ ID NO: 32232 - DNA, 50 bp, Listeria monocytogenes; identical to SEQ ID NO: 32142
  source 1..50: mol_type = genomic DNA

SEQ ID NO: 32233 - DNA, 40 bp, Listeria monocytogenes; identical to SEQ ID NO: 1298
  source 1..40: mol_type = genomic DNA

SEQ ID NO: 32234 - DNA, 40 bp, Listeria monocytogenes; identical to SEQ ID NO: 1299
  source 1..40: mol_type = genomic DNA

SEQ ID NO: 32235 - DNA, 50 bp, Listeria monocytogenes; identical to SEQ ID NO: 1300
  source 1..50: mol_type = genomic DNA

SEQ ID NO: 32236 - protein, 452 aa, Listeria monocytogenes; identical to SEQ ID NO: 20351

SEQ ID NO: 32237 - DNA, 50 bp, Listeria monocytogenes; identical to SEQ ID NO: 32177
  source 1..50: mol_type = genomic DNA

SEQ ID NO: 32238 - DNA, 40 bp, Listeria monocytogenes; identical to SEQ ID NO: 1298
  source 1..40: mol_type = genomic DNA

SEQ ID NO: 32239 - DNA, 40 bp, Listeria monocytogenes; identical to SEQ ID NO: 1299
  source 1..40: mol_type = genomic DNA

SEQ ID NO: 32240 - DNA, 50 bp, Listeria monocytogenes; identical to SEQ ID NO: 1300
  source 1..50: mol_type = genomic DNA

SEQ ID NO: 32241 - protein, 452 aa, Listeria monocytogenes; identical to SEQ ID NO: 7746

SEQ ID NO: 32242 - DNA, 50 bp, Listeria monocytogenes
  source 1..50: mol_type = genomic DNA
tttagttcctcgttttctctcgttggaagaagaagaaatgagatacccaa

SEQ ID NO: 32243 - DNA, 40 bp, Listeria monocytogenes; identical to SEQ ID NO: 1298
  source 1..40: mol_type = genomic DNA

SEQ ID NO: 32244 - DNA, 40 bp, Listeria monocytogenes; identical to SEQ ID NO: 1299
  source 1..40: mol_type = genomic DNA

SEQ ID NO: 32245 - DNA, 50 bp, Listeria monocytogenes; identical to SEQ ID NO: 1300
  source 1..50: mol_type = genomic DNA

SEQ ID NO: 32246 - protein, 452 aa, Listeria monocytogenes
MKAAIYIRVSTQEQIENYSIQAQTEKLTALCRSKDWDVYDIFIDGGYSGSNMNRPALNEMLSKLHEIDAVVVYRLDRLSRSQRDTITLIEEYFLKNNVEFVSLSETLDTSSPFGRAMIGILSVFAQLERETIRDRMVMGKIKRIEAGLPLTTAKGRTFGYDVIDTKLYINEEEAKQLQMIYDIFEEEKSITTLQKRLKKLGFKVKSYSSYNNWLTNDLYCGYVSYADKVHTKGVHEPIISEEQFYRVQEIFSRMGKNPNMNRDSASLLNNLVVCSKCGLGFVHRRKDTVSRGKKYHYRYYSCKTYKHTHELEKCGNKIWRADKLEELIIDRVNNYSFASRNVDKEDELDNLNEKLKTEHTKKKRLFDLYISGSYEVSELDAMMADIDAQINYYEAQIEANEELKKNKKIQENLADLATVDFDSLEFREKQLYLKSLINKIYIDGEQVTIEWL

SEQ ID NO: 32247 - DNA, 50 bp, Listeria monocytogenes; identical to SEQ ID NO: 32142
  source 1..50: mol_type = genomic DNA

SEQ ID NO: 32248 - DNA, 40 bp, Listeria monocytogenes; identical to SEQ ID NO: 1298
  source 1..40: mol_type = genomic DNA

SEQ ID NO: 32249 - DNA, 40 bp, Listeria monocytogenes; identical to SEQ ID NO: 1299
  source 1..40: mol_type = genomic DNA

SEQ ID NO: 32250 - DNA, 50 bp, Listeria monocytogenes; identical to SEQ ID NO: 1300
  source 1..50: mol_type = genomic DNA

SEQ ID NO: 32251 - protein, 452 aa, Listeria monocytogenes
MKAAIYIRVSTQEQIENYSIQAQTEKLTALCRSKDWDVYDIFIDGGYSGSNMNRPALNEMLSKLHEIDAVVVYRLDRLSRSQRDTITLIEEYFLKNNVEFVSLSETLDTSSPFGRAMIGILSVFAQLERETIRDRMVMGKIKRIEAGLPLTTAKGRTFGYDVIDTKLYINEEEAKQLQMIYDIFEQEKSITFLQKKLKNLGFNVKSYSSYNNWLTNDLYCGYVSYADKVHTKGVHEPIISEEQFYRVQEIFSRMGKNPNMNRDSASLLNNLVVCGKCGLGFVHRRKDTVSRGKKYHYRYYSCKTYKHTHELEKCGNKIWRADKLEELIIDRVNNYSFASRNVDKEDELDNLNEKLKTEHTKKKRLFDLYISGSYEVSELDGMMADIDARINYYEAQIEANEELKKNKKIQENLADLATVDFDSLEFREKQLYLKSLINKIYIDGEQVTIEWL

SEQ ID NO: 32252 - DNA, 50 bp, Listeria monocytogenes; identical to SEQ ID NO: 32142
  source 1..50: mol_type = genomic DNA

SEQ ID NO: 32253 - DNA, 40 bp, Listeria monocytogenes; identical to SEQ ID NO: 1298
  source 1..40: mol_type = genomic DNA

SEQ ID NO: 32254 - DNA, 40 bp, Listeria monocytogenes; identical to SEQ ID NO: 1299
  source 1..40: mol_type = genomic DNA

SEQ ID NO: 32255 - DNA, 50 bp, Listeria monocytogenes; identical to SEQ ID NO: 1300
  source 1..50: mol_type = genomic DNA

SEQ ID NO: 32256 - protein, 452 aa, Listeria monocytogenes
MKAAIYIRVSTQEQIENYSIQAQTEKLTALCRSKDWDVYDIFIDGGYSGSNMNRPALNEMLSKLHEIDAVVVYRLDRLSRSQRDTITLIEEYFLKNNVEFVSLSETLDTSSPFGRAMIGILSVFAQLERETIRDRMVMGKIKRIEAGLPLTTAKGRTFGYDVIDTKLYINEEEAKQLQMIYDIFEEEKSITTLQKRLKKLGFKVKSYSSYNNWLTNDLYCGYVSYADKVHTKGVHEPIISEEQFYRVQEIFSRMGKNPNMNRDSASLLNNLVVCGKCGLGFVHRRKDTVSRGKKYHYRYYSCKTYKHTHELEKCGNKIWRADKLEELIIDRVNNYSFASRNVDKEDELDSLNEKLKTEHVKKKRLFDLYISGSYEVSELDAMMADIDAQINYYEAQIEANEELKKNKKIQENLADLATVDFDSLEFREKQLYLKSLINKIYIDGEQVTIEWL

SEQ ID NO: 32257 - DNA, 50 bp, Listeria monocytogenes; identical to SEQ ID NO: 32142
  source 1..50: mol_type = genomic DNA

SEQ ID NO: 32258 - DNA, 40 bp, Listeria monocytogenes; identical to SEQ ID NO: 1298
  source 1..40: mol_type = genomic DNA

SEQ ID NO: 32259 - DNA, 40 bp, Listeria monocytogenes; identical to SEQ ID NO: 1299
  source 1..40: mol_type = genomic DNA

SEQ ID NO: 32260 - DNA, 50 bp, Listeria monocytogenes; identical to SEQ ID NO: 1300
  source 1..50: mol_type = genomic DNA

SEQ ID NO: 32261 - protein, 452 aa, Listeria monocytogenes
MKAAIYIRVSTQEQVENYSIQAQTEKLTALCRSKDWDVYDIFIDGGYSGSNMNRPALNEMLSKLHEIDAVVVYRLDRLSRSQRDTITLIEEYFLKNNVEFVSLSETLDTSSPFGRAMIGILSVFAQLERETIRDRMVMGKIKRIEAGLPLTTAKGRTFGYDVIDTKLYINEEEAKQLQMIYDIFEEEKSITSLQKRLKKLGFKVKSYSSYNNWLTNDLYCGYVSYADKVHTKGVHEPIISEEQFYRVQEIFSRMGKNPNMNRDSASLLNNLVVCSKCGLGFVHRRKDTVSRGKKYHYRYYSCKTYKHTHELEKCGNKIWRADKLEELIIDRVNNYSFASRNVDKEDELDNLNEKLKTEHTKKKRLFDLYISGSYEVSELDAMMADIDAQINYYEAQIEANEELKKNKKIQENLADLATVDFDSLEFREKQLYLKSLINKIYIDGEQVTIEWL

SEQ ID NO: 32262 - DNA, 50 bp, Listeria monocytogenes; identical to SEQ ID NO: 32147
  source 1..50: mol_type = genomic DNA

SEQ ID NO: 32263 - DNA, 40 bp, Listeria monocytogenes; identical to SEQ ID NO: 1298
  source 1..40: mol_type = genomic DNA

SEQ ID NO: 32264 - DNA, 40 bp, Listeria monocytogenes; identical to SEQ ID NO: 1299
  source 1..40: mol_type = genomic DNA

SEQ ID NO: 32265 - DNA, 50 bp, Listeria monocytogenes; identical to SEQ ID NO: 1300
  source 1..50: mol_type = genomic DNA

SEQ ID NO: 32266 - protein, 452 aa, Listeria monocytogenes
MKAAIYIRVSTQEQIENYSIQAQTEKLTALCRSKDWDVYDIFIDGGYSGSNMNRPALNEMLSKLHEIDAVVVYRLDRLSRSQRDTITLIEEYFLKNNVEFVSLSETLDTSSPFGRAMIGILSVFAQLERETIRDRMVMGKIKRIEAGLPLTTAKGRTFGYDVIDTKLYINEEEAKQLRLIYDIFEEEQSITFLQKRLKKLGFKVRTYNRYNNWLTNDLYCGYVSYKDKVHVKGIHEPIISEEQFYRVQEIFTRMGKNPNMNRDSASLLNNLVVCSKCGLGFVHRRKDTVSRGKKYHYRYYSCKTYKHTHELEKCGNKIWRADKLEELIIDRVNNYSFASRNVDKEDELDYLNEKLKTEHVKKKRLFDLYISGSYEVSELDAMMADIDAQINYYEAQIEANEELKKNKKIQENLADLATVDFDSLEFREKQLYLKSLINKIYIDGEQVTIEWL

SEQ ID NO: 32267 - DNA, 50 bp, Listeria monocytogenes
  source 1..50: mol_type = genomic DNA
tttagttcctcgttttctctcgttggacggagaagaaacgagatacaaaa

SEQ ID NO: 32268 - DNA, 40 bp, Listeria monocytogenes; identical to SEQ ID NO: 7733
  source 1..40: mol_type = genomic DNA

SEQ ID NO: 32269 - DNA, 40 bp, Listeria monocytogenes; identical to SEQ ID NO: 7734
  source 1..40: mol_type = genomic DNA

SEQ ID NO: 32270 - DNA, 50 bp, Listeria monocytogenes; identical to SEQ ID NO: 1300
  source 1..50: mol_type = genomic DNA

SEQ ID NO: 32271 - protein, 452 aa, Listeria innocua; identical to SEQ ID NO: 21911

SEQ ID NO: 32272 - DNA, 50 bp, Listeria innocua; identical to SEQ ID NO: 32182
  source 1..50: mol_type = genomic DNA

SEQ ID NO: 32273 - DNA, 40 bp, Listeria innocua; identical to SEQ ID NO: 7873
  source 1..40: mol_type = genomic DNA

SEQ ID NO: 32274 - DNA, 40 bp, Listeria innocua
  source 1..40: mol_type = genomic DNA
tttcggatcgagttatgatgaacgtaaagagggaacaaag

SEQ ID NO: 32275 - DNA, 50 bp, Listeria innocua; identical to SEQ ID NO: 1300
  source 1..50: mol_type = genomic DNA

SEQ ID NO: 32276 - protein, 452 aa, Listeria monocytogenes; identical to SEQ ID NO: 7751

SEQ ID NO: 32277 - DNA, 50 bp, Listeria monocytogenes; identical to SEQ ID NO: 32147
  source 1..50: mol_type = genomic DNA

SEQ ID NO: 32278 - DNA, 40 bp, Listeria monocytogenes; identical to SEQ ID NO: 7828
  source 1..40: mol_type = genomic DNA

SEQ ID NO: 32279 - DNA, 40 bp, Listeria monocytogenes; identical to SEQ ID NO: 7829
  source 1..40: mol_type = genomic DNA

SEQ ID NO: 32280 - DNA, 50 bp, Listeria monocytogenes; identical to SEQ ID NO: 1300
  source 1..50: mol_type = genomic DNA

SEQ ID NO: 32281 - protein, 452 aa, Listeria monocytogenes; identical to SEQ ID NO: 7861

SEQ ID NO: 32282 - DNA, 50 bp, Listeria monocytogenes; identical to SEQ ID NO: 32142
  source 1..50: mol_type = genomic DNA

SEQ ID NO: 32283 - DNA, 40 bp, Listeria monocytogenes; identical to SEQ ID NO: 7828
  source 1..40: mol_type = genomic DNA

SEQ ID NO: 32284 - DNA, 40 bp, Listeria monocytogenes; identical to SEQ ID NO: 7829
  source 1..40: mol_type = genomic DNA

SEQ ID NO: 32285 - DNA, 50 bp, Listeria monocytogenes; identical to SEQ ID NO: 1300
  source 1..50: mol_type = genomic DNA

SEQ ID NO: 32286 - protein, 452 aa, Listeria monocytogenes; identical to SEQ ID NO: 32261

SEQ ID NO: 32287 - DNA, 50 bp, Listeria monocytogenes; identical to SEQ ID NO: 32147
  source 1..50: mol_type = genomic DNA

SEQ ID NO: 32288 - DNA, 40 bp, Listeria monocytogenes; identical to SEQ ID NO: 7828
  source 1..40: mol_type = genomic DNA

SEQ ID NO: 32289 - DNA, 40 bp, Listeria monocytogenes; identical to SEQ ID NO: 7829
  source 1..40: mol_type = genomic DNA

SEQ ID NO: 32290 - DNA, 50 bp, Listeria monocytogenes; identical to SEQ ID NO: 1300
  source 1..50: mol_type = genomic DNA

SEQ ID NO: 32291 - protein, 452 aa, Listeria monocytogenes
MKAAIYIRVSTQEQIENYSIQAQTEKLTALCRSKDWDVYDIFIDGGYSGSNMNRPALNEMLSKLHEIDAVVVYRLDRLSRSQRDTITLIEEYFLKNNVEFVSLSETLDTSSPFGRAMIGILSVFAQLERETIRDRMVMGKIKRIEAGLPLTTAKGRTFGYDVIDTKLYINEEEAKQLQMIYDIFEEEKSITSLQKRLKKLGFKVKSYSSYNNWLTNDLYCGYVSYADKVHTKGVHEPIISEEQFYRVQEIFSRMGKNPNMNRDSASLLNNLVVCGKCGLGFVHRRKDTVSRGKKYHYRYYSCKTYKHTHELEKCGNKIWRADKLEELIIDRVNNYSFASRNVDKEDELDSLNEKLKTEHVKKKRLFDLYISGSYEVSELDAMMADIDAQINYYEAQIEANEELKKNKKIQENLADLATVDFDSLEFREKQLYLKSLINKIYIEGEQVTIEWL

SEQ ID NO: 32292 - DNA, 50 bp, Listeria monocytogenes; identical to SEQ ID NO: 32147
  source 1..50: mol_type = genomic DNA

SEQ ID NO: 32293 - DNA, 40 bp, Listeria monocytogenes; identical to SEQ ID NO: 7828
  source 1..40: mol_type = genomic DNA

SEQ ID NO: 32294 - DNA, 40 bp, Listeria monocytogenes; identical to SEQ ID NO: 7829
  source 1..40: mol_type = genomic DNA

SEQ ID NO: 32295 - DNA, 50 bp, Listeria monocytogenes; identical to SEQ ID NO: 1300
  source 1..50: mol_type = genomic DNA

SEQ ID NO: 32296 - protein, 452 aa, Listeria monocytogenes; identical to SEQ ID NO: 20351

SEQ ID NO: 32297 - DNA, 50 bp, Listeria monocytogenes; identical to SEQ ID NO: 32177
  source 1..50: mol_type = genomic DNA

SEQ ID NO: 32298 - DNA, 40 bp, Listeria monocytogenes; identical to SEQ ID NO: 7828
  source 1..40: mol_type = genomic DNA

SEQ ID NO: 32299 - DNA, 40 bp, Listeria monocytogenes; identical to SEQ ID NO: 7829
  source 1..40: mol_type = genomic DNA

SEQ ID NO: 32300 - DNA, 50 bp, Listeria monocytogenes; identical to SEQ ID NO: 1300
  source 1..50: mol_type = genomic DNA

SEQ ID NO: 32301 - protein, 452 aa, Listeria monocytogenes
MKAAIYIRVSTQEQVENYSIQAQTEKLTALCRSKDWDVYDTFIDGGYSGSNMNRPALNEMLSKLHEIDAVVVYRLDRLSRSQRDTITLIEEYFLKNNVEFVSLSETLDTSSPFGRAMIGILSVFAQLERETIRDRMVMGKIKRIEAGLPLTTAKGRTFGYDVIDTKLYINEEEAKQLQMIYDIFEEEKSITTLQKRLKKIGFKVKSYSSYNNWLTNDLYCGYVSYADKVHTKGVHEPIISEEQFYRVQEIFSRMGKNPNMNRDSASLLNNLVVCGKCGLGFVHRRKDTVSRGKKYHYRYYSCKTYKHTHELEKCGNKIWRADKLEELIIDRVNNYSFASRNVDKEDELDNLNEKLKTEHTKKKRLFDLYISGSYEVSELDAMMADIDAQINYYEAQIEANEELKKNKKIQENLADLATVDFDSLEFREKQLYLKSLINKIYIDGEQVTIEWL

SEQ ID NO: 32302 - DNA, 50 bp, Listeria monocytogenes; identical to SEQ ID NO: 32147
  source 1..50: mol_type = genomic DNA

SEQ ID NO: 32303 - DNA, 40 bp, Listeria monocytogenes; identical to SEQ ID NO: 7828
  source 1..40: mol_type = genomic DNA

SEQ ID NO: 32304 - DNA, 40 bp, Listeria monocytogenes; identical to SEQ ID NO: 7829
  source 1..40: mol_type = genomic DNA

SEQ ID NO: 32305 - DNA, 50 bp, Listeria monocytogenes; identical to SEQ ID NO: 1300
  source 1..50: mol_type = genomic DNA

SEQ ID NO: 32306 - protein, 452 aa, Listeria monocytogenes; identical to SEQ ID NO: 32256

SEQ ID NO: 32307 - DNA, 50 bp, Listeria monocytogenes; identical to SEQ ID NO: 32142
  source 1..50: mol_type = genomic DNA

SEQ ID NO: 32308 - DNA, 40 bp, Listeria monocytogenes; identical to SEQ ID NO: 7828
  source 1..40: mol_type = genomic DNA

SEQ ID NO: 32309 - DNA, 40 bp, Listeria monocytogenes; identical to SEQ ID NO: 7829
  source 1..40: mol_type = genomic DNA

SEQ ID NO: 32310 - DNA, 50 bp, Listeria monocytogenes; identical to SEQ ID NO: 1300
  source 1..50: mol_type = genomic DNA

SEQ ID NO: 32311 - protein, 452 aa, Listeria monocytogenes
MKAAIYIRVSTQEQIENYSIQAQTEKLTALCRSKDWDVYDIFIDGGYSGSNMNRPALNEMLSKLHEIDAVVVYRLDRLSRSQRDTITLIEEYFLKNNVEFVSLSETLDTSSPFGRAMIGILSVFAQLERETIRDRMVMGKIKRIEAGLPLTTAKGRTFGYDVIDTKLYINEEEAKQLQMIYDIFEEEKSITTLQKRLKKIGFKVKSYSSYNNWLTNDLYCGYVSYADKVHTKGVHEPIISEEQFYRVQEIFSRMGKNPNMNRDSASLLNNLVVCGKCGLGFVHRRKDTVSRGKKYHYRYYSCKTYKHTHELEKCGNKIWRADKLEELIIDRVNNYSFASRNVDKEDELDNLNEKLKTEHTKKKRLFDLYISGSYEVSELDAMMADIDAQINYYEAQIEANEELKKNKKIQENLADLATVDFDSLEFREKQLYLKSLINKIYIDGEQVTIEWL

SEQ ID NO: 32312 - DNA, 50 bp, Listeria monocytogenes; identical to SEQ ID NO: 32147
  source 1..50: mol_type = genomic DNA

SEQ ID NO: 32313 - DNA, 40 bp, Listeria monocytogenes; identical to SEQ ID NO: 1298
  source 1..40: mol_type = genomic DNA

SEQ ID NO: 32314 - DNA, 40 bp, Listeria monocytogenes; identical to SEQ ID NO: 1299
  source 1..40: mol_type = genomic DNA

SEQ ID NO: 32315 - DNA, 50 bp, Listeria monocytogenes; identical to SEQ ID NO: 1300
  source 1..50: mol_type = genomic DNA

SEQ ID NO: 32316 - protein, 452 aa, Listeria monocytogenes
MKAAIYIRVSTQEQIENYSIQAQTEKLTALCRSKDWDVYDIFIDGGYSGSNMNRPALNEMLSKLHEIDAVVVYRLDRLSRSQRDTITLIEEYFLKNNVEFVSLSETLDTSSPFGRAMIGILSVFAQLERETIRDRMVMGKIKRIEAGLPLTTAKGRTFGYDVIDTKLYINEEEAKQLRLIYDIFEEEQSITFLQKRLKKLGFKVRTYNRYNNWLTNDLYCGYVSYKDKVHVKGIHEPIISEEQFYRVQEIFSRMGKNPNMNRDSASLLNNLVVCGKCGLGFVHRRKDTVSRGKKYHYRYYSCKTYKHTHELEKCGNKIWRADKLEELIIDRVNNYSFASRNVDKEDELDSLNEKLKTEHVKKKRLFDLYISGSYEVSELDAMMADIDAQINYYEAQIEANEELKKNKKIQENLADLATVDFDSLEFREKQLYLKSLINKIYIDGEQVTIEWL

SEQ ID NO: 32317 - DNA, 50 bp, Listeria monocytogenes; identical to SEQ ID NO: 32142
  source 1..50: mol_type = genomic DNA

SEQ ID NO: 32318 - DNA, 40 bp, Listeria monocytogenes; identical to SEQ ID NO: 1298
  source 1..40: mol_type = genomic DNA

SEQ ID NO: 32319 - DNA, 40 bp, Listeria monocytogenes; identical to SEQ ID NO: 1299
  source 1..40: mol_type = genomic DNA

SEQ ID NO: 32320 - DNA, 50 bp, Listeria monocytogenes; identical to SEQ ID NO: 1300
  source 1..50: mol_type = genomic DNA

SEQ ID NO: 32321 - protein, 452 aa, Listeria monocytogenes; identical to SEQ ID NO: 7861

SEQ ID NO: 32322 - DNA, 50 bp, Listeria monocytogenes; identical to SEQ ID NO: 32142
  source 1..50: mol_type = genomic DNA

SEQ ID NO: 32323 - DNA, 40 bp, Listeria monocytogenes; identical to SEQ ID NO: 1298
  source 1..40: mol_type = genomic DNA

SEQ ID NO: 32324 - DNA, 40 bp, Listeria monocytogenes; identical to SEQ ID NO: 1299
  source 1..40: mol_type = genomic DNA

SEQ ID NO: 32325 - DNA, 50 bp, Listeria monocytogenes; identical to SEQ ID NO: 1300
  source 1..50: mol_type = genomic DNA

SEQ ID NO: 32326 - protein, 452 aa, Listeria monocytogenes; identical to SEQ ID NO: 7751

SEQ ID NO: 32327 - DNA, 50 bp, Listeria monocytogenes; identical to SEQ ID NO: 32147
  source 1..50: mol_type = genomic DNA

SEQ ID NO: 32328 - DNA, 40 bp, Listeria monocytogenes; identical to SEQ ID NO: 7733
  source 1..40: mol_type = genomic DNA

SEQ ID NO: 32329 - DNA, 40 bp, Listeria monocytogenes; identical to SEQ ID NO: 7734
  source 1..40: mol_type = genomic DNA

SEQ ID NO: 32330 - DNA, 50 bp, Listeria monocytogenes; identical to SEQ ID NO: 1300
  source 1..50: mol_type = genomic DNA

SEQ ID NO: 32331 - protein, 452 aa, Listeria monocytogenes
MKAAIYIRVSTQEQVENYSIQAQTEKLTALCRSKDWDVYDIFIDGGYSGSNMNRPALNEMLSKLHEIDAVVVYRLDRLSRSQRDTITLIEEYFLKNNVEFVSLSETLDTSSPFGRAMIGILSVFAQLERETIRDRMVMGKIKRIEAGLPLTTAKGRTFGYDVIDTKLYINEEEAKQLQMIYDIFEEEKSITTLQKRLKKLGFKVKSYSSYNNWLTNDLYCGYVSYADKVHTKGVHEPIISEEQFYRVQEIFSRMGKNPNMNRDSASLLNNLVVCGKCGLGYVHRRKDTVSRGKKYHYRYYSCKTYKHTHELEKCGNKIWRADKLEELIIDRVNNYSFASRNVDKEDELDSLNEKLKTEHAKKKRLFDLYISGSYEVSELDAMMSDIDAQINYYEAQIEANEELKKNKKIQENLADLATVDFDSLEFREKQLYLKSLINKIYIDGEQVTIEWL

SEQ ID NO: 32332 - DNA, 50 bp, Listeria monocytogenes
  source 1..50: mol_type = genomic DNA
tttagtacctcgtttactctcgttggaagaagaagaaacgagatactaaa

SEQ ID NO: 32333 - DNA, 40 bp, Listeria monocytogenes; identical to SEQ ID NO: 5118
  source 1..40: mol_type = genomic DNA

SEQ ID NO: 32334 - DNA, 40 bp, Listeria monocytogenes
  source 1..40: mol_type = genomic DNA
tttcggatcaagctatgaggaacgcaaagagggaaccaaa

SEQ ID NO: 32335 - DNA, 50 bp, Listeria monocytogenes; identical to SEQ ID NO: 1300
  source 1..50: mol_type = genomic DNA

SEQ ID NO: 32336 - protein, 452 aa, Listeria monocytogenes; identical to SEQ ID NO: 7751

SEQ ID NO: 32337 - DNA, 50 bp, Listeria monocytogenes
  source 1..50: mol_type = genomic DNA
tttagttcctcgtttcctctcgttggaagaagaataagcgagataccaaa

SEQ ID NO: 32338 - DNA, 40 bp, Listeria monocytogenes; identical to SEQ ID NO: 1298
  source 1..40: mol_type = genomic DNA

SEQ ID NO: 32339 - DNA, 40 bp, Listeria monocytogenes; identical to SEQ ID NO: 1299
  source 1..40: mol_type = genomic DNA

SEQ ID NO: 32340 - DNA, 50 bp, Listeria monocytogenes; identical to SEQ ID NO: 1300
  source 1..50: mol_type = genomic DNA

SEQ ID NO: 32341 - protein, 452 aa, Listeria monocytogenes
MKAAIYIRVSTQEQIENYSIQAQTEKLTALCRSKDWDVYDIFIDGGYSGSNMNRPALNEMLSKLHEIDAVVVYRLDRLSRSQRDTITLIEEYFLKNNVEFVSLSETLDTSSPFGRAMIGILSVFAQLERETIRDRMVMGKIKRIEAGLPLTTAKGRTFGYDVIDTKLYINEEEAKQLQMIYDIFEEEKSITSLQKRLKKIGFKVKSYSSYNNWLTNDLYCGYVSYADKVHTKGVHEPIISEEQFYRVQEIFSRMGKNPNMNRDSASLLNNLVVCSKCGLGFVHRRKDTVSRGKKYHYRYYSCKTYKHTHELEKCGNKIWRADKLEELIIDRVNNYSFASRNVDKEDELDNLNEKLKTEHTKKKRLFDLYISGSYEVSELDAMMADIDAQINYYEAQIEANEELKKNKKIQENLADLATVDFDSLEFREKQLYLKSLINKIYIDGEQVTIEWL

SEQ ID NO: 32342 - DNA, 50 bp, Listeria monocytogenes; identical to SEQ ID NO: 32177
  source 1..50: mol_type = genomic DNA

SEQ ID NO: 32343 - DNA, 40 bp, Listeria monocytogenes; identical to SEQ ID NO: 1298
  source 1..40: mol_type = genomic DNA

SEQ ID NO: 32344 - DNA, 40 bp, Listeria monocytogenes; identical to SEQ ID NO: 1299
  source 1..40: mol_type = genomic DNA

SEQ ID NO: 32345 - DNA, 50 bp, Listeria monocytogenes; identical to SEQ ID NO: 1300
  source 1..50: mol_type = genomic DNA

SEQ ID NO: 32346 - protein, 452 aa, Listeria monocytogenes; identical to SEQ ID NO: 20351

SEQ ID NO: 32347 - DNA, 50 bp, Listeria monocytogenes; identical to SEQ ID NO: 32182
  source 1..50: mol_type = genomic DNA

SEQ ID NO: 32348 - DNA, 40 bp, Listeria monocytogenes; identical to SEQ ID NO: 1298
  source 1..40: mol_type = genomic DNA

SEQ ID NO: 32349 - DNA, 40 bp, Listeria monocytogenes; identical to SEQ ID NO: 1299
  source 1..40: mol_type = genomic DNA

SEQ ID NO: 32350 - DNA, 50 bp, Listeria monocytogenes; identical to SEQ ID NO: 1300
  source 1..50: mol_type = genomic DNA

SEQ ID NO: 32351 - protein, 452 aa, Listeria monocytogenes; identical to SEQ ID NO: 1296

SEQ ID NO: 32352 - DNA, 50 bp, Listeria monocytogenes; identical to SEQ ID NO: 32182
  source 1..50: mol_type = genomic DNA

SEQ ID NO: 32353 - DNA, 40 bp, Listeria monocytogenes; identical to SEQ ID NO: 1298
  source 1..40: mol_type = genomic DNA

SEQ ID NO: 32354 - DNA, 40 bp, Listeria monocytogenes; identical to SEQ ID NO: 1299
  source 1..40: mol_type = genomic DNA

SEQ ID NO: 32355 - DNA, 50 bp, Listeria monocytogenes; identical to SEQ ID NO: 1300
  source 1..50: mol_type = genomic DNA

SEQ ID NO: 32356 - protein, 452 aa, Listeria monocytogenes; identical to SEQ ID NO: 24371

SEQ ID NO: 32357 - DNA, 50 bp, Listeria monocytogenes; identical to SEQ ID NO: 32177
  source 1..50: mol_type = genomic DNA

SEQ ID NO: 32358 - DNA, 40 bp, Listeria monocytogenes; identical to SEQ ID NO: 1298
  source 1..40: mol_type = genomic DNA

SEQ ID NO: 32359 - DNA, 40 bp, Listeria monocytogenes; identical to SEQ ID NO: 1299
  source 1..40: mol_type = genomic DNA

SEQ ID NO: 32360 - DNA, 50 bp, Listeria monocytogenes; identical to SEQ ID NO: 1300
  source 1..50: mol_type = genomic DNA

SEQ ID NO: 32361 - protein, 452 aa, Listeria cossartiae
MKAAIYIRVSTQEQIENYSIQAQTEKLTALCRSKDWDVYDIFIDGGYSGSNMNRPALNEMLSKLHEIDAVVVYRLDRLSRSQRDTITLIEEYFLKNNVEFVSLSETLDTSSPFGRAMIGILSVFAQLERETIRDRMVMGKIKRIEAGLPLTTAKGRTFGYDVIDTKLYINHEEAKQLQMIYDVFEEEKSITSLQKRLKKLGFKVKSYSSYNNWLTNDLYCGYVSYKDKVHVKGIHEPVISEEQFYRVQEIFSRMGKNPNMNRDSASLLNNLVVCGKCGLGFVHRRKDTVSRGKKYHYRYYSCKTYKHTHELEKCGNKIWRADKLEELIIDRVNNYSFASRNVDKEDELDSLNEKLKTEHVKKKRLFDLYISGSYEVSELDAMMADIDAQINYYEAQIEANEELKKNKKIQENLADLATVDFDSLEFREKQLYLKSLINKIYINGEQVTIEWL

SEQ ID NO: 32362 - DNA, 50 bp, Listeria cossartiae
  source 1..50: mol_type = genomic DNA
tttagtacctcattttctctcgttggaagaagaagaaacgagatactaaa

SEQ ID NO: 32363 - DNA, 40 bp, Listeria cossartiae
  source 1..40: mol_type = genomic DNA
tttcggatcaagctatgagggtcgtaaggagggcaccaaa

SEQ ID NO: 32364 - DNA, 40 bp, Listeria cossartiae
  source 1..40: mol_type = genomic DNA
tttcggatcaagctatgaggatcgtaaggagggcaccaaa

SEQ ID NO: 32365 - DNA, 50 bp, Listeria cossartiae; identical to SEQ ID NO: 1300
  source 1..50: mol_type = genomic DNA

SEQ ID NO: 32366 - protein, 518 aa, Brevibacillus brevis
MVTHLKNLDIAIYLRKSRKDIETEREAALRGEEYDTLTKHRKELLAFARKNEHNIVDIFEEVVSGEYIAERPEMQALLQKVKDLNYDGILVMDLDRFGRGDKMDQGRIERTFKESQTLILTPQETLDLNEESGEFTVEVKTFLARMEYKQIKKRLQGGRRRGATSGRDQSTKPPYGYRKDDSLRLVVQEEEAKVVRMIFQWCVEDGLGRSAIAQRLMDFGIPSPTGLPQWQHVTVGRILKNPKYKGDQVFGRTKWSKNEDGTYSYTKVHDIEQMAYLEGAHEPIVDPELWEKAQEALSRRREAPVKKNHDILNPFAGILKCKKCGKAMLANKPTNRPNKYLSCYTTRCDTKMIALYKVEEVFLRQLETIFDHLRATAKKRRSQPDDAALDLAKRKVLRIQEDIKKTNLRKTNLHDLLEDGTYDKDTFLERSRLLQEQLKQLDNELEAAEKQVELEAGRLNQALKVLPMIKKALTEYKSAGSIKEQNALLKEIVREIKYRRDTDWTGPYQFEIEIHLYD

SEQ ID NO: 32367 - DNA, 50 bp, Brevibacillus brevis
  source 1..50: mol_type = genomic DNA
tgtacatatcatttaacgtaagacttattctatgttaaatgatatgcact

SEQ ID NO: 32368 - DNA, 40 bp, Brevibacillus brevis
  source 1..40: mol_type = genomic DNA
tgtaacgggatcacggattttgttcatgttgcaataagct

SEQ ID NO: 32369 - DNA, 40 bp, Brevibacillus brevis
  source 1..40: mol_type = genomic DNA
tgtaacgggatcacggatttcgttcatgttgcaataagct

SEQ ID NO: 32370 - DNA, 50 bp, Brevibacillus brevis
  source 1..50: mol_type = genomic DNA
cttacctatttagaaacttaaggctccttctctgtccctctatatgaact

SEQ ID NO: 32371 - protein, 616 aa, Rathayibacter tritici
MSLPDDTYPNAFLSEPPALRAVATEDAEADDLGIVSTHSPPNAVPPGSRAVIYLRVSSKGQVNTDYDPEGISIPAQRIACQRKAEQLGLTVTAEYIEPGRSATEMTKRVAFQQMLERIRREKDVDYVIVHKLSRFARNRIDDAVVMADLQKRGVELISATESIDATPVGQLMHGILAAFNEYRSREDGADIAYKMGQKAKNGGTLGKAPLGYLNVTDNVDGRKINTVAVDPERAAFVKLAFELYADRNHTIDDIVEELTDRGLRTRPTLRRPAGPVSASKVQQMLRDRYYLGEVGYKGEYFEGRHEPLIDEGTFNRVQELMDARGNSGERRRRHDHYLKGTIWCGRCRLEDQTNRRMIIMRATGRQGSTYWYFFCRGTQDHLCDAPYSNTERVEAAIEEHYKTIQFRAEFVAAIRQSIEAALTDSEAAKRLLREQMLGQLTQLETKEENLLDLAADGALPQAKIRERLRAIARDRERLTSQLGGIHDDLSSGKAFLDAHLELLTAPHELYRNASDETRRLLNQAIFAHIYVVNDEVIGDELNSPLAELLAAERGWSAFQAGLGAEAATAQAHAELTRRGPQNAKRATFEGDPFETVGDLLTALDSVGDCSKPSMVP

SEQ ID NO: 32372 - DNA, 50 bp, Rathayibacter tritici
  source 1..50: mol_type = genomic DNA
gcagtaagccgtctatggtgcccctatccgcaactaatcaagaaagatgg

SEQ ID NO: 32373 - DNA, 40 bp, Rathayibacter tritici
  source 1..40: mol_type = genomic DNA
ttgcggatcgtggcgcccctggagggactcgaacccccaa

SEQ ID NO: 32374 - DNA, 40 bp, Rathayibacter tritici
  source 1..40: mol_type = genomic DNA
ttgcggatcgtggcgccccatgagggactcgaacccccaa

SEQ ID NO: 32375 - DNA, 50 bp, Rathayibacter tritici
  source 1..50: mol_type = genomic DNA
gcagtaagcactgtatagtaccacattctacaacagttcctgagacatgg

SEQ ID NO: 32376 - protein, 506 aa, Escherichia coli
MRSVITYLRYSSAIQGAEGADSTRRQNDLFKQWLKKNSDAQVVASFSDEGLSGYKGKHLTGQFGDMLARIESGEFPEGTILLVESIDRIGRLEHLETEALMNRILGNGLEIHTLQDGLIYTKDALADDLGISIIQRVKAYIAHQESKQKSFRVSQKWEQRAKLALAGEQRLTKMVPGWIDPDTFKLNEHAETVRLIFKLLLSGESLHNIARHLQANNISSFSRRKDANGFSVHSVRTILRSETTIGTLPASQRNDRPAIPNYYEPAIDASTFNKAQEILDKNRKGRTPASDNPLTINIFKGLFRCQCGASVHPTGTKNKYAGVYRCNSHLDGRCGVPPLKRKPFDKWMIDNFLGMIDVGNDGEAEKEIASLQHEVETVTARIKKATALLLEMDDIDELKIQLKELNQKRTELQTTIDSMRRKASLTDKELPQLKDIDLTTKAGRVECQLILSKHLESLTLGRGQVTVKLSNGTEIIVPTDPLPLTDGAAIFEIAEKNLLNIDTFQL

SEQ ID NO: 32377 - DNA, 50 bp, Escherichia coli
  source 1..50: mol_type = genomic DNA
aaaccgaatagactttattcaagggttattgtattgtagctattcggcat

SEQ ID NO: 32378 - DNA, 40 bp, Escherichia coli; identical to SEQ ID NO: 20043
  source 1..40: mol_type = genomic DNA

SEQ ID NO: 32379 - DNA, 40 bp, Escherichia coli
  source 1..40: mol_type = genomic DNA
gcggcgaggtaaatcaaggttcattgaagtcataatcatt

SEQ ID NO: 32380 - DNA, 50 bp, Escherichia coli
  source 1..50: mol_type = genomic DNA
aaacctaaaaggggttattcagcctttattataatttagtcattcagcat

SEQ ID NO: 32381 - protein, 532 aa, Vibrio parahaemolyticus
MKVAAYIRVSTLEQVKYGDSLDGQKESAKRWARENGHTIATWYVDEGRSAYKGTHRPSFQQLIEDVSSGELAIDAILVFSLSRFSRRLLQQLNAFEILKNNDVTVLSITEPLPDDPSSNFLMTTVIGMVNEQQSQQNSKNVKERLADTARKNYFTGGRVPFGYTSIDVEGEDKLRRKKLAINPDESVLVKKIFSLALSGINGKAMGIKAIYTWLNENGLTFRGKRWTRNSVNRILRNTVYIGEFVFRTNTSSSGIAEEIIVSVPRIVEDETFRKVGEGLDFRKPTNTQVNKGPLSKSLLTGILRCGKCGSNMSLMSGKTGRYQYYVCNQKKNVSAKACSCPYLSKDHVDKAVLSTITNEVLSIEHIDSCLDRVKEILDDKRSTASQNIMQLNNKRTRLEQSISTLLEQIGTGQLMSSTTVNQFILDKEKELALTKNQLSELESLSNIPVMKFSEEGASQFIRKAANYMLNTEEEVLKQFLMVIVDQIIVEPNQQKLKMTCSNMGVINLIPKTKMGTDFSVPIFVSIWRRDRD

SEQ ID NO: 32382 - DNA, 50 bp, Vibrio parahaemolyticus
  source 1..50: mol_type = genomic DNA
tatcaatatggcggagagatagggatgattatgggaacacatcatatatc

SEQ ID NO: 32383 - DNA, 40 bp, Vibrio parahaemolyticus
  source 1..40: mol_type = genomic DNA
atgtggcggagagatagggatttgaaccctagatacgcta

SEQ ID NO: 32384 - DNA, 40 bp, Vibrio parahaemolyticus
  source 1..40: mol_type = genomic DNA
atgtggcggagagatagggtattgaaccctagatacgcta

SEQ ID NO: 32385 - DNA, 50 bp, Vibrio parahaemolyticus
  source 1..50: mol_type = genomic DNA
tattaattttaatcagatatatggtatattttgggttcatgtcatatttg

SEQ ID NO: 32386 - protein, 532 aa, Vibrio parahaemolyticus
MKVAAYIRVSTLEQVKYGDSLDGQKESAKRWARENGHTIATWYVDEGRSAYKGTHRPSFQQLIEDVSSGELAIDAILVFSLSRFSRRLLQQLNAFEILKNNDVTVLSITEPLPDDPSSNFLMTTVIGMVNEQQSQQNSKNVKERLADTARKNYFTGGRVPFGYTSIDVEGEDKLRRKKLEINPDESVLVKKIFSLALSGINGKAMGIKAIYTWLNENGLTFRGKRWTRNSVNRILRNTVYIGEFVFRTNTSSSGIAEEIIVSVPRIVEDETFRKVGEGLDFRKPTNTQVNKGPLSKSLLTGLLRCGKCGSNMSLMSGKSGRYQYYVCNQKKNVSAKACSCPYLSKDHVDKAVLSTITNEVLSIEHINSCLDRVKEILDDKRSTASQNIMQLNNKRTRLEQSISTLLEQIGTGQLMSSTTVNQFILDKEKELALTKNQLSELESLSNIPVMKFSEEGASQFIRKAANYMLNTEEEVLKQFLMVIVDQIIVEPNQQKLKMTCSNMGVINLIPKTKMGTDFSVPIFVSIWRRDRD

SEQ ID NO: 32387 - DNA, 50 bp, Vibrio parahaemolyticus; identical to SEQ ID NO: 32382
  source 1..50: mol_type = genomic DNA

SEQ ID NO: 32388 - DNA, 40 bp, Vibrio parahaemolyticus
  source 1..40: mol_type = genomic DNA
atgtggcggagagattgggatttgaaccctagatacgcta

SEQ ID NO: 32389 - DNA, 40 bp, Vibrio parahaemolyticus
  source 1..40: mol_type = genomic DNA
atgtggcggagagattgggtattgaaccctagatacgcta

SEQ ID NO: 32390 - DNA, 50 bp, Vibrio parahaemolyticus; identical to SEQ ID NO: 32385
  source 1..50: mol_type = genomic DNA

SEQ ID NO: 32391 - protein, 532 aa, Vibrio parahaemolyticus
MKVAAYIRVSTLEQVKYGDSLDGQKESAKRWARENGHTIATWYVDEGRSAYKGTHRPSFQQLIEDVSSGELAIDAILVFSLSRFSRRLLQQLNAFEILKNNDVTVLSITEPLPDDPSSNFLMTTVIGMVNEQQSQQNSKNVKERLADTARKNYFTGGRVPFGYTSIDVEGEDKLRRKKLEINPDESVLVKKIFSLALSGINGKAMGIKAIYTWLNENGLTFRGKRWTRNSVNRILRNTVYIGEFVFRTNTSSSGIAEEIIVSVPRIVEDETFRKVGEGLDFRKPTNTQVNKGPLSKSLLTGILRCGKCGSNMSLMSGKSGRYQYYVCNQKKNVSAKACSCPYLSKDHVDKAVLSTITNEVLSIEHINSCLDRVKEILDDKRSTASQNIMQLNNKRTRLEQSISTLLEQIGTGQLMSSTTVNQFILDKEKELALTKNQLSELESLSNIPVMKFSEEGASQFIRKAANYMLNTEEEVLKQFLMVIVDQIIVEPNQQKLKMTCSNMGVINLIPKTKMGTDFSVPIFVSIWRRDRD

SEQ ID NO: 32392 - DNA, 50 bp, Vibrio parahaemolyticus; identical to SEQ ID NO: 32382
  source 1..50: mol_type = genomic DNA

SEQ ID NO: 32393 - DNA, 40 bp, Vibrio parahaemolyticus; identical to SEQ ID NO: 32388
  source 1..40: mol_type = genomic DNA

SEQ ID NO: 32394 - DNA, 40 bp, Vibrio parahaemolyticus; identical to SEQ ID NO: 32389
  source 1..40: mol_type = genomic DNA

SEQ ID NO: 32395 - DNA, 50 bp, Vibrio parahaemolyticus; identical to SEQ ID NO: 32385
  source 1..50: mol_type = genomic DNA

SEQ ID NO: 32396 - protein, 453 aa, Aphanizomenon flos-aquae
MKAGYVRVSTREQDEGNALEQQTARVERAGAIVIFSDVESGRSDKRKEFNKMIAQCKQGKITEVICTRIDRLGRSVVGIHKAIAIFEEYKVKLTVLDAPVDPSSPFGWFSVNQMAGLAEFESRLLANRIKNGMNFFREQKKASPRPPFGYCRVDEKYAPDLSEMNGISKWAIAHKMIAYFLGDGATLRSTGQYLLQTYHLKWTAAGLRYWLLNPVLRGCTAYNIKDNLNKPENWDIHEDTHQRLITEDIFKRIVRKLDENKSKYSYGRDKKETEIFPLAGQIICADCGYKCFCKKRNSTYRVRCKKHENMGNDFCSNKISTYLPDIILAVDQTLVERHREIKEYAITNSNVETQDSPELIARQEQLKSLRLLPKNPIIQDAIDQTILEINKIKQKETLVNKINSELFDILAFCCSNINFWDETPWADKSLIYKELIDYVKVANGEIKEVKLRV

SEQ ID NO: 32397 - DNA, 50 bp, Aphanizomenon flos-aquae
  source 1..50: mol_type = genomic DNA
aatgtccatattgttaaaacgggtagagttatattaacaatatgggcagt

SEQ ID NO: 32398 - DNA, 40 bp, Aphanizomenon flos-aquae
  source 1..40: mol_type = genomic DNA
agtgaagcatcaaacgggtagagtcagctttaggatcgca

SEQ ID NO: 32399 - DNA, 40 bp, Aphanizomenon flos-aquae
  source 1..40: mol_type = genomic DNA
agtgaagcatcaaacgggtatagtcagctttaggatcgca

SEQ ID NO: 32400 - DNA, 50 bp, Aphanizomenon flos-aquae
  source 1..50: mol_type = genomic DNA
aaggtccttatttctaaaatgggaatattaatagtaaatctttgggtagt

SEQ ID NO: 32401 - protein, 554 aa, Bradyrhizobium elkanii
MNRITIIPASPVPTTDAQVQPKAYSYKRFSTPAQEQGDSLRRQTAMAQAWADRNGVPLDTELNLTDRGVSAYTGANKDVGNLGAFLRAVEEGTVPKGSWLLVENLDRLSREPAFDASYTMQGIIRAGVTVVDLSDNGGLGREYNMETLRSDQGLMHLMAMLLSFARGNQESAQKGRRVGEAYANKRAVFASDQKLTKPYTRRLPAWIRWNTETTTYELIEDRAERLRWMFEMADDGMGAHSIAAQLNEAGVGTWGAGGWKARYWHRSYIRKLLTNKAAIGIFVPHRVEKVEGKRSKQRIPQEPIAHRFPPAIDRELFERVNARLNTTEARGKNATAPVRSIFAGIMKCQHCGGTVTRVNKGDHVYLVCAAAHAKAGTCKYESVPYAEAVGAFKSHRLGTLNSAPRGNDTAELDAKIERLKGEIDAGEDIVSELLDLTISDKSRSARQRLREAEDELDRLKKTLRETMGRRDAMTSTNVLKRLAAVEKALTAETIDTEEANKALRGAVRKMVMRPQEGRLDILWHHADEAQETLFFTSRFDWGANQIKSTEEAGL

SEQ ID NO: 32402 - DNA, 50 bp, Bradyrhizobium elkanii
  source 1..50: mol_type = genomic DNA
tgttcccattgacggaatcacttgagcatgtgatcttgtgaatggcccac

SEQ ID NO: 32403 - DNA, 40 bp, Bradyrhizobium elkanii
  source 1..40: mol_type = genomic DNA
gccgggcgagccgatcatcagcagatgatgcccgccggcg

SEQ ID NO: 32404 - DNA, 40 bp, Bradyrhizobium elkanii
  source 1..40: mol_type = genomic DNA
gccgggcgagccgatcatcctcagatgatgcccgccggcg

SEQ ID NO: 32405 - DNA, 50 bp, Bradyrhizobium elkanii
  source 1..50: mol_type = genomic DNA
tatacccataagtgaaatcacttgctcataagatatgtgcattaggccac

SEQ ID NO: 32406 - protein, 494 aa, Lysinibacillus fusiformis
MRCAVYARVSTNMDSQATSIENQIDIFNNYAAQKNWEIVKVYTDKKTGTKSNRPGLKALIEDGKDGEYDVILAKELSRLARNGKLSYELRDICQFNNIHIVCLDNSINTLEGNVQNFGLFAWLYETESANSSRRNKQAKKVKAQRGLYIGSHPPYGYSVDNGVLKIKEDDKPNIVRRIFSDYLEGIGMDTIAKNLTTEKVLTPAQVAKKSNASTQWHGSTIKKILKNRHYIGDLVQGRSETISVTSSYRREIDEENQIFNENTHEAIIEKETFDKVQELLQRRTKSGTAPQKHLFTNLLYCEECQKGMWYKANQKGYRCGGNLRHGDTFCVNKTAVRERELIDVIINDLKPLYNTLKEESFVQTLLKKLNKKKHQIQIELEKTKSDIDALKQKKLEYVHLYTDNIISKEELIEYRDLTDNNIKELQTKKAQLNEKASECEDENYAVSIGRKLKDVLSLDALTSPILHSLVEKITCTHDGYIHIHYTFVNPLQVE

SEQ ID NO: 32407 - DNA, 50 bp, Lysinibacillus fusiformis
  source 1..50: mol_type = genomic DNA
atgagttgcgagacacactccacatgtgtgaagtgtatgtggcaacacat

SEQ ID NO: 32408 - DNA, 40 bp, Lysinibacillus fusiformis
  source 1..40: mol_type = genomic DNA
ccacgcaaccgcttcacaatgtgtggagtgcgggaacata

SEQ ID NO: 32409 - DNA, 40 bp, Lysinibacillus fusiformis
  source 1..40: mol_type = genomic DNA
ccacgcaaccgcttcacaacttgtggagtgcgggaacata

SEQ ID NO: 32410 - DNA, 50 bp, Lysinibacillus fusiformis
  source 1..50: mol_type = genomic DNA
ataagctgctatttaaagtcctcacttgtgaagattggaatgcaatgcat

SEQ ID NO: 32411 - protein, 462 aa, Flavonifractor plautii
MKAEIDRIIRVALYIRVSTEEQALHGYSLQAQEDELLHFAKEKKYKVVGTYRDEGFSARKPALKRKVMQELLDDVRAGKIDRILFIKLDRWFRNVWEYHQVQAVLDENNVTWQATMEDYNTATADGRLKVNIMLSVAENEADRTSERIKFVFNSKVNRGEYPYGRVPIGYKAEIVDGLRKLVKDPELEAAITAFWEYALKYNSVRRAGFLVNAEYGTTRAAKEWLRTGKLEIYCGTFEGIPDFCPAYVSRENWKKIQDRKNLIKKAQAWNVYLFSGLITCPSCGHTLKATYKSYPNDRSIKYNAYRCNHGRDNTGCTYRSSVSEKKTEKYLLEHIREMIEEYISETEVGASSKKKKRIIKFDVAKAKEQLRRLNVAYFAGNMPDDEYTAMAAKLKEDIAKALESEYEAEKAPDIGKLRAFLDTDFEAIYRTLEKDDQRRLWRSIIKEIRVEDNHVVGVTFNV

SEQ ID NO: 32412 - DNA, 50 bp, Flavonifractor plautii
  source 1..50: mol_type = genomic DNA
ttagggactaattacccgttttctgtagtaatagggcagttagtccccaa

SEQ ID NO: 32413 - DNA, 40 bp, Flavonifractor plautii
  source 1..40: mol_type = genomic DNA
gtcggggataccactctcagtggacacccccgcgccgccg

SEQ ID NO: 32414 - DNA, 40 bp, Flavonifractor plautii; identical to SEQ ID NO: 32413
  source 1..40: mol_type = genomic DNA

SEQ ID NO: 32415 - DNA, 50 bp, Flavonifractor plautii
  source 1..50: mol_type = genomic DNA
gtagggaatacaatccgggtttgtgtagttacagtgtatgatgtccccaa

SEQ ID NO: 32416 - protein, 516 aa, Bacillus cereus; identical to SEQ ID NO: 6231

SEQ ID NO: 32417 - DNA, 50 bp, Bacillus cereus
  source 1..50: mol_type = genomic DNA
cgtgtacatggtggagtattaaactggtttaactctctaccatatacact

SEQ ID NO: 32418 - DNA, 40 bp, Bacillus cereus; identical to SEQ ID NO: 6233
  source 1..40: mol_type = genomic DNA

SEQ ID NO: 32419 - DNA, 40 bp, Bacillus cereus
  source 1..40: mol_type = genomic DNA
tgtactgtggcgattgtacgaattcacttccccataccca

SEQ ID NO: 32420 - DNA, 50 bp, Bacillus cereus
  source 1..50: mol_type = genomic DNA
cgtgtccatcccccactataaaatgagataaactttcatatataaacaca

SEQ ID NO: 32421 - protein, 629 aa, Enterobacter hormaechei
MPQLYSYIRWSTDRQDKGTTRTRQVAAAKAYAEEAGLEMVEIIEPGVSAFRGKNRAGKLGDFIDAVKNAAIPSDSWLYCENLDRLSRDQVDEALRLFLELIGLGLTIVTGMDRKVYNRDTIRQNPTDLMISILMFIRGNEESETKSNRTVGNVVALVERHKEGLPVNIKSVGRHPFWIDDTGSQYEAVKKHPFYWNIAREIIDMFLSGNGVYSVKKYLDEKYPNGLKGREWDYQVLKKMRDNRALIGERTINLRGVPYKLENYYPWLCKDEAEFFLLEKRKQQNNYKSKKDGADTIKLLSGLSILRCSKCGGTMHSFMNHGKARYICTNGVHLQKNCSGWSITAQLVEHCTMIALLIGYMDKSRKNGSDTTLIEEELNEKEKLIKSLDSKISNLVTAIAIAPDVNSLAHSLNEINSKRKELVLSVEKLKERLVSLQGKGSFEVDIMEFLILIQWAVFTNMEDNDRDKIRKIIDAIIEYIVVDKTNDCITIKIKYYGNDEVLVFGGVDRKPHWRFSIDFDTGKEGALTVLENDLINMPEIQKAVGYLHKLKESYVAMYDAAVTMLSEVGYPEIKGSQFWPNTGKHEKVTVAFEGIVYTISFNGRLPKAITSALETTGLTRQQFIENFKVQ

SEQ ID NO: 32422 - DNA, 50 bp, Enterobacter hormaechei
  source 1..50: mol_type = genomic DNA
ccggattttatttcttgatttttcgggcaccctaatgatataaatccaat

SEQ ID NO: 32423 - DNA, 40 bp, Enterobacter hormaechei
  source 1..40: mol_type = genomic DNA
ggagtccaccaggttcttcgggcagcccagggagacaaag

SEQ ID NO: 32424 - DNA, 40 bp, Enterobacter hormaechei
  source 1..40: mol_type = genomic DNA
ggagtccaccaggttcttcttgcagcccagggagacaaag

SEQ ID NO: 32425 - DNA, 50 bp, Enterobacter hormaechei
  source 1..50: mol_type = genomic DNA
cctgattctgttgatttctttttcttacaccatcatagaaaatttccaat

SEQ ID NO: 32426 - protein, 459 aa, Rhodococcus rhodochrous
MQRQEDDCRQLAQQLGWTVEEVYADNDVSAYSGKPRPAYLRMLADLEAGRIRGILAWHPDRLHRSPLELEHFITLVEKHAVRVHTVRAGHYDLSTPSGRAVARTVGAWARYESEHKSDRIRRAREQQALAGRFHGGQRPYGFEKDGVTLRPDEAAEIVKAIDGVIAGVSLRSIVRDMNQRGVPTATGRSQWTGVVLREILCRPRVAGLSSLHGEIVGKAEWPALVPEETWRAAKTILEDPSRRTNQRGGTVRWLGSGIYVCGVCGCRELRASTSGSKRKHAYRCRARDYSGDPGGHVVRSCEDVDGYVEATIVERLKRDRVTDLLVDQPDTAAAAASLRIESAAVTERLDQLAGMFAEGQISASQLAAGTEKLRTRAGEIAAELAELGKRSPLSLVAGAPDIERLWFGTEPDRSDGLALGARRAIVDALMTVTILRAPSGRSRDGLYFDPEYVRIEWKA

SEQ ID NO: 32427 - DNA, 50 bp, Rhodococcus rhodochrous
  source 1..50: mol_type = genomic DNA
aggtgtccccgttgcagtcgcgggaagacatggattgaactatgacacac

SEQ ID NO: 32428 - DNA, 40 bp, Rhodococcus rhodochrous
  source 1..40: mol_type = genomic DNA
cggcggtacgggtgcggggaagacgacgatgctcgcggcg

SEQ ID NO: 32429 - DNA, 40 bp, Rhodococcus rhodochrous; identical to SEQ ID NO: 32428
  source 1..40: mol_type = genomic DNA

SEQ ID NO: 32430 - DNA, 50 bp, Rhodococcus rhodochrous
  source 1..50: mol_type = genomic DNA
aggggtccctgttccactcttaggaagccatggagatgcccatgccacac

SEQ ID NO: 32431 - protein, 537 aa, Vibrio coralliilyticus
MLVLWMRLYSYIRFSTEKQKDGDSLSRQTEAAKRYAEQHDYDYQDSSFKDLGVSGWSKKERNGLESMLTAVERGSVAKGDMIFIENVDRLTRKGFQDANDLICQIVRMGVHMRFESEGITFTNEKDLNASMNVIRVSIAAEQANQESEKKSERIRASKATRFKEALKAGKRVSNGGYPTWLNVSKDTEPTFKPYAKETIQTIAKMYLNGRSIGDISKHLNNPENGDYWRQGEWNVGKVSRLLDQPALYGVHKSRTWKADGTRFESYARHNQDGVEIQGAYPVVISKTDYDLIQAKREHNKTNLPYMRGTNESTRSRGKLIFPESTCMFCGGNMRYKSSQDRAKSEFICANKKGAGVCDSASMNYMLAEQMLLGLVFQENNLAPLFSDDQPNQELKNKIEALEIERATTLEAIESKKAQGKRYGALQDEVGDIEDEIQALKKELQALETGSVSVYEEMRTWSSVWDADAEERNKVRIFLESIVEAIEITSIKRSTKTMAVQININGNQRRLIATSSGNKKQGKHTINYIKGLFEGVEV

SEQ ID NO: 32432 - DNA, 50 bp, Vibrio coralliilyticus
  source 1..50: mol_type = genomic DNA
tttcgacatttagtaactaaagtatttgcgttggttattaaaagtcgata

SEQ ID NO: 32433 - DNA, 40 bp, Vibrio coralliilyticus
  source 1..40: mol_type = genomic DNA
ttttctgccacgctgcatttttgcgttggttaatctgtag

SEQ ID NO: 32434 - DNA, 40 bp, Vibrio coralliilyticus
  source 1..40: mol_type = genomic DNA
ttttctgccacgctgcattagtgcgttggttaatctgtag

SEQ ID NO: 32435 - DNA, 50 bp, Vibrio coralliilyticus
  source 1..50: mol_type = genomic DNA
tttgtagatgaaaaaactaaagtaagaaagttagttttcccaagaccata

SEQ ID NO: 32436 - protein, 588 aa, Phytobacter sp SCO41
MTKLYSYIRWSSARQRRGSSKARQSTKAQEYAALNGFDYTEISDDGVSAFRGKNMLPTSELGKFIEAVENKVIPSNSCLYVENLDRLSREEATKANELFLKLLNLGLTIVTGMDNKVYTRDSVNANPMDLMFSIMMFMRANEESRTKSKRVTGNILALLERHEQGLPVTIKSAGNCPWWIHESGSQYEKPKKHELYFGIARLIVELFLEGHGSYRIAKLLNSDPSLYPAPKGWTKRSEQTWTVRKLEYMRRSKALTGEYVIKVSGVTHNLHNYYPPVCTETEFAKLQDSVRNNHITQSSARKRISLLSGMNFLFCGNCGGAMSFYLMDGKIRYCCGQARNQANKNCAYWSVAGAPLEQAAFYAAVYAVFDNEIQVHVSTDKESLQMHLDGLRSRYESVESQLANVAKAIRMGNGPIPVLVEGLQELYAEKEGLLLELEQAEHQLLLAQNDDVSERIADILEQFRPEVWQDITHPAREKIREIFRKNLLRVSVYKRANKSIIFIFSLPGNCFYIVNGVMRNVNGVYKKAVGIYRGLLDEDGQPCDLLDKAHDQYSSLKALQGRSDKVMEKVIAELNLPPYRTRDFFAQR

SEQ ID NO: 32437 - DNA, 50 bp, Phytobacter sp SCO41
  source 1..50: mol_type = genomic DNA
actcatatataattaataaacgggaagccgaaagttgaaaagttatgagt

SEQ ID NO: 32438 - DNA, 40 bp, Phytobacter sp SCO41
  source 1..40: mol_type = genomic DNA
ctaagttgagcgaaacgggaagccgattgtgcaaatcggc

SEQ ID NO: 32439 - DNA, 40 bp, Phytobacter sp SCO41
  source 1..40: mol_type = genomic DNA
ctaagttgagcgaaacgggaggccgattgtgcaaatcggc

SEQ ID NO: 32440 - DNA, 50 bp, Phytobacter sp SCO41
  source 1..50: mol_type = genomic DNA
tctcacttggaagtaataaaggggaggccaaaagttggttgtttataagg

SEQ ID NO: 32441 - protein, 583 aa, Pseudomonas fulva
MSAKAYSYIRFSSPEQAKGDSYRRQKDAAVRYCQEHDLELATTKEYTFLDKGRSAYRGRNLDDEGQLRRFLDLVENGTIESGSYLLVESLDRLSREKVNTALPRFMDLLNCGIRVVTLSDGRLYTEEFNELDLIISIVHMSRAHNESAIKGERVSAAWANKRVLARSSKKPLGRACPYWLELVDGNYQPITSRVETVRLIFELAIQGYGQGSIPRLLNERGIPVFGSRNRNHSGAWGSSSVSRLLNNRALLGEYQPTHMVDGKRINDGEPVSGFYPPVIEESVFYQAQAVRADRRIHRTGNQSHRFNVFQGIAKCGACGDAMHLVNKGRPPKGATYLQCHSARKGVCKNGYVRVERAERALREVLAKVDSLSLVQASEGQTAKELAALKGKTQEVNERLAKAIGLMTEAPSRALAVLVQTLEDELAELKKEEQKCQELLAVNQVISKKDFFAKLDLVSFEGRHATNSLLKRLSIVVTMSISKAHQSYSAIKDGIPQLQIMQYLEAMVIIAANESILDLQVLQGELSPTERAAWIQWFEIRRNGLPAGAFERIKAKLGNIDPSKVRFKGLSGQFKKVIPERNPE

SEQ ID NO: 32442 - DNA, 50 bp, Pseudomonas fulva
  source 1..50: mol_type = genomic DNA
ggttttttatcattccacaacctgctacagttgtgttaggttacacaaca

SEQ ID NO: 32443 - DNA, 40 bp, Pseudomonas fulva
  source 1..40: mol_type = genomic DNA
tgccggggcgcacaacctgctcttcaccgggccgccgggc

SEQ ID NO: 32444 - DNA, 40 bp, Pseudomonas fulva
  source 1..40: mol_type = genomic DNA
tgccggggcgcacaacctgggcttcaccgggccgccgggc

SEQ ID NO: 32445 - DNA, 50 bp, Pseudomonas fulva
  source 1..50: mol_type = genomic DNA
ggtttttttctggttggcaacctgggagagttgtggtactggatccaaca

SEQ ID NO: 32446 - protein, 498 aa, Vibrio parahaemolyticus
MNKTKVYSYIRFSTSRQESGDSVRRQLEIARNYSEKVGGVYQDRSFTDMGISAFKQKERDGLQMMLDMVEDGSIEKGSHIVIERLDRLSRQGISVTQQLITQIVQTGVLLYVAGDNLLLDRNSLNDLSTVIIVAVAADLAYKESLQKSQRIKASKIAKKKDGLDGRVTKKVCPFWLTFDENKQGYVFNEKLPTIQRIIELRQQGLGENKVAQHLNDENIKPPRAAKWNPTTLRKMYTHPALYGAWQTTEKADNGRYVDSDLIENYYPALLTYEEFSLMNPKSKTTTGKDSGLNPFKGLLRCAKCGATMSRQTTKMRSGEIYVAFRCTNAGKGIYCDAVGYRDLDKYLVSGCKRLKITKTADRDTRQQEADLRALESKLEQLQKAILTQTDISALINTSQLVEHQIKELKSKIKPVATVTVEELYSHKDTPQSFNLLARSLLKRVEVEVKAKGRHTKTLFARFYQHNDYVITMTVLPSGESFYSTTELNELYKGTDNFD

SEQ ID NO: 32447 - DNA, 50 bp, Vibrio parahaemolyticus; identical to SEQ ID NO: 14867
  source 1..50: mol_type = genomic DNA

SEQ ID NO: 32448 - DNA, 40 bp, Vibrio parahaemolyticus
  source 1..40: mol_type = genomic DNA
cttagcgccaaattgttgagtgatattcgctgtggagatc

SEQ ID NO: 32449 - DNA, 40 bp, Vibrio parahaemolyticus
  source 1..40: mol_type = genomic DNA
cttagcgccaaattgttgattgatattcgctgtggagatc

SEQ ID NO: 32450 - DNA, 50 bp, Vibrio parahaemolyticus
  source 1..50: mol_type = genomic DNA
agttttacatttatcaattatactttaacattgttttaacatagcatatc

SEQ ID NO: 32451 - protein, 498 aa, Vibrio parahaemolyticus
MNKTKVYSYIRFSTSRQESGDSVRRQLEIARNYSEKVGGVYQDRSFTDMGISAFKQKERDGLQMMLDMVEDGSIEKGSHIVIERLDRLSRQGISVTQQLITQIVQTGVLLYVAGDNLLLDRNSLNDLSTVIIVAVAADLAYKESLQKSQRIKASKIAKKKDGLDGRVTKKVCPFWLTFDENKQGYVFNEKLPTIQRIIELRQQGLGENKVAQHLNDENIKPPRAAKWNPTTLRKMYTHPALYGAWQTTEKADNGRYVDSDLIENYYPALLTYEEFSLMNPKSKTTTGKDSGLNPFKGLLRCAKCGATMSRQTTKMRSGEIYVAFRCTNAGKGIYCDAVGYRDLDKYLVSGCKRLKITKTADRDTRQQEADLRALESKLEQLQKAILTQTDISALINTSQLVERQIKELKSKIKPVATVTVEELYSHKDTPQSFNLLARSLLKRVEVEVKAKGRHTKTLFARFYQHNDYVITMTVLPSGESFYSTTELNELYKGTDNFD

SEQ ID NO: 32452 - DNA, 50 bp, Vibrio parahaemolyticus; identical to SEQ ID NO: 14867
  source 1..50: mol_type = genomic DNA

SEQ ID NO: 32453 - DNA, 40 bp, Vibrio parahaemolyticus; identical to SEQ ID NO: 32448
  source 1..40: mol_type = genomic DNA

SEQ ID NO: 32454 - DNA, 40 bp, Vibrio parahaemolyticus; identical to SEQ ID NO: 32449
  source 1..40: mol_type = genomic DNA

SEQ ID NO: 32455 - DNA, 50 bp, Vibrio parahaemolyticus; identical to SEQ ID NO: 32450
  source 1..50: mol_type = genomic DNA

SEQ ID NO: 32456 - protein, 528 aa, Vibrio splendidus
MTEIKKRYAVTYQRFSSDRQVGNSSIDRQTNSQKDWLKANPDVVVIDSFVDQAMSAWSGKHIEKGSLGKLLQAAEEGIIQPGTLVLVEHFSRLTRQNFKQARNLMDRLWEAGITVVTVRDKAEYPPEAANDMNKQVRLLVEIQQAFSESQWRSEKVKASYSRREKQAREQGIVPRIRKPFWINDDGTLNHLHQAIKDMFHWYRNGMGQQRIVVALREKYPDTAIQKINPSTVMRWIQADITRGFWRGNRIYEAAIDDAIFYEVQSIHKNRLYENVKPDRKWPLSGLMKCGVCGRGMSIQKSKNSAPVVRCSSKQRDRSCNRKTTFPYFIIHIYMSTVVKKYALRKYSTHTSNKELQQQLHKIESDLIKSREYLIELKEFLEQQRQAGKRMFATLSMIEDEYEKIEELEEKENEIKASLETLSKGSISREARELVLSPENYNLEMHKLGFRIVVDEHSLSTEGFDEKVPTLEYLGYSRKTKNYEYRTQGTPWKEEWPASAATEELLMMKGLKEKVQTEPFMKKIWESDN

SEQ ID NO: 32457 - DNA, 50 bp, Vibrio splendidus
  source 1..50: mol_type = genomic DNA
aatatgcacatctcagcttttgatgagctgtaggcataggtgtgcagatt

SEQ ID NO: 32458 - DNA, 40 bp, Vibrio splendidus
  source 1..40: mol_type = genomic DNA
acgcgatcacatgctgtgtgaacttaaggcggcacagagt

SEQ ID NO: 32459 - DNA, 40 bp, Vibrio splendidus
  source 1..40: mol_type = genomic DNA
acgcgatcacatgctgtgtatacttaaggcggcacagagt

SEQ ID NO: 32460 - DNA, 50 bp, Vibrio splendidus
  source 1..50: mol_type = genomic DNA
aagattcacaatccagtttaaggtatgctggaggcaaagggatgaagatt

SEQ ID NO: 32461 - protein, 452 aa, Listeria monocytogenes
MKAAIYIRVSTQEQIENYSIQAQTEKLTALCRSKDWDVYDIFIDGGYSGSNMNRPALNEMLSKLHEIDAVVVYRLDRLSRSQRDTITLIEEYFLKNNVEFVSLSETLDTSSPFGRAMIGILSVFAQLERETIRDRMVMGKIKRVESGLPLTTAKGRTYGYDVVDTKLYINEEEAQHLQLIYDIFEEEKSITFLQKRLKKLGFKVKSYSSYNKWLMNDLYIGYVSYSDKVHAKGIHEPIISEDQFYRVQEIFSRMGKNPNMNKESSSLLNNLIVCEKCGLGYVHRAKDTVSRGKKYHYRYYSCKTYKHTHELEKCGNKIWRADKLEEIIISRVKNYSFATRNSDKEDELDSITEKLKTEHSKKKRLFDLYINGSYEVAELDKMMADIDAQINYYDSQIEANKELKRNKKVQESLAELATVDFDSLEFREKQIYLKSIINKIYIDGEQVTIEWI

SEQ ID NO: 32462 - DNA, 50 bp, Listeria monocytogenes
  source 1..50: mol_type = genomic DNA
tttagtacctcaatttctctctctggacggagacgaatcgagaaactaaa

SEQ ID NO: 32463 - DNA, 40 bp, Listeria monocytogenes; identical to SEQ ID NO: 1298
  source 1..40: mol_type = genomic DNA

SEQ ID NO: 32464 - DNA, 40 bp, Listeria monocytogenes; identical to SEQ ID NO: 20354
  source 1..40: mol_type = genomic DNA

SEQ ID NO: 32465 - DNA, 50 bp, Listeria monocytogenes
  source 1..50: mol_type = genomic DNA
tacagtaactccaattctctctctttacagataagactactgaagctgag

SEQ ID NO: 32466 - protein, 452 aa, Listeria monocytogenes
MKAAIYIRVSTQEQVENYSIQAQTEKLTALCRSKDWDVYDTFIDGGYSGSNMNRPALNEMLSKLHEIDAVVVYRLDRLSRSQKDTITLIEEYFLKNNVEFVSLSETLDTSSPFGRAMIGILSVFAQLERETIRDRMVMGKIKRIEAGLPLTTAKGRTFGYDVIDTKLYINEEEAKQLRLIYDIFEEEQSITFLQKRLKKLGFKVRTYNRYNNWLTNDLYCGYVSYSDKVHAKGIHEPIISEDQFYRVQEIFSRMGKNPNMNKESSSLLNNLIVCEKCGLGYVHRAKDTVSRGKKYHYRYYSCKTYKHTHELEKCGNKIWRADKLEEIIISRVKNYSFATRNLDKEDELDSITEKLKTEHSKKKRLFDLYINGSYEVAELDKMMADIDAQINYYDSQIEANKELKRNKKVQESLAELATVDFDSLEFREKQIYLKSIINKIYIDGEQVTIEWI

SEQ ID NO: 32467 - DNA, 50 bp, Listeria monocytogenes; identical to SEQ ID NO: 32462
  source 1..50: mol_type = genomic DNA

SEQ ID NO: 32468 - DNA, 40 bp, Listeria monocytogenes; identical to SEQ ID NO: 1298
  source 1..40: mol_type = genomic DNA

SEQ ID NO: 32469 - DNA, 40 bp, Listeria monocytogenes; identical to SEQ ID NO: 20354
  source 1..40: mol_type = genomic DNA

SEQ ID NO: 32470 - DNA, 50 bp, Listeria monocytogenes; identical to SEQ ID NO: 32465
  source 1..50: mol_type = genomic DNA

SEQ ID NO: 32471 - protein, 452 aa, Listeria monocytogenes
MKAAIYIRVSTQEQIENYSIQAQTEKLTALCRSKDWDVYDIFIDGGYSGSNMNRPALNEMLSKLHEIDAVVVYRLDRLSRSQRDTITLIEEYFLKNNVEFVSLSETLDTSSPFGRAMIGILSVFAQLERETIRDRMVMGKIKRVESGLPLTTAKGRTYGYDVVDTKLYINEEEAQHLQLIYDIFEEEKSITFLQKRLKKLGFKVKSYSSYNKWLMNDLYIGYVSYSDKVHAKGIHEPIISEDQFYRVQEIFSRMGKNPNMNKESSSLLNNLIVCEKCGLGYVHRAKDTVSRGKKYHYRYYSCKTYKHTHELEKCGNKIWRADKLEEIIISRVKNYSFATRNLDKEDELDSITEKLKTEHSKKKRLFDLYINGSYEVAELDKMMADIDAQINYYDSQIEANKELKRNKKVQESLAELATVDFDSLEFREKQIYLKSIINKIYIDGEQVTIEWI

SEQ ID NO: 32472 - DNA, 50 bp, Listeria monocytogenes; identical to SEQ ID NO: 32462
  source 1..50: mol_type = genomic DNA

SEQ ID NO: 32473 - DNA, 40 bp, Listeria monocytogenes; identical to SEQ ID NO: 1298
  source 1..40: mol_type = genomic DNA

SEQ ID NO: 32474 - DNA, 40 bp, Listeria monocytogenes; identical to SEQ ID NO: 20354
  source 1..40: mol_type = genomic DNA

SEQ ID NO: 32475 - DNA, 50 bp, Listeria monocytogenes; identical to SEQ ID NO: 32465
  source 1..50: mol_type = genomic DNA

SEQ ID NO: 32476 - protein, 452 aa, Listeria monocytogenes; identical to SEQ ID NO: 32471

SEQ ID NO: 32477 - DNA, 50 bp, Listeria monocytogenes; identical to SEQ ID NO: 32462
  source 1..50: mol_type = genomic DNA

SEQ ID NO: 32478 - DNA, 40 bp, Listeria monocytogenes
  source 1..40: mol_type = genomic DNA
tttcgaatcaagctatgagggacgcaaagagggaactaaa

SEQ ID NO: 32479 - DNA, 40 bp, Listeria monocytogenes
  source 1..40: mol_type = genomic DNA
tttcgaatcaagctatgagttacgcaaagagggaactaaa

SEQ ID NO: 32480 - DNA, 50 bp, Listeria monocytogenes; identical to SEQ ID NO: 32465
  source 1..50: mol_type = genomic DNA

SEQ ID NO: 32481 - protein, 452 aa, Listeria monocytogenes; identical to SEQ ID NO: 22451

SEQ ID NO: 32482 - DNA, 50 bp, Listeria monocytogenes; identical to SEQ ID NO: 32462
  source 1..50: mol_type = genomic DNA

SEQ ID NO: 32483 - DNA, 40 bp, Listeria monocytogenes; identical to SEQ ID NO: 1298
  source 1..40: mol_type = genomic DNA

SEQ ID NO: 32484 - DNA, 40 bp, Listeria monocytogenes; identical to SEQ ID NO: 20354
  source 1..40: mol_type = genomic DNA

SEQ ID NO: 32485 - DNA, 50 bp, Listeria monocytogenes; identical to SEQ ID NO: 32465
  source 1..50: mol_type = genomic DNA

SEQ ID NO: 32486 - protein, 452 aa, Listeria monocytogenes
MKAAIYIRVSTQEQIENYSIQAQTEKLTALCRSKDWDVYDTFIDGGYSGSNMNRPALNEMLSKLHEIDAVVVYRLDRLSRSQRDTITLIEEYFLKNNVEFVSLSETLDTSSPFGRAMIGILSVFAQLERETIRDRMVMGKIKRVESGLPLTTAKGRTYGYDVVDTKLYINEEEAQHLQLIYDIFEEEKSITFLQKRLKKLGFKVKSYSSYNKWLMNDLYIGYVSYSDKVHAKGIHEPIISEDQFYRVKEIFSRMGKNPNMNKESSSLLNNLIVCEKCGLGYVHRAKDTVSRGKKYHYRYYSCKTYKHTHELEKCGNKIWRADKLEEIIISRVKNYSFATRNLDKEDELDSITEKLKTEHSKKKRLFDLYINGSYEVAELDKMMADIDAQINYYDSQIEANKELKRNKKVQESLAELATVDFDSLEFREKQIYLKSIINKIYIDGEQVTIEWI

SEQ ID NO: 32487 - DNA, 50 bp, Listeria monocytogenes; identical to SEQ ID NO: 32462
  source 1..50: mol_type = genomic DNA

SEQ ID NO: 32488 - DNA, 40 bp, Listeria monocytogenes; identical to SEQ ID NO: 1298
  source 1..40: mol_type = genomic DNA

SEQ ID NO: 32489 - DNA, 40 bp, Listeria monocytogenes; identical to SEQ ID NO: 20354
  source 1..40: mol_type = genomic DNA

SEQ ID NO: 32490 - DNA, 50 bp, Listeria monocytogenes; identical to SEQ ID NO: 32465
  source 1..50: mol_type = genomic DNA

SEQ ID NO: 32491 - protein, 452 aa, Listeria monocytogenes
MKAAIYIRVSTQEQVENYSIQAQTEKLTALCRSKDWDVYDTFIDGGYSGSNMNRPALNEMLSKLHEIDAVVVYRLDRLSRSQKDTITLIEEYFLKNNVEFVSLSETLDTSSPFGRAMIGILSVFAQLERETIRDRMVMGQIKRVESGLPLTTAKGRTFGYDVVDTKLYVNKEEAQHLQLIYDIFEEEKSITFLQKRLKELGFKVKSYSSYNKWLMNDLYIGYVSYSDKVHVKGVHEAIISEEQFYRVQEIFSRMGKNPNMNKESSSLLNNLIVCEKCGLGYVHRAKDTVSRGKKYHYRYYSCKTYKHTHELEKCGNKIWRADKLEEIIIDRVKNYSFATRNLDKEDELDSITEKLKTEHSKKKRLFDLYINGTYEVAELDKMMADIDAQINYYNSQIEANEELKKDKKIQESLAELATVDFDSLEFREKQIYLKSIINKIYIDGEQVTIEWI

SEQ ID NO: 32492 - DNA, 50 bp, Listeria monocytogenes; identical to SEQ ID NO: 32462
  source 1..50: mol_type = genomic DNA

SEQ ID NO: 32493 - DNA, 40 bp, Listeria monocytogenes; identical to SEQ ID NO: 7828
  source 1..40: mol_type = genomic DNA

SEQ ID NO: 32494 - DNA, 40 bp, Listeria monocytogenes
  source 1..40: mol_type = genomic DNA
tttcggatcaagctatgaattacgcaaagagggaactaaa

SEQ ID NO: 32495 - DNA, 50 bp, Listeria monocytogenes; identical to SEQ ID NO: 32465
  source 1..50: mol_type = genomic DNA

SEQ ID NO: 32496 - protein, 452 aa, Listeria monocytogenes
MKAAIYIRVSTQEQVENYSIQAQTEKLTALCRSKDWDVYDIFIDGGYSGSNMNRPALNEMLSKLHEIDAVVVYRLDRLSRSQRDTITLIEEYFLKNNVEFVSLSETLDTSSPFGRAMIGILSVFAQLERETIRDRMVMGKIKRVESGLPLTTAKGRTFGYDVVDTKLYVNKEEAQHLQLIYDIFEEEKSITFLQKRLKKLGFKVKSYSSYNKWLMNDLYIGYVSYGDKVHVKGVHEPIISEEQFYRVQEVFSRMGKNPNMNKESSSLLNNLIVCEKCGLSFVHRVKDTVSRGKKYHYRYYSCKTYKHTHELEKCGNKTWRADKLEEIIIDRVKNYSFATRNVDKEDELDSINAKLKVEHLKKKRLFDLYINGSYEVAELDKMMADIDAQINYYNSQIEANEELKRNKKVQESLAELATVDFDSLEFREKQIYLKSIINKIYIDGEQVTIEWI

SEQ ID NO: 32497 - DNA, 50 bp, Listeria monocytogenes; identical to SEQ ID NO: 32462
  source 1..50: mol_type = genomic DNA

SEQ ID NO: 32498 - DNA, 40 bp, Listeria monocytogenes; identical to SEQ ID NO: 1298
  source 1..40: mol_type = genomic DNA

SEQ ID NO: 32499 - DNA, 40 bp, Listeria monocytogenes; identical to SEQ ID NO: 20354
  source 1..40: mol_type = genomic DNA

SEQ ID NO: 32500 - DNA, 50 bp, Listeria monocytogenes; identical to SEQ ID NO: 32465
  source 1..50: mol_type = genomic DNA

SEQ ID NO: 32501 - protein, 452 aa, Listeria monocytogenes
MKAAIYIRVSTQEQIENYSIQAQTEKLTALCLSKDWDVYDIFIDGGYSGSNMNRPALNEMLSKLHEIDAVVVYRLDRLSRSQRDTITLIEEYFLKNNVEFVSLSETLDTSSPFGRAMIGILSVFAQLERETIRDRMVMGKIKRVESGLPLTTAKGRTYGYDVVDTKLYINEEEAQHLQLIYDIFEEEKSITFLQKRLKKLGFKVKSYSSYNKWLMNDLYIGYVSYSDKVHAKGIHEPIISEDQFYRVQEIFSRMGKNPNMNKESSSLLNNLIVCEKCGLGYVHRAKDTVSRGKKYHYRYYSCKTYKHTHELEKCGNKIWRADKLEEIIISRVKNYSFATRNLDKEDELDSITEKLKTEHSKKKRLFDLYINGSYEVAELDKMMADIDAQINYYDSQIEANKELKRNKKVQESLAELATVDFDSLEFREKQIYLKSIINKIYIDGEQVTIEWI

SEQ ID NO: 32502 - DNA, 50 bp, Listeria monocytogenes; identical to SEQ ID NO: 32462
  source 1..50: mol_type = genomic DNA

SEQ ID NO: 32503 - DNA, 40 bp, Listeria monocytogenes; identical to SEQ ID NO: 1298
  source 1..40: mol_type = genomic DNA

SEQ ID NO: 32504 - DNA, 40 bp, Listeria monocytogenes; identical to SEQ ID NO: 20354
  source 1..40: mol_type = genomic DNA

SEQ ID NO: 32505 - DNA, 50 bp, Listeria monocytogenes; identical to SEQ ID NO: 32465
  source 1..50: mol_type = genomic DNA

SEQ ID NO: 32506 - protein, 452 aa, Listeria seeligeri; identical to SEQ ID NO: 32471

SEQ ID NO: 32507 - DNA, 50 bp, Listeria seeligeri; identical to SEQ ID NO: 32462
  source 1..50: mol_type = genomic DNA

SEQ ID NO: 32508 - DNA, 40 bp, Listeria seeligeri; identical to SEQ ID NO: 21013
  source 1..40: mol_type = genomic DNA

SEQ ID NO: 32509 - DNA, 40 bp, Listeria seeligeri; identical to SEQ ID NO: 28289
  source 1..40: mol_type = genomic DNA

SEQ ID NO: 32510 - DNA, 50 bp, Listeria seeligeri; identical to SEQ ID NO: 32465
  source 1..50: mol_type = genomic DNA

SEQ ID NO: 32511 - protein, 452 aa, Listeria seeligeri
MKAAIYIRVSTQEQVENYSIQAQTEKLTALCRSKDWDVYDIFIDGGYSGSNMNRPALNEMLSKLHEIDAVVVYRLDRLSRSQRDTITLIEEYFLKNNVEFVSLSETLDTSSPFGRAMIGILSVFAQLERETIRDRMVMGQIKRVESGLPLTTAKGRTFGYDVVDTKLYINEEEAKHLQLIYDIFEEEKSITFLQKRLKELGFIVKSYSSYNKWLMNDLYIGYVSYSDKVHVKGIHEPIISEDQFYRVQEIFSRMGKNPNMNKESSSLLNNLIVCEKCGLGYVHRAKDTVSRGKKYHYRYYSCKTYKHTHELEKCGNKIWRADKLEEIIISRVKNYSFATRNLDKEDELDSITEKLKTEHSKKKRLFDLYINGTYEVAELDKMMADIDAQINYYNSQIEANKELKRNKKVQESLAELAAVDFDSLEFREKQIYLKSIINKIYIDGEQVTIEWI

SEQ ID NO: 32512 - DNA, 50 bp, Listeria seeligeri; identical to SEQ ID NO: 32462
  source 1..50: mol_type = genomic DNA

SEQ ID NO: 32513 - DNA, 40 bp, Listeria seeligeri; identical to SEQ ID NO: 21013
  source 1..40: mol_type = genomic DNA

SEQ ID NO: 32514 - DNA, 40 bp, Listeria seeligeri; identical to SEQ ID NO: 28289
  source 1..40: mol_type = genomic DNA

SEQ ID NO: 32515 - DNA, 50 bp, Listeria seeligeri; identical to SEQ ID NO: 32465
  source 1..50: mol_type = genomic DNA

SEQ ID NO: 32516 - protein, 452 aa, Listeria seeligeri
MKAAIYIRVSTQEQVENYSIQAQTEKLTALCRSKDWDVYDTFIDGGYSGSNMNRPALNEMLSKLHEIDAVVVYRLDRLSRSQRDTITLIEEYFLKNNVEFVSLSETLDTSSPFGRAMIGILSVFAQLERETIRDRMVMGKIKRIEAGLPLTTAKGRTFGYDVIDTKLYINEEEAKQLRLIYDIFEEEQSITFLQKRLKKLGFKVRTYNRYNNWLTNDLYCGYVSYKDKVHVKGIHEPIISEEQFYRVQEIFSRMGKNPNMNKESSSLLNNLIVCEKCGLGYVHRAKDTVSRGKKYHYRYYSCKTYKHTHELEKCGNKIWRADKLEEIIIDRVKNYSFATRNVDKEDELDSINAKLKVEHSKKKRLFDLYINGSYEVAELDKMMADIDAQINYYNSQIEANEELKRDKKVQESLAELAAVDFDSLEFREKQIYLKSIINKIYIDGEQVTIEWI

SEQ ID NO: 32517 - DNA, 50 bp, Listeria seeligeri; identical to SEQ ID NO: 32462
  source 1..50: mol_type = genomic DNA

SEQ ID NO: 32518 - DNA, 40 bp, Listeria seeligeri; identical to SEQ ID NO: 21013
  source 1..40: mol_type = genomic DNA

SEQ ID NO: 32519 - DNA, 40 bp, Listeria seeligeri; identical to SEQ ID NO: 28289
  source 1..40: mol_type = genomic DNA

SEQ ID NO: 32520 - DNA, 50 bp, Listeria seeligeri; identical to SEQ ID NO: 32465
  source 1..50: mol_type = genomic DNA

SEQ ID NO: 32521 - protein, 452 aa, Listeria monocytogenes
MKAAIYIRVSTQEQIENYSIQAQTEKLTALCRSKDWDVYDIFIDGGYSGSNMNRPALNEMLSKLHEIDAVVVYRLDRLSRSQRDTITLIEEYFLKNNVEFVSLSETLDTSSPFGRAMIGILSVFAQLERETIRDRMVMGKIKRIEAGLPLTTAKGRTFGYDVIDTKLYINEEEAKQLQMIYDIFEEEKSITTLQKRLKKLGFKVKSYSSYNNWLTNDLYCGYVSYADKVHTKGVHEPIISEEQFYRVQEIFSRMGKNPNMNRDSASLLNNLVVCGKCGLGYVHRRKDTVSRGKKYHYRYYSCKTYKHTHELEKCGNKIWRADKLEELIIDRVNNYSFASRNVDKEDELDNLNEKLKTEHTKKKRLFDLYISGSYEVSELDAMMADIDAQINYYNSQIEANEELKRDKKVQESLAELAAVDFDSLEFREKQIYLKSIINKIYIDGEQVTIEWI

SEQ ID NO: 32522 - DNA, 50 bp, Listeria monocytogenes; identical to SEQ ID NO: 32462
  source 1..50: mol_type = genomic DNA

SEQ ID NO: 32523 - DNA, 40 bp, Listeria monocytogenes; identical to SEQ ID NO: 1298
  source 1..40: mol_type = genomic DNA

SEQ ID NO: 32524 - DNA, 40 bp, Listeria monocytogenes; identical to SEQ ID NO: 20354
  source 1..40: mol_type = genomic DNA

SEQ ID NO: 32525 - DNA, 50 bp, Listeria monocytogenes; identical to SEQ ID NO: 32465
  source 1..50: mol_type = genomic DNA

SEQ ID NO: 32526 - protein, 452 aa, Listeria monocytogenes
MKAAIYIRVSTQEQVENYSIQAQTEKLTALCRSKDWDVYDIFIDGGYSGSNMNRPALNEMLSKLHEIDAVVVYRLDRLSRSQKDTITLIEEYFLKNNVEFVSLSETLDTSSPFGRAMIGILSVFAQLERETIRDRMVMGQIKRVESGLPLTTAKGRTFGYDVVDTKLYINEEEAKHLQLIYDIFEEEKSITFLQKRLKELGFIVKSYSSYNKWLMNDLYIGYVSYSDKVHVKGIHEPIISEDQFYRVQEIFSRMGKNPNMNKESSSLLNNLIVCEKCGLGYVHRAKDTVSRGKKYHYRYYSCKTYKHTHELEKCGNKIWRADKLEEIIISRVKNYSFATRNLDKEDELDSITEKLKTEHSKKKRLFDLYINGTYEVAELDKMMADIDAQINYYNSQIEANKELKRNKKVQESLAELATVDFDSLEFREKQIYLKSIINKIYIDGEQVTIEWI

SEQ ID NO: 32527 - DNA, 50 bp, Listeria monocytogenes; identical to SEQ ID NO: 32462
  source 1..50: mol_type = genomic DNA

SEQ ID NO: 32528 - DNA, 40 bp, Listeria monocytogenes; identical to SEQ ID NO: 1298
  source 1..40: mol_type = genomic DNA

SEQ ID NO: 32529 - DNA, 40 bp, Listeria monocytogenes; identical to SEQ ID NO: 20354
  source 1..40: mol_type = genomic DNA

SEQ ID NO: 32530 - DNA, 50 bp, Listeria monocytogenes; identical to SEQ ID NO: 32465
  source 1..50: mol_type = genomic DNA

SEQ ID NO: 32531 - protein, 452 aa, Listeria monocytogenes
MKAAIYIRVSTQEQIENYSIQAQTEKLTALCRSKDWDVYDTFIDGGYSGSNMNRPALNEMLSKLHEIDAVVVYRLDRLSRSQKDTITLIEEYFLKNNVEFVSLSETLDTSSPFGRAMIGILSVFAQLERETIRDRMVMGKIKRIEAGLPLTTAKGRTFGYDVIDTKLYINEEEAKQLRLIYDIFEEEQSITFLQKRLKKLGFKVRTYNRYNNWLTNDLYCGYVSYSDKVHAKGIHEPIISEDQFYRVQEIFSRMGKNPNMNKESSSLLNNLIVCEKCGLGYVHRAKDTVSRGKKYHYRYYSCKTYKHTHELEKCGNKIWRADKLEEIIISRVKNYSFATRNLDKEDELDSITEKLKTEHSKKKRLFDLYINGSYEVAELDKMMADIDAQINYYDSQIEANKELKRNKKVQESLAELATVDFDSLEFREKQIYLKSIINKIYIDGEQVTIEWI

SEQ ID NO: 32532 - DNA, 50 bp, Listeria monocytogenes; identical to SEQ ID NO: 32462
  source 1..50: mol_type = genomic DNA

SEQ ID NO: 32533 - DNA, 40 bp, Listeria monocytogenes; identical to SEQ ID NO: 1298
  source 1..40: mol_type = genomic DNA

SEQ ID NO: 32534 - DNA, 40 bp, Listeria monocytogenes; identical to SEQ ID NO: 20354
  source 1..40: mol_type = genomic DNA

SEQ ID NO: 32535 - DNA, 50 bp, Listeria monocytogenes; identical to SEQ ID NO: 32465
  source 1..50: mol_type = genomic DNA

SEQ ID NO: 32536 - protein, 452 aa, Listeria monocytogenes
MKAAIYIRVSTQEQIENYSIQAQTEKLTALCRSKDWDVYDTFIDGGYSGSNMNRPALNEMLSKLHEIDAVVVYRLDRLSRSQRDTITLIEEYFLKNNVEFVSLSETLDTSSPFGRAMIGILSVFAQLERETIRDRMVMGQIKRVESGLPLTTAKGRTFGYDVVDTKLYINEEEAKHLQLIYDIFEEEKSITFLQKRLKELGFIVKSYSSYNKWLMNDLYIGYVSYSDKVHVKGIHEPIISEDQFYRVQEIFSRMGKNPNMNKESSSLLNNLIVCEKCGLGYVHRAKDTVSRGKKYHYRYYSCKTYKHTHELEKCGNKIWRADKLEEIIISRVKNYSFATRNLDKEDELDSITEKLKTEHSKKKRLFDLYINGTYEVAELDKMMADIDAQINYYNSQIEANKELKRNKKVQESLAELATVDFDSLEFREKQIYLKSIINKIYIDGEQVTIEWI

SEQ ID NO: 32537 - DNA, 50 bp, Listeria monocytogenes; identical to SEQ ID NO: 32462
  source 1..50: mol_type = genomic DNA

SEQ ID NO: 32538 - DNA, 40 bp, Listeria monocytogenes; identical to SEQ ID NO: 1298
  source 1..40: mol_type = genomic DNA

SEQ ID NO: 32539 - DNA, 40 bp, Listeria monocytogenes; identical to SEQ ID NO: 20354
  source 1..40: mol_type = genomic DNA

SEQ ID NO: 32540 - DNA, 50 bp, Listeria monocytogenes; identical to SEQ ID NO: 32465
  source 1..50: mol_type = genomic DNA

SEQ ID NO: 32541 - protein, 452 aa, Listeria monocytogenes
MKAAIYIRVSTQEQIENYSIQAQTEKLTALCRSKDWDVYDIFIDGGYSGSNMNRPALNEMLSKLHEIDAVVVYRLDRLSRSQKDTITLIEEYFLKNNVEFVSLSETLDTSSPFGRAMIGILSVFAQLERETIRDRMVMGQIKRVESGLPLTTAKGRTFGYDVVDTKLYINEEEAKHLQLIYDIFEEEKSITFLQKRLKELGFKVKSYSSYNKWLMNDLYIGYVSYSDKVHVKGIHEPIISEDQFYRVQEIFSRMGKNPNMNKESSSLLNNLIVCEKCGLGYVHRAKDTVSRGKKYHYRYYSCKTYKHTHELEKCGNKIWRADKLEEIIISRVKNYSFATRNLDKEDELDSITEKLKTEHSKKKRLFDLYINGTYEVAELDKMMADIDAQINYYNSQIEANKELKRNKKVQESLAELATVDFDSLEFREKQIYLKSIINKIYIDGEQVTIEWI

SEQ ID NO: 32542 - DNA, 50 bp, Listeria monocytogenes; identical to SEQ ID NO: 32462
  source 1..50: mol_type = genomic DNA

SEQ ID NO: 32543 - DNA, 40 bp, Listeria monocytogenes; identical to SEQ ID NO: 1298
  source 1..40: mol_type = genomic DNA

SEQ ID NO: 32544 - DNA, 40 bp, Listeria monocytogenes; identical to SEQ ID NO: 20354
  source 1..40: mol_type = genomic DNA

SEQ ID NO: 32545 - DNA, 50 bp, Listeria monocytogenes; identical to SEQ ID NO: 32465
  source 1..50: mol_type = genomic DNA

SEQ ID NO: 32546 - protein, 466 aa, Staphylococcus cohnii
MIKKVAIYTRVSTLEQANEGYSIEGQEQRLKAYCKVHDWDNFEFFVDAGQSASNTDRAGLQNLLNRLDEFDLVLVYKLDRLTRSVRDLMSLLDTFEEKDVKFRSATEVFDTTSAIGKLFITLVGAMAEWERSTITERTTQGRRVATEKGIYTTTPPFFYDKIEGKLYPNDKKEIVDYIVSRAKAGVSIRGITEELNNSIYNPPKGKRWDKSMISYVLMSPVSRGHTHIGDVFVENTHEPVISEDDYNIYMQSISQRTHSRGIKHTAIFRGKLTCPNCGHSLTLNTSKRTNKNGSVDYDERYVCDRCRSDKSAENITIQSKEVERAFIDFIQHGEIEVDVEDTEEQEEQSVIDVDKIKRQRKKYQQAWAMDLMSDDEFQALIKETDDLLDQHNRQQLRKKENKNNHEQIEATHDLILNVWDKMASKDKEDLINASISNIQYNFYRGHGYGKNRTPNSMSVTHIDYKV

SEQ ID NO: 32547 - DNA, 50 bp, Staphylococcus cohnii
  source 1..50: mol_type = genomic DNA
gatggggtttgtgggtagatcctcccgaataacacaccaaaacccccaca

SEQ ID NO: 32548 - DNA, 40 bp, Staphylococcus cohnii
  source 1..40: mol_type = genomic DNA
agcagtaggtgtccaatttccgaaagtaccgccccccatg

SEQ ID NO: 32549 - DNA, 40 bp, Staphylococcus cohnii
  source 1..40: mol_type = genomic DNA
agcagtaggtgtccaatttcagaaagtaccgccccccatg

SEQ ID NO: 32550 - DNA, 50 bp, Staphylococcus cohnii
  source 1..50: mol_type = genomic DNA
gattggatcttctcctagagcctccagaaacacacacacacacacacaca

SEQ ID NO: 32551 - protein, 494 aa, Peribacillus simplex
MLFNNENIKHVAVYLRLSRDEENLGIEQILANHRQTLIDLCNENKWSYEIFEEVASSSTIKEREQMVKLLDRIEQGYYDAVVVMDIDRLSRNEYDASLIKKILFQTETYIVTTYRMYDLTRDDDSLLLGITNLIAAGEYKQILKRMRRGKEYAQKQGHWTNGIAPLGYTKDSTTKKLVPNEREKDIQLIFSEIVKGTTIPTLINLLNSIGVKTREGNSFHYNSIQRIINNEAYKGTIISNRTTGKHANTIRPKEEWIIVHNAHPSIVDENTWNAANKIVNEYSFKAPRSKNRIYPTSNLFYCSNCGRSQGCNYKPHIDKIYIKHCKCGNRGFYYNPVLEKIKEEVLGYKESILEAFESLKEDKQVDNTQNKKDQLTARLNKSKKALKNINILFEEDDIDIVEYRERKAERQEEVKLIEEEILALEKEDKSVKIETLKEQIKAFDNLVGKWHLLDGEGYSDEKVNRLLHGLISGVLWSFKKGDESPDLRIIYNEG

SEQ ID NO: 32552 - DNA, 50 bp, Peribacillus simplex
  source 1..50: mol_type = genomic DNA
aagttctacccaaaaacaggacaaacttgttgagtacgtgggtagtacat

SEQ ID NO: 32553 - DNA, 40 bp, Peribacillus simplex
  source 1..40: mol_type = genomic DNA
gcttatatttaccggtccgaccggcagtggaaaaaccacg

SEQ ID NO: 32554 - DNA, 40 bp, Peribacillus simplex
  source 1..40: mol_type = genomic DNA
gcttatatttaccggtccgtacggcagtggaaaaaccacg

SEQ ID NO: 32555 - DNA, 50 bp, Peribacillus simplex
  source 1..50: mol_type = genomic DNA
aagttctacattataatatgatcatattgttgattagactgttagcatag

SEQ ID NO: 32556 - protein, 520 aa, Hafnia alvei
MKKAVYCYARVSSRGQAKDGYGMSRQQAMLRDYVAAYDDSQHNRGYDLGDISWLYAEGVSAYSGKNIEDGSVLKTFIDDVLQKKITNSVLVIENLDRFSRAAPNRAAGLFLSLINAGCDIHEVETEMIHHQYSDLNIISGGLQRAHNESKRKARLSIKNWDERIKNTIDGTSILTHRVPSWIEVKNNKYVIKKGESEKYNLIFKMYADGFGPAAIRDELKMRGMQINEREPTINHLMKIIKDQRLIGKFNSTGRKILDGMLIYPVIVEPELFESVNDLRKQRNPLGKINVKANNLFAGLCICMNCGRYVQVNSVDKKGDTYFRCGGSLVKIDKCKERGFKYKIVENALLEHLRNFDFSMLRCEDNEIQVKINYLSMELVANEKYSNEILADLEKEDIPDPNDRRILKNIQRRISEIRTEITTLKQSNIGYETFNDLKDSYTDDLLDPKNTKLRLDFNVKVKRVVKNIKMKRYDNTIMLVVSYVGVNEKQAMVINSKTGEVVFMAVQNDDLKSVEYLINND

SEQ ID NO: 32557 - DNA, 50 bp, Hafnia alvei
  source 1..50: mol_type = genomic DNA
aacagtaatttgcttccaatcatcaccatgatatactgctttttactgtt

SEQ ID NO: 32558 - DNA, 40 bp, Hafnia alvei; identical to SEQ ID NO: 1113
  source 1..40: mol_type = genomic DNA

SEQ ID NO: 32559 - DNA, 40 bp, Hafnia alvei
  source 1..40: mol_type = genomic DNA
ggcaataatggcaataacaagcattaattcgattagcgta

SEQ ID NO: 32560 - DNA, 50 bp, Hafnia alvei
  source 1..50: mol_type = genomic DNA
gaaattaattttctaccagtcatcagcaaaatatacaacactttaatatt

SEQ ID NO: 32561 - protein, 525 aa, Bifidobacterium bifidum
MARKKRFAPNDNNLAIAYYRFSSHSQNDASIDQQRELAHEWADAHGFKIVQEYEDAAISGTTDARPGFQQMLSEVAKIRPHTLIMWKTDRLGRDKYVLAMAKKKIRDAGCEIHLLAEHIPTEGPEGVLIEGLMEAMAEYYSRQLSQNIQRGMDYNAQHALYNGHKLFGYDVDRSTKKYIPDPNTAPFVQWAFKEYASGRPLKTIAEEMNAQGLRTPRNAKFSVNMLNKMLKNRAYIGEYHHGDITVAGGMPVLVDEATFDRAQRRFAENKRKGSQRAHGMDDADAPRYWLTGKLYCGECGNTMQGVSGTSKTGRTYYYYYCSAQRRKECHLHKARKRDLEDMVLFALHNIVDDEENVTALALDAAEYYEKNHDDTAYLEALEAKRREVEKSLANLVKVIEKGVVSDTVTQRLAQLEEQKSALNDAIGTENVRVSLYEDRHSIQAYFDKFLHADVNDPEIRDQVFEYFVDKVYLYDDKLVVSMWFSEDDRQEITWRDWFSLDEYWTDESPFVKGEAVEFDCFPFSS

SEQ ID NO: 32562 - DNA, 50 bp, Bifidobacterium bifidum
  source 1..50: mol_type = genomic DNA
agttcgactgcttcccctttagctccaccagaagaggaagcgtcgaactc

SEQ ID NO: 32563 - DNA, 40 bp, Bifidobacterium bifidum
  source 1..40: mol_type = genomic DNA
ggttcgaatccccttagctccacagaacagaacgtccctc

SEQ ID NO: 32564 - DNA, 40 bp, Bifidobacterium bifidum
  source 1..40: mol_type = genomic DNA
ggttcgaatccccttagctgaacagaacagaacgtccctc

SEQ ID NO: 32565 - DNA, 50 bp, Bifidobacterium bifidum
  source 1..50: mol_type = genomic DNA
tgttccacctcttcccctttagctgaacctgtagaggtcatgtagaggtg

SEQ ID NO: 32566 - protein, 522 aa, Vibrio parahaemolyticus
MRFSRPEQAKGTSIERQSNFAEQYALEHGLELDKSLTMMDKGLSAFHGVHKTKGAFGQFLAAVTAGKVPSGSVLVVESLDRLSREDPLIAQAALTDLILSGITVVTAADNQVYSREEIQQNPFKLIMSLVVMIRANEESETKQRRSNAFLKSALNQYQANGKVQRLGSDPSWLDFNKDNDTYSFNERVEVIRRILNLYNQGIGSLKIARQLTEESIPTLSGKRSAWGQTTVANIVKSHALYGMKRINVQGVEYDLEDFYPALITKSKWLALQQHRTKRSKSMHGRGEVVHLITGHGKGFTTCGYCGGGLGAQTQKQYKRSGVYSKTVTRLHCLTHKETSSCCSSVFLEPIENAVLFAACIGVEPQSLVPTVNNVNYSALIDEVDNKVKHIVEQVTAGAPWDLFKDAHNRLKSEKQKLIEERDSQKPDVNQSDVQKWVNKLVELADKARANDKEARLKCRTLISSICKSIVIKLRGHDLKSEPVVTITFVTDEQFEFKVGKSGAVQFVDNGMAVNRRLKPLLA

SEQ ID NO: 32567 - DNA, 50 bp, Vibrio parahaemolyticus
  source 1..50: mol_type = genomic DNA
tagttatgcactgtacattttctctctgtctaatgtatagtgataacttg

SEQ ID NO: 32568 - DNA, 40 bp, Vibrio parahaemolyticus; identical to SEQ ID NO: 7098
  source 1..40: mol_type = genomic DNA

SEQ ID NO: 32569 - DNA, 40 bp, Vibrio parahaemolyticus
  source 1..40: mol_type = genomic DNA
gaaataaccaaaagagccgaaagtccaatggatgtcttgc

SEQ ID NO: 32570 - DNA, 50 bp, Vibrio parahaemolyticus
  source 1..50: mol_type = genomic DNA
cagttattcacttaacattttttgaatctctatagttgtgccagaacttg

SEQ ID NO: 32571 - protein, 488 aa, Propionimicrobium lymphophilum; identical to SEQ ID NO: 18601

SEQ ID NO: 32572 - DNA, 50 bp, Propionimicrobium lymphophilum
  source 1..50: mol_type = genomic DNA
agagttcgacagttcccactcaggttacttagacgttcatattgatacaa

SEQ ID NO: 32573 - DNA, 40 bp, Propionimicrobium lymphophilum
  source 1..40: mol_type = genomic DNA
tcgacacgcatgtcgtgagtggaggtggcgagaattgaac

SEQ ID NO: 32574 - DNA, 40 bp, Propionimicrobium lymphophilum
  source 1..40: mol_type = genomic DNA
tcgacacgcatgtcgtgagaagaggtggcgagaattgaac

SEQ ID NO: 32575 - DNA, 50 bp, Propionimicrobium lymphophilum
  source 1..50: mol_type = genomic DNA
agaggttgaaacaaccacctccagaaacttagatgcaattattgatagaa

SEQ ID NO: 32576 - protein, 478 aa, Corynebacterium sphenisci
MVELVALRKTNEVAAYVRASMDRKGDRWTVDTQLRKIRALAEAKDWNVVEVYEDNAVSATKKRRAGTRWAEMLDDARAGRFSMVVAVDMDRLLRSTKDLNTLIDLGLRVVTVDGEIDLSTADGEFRATMLAALARFEARRKAERQIRSNARRRFEGIPTSAWKAFGWTREGELIPEEADAVRRAFAAFLGEPSLSIRRIREDLNGAGHLTARGSEFSVDAVRYLLANPLYAGYIKHYASGELYPVQGDAFPPIVGEQTWRAAVAKLEDNVRRSARQGNQPKYLLSTIGLCGKCGATLVSGTNSRKQPTYRCGEQFHLTRQREPVDAMVTEAVLTRLSSVDVHNLVMPQEDDGPDHEELLTERNALVERVKELSPLLRDIHQPVLEITAAINDVKARIDEIDAELLDRSVSVAAKLLADVDEPVGTAERREVVEAKWKTLDVDRRRMLVDELVTVTIEPIAPGHVKFDPDLIRIEPRRD

SEQ ID NO: 32577 - DNA, 50 bp, Corynebacterium sphenisci
  source 1..50: mol_type = genomic DNA
gagagccataacacgaacatgcgctagagcatgtcgcggttgtgacactc

SEQ ID NO: 32578 - DNA, 40 bp, Corynebacterium sphenisci
  source 1..40: mol_type = genomic DNA
cggcgtgatcgacatgcggtacgaaaacccgctgtacctc

SEQ ID NO: 32579 - DNA, 40 bp, Corynebacterium sphenisci
  source 1..40: mol_type = genomic DNA
cggcgtgatcgacatgcggtccgaaaacccgctgtacctc

SEQ ID NO: 32580 - DNA, 50 bp, Corynebacterium sphenisci
  source 1..50: mol_type = genomic DNA
gtgagccatgatcacaccatgcactcaagcctggggatagggtgacaccc

SEQ ID NO: 32581 - protein, 643 aa, Ruminococcus torques
MNAGYVRLSRDDDKRNYVSIENQKLIINQYAADHGVVIDRWYEDDGLSGYIFDRPGFQQMMADLDKDIDAVYVKDFSRLGRHNAKVLLLLDEFQERGKHLIVIDDNYDSMDSSDDTIGIKTWFNERYVKDTSKKIKRAIGARQKEGTLITRPPFGYRRNEKDKTVLEIVPKEAEYIKQIYDLYLSGSGYRKIATYLTEQGAPTPSMIQREREIEEGRLSKRQVASKWSDAMIKEILDNDFYIGTFRLKKRARNTVHGKDKRVPKEEQCIFENHHPAIIDKATFALVQELKRKRNRTNYRGSRGQWLGSEIPNPFGSCLFCKDCGSRLTPIKRKTSSKERKYYICTTYNTKGRRYCSKAHLIEEDDLMEDVLTYIKMCRNALCEVISTYDLKDFEAEKKTIEEKRQELHIAINERKSQLKVLLTQKVKDLAVAAGNEDLINETYDSMQKDLFAQIHGLEMQIKELNETAIETPDVKDKLKNALEVVDKIIAGGSLDRRDIELLIEKIVVDEGGMPEITLKYGLSNLIRYSPADEMNRRENTIIAVVMKLIAEDERGFTSAKYLSEHITDLGFKKTKQSILPYIELMKGLGILESTDNPLKPYNIVKSKETIEQLARDYLPYISAEITAKQLSDDYLHSNGDDRW

SEQ ID NO: 32582 - DNA, 50 bp, Ruminococcus torques
  source 1..50: mol_type = genomic DNA
atttacatagtaatggtgatgacaggtggcgtacatatatcaatgtaaat

SEQ ID NO: 32583 - DNA, 40 bp, Ruminococcus torques
  source 1..40: mol_type = genomic DNA
tgttcttggtggtagaaaaggtggtatgccggaaatggta

SEQ ID NO: 32584 - DNA, 40 bp, Ruminococcus torques
  source 1..40: mol_type = genomic DNA
tgttcttggtggtagaaaatctggtatgccggaaatggta

SEQ ID NO: 32585 - DNA, 50 bp, Ruminococcus torques
  source 1..50: mol_type = genomic DNA
attgaaagaaggacggtgatgtcatctggctttccacctacaatgaaaat

SEQ ID NO: 32586 - protein, 497 aa, Acidaminococcus intestini
MQKNTTVETTTKAVIYARYSSDRQREESIEGQLRVCEDFAKRNGMTILHVYADRALSGRSDQRPEFQMMIQAAATQAFDTVLVYKLNRFARNRYDSAKYKHKLKKYGVKVVSAMENIADDPSGILLESVIEGMAEYYSAELAENVMRGMTENALECKWPGGTVPLGYKLDVAHHLIIDDPAAKTVRWIYQMALEGRQPASIIRELNAAGCRTAFGRPFGRTSLNTILKNERYIGTFLWNGIKKPNAIPAIVNPEEWQKVQEITKAKKKCIAKSRGENYLLTGRLFCGQCGGSMVGTAGTSKMQRVYHYYDCGNHLKRKGCTTKAIRADKLEDLICDTTTQLLSNQDAIKAIAKQAISAQKEQGPSLVLQSLQNQKADISRKLQNCIKAIEEGLISQTVTNHIQDYEKQLQTLNDDIRREELMSRIPQLTEKHIEFFFWSISQQIKKADKYKSILLSSLVRSVIIYEDFIEIQYNYKKKLPILQNPVKIKSSYLNNVV

SEQ ID NO: 32587 - DNA, 50 bp, Acidaminococcus intestini
  source 1..50: mol_type = genomic DNA
gataaagagttcttatttgaacaatgtggtgaacttacccataccacata

SEQ ID NO: 32588 - DNA, 40 bp, Acidaminococcus intestini
  source 1..40: mol_type = genomic DNA
atagggagcttacagttgaagtggtgatccacccgggatt

SEQ ID NO: 32589 - DNA, 40 bp, Acidaminococcus intestini
  source 1..40: mol_type = genomic DNA
atagggagcttacagttgatatggtgatccacccgggatt

SEQ ID NO: 32590 - DNA, 50 bp, Acidaminococcus intestini
  source 1..50: mol_type = genomic DNA
gatcaagatttactagttgaacaatatagttctcttaagcttatcatata

SEQ ID NO: 32591 - protein, 585 aa, Brucella anthropi
MDKENTKPLAYSYVRMSTDMQLKGNSLERQKEKSKEYAIRHDLQLVENFEDIGVSAFKGKNIKEGMLGEFISLIENKTVPAGSYLLVESLDRLSRENIIESIPLFIRILKSGIKIVTLIDEQVYGAENADFKDLLYPMVVLSRAHEESVAKSFRVGKAWANKRKNIHQRKLTKVCPAWLKLNTDTNSFEVIPGRDDIVKRIFELADSGYGSYSIGRILNNEAVPPFSEESKGWHASYISRILNNRSVLGEFQPHKLVNGTAKPDGVTVSDYFPQLIDEEKFLRIKHARRKRQVEGAGRKGPVYRNLFSRIAKCAYCASPMRFVDKGPPPKGGQFLRCTNADRHFGCSASHWRYDHFENVFLYFVHELDLIETLKRADEQSERYSLEQKLVSINENIRGKRELLNTAFDMLQESSASKDFIQSKIEEISSEILELENQKGAVEGKIKKDTALAPIDDQQIKSLIKELQDADDGDLERKRRVVANRLQMMIQSLTLAPDGLRKDAEKLVLSQFGPSEALFDFFETGAQSDEVSAGMSFSVVLLDGIMRRVTVSRKEPLKGVQVIAVDKHGLIIETDQTHDSRGEWKI

SEQ ID NO: 32592 - DNA, 50 bp, Brucella anthropi
  source 1..50: mol_type = genomic DNA
cttaaattaattagcccatatatcgagatgttgtggctaattaatttatc

SEQ ID NO: 32593 - DNA, 40 bp, Brucella anthropi; identical to SEQ ID NO: 29293
  source 1..40: mol_type = genomic DNA

SEQ ID NO: 32594 - DNA, 40 bp, Brucella anthropi
  source 1..40: mol_type = genomic DNA
gtccggcaagccgacaatgctcatgcccatcttgcccggc

SEQ ID NO: 32595 - DNA, 50 bp, Brucella anthropi
  source 1..50: mol_type = genomic DNA
cttaaattatctatgccttaaatccttctgttgtgttatcttaccatatc

SEQ ID NO: 32596 - protein, 569 aa, Pseudomonas putida
MENQRKAVETYNLHVVDVFEDLGKSAFRGKHRLKGALSLFLASLDEGKIPTGAYLLIESFDRLSRERMTDGLTVVLTILRKGIKIITTDDLKLYDLSIKGKDLEQTIMITVLLERANNESTTKSDRQKAKWDGRRERIIKGEKKFLNKNVPWWISLNESTGEYSLIPDRVAELKTIYELLMVKNLGLRAAAAHINENNPIKVVFGKNPKSSGWTARGIKRMIDTPSLYGSLELCEYIYDNGKSVPDRKTVQVMDNFYPAAFSKHEVDLLKAKIASRMTSNEKPTRRDLQYYNIYHGLIKCAFCGGNVRFSQKQKYSYLVCRNSEIKLCKYPKTLSMQYERFHEVFFKYAEHYNFELLIQSGGNDNDVVVKEINELEETIVSEKHKAQKFTEKLLDMFDGDIPEEQEAALLTRTKKIKALEAKVKALRAKIVYVDTDADTISDAVQYAEKLVETKDGRLELSNYLTKLIDKMVVDFGKAHGRESDYVKVLFRNKDFSHHFLFSKSDAYSYDSDGELFLDTLSGVSRDEGYYLEANEIPVWEGVEIPDFTDEEIAAAEIQNSLNPPLLQEG

SEQ ID NO: 32597 - DNA, 50 bp, Pseudomonas putida
  source 1..50: mol_type = genomic DNA
tttcctattgcgtgctcgctttcttcctatgtgggtgctatgatagagaa

SEQ ID NO: 32598 - DNA, 40 bp, Pseudomonas putida
  source 1..40: mol_type = genomic DNA
cggtgtaggaccaacgtcttcgtacagcgggtcgccttct

SEQ ID NO: 32599 - DNA, 40 bp, Pseudomonas putida; identical to SEQ ID NO: 32598
  source 1..40: mol_type = genomic DNA

SEQ ID NO: 32600 - DNA, 50 bp, Pseudomonas putida
  source 1..50: mol_type = genomic DNA
tttcctattttaacctctctgttttcctaactggatgctgacttacagaa

SEQ ID NO: 32601 - protein, 514 aa, Micrococcus luteus
MFTARLRLMVPRAVIYARISVTSEESVSIERQLEAARQYAAARGWEVAAVFTDEGISATHNSPEARSGWSALLRYDQPFDFVVVWKIDRVARRITDFWDAVKTLQGRDRALVSIGDNLDMSSTVGQIVAGVLAGFAQMEAEAISSRVAAARRHLLQNGRLPGGAVPYGWRSVPNPDGAGKVLAQDPERIEYVREAADRVRGGATLYSVVQWLDEVEAPLPRASQSRRREGSGWSYTTVERLLRNPVLAGMVSFNPGNSSKMRGSEVLRDENGLPVVDPAVAIMSPSDWRAMVAALDANDTGRAKPHALRAKTSALLSGLVWCGHCEDSEGHPVRMHRGTTQGRESYSCPRCHQTISRIQDYVVEQFLWAKGEHVRWTPVREVYESGAALLPEIEARLDELDVAIRDAPDRASRRRLQEQQDALLDLRDEKRAEAPRTELRYEDAGFFAEAWAEAGGVEAQRAVLDDALERITVVRGRTGRGLDKSRLTFSWVRPAEVGPLPEPTQEELASWAEG

SEQ ID NO: 32602 - DNA, 50 bp, Micrococcus luteus
  source 1..50: mol_type = genomic DNA
cacgcttgttcctcaccgggcggggtggcaccaggcggggaacaagtatg

SEQ ID NO: 32603 - DNA, 40 bp, Micrococcus luteus; identical to SEQ ID NO: 28358
  source 1..40: mol_type = genomic DNA

SEQ ID NO: 32604 - DNA, 40 bp, Micrococcus luteus
  source 1..40: mol_type = genomic DNA
ggtggtcttgcccgcctggcgggccccgctgacgaggatg

SEQ ID NO: 32605 - DNA, 50 bp, Micrococcus luteus
  source 1..50: mol_type = genomic DNA
cacagttctgcatggccgggcgggcgggcctcaggaaacttacaatgatg

SEQ ID NO: 32606 - protein, 521 aa, Vallitalea guaymasensis
MIRRAVAYCRVSSDHEDQLNSLENQKQMWEEYINKHEGLEFCGLYVDEGISGTSTKKREAFNRMVNDASTGKFDLILTKEVSRFARNTVDTLQFTRKLKEYGVDVYFKIDNINTGDNDGELRLSLMATLAQEESRKISERVKSGHKQAMKNGIVFGANRIFGYDLIDKQLFINKTEADIVRKIFNWYLLEDESLHGIVRRLAAIGITKGKLGGKINHSSIRRILENEKYAGDLKQQKYYTVNYLTHKKKKNKGDKGYIINIDNHPAVIDRDIWNKVQMKLNDNMRKYKEQGIGYSKALFSGKIICGSCGGKYRKRTMKNKDGTYRVIYKCNVNYSKGKKGCENGSYIREDVLINIFIDLLTRISEVKDKKIFIKNMMIALEEGLVNNSIKRLENIEKQITKIQDKKDKLLDLYMDGILGKEGYIKKNTELQEAESRFNAELQIAENRKYHLSSKKQRLDNLYNMVCKELDYSELQSNDDIKELVNIFIDKIVIKENIINFYLVDGNYEIDIKEYPKRVNTG

SEQ ID NO: 32607 - DNA, 50 bp, Vallitalea guaymasensis
  source 1..50: mol_type = genomic DNA
aatatcctaaaagggtgaacacaggagaacgtatacccattagggatatt

SEQ ID NO: 32608 - DNA, 40 bp, Vallitalea guaymasensis
  source 1..40: mol_type = genomic DNA
aaatccgggagcagtagatgagattatccatctaggagat

SEQ ID NO: 32609 - DNA, 40 bp, Vallitalea guaymasensis
  source 1..40: mol_type = genomic DNA
aaatccgggagcagtagatacgattatccatctaggagat

SEQ ID NO: 32610 - DNA, 50 bp, Vallitalea guaymasensis; identical to SEQ ID NO: 8015
  source 1..50: mol_type = genomic DNA

SEQ ID NO: 32611 - protein, 498 aa, Aeromonas dhakensis
MTPIKMTTASKPQAILYSRFSSSQQADGDSIRRQEEAAYKFCEREGLELIESQFKDLGFSGWKRHVKREGLESLLMAVENGTIPSGTWLLVEATDRLSRQGWDHVVQLVKSLVSTGCTFVTLDNNQIYNSSNIQDLMSALPLMISADLAFKESQKKSERLRAVKTNKRSNRVIQGNQPFWIDVVDGKPVLNDKAPLARRIVDMALEGIRPLAIVRQFNTEGIKSPKGKDWEVAVIRRILKNTILYGAKTYFEARDGEYKDVETVAGLYPKICTLAEFEQITIKKKKDDTSYNTAGPFSNLLKCQCGKPLVAKQRRGDDYYKVCSGMQNKTCNYRGYYKNIDFYLTKWLGTLSMEEIAHKSNVIDNSPRITELEQLLIDLEAMRVENKGKTRILQRIYEDIEEAESELEQLQAQKSLSEGDTKTTLRDALSFSDNPTKQNMIFRRYINTIVCRKETKDIIVGEVHFKSGASYEVWIHHDSKLKNTSESISYKYNLKTNR

SEQ ID NO: 32612 - DNA, 50 bp, Aeromonas dhakensis
  source 1..50: mol_type = genomic DNA
gttgtaggaaaaagaactagcatcacgatgttagttattttagtatacag

SEQ ID NO: 32613 - DNA, 40 bp, Aeromonas dhakensis
  source 1..40: mol_type = genomic DNA
gagcggcgccatcagcatcaccttgttgatcatccagacg

SEQ ID NO: 32614 - DNA, 40 bp, Aeromonas dhakensis
  source 1..40: mol_type = genomic DNA
gagcggcgccatcagcatcgtcttgttgatcatccagacg

SEQ ID NO: 32615 - DNA, 50 bp, Aeromonas dhakensis
  source 1..50: mol_type = genomic DNA
cttggagccagtggaacttgcttcgtgatcttagcttagttagaatacag

SEQ ID NO: 32616 - protein, 572 aa, Mycobacterium avium
MRALIVVRLSRVTDATTSPKRQLQACRELCAKRGWEVVGVAEDLDVSAASTSPFDRPQLGDWLTNRFGEFDVLVVYRMDRLVRRLLDLADVIRWGQDHSVSLVSATESFLDLTAPFGDIVALLVAKVAEMELAAISERNASAARYNIRAGKYRGGIPPWGYLPEQTEGGWRLVQDPDQVAVIREVVERVLAGEPLRSVAHDLTDRKILTPKDRFAQARGRKVKGYAWHSGPLKRSLTSPTLLGQVVAREQLTDNQGRVKRDTKGRKVFGPEMVVRHDDGSPVVRAEPILTPEVFDRLCVELAERENRKEPTKRSTGLLLRVIYCGVCGRPAYRLKGGPGRRPRYRCSSAQYKQPCGNKSVSLEYADDAVESLLLGLLGSSERLERVWDSGSDHSAELAEVNETLADLTGLLGTGPYKAGTPQRVRLNERIKHLAARQAELSAESVKPAGWTWQSTGETFSNWWDRQDVTAKNVWLRSMNVRLDYRCSKGVNGRIEVDKLNLDLGDLDTLTQQLNASGPAVQWQETFEAMRKNDIAGMEIHGDKVVFVNSDGQRSPVVDPASDVPFAEQLIGE

SEQ ID NO: 32617 - DNA, 50 bp, Mycobacterium avium
  source 1..50: mol_type = genomic DNA
tgggtgtaattgacaacattcgagtaccccattgtgtagatttacactca

SEQ ID NO: 32618 - DNA, 40 bp, Mycobacterium avium
  source 1..40: mol_type = genomic DNA
cgcgatggtgacgatggcgtactcgacggtcgacatgccc

SEQ ID NO: 32619 - DNA, 40 bp, Mycobacterium avium
  source 1..40: mol_type = genomic DNA
cgcgatggtgacgatggcgacctcgacggtcgacatgccc

SEQ ID NO: 32620 - DNA, 50 bp, Mycobacterium avium
  source 1..50: mol_type = genomic DNA
tgggaggaaggaacaactctggacaccacctttgtgaactgtaacactca

SEQ ID NO: 32621 - protein, 540 aa, Salmonella enterica
MYATVSDRRVYRMKVPVWSYARVSTISQIDGFGIQRQVNTINQFIQYLVLDHRLPFTLDVDNITQMVAEGKSAFRGKNWNPKTKLGQYRKMVMDGLIPDSVLIVENIDRLTRLDPFQAVEIVSGMINRGTTILEIETGMTYSRYIPESITVLTMQINRANGESKRKSIMMQKSHQNRFGNVSKVRPRWFDVVEIDGVKQYRTNDTAKAIQRMYSDYINGIGAAQIVRTYGKTDNGKSWTLVTVLRALSDKRVADDPRYPPIVDKAIYEKVQAIKIRSNKGNTHQKNMLNIFSGMTRCPICKQSIIVKRNSHGGLYTICLGKRTNKTCEARCIAYNAFERPLLNAIRGLDFSEVYNREESNVVTLRDQWIQNERDISAFRERLVKASRHEKFAILDELETLSKEQEELSIRLKSVDAPKDVKITYNDTKLDLDVEYRIELNSRMKKLIQCIDIGRVDNSKSSYTIYCTIKYWTDAIKHLVIIDAESVRIGKGGANKLTTTLRSVSSIDANGTISGNPDIEALEYWEKVIDKAVVMAKEQVG

SEQ ID NO: 32622 - DNA, 50 bp, Salmonella enterica
  source 1..50: mol_type = genomic DNA
acatactttactaactacgagcagttatgatattatgtacgccacagtaa

SEQ ID NO: 32623 - DNA, 40 bp, Salmonella enterica
  source 1..40: mol_type = genomic DNA
catcagcagcatggaacagtcggtggtgccgccgccaata

SEQ ID NO: 32624 - DNA, 40 bp, Salmonella enterica
  source 1..40: mol_type = genomic DNA
catcagcagcatggaacaggaggtggtgccgccgccaata

SEQ ID NO: 32625 - DNA, 50 bp, Salmonella enterica
  source 1..50: mol_type = genomic DNA
acccagttttatcattacatgcaggaatgaacttatcaaagccaaagtaa

SEQ ID NO: 32626 - protein, 540 aa, Salmonella enterica; identical to SEQ ID NO: 32621

SEQ ID NO: 32627 - DNA, 50 bp, Salmonella enterica; identical to SEQ ID NO: 32622
  source 1..50: mol_type = genomic DNA

SEQ ID NO: 32628 - DNA, 40 bp, Salmonella enterica
  source 1..40: mol_type = genomic DNA
cattagtagcatggaacagtcggtggtgccgccgccaata

SEQ ID NO: 32629 - DNA, 40 bp, Salmonella enterica
  source 1..40: mol_type = genomic DNA
cattagtagcatggaacaggaggtggtgccgccgccaata

SEQ ID NO: 32630 - DNA, 50 bp, Salmonella enterica; identical to SEQ ID NO: 32625
  source 1..50: mol_type = genomic DNA

SEQ ID NO: 32631 - protein, 542 aa, Streptomyces sp 769
MPQLSTLPRPKQRLITYIRVSTAREDMISPELQEHTCRKYAEAAGATIIDVLSDLDLSGKDFARRKIGSIIARVAAGEADGVLVYRYDRFGRNIELSLTNLRALESIGGVAQSATEHFDTSTAAGRFARTNMLGVAEFQRELIGENWMSTHASRLRKGLPHHGAPRFGYWYCDTCPMPEPRSPRGVRRERQQRQKCEKCKAGIQIPRPVYGEALGYSFEEFASGSPLSRITHEIRLEGIRSYSGKIITDQHLLAILDTGFGAGYIRVTPDAQSWADELPESAVAPIGIRKIDRFSWIPGAHEAVTSESNWEAFLERRKARPRRASHKTRAKYQASGLVFCIDCEESYGVPMTAGSSRGAGGGKYLTWRCSNIRTGLCNHSTASREAVDEAIKRFLVEYATDDSAARRVAEETLDQARAQQPPDDSAHWQAEVERLERMNSNLIRMRMAEQITENEFLTQRDETANEIAEAKGRLAQARAHENPVLPGTEVFRGLLAEWEDLDADTRRAALKKVVWRILAKKGDFHDLNRYKIIPRWEMPSDA

SEQ ID NO: 32632 - DNA, 50 bp, Streptomyces sp 769
  source 1..50: mol_type = genomic DNA
agtcttctttagcaagtctatgtacctacgtagacttcctaaggaacaca

SEQ ID NO: 32633 - DNA, 40 bp, Streptomyces sp 769
  source 1..40: mol_type = genomic DNA
ggtcttgccggaacccgtacccccgctgaccaggaacgac

SEQ ID NO: 32634 - DNA, 40 bp, Streptomyces sp 769
  source 1..40: mol_type = genomic DNA
ggtcttgccggaacccgtatacccgctgaccaggaacgac

SEQ ID NO: 32635 - DNA, 50 bp, Streptomyces sp 769
  source 1..50: mol_type = genomic DNA
aggcttcttttactagtctctctgtaaaaatagactttagtaggattaca

SEQ ID NO: 32636 - protein, 578 aa, Mycobacteroides abscessus
MARKNVKYRTGNQGLSYLRVSSRGQVETEYDAEGMSLPAQRRKCAERAREKKLVLADELIDPGITATNIEDRKSYQQLIERLKTDEAISFVMVYSITRLHRNWTEAGLMVMQLRSMGVRLISAMENIDDSTATGRMMLGILFSTAGYQSEASSEDLQYKMTQKAIIGGTPGFVPLGYLNVSEQFKGHKVNTVAIDPERGQYIPMAYEWFATGHYTYAELRKKLTDAGLRTRPNRKYPSGQISIHSIEKMLRNRYYLGYVTWNGEEYQGRHEPLVTQDLFDRVQSALAIMPGAGNRQRRYHHFLKGFVWCARCERRLIVMRGRSKTGELYFYYLCRGRQDKLCDLPYLRAGHVENAVAERYQTVTLGEDFKGQLSELFAGAAGQWRSSRGGNRTQMKKRLTELDRQEDRYIELALDPDWPKEKITAKLRQLRDERKRLTEELAAGEQTITEAHTNATRVLEYLEEPHELYQRSGIRTKTAMNRTIFNRLHIDADEVTNRPYVASDVLTEAFEAIVELRRNWQAHRVSEADVQAPHTPRYTRKNNSSAPVRDAAADVRVLSLLEQAFYSPQCSSSSTLAE

SEQ ID NO: 32637 - DNA, 50 bp, Mycobacteroides abscessus
  source 1..50: mol_type = genomic DNA
cctcagtgttcaagtagcagcactctggcggaggtgcttaagccctactt

SEQ ID NO: 32638 - DNA, 40 bp, Mycobacteroides abscessus
  source 1..40: mol_type = genomic DNA
tccttgatgcggtcctgcagtggcggaggataggggattt

SEQ ID NO: 32639 - DNA, 40 bp, Mycobacteroides abscessus
  source 1..40: mol_type = genomic DNA
tccttgatgcggtcctgcagaggcggaggataggggattt

SEQ ID NO: 32640 - DNA, 50 bp, Mycobacteroides abscessus
  source 1..50: mol_type = genomic DNA
ccacagtgcccctctggaagcacagaggtggaggtgcttcggaccttctc

SEQ ID NO: 32641 - protein, 498 aa, Paenibacillus xylanexedens
MIGILARVSTEEQARTGYSIDYQIREGIKKAGTSDIKKYIDDGYSGEFLERPGLTQLRKDVKEGLITKVICLDPDRLARKLMLQLIVTDELEKNGAELVFVSSEYAKTPEGQLFYSMRGAISEFEKAKINERMSSGRREKARKGKVVKNSFTYGYDYDKEKSEYVINEAEARVVQLIFELFTKPNDIAKGMNGIARYLTDNLIPTKRGAEVWHRNVVRQILMKEAYTGRMPQNRWDTEGMLGNKYRAPEDKVPMTVRPKEEWIYVDVPQIIPPEKFEHVQKLLAESRRRHTKESMHQYLLSGLLRCTKCGNTMTGRKSKYWSKYIYEYTDKKNSVGAKEKGCGRKIACAKIDEMVWDTILNWLNNPDEIAAAVEETQVAYMDNEIERVEQDIEKTKAARKRVIKLFSSDLGIGEEEIREELRELSEREEVLSKRLTELQSKQEDEQRFESSRNLMSETLEYYLDLNPDELTFEDKQNIIRMVAKEILVGEDEVQIIPF

SEQ ID NO: 32642 - DNA, 50 bp, Paenibacillus xylanexedens
  source 1..50: mol_type = genomic DNA
agcaccactattgttattagaatagaaatcttaattgcattaggggtgct

SEQ ID NO: 32643 - DNA, 40 bp, Paenibacillus xylanexedens
  source 1..40: mol_type = genomic DNA
cgccagatgtattgaaaacgaaatcttaatgcacttaaga

SEQ ID NO: 32644 - DNA, 40 bp, Paenibacillus xylanexedens
  source 1..40: mol_type = genomic DNA
cgccagatgtattgaaaacaaaatcttaatgcacttaaga

SEQ ID NO: 32645 - DNA, 50 bp, Paenibacillus xylanexedens
  source 1..50: mol_type = genomic DNA
agtgctaatcagaatattagaatgaaatacttaattattaaggggctgct

SEQ ID NO: 32646 - protein, 537 aa, Paenibacillus alvei
MNYLNGEKLLELGVECIINYLRRSRADEEYEKRTGEDTLKNQADLMDRVLAPYGIPYVQETEIGSGDKISTRPVFQQVIADLRSRKYQAIAVKEISRMGRGSYTDMGTIYDLIIEFNIYIITPYRVYDPSNPADLRQIRFDLFMSREEFETTRERLMGGRITAAHDGRWVAGKAPYCFVRDESTGKLVLHESESADMRQIYIYYVYGVPDFKNGGLRDVSYRALSTFLKRHTNILTPEGNKEWQPAMLRRLITHPRNVGIHEFKPKGQDPIIFYGPMVVEQELYDKAMEKDQASRHKPRTKLDFSPCELAGLIICAKCGRRMVRQYSTQIYKHKDGKGESRYEKEFLWCTEPGCTFLKYRSVESQMLKVLELLQSLDNEKLRRYIQNSVNNDEGERLERERIGMLEGLMGRRDNLKKRLVFIFDKYEEGMYDNETFLNRKAAVEKELEEVDELEKMYRGAKIEKKEEVDVKQVQRNITTVLRAYHATDNKTSKNTILRAVFDHAVAEIIEKGSGRKEAKFSLKPVLRADILGEIHLG

SEQ ID NO: 32647 - DNA, 50 bp, Paenibacillus alvei
  source 1..50: mol_type = genomic DNA
tgggttgatcatgtattaattgactcatctactgttctatgatattacca

SEQ ID NO: 32648 - DNA, 40 bp, Paenibacillus alvei
  source 1..40: mol_type = genomic DNA
cgtgtgtgcgataatgagttcgtccgccgaaattaacgca

SEQ ID NO: 32649 - DNA, 40 bp, Paenibacillus alvei
  source 1..40: mol_type = genomic DNA
cgtgtgtgcgataatgagtttgtccgccgaaattaacgca

SEQ ID NO: 32650 - DNA, 50 bp, Paenibacillus alvei
  source 1..50: mol_type = genomic DNA
tgtgttgataacaaattaattatcttttaaaatgttacttggtattagca

SEQ ID NO: 32651 - protein, 595 aa, Klebsiella variicola
MKLYSYQRWSSAVQADGTSKARQSHAAEQYAVANNLELVEIVDAGISGFKSANSKSGALAQFLEAVDAGLIIKNSYLYVESLDRITRDEIDIAIELFMGILRRGITIVTGMDNKVYTHAGIKGNPIDLITSLLLFIRAHEESKTKQNRTNGNALALIRRFQEGKPTTIKSVGSHPWWIDCSTDKFESVRRHPTLWQPAQDAMNMFMDGMSVFKVVQYLDEKYPHAYKGKAWKTSNIRKLRFNKAVYGLREIKVDDKDYELQNYFPALITEGQFERLKKIRENTKYIGKVGKGKTVTDKEGNSKVIAERNNINLLAGMKLFRCGHCGGTMMAMRNGDTIRYLCEKGRGHLNDCKTWSLPGMLVEHTLMIVTTIAYINMQRKGGVEKEDYTAQISSTQMLIEDISKKISNGAHLVLAGLGDLDEVIKELQELKDSRSNLALELEVLQRKQLLLQDNTFESLMMDFFTYAQYGVLQDPVHEYRNKLRDIVYSSIDEVKAWKIDKKLMISFKIKGDDEYYTFSAGDEPYDYIFYYGSPLQLGEDLTVQRTYELPEDVKRRIRDYSDVYEATMAVFSTAKEMLRVIHYPPLDGRLFWPRK

SEQ ID NO: 32652 - DNA, 50 bp, Klebsiella variicola
  source 1..50: mol_type = genomic DNA
tcatgtgtagaaaatcattttgggaatccaagagtaatttctacacatta

SEQ ID NO: 32653 - DNA, 40 bp, Klebsiella variicola; identical to SEQ ID NO: 5423
  source 1..40: mol_type = genomic DNA

SEQ ID NO: 32654 - DNA, 40 bp, Klebsiella variicola; identical to SEQ ID NO: 5423
  source 1..40: mol_type = genomic DNA

SEQ ID NO: 32655 - DNA, 50 bp, Klebsiella variicola
  source 1..50: mol_type = genomic DNA
tcatgtgtataggcacaatttggaaaaaaaaaagtaaagattccccatta

SEQ ID NO: 32656 - protein, 595 aa, Klebsiella pneumoniae
MKLYSYQRWSSAVQADGTSKARQSHAAEQYAVANNLELVEIVDAGISGFKSANSKSGALAQFLEAVDAGLIIKNSYLYVESLDRITRDEIDIAIELFMGILRRGITIVTGMDNKVYTHAGIKGNPIDLITSLLLFIRAHEESKTKQNRTNGNALALIRRFQEGKPTTIKSVGSHPWWIDCSTDKFESVRRHPTLWQPAQDAMNMFMDGMSVFKVVQYLDEKYPHAYKGKAWKTSNIRKLRFNKAVYGLREIKVDDKDYELQNYFPALITEGQFERLKKIRENTKYIGKVGKGKTVTDKEGNSKVIAERNNINLLAGMKLFRCGHCGGTMMAMRNGDTIRYLCEKGRGHLNDCKTWSLPGMLVEHTLMIVTTIAYINMQRKGGVEKEDYTAQISSTQMLIEDISKKISNGAHLVLAGLGDLDEVIKELQELKDSRSNLALELEVLQRKQLLLQDNTFESLMMDFFTYAQYGVLQDPVHEYRNKLRDIVYSSIDEVKAWKIDKKLMISFKIKGDDEYYTFSAGDEPYDYIFYYGSPLQLGEDLTVQGTYELPEDVKRRIRDYSDVYEATMAVFSTAKEMLRVIHYPPLDGRLFWPRK

SEQ ID NO: 32657 - DNA, 50 bp, Klebsiella pneumoniae; identical to SEQ ID NO: 32652
  source 1..50: mol_type = genomic DNA

SEQ ID NO: 32658 - DNA, 40 bp, Klebsiella pneumoniae; identical to SEQ ID NO: 5423
  source 1..40: mol_type = genomic DNA

SEQ ID NO: 32659 - DNA, 40 bp, Klebsiella pneumoniae; identical to SEQ ID NO: 5423
  source 1..40: mol_type = genomic DNA

SEQ ID NO: 32660 - DNA, 50 bp, Klebsiella pneumoniae; identical to SEQ ID NO: 32655
  source 1..50: mol_type = genomic DNA

SEQ ID NO: 32661 - protein, 505 aa, Clostridioides difficile
MKCAIYIRVSKNCDEQMPSVDNQKDFFINYALENNLDIYDFYIDIQSGSKPKLRKNLQRMIDDAKSKKFDIILSKELSRLAGNGQISYALRDLAENINIDMRTLDNAIDTSIGNVENFGLHAWLFEREAQNTSKRVKLSLNTKAIRGEFKSGTPPYGYHLKDSKLIVNDDETPFIVKRIFSEYLSGICYDAIARKLYKEKVRTPSQCFGKSNAFPIWHGATVRGILSNAHYMGNLVQSKTETKSATSMVRVINSPEKYIIVEDTHEAIIDKKTFELVNSLLNSRKRIKPKAQKHLFSNLLFCADCGKGMHFKRNRKGYVCGSFDKWGKVACESHIVRELNLIEIISNEFKNISSAIDNVDYIKKIQSSLLKDVTKKEKNLNQYIAKLNHSKSIKNKALRSLFENEITKEAYNSFICDIDIEINQYTEHIKKLELELSKHKDTTNLSKLQDIQTYIKDFSKLTPELLNRFIEKIEIKKDGSPKIYYRFSDASIYFSDLINFTQVSQ

SEQ ID NO: 32662 - DNA, 50 bp, Clostridioides difficile
  source 1..50: mol_type = genomic DNA
attaacttcacacaggtctcacaatgtggtgactgccattcatagttaaa

SEQ ID NO: 32663 - DNA, 40 bp, Clostridioides difficile
  source 1..40: mol_type = genomic DNA
tttaactacagtctcacaatgtggcgtatttgggaacata

SEQ ID NO: 32664 - DNA, 40 bp, Clostridioides difficile
  source 1..40: mol_type = genomic DNA
tttaactacagtctcacaatttggcgtatttgggaacata

SEQ ID NO: 32665 - DNA, 50 bp, Clostridioides difficile
  source 1..50: mol_type = genomic DNA
tttttcttctctatggcttaacaatttggtgactgtttttcattgttgaa

SEQ ID NO: 32666 - protein, 598 aa, Vibrio cholerae
MKQPMIYSYRRISSKKQEIGRGMDMQDDTDTLKRLEVELKLPISERRLDDVSKSAFHGHNIKDGDLGWFLDAVKEGKVARGSCLVVYSLDRFSRQRIEKATNDFTSILKEGVMIYSILERTLFGDPNKSNEINASEQNLANMVFARAYNESSTKSSRAKDRMALAVRDFKEGKRKDGRVISIKVVGNDVWWIDNSDGTIRKRKSTSSDGRSACYFELAREILLKRIDGWSVYRIVNWLNDTTRDRYLPSPTNRIDKKESRFGLWTRDMINRISEPRKSKVPGSHIKARPILGEKLIGDEVLEGYYPPLLSESEYSQLIRMIKTRARPKSRSKQGESLFSGINVFCANCGDRVTRTTETGGILNYRCGSANCNKNWSKRGAELEKAILDVCVDKVWKPQRKTTQTDQVKVIEGELVRVRAEIEDIKQLLVGRSSRTFAERVFSLEDEEESLLNELEKAKIAQQGVFAQDTRMLSERWSEVNTKVLDFNNDLERIKFRDLIHDSCERIDIGRPLDSDRYRIAVLIKFIDGEWRHIVLGRREVLAVNGSDFYKLEEDAFQRLASIEAGFNIYAPSSQVDDWLKDEFSGFSKDSSYKKRASK

SEQ ID NO: 32667 - DNA, 50 bp, Vibrio cholerae
  source 1..50: mol_type = genomic DNA
aacctgtattatgtaattttcggctggcctaatgttgcatgatgatggtt

SEQ ID NO: 32668 - DNA, 40 bp, Vibrio cholerae
  source 1..40: mol_type = genomic DNA
gtcttccaaagcgcccggttggccataggctccgttatta

SEQ ID NO: 32669 - DNA, 40 bp, Vibrio cholerae
  source 1..40: mol_type = genomic DNA
gtcttccaaagcgcccggtatgccataggctccgttatta

SEQ ID NO: 32670 - DNA, 50 bp, Vibrio cholerae
  source 1..50: mol_type = genomic DNA
aaactgtacatgttaattatctggatgcctaaggtcttgcaatgattttt

SEQ ID NO: 32671 - protein, 576 aa, Rhizobium leguminosarum
MKPRAYSYVRMSTDVQLKGDSLRRQTEESKRYCEENGLELVEDFKLQDIGVSAYHGKNVAQGSLGRFLALAEDGSIPKGSFLIVESLDRISRETPQIATTLFLQILQSGINIVTLTDRHVYKSGSADFADIIVSVVIMARAYEESRTKGLRVGAAWENKRRNIHEKKLTQVAPAWLRLSEDRRAYDVIPARVAVLRNIFNDADNGKGSFQIARKLNFDSVPTFAPSQGWHESYISKLLTNRAVLGEFQPHRYIEGKRTPTGEPVVDYFPAVISQDQFERIQAGRASRKNRGSGRKGRNNINLFSCVATCGYCRGKMMIVDKGSGPKGGVYLRCDNARRGNECEAGLWPLKHLEMAFLSFVKEMDLRSLIIESSERDERLSLEGQRASVSNELAKKRKIRDGAFELMSDDAVDMTYVRQRLADLAIDIRKLEDSLADLSAQGNLRLVRQADTNLDERILVEAIAAGPKDNLDSRTVVADWIRRNVERLQVYPDGLDGPPGAVEKMRETMDPDFIAILDKSIAFAKKGHALVDGSNRRFEVSFGGHKFRAVEVDRTDPTKLIVASYADESRWGMERGS

SEQ ID NO: 32672 - DNA, 50 bp, Rhizobium leguminosarum
  source 1..50: mol_type = genomic DNA
tctggattaatccaacttatgatgcagatgttgaggtggattaatttatg

SEQ ID NO: 32673 - DNA, 40 bp, Rhizobium leguminosarum
  source 1..40: mol_type = genomic DNA
tcccggaaaggtcgggatgcagatcgtcggcctgcctgac

SEQ ID NO: 32674 - DNA, 40 bp, Rhizobium leguminosarum
  source 1..40: mol_type = genomic DNA
tcccggaaaggtcgggatgatgatcgtcggcctgcctgac

SEQ ID NO: 32675 - DNA, 50 bp, Rhizobium leguminosarum
  source 1..50: mol_type = genomic DNA
actttattaaaacaacttataatgattaatttgaggctttataatttaga

SEQ ID NO: 32676 - protein, 674 aa, Vibrio parahaemolyticus
MIKNDEGTMRIPKIHVYARVSTLGQVESGLSLGLQTDNDMINEYCQRYGTELGKVYSDHGRSAFHQKNLAGKLGDFLTDMADKNNLDVQAGDYLLVRALDRISRANLDDAFWLYLQIMRSGVSILTTMDNREYKPNDSVSQILATLSFDLAGEESRKKQAITLAAMRKRIKQYQTGERAPCGNPYNVSTGLPFYAYAKDNVCYIDDQKFQLAKDICQMALDGKGNVTCRDYLRKHGVDLNVDSVASVFKSECLYGDRQVTLLDLDATNRHPEKKKVYSTFILKDYFPAACTKDEFHRIRAIKDSYKIHDNRRVSYSILGGISRLYCKDTVAIGSRENGGIYKCSSPECACGFYARQQLLDYIVLSCLSEHQIVPVEPDKRKIESIQQQIGAYQHQLSTLKKIMFDNPLAFDLADQDRLSELSTKIQELNNQLTIEQENHAHSNSFISLDDVKNWREKKEAYINGSDEDKLEAREIVQRLVKEIRIVENTVTIKTIDNKVHWYYIPTPSNRRKKAYVKLLVSDHAQNMRSINEALDKVCFTEEDIKNGKHHYPLEAYAPDLVTVAIKSPAKEKDEFELLLETVTEPFVFKRRVLLSMGLSANQYQRHASVEKAIDNGFYAVSVDYTSKNYKYPTDIIVSPREITTDDIHALLCVRKIKTIESIAPKQREFTSKVY

SEQ ID NO: 32677 - DNA, 50 bp, Vibrio parahaemolyticus
  source 1..50: mol_type = genomic DNA
gtgatgatttgagcttgataagtgttgcctaactgaagtttaatcatgct

SEQ ID NO: 32678 - DNA, 40 bp, Vibrio parahaemolyticus; identical to SEQ ID NO: 21933
  source 1..40: mol_type = genomic DNA

SEQ ID NO: 32679 - DNA, 40 bp, Vibrio parahaemolyticus
  source 1..40: mol_type = genomic DNA
tttagcagcgcgctcaacgagaacggcgcttccttcttcg

SEQ ID NO: 32680 - DNA, 50 bp, Vibrio parahaemolyticus
  source 1..50: mol_type = genomic DNA
atgatgattgacacttgatgaaagaggcctaactgctaaatacttttgcc

SEQ ID NO: 32681 - protein, 597 aa, Enterobacter hormaechei
MQQVDAFGLDRQISTVLDFLENAKLPAELGYQLDPSNHEVLESDKGLSGYAGHNFTKGSLGRFKERVRSGEITEGCLLIESVDRFSRKQGYDAIDEFTFLIKRNIDIVEVETGQIYSYKLDHKLSALSTSIERAHQESKRKARISMKSWKHRKEASLANGVALNNNTPDWLSLSTDKLSYEIDYHKVETIKRIFQMYRDGYGVTHIVKVLNDEGNRYNGKGWNTVTVYNKLRDRRLNGFLVGKYKTIPKKINESTNETEKRILENLKIKKEAHDNAKRIYPVVVDDDLFLKVQSLMDRNVSNKKQRSTTTKQRNLFNGLTKCYECGSPMIVQSMSNGGQYLRCYRQRTKDEKCNSKMLRYSVTEKVLLEHIKGLDLDDIYGDKTQNYSVDTLKNLLQQTNNKLLELNEKIKSANDEEELFAIMEFKRKRNIEKEELIAKINSIENASEVVRLSYNYDIGEISNQDNTVLRRKINENISKVVASIKCLRTDSSYIGAYYSYDITYHKDILKHLLLTDNNGALLSEISIYQKNNERTYIVKEDKEMVFRVESNGDVWVLYASRKKSINDLLHYINVMMVGREPDTFSFVLNEDMIEWID

SEQ ID NO: 32682 - DNA, 50 bp, Enterobacter hormaechei
  source 1..50: mol_type = genomic DNA
atgatgtattttactttacgcttcttccagcgtactatagaatacatatt

SEQ ID NO: 32683 - DNA, 40 bp, Enterobacter hormaechei
  source 1..40: mol_type = genomic DNA
gagcggcatcgatagcttcttccagcgtggcgtacatggt

SEQ ID NO: 32684 - DNA, 40 bp, Enterobacter hormaechei
  source 1..40: mol_type = genomic DNA
gagcggcatcgatagcttctaccagcgtggcgtacatggt

SEQ ID NO: 32685 - DNA, 50 bp, Enterobacter hormaechei
  source 1..50: mol_type = genomic DNA
attttgtataatattttatgcttctacaactggaataattaatacatttt

SEQ ID NO: 32686 - protein, 611 aa, Enterobacter chengduensis
MRTVKAYIYSRVSSLQQVDAFGLDRQISTVLDFLENAKLPTELGYQLDPSNYEVLESDKGLSGYKGHNFTKGSLGQFKRRVEAGEITEGCLLIESVDRFSRKQGYDAIDEFTFLIKRNIDIVEVETGQIYSYKLDHKLSALSTSIERAHQESKRKARISKKSWNRRKEESLSTGVALNNNTPDWLSLSHDKKSYEIDPQKLQTITKIFEWYSDGYGVTEIVNRLNGEGDRYNGRGWNTVTVYNKLRDRRLNGYLIGKYSTILKKENESTSDAEKRILGNIKIKKEANDNAIRIYPVVIDDELFSKIQSMMDRNVSSKKQRSTTTKQRNLFNGLTKCHECGSPMIVQSMSNGGQYLRCYRQRTKDEKCNSKMLRYFESEKVLLGHIKNLNIDEIYNDQKQSQSLEVLKRKLSDINEKIVLLNDKVRSASDEDELFAIMEFKRKRIIEKDELTEKISALENESEIFRLDYNYDVEKLTDQDNTVLRRKANEHIAKVISSIKCRRIDSSYIGAYYLYDITYHREVLKHILITDNSGKLISEIAISEKDNERTYQVREGGKTVFKVESNGNAWVLYASRTKTIDDLLYYITTMMVGREPDEFVYQLNEDQIEWID

SEQ ID NO: 32687 - DNA, 50 bp, Enterobacter chengduensis; identical to SEQ ID NO: 32682
  source 1..50: mol_type = genomic DNA

SEQ ID NO: 32688 - DNA, 40 bp, Enterobacter chengduensis
  source 1..40: mol_type = genomic DNA
gagcggcatcaatcgcttcttccatcgtggcgtacatggt

SEQ ID NO: 32689 - DNA, 40 bp, Enterobacter chengduensis
  source 1..40: mol_type = genomic DNA
gagcggcatcaatcgcttctaccatcgtggcgtacatggt

SEQ ID NO: 32690 - DNA, 50 bp, Enterobacter chengduensis; identical to SEQ ID NO: 32685
  source 1..50: mol_type = genomic DNA

SEQ ID NO: 32691 - protein, 578 aa, Enterobacter bugandensis
MKNTKLPVELGYRLDPNNHEVLESDKGLSGYKGHNFTKGSLDRFKERVRAGEITEGCLLIESVDRFSRKQGYDAIDEFTFLIKRNIDIVEVETGQIFSNKLEHRLSALSTSIERAYQESKRKARISKKSWKHRKEESLANGVALNNNTPDWLALSNDKKTYEIDIQRVQTITKIFELYRDGHGVTQIVNLLNKAGERYNGKGWNTVTVYNKLRDRRLNGYLVGKYPSIPKKDNESTSETEKRVLENLKIKREANENAKRIYPIVVEDDLFLKVQTMMDRNVSTKKERSSTTKQRNLFNGLTKCHECGSPMIVQSMSNGGQYLRCYKQRTKDEKCNSKMLRYYVTERVLLEHIKGLNLNDIYGDKSGNLSLESLNNLLSQVNNKLVVLNDKIKNASDEEELFAIMNFKRKRNAEKEDILNQINALENESEVVRLSYDYDIKEITNQDNTVLRRKKNEHIAKVLSSVRCLRMDSSYIGAYYLYDITYHKDIIKHLLLTNNDGVLQSEISINEFNNQRIYSVKEDNKIVFKVESNGDVWVLHASRQKSIDELLHYINVMMVGREPEGFAYEVNEDMIEWVD

SEQ ID NO: 32692 - DNA, 50 bp, Enterobacter bugandensis
  source 1..50: mol_type = genomic DNA
atgatgtattttgctttacgcttcttccagcgtactatagaatacatatt

SEQ ID NO: 32693 - DNA, 40 bp, Enterobacter bugandensis
  source 1..40: mol_type = genomic DNA
gagcggcatcaatagcttcttccagcgtggcgtacatggt

SEQ ID NO: 32694 - DNA, 40 bp, Enterobacter bugandensis
  source 1..40: mol_type = genomic DNA
gagcggcatcaatagcttctaccagcgtggcgtacatggt

SEQ ID NO: 32695 - DNA, 50 bp, Enterobacter bugandensis; identical to SEQ ID NO: 32685
  source 1..50: mol_type = genomic DNA

SEQ ID NO: 32696 - protein, 611 aa, Lelliottia amnigena
MRTVKAYIYSRVSSLQQVDAFGLDRQISTVLDFLENAKLPAELGYQLDPSNHEVLESDKGLSGYKGHNFTKGSLGQFKRRVEAGEITEGCLLIESVDRFSRKQGYDAIDEFTFLIKRNIDIVEVETGQIYSYKLDHKLSALSTSIERAHQESKRKARISKKSWNRRKEESLATGVALNNNTPDWLSLSQDKKTYEIDAQKVQTITSIFEWYRDGYGVTEIVNRLNSEGNRYNGRGWNTVTVYNKLRDRRLNGYLIGKYKTIPKKDSESTTDNEKRILENIKIKKEANDNAQRIYPVVIDDELFTKIQSMMDRNVSSKKQRSTTTKQRNLFNGLTKCHECGSPMIVQSMSNGGQYLRCYRQRTKDEKCNSKMLRYFESEKVLLGHIKNLNLDEIYSDRKHAQSLDVLKRQLSDVNEKIVLLNDKVKSASDEDELFAIMEFKRKRILEKDELNQKISSLENESEIVRLNYNYDIDKLTDQDNTALRRKANEHIAKVISAIKCRRIDSSYIGAYYLYDITYHRDILKHILITDNSGKLISEITISEKDNERTYLVREEEQTVFKVESNGNAWVMYASRTKTIDDLLYYINTMMVGREPDDFAYQLNEDHIEWID

SEQ ID NO: 32697 - DNA, 50 bp, Lelliottia amnigena; identical to SEQ ID NO: 32682
  source 1..50: mol_type = genomic DNA

SEQ ID NO: 32698 - DNA, 40 bp, Lelliottia amnigena
  source 1..40: mol_type = genomic DNA
gagcggcatcaatagcttcttccagcgtggcgtacatagt

SEQ ID NO: 32699 - DNA, 40 bp, Lelliottia amnigena
  source 1..40: mol_type = genomic DNA
gagcggcatcaatagcttctaccagcgtggcgtacatagt

SEQ ID NO: 32700 - DNA, 50 bp, Lelliottia amnigena; identical to SEQ ID NO: 32685
  source 1..50: mol_type = genomic DNA

SEQ ID NO: 32701 - protein, 495 aa, Enterobacter asburiae
MKQNGKAYSYIRFSSKKQEQGDSVRRQTELAEQYAHVHGLILSDKNFQDLGISAFKEGNRPSLGDMLEAIEKGQIEPGSTIIIESLDRLSRRGIDVTQQIIKSILQHNVFIASLVDGLLLNRESVNDLVSVIRIALAADLAHKESEKKSQRLRETKSQQRQRALSGEVINKILPFWLKRKEDKFVFSDKVDTVRRIIQLRREGFGTNKIAKVLNDEGHKPLRSAGWNHTTVGKTINSVALYGAYQTSETTKDRKVILLDIIDDYYPAVISKEEFMLLQSDQKQNKPGYKSEHNAFAGILKHECGGSLVRKFHVASGKTYQYHVCANARDGKCNITKNFKNIEIALFRIMKKLKLEKNTSFDGALLLEQETIKKKIQELNDMLLTASKIPTSVIQTINNLEDKLQEIEEKIKQQNSIIISERAFNLKLLLDIKEPQELNMMLKRIIKNIIVYNIGKKWRIKVQYRNKHVQSFLWDGENITFITDTKEILDLVNSWG

SEQ ID NO: 32702 - DNA, 50 bp, Enterobacter asburiae
  source 1..50: mol_type = genomic DNA
aattcccccctttgaaactacatggtaatattgttgcaaagaagcaaaat

SEQ ID NO: 32703 - DNA, 40 bp, Enterobacter asburiae; identical to SEQ ID NO: 4963
  source 1..40: mol_type = genomic DNA

SEQ ID NO: 32704 - DNA, 40 bp, Enterobacter asburiae; identical to SEQ ID NO: 6099
  source 1..40: mol_type = genomic DNA

SEQ ID NO: 32705 - DNA, 50 bp, Enterobacter asburiae
  source 1..50: mol_type = genomic DNA
aattgctgcataacaaacttcttcaaaaaatagttgcttaaaagaaaaat

SEQ ID NO: 32706 - protein, 541 aa, Enterobacter hormaechei
MPKAISYIRFSSRIQASGDSTKRQNKYINEWLKNNPDYQLDESLRFQDLGISGYSGANAKSGAFGEFLAAVESGVIEAGSVLLVESLDRVSRQDIDTARERLRKILLAGVDVVTLADNSWYKKESLNDPLSLIKAVLIMQRANEESATKSKRLRSAWDAKREEAAKGKIMSRRCVAWLRVSDDMSHFELIPDNVKAVQRVFQLRLEGLPFVRIARQMNEEGFYTLNQHKPVKGAWSHTTVKALLDNRSVIGFKVPSNCTVTKGVKEIPNYYPAVISEEHFYAVQQLKQGSGRRPTSDKPLLTNLFKGVMRCAECGFVTIVNCATEKWHGVYRCSMRYEGRCHAKSINRRLADKALIQGLLYNTNRLSLNRDNGSAIGSLQSELEQIQKQRERLIKLAMLADDTESMAKDLKALNSQIKDAENAISLLHQREQSSQLETISHLDLTVKKDRIEAQIIIKRIVKEIRLNTAGKKCDVFLHNGLKLLNFPLDRVVDGAQWLEVLPLIDGDEFDFEGFTTKPQHIALEEAPEWVKYMEEQSNQPL

SEQ ID NO: 32707 - DNA, 50 bp, Enterobacter hormaechei
  source 1..50: mol_type = genomic DNA
gttagtgattagagagttgtaattaggactacacatctcttatgataaac

SEQ ID NO: 32708 - DNA, 40 bp, Enterobacter hormaechei
  source 1..40: mol_type = genomic DNA
gttagtatgcagggtggacagcaccagatgtccggtttgc

SEQ ID NO: 32709 - DNA, 40 bp, Enterobacter hormaechei
  source 1..40: mol_type = genomic DNA
gttagtatgcagggtggacgacaccagatgtccggtttgc

SEQ ID NO: 32710 - DNA, 50 bp, Enterobacter hormaechei
  source 1..50: mol_type = genomic DNA
attagtgaatcaaaagttataattgagaaagtacatatgaaatgaaaaat

SEQ ID NO: 32711 - protein, 518 aa, Pantoea sp PSNIH1
MPKAISYIRFSSRIQASGDSTKRQNKYINEWLKNNPDYQLDESLRFQDLGISGYSGANAKSGAFGEFLAAVESGVIEAGSVLLVESLDRVSRQDIDTARERLRKILLAGVDVVTLADNSWYKKESLNDPLSLIKAVLIMQRANEESATKSKRLRSAWDAKREEAAKGKIMSRRCVAWLRVSDDMSHFELIPDNVKAVQRVFQLRLEGLPFVRIARQMNEEGFYTLNQRNPVKGAWSHTTVKALLDNRSVIGFKVPSNCTVTKGVKEIPNYYPAVISEEHFYAVQQLKQGAGRRPSSEKPLLTNLFKGVMRCAECGFVTIVNCATEKWHGVYRCSMRYEGRCHAKSINRRLADKALVQGLLYNTNRLSLNRDNGSAIGSLQSELEQLQKQRERLIKLAMLADDTESMAKDLKALNSQIKDAEKAVSEVHQREQSTQLETISHLDLTVKKDRIEAQIIIKRIVKEIRLNTAQKKCDVFLHNGLKLLNFPLDRVVDGEIFLEVLPVLEADEFDFDTYRMIE

SEQ ID NO: 32712 - DNA, 50 bp, Pantoea sp PSNIH1; identical to SEQ ID NO: 32707
  source 1..50: mol_type = genomic DNA

SEQ ID NO: 32713 - DNA, 40 bp, Pantoea sp PSNIH1
  source 1..40: mol_type = genomic DNA
gcgggtatgcagcgtagcgagcaccagatgtccggtctca

SEQ ID NO: 32714 - DNA, 40 bp, Pantoea sp PSNIH1
  source 1..40: mol_type = genomic DNA
gcgggtatgcagcgtagcggacaccagatgtccggtctca

SEQ ID NO: 32715 - DNA, 50 bp, Pantoea sp PSNIH1; identical to SEQ ID NO: 32710
  source 1..50: mol_type = genomic DNA

SEQ ID NO: 32716 - protein, 541 aa, Klebsiella pneumoniae
MPKAISYIRFSSRIQASGDSTKRQNKYINEWLKNNPDYQLDESLRFQDLGISGYSGANAKSGAFGEFLAAVESGVIEAGSVLLVESLDRVSRQDIDTARERLRKILLAGVDVVTLADNSWYKKESLNDPLSLIKAVLIMQRANEESATKSKRLRSAWDAKREEAAKGKIMSRRCVAWLRVSDDMSHFELIPDNVKAVQRVFQLRLEGLPFVRIARQMNEEGFYTLNQHKPVKGAWSHTTVKALLDNRSVIGFKVPSNCTVTKGVKEIPNYYPAVISEEHFYAVQQLKQGSGRRPTSDKPLLTNLFKGVMRCAECGFVTIVNCATEKWHGVYRCSMRYEGRCHAKSINRRLADKALVQGLLYNTNRLSLNRDNGSAIGSLQSELEQIQKQRERLIKLAMLADDTESMAKDLKALNSQIKDAENAISLLHQREQSSQLETISHLDLTVKKDRIEAQIIIKRIVKEIRLNTAGKKCDVFLHNGLKLLNFPLDRVVDGAQWLEVLPLIDGDEFDFEGFTTKPQHIALEEAPEWVKYMEEQSNQPL

SEQ ID NO: 32717 - DNA, 50 bp, Klebsiella pneumoniae; identical to SEQ ID NO: 32707
  source 1..50: mol_type = genomic DNA

SEQ ID NO: 32718 - DNA, 40 bp, Klebsiella pneumoniae
  source 1..40: mol_type = genomic DNA
attggtgtgcagggtggagagcaccagatgaccggtctgg

SEQ ID NO: 32719 - DNA, 40 bp, Klebsiella pneumoniae
  source 1..40: mol_type = genomic DNA
attggtgtgcagggtggaggacaccagatgaccggtctgg

SEQ ID NO: 32720 - DNA, 50 bp, Klebsiella pneumoniae; identical to SEQ ID NO: 32710
  source 1..50: mol_type = genomic DNA

SEQ ID NO: 32721 - protein, 518 aa, Klebsiella pneumoniae
MPKAISYIRFSSRIQASGDSTKRQNKYINEWLKNNPDYQLDESLRFQDLGISGYSGANAKSGAFGEFLAAVESGVIEAGSVLLVESLDRVSRQDIDTARERLRKILLAGVDVVTLADNSWYKKESLNDPLSLIKAVLIMQRANEESATKSKRLRSAWDAKREEAAKGKIMSRRCVAWLRVSDDMSHFELIPDNVKAVQRVFQLRLEGLPFVRIARQMNEEGFYTLNQRNPVKGAWSHTTVKALLDNRSVIGFKVPSNCTVTKGVKEIPNYYPAVISEEHFYAVQQLKQGAGRRPSSEKPLLTNLFKGVMRCAECGFVTIVNCATEKWHGVYRCSMRYEGRCHAKSINRRLADKALVQGLLYNTNRLSLNRDNGSAIGSLQSELEQLQKQRERLIKLAMLADDTESMAKDLKALNSQIKDAEKAVSEVHQREQSSQLETISHLDLTVKKDRIEAQIIIKRIVKEIWLNTAQKKCDVFLHNGLKLLNFPLDRVVDGEIFLEVLPVLEADEFDFDTYRMIE

SEQ ID NO: 32722 - DNA, 50 bp, Klebsiella pneumoniae; identical to SEQ ID NO: 32707
  source 1..50: mol_type = genomic DNA

SEQ ID NO: 32723 - DNA, 40 bp, Klebsiella pneumoniae; identical to SEQ ID NO: 32718
  source 1..40: mol_type = genomic DNA

SEQ ID NO: 32724 - DNA, 40 bp, Klebsiella pneumoniae; identical to SEQ ID NO: 32719
  source 1..40: mol_type = genomic DNA

SEQ ID NO: 32725 - DNA, 50 bp, Klebsiella pneumoniae; identical to SEQ ID NO: 32710
  source 1..50: mol_type = genomic DNA

SEQ ID NO: 32726 - protein, 541 aa, Klebsiella michiganensis; identical to SEQ ID NO: 32706

SEQ ID NO: 32727 - DNA, 50 bp, Klebsiella michiganensis; identical to SEQ ID NO: 32707
  source 1..50: mol_type = genomic DNA

SEQ ID NO: 32728 - DNA, 40 bp, Klebsiella michiganensis
  source 1..40: mol_type = genomic DNA
attggtgtgcagcgttgagagaacaaggtgcccggtttgc

SEQ ID NO: 32729 - DNA, 40 bp, Klebsiella michiganensis
  source 1..40: mol_type = genomic DNA
attggtgtgcagcgttgaggaaacaaggtgcccggtttgc

SEQ ID NO: 32730 - DNA, 50 bp, Klebsiella michiganensis; identical to SEQ ID NO: 32710
  source 1..50: mol_type = genomic DNA

SEQ ID NO: 32731 - protein, 541 aa, Klebsiella oxytoca
MPKAISYIRFSSRIQASGDSTKRQNKYINEWLKNNPDYQLDESLRFQDLGISGYSGANAKSGAFGEFLAAVESGVIEAGSVLLVESLDRVSRQDIDTARERLRKILLAGVDVVTLADNSWYKKESLNDPLSLIKAVLIMQRANEESATKSKRLRSAWDAKREEAAKGKIMSRRCVAWLRVSDDMSHFELIPDNVKAVQRVFQLRLEGLPFVRIARQMNEEGFYTLNQRNPVKGAWSHTTIKALLDNRSVIGFKVPSNCTVTKGVKEIPNYYPAVISEEHFYAVQQLKQGAGRRPSSEKPLLTNLFKGVMRCAECGFVTIVNCATEKWHGVYRCSMRYEGRCHAKSINRRLADKALVQGLLYNTNRLSLNRGNGSAIGSLQSELEQLQKQRERLIKLAMLADDTESMAKDLKALNSQIKDAEKAVSEVHQREQSSQLETISHLDLTLKKDRIEAQIIIKRIVKEIRLNTAQKKCDVFLHNGLKLLNFPLDRVVDGAQWLEILPLIDGDEFDFEGFTTKPRHLALEEAPKWVKEMEEQPNQPL

SEQ ID NO: 32732 - DNA, 50 bp, Klebsiella oxytoca; identical to SEQ ID NO: 32707
  source 1..50: mol_type = genomic DNA

SEQ ID NO: 32733 - DNA, 40 bp, Klebsiella oxytoca
  source 1..40: mol_type = genomic DNA
attggtgtgcaatgttgagagtaccagatgcccggtttgc

SEQ ID NO: 32734 - DNA, 40 bp, Klebsiella oxytoca
  source 1..40: mol_type = genomic DNA
attggtgtgcaatgttgaggataccagatgcccggtttgc

SEQ ID NO: 32735 - DNA, 50 bp, Klebsiella oxytoca; identical to SEQ ID NO: 32710
  source 1..50: mol_type = genomic DNA

SEQ ID NO: 32736 - protein, 541 aa, Serratia plymuthica
MPKAISYIRFSSRIQASGDSTKRQNKYINEWLKNNPDYQLDESLRFQDLGISGYSGANAKSGAFGEFLAAVESGVIEAGSVLLVESLDRVSRQDIDTARERLRKILLAGVDVVTLADNSWYKKESLNDPLSLIKAVLIMQRANEESATKSKRLRSAWDAKREEAAKGKIMSRRCVAWLRVSDDMSHFELIPDNVKAVQRVFQLRLEGLPFVRIARQMNEEGFYTLNQRNPVKGAWSHTTVKALLDNRSVIGFKVPSNCTVTKGVKEIPNYYPAVISEEHFYAVQQLKQGAGRRPSSEKPLLTNLFKGVMRCAECGFVTIVNCATEKWHGVYRCSMRYEGRCHAKSINRRLADKALVQGLLYNTNRLSLNRDNGSAIGSLQSELEQLQKQRERLIKLAMLADDTESMAKDLKALNSQIKDAEKAVSEVHQREQSSQLETISHLDLTVKKDRIEAQIIIKRIVKEIWLNTAQKKCDVFLHNGLKLLNFPLDRVVDGAQWLEVLPLIDGDEFDFAEFTTKPRHIALEEAPEWVKEMEEQPNQPL

SEQ ID NO: 32737 - DNA, 50 bp, Serratia plymuthica; identical to SEQ ID NO: 32707
  source 1..50: mol_type = genomic DNA

SEQ ID NO: 32738 - DNA, 40 bp, Serratia plymuthica
  source 1..40: mol_type = genomic DNA
gttggtgtgcagcgtcgagaggaccagatgaccggtttga

SEQ ID NO: 32739 - DNA, 40 bp, Serratia plymuthica
  source 1..40: mol_type = genomic DNA
gttggtgtgcagcgtcgaggagaccagatgaccggtttga

SEQ ID NO: 32740 - DNA, 50 bp, Serratia plymuthica; identical to SEQ ID NO: 32710
  source 1..50: mol_type = genomic DNA

SEQ ID NO: 32741 - protein, 540 aa, Ruthenibacterium lactatiformans; identical to SEQ ID NO: 296

SEQ ID NO: 32742 - DNA, 50 bp, Ruthenibacterium lactatiformans; identical to SEQ ID NO: 297
  source 1..50: mol_type = genomic DNA

SEQ ID NO: 32743 - DNA, 40 bp, Ruthenibacterium lactatiformans
  source 1..40: mol_type = genomic DNA
ggtctcaaaatgggagcgcggaataagctgccccgatatc

SEQ ID NO: 32744 - DNA, 40 bp, Ruthenibacterium lactatiformans
  source 1..40: mol_type = genomic DNA
ggtctcaaaatgggagcgcttaataagctgccccgatatc

SEQ ID NO: 32745 - DNA, 50 bp, Ruthenibacterium lactatiformans
  source 1..50: mol_type = genomic DNA
aaataacttagaccagggaaaccgttagtttacaaaatacaaaaatacga

SEQ ID NO: 32746 - protein, 540 aa, Clostridium innocuum; identical to SEQ ID NO: 296

SEQ ID NO: 32747 - DNA, 50 bp, Clostridium innocuum; identical to SEQ ID NO: 297
  source 1..50: mol_type = genomic DNA

SEQ ID NO: 32748 - DNA, 40 bp, Clostridium innocuum
  source 1..40: mol_type = genomic DNA
gatatccaagtgggaaaatggtactgccaatccggatatg

SEQ ID NO: 32749 - DNA, 40 bp, Clostridium innocuum
  source 1..40: mol_type = genomic DNA
gatatccaagtgggaaaattttactgccaatccggatatg

SEQ ID NO: 32750 - DNA, 50 bp, Clostridium innocuum; identical to SEQ ID NO: 32745
  source 1..50: mol_type = genomic DNA

SEQ ID NO: 32751 - protein, 540 aa, Intestinimonas butyriciproducens; identical to SEQ ID NO: 296

SEQ ID NO: 32752 - DNA, 50 bp, Intestinimonas butyriciproducens; identical to SEQ ID NO: 297
  source 1..50: mol_type = genomic DNA

SEQ ID NO: 32753 - DNA, 40 bp, Intestinimonas butyriciproducens
  source 1..40: mol_type = genomic DNA
cgtgtccaagtgggaaagtggagacaccgtccccagtacg

SEQ ID NO: 32754 - DNA, 40 bp, Intestinimonas butyriciproducens
  source 1..40: mol_type = genomic DNA
cgtgtccaagtgggaaagtttagacaccgtccccagtacg

SEQ ID NO: 32755 - DNA, 50 bp, Intestinimonas butyriciproducens; identical to SEQ ID NO: 32745
  source 1..50: mol_type = genomic DNA

SEQ ID NO: 32756 - protein, 540 aa, Anaerotruncus colihominis; identical to SEQ ID NO: 296

SEQ ID NO: 32757 - DNA, 50 bp, Anaerotruncus colihominis; identical to SEQ ID NO: 297
  source 1..50: mol_type = genomic DNA

SEQ ID NO: 32758 - DNA, 40 bp, Anaerotruncus colihominis
  source 1..40: mol_type = genomic DNA
cggacagggaaacctctgagggctgtcccatttgaatatc

SEQ ID NO: 32759 - DNA, 40 bp, Anaerotruncus colihominis
  source 1..40: mol_type = genomic DNA
cggacagggaaacctctgattgctgtcccatttgaatatc

SEQ ID NO: 32760 - DNA, 50 bp, Anaerotruncus colihominis; identical to SEQ ID NO: 32745
  source 1..50: mol_type = genomic DNA

SEQ ID NO: 32761 - protein, 540 aa, Megamonas funiformis; identical to SEQ ID NO: 296

SEQ ID NO: 32762 - DNA, 50 bp, Megamonas funiformis; identical to SEQ ID NO: 297
  source 1..50: mol_type = genomic DNA

SEQ ID NO: 32763 - DNA, 40 bp, Megamonas funiformis
  source 1..40: mol_type = genomic DNA
cctttcaatattggataatggggtgaataatcccaattgc

SEQ ID NO: 32764 - DNA, 40 bp, Megamonas funiformis
  source 1..40: mol_type = genomic DNA
cctttcaatattggataatttggtgaataatcccaattgc

SEQ ID NO: 32765 - DNA, 50 bp, Megamonas funiformis; identical to SEQ ID NO: 32745
  source 1..50: mol_type = genomic DNA

SEQ ID NO: 32766 - protein, 540 aa, Holdemania filiformis; identical to SEQ ID NO: 296

SEQ ID NO: 32767 - DNA, 50 bp, Holdemania filiformis; identical to SEQ ID NO: 297
  source 1..50: mol_type = genomic DNA

SEQ ID NO: 32768 - DNA, 40 bp, Holdemania filiformis
  source 1..40: mol_type = genomic DNA
ggtgtcgaaatgggaaaccgggaaatcgctgccggattat

SEQ ID NO: 32769 - DNA, 40 bp, Holdemania filiformis
  source 1..40: mol_type = genomic DNA
ggtgtcgaaatgggaaaccttgaaatcgctgccggattat

SEQ ID NO: 32770 - DNA, 50 bp, Holdemania filiformis; identical to SEQ ID NO: 32745
  source 1..50: mol_type = genomic DNA

SEQ ID NO: 32771 - protein, 540 aa, Phascolarctobacterium succinatutens
MKQPYNTTIYNTALYMRLSRDDENYGDSVSIETQRTILQQYAKEQGLHVVGEYVDDGWSGTNFDRPDFQRMIDDIEDGKINCVVTKDLSRLGRNYILTGQYTEIYFPSKGVRYIAVNDNVDTINGENELAPFLNILNEMHARQTSKKVKAAMRTRFANGAHYGAYAPLGYVKDPDKKGHLLIDPETRWIIEKIFDLAVHGRGAASITRILVEEKVPTPGWLNFQRYGTFANIYAGAPEEKAYAWTIAQVKSILKEETYIGHSVHNKQTNISFKNKKKVRKPKEEWYRVENTHEAIISEDVFRQVQEQICNRRRRQKNGTTQIFSGLVKCADCGWSLAYGMNSQNKNPYAHYHCSKYGQGLHQCSMHYIRYDVLYAYVLSRLQYWSVLAQQDGDKLLKRLLNASDKERNTARKRQTAELKKAEKRKAEVDTLFAKMYEDWSAGRITEYNFNMLSEKYQGEQRELDVKIERLHEAMETAAQTAVDAEKWIGLMKQYVNPTELTAELLNTLIEKILVHEAVKSEDGSREQEVEIFYRFIGKIE

SEQ ID NO: 32772 - DNA, 50 bp, Phascolarctobacterium succinatutens; identical to SEQ ID NO: 297
  source 1..50: mol_type = genomic DNA

SEQ ID NO: 32773 - DNA, 40 bp, Phascolarctobacterium succinatutens
  source 1..40: mol_type = genomic DNA
tttccccaagcacccaagcggtcattcacagccttattca

SEQ ID NO: 32774 - DNA, 40 bp, Phascolarctobacterium succinatutens
  source 1..40: mol_type = genomic DNA
tttccccaagcacccaagctttcattcacagccttattca

SEQ ID NO: 32775 - DNA, 50 bp, Phascolarctobacterium succinatutens; identical to SEQ ID NO: 32745
  source 1..50: mol_type = genomic DNA

SEQ ID NO: 32776 - protein, 540 aa, Mitsuokella multacida; identical to SEQ ID NO: 296

SEQ ID NO: 32777 - DNA, 50 bp, Mitsuokella multacida; identical to SEQ ID NO: 297
  source 1..50: mol_type = genomic DNA

SEQ ID NO: 32778 - DNA, 40 bp, Mitsuokella multacida
  source 1..40: mol_type = genomic DNA
agtatctggatgagaaaggggagcaggcatgatgaacaca

SEQ ID NO: 32779 - DNA, 40 bp, Mitsuokella multacida
  source 1..40: mol_type = genomic DNA
agtatctggatgagaaaggttagcaggcatgatgaacaca

SEQ ID NO: 32780 - DNA, 50 bp, Mitsuokella multacida; identical to SEQ ID NO: 32745
  source 1..50: mol_type = genomic DNA

SEQ ID NO: 32781 - protein, 587 aa, Streptococcus pneumoniae
MKKEVKVIKGDTTLKRTASGCVERSIKRVAAYCRVSTDTEDQINSYNSQVEHYTEFIQKNNEWTLAGIYADEAITGTQVDRRIDFQRLINDCMNGDIDMIITKSISRFARNTLDTLKYVRKLKEFNVAVFFEEENINTLTMDGELLLTILSSVAQQEVENISANVKKGLRMKMERGEMVGFQGCLGYDYDPETKSISINEKEAEIVRYIFRRYIEGVGGMVISRELEEQGYLSPRGNKRWTETTVLGIIKNEKYKGDLMMGKTYTVDPISKRRLDNFGEQDKFYIENHHEPIISEEDFEKAQGIRLRRSKNRNTVANNGGKREKYSRKYAFSSMLECGFCGHNLSRRNWHSSSEYTKVIWQCVNATKNGKKYCPHSKGIEEEAIEKAFMESYRQVCHNNVEITNEFLKTVEEELKDNSLAKDLKKITNQLDKILKKEKDLVELRLNESISMDIYQDKYNEIAISKEKLLAEKRTLEVTLTDEKALKKRLEGFKKLLESNKYLEEFDRAVFESIVDKIIIGGTNDEGEIDPAMITIIYKTGKKDSQDGRLFKSRRKNAKEVNEKADSKLYPQSSDEVNNLCFYPMDNT

SEQ ID NO: 32782 - DNA, 50 bp, Streptococcus pneumoniae
  source 1..50: mol_type = genomic DNA
tgtgtttctatcctatggacaacacatgtggagtgcatagcgttgataca

SEQ ID NO: 32783 - DNA, 40 bp, Streptococcus pneumoniae
  source 1..40: mol_type = genomic DNA
tctatttcctcaaacgcatcacgtcgagacggtagcactt

SEQ ID NO: 32784 - DNA, 40 bp, Streptococcus pneumoniae
  source 1..40: mol_type = genomic DNA
tctatttcctcaaacgcatatcgtcgagacggtagcactt

SEQ ID NO: 32785 - DNA, 50 bp, Streptococcus pneumoniae
  source 1..50: mol_type = genomic DNA
tgtatttatcactcagggacaaaaattatggcatgcactttgtcgatata

SEQ ID NO: 32786 - protein, 514 aa, Bacillus subtilis
MAKELTKTASVAAYLRKSREDADQEDTLARHRKQLIDLVKQRGFENVDWYEEIGSADSIKNRPVFSDLLKKIENDEYDAVCVVAYDRLSRGNQIESGIISKAFKDTETLLITPTRTYDWSIEGDEMLSEFESMIARSEYRVIKKRLKQGKINAVRNGRLHSGNVPYGYKWDKNDKTAKIDKEKHEIYRLMVKWFLDEEYSATEIADKLNELGIPSPSGGSTWYSEVVADILTNDFHRGLVWYGKYRARKNGIGIEKNPDSSSIIMHKGNHEPMKSDEEHGAIIRRISKLRTFKPGRKLNKNTFKLSGLVRCPYCGKVQVVHTPKNRNPHVRKCLKKSKTRTTECNNTTGIPEEALYKAIVMKIREYNEVLFSKESSEKKDEEARTYMNQILSLHEKAISKSNKRIEKIKEMYMDEIIDKDEFKSRIDKEKKSIQEAENEIRKLKESADYHDEIEHEQRKIKWNHEKVQEFIESDQGFTPSEINLILKLIISHVSYTMVKNEYGEFDVDLRVNFN

SEQ ID NO: 32787 - DNA, 50 bp, Bacillus subtilis
  source 1..50: mol_type = genomic DNA
agtagtacccaattaaggtctgttgtgtgaaactttatttgggtactaca

SEQ ID NO: 32788 - DNA, 40 bp, Bacillus subtilis
  source 1..40: mol_type = genomic DNA
ggtcgtgacaggctctgttgttacgattatcggtattaca

SEQ ID NO: 32789 - DNA, 40 bp, Bacillus subtilis
  source 1..40: mol_type = genomic DNA
ggtcgtgacaggctctgtttatacgattatcggtattaca

SEQ ID NO: 32790 - DNA, 50 bp, Bacillus subtilis
  source 1..50: mol_type = genomic DNA
attaacacattttaaaggtctctttaatgaatctttgtccttgtgctaca

SEQ ID NO: 32791 - protein, 600 aa, Coprococcus eutactus
METKKTKYTALYERLSRDDEMQGESNSITNQKKYLEEYARSQGFKNIRHFTDDGYSGVDFNRPGFQALIAAVEAGEVDVVCVKDMSRFGRNYLKVGFYTEIMFPEKGVRFIAINNGVDSANPSENDFTPFLNIMNEWYAKDTSNKIRAIFRSRMQDGKRCSGAIPYGYKRDPEDKNHLLIDEEAAKVVHRIFQMIIDGMGTKAIANKLSEEKVLIPSAYLEQSEHGQSRNHSYHDPYRWNCTAVAYILEKQEYMGHTVLGKTICENFKTKKRRKATPDELIIFENTHEAIVDEETWHLAQKLRRKTKRTLANGTYSHRLSGLLYCSDCGKRLSYASPHSQHRADGKTYDADSNFRCPTYKSMYGECTMHFIKASTLDSLVDEAIRKVAAYVLKDEQAFLQQVKELASASQAVMQTDSKKELVTAKKRIAELDNFIKKLYEGNASGKIPDRQFEKLMAQYDTEQQELEARVAEIEAKISELRQEEESGEMFVRLVKRYRDFTEITQTMLNEFIDKIVIFEATGGRTVNRSQRIDIYFNFIGQFVVEDTEEEILSKQEEEKRLAELKEQERKDRRNETVRRYRQRKKEKQAAEAEAEKSRCA

SEQ ID NO: 32792 - DNA, 50 bp, Coprococcus eutactus
  source 1..50: mol_type = genomic DNA
ttctgtcttgacgaaacgcttccgaagggttacaataatataggacagag

SEQ ID NO: 32793 - DNA, 40 bp, Coprococcus eutactus
  source 1..40: mol_type = genomic DNA
gtatgtagtgactgatcccaagggaactgtacttgaagaa

SEQ ID NO: 32794 - DNA, 40 bp, Coprococcus eutactus
  source 1..40: mol_type = genomic DNA
gtatgtagtgactgatccctagggaactgtacttgaagaa

SEQ ID NO: 32795 - DNA, 50 bp, Coprococcus eutactus
  source 1..50: mol_type = genomic DNA
tcctgtcttttgtgaaggattccgtaatattagaatcactcagcacagat

SEQ ID NO: 32796 - protein, 611 aa, Enterobacter hormaechei
MRTVKAYIYSRVSSLQQVDAFGLDRQISTVLDFLENAKLPAELGYQLDPSNHEVLDSDKGLSGYAGHNFTKGSLGRFKERVRSGEITEGCLLIESVDRFSRKQGYDAIDEFTFLIKRNIDIVEVETGQIYSYKLDHKLSTLSTSIERAYQESKRKARISKKSWQKRKKDSVDTGIALNNNTPDWLSLSQDKKSYELDVQKVQTITKIFELYRDGYGVTQIVNLLNKEGERYNGKGWNTVTVYNKLRDRRLNGYLVGKYTTIPKKDNESTNDAEKRIIENIKIKKEANDNAKRIYPVVIEDDLFSRVQSMMDRNVSSKKQKSTTTKQRNLFNGLTKCNECGSPMIVQSMSNGGQYLRCYRQRTKDEKCNSKMLRYFETEKVLLQHIKNLNLDEIYGDEKSNQSLDTLKRLLSDVNGKIALLNEKVQSANDESELFAIMEFKRKRILEKDELIAKINSLENRCEAVTLNYTYDIEQLTNQDNTVLRRKANEHIAKVISSIKCRRIDSSYIGAYYLYDITYHREVLKHILITDNSGKLISEIAISEKDNERTYQVREGGKTVFKVESNGNAWVLYASRTKTIDDLLYYITTMMVGREPDEFVYQLNEDQIEWID

SEQ ID NO: 32797 - DNA, 50 bp, Enterobacter hormaechei
  source 1..50: mol_type = genomic DNA
catatgtatttcactttacgctgcttccagcgtactatagaatacatatt

SEQ ID NO: 32798 - DNA, 40 bp, Enterobacter hormaechei; identical to SEQ ID NO: 32683
  source 1..40: mol_type = genomic DNA

SEQ ID NO: 32799 - DNA, 40 bp, Enterobacter hormaechei; identical to SEQ ID NO: 32683
  source 1..40: mol_type = genomic DNA

SEQ ID NO: 32800 - DNA, 50 bp, Enterobacter hormaechei
  source 1..50: mol_type = genomic DNA
catatgtgtcattatttatgttgcttcaagcgcataaatacataaataat

SEQ ID NO: 32801 - protein, 611 aa, Enterobacter roggenkampii
MRTVKAYIYSRVSSLQQVDAFGLDRQISTVLDFLENAKLPAELGYQLDPSNHEVLDSDKGLSGYAGHNFTKGSLGRFKERVRSGEITEGCLLIESVDRFSRKQGYDAIDEFTFLIKRNIDIVEVETGQIYSYKLDHKLSTLSTSIERAYQESKRKARISKKSWQKRKKDSVDTGIALNNNTPDWLSLSQDKKSYELDVQKVQTITKIFELYRDGYGVTQIVNLLNKEGERYNGKGWNTVTVYNKLRDRRLNGYLVGKYTTIPKKDNESTNDAEKRIIENIKIKKEANDNAKRIYPVVIEDDLFSRVQSMMDRNVSSKKQKSTTTKQRNLFNGLTKCNECGSPMIVQSMSNGGQYLRCYRQRTKDEKCNSKMLRYFETEKVLLQHIKNLNLDEIYGDEKSNQSLDTLKRLLSDVNGKIALLNEKVQSANDESELFAIMEFKRKRILEKDELIAKINSLENRCEAVTLNYTYDIEQLTNQDNTVLRRKANEHIAKVISSIKCRRIDSSYIGAYYLYDITYHREVLKHILITDNSGKLISEIAISEKDNERTYQVREGGKTVFKVESNGNAWVLYASRTKTIDDLLYYITTMMVGREPDEFVYQLHEDQIEWID

SEQ ID NO: 32802 - DNA, 50 bp, Enterobacter roggenkampii; identical to SEQ ID NO: 32797
  source 1..50: mol_type = genomic DNA

SEQ ID NO: 32803 - DNA, 40 bp, Enterobacter roggenkampii; identical to SEQ ID NO: 32693
  source 1..40: mol_type = genomic DNA

SEQ ID NO: 32804 - DNA, 40 bp, Enterobacter roggenkampii; identical to SEQ ID NO: 32693
  source 1..40: mol_type = genomic DNA

SEQ ID NO: 32805 - DNA, 50 bp, Enterobacter roggenkampii; identical to SEQ ID NO: 32800
  source 1..50: mol_type = genomic DNA

SEQ ID NO: 32806 - protein, 547 aa, Clostridium tunisiense
MKIAIYSRKSKFTGKGESIENQIQMCKDYVNNNMKDRDITEFLVYEDEGFSGGNTNRPEFQRLMEDARAKKFEVLICYRLDRISRNVADFSTTLETLQKYDIDFISIKEQFDTSTPMGRAMIYIASVFAQLERETIAERVKDNMLELSKTGRWLGGVTPIGYESTPIIYYDHDMNEKKMFKLSQVPEELKVVKLIFDKYLEFKSLSKVETYLLQNDIKTKKGNDFNKSNLRVVLTNAVYVKATEDVMNYLEQEGMTTCGVPDGNHGLLSYNKSKTIINENGKITRKHRDKSDWIVSVSSQAGIIEDKEWLEVQRILLKNRDTFPNLGRTHNALLTGKLKCKKCDGLMGISHGHISKKTGDRIFYYACNLKKFSKGSRCDCKNAKVAEVDAAMKLQLKEFGLNQAKLLNKLSEQLKKAKENNSGANQEDNIKKAIVEKERQIESLLNKLSLDDDITELIVGKIKNLKTELSELKSQLSNINDMKNEQIENELNMSLIKMILDKCSIIDTLKDGEIKQLIDVFIEDIYWDDETSSIEVNIIGSKGSKKK

SEQ ID NO: 32807 - DNA, 50 bp, Clostridium tunisiense
  source 1..50: mol_type = genomic DNA
agtcgcagtttagtacaattagcacctgcatattataccaaactgcgata

SEQ ID NO: 32808 - DNA, 40 bp, Clostridium tunisiense
  source 1..40: mol_type = genomic DNA
ggaactagcaaaattagcacctgcatccaaaagcgcctca

SEQ ID NO: 32809 - DNA, 40 bp, Clostridium tunisiense
  source 1..40: mol_type = genomic DNA
ggaactagcaaaattagcagttgcatccaaaagcgcctca

SEQ ID NO: 32810 - DNA, 50 bp, Clostridium tunisiense
  source 1..50: mol_type = genomic DNA
agtttctggcttaaacaattagaagttgaatattactattgactgagatt

SEQ ID NO: 32811 - protein, 505 aa, Dehalobacter restrictus
MDIESKKFIIRYVAIYIRKSRAENMEDLEKHRMVLIDLCKRNNFKYVEYLEVGTSDSIDMRPKICKLLNEVEEGVYDAVCVVEYDRLGRGDLGEQDRIKKAFQKSNTFIITPDKIFDLNDDVDDTYADFKGFFARQEYKMITKRLRQGKKIGARRGQWTNGIPPFPYVYQTYKNKVNKKGLVVDDDKLSIYRDMLEQALKGIDPKKIAENINQRGILTIKGNYWSNVTIQRLLVDETHLGKIISNKTQGDAHKNKRPNAKPYKIIPQCDWVIVENCHEPVKTQEEHDRILTLIHQRNSVPVAGRKQKHALTGLIKCAKCGHNLTFNMTEEKVFVKPCWFIDAFGKKCGNKGISVDILEKFSIDEIKKYNDNYLISFDSEDAEKAEIMQELILEKEITLQKHKRALELVNDAYELGDYTRHEWLLRKEKWQKSIEQLKSEIYELKRQYRSTDKITKEERQKKLSAFLDSITAVTENAQRNDLYRTIINGIIYLRERDTIEIKIDFK

SEQ ID NO: 32812 - DNA, 50 bp, Dehalobacter restrictus
  source 1..50: mol_type = genomic DNA
ggatattctgagtcaggtaggtgagctggcattgaaacgtaatcatttta

SEQ ID NO: 32813 - DNA, 40 bp, Dehalobacter restrictus
  source 1..40: mol_type = genomic DNA
aataatccgttaatcgtactctgtggcagacagagaaaga

SEQ ID NO: 32814 - DNA, 40 bp, Dehalobacter restrictus
  source 1..40: mol_type = genomic DNA
aataatccgttaatcgtactttgtggcagacagagaaaga

SEQ ID NO: 32815 - DNA, 50 bp, Dehalobacter restrictus
  source 1..50: mol_type = genomic DNA
ggatactctttattaagaaggtgctttggcattaaatgaagatatttatc

SEQ ID NO: 32816 - protein, 547 aa, Pseudomonas putida
MPIAVLYIRFSSVEQGDGSSLERQEERANQWFAQNPTFTRYEKTFRDLGLSGYKGDHIKAGALGKLLLAIEQGYIPAGSVVLVEAIDRFSRLPPLETLRHLETIVKAGVNLITLRDGVRYDESSLKSQSLMMLAYHAFAAFDYSNTIAGNIRDSYTDRAKEAKVGNPIKRRNPFWLTSDGELKGDGSLDAIQQVFQGFANGVPLRALAIQYSQYFANRQSLKHALRNPAAIGHWQRTTAIEVDGEKERVPGELIKDVFKAAVTDELFFQVQRMLDDLADQPVTVARKFPMAGLLQCGDCGANMVLLRQNARQQTDAVRCYRRMQSSEKCTNQKTIPVPVVGWFYENTRKPHAFRAYQRTKLPENQRQRIKLEGQITQLKQQQARLRQLVLLDDGDKDALADYSKLVDEKKARELELASLPQVADTAVVGMAEFHQFLHGDHFAISNLLQQDGYRIVCHRDGLLEVKVSADDNPVESAQYIGYARKYKMWKIKPKNAELLFVDSYSQLQFPQHVTITTSEQWQQRVMGTDLSAYMDDEDLADYLESQG

SEQ ID NO: 32817 - DNA, 50 bp, Pseudomonas putida
  source 1..50: mol_type = genomic DNA
ccactgcataagtagaaatcttgtaggcagagttgtaagctatgcagtga

SEQ ID NO: 32818 - DNA, 40 bp, Pseudomonas putida
  source 1..40: mol_type = genomic DNA
gaccaggtggtcgtgcagcaggcggaacttgtccatcggg

SEQ ID NO: 32819 - DNA, 40 bp, Pseudomonas putida
  source 1..40: mol_type = genomic DNA
gaccaggtggtcgtgcagcgagcggaacttgtccatcggg

SEQ ID NO: 32820 - DNA, 50 bp, Pseudomonas putida
  source 1..50: mol_type = genomic DNA
ccatagcaatttatgacatgttgtgaagagagttgtaaaatatgccttga

SEQ ID NO: 32821 - protein, 546 aa, Faecalicoccus pleomorphus
MNQQPEKITALYCRLSQDDALDGESNSITNQKALLSKYAADHGFRNTRFFVDDGFSGTSFQRPGFQEMMRYVEDYSVSAVIVKDLSRLGREYSYMGRLQDFIFPAYDVRFIAINDDVDSAKGENDFAVFKNVFNDYYAKDTSKKIRAVVKMRGEAGEHIASNPPYGYIKDPQDKKKWIVDEEAAKVVQRIFNLCIAGKGPMQIAKTLTADRVLTVTAYHARQKGWVMPENLYRWNTNAVLRILERREYTGCTVNFKTYTKSLKFKKRMENPVENQRVFEDTQPAIIDKGQWERVQELRKNKRRPTKTGRTSMFSGLLYCADCGAKLYFCTCNTYKDDSQNHFVCSNYKSNTGSCKIHYIREQVLYRIVLETIRQTLSYVRMFRKDFKLEMLAQDEESRKAELAEKQKALSGAKKRMEDLDRIIQHIYEDNVLGKLSDSRYLKLSRQYEKEQAEIEQLAAVLEREIETQAGQVSDVNEFLKLVDKYLDIPELDAAILNELVSRIVVHSPVRENGRKQVRIDLHFTYVGQIRIPLKIGRESLNESEPA

SEQ ID NO: 32822 - DNA, 50 bp, Faecalicoccus pleomorphus
  source 1..50: mol_type = genomic DNA
ttacttccttatgggacgttgcataatggcagaggagcataaagaagtat

SEQ ID NO: 32823 - DNA, 40 bp, Faecalicoccus pleomorphus
  source 1..40: mol_type = genomic DNA
gaatcagatcctccggcataaagcaggcaggatctttttt

SEQ ID NO: 32824 - DNA, 40 bp, Faecalicoccus pleomorphus
  source 1..40: mol_type = genomic DNA
gaatcagatcctccggcattcagcaggcaggatctttttt

SEQ ID NO: 32825 - DNA, 50 bp, Faecalicoccus pleomorphus
  source 1..50: mol_type = genomic DNA
ttccttctaggcagcaggttgccttctggcctaggatgtgtcagaagtat

SEQ ID NO: 32826 - protein, 546 aa, Clostridium leptum
MNQQPEKITALYCRLSQDDALDGESNSITNQKALLSKYAADHGFRNIRFFVDDGFSGTSFQRPGFQEMMRYVEDYSVSAVIVKDLSRLGREYSYMGRLQDFIFPAYDVRFIAINDDVDSAKGENDFAVFKNVFNDYYAKDTSKKIRAVVKMRGEAGEHLASNPPYGYIKDPQDKKKWIVDEEAAKVVRRIFNLCIAGKGPMQIAKILTADKVPTVTAYHARQKGWAMPENLYQWCAKSVAGILERREYTGCTVNFKTYTKSLKFKKRMENPVENQRIFEDTQPAIIEKGQWERVQELRKNKRRPAKTERTSMFSGLLYCADCGAKLYFCTCNTYKDDSQNHFVCSNYKSNTGSCKIHYIREQVLYRIVLETIQQTLSYVRMFRKDFKLEMLAQDEESRKAELAEKQKALSGAKKRMEDLDRIIQHIYEDNVLGKLSDSRYLKLSRQYEKEQAEIEQLAVVLEQEIETQAGQVSDVNEFLKLVDKYLDIPELDAAILNELVSKIVVHSPVKENGKKHVQIDLYFTYVGQIRIPLKIGRESLNESEPA

SEQ ID NO: 32827 - DNA, 50 bp, Clostridium leptum
  source 1..50: mol_type = genomic DNA
ttacttccttatgggacgctgccttatggcagaggagcataaagaagtat

SEQ ID NO: 32828 - DNA, 40 bp, Clostridium leptum
  source 1..40: mol_type = genomic DNA
ctaaaaaggagagcggttttattccgctctccttttatta

SEQ ID NO: 32829 - DNA, 40 bp, Clostridium leptum
  source 1..40: mol_type = genomic DNA
ctaaaaaggagagcggttttcttccgctctccttttatta

SEQ ID NO: 32830 - DNA, 50 bp, Clostridium leptum; identical to SEQ ID NO: 32825
  source 1..50: mol_type = genomic DNA

SEQ ID NO: 32831 - protein, 659 aa, Leclercia adecarboxylata
MQQQHGFGIDRQISTVTEYLSYATLDQRLGYQLDPENYEILDSDIGKSAFKGANWGAKSSLGKFYKAVVDRKITSGVLVCENIDRLVRLSNYEANNKLSTLIMNGIDILEVESGSCFSNRIPESSTVLNMSISRAYNESLRKSNFSKKSWKKRKATAEEQGTALNNNTPDWLSLSEDKQAYVINTVNVEKITNIFKMYVNGMGVTEIVKTLNANGDRYNDRGWNLVTIYNKLRDRRLNGYLVGKYKTVSQRDDETAEEAEKRLLKNRKARHEANLNAIRIYPIVIGDELFSKVESLMDKNIQARKPRSTTTKQRNLFNGISRCLVCGSPMNVQSMSNGSQYFRCYRQRTKDEHCDSKLVRYGDSERFLLNHIKGLDLNIIYGQDTEESSVESLKSHLSDISSKIDALNVQMQSASDEEELFLLMGFKRKRITERETIAEQIYKIENESHIVKLNYDYDIKAISDQNNTVLRRKTNMHLSNVISSIKCGRFDLSDVTIYIYDISYHKDLLKHVLITDNRCNLRSMITISNNCVLDVGYMKIDILNHRVDMIRQPTVTEVEMIKVYLEYLNEGFEIAFELIDEEVIKVLEVLSKKVEVLQSTFADGHSIDEVLKDVEAVISTLNPMIATCRNELIIQRFKLLYETVQFIEQGNKALLELDL

SEQ ID NO: 32832 - DNA, 50 bp, Leclercia adecarboxylata
  source 1..50: mol_type = genomic DNA
aatatgtattttgatataccctgcctgcagggtgctataaaatacataat

SEQ ID NO: 32833 - DNA, 40 bp, Leclercia adecarboxylata
  source 1..40: mol_type = genomic DNA
gcgcggcatcaatcgcttcctctagagtggcaaacatagt

SEQ ID NO: 32834 - DNA, 40 bp, Leclercia adecarboxylata
  source 1..40: mol_type = genomic DNA
gcgcggcatcaatcgcttcatctagagtggcaaacatagt

SEQ ID NO: 32835 - DNA, 50 bp, Leclercia adecarboxylata
  source 1..50: mol_type = genomic DNA
aatatgtataattaattacccagtatgtagggtgttgaaaaaaatatact

SEQ ID NO: 32836 - protein, 547 aa, Vibrio parahaemolyticus; identical to SEQ ID NO: 4886

SEQ ID NO: 32837 - DNA, 50 bp, Vibrio parahaemolyticus
  source 1..50: mol_type = genomic DNA
ttatgcctttaagaaaacttaactaaggtattgtatcggttatgacataa

SEQ ID NO: 32838 - DNA, 40 bp, Vibrio parahaemolyticus; identical to SEQ ID NO: 4428
  source 1..40: mol_type = genomic DNA

SEQ ID NO: 32839 - DNA, 40 bp, Vibrio parahaemolyticus; identical to SEQ ID NO: 4429
  source 1..40: mol_type = genomic DNA

SEQ ID NO: 32840 - DNA, 50 bp, Vibrio parahaemolyticus
  source 1..50: mol_type = genomic DNA
ttctgcctttatttaaaatcatctttggtattaaatgttatcttacctaa

SEQ ID NO: 32841 - protein, 547 aa, Vibrio parahaemolyticus; identical to SEQ ID NO: 4836

SEQ ID NO: 32842 - DNA, 50 bp, Vibrio parahaemolyticus; identical to SEQ ID NO: 32837
  source 1..50: mol_type = genomic DNA

SEQ ID NO: 32843 - DNA, 40 bp, Vibrio parahaemolyticus; identical to SEQ ID NO: 4863
  source 1..40: mol_type = genomic DNA

SEQ ID NO: 32844 - DNA, 40 bp, Vibrio parahaemolyticus; identical to SEQ ID NO: 5164
  source 1..40: mol_type = genomic DNA

SEQ ID NO: 32845 - DNA, 50 bp, Vibrio parahaemolyticus; identical to SEQ ID NO: 32840
  source 1..50: mol_type = genomic DNA

SEQ ID NO: 32846 - protein, 547 aa, Vibrio parahaemolyticus
MRTAYSYVRLSSKKQIQGYGQERQWQAIQAAALAHGWELSEKTFSDLGVSGWKGANIETGALSQFLQCVEDGYIEKGSVLIVENVDRLSRAGVQRAVSLLMQLLASGISIYTFTDSKLYEPDSHNPLMDLMAWALSAQRAFEESERKSQMILNAKAKAREKARLTGEIITRRCPSWLRVNQDKTAFELIPERVETVRKIFDLYVNGYGTPRIGRLLTEEGRKPLTGRAWYPRSISRILQYRAVLGEYQPTLNGKPEGDAIKNYYPAIIDEDRFNEVQAVLKEGGAGKGRRGKEMRNYFAGLLRCSCGEGMHIVSSCVKGKRYYQLRCLQYRISCFGSSWNFYKLSSFVLFALRRLPILEVMGSQDNNNIKELNAKERELTFLLEDTRRQLDNTINAIATLGLNDQLQSKFRELKTSVTNIEKQLSNVKTELETSQGKLVIQKQDSEMLTGRFLELIDSTKDIDGRIKLNQVLRRYLSKIEMHADKKEEYRYIKIYRKDGDELVSIQCDHSLKGALFESKDGLETFELLPATDAKRNEISNTLLCTPK

SEQ ID NO: 32847 - DNA, 50 bp, Vibrio parahaemolyticus; identical to SEQ ID NO: 32837
  source 1..50: mol_type = genomic DNA

SEQ ID NO: 32848 - DNA, 40 bp, Vibrio parahaemolyticus; identical to SEQ ID NO: 4428
  source 1..40: mol_type = genomic DNA

SEQ ID NO: 32849 - DNA, 40 bp, Vibrio parahaemolyticus; identical to SEQ ID NO: 4429
  source 1..40: mol_type = genomic DNA

SEQ ID NO: 32850 - DNA, 50 bp, Vibrio parahaemolyticus; identical to SEQ ID NO: 32840
  source 1..50: mol_type = genomic DNA

SEQ ID NO: 32851 - protein, 547 aa, Vibrio parahaemolyticus; identical to SEQ ID NO: 4841

SEQ ID NO: 32852 - DNA, 50 bp, Vibrio parahaemolyticus; identical to SEQ ID NO: 32837
  source 1..50: mol_type = genomic DNA

SEQ ID NO: 32853 - DNA, 40 bp, Vibrio parahaemolyticus; identical to SEQ ID NO: 4428
  source 1..40: mol_type = genomic DNA

SEQ ID NO: 32854 - DNA, 40 bp, Vibrio parahaemolyticus; identical to SEQ ID NO: 4429
  source 1..40: mol_type = genomic DNA

SEQ ID NO: 32855 - DNA, 50 bp, Vibrio parahaemolyticus; identical to SEQ ID NO: 32840
  source 1..50: mol_type = genomic DNA

SEQ ID NO: 32856 - protein, 547 aa, Vibrio parahaemolyticus; identical to SEQ ID NO: 4836

SEQ ID NO: 32857 - DNA, 50 bp, Vibrio parahaemolyticus; identical to SEQ ID NO: 32837
  source 1..50: mol_type = genomic DNA

SEQ ID NO: 32858 - DNA, 40 bp, Vibrio parahaemolyticus; identical to SEQ ID NO: 4848
  source 1..40: mol_type = genomic DNA

SEQ ID NO: 32859 - DNA, 40 bp, Vibrio parahaemolyticus; identical to SEQ ID NO: 4849
  source 1..40: mol_type = genomic DNA

SEQ ID NO: 32860 - DNA, 50 bp, Vibrio parahaemolyticus; identical to SEQ ID NO: 32840
  source 1..50: mol_type = genomic DNA

SEQ ID NO: 32861 - protein, 638 aa, Klebsiella oxytoca
MKPKLYSYVRFSSVKQREGNSLERQQDTALRIASRYDLELDTTAFHDLGMSAFKGKNAHEGKLSEFIKQIGVKVPVGSWLVVENLDRISRDDAWSALDIFKSILSKGIVVVTGMDEKVYKYADVKNNPTDLIISLLMFTRAHDESLTKKNRVESQARSLIRHNLTREPGTPARAIESVGQNVWWVDTKSGYVTPHPTYFAAAQKIIELKQSGETLLGIQRYLNEHYPAPKKRVYKDQTGQALTSKTEQWGKHLIRTFLNPTVHGQKVFTLDKRDESGIVIYDPDSEKPLKETFTIPDYYPVLMSEIDYLTLSKLDRHRAVTRSSSKYPEGNPEPEIPLLSGIGILFCGKCGSFMFKSGSNKNKYRYICGSKIVQGKPCGKKGFTSYQLEHTILQLIADHVWNNHQEDKTAWYESEIAKTSESIDKLLKLATLTDSLEELAEQINSNKHKKATLEREFHQYKINRSEIQTTGWEQFQHFDVHDTKNPNRKQIRLKVKQAIKRIDCYDIDGRHDHFEVTFTDETKQRIVIKFNRNRSPGVSYVEAQTVNDHDLLKMQGLVLHSFIDELISPDKFAQHIKEKYEVSLLNPTYITELENSTSRDKGNGMAIIVDGSTSKTYATVNGTKYEINSLEDLEKLSH

SEQ ID NO: 32862 - DNA, 50 bp, Klebsiella oxytoca
  source 1..50: mol_type = genomic DNA
actatgaataattgactgttaggcttgcctaatatacaattactcattgt

SEQ ID NO: 32863 - DNA, 40 bp, Klebsiella oxytoca
  source 1..40: mol_type = genomic DNA
acagcgggtatttgccggtttgccctgcggcatacccggg

SEQ ID NO: 32864 - DNA, 40 bp, Klebsiella oxytoca
  source 1..40: mol_type = genomic DNA
acagcgggtatttgccggtcggccctgcggcatacccggg

SEQ ID NO: 32865 - DNA, 50 bp, Klebsiella oxytoca
  source 1..50: mol_type = genomic DNA
aataagaattgattacttttattccgttctaatttaattttactctttgt

SEQ ID NO: 32866 - protein, 487 aa, Bacillus wiedmannii
MAYAVYVRVSSDKDEQVSSVENQIDICRYWLENNGFEWDENAVYFDDGISGTAWLERHAIQLVLEKARKKEIDTVVFKSIHRLARDLKDALEIKEILLGHGVRLITIEEGYDSHYEGKNDMKFEMYAMFASQLPKTLSVSITAALAAKVRRGGYTGGFVPYGYEIIDGKYAINEEEAALVREIFELYAQGFGYIKIANTINDKGARTRKGAPWTFSTLCKMIKNPAYKGTYIMQKYGTVKVNGRKKKVINPKEKWVIFEDHHPAIISHELWDKVNDKDPNKFKKKRRVSTTNELRGITVCAHCGTAMSKRNSINVSKNGTATEYSYMICNWSRTTARRECVRHVPIHYKDLRVLVLSKLKEKERELDKEFCSDDNQLHVKLRKLKRDINDLKFKRERLLDLYLEDERIDKDTFTLRNAKIEKEIGLKEMEIRKASNIEIQMKEKQEVRDAFALLEESKDLHSVFQKLINRIEVAQDGAIDIYYRFEE

SEQ ID NO: 32867 - DNA, 50 bp, Bacillus wiedmannii
  source 1..50: mol_type = genomic DNA
tttttgccatattgacatacagcaagtgcggtgtataattaaggcataaa

SEQ ID NO: 32868 - DNA, 40 bp, Bacillus wiedmannii
  source 1..40: mol_type = genomic DNA
tatagcgtttgagggagcgagtgcggttggtaagagcagc

SEQ ID NO: 32869 - DNA, 40 bp, Bacillus wiedmannii
  source 1..40: mol_type = genomic DNA
tatagcgtttgagggagcgaatgcggttggtaagagcagc

SEQ ID NO: 32870 - DNA, 50 bp, Bacillus wiedmannii
  source 1..50: mol_type = genomic DNA
tatttgccaatcatacatccaacaaaggacctgtattcggaatacataaa

SEQ ID NO: 32871 - protein, 522 aa, Pseudomonas asiatica
MPTAFSYARFSSAIQKKGSSLERQQAMVANWLVTHPEYSLSDLTFQDLGKSGWKGDHIKEGGDFAKLLAAVEAGVIQKGDAVLVEAIDRTGRLPVLEMLSSIVSPILRAGVSIVTLEDNLVFTEASLNEGGHIYILVGKIQAARQYSDNLSRRLAASYDSRRRLAKEGTTPKRNTPVWLTSKGKVIEEIADQIKLAFELYTSGLGKAVIAKRMRESGVAALAKTSGPGVEGWLRNEAVIGRWNGSDVYEPIVDLSLYQLAQIEGEKRKTAPRAKTATHFYVGLIKCGCCGHNFIMRTIGGVQVSMRCRKRQELKGCDNKKVIPKEIIDAVYRKTSVPAALRVVARDHSGVNEKAIIAAEAKLLEISKQMQELSAAIVTLGFIPEVQAKLQQTQEARETTERELAVLKATVVHTAANGWIEQGKVWELERNDPQRLSAMLRSVGYTITIHPDGRLVASESDTVYRYAGVDRKEDRYKLMQDDQLLLVHKGPDESYSYWEPFQEVVGEMMWNEADYENLRLQYE

SEQ ID NO: 32872 - DNA, 50 bp, Pseudomonas asiatica
  source 1..50: mol_type = genomic DNA
tttgtgaacatatgaaagcgtttcttgcagctaattcatatgtttacaat

SEQ ID NO: 32873 - DNA, 40 bp, Pseudomonas asiatica; identical to SEQ ID NO: 8403
  source 1..40: mol_type = genomic DNA

SEQ ID NO: 32874 - DNA, 40 bp, Pseudomonas asiatica; identical to SEQ ID NO: 8403
  source 1..40: mol_type = genomic DNA

SEQ ID NO: 32875 - DNA, 50 bp, Pseudomonas asiatica
  source 1..50: mol_type = genomic DNA
gttgagaacattccaaagcttctcttctagctatttttgaaatatacaat

SEQ ID NO: 32876 - protein, 506 aa, Pseudomonas asiatica
MPTAFSYARFSSAIQKKGSSLERQQAMVANWLVTHPEYSLSDLTFQDLGKSGWKGDHIKEGGDFAKLLAAVEAGVIQKGDAVLVEAIDRTGRLPVLEMLSSIVSPILRAGVSIVTLEDNLVFTEASLNEGGHIYILVGKIQAARQYSDNLSRRLAASYDSRRRLAKEGTTPKRNTPVWLTSKGKVIEEIADQIKLAFELYTSGLGKAVIAKRMRESGVAALAKTSGPGVEGWLRNEAVIGRWNGSDVYEPIVDLSLYQLAQIEGEKRKTAPRAKTATHFYVGLIKCGCCGHNFIMRTIGGVQVSMRCRKRQELKGCDNKKVIPKEIIDAVYRKTSVPAALRVVARDHSGVNEKAIIAAEAKLLEISKQMQELSAAIVTLGFIPEVQAKLQQTQEARETTERELAVLKATVVHTAANGWIEQGKVWELERNDPQRLSAMLRSVGYTITIHPDGRLVASESDTVYRYAGVDRKEDRYKLMQDDQLLLVHKGQMRVIPTGSHSKRLLER

SEQ ID NO: 32877 - DNA, 50 bp, Pseudomonas asiatica; identical to SEQ ID NO: 32872
  source 1..50: mol_type = genomic DNA

SEQ ID NO: 32878 - DNA, 40 bp, Pseudomonas asiatica; identical to SEQ ID NO: 8403
  source 1..40: mol_type = genomic DNA

SEQ ID NO: 32879 - DNA, 40 bp, Pseudomonas asiatica; identical to SEQ ID NO: 8403
  source 1..40: mol_type = genomic DNA

SEQ ID NO: 32880 - DNA, 50 bp, Pseudomonas asiatica; identical to SEQ ID NO: 32875
  source 1..50: mol_type = genomic DNA

SEQ ID NO: 32881 - protein, 507 aa, Bacillus pumilus
MYFQKGTPNEIIKYDDYPYKVYTRVSTDRDEQISSKENQIDVCRYWIEQHNYEWDDRSVLLDDGISGTVLEDRAAMKYIFSLAEKKEIKMVIFKSITRLARDLKDALYIREILVSNGVRVVTLEEDYDSLYESKASMKFEMSALFAEQLPKSMSVNISGVLAAKARRGEHSGRVPYGYMKEGKHLVINENEAQVIRLIFHLYNNEGLGHKRVTYALQEKCKLGEIPPPKKRSNWQLTTVQTILRNPIYCGVHIANRHTTIKVDGRKKFIRNPPEKWTVYEDFCPPIVSREDWEKANNKLTVNKKTKFTPWNELRQLLICGKCGSNMVIIQTSRAKQNGEKTYWKYVKCSNYRRAGQEGCVNHVPITYEEVRDLVIENLIEFSKDISHDYRKNAIEQKEKQMKSVKVELKSLETQNKRLLELYLEDQIISKAEFQTKRNEIQSNIIKLEQSLFSLQQVHDEKSSMMEMQAVLRELEDKEKDLKHVFDKLIDHIVIHPNGKMNFHYRFK

SEQ ID NO: 32882 - DNA, 50 bp, Bacillus pumilus
  source 1..50: mol_type = genomic DNA
catttgtaaaaggtatgcataacaaatgctaagcaaaccttttacaaatt

SEQ ID NO: 32883 - DNA, 40 bp, Bacillus pumilus; identical to SEQ ID NO: 20513
  source 1..40: mol_type = genomic DNA

SEQ ID NO: 32884 - DNA, 40 bp, Bacillus pumilus; identical to SEQ ID NO: 20513
  source 1..40: mol_type = genomic DNA

SEQ ID NO: 32885 - DNA, 50 bp, Bacillus pumilus
  source 1..50: mol_type = genomic DNA
tatttctcataaacatggataaaaaatcctaagcaacattttatcaactt

SEQ ID NO: 32886 - protein, 600 aa, Vibrio parahaemolyticus
MKGSGVAMQINDEVLKSLSNEHNLPIAQETYQDLGKSAYKGEHLENELGLFLAAVKNRTVAEGSILVVYSLDRLSRLEIGHAKQTYYDLTNNGVSVYAVVDNHLYRAHNAADDIIATITFERAHNESEIKSRRVIDAAKEGLKRWKETKQPQSSLGRSPFWIDQPTNSLNEKAEGVKVAVDLFLEGWSTIKVKQHLDKNYPYLRTRKTSIKKAQTWDYGVIDQLWRKTSLIGEKRLTIEDQKYVLSNYYPPLISLEKFNKLNRLKKPKLGRSTSTGSIHLLKGLARCGICGSAMVFVDKAQHSKNYVCSLAIKGEPLHNREVFSAELLELLTLEVCRDQYLVNSFNAQLNVEEKARVEYELAEEKKQLEDLKSRYKQKSRASLLDLIEDTEDKIEVLEQKLASFETFDLSDNLHLLNSDIFTEDVRTNFQHSSRAEIIDNLKSVLSDVTLNRVVEDSEFTKTGTVNCVSISWRFKNNQTRSISVKPFRYIGTGSNKKLFVPVRYEYTVPVIDEENRRGEKFVPDMIKKVHEKKLLNKFYPSKGRYQWNNLELVLGEFQTGLHNFLPNFVADPDPDAFWGDMVDKARAKGTRYTVLSKNVL

SEQ ID NO: 32887 - DNA, 50 bp, Vibrio parahaemolyticus
  source 1..50: mol_type = genomic DNA
cgaagaatttagttttataatggtttgcgaataaaaaacaattcccttcg

SEQ ID NO: 32888 - DNA, 40 bp, Vibrio parahaemolyticus; identical to SEQ ID NO: 23528
  source 1..40: mol_type = genomic DNA

SEQ ID NO: 32889 - DNA, 40 bp, Vibrio parahaemolyticus; identical to SEQ ID NO: 23528
  source 1..40: mol_type = genomic DNA

SEQ ID NO: 32890 - DNA, 50 bp, Vibrio parahaemolyticus
  source 1..50: mol_type = genomic DNA
ctgaaaatttaattttattttgatttgagaataaaaaagctttctctttg

SEQ ID NO: 32891 - protein, 498 aa, Paenarthrobacter ureafaciens
MGTTAAIYARLSNDKRQGTKDEGATVAEQIKACEAFIAAKGWTLGEVYKDNNISATDGSVRPDFERMLKDAPPIVVAFRSSRLSRDVMDTLRLKAAGITGYMEDGGMLDFSSGDATMLTLLRSVIDSAEGQKKSEFQKFRNKADAKEGRWHYARPVFGNDRVTGKLIPSEAKAIREAAALIAAEETTFFKTAKLWNELGFRTPKSGNAGGRLWEPGTVRNFFTAPRLIGKRVYDGETYDMTQNGWEPVLDEDTFNTIQELITANKTGKRGKQGSRNMPHLLTGIATCEVCGKGMNVGYRGGAGSAKAYRCTTPGHVSRVAEPFEKWIVEKFLYLLMHEGAEQVVSPDTHGSATKLRLERVKEVREYTEWRKKASKSRLDPEFLELAQDEHKAKLADIDAQLLEVLRETSFSGLLPDIATEGPEAMWTRWESVPMEKKRAVIKSLFSEVVVKKAPQGRRFRPEYIKLVPTDLMLQLTALNVQGEEVSDELAELLGLPAL

SEQ ID NO: 32892 - DNA, 50 bp, Paenarthrobacter ureafaciens
  source 1..50: mol_type = genomic DNA
aaggggtacccaaatatctttggtcatcaatggatatttgggtacccttc

SEQ ID NO: 32893 - DNA, 40 bp, Paenarthrobacter ureafaciens
  source 1..40: mol_type = genomic DNA
catcaaggtgatcatgacccaacccggaacgtcgccccgt

SEQ ID NO: 32894 - DNA, 40 bp, Paenarthrobacter ureafaciens
  source 1..40: mol_type = genomic DNA
catcaaggtgatcatgaccatacccggaacgtcgccccgt

SEQ ID NO: 32895 - DNA, 50 bp, Paenarthrobacter ureafaciens
  source 1..50: mol_type = genomic DNA
aatgagtactactgtgtcttttggattcaatgaatactactgtgtctttc

SEQ ID NO: 32896 - protein, 550 aa, Streptococcus pyogenes
MSKEKIKVYLYTRVSTSIQIEGYSLEAQKSRMKAFAIYNNYEIVGEYEDAGKSGKSIEGRIQFNRMMEDIKSGKDGVSFVLVFKLSRFARNAADVLSTLQIMQDYGVNLICVEDGIDSSKDAGKLMISVLSAVAEIERENIRIQTMEGRIQKAKEGKWNGGFAPYGYKLEDGKLFINEEEAVAIRTIFDQYVNTTIGANGLSKYLENHGIRKIPRQNGKNPLFDAGLIRKILKNPVYNGKIAFGRRTLEKVHGTRNEYKQVEQDEYLISEGIHEAIVSDEVWQAAQVKLKSQAKKYEHVNKGKDTRTHLLSGIVKCPICGAGMFGNKCTKKKKDGTKYKDFYYYGCKHRQMIRGHKCTFRKQIREELLDDAVAEVIVKIVSNPKFASMMQEKINMKVDTSEIEKEIDNYQKELRKSHSTKFKLIEEIDNLDVEDKHYKRRKQDLDDRLYRMYDKIDELESSLIDAKAKKQTIEAEKLTGDNIYKVLIYFDKLYKVMNDVERRQLITALISEIQIYEEKQPNGQWLKSITFKLPIIDDDLNISLDNDEYVE

SEQ ID NO: 32897 - DNA, 50 bp, Streptococcus pyogenes
  source 1..50: mol_type = genomic DNA
agtttggacaatgatgaatatgttgagacggtagcacttttgtccaaact

SEQ ID NO: 32898 - DNA, 40 bp, Streptococcus pyogenes
  source 1..40: mol_type = genomic DNA
tccgcaaacgcatcacgtcgagtgcgtagtgttgctaatc

SEQ ID NO: 32899 - DNA, 40 bp, Streptococcus pyogenes
  source 1..40: mol_type = genomic DNA
tccgcaaacgcatcacgtcgtgtgcgtagtgttgctaatc

SEQ ID NO: 32900 - DNA, 50 bp, Streptococcus pyogenes
  source 1..50: mol_type = genomic DNA
agtgtgaactaatatgaagttgttgtgatggttgcataattgttcaaata

SEQ ID NO: 32901 - protein, 550 aa, Streptococcus pyogenes
MSKEKIKVYLYTRVSTSIQIEGYSLEAQKSRMKAFAIYNNYEIVGEYEDAGKSGKSIEGRIQFNRMMEDIKSGKDGVSFVLVFKLSRFARNAADVLSTLQIMQDYGVNLICVEDGIDSSKDAGKLMISVLSAVAEIERENIRIQTMEGRIQKAKEGKWNGGFAPYGYKLEDGKLFINEEEAVAIRTIFDQYVNTTIGANGLSKYLENHGIRKIPRQNGKNPLFDAGLIRKILKNPVYNGKIAFGRRTLEKVHGTRNEYKQVEQDEYLISEGIHEAIVSDEVWQAAQVKLKSQAKKYEHVNKGKDTRTHLLSGIVKCPICGAGMFGNKCTKKKKDGTKYKDFYYYGCKHRQMIRGHKCTFRKQIREELLDDAVAEVIVKIVSNPKFAFMMQEKINMKVDTSEIEKEIDNYQKELRKSHSTKFKLIEEIDNLDVEDKHYKRRKQDLDDRLYRMYDKIDELESSLIDAKAKKQTIEAEKLTGDNIYKVLIYFDKLYKVMNDVERRQLITALISEIQIYEEKQPNGQWLKSITFKLPIIDDDLNISLDNDEYVE

SEQ ID NO: 32902 - DNA, 50 bp, Streptococcus pyogenes; identical to SEQ ID NO: 32897
  source 1..50: mol_type = genomic DNA

SEQ ID NO: 32903 - DNA, 40 bp, Streptococcus pyogenes; identical to SEQ ID NO: 32898
  source 1..40: mol_type = genomic DNA

SEQ ID NO: 32904 - DNA, 40 bp, Streptococcus pyogenes; identical to SEQ ID NO: 32899
  source 1..40: mol_type = genomic DNA

SEQ ID NO: 32905 - DNA, 50 bp, Streptococcus pyogenes; identical to SEQ ID NO: 32900
  source 1..50: mol_type = genomic DNA

SEQ ID NO: 32906 - protein, 593 aa, Psychroserpens burtonensis
MVGIYCRISGDKMDGIDTSIEYQEERGIEFSGKLEMKYEVYKDINVSGKAEIFSRDEFHRFIGDIKAKKITHVFAIHQDRIERNPDTWRYFVSTILNVGAKWYPEGKFYDLDSTTNRAMANLLSVFNEMHSDKTSDAVKVAFYRNALKGKTHGVNAYGITKDDNGLMVHESEEIKIVKNIFEWSLNGIGAYSIAKKLNELNVPTRFAKLNKHRTTIEVSTGIKIKHKNKLWWGSTIHGILKKKLYAGIHIWNKEEISLPHLAIISLNEYNAIQKNLKKNKRTKSGKKPIYKYLLNGLVFCKECGFMYKGKRRLSDRRNQYICSGKQAPLHVCKGGKGFNIPRFETFIIKHLFLSKNLQKRLNNIEVDTVEIDTLTFKNNELIRKLKSAEKLETKAFNYLFEDEDDLSNDARLKAKYKEAKDKVFKYKESLEQVKTELSIQNDNNRLTRVNSAIEGFKIDSGFEAIKATVQQLIESIEVMYIPHEKNGEFWFVIKYKGFNETSVWKTNQQLIQYNLIGYQKTSNTLTNTIPGFTIPKEFKDFMDSDPYRKQHFEELIDRLKKSDEQNQNKDYVQMEFGYLDTIKITKNELIIFD

SEQ ID NO: 32907 - DNA, 50 bp, Psychroserpens burtonensis
  source 1..50: mol_type = genomic DNA
gcagcatttattatacatttaaacatattaatgcgtttaataagtgctgc

SEQ ID NO: 32908 - DNA, 40 bp, Psychroserpens burtonensis
  source 1..40: mol_type = genomic DNA
tgcagcaaaacgaatcaatatgtatttacggtggatggtg

SEQ ID NO: 32909 - DNA, 40 bp, Psychroserpens burtonensis
  source 1..40: mol_type = genomic DNA
tgcagcaaaacgaatcaataagtatttacggtggatggtg

SEQ ID NO: 32910 - DNA, 50 bp, Psychroserpens burtonensis
  source 1..50: mol_type = genomic DNA
gactcagtataacaacatttaaacaaattaatgtgcagggaaagtcctga

SEQ ID NO: 32911 - protein, 406 aa, Clostridium saccharoperbutylacetonicum
MVGAPIFKEFIISVTKHSPWASKPDSLASAIFRYNSSLLGFDSALNIFAACCEFSHLLVWKIDRISRNLLDFCSMYDELKKYNCIFVSKNEQFDTSTAMGEAMLKIILVFAELERKLTGERVTSVMLDRASKGLWTGAPIPPGYKWDETIKFPIIDDEEKNTVDIIFKTYSKTESSSAVTKLLNTNGIKTKRDGRWTTKTICDVIRNPFYKGTYRYNYRIPGHGKVKNQDEWIIIPNNHAGIISEELWEECNKIMDINANKNSARFRRTSKIHIFAGLLECGECNNRSDKTSLDGFTPGLYTCSGRYNHLGCSQKTISDTIIGNFTLNFISNIIKSYKEKGSSISLDDLERKLLSGTCFKDIVGISEIEDLYNSIFYSQSNTFKPYKEGKTESNIIDIDSNKFEAE

SEQ ID NO: 32912 - DNA, 50 bp, Clostridium saccharoperbutylacetonicum
  source 1..50: mol_type = genomic DNA
ttcttcttttcttctactaacggacatccgaaagtagaaataaagaagaa

SEQ ID NO: 32913 - DNA, 40 bp, Clostridium saccharoperbutylacetonicum
  source 1..40: mol_type = genomic DNA
atcttcttcattcatttgacatccatacgtttgaataaag

SEQ ID NO: 32914 - DNA, 40 bp, Clostridium saccharoperbutylacetonicum
  source 1..40: mol_type = genomic DNA
atcttcttcattcatttgatttccatacgtttgaataaag

SEQ ID NO: 32915 - DNA, 50 bp, Clostridium saccharoperbutylacetonicum
  source 1..50: mol_type = genomic DNA
tttttctttgcctttgctcagggatttactaaggcaaaggcaaagaaaaa

SEQ ID NO: 32916 - protein, 673 aa, Vibrio alginolyticus
MIGEETLREEIFQYDKAKFKGICVPYARFSTKGQSKVGKKSLERQLSKAREYAKRNNLFINEDLIFTDKGVSGYSNQGELSKAFKKGQMATMLLLLEEVPPEERDNVYITFHNFDRFSRMSPDAAQAHFNKILNRGFKIVTTIDNQLYDRRDKGMSNMLISIIKMTTAWQESLNKSIYITDALSRKKKVIEYLYNHPSQKGKHKHIGVVQPSIPRWIDQENITYEYIDADGSKRTDTFKKFSLNQYKAEVVRKIFELKIAGLGYTRICQKLNNDGVEVFEQGRFKKAKKWHPYAVQNIITSDKVLGHITLKEMVTEEYHCKETDEIKTKKVKKEVTSKLENYYPSVVDEEVFRLANVLKFQEKKGKPLGRIGERTNIFATFMSCYCGATLQYSRSQINKRSNKAPIYREQLRCNNALVKNGCFDDYINYVELEQAFFKYVHHIDFREVCLVGDKSLETEIKNLQAEITYLNGQKKELKLKNSGLEKTFESAISQGLNADYVLVALNEAKKSADLIETKINDLKVRITKLQLSLDSKESDFLDIVEYSKRIKNSSTETKIMMRKKLNDFLHSKIKWMEVCSSKHSKFVILCFHDDVIRTFAYSENYANDLMFNTIKISYEVEDSQLNYELFLIYIHQIKRSLRGETEVVSNGDLIEALQRLKRKFYAGKGIDYV

SEQ ID NO: 32917 - DNA, 50 bp, Vibrio alginolyticus; identical to SEQ ID NO: 11822
  source 1..50: mol_type = genomic DNA

SEQ ID NO: 32918 - DNA, 40 bp, Vibrio alginolyticus
  source 1..40: mol_type = genomic DNA
ctcaccgactttgatgtctttcaaagtaaaccaaccgagc

SEQ ID NO: 32919 - DNA, 40 bp, Vibrio alginolyticus
  source 1..40: mol_type = genomic DNA
ctcaccgactttgatgtctatcaaagtaaaccaaccgagc

SEQ ID NO: 32920 - DNA, 50 bp, Vibrio alginolyticus
  source 1..50: mol_type = genomic DNA
gtgtgtgtgtgtatatatatatatatatataaactctagcttactaacag

SEQ ID NO: 32921 - protein, 673 aa, Vibrio alginolyticus
MIGEETLREEIFQYDKAKFKGICVPYARFSTKGQSKVGKKSLERQLSKAREYAKRNNLFINEDLIFTDKGVSGYSNQGELSKAFKKGQMATMLLLLEEVPPEERDNVYITFHNFDRFSRMSPDAAQAHFNKILNRGFKIVTTIDNQLYDRRDKGMSNMLISIIKMTTAWQESLNKSIYITDALSRKKKVIEYLYNHPSQKGKHKHIGVVQPSIPRWIDQENITYEYIDADGSKRTDTFKKFSLNQYKAEVVRKIFELKIAGLGYTRICQKLNNDGVEVFEQGRFKKAKKWHPYAVQNIITSDKVLGHITLKEMVTEEYHCKETDEIKTKKVKKEVTSKLENYYPSVVDEEVFRLANVLKFQEKKGKPLGRIGERTNIFATFMSCYCGSTLQYSRSQINKRSNKTPVYREQLRCNNALVKNGCFDDYINYVELEQAFFKYVHHIDFREVCLVGDKSLETEIKNLQAEITYLNGQKKELKLKNSGLEKTFESAISQGLNADYVLVALNEAKKSADLIETKINDLKVRITKLQLSLDSKESDFLDIVEYSKRIKNSSTETKIMMRKKLNDFLHSKIKWMEVCSSKHSKFVILCFHDDVIRTFAYSENYANDLMFNTIKISYEVEDSQLNYELFLIYIHQIKRSLRGETEVVSNGDLIEALQRLKRKFYAGKGIDYV

SEQ ID NO: 32922 - DNA, 50 bp, Vibrio alginolyticus; identical to SEQ ID NO: 11822
  source 1..50: mol_type = genomic DNA

SEQ ID NO: 32923 - DNA, 40 bp, Vibrio alginolyticus; identical to SEQ ID NO: 32918
  source 1..40: mol_type = genomic DNA

SEQ ID NO: 32924 - DNA, 40 bp, Vibrio alginolyticus; identical to SEQ ID NO: 32919
  source 1..40: mol_type = genomic DNA

SEQ ID NO: 32925 - DNA, 50 bp, Vibrio alginolyticus; identical to SEQ ID NO: 32920
  source 1..50: mol_type = genomic DNA

SEQ ID NO: 32926 - protein, 673 aa, Vibrio alginolyticus
MIGEETLREEIFQYDKAKFKGICVPYARFSTKGQSKVGKKSLERQLSKAREYAKRNNLFINEDLIFTDKGVSGYSNQGELSKAFKKGQMATMLLLLEEVPPEERDNVYITFHNFDRFSRMSPDAAQAHFNKILNRGFKIVTTIDNQLYDRRDKGMSNMLISIIKMTTAWQESLNKSIYITDALSRKKKVIEYLYNHPSQKGKHKHIGVVQPSIPRWIDQENITYEYIDADGSKRTDTFKKFSLNQYKAEVVRKIFELKIAGLGYTRICQKLNNDGVEVFEQGRFKKAKKWHPYAVQNIITSDKVLGHITLKEMVTEEYHCKETDEIKTKKVKKEVTSKLENYYPSVVDEEVFRLANVLKFQEKKGKPLGRIGERTNIFATFMSCYCGSTLQYSRSQINKRSNKAPVYREQLRCNNALVKNGCFDDYINYVELEQAFFKYVHHIDFREVCLVGDKSLETEIKNLQAEITYLNGQKKELKLKNSGLEKTFESAISQGLNADYVLVALNEAKKSADLIETKISDLKVRITKLQLSLDSKESDFLDIVEYSKRIKNSSTETKIMMRKKLNDFLHSKIKWMEVCSSKHSKFVILCFHDDVIRTFAYSENYANDLMFNTIKISYEVEDSQLNYELFLIYIHQIKRSLRGETEVVSNGDLIEALQRLKRKFYAGKGIDYV

SEQ ID NO: 32927 - DNA, 50 bp, Vibrio alginolyticus; identical to SEQ ID NO: 11822
  source 1..50: mol_type = genomic DNA

SEQ ID NO: 32928 - DNA, 40 bp, Vibrio alginolyticus; identical to SEQ ID NO: 32918
  source 1..40: mol_type = genomic DNA

SEQ ID NO: 32929 - DNA, 40 bp, Vibrio alginolyticus; identical to SEQ ID NO: 32919
  source 1..40: mol_type = genomic DNA

SEQ ID NO: 32930 - DNA, 50 bp, Vibrio alginolyticus; identical to SEQ ID NO: 32920
  source 1..50: mol_type = genomic DNA

SEQ ID NO: 32931 - protein, 446 aa, Roseburia inulinivorans
MNIAIYPRKSKKDDNSESMEQQIDDCRKYINKTYPDANIIVYSGDYAITGHSTAKRKDFQRMMDDVRAGRINAVVIMRYDRIARNMRDFCNLYHDMESAGCNLISVSQQIDTSTPYGKNFMYQMANMAELEWAIISERYKDTAAYKIREGKAYTGRVPIGFKIEKIDGVKKVVHDNEEQTRAIFDYLLATKSKRGTVLWVRENLIPDFTRHKLDTMIKSDLYIGKVRENDHFCQPYFTKDQMEEIRSVNQIKYAPSGHIYLFSGLFRCPICGRKMSSFYSIDRKTKKHRQYQRCWFGGNEKLHKTKLVSEAKTEKYLLENLDAALKNLEFDVKKEAGKPKRNLNKKLNDAIGERERLNYLFEKGRIDIPEYEKKYSILSGKINSISEELSNNKVVRIEEFKKQIPEDWKELYEQLDQKGKQEFWHRIIKEFYLNEAFEITGFIFYI

SEQ ID NO: 32932 - DNA, 50 bp, Roseburia inulinivorans
  source 1..50: mol_type = genomic DNA
acttgtactaaataactatttcctagcggttaacattaattagtacaagt

SEQ ID NO: 32933 - DNA, 40 bp, Roseburia inulinivorans
  source 1..40: mol_type = genomic DNA
tctttggtttgcatattcgagcgggaatctgaattgtttt

SEQ ID NO: 32934 - DNA, 40 bp, Roseburia inulinivorans
  source 1..40: mol_type = genomic DNA
tctttggtttgcatattcgaccgggaatctgaattgtttt

SEQ ID NO: 32935 - DNA, 50 bp, Roseburia inulinivorans
  source 1..50: mol_type = genomic DNA
tcctgtattttctaagtatttcaaactggttaagtttttcaagtacaagt

SEQ ID NO: 32936 - protein, 507 aa, Escherichia coli
MKRVISYIRFSSEKQAKGDSLRRQSKMVTDWLKAHPEYYLDQDLSFRDLGVSGFTGKHLKGGLGDFLTAIEKGLVKAGDTLLIESLDRLSRQAVDRASELLRNILRSGVDVVTLSDGEHYTSESLKDPLALIKSILIMQRAHEESLRKSERIQAAWDAKKEAAKAGIKVSKRCPAWLKLNDDRKSFSVIPEKVATVKRCFQLRLEGKSIWEIVRTLNDEGHQTLNQYKPGKFGQTSVQDLLKNRSVIGYFTPKGREEIAGYFPPIIPETDFYKVQQLSYSRYGRKPASDKPLSVNLFKGVIRCSECGHALIITGFSDTRSGIYRCPSRNENRCNAKGLSRKQTDGTLLALLSRLDRFDSDMTNTVDTLKLHREHISSNIEKLVQLSLEIEDLSAITSKLKQLKGELSQVDADIEKETQRLKSIDVGCLSDCDLTTKAGRIEAQLIIKSAVKEVVLNTAKRRCKVTFHNGRIIDLPITENPSEDVTEAIQSLSEVTERGLIDVDEVII

SEQ ID NO: 32937 - DNA, 50 bp, Escherichia coli
  source 1..50: mol_type = genomic DNA
tagtgtatttagaccttgatgatttttattatacacatttaaatacacta

SEQ ID NO: 32938 - DNA, 40 bp, Escherichia coli; identical to SEQ ID NO: 5188
  source 1..40: mol_type = genomic DNA

SEQ ID NO: 32939 - DNA, 40 bp, Escherichia coli; identical to SEQ ID NO: 5188
  source 1..40: mol_type = genomic DNA

SEQ ID NO: 32940 - DNA, 50 bp, Escherichia coli
  source 1..50: mol_type = genomic DNA
ttgtgtcttttgaccttacagatttttattataaattgaaaaatgaacta

SEQ ID NO: 32941 - protein, 547 aa, Priestia megaterium
MSKKTAVYTRVSSTKQVEFGTSLNYQQEVCINKAKVMGANDEDIIVYREEGVSGEDIDRPQMNRLREDIKQHKINKIIILHPDRLSRNMVDRLIVCSEFEKYEVGLFFVDSEYKDTEEGKLFFNIQSSIAQYELELIKKRTKRGTISAVKEGKVMPMRFTTYGYDYEDKMLKINEEEAKFVKLIYQWYVYDKLTMREIGEKLYIMGAKTKRNGSRNWSASTIQRILKNETYIGNYYYNRRKSKKVKGEKTASGRKKMEYEYRDKEEWILVKVPPIIDPVTFYLAEDQRAENGKNSGNVKHEYLLKQKIRCGHCGCKYSSYTATSMSRSVRTGEVTSKRQYRKYRCVNATHRKYGEGIERCRAKIIDAQLIEDYIWNNLVMEIVKNGDSILEDIKNTHSKPSQDIQDMYDTLRLRIERLQEEKRRIVQLFKKGYIDEIEMDRDMESVNKGIKEQEKELSKYEKQIFKLGKNETNVKMLGELFIKIKSLVTKKENITFEDKRKVIDLLIDEIIVTWDDNKKDKFRITCTGEIGDWINPEKRSESSTQEE

SEQ ID NO: 32942 - DNA, 50 bp, Priestia megaterium
  source 1..50: mol_type = genomic DNA
gtagtgagtcgagtacacaagaagaaactgttatgaacacaactaactac

SEQ ID NO: 32943 - DNA, 40 bp, Priestia megaterium
  source 1..40: mol_type = genomic DNA
gcttgtgacttataatgggaaatctttcgattggcctcac

SEQ ID NO: 32944 - DNA, 40 bp, Priestia megaterium
  source 1..40: mol_type = genomic DNA
gcttgtgacttataatggggaatctttcgattggcctcac

SEQ ID NO: 32945 - DNA, 50 bp, Priestia megaterium
  source 1..50: mol_type = genomic DNA
agagtaatttctgtacacaagaaggaacagttatgaaacattcaaaccag

SEQ ID NO: 32946 - protein, 516 aa, Bacillus cereus
MYRPDSLDVCIYLRKSRKDVEEERRALEEGSSYNALERHRKRLFAIAKAENHNIIDIFEEVASGESIQERPQMQQLLRKLEGNEIDGVLVIDLDRLGRGDMLDAGMIDRAFRYSSTKIITPTDVYDPDDESWELVFGIKSLISRQELKSITRRLQNGRIDSVKEGKHIGKKPPYGYLKDENLRLYPDPEKAWIVKKIFELMCDGKGRQMIAAELDRLGIDPPVTKRGAWDSSTITSIIKNEVYTGVIVWGKFKHKKRNGKYTRHKNPQEKWIMYENAHEPIISKELFDAANEAHSSRHKPAVITSKELTNPLAGILKCKLCGYTMLIQTRKDRPHNYLRCNNPACKGKQKQSVFNLVEEKLLYSLQQIVDEYQAQKVEEVEIDDSKLISFKEKAIISKEKELKELQTQKGNLHDLLEQGIYTVEIFLERQKNLVERITSIENDVEVLQKEIEIEQVKEHNKTEFIPALKTVIESYHKTTNVELKNQLLKTILSTVTYYRHPDWKANEFEIQVYFKI

SEQ ID NO: 32947 - DNA, 50 bp, Bacillus cereus
  source 1..50: mol_type = genomic DNA
cgtgtacatggtggagtattaaactggtttaactctctaccatgtacact

SEQ ID NO: 32948 - DNA, 40 bp, Bacillus cereus; identical to SEQ ID NO: 6233
  source 1..40: mol_type = genomic DNA

SEQ ID NO: 32949 - DNA, 40 bp, Bacillus cereus
  source 1..40: mol_type = genomic DNA
tgtactgtggcgattgtacaaattcacttccccataccca

SEQ ID NO: 32950 - DNA, 50 bp, Bacillus cereus
  source 1..50: mol_type = genomic DNA
cctgtagaaaactcagtataaaaaaaatttaactctatccaattaatact

SEQ ID NO: 32951 - protein, 540 aa, Erysipelotrichaceae bacterium I46
MKQPYNTTIYNTALYMRLSRDDELQGESGSIQTQRMMLRQYAAEHGLNVIDEYIDDGWSGTNFDRPDFQRMIDDIEDRKINCVVTKDLSRLGRNYILTGQYTEIYFPSKGVRYIAVNDNVDTINGENELAPFLNILNEMHARQTSKKVKAAMRTRFANGAHYGAYAPLGYVKDPDKKGHLLIDPETRWIIEKIFDLAVHGRGAASITRILVEEKVPTPGWLNFQRYGTFANIYAGAPEEKAYAWTIAQVKSILKEETYIGHSVHNKQTNISFKNKKKVRKPKEEWYRVENTHEAIISEDVFRQVQEQICNRRRRQKNGTTQIFSGLVKCADCGWSLAYGVNSQNKNPYAHYHCSKYGQGLHQCSMHYIRYDVLYAYVLSRLQYWSVLAQQDGDKLLKRLLNASDKERNTARKRQTAELKKAEKRKAEVDTLFAKMYEDWSAGRITEYNFNMLSEKYQGEQRELDAKIERLHEAMEVAAQTAVDAEKWIGLMKQYVNPTELTAELLNTLIEKILVHEAVKSEDGSREQEVEIFYRFIGKIE

SEQ ID NO: 32952 - DNA, 50 bp, Erysipelotrichaceae bacterium I46; identical to SEQ ID NO: 13292
  source 1..50: mol_type = genomic DNA

SEQ ID NO: 32953 - DNA, 40 bp, Erysipelotrichaceae bacterium I46
  source 1..40: mol_type = genomic DNA
agtgagtaaatgggagcacggcagcagctgtcccgatata

SEQ ID NO: 32954 - DNA, 40 bp, Erysipelotrichaceae bacterium I46
  source 1..40: mol_type = genomic DNA
agtgagtaaatgggagcacctcagcagctgtcccgatata

SEQ ID NO: 32955 - DNA, 50 bp, Erysipelotrichaceae bacterium I46
  source 1..50: mol_type = genomic DNA
gaacaccttgaatgaaggggaaggctgggttcccttgaggaaggacccca

SEQ ID NO: 32956 - protein, 540 aa, Hungatella hathewayi
MKQPYNTTIYNTALYMRLSRDDELQGESGSIQTQRMMLRQYAAEHGLNVIDEYIDDGWSGTNFDRPDFQRMIDDIEDGKINCVVTKDLSRLGRNYILTGQYTEIYFPSKGVRYIAVNDNVDTINGENELAPFLNILNEMHARQTSKKVKAAMRTRFANGAHYGAYAPLGYVKDPDKKGHLLIDPETRWIIEKIFDLAVHGRGAASITRILVEEKVPTPGWLNFQRYGTFANIYAGAPEEKAYAWTIAQVKSILKEETYIGHSVHNKQTNISFKNKKKVRKPKEEWYRVENTHEAIISEDVFRQVQEQICNRRRRQKNGTTQIFSGLVKCADCGWSLAYGVNSQNKNPYAHYHCSKYGQGLHQCSMHYIRYDVLYAYVLSRLQYWSVLAQQDGDKLLKRLLNASDKERNTARKRQTAELKKVEKRKAEVDTLFAKMYEDWSAGRITEYNFNMLSEKYQGEQRELDAKIERLHEAMEAAAQTAVDAEKWIGLMKQYVNPTELTAELLNTLIEKILVHEAVKNEDGSREQEVEIFYRFIGKIE

SEQ ID NO: 32957 - DNA, 50 bp, Hungatella hathewayi; identical to SEQ ID NO: 13292
  source 1..50: mol_type = genomic DNA

SEQ ID NO: 32958 - DNA, 40 bp, Hungatella hathewayi
  source 1..40: mol_type = genomic DNA
agtctcccggtgggaaacaggaatgaatatgccagattta

SEQ ID NO: 32959 - DNA, 40 bp, Hungatella hathewayi
  source 1..40: mol_type = genomic DNA
agtctcccggtgggaaacactaatgaatatgccagattta

SEQ ID NO: 32960 - DNA, 50 bp, Hungatella hathewayi; identical to SEQ ID NO: 32955
  source 1..50: mol_type = genomic DNA

SEQ ID NO: 32961 - protein, 540 aa, Mordavella massiliensis
MKQPYNTTIYNTALYMRLSRDDELQGESGSIQTQRMMLRQYAAEHSLNVIDEYIDDGWSGTNFDRPDFQRMIDDIEDGKINCVVTKDLSRLGRNYILTGQYTEIYFPSKGVRYIAVNDNVDTINGENELAPFLNILNEMHARQTSKKVKAAMRTRFANGAHYGAYAPLGYVKDPDKKGHLLIDPETRWIIEKIFDLAVHGRGAASITRILVEEKVPTPGWLNFQRYGTFANIYAGAPEEKAYAWTIAQVKSILKEETYIGHSVHNKQTNISFKNKKKVRKPKEEWYRVENTHEAIISEDVFRQVQEQICNRRRRQKNGTTQIFSGLVKCADCGWSLAYGENRQNSKPYGHYHCSKYGQGLHQCSMHYIRYDVLYAYVLSRLQYWSVLAQQDGDKLLKRLLNASDKERNTARKRQTAELKKAEKRKAEVDTLFAKMYEDWSAGRITEYNFNMLSEKYQGEQRELDAKIERLHKAMEAAAQTAVDAEKWIGLMKQYVNPTELTAELLNTLIEKILVHEAVKSEDGSREQEVEIFYRFIGKIE

SEQ ID NO: 32962 - DNA, 50 bp, Mordavella massiliensis; identical to SEQ ID NO: 13292
  source 1..50: mol_type = genomic DNA

SEQ ID NO: 32963 - DNA, 40 bp, Mordavella massiliensis
  source 1..40: mol_type = genomic DNA
tgtcagtaagtgggagaaaggcgctgcgtatccggatatt

SEQ ID NO: 32964 - DNA, 40 bp, Mordavella massiliensis
  source 1..40: mol_type = genomic DNA
tgtcagtaagtgggagaaactcgctgcgtatccggatatt

SEQ ID NO: 32965 - DNA, 50 bp, Mordavella massiliensis; identical to SEQ ID NO: 32955
  source 1..50: mol_type = genomic DNA

SEQ ID NO: 32966 - protein, 470 aa, Drancourtella sp An57
MIDDIEDGKINCVVTKDLSRLGRNYILTGQYTEIYFPSKGVRYIAVNDNVDTINGENELAPFLNILNEMHARQTSKKVKAAMRTRFANGAHYGAYAPLGYVKDPDKKGHLLIDPETRWIIEKIFDLAVHGRGAASITRILVEEKVPTPGWLNFQRYGTFANIYAGAPEEKAYAWTIAQVKSILKEETYIGHSVHNKQTNISFKNKKKVRKPKEEWYRVENTHEAIISEDVFRQVQEQICNRRRRQKNGTTQIFSGLVKCADCGWSLAYGVNSQNKNPYAHYHCSKYGQGLHQCSMHYIRYDVLYAYVLSRLQYWSVLAQQDGDKLLKRLLNASDKERNTARKRQTAELKKAEKRKAEVDTLFAKMYEDWSAGRITEYNFNMLSEKYQGEQRELDAKIERLHEAMEAAAQTAVDAEKWIGLMKQYVNPTELTAELLNTLIEKILVHEAVKGEDGSREQEVEIFYRFIGKIE

SEQ ID NO: 32967 - DNA, 50 bp, Drancourtella sp An57
  source 1..50: mol_type = genomic DNA
caatatctttaactaagggaaacggggggttcacttaaataaagatacca

SEQ ID NO: 32968 - DNA, 40 bp, Drancourtella sp An57
  source 1..40: mol_type = genomic DNA
agtctcaaaatgggagcttggagtatccaagccggacgtg

SEQ ID NO: 32969 - DNA, 40 bp, Drancourtella sp An57
  source 1..40: mol_type = genomic DNA
agtctcaaaatgggagcttctagtatccaagccggacgtg

SEQ ID NO: 32970 - DNA, 50 bp, Drancourtella sp An57; identical to SEQ ID NO: 32955
  source 1..50: mol_type = genomic DNA

SEQ ID NO: 32971 - protein, 561 aa, Ruminococcus albus
MSVWYCFDLKGVTMAKQTIYNAGIYVRLSQEDMRAGESLSIENQKLILTKYVKEQGWNLVDTYVDDGWSGTDFDRPAVQRLLSDAQSGKINLIICKDLSRFGRNYIEVGRYVDYIFPSYNIRFIALNDNVDTASKDTSALDMMPIVNLFNEWHAASTSKKIKAVIEANAKAGKYRTTCAPFGYTKGDDPNHLPVIDPDAAPIVRNIFEMRASGISPHHIADKLNEDGVPIPSDYYYTKLGKPNPRRTRHMWSPETVRQILHNYTYLGHLVQLRTRTVSYKNHKVIKNDEDDMIVVKNTHEPIVSQELWDRVREMEQSVSQGKRNSSGYVANLSGLIYCQDCGNKVRLAWNNTTNGSKKKPRKYLRHNYNCTSYMKFGKRYCPSHYIKMQDIDAIVLEDIRSLAQLVVEDKEKAKAEFLARKAKHHEEQYSVDTKKLSDGKFRLQELDTLIQNIYEDKVLGKVSEDVAMKLIAKYETEQKELSAEVAELEEKFSTIRQDEEDVAMFMERLRRYTDVQELTREMCLELIEYITLDAYVEGQPREIYIYYKLLDEPLKDKRSLF

SEQ ID NO: 32972 - DNA, 50 bp, Ruminococcus albus
  source 1..50: mol_type = genomic DNA
tcagagctatagtcaagatgacccgtacgggaattgaaatgaatttttga

SEQ ID NO: 32973 - DNA, 40 bp, Ruminococcus albus
  source 1..40: mol_type = genomic DNA
gaacgttgaatggtgacccgtacgggaattgaacccatga

SEQ ID NO: 32974 - DNA, 40 bp, Ruminococcus albus
  source 1..40: mol_type = genomic DNA
gaacgttgaatggtgaccctaacgggaattgaacccatga

SEQ ID NO: 32975 - DNA, 50 bp, Ruminococcus albus
  source 1..50: mol_type = genomic DNA
acagagaacctagcaagatgaccgtaaggggaaatgttagaaattctaga

SEQ ID NO: 32976 - protein, 557 aa, Pseudomonas lactis
MPKAYAYVRWSTASQGEEGRDSHDRQTTPLQAFTDVTGVPVVETVIDKGISAFRGANARIGQLKGLLDRIESGEIEHGDYIIVESIDRLTRQKLTDSVDLIQSILKKGVRLHTVFDNKTYSYDDPSRDLETLILVGVIAKRAHEESDTKSKRLKSVWVKKRDTAETNVIGKRCPYGFRFDEQSQSFVIVEEEAQEIRQIFELLKHVGVLESVKQVNKNSKRRWTRTSVLHLINSKSPIGVLRLQRRNENGTKAFDRYVPDYFPKIIDEIEFSAAVAAMKTRLNGRKYGRRTPHHYNIFRHCIQCEEHKCGMIFNLQILGTEKKRYAYLVCSNRAERVCECDNRIRFELVFGTFLAFVKQLSENRYIDERTDKKRKDFTWFSQDRYNQMDTVNDAFSRFFSVRDTSAPKEEIRAKKAKLTTEKTTLEMLEASLAQFDGIIPNTFIRRVADSEARITVLESEIQKLEGSLAIEAETLEITTYEDIIALYETEEGRLKLNTFFITRGITFDVKIDKETNLVGMDIRIKGEKDFNLYTHQFFKQKAPLTPFGIPDLSHIIK

SEQ ID NO: 32977 - DNA, 50 bp, Pseudomonas lactis
  source 1..50: mol_type = genomic DNA
ttattataaagagctagaccctgcgaccacggtaagctattttctaataa

SEQ ID NO: 32978 - DNA, 40 bp, Pseudomonas lactis
  source 1..40: mol_type = genomic DNA
gctcagcattgccccggatgaaatgggcgtaatcaacagt

SEQ ID NO: 32979 - DNA, 40 bp, Pseudomonas lactis
  source 1..40: mol_type = genomic DNA
gctcagcattgccccggattcaatgggcgtaatcaacagt

SEQ ID NO: 32980 - DNA, 50 bp, Pseudomonas lactis
  source 1..50: mol_type = genomic DNA
ttataatcacattttagaaactcctcccactgtaaggctccttttcagaa

SEQ ID NO: 32981 - protein, 553 aa, Pseudoalteromonas distincta; identical to SEQ ID NO: 12266

SEQ ID NO: 32982 - DNA, 50 bp, Pseudoalteromonas distincta; identical to SEQ ID NO: 12267
  source 1..50: mol_type = genomic DNA

SEQ ID NO: 32983 - DNA, 40 bp, Pseudoalteromonas distincta
  source 1..40: mol_type = genomic DNA
atctacggctattacaggccagccaaaggctgtgttgagt

SEQ ID NO: 32984 - DNA, 40 bp, Pseudoalteromonas distincta
  source 1..40: mol_type = genomic DNA
atctacggctattacaggctggccaaaggctgtgttgagt

SEQ ID NO: 32985 - DNA, 50 bp, Pseudoalteromonas distincta
  source 1..50: mol_type = genomic DNA
aacctcccttctctaccttttaactggcaaatgtatcagtgtaagagata

SEQ ID NO: 32986 - protein, 487 aa, Ruthenibacterium lactatiformans
MNAVIYARYSSDNQREESIEGQLRECKEYAERSGMNVVATYIDRALSAKTDDRPQFQQMIRDSNTHKFEVVLVWKLDRFSRNRYDSANYKRKLAQNHVRVVSATEPISNTPEGIMLESLLEGMAEYYSAELSEKVSRGHKENALKAKFNGGTIPLGYRIDENQHYQIDPATAPLVLETFERYADGECVRKIVESFNARGLRTSRGAPFSINSFQAILKNRRYLGEYRYKDTVIPDAIPAIITPEVFEKVQRRCEQNKKAPAHTKTDVNYMLTTKLFCGKCGAMMAGESGKSHTGAWHYYYKCGNHKRHGRSVCDLKAVRKEPLERFVVKVAIEKVLKTDTLELLAQKLLEYQNKENTRLPVLQAGLKDISKRINNIVSAIEQGIFTPATKQRLDELEEQRKELEASILQEQITKPLLTREQILFWFERFRQGDPSDPAYQQKIIDCFVNSVYIFDDRLVINFNYRDGDKLVSLQEVKSSFLGGNRSP

SEQ ID NO: 32987 - DNA, 50 bp, Ruthenibacterium lactatiformans
  source 1..50: mol_type = genomic DNA
agttcgtttttgggtggaaatcgttcaccattaccagcaaactcgaactt

SEQ ID NO: 32988 - DNA, 40 bp, Ruthenibacterium lactatiformans
  source 1..40: mol_type = genomic DNA
ggttcgaatccccgatggctcaccacttcggaatggactg

SEQ ID NO: 32989 - DNA, 40 bp, Ruthenibacterium lactatiformans; identical to SEQ ID NO: 32988
  source 1..40: mol_type = genomic DNA

SEQ ID NO: 32990 - DNA, 50 bp, Ruthenibacterium lactatiformans
  source 1..50: mol_type = genomic DNA
agttggtttcactatagaaatctttcaactttgccagaggtttgaaactt

SEQ ID NO: 32991 - protein, 541 aa, Klebsiella quasipneumoniae
MPKAISYIRFSTKIQSVGDSTKRQSKYINDWLKRNPDYYLDESLRFQDLGISGFSGANAKSGAFGEFLAAVESGYIESGSVLLVESLDRVSRQDIDTAGEQLRKILRSGVEVVTLVDNEWYTKESLKDSLSMIKAMLVMERAHEESAMKSTRLRSMWAAKRERAANGEIMSKRCAAWLKVSEDRSHFEFITENVKAVQRVFQLRLEGLSHIKIAKQMNDEGFYTLNQHKSVKGGWSQSSVTELLSNRSVIGFKVPSKSMAVKGVSEIPNYYPAIITDEQFYAVQQLKQGSGRKPSSDLPLLTNLFKGVLRCSECGFIVVVAGVSAKRSGIYKCSMKSEGRCNSVGFSRLQTDRALVQGLLYNTNRLSLNRDNGSAIGTLQSDLEQLQKQRERLIKLAMLADDTESMAKDLKALNSQIKDAEKAVSEVHQREQSSQLETVSHLDLTVKKDRIEAQIITKRIVKEIRLNTAQKKCDVFLHNGLKLLNFPLDRVVDGAQWIEILPLIDGDEFDFGGFTTKPRHIALEEAPEWVKEMEEQSNYLL

SEQ ID NO: 32992 - DNA, 50 bp, Klebsiella quasipneumoniae
  source 1..50: mol_type = genomic DNA
gtgtatcaatagaaaggtctcttcaggattacacctttcttatgatacac

SEQ ID NO: 32993 - DNA, 40 bp, Klebsiella quasipneumoniae
  source 1..40: mol_type = genomic DNA
gtggaccgggcggctgtcgaggatcacgcggttgacgttg

SEQ ID NO: 32994 - DNA, 40 bp, Klebsiella quasipneumoniae
  source 1..40: mol_type = genomic DNA
gtggaccgggcggctgtcgcagatcacgcggttgacgttg

SEQ ID NO: 32995 - DNA, 50 bp, Klebsiella quasipneumoniae; identical to SEQ ID NO: 1340
  source 1..50: mol_type = genomic DNA

SEQ ID NO: 32996 - protein, 518 aa, Klebsiella quasipneumoniae
MPKAISYIRFSTKIQSVGDSTKRQSKYINDWLKRNPDYYLDESLRFQDLGISGFSGANAKSGAFGEFLAAVESGYIEAGSVLLVESLDRVSRQDIDTAGEQLRKILRSGVEVVTLVDNEWYTKESLKDSLSMIKAMLVMERAHEESAMKSTRLRSMWAAKRERAANGEIMSKRCAAWLKVSDDRSHFEFIPENVKAVQRVFQLRLEGLSHVKIAKQMNDEGFSTLNQFKSVTGGWSQSSVTELLSNRSVIGFKVPSKSMAVKGVSEIPNYYPSIITDEQFYAVQQLKQGSGRKPSSDLPLLTNLFKGVLRCSECGFIVVVAGVSAKRSGIYKCSMKSEERCNSVGFSRLQTDRALVQGLLYNTNRLSLNRDNGSAIGTLQSELEQLQKQRERLIKLAMLADDTESMAKDLKALNSQIKDAEKAVSEVHQREQSSQLETISHLDLTLKKDRIEAQIIIKRIVKEIRLNTAQKKCDVFLHNGLKLLNFPLDRVVDGEIFLEVLPLLEADEFDFDTYRVIE

SEQ ID NO: 32997 - DNA, 50 bp, Klebsiella quasipneumoniae; identical to SEQ ID NO: 32992
  source 1..50: mol_type = genomic DNA

SEQ ID NO: 32998 - DNA, 40 bp, Klebsiella quasipneumoniae; identical to SEQ ID NO: 8148
  source 1..40: mol_type = genomic DNA

SEQ ID NO: 32999 - DNA, 40 bp, Klebsiella quasipneumoniae; identical to SEQ ID NO: 8149
  source 1..40: mol_type = genomic DNA

SEQ ID NO: 33000 - DNA, 50 bp, Klebsiella quasipneumoniae; identical to SEQ ID NO: 1340
  source 1..50: mol_type = genomic DNA

SEQ ID NO: 33001 - protein, 540 aa, Klebsiella quasipneumoniae
MPKAISYIRFSTKIQSVGDSTKRQSKYINDWLKRNPDYYLDESLRFQDLGISGFSGANARSGAFGEFLAAVESGYIEAGSVLLVESLDRVSRQDIDTAGEQLRKILRSGVEVVTLVDNEWYTKESLKDSLSMIKAMLVMERAHEESAMKSTRLRSVWAAKRERAAKGEIMSKRCAAWLKVSEDRSHFEFIPENVKAVQRVFQLRLEGLSHVKIAKQMNDEGFSTLNQFKSVTGGWSQSSVTELLSNRSVIGFKVPSKSMAVKGVSEIPNYYPSIITDEQFYAVQQLKQGSGRKPSSDLPLLTNLFKGVLRCSECGFIVVVAGVSAKRSGIYKCSMKSEGRCNSVGFSRLQTDRALVQGLLYNANRLFLNRDNGSAIGALQGELEQLQKQRERLIKLAMLADDTESMAKDLKALNSQIKDAEKAVSEVHQREQSSQLETISHLDLTVKKDRIEAQIIIKRIVKEIRLNTAEKKCDVLLHNGLRLLNFPLDRVVDGAQWLEILPLIDGDEFDFEGFSAKPRHLAFEEAPEWVKELEFNSKIQ

SEQ ID NO: 33002 - DNA, 50 bp, Klebsiella quasipneumoniae; identical to SEQ ID NO: 32992
  source 1..50: mol_type = genomic DNA

SEQ ID NO: 33003 - DNA, 40 bp, Klebsiella quasipneumoniae
  source 1..40: mol_type = genomic DNA
atggaccgggcggctgtcgaggatcacgcggttgacgctg

SEQ ID NO: 33004 - DNA, 40 bp, Klebsiella quasipneumoniae
  source 1..40: mol_type = genomic DNA
atggaccgggcggctgtcgcagatcacgcggttgacgctg

SEQ ID NO: 33005 - DNA, 50 bp, Klebsiella quasipneumoniae; identical to SEQ ID NO: 1340
  source 1..50: mol_type = genomic DNA

SEQ ID NO: 33006 - protein, 541 aa, Klebsiella quasipneumoniae
MPKAISYIRFSTKIQSVGDSTKRQSKYINDWLKRNPDYYLDESLRFQDLGISGFSGANAKSGAFGEFLAAVESGYIESGSVLLVESLDRVSRQDIDTAGEQLRKILRSGVEVVTLVDNEWYTKESLKDSLSMIKAMLVMERAHEESAMKSTRLRSVWAAKRERAAKGEIMSKRCAAWLKVSEDRSHFEFIPENVKAVQRVFQLRLEGLSHVKIAKQMNDEGFSTLNQFKSVTGGWSQSSVTELLSNRSVIGFKVPSKSMAVKGVSEIPNYYPSIITDEQFYAVQQLKQSSGRRPSSDLPLLTNLFKGVLRCSECGFIVVVAGVSAKRSGIYKCSMKSEGRCNSVGFSRLQTDRALVQGLLYNTNRLSLNRDNGSAIGTLQSELEQLQKQRERLIKLAMLADDTESMAKDLKALNSQIKDAEKAVSEVHQREQSSQLETISHLDLAVKKDRIEAQIIIKRIVKEIRLNTAGKKCDVFLNNGLKLLNFPLDRVVDGAQWLEVLPLIDGDEFDFEGFTTKPQHIALEEAPEWVKEMEEQPNQPL

SEQ ID NO: 33007 - DNA, 50 bp, Klebsiella quasipneumoniae; identical to SEQ ID NO: 32992
  source 1..50: mol_type = genomic DNA

SEQ ID NO: 33008 - DNA, 40 bp, Klebsiella quasipneumoniae; identical to SEQ ID NO: 33003
  source 1..40: mol_type = genomic DNA

SEQ ID NO: 33009 - DNA, 40 bp, Klebsiella quasipneumoniae; identical to SEQ ID NO: 33004
  source 1..40: mol_type = genomic DNA

SEQ ID NO: 33010 - DNA, 50 bp, Klebsiella quasipneumoniae; identical to SEQ ID NO: 1340
  source 1..50: mol_type = genomic DNA

SEQ ID NO: 33011 - protein, 540 aa, Klebsiella quasipneumoniae
MPKAISYIRFSTKIQSVGDSTKRQSKYINDWLKRNPDYYLDESLRFQDLGISGFSGANARSGAFGEFLAAVESGYIEAGSVLLVESLDRVSRQDIDTAGEQLRKILRSGVEVVTLVDNEWYTKESLKDSLSMIKAMLVMERAHEESAMKSTRLRSVWAAKRERAAKGEIMSKRCAAWLKVSEDRSHFEFIPENVKAVQRVFQLRLEGLSHVKIAKQMNDEGFSTLNQFKSVTGGWSQSSVTELLSNRSVIGFKVPSKSMAVKGVSEIPNYYPSIITDEQFYAVQQLKQGSGRKPSSDLPLLTNLFKGVLRCSECGFIVVVAGVSAKRSGIYKCSMKSEGRCNSVGFSRLQTDRALVQGLLYNANRLFLNRDNGSAIGALQGELEQLQKQRERLIKLAMLADDTESMAKDLKALNSQIKDAEKAVSEVHQREQSSQLETISHLDLTVKKDRIEAQIIIKRIVKEIRLNTAEKKCDVLLHNGLRLLNFPLDRVVDGAQWLEILPLIDGDEFDFEGFSTKPRHLAFEEAPEWVKELEFNSKIQ

SEQ ID NO: 33012 - DNA, 50 bp, Klebsiella quasipneumoniae; identical to SEQ ID NO: 32992
  source 1..50: mol_type = genomic DNA

SEQ ID NO: 33013 - DNA, 40 bp, Klebsiella quasipneumoniae; identical to SEQ ID NO: 32993
  source 1..40: mol_type = genomic DNA

SEQ ID NO: 33014 - DNA, 40 bp, Klebsiella quasipneumoniae; identical to SEQ ID NO: 32994
  source 1..40: mol_type = genomic DNA

SEQ ID NO: 33015 - DNA, 50 bp, Klebsiella quasipneumoniae; identical to SEQ ID NO: 1340
  source 1..50: mol_type = genomic DNA

SEQ ID NO: 33016 - protein, 541 aa, Klebsiella quasipneumoniae
MPKAISYIRFSTKIQSVGDSTKRQSKYINDWLKRNPDYYLDESLRFQDLGISGFSGANAKSGAFGEFLAAVESGYIEAGSVLLVESLDRVSRQDIDTAGEQLRKILRSGVEVVTLVDNEWYTKESLKDSLSMIKAMLVMERAHEESAMKSTRLRSMWAAKRERAANGEIMSKRCAAWLKVSDDRSHFEFIPENVKAVQRVFQLRLEGLSHVKIAKQMNDEGFSTLNQFKSVTGGWSQSSVTELLSNRSVIGFKVPSKSMAVKGVSEIPDYYPAIISEQQFYAVQQLKQGSGRKPSSDLPLLTNLFKGVLRCSECGFIVVVAGVSAKRSGIYKCSMKSEGRCNSVGFSRLQTDRALVQGLFYNTNRLSLNRRNGSAIGSLQSELEQLQKQRERLIKLAMLADDTESMAKDLKALNSQIKDAEKAVSEVHQREQSSQLETISHLDLTVKKDRIEAQIIIKRIVKEIRLNTAGKKCNVFLHNGLKLLNFPLDRVVDGAQWLEILPLIDGDEFDFEGFTTKPRHLVLEEAPEWVKEIEAQPNQPQ

SEQ ID NO: 33017 - DNA, 50 bp, Klebsiella quasipneumoniae; identical to SEQ ID NO: 32992
  source 1..50: mol_type = genomic DNA

SEQ ID NO: 33018 - DNA, 40 bp, Klebsiella quasipneumoniae; identical to SEQ ID NO: 33003
  source 1..40: mol_type = genomic DNA

SEQ ID NO: 33019 - DNA, 40 bp, Klebsiella quasipneumoniae; identical to SEQ ID NO: 33004
  source 1..40: mol_type = genomic DNA

SEQ ID NO: 33020 - DNA, 50 bp, Klebsiella quasipneumoniae; identical to SEQ ID NO: 1340
  source 1..50: mol_type = genomic DNA

SEQ ID NO: 33021 - protein, 540 aa, Klebsiella quasipneumoniae
MPKAISYIRFSTKIQSVGDSTKRQSKYINDWLKRNPDYYLDETLRFQDLGISGFSGANAKSGAFGEFLAAVESGYIEAGSVLLVESLDRVSRQDIDTAGEQLRKILRSGVEVVTLVDNEWYTKESLKDSLSMIKAMLVMERAHEESAMKSTRLRSVWAAKRERAAKGEIMSKRCAAWLKVSEDRSRFEFIPENVKAVQRVFQLRLEGLSHVKIAKQMNDEGFSTLNQFKSVTGGWSQSSVTELLSNRSVIGFKVPSKSMAVKGVSEIPNYYPSIITDEQFYAVQQLKQGSGRKPSSDLPLLTNLFKGVLRCSECGFIVVVAGVSAKRSGIYKCSMKSEGRCNSVGFSRLQTDRALVQGLLYNANRLFLNRDNGSAIGALQGELEQLQKQRERLIKLAMLADDTESMAKDLKALNSQIKDAEKAVSEVHQREQSSQLETISHLDLTVKKDRIEAQIIIKRIVKEIRLNTAEKKCDVLLHNGLRLLNFPLDMVVDGAQWLEILPLIDGDEFDFEGFSTKPRHLAFEEAPEWVKELEFNSKIQ

SEQ ID NO: 33022 - DNA, 50 bp, Klebsiella quasipneumoniae; identical to SEQ ID NO: 32992
  source 1..50: mol_type = genomic DNA

SEQ ID NO: 33023 - DNA, 40 bp, Klebsiella quasipneumoniae; identical to SEQ ID NO: 32993
  source 1..40: mol_type = genomic DNA

SEQ ID NO: 33024 - DNA, 40 bp, Klebsiella quasipneumoniae; identical to SEQ ID NO: 32994
  source 1..40: mol_type = genomic DNA

SEQ ID NO: 33025 - DNA, 50 bp, Klebsiella quasipneumoniae; identical to SEQ ID NO: 1340
  source 1..50: mol_type = genomic DNA

SEQ ID NO: 33026 - protein, 541 aa, Klebsiella quasipneumoniae
MPKAISYIRFSTKIQSVGDSTKRQSKYINDWLKRNPDYYLDESLRFQDLGISGFSGANAKSGAFAEFLAAVESGYIEAGSVLLVESLDRVSRQDIDTAGEQLRKILRSGVEVVTLVDNEWYTKESLKDSLSMIKAMLVMERAHEESAMKSTRLRSVWAAKRERAANGEIMSKRCAAWLKVSEDRSHFEFIPENVKAVQRVFQLRLEGLSHVKIAKQMNDEGFSTLNQFKSVTGGWSQSSVTELLSNRSVIGFKVPSKSMAVKGVSEIPNYYPSIITDEQFYAVQQLKQGSGRKPSSDLPLLTNLFKGVLRCSECGFVVVVAGVSAKRSGIYKCSMKSEGRCNSVGFSRLQTDRALVQGLLYNTNRLSLNRDNGSTIGGLQAELEQLQKQRERLIKLAMLADDTESMAKDLKALNSQIKDAEKAVSEVHQREQSSQLETISHLDLTVKKDRIEAQIIIKRIVKEIRLNTAGKKCDVFLHNGLKLLNFPLDRVVDGAQWLEVLPLIDGDEFDFAEFTTKPRHIALEEAPEWVKEMEEQPNQSL

SEQ ID NO: 33027 - DNA, 50 bp, Klebsiella quasipneumoniae; identical to SEQ ID NO: 32992
  source 1..50: mol_type = genomic DNA

SEQ ID NO: 33028 - DNA, 40 bp, Klebsiella quasipneumoniae; identical to SEQ ID NO: 32993
  source 1..40: mol_type = genomic DNA

SEQ ID NO: 33029 - DNA, 40 bp, Klebsiella quasipneumoniae; identical to SEQ ID NO: 32994
  source 1..40: mol_type = genomic DNA

SEQ ID NO: 33030 - DNA, 50 bp, Klebsiella quasipneumoniae; identical to SEQ ID NO: 1340
  source 1..50: mol_type = genomic DNA

SEQ ID NO: 33031 - protein, 518 aa, Enterobacter hormaechei
MPKAISYIRFSTKIQSVGDSTKRQSKYINDWLKRNPDYYLDESLRFQDLGISGFSGANAKSGAFGEFLAAVESGYIESGSVLLVESLDRVSRQDIDTAGEQLRKILRAGVEVVTLVDNEWYTKESLKDSLSMIKAMLVMERAHEESAMKSTRLRSVWAAKRERAANGEIMSKRCAAWLKVSEDRSHFEFIPENVKAVQRVFQLRLEGLSHVKIAKQMNDEGFSTLNQFKSVTGGWSQSSVTELLSNRSVIGYKVPSKSMAVKGVAEISNYYPAIITDEQFYAVQQLKQGSGRKPSSDLPLLTNLFKGVLRCSECGFIVVVAGVSAKRSGIYKCSMKSEGRCNSVGFSRLQTDRALVQGLLYNTNRLSLNRNNGSAIGSLQSELEELHKQRERLIKLAMLADDTESMAKDLKALNSQIKDAEKAVSEVHQREQSSQLETISHLDLTVKKDRIEAQIIIKRIVKEIQLNTAGKKCDVFLHNGLKLLNFPLDRVVDGEIFLEVLPVLEADEFDFDTYRMIE

SEQ ID NO: 33032 - DNA, 50 bp, Enterobacter hormaechei; identical to SEQ ID NO: 32992
  source 1..50: mol_type = genomic DNA

SEQ ID NO: 33033 - DNA, 40 bp, Enterobacter hormaechei
  source 1..40: mol_type = genomic DNA
gtgcacggggcggctgtcgaggatcacgcggttgaccgat

SEQ ID NO: 33034 - DNA, 40 bp, Enterobacter hormaechei
  source 1..40: mol_type = genomic DNA
gtgcacggggcggctgtcgcagatcacgcggttgaccgat

SEQ ID NO: 33035 - DNA, 50 bp, Enterobacter hormaechei; identical to SEQ ID NO: 1340
  source 1..50: mol_type = genomic DNA

SEQ ID NO: 33036 - protein, 541 aa, Enterobacter hormaechei
MPKAISYIRFSTKIQSVGDSTKRQSKYINDWLKRNPDYYLDESLRFQDLGISGFSGANAKSGAFGEFLAAVESGYIEAGSVLLVESLDRVSRQDIDTAGEQLRKILRSGVEVVTLVDNEWYTKESLKDSLSMIKAMLVMERAHEESAMKSTRLRSVWAAKRERAANGEIMSKRCAAWLKVSDDRSHFEFIPENVKAVQRVFQLRLEGLSHVKIAKQMNDEGFSTLNQFKSVTGGWSQSSVTELLSNRSVIGFKVPSKSMAVKGVSEIPNYYPSIITDEQFYAVQQLKQGSGRKPSSDLPLLTNLFKGVLRCSECGFIVVVAGVSTKRSGIYKCSMKSEGRCNSVGFSRLQTDRALVQGLLYNTNRLSLNRDNGSAIGTLQSELEQLQKQRERLIKLAMLADDTESMAKDLKALNSQIKDAEKAVSEVHQREQSSQLETISHLDLTLKKDRIEAQIIIKRIVKEIRLNTAGKKCDVFLHNGLKLLNFPLDRVVDGAQWLEVLPLIDGDEFDFEGFTTKPRHLVLEEAPEWVKEIEAQPNQPL

SEQ ID NO: 33037 - DNA, 50 bp, Enterobacter hormaechei; identical to SEQ ID NO: 32992
  source 1..50: mol_type = genomic DNA

SEQ ID NO: 33038 - DNA, 40 bp, Enterobacter hormaechei
  source 1..40: mol_type = genomic DNA
gtgtacggggcggctgtcgaggatcacgcggttgaccgat

SEQ ID NO: 33039 - DNA, 40 bp, Enterobacter hormaechei
  source 1..40: mol_type = genomic DNA
gtgtacggggcggctgtcgcagatcacgcggttgaccgat

SEQ ID NO: 33040 - DNA, 50 bp, Enterobacter hormaechei; identical to SEQ ID NO: 1340
  source 1..50: mol_type = genomic DNA

SEQ ID NO: 33041 - protein, 541 aa, Enterobacter hormaechei; identical to SEQ ID NO: 33026

SEQ ID NO: 33042 - DNA, 50 bp, Enterobacter hormaechei; identical to SEQ ID NO: 32992
  source 1..50: mol_type = genomic DNA

SEQ ID NO: 33043 - DNA, 40 bp, Enterobacter hormaechei
  source 1..40: mol_type = genomic DNA
gtgcacagggcggctgtcgaggatcacgcggttgaccgat

SEQ ID NO: 33044 - DNA, 40 bp, Enterobacter hormaechei
  source 1..40: mol_type = genomic DNA
gtgcacagggcggctgtcgcagatcacgcggttgaccgat

SEQ ID NO: 33045 - DNA, 50 bp, Enterobacter hormaechei; identical to SEQ ID NO: 1340
  source 1..50: mol_type = genomic DNA

SEQ ID NO: 33046 - protein, 541 aa, Enterobacter hormaechei
MPKAISYIRFSTKIQSVGDSTKRQSKYINDWLKRNPDYYLDESLRFQDLGISGFSGANAKSGAFGEFLAAVESGYIESGSVLLVESLDRVSRQDIDTAGEQLRKILRSGVEVVTLVDNEWYTKESLKDSLSMIKAMLVMERAHEESAMKSTRLRSVWAAKRERAAKGEIMSKRCAAWLKVSEDRSHFEFIPENVKAVQRVFQLRLEGLSHVKIAKQMNDEGFSTLNQFKSVTGGWSQSSVTELLSNRSVIGFKVPSKSMAVKGVSEIPNYYPSIITDEQFYAVQQLKQGSGRRPSSDLPLLTNLFKGVLRCSECGFIVVVAGVSAKRSGIYKCSMKSEGRCNSVGFSRLQTDRALVQGLLYNTYRLSLNHDNGSAIGALQTELEQLQKQRERLIKLAMLADDTESMAKDLKALNSQIKDAEKAVSEVHQREQSSQLETISHLDLTVKKDRIEAQIIIKRIVKEIRLNTAGKKCDVFLHNGLKLLNFPLDRVVDGAQWLEILPLIDGDEFDFEGVTTKPRHLVLEEAPEWVKEIEAQPNQPL

SEQ ID NO: 33047 - DNA, 50 bp, Enterobacter hormaechei; identical to SEQ ID NO: 32992
  source 1..50: mol_type = genomic DNA

SEQ ID NO: 33048 - DNA, 40 bp, Enterobacter hormaechei; identical to SEQ ID NO: 33033
  source 1..40: mol_type = genomic DNA

SEQ ID NO: 33049 - DNA, 40 bp, Enterobacter hormaechei; identical to SEQ ID NO: 33034
  source 1..40: mol_type = genomic DNA

SEQ ID NO: 33050 - DNA, 50 bp, Enterobacter hormaechei; identical to SEQ ID NO: 1340
  source 1..50: mol_type = genomic DNA

SEQ ID NO: 33051 - protein, 541 aa, Klebsiella michiganensis; identical to SEQ ID NO: 33026

SEQ ID NO: 33052 - DNA, 50 bp, Klebsiella michiganensis; identical to SEQ ID NO: 32992
  source 1..50: mol_type = genomic DNA

SEQ ID NO: 33053 - DNA, 40 bp, Klebsiella michiganensis; identical to SEQ ID NO: 8143
  source 1..40: mol_type = genomic DNA

SEQ ID NO: 33054 - DNA, 40 bp, Klebsiella michiganensis; identical to SEQ ID NO: 8144
  source 1..40: mol_type = genomic DNA

SEQ ID NO: 33055 - DNA, 50 bp, Klebsiella michiganensis; identical to SEQ ID NO: 1340
  source 1..50: mol_type = genomic DNA

SEQ ID NO: 33056 - protein, 541 aa, Klebsiella michiganensis
MPKAISYIRFSKKIQSVGDSTKRQSKYINDWLKRNPDYYLDESLRFQDLGISGFSGANAKSGAFGEFLAAVESGYIEAGSVLLVESLDRVSRQDIDTAGEQLRKILRSGVEVVTLVDNEWYTKESLKDSLSMIKAMLVMERAHEESAMKSTRLRSVWAAKRERAAKGEIMSKRCAAWLKVSEDRSRFEFIPENVKAVQRVFQLRLEGLSHVKIAKQMNDEGFSTLNQFKSVTGGWSQSSVTELLSNRSVIGFKVPSKSMAVKGVSEIPNYYPSIITDEQFYSVQQLKQGSGRKPSSDLPLLTNLFKGVLRCSECGFIVVVAGVSAKRSGIYKCSMKSEGRCNSVGFSRLQTDRALVQGLLYNTNRLSLNRDNGSAIGTLQSELEQLQKQRERLIKLAMLADDTESMAKDLKALNSQIKDAEKAVSEVHQREQSSQLETISHLDLTLKKDRIEAQIIIKRIIKEIRLNTAGKKCDVFLHNGLRLLNFPLDRVVDGAQWLEILPLIDGDEFDFEGFSTKPRHLAFEDTPEWVKEMEAQPNQPL

SEQ ID NO: 33057 - DNA, 50 bp, Klebsiella michiganensis; identical to SEQ ID NO: 32992
  source 1..50: mol_type = genomic DNA

SEQ ID NO: 33058 - DNA, 40 bp, Klebsiella michiganensis; identical to SEQ ID NO: 8143
  source 1..40: mol_type = genomic DNA

SEQ ID NO: 33059 - DNA, 40 bp, Klebsiella michiganensis; identical to SEQ ID NO: 8144
  source 1..40: mol_type = genomic DNA

SEQ ID NO: 33060 - DNA, 50 bp, Klebsiella michiganensis; identical to SEQ ID NO: 1340
  source 1..50: mol_type = genomic DNA

SEQ ID NO: 33061 - protein, 540 aa, Klebsiella variicola; identical to SEQ ID NO: 33011

SEQ ID NO: 33062 - DNA, 50 bp, Klebsiella variicola; identical to SEQ ID NO: 32992
  source 1..50: mol_type = genomic DNA

SEQ ID NO: 33063 - DNA, 40 bp, Klebsiella variicola
  source 1..40: mol_type = genomic DNA
gtggaccgggcggctgtcgaggatcacacggttaacgttg

SEQ ID NO: 33064 - DNA, 40 bp, Klebsiella variicola
  source 1..40: mol_type = genomic DNA
gtggaccgggcggctgtcgcagatcacacggttaacgttg

SEQ ID NO: 33065 - DNA, 50 bp, Klebsiella variicola; identical to SEQ ID NO: 1340
  source 1..50: mol_type = genomic DNA

SEQ ID NO: 33066 - protein, 541 aa, Klebsiella variicola
MPKAISYIRFSTKIQSVGDSTKRQSKYINDWLKRNPDYYLDESLRFQDLGISGFSGANAKSGAFGEFLAAVESGYIESGSVLLVESLDRVSRQDIDTAGEQLRKILRAGVEVVTLVDNEWYTKESLKDSLSMIKAMLVMERAHEESAMKSTRLRSVWAAKRERAANGEIMSKRCAAWLKVSEDRSHFEFIPENVKAVQRVFQLRLEGLSHVKIAKQMNDEGFSTLNQFKSVTGGWSQSSVTELLSNRSVIGFKVPSKSMAVKGVSEIPNYYPSIISDEQFYAVQQLKQGSGRKPSSDLPLLTNLFKGVLRCSECGFIVVVAGVSAKRSGIYKCSMKSEGRCNSVGFSRLQTDRALVQGLLYNTNRLSLNRRDGSAIGALQSELEQLQKQRERLIKLAMLADDTESMAKDLKALNSQIRDAEKAVSEVHQREQSSQLETISHLDLTVKKDRIEAQIIIKRIVKEIRLNTAGKKCDVFLHNGLKLYNFPLDRVVDGAQWLEILPLIDGDEFDFEGLTTKPRHIALEEAPEWVKEMEEQPNQPL

SEQ ID NO: 33067 - DNA, 50 bp, Klebsiella variicola; identical to SEQ ID NO: 32992
  source 1..50: mol_type = genomic DNA

SEQ ID NO: 33068 - DNA, 40 bp, Klebsiella variicola
  source 1..40: mol_type = genomic DNA
gtggaccgggcggctatcgaggatcacgcggttaacgttg

SEQ ID NO: 33069 - DNA, 40 bp, Klebsiella variicola
  source 1..40: mol_type = genomic DNA
gtggaccgggcggctatcgcagatcacgcggttaacgttg

SEQ ID NO: 33070 - DNA, 50 bp, Klebsiella variicola; identical to SEQ ID NO: 1340
  source 1..50: mol_type = genomic DNA

SEQ ID NO: 33071 - protein, 541 aa, Klebsiella variicola
MPKAISYIRFSTKIQSVGDSTKRQSKYINDWLKRNPDYYLDESLRFQDLGISGFSGANAKSGAFGEFLAAVESGYIEAGSVLLVESLDRVSRQDIDTAGEQLRKILRSGVEVVTLVDNEWYTKESLKDSLSMIKAMLVMERAHEESAMKSTRLRSVWAAKRERAANGEIMSKRCAAWLKVSDDRSHFEFIPENVKAVQRVFQLRLEGLSHVKIAKQMNDEGFSTLNQFKSVTGGWSQSSVTELLSNRSVIGFKVPSKSMAVKGVSEIPNYYPSIITDEQFYAVQQLKQGSGRKPSSDLPLLTNLFKGVLRCSECGFIVVVAGVSAKRSGIYKCSMKSEGRCNSVGFSRLQTDRALVQGLLYNTNRLSLNRDNGSAIGTLQSELEQLQKQRERLIKLAMLADDTESMAKDLKALNSQIKDAEKAVSEVHQREQSSQLETISHLDLTLKKDRIEAQIIIKRIVKEIRLNTAGKKCDVFLHNGLKLLNFPLDRVVDGAQWLEVLPLIDGDEFDFEGFTTKPRHLVLEEAPEWVKEIEAQPNQPL

SEQ ID NO: 33072 - DNA, 50 bp, Klebsiella variicola; identical to SEQ ID NO: 32992
  source 1..50: mol_type = genomic DNA

SEQ ID NO: 33073 - DNA, 40 bp, Klebsiella variicola
  source 1..40: mol_type = genomic DNA
gtggaccgggcggctgtcgaggatcacgcggttaacgttg

SEQ ID NO: 33074 - DNA, 40 bp, Klebsiella variicola
  source 1..40: mol_type = genomic DNA
gtggaccgggcggctgtcgcagatcacgcggttaacgttg

SEQ ID NO: 33075 - DNA, 50 bp, Klebsiella variicola; identical to SEQ ID NO: 1340
  source 1..50: mol_type = genomic DNA

SEQ ID NO: 33076 - protein, 541 aa, Klebsiella variicola
MPKAISYIRFSTKIQSVGDSTKRQSKYINDWLKRNPDYYLDESLRFQDLGISGFSGANAKSGAFGEFLAAVESGYIESVSVLLVESLDRVSRQDIDTAGEQLRKILRAGVEVVTLVDNEWYTKESLKDSLSMIKAMLVMERAHEESAMKSTRLRSVWAAKRERAANGEIMSKRCAAWLKVSEDRSHFEFIPENVKAVQRVFQLRLEGLSHVKIAKQMNDEGFSTLNQFKSVTGGWSQSSVTELLSNRSVIGFKVPSKSMAVKGVSEIPNYYPSIISDEQFYAVQQLKQGSGRKPSSDLPLLTNLFKGVLRCSECGFIVVVAGVSAKRSGIYKCSMKSEGRCNSVGFSRLQTDRALVQGLLYNTNRLSLNRRDGSAIGALQSELEQLQKQRERLIKLAMLADDTESMAKDLKALNSQIRDAEKAVSEVHQREQSSQLETISHLDLTVKKDRIEAQIIIKRIVKEIRLNTAGKKCDVFLHNGLKLYNFPLDRVVDGAQWLEILPLIDGDEFDFEGLTTKPRHIALEEAPEWVKEMEEQPNQPL

SEQ ID NO: 33077 - DNA, 50 bp, Klebsiella variicola; identical to SEQ ID NO: 32992
  source 1..50: mol_type = genomic DNA

SEQ ID NO: 33078 - DNA, 40 bp, Klebsiella variicola; identical to SEQ ID NO: 33068
  source 1..40: mol_type = genomic DNA

SEQ ID NO: 33079 - DNA, 40 bp, Klebsiella variicola; identical to SEQ ID NO: 33069
  source 1..40: mol_type = genomic DNA

SEQ ID NO: 33080 - DNA, 50 bp, Klebsiella variicola; identical to SEQ ID NO: 1340
  source 1..50: mol_type = genomic DNA

SEQ ID NO: 33081 - protein, 518 aa, Klebsiella variicola
MPKAISYIRFSTKIQSVGDSTKRQSKYINDWLKRNPDYYLDESLRFQDLGISGFSGANAKSGAFGEFLAAVESGYIEAGSVLLVESLDRVSRQDIDTAGEQLRKILRAGVEVVTLVDNEWYTKESLKDSLSMIKAMLVMERAHEESAMKSTRLRSVWAAKRERAAKGEIMSKRCAAWLKVSEDRSHFEFIPENVKAVQRVFQLRLEGLSHIKIAKQMNDEGFYTLNQHKSVKGGWSQSSVTELLSNRSVIGFKVPSKSMAVKGVSEIPNYYPAIITDEQFYAVQQLKQGSGRKPSSDLPLLTNLFKGVLRCSECGFIVVVAGVSAKRSGIYKCSMKSEGRCNSVGFSRLQTDKALVQGLLYNTNRLSLNRDSGSAIGTLQSELEQLQKQRERLIKLAMLADDTESMAKDLKALNSQIKDAEKAVSEVHQREQSSQLETISHLDLTVKKDRIEAQIIIKRIVKEIRLNTAGKKCDVFLHNGLKLLNFPLDRVVDGEIFLEVLPVLEADEFDFDTYRMIE

SEQ ID NO: 33082 - DNA, 50 bp, Klebsiella variicola; identical to SEQ ID NO: 32992
  source 1..50: mol_type = genomic DNA

SEQ ID NO: 33083 - DNA, 40 bp, Klebsiella variicola; identical to SEQ ID NO: 33068
  source 1..40: mol_type = genomic DNA

SEQ ID NO: 33084 - DNA, 40 bp, Klebsiella variicola; identical to SEQ ID NO: 33069
  source 1..40: mol_type = genomic DNA

SEQ ID NO: 33085 - DNA, 50 bp, Klebsiella variicola; identical to SEQ ID NO: 1340
  source 1..50: mol_type = genomic DNA

SEQ ID NO: 33086 - protein, 519 aa, Klebsiella variicola
MPKAISYIRFSTKIQSVGDSTKRQSKYINDWLKRNPDYYLDESLRFQDLGISGFSGANAKSGAFGEFLAAVESGYIEAGSVLLVESLDRVSRQDIDTAGEQLRKILRSGVEVVTLVDNEWYTKESLKDSLSMIKAMLVMERAHEESAMKSTRLRSMWAGKRERAAKGEIMSKRCAAWLKVSEDRSHFEFIPENVKAVQRVFQLRLEGLSHIKIAKQMNDEGFYTLNQHKSVKGGWSQSSVTELLSNRSVIGFKVPSKSMAVKGVSEIPNYYPAIITDEQFYAVQQLKQGSGRKPSSDLPLLTNLFKGVLRCSECGFIVVVAGVSAKRSGIYKCSMKSEGRCNSVGFSRLQTDRALVQGLLYNTNRLSLNRDNGSAIGALQSELEQLQKQRERLIKLAMLADDTESMAKDLKALNSQIKDAEKAVSEVHQREQSSQLETISHLDLTVKKDRVEAQIIIKRIVKEIRLNTAGKKCDVFLHNGLKLLNFPLDRVVDGEIFLEVLPLLEADEFDFDTYRVINP

SEQ ID NO: 33087 - DNA, 50 bp, Klebsiella variicola
  source 1..50: mol_type = genomic DNA
gtgtatcataagaaaggtctcttcaggattacacctttcttatgatacac

SEQ ID NO: 33088 - DNA, 40 bp, Klebsiella variicola; identical to SEQ ID NO: 33063
  source 1..40: mol_type = genomic DNA

SEQ ID NO: 33089 - DNA, 40 bp, Klebsiella variicola; identical to SEQ ID NO: 33064
  source 1..40: mol_type = genomic DNA

SEQ ID NO: 33090 - DNA, 50 bp, Klebsiella variicola; identical to SEQ ID NO: 1340
  source 1..50: mol_type = genomic DNA

SEQ ID NO: 33091 - protein, 541 aa, Raoultella ornithinolytica
MPKAISYIRFSTKIQSVGDSTKRQSKYINDWLKRNPDYYLDESLRFQDLGISGFSGANAKSGAFAEFLAAVESGYIEAGSVLLVESLDRVSRQDIDTAGEQLRKILRSGVEVVTLVDNEWYTKESLKDSLSMIKAMLVMERAHEESAMKSTRLRSVWAAKRERAANGEIMSKRCAAWLKVSEDRSHFEFIPENVKAVQRVFQLRLEGLSHVKIAKQMNDEGFSTLNQFKSVTGGWSQSSVTELLSNRSVIGFKVPSKSMAVKGVSEIPNYYPSIITDEQFYAVQQLKQGSGRKPSSDLPLLTNLFKGVLRCSECGFVVVVAGVSAKRSGIYKCSMKSEGRCNSVGFSRLQTDRALVQGLLYNTNRLSLNRDNGSTIGGLQAELEQLQKQRERLIKLAMLADDTESMAKDLKALNSQIKDAEKAVSEVHQREQSSQLETISHLELTVKKDRIEAQIIIKRIVKEIRLNTAGKKCDVFLHNGLKLLNFPLDRVVDGAQWLEVLPLIDGDEFDFAEFTTKPRHIALEEAPEWVKEMEEQPNQSL

SEQ ID NO: 33092 - DNA, 50 bp, Raoultella ornithinolytica; identical to SEQ ID NO: 32992
  source 1..50: mol_type = genomic DNA

SEQ ID NO: 33093 - DNA, 40 bp, Raoultella ornithinolytica
  source 1..40: mol_type = genomic DNA
atgcaccgggcggctgtcgaggatggcgcgattcacgtga

SEQ ID NO: 33094 - DNA, 40 bp, Raoultella ornithinolytica
  source 1..40: mol_type = genomic DNA
atgcaccgggcggctgtcgcagatggcgcgattcacgtga

SEQ ID NO: 33095 - DNA, 50 bp, Raoultella ornithinolytica; identical to SEQ ID NO: 1340
  source 1..50: mol_type = genomic DNA

SEQ ID NO: 33096 - protein, 518 aa, Serratia marcescens
MPKAISYIRFSTKIQSVGDSTKRQSKYINDWLKRNPDYYLDESLRFQDLGISGFSGANAKSGAFGEFLAAVESGYIEAGSVLLVESLDRVSRQDIDTAGEQLRKILRSGVEVVTLVDNEWYTKESLKDSLSMIKAMLVMERAHEESAMKSTRLRSVWAAKRERAAKGEIMSKRCAAWLKVSEDRSHFEFIPENVKAVQRVFQLRLEGLSHIKIAKQMNDEGFSTLNQFKSVTGGWSQSSVTELLSNRSVIGFKVPSKSMAVKGVSEIPNYYPSIITDEQFYAVQQLKQGSGRKPSSDLPLLTNLFKGVLRCSECGFIMVVAGVSAKRSGIYKCSMKSEGRCNSVGFSRLQTDRALVQGLLYNTNRLSLNRDNGSAIGSLQSDLEKLHKQRERLIKLAMLADDTESMAKDLKALNSQIKDAEKAVSEVHQREQSSQLETISHLDLTVKKDRIEAQIIIKRIVKEIRLNTARKKCDVFLHNGLRLLNFPLDRVVDGEIFLEVLPVLEADEFDFDTYRMIE

SEQ ID NO: 33097 - DNA, 50 bp, Serratia marcescens; identical to SEQ ID NO: 32992
  source 1..50: mol_type = genomic DNA

SEQ ID NO: 33098 - DNA, 40 bp, Serratia marcescens
  source 1..40: mol_type = genomic DNA
atgcaccgggcggctgtcgaggatcacccgattgatgccg

SEQ ID NO: 33099 - DNA, 40 bp, Serratia marcescens
  source 1..40: mol_type = genomic DNA
atgcaccgggcggctgtcgcagatcacccgattgatgccg

SEQ ID NO: 33100 - DNA, 50 bp, Serratia marcescens; identical to SEQ ID NO: 1340
  source 1..50: mol_type = genomic DNA

SEQ ID NO: 33101 - protein, 541 aa, Raoultella planticola; identical to SEQ ID NO: 33071

SEQ ID NO: 33102 - DNA, 50 bp, Raoultella planticola; identical to SEQ ID NO: 32992
  source 1..50: mol_type = genomic DNA

SEQ ID NO: 33103 - DNA, 40 bp, Raoultella planticola
  source 1..40: mol_type = genomic DNA
atgcaccgggcggctgtcgaggatggcgcgattcacgtta

SEQ ID NO: 33104 - DNA, 40 bp, Raoultella planticola
  source 1..40: mol_type = genomic DNA
atgcaccgggcggctgtcgcagatggcgcgattcacgtta

SEQ ID NO: 33105 - DNA, 50 bp, Raoultella planticola; identical to SEQ ID NO: 1340
  source 1..50: mol_type = genomic DNA

SEQ ID NO: 33106 - protein, 541 aa, Cronobacter sakazakii
MPKAISYIRFSTKIQSVGDSTKRQSKYINDWLKRNPDYYLDESLRFQDLGISGFSGANAKSGAFGEFLAAVESGYIEAGSVLLVESLDRVSRQDIDTAGEQLRKILRSGVEVVTLVDNEWYTKESLKDSLSMIKAMLVMERAHEESAMKSTRLRSMWAAKRERAAKGEIMSKRCAAWLKVSEDRSHFEFIPENVKAVQRVFQLRLEGLSHIKIAKQMNDEGFYTLNQHKSVKGGWSQSSVTELLSNRSVIGFKVPSKSMAVKGVSEIPNYYPSIITDEQFYAVQQLKQGSGRKPSSDLPLLTNLFKGVLRCSECGFIVVVAGVSAKRSGIYKCSMKSEGRCNSVGFSRLQTDRALVQGLLYNTNRLSLNRDNGSAIGSLQSELEQLQKQRERLIKLAMLADDTESMAKDLKALNSQIKDAEKAVSEVHQREQSSQLETISHLDLTVKKDRIEAQIIIKRIVKEIRLNTAGKKCDVFLHNGLKLLNFPLDRVVDGAQWLEVLPLIDGDEFDFVEFTTKPRHIALEEAPDWVKEMDEQSNQPL

SEQ ID NO: 33107 - DNA, 50 bp, Cronobacter sakazakii; identical to SEQ ID NO: 32992
  source 1..50: mol_type = genomic DNA

SEQ ID NO: 33108 - DNA, 40 bp, Cronobacter sakazakii
  source 1..40: mol_type = genomic DNA
atgtaccggacggctgtcgagcatcacgcggttaacgccg

SEQ ID NO: 33109 - DNA, 40 bp, Cronobacter sakazakii
  source 1..40: mol_type = genomic DNA
atgtaccggacggctgtcgcacatcacgcggttaacgccg

SEQ ID NO: 33110 - DNA, 50 bp, Cronobacter sakazakii; identical to SEQ ID NO: 1340
  source 1..50: mol_type = genomic DNA

SEQ ID NO: 33111 - protein, 518 aa, Cronobacter sakazakii
MPKAISYIRFSTKIQSVGDSTKRQSKYINDWLKRNPDYYLDESLRFQDLGISGFSGANAKSGAFGEFLAAVESGYIEAGSVLLVESLDRVSRQDIDTAGEQLRKILRSGVEVVTLVDNEWYTKESLKDSLSMIKAMLVMERAHEESAMKSTRLRSVWAAKRERAAKGEIMSKRCAAWLKVSEDRSRFEFIPENVKAVQRVFQLRLEGLSHVRIAKQMNDEGFSTLNQFKSVTGGWSQSSVTELLSNRAVIGVKVPSKSMVIKGVSEIPNYYPSIITDEQFYAVQQLKQGSGRKPSSDLPLLTNLFKGVLRCSECGFIVVVAGVSAKRSGIYKCSMKSEGRCNSVGFSRLQTDRALVQGLLYNTNRLSLNRGNGSAIGSLQSELEELHKQRERLIKLAMLADDTESMAKDLKALNSQIKEAEKAVSEVHQREQSSQLETISHLDLTVKKNRIEAQIIIKRIVKEIRLNTAGKKCDVFLHNGLKLLNFPLDRVVDGEIFLEVLPVLDCDEFDFDTYRMIE

SEQ ID NO: 33112 - DNA, 50 bp, Cronobacter sakazakii; identical to SEQ ID NO: 32992
  source 1..50: mol_type = genomic DNA

SEQ ID NO: 33113 - DNA, 40 bp, Cronobacter sakazakii; identical to SEQ ID NO: 33108
  source 1..40: mol_type = genomic DNA

SEQ ID NO: 33114 - DNA, 40 bp, Cronobacter sakazakii; identical to SEQ ID NO: 33109
  source 1..40: mol_type = genomic DNA

SEQ ID NO: 33115 - DNA, 50 bp, Cronobacter sakazakii; identical to SEQ ID NO: 1340
  source 1..50: mol_type = genomic DNA

SEQ ID NO: 33116 - protein, 518 aa, Cronobacter sakazakii
MPKAISYIRFSTKIQSVGDSTKRQSKYINDWLKRNPDYYLDESLRFQDLGISGFSGANAKSGAFGEFLAAVESGYIEAGSVLLVESLDRVSRQDIDTAGEQLRKILRSGVEVVTLVDNEWYTKESLKDSLSMIKAMLVMERAHEESAMKSTRLRSVWAAKRERAAKGEIMSKRCAAWLKVSEDRSHFEFIPENVKAVQRVFQLRLEGLSHVKIAKQMNDEGFSTLNQFKSVTGGWSQSSVTELLSNRSVIGFKVPSKSMAVKGVSEIPNYYPSIITDEQFYAVQQLKQGSGRKPSSDLPLLTNLFKGVLRCSECGFIVVVAGVSAKRSGIYKCSMKSEGRCNSVGFSRLQTDRALVQGLLYNTNRLSLNRDNGSAIGTLQSELEQLQKQRERLIKLAMLADDTESMAKDLKALNSQIKDAEKAVSEVHQREQSSQLETISHLDLTLKKDRIEAQIIIKRIVKEIRLNTAQKKCDVFLHNGLKLLNFPLDRVVDGEIFLEVLPLLEADELDLDTYRVIE

SEQ ID NO: 33117 - DNA, 50 bp, Cronobacter sakazakii; identical to SEQ ID NO: 32992
  source 1..50: mol_type = genomic DNA

SEQ ID NO: 33118 - DNA, 40 bp, Cronobacter sakazakii; identical to SEQ ID NO: 33108
  source 1..40: mol_type = genomic DNA

SEQ ID NO: 33119 - DNA, 40 bp, Cronobacter sakazakii; identical to SEQ ID NO: 33109
  source 1..40: mol_type = genomic DNA

SEQ ID NO: 33120 - DNA, 50 bp, Cronobacter sakazakii; identical to SEQ ID NO: 1340
  source 1..50: mol_type = genomic DNA

SEQ ID NO: 33121 - protein, 541 aa, Klebsiella aerogenes
MPKAISYIRFSTKIQSVGDSTKRQSKYINDWLKRNPDYYLDESLRFQDLGISGFSGANAKSGAFGEFLAAVESGYIEAGSVLLVESLDRVSRQDIDTAGEQLRKILRSGVEVVTLVDNEWYTKESLKDSLSMIKAMLVMERAHEESAMKSTRLRSMWAAKRERAAKGEIMSKRCAAWLKVSEDRSHFEFIPENVKAVQRVFQLRLEGLSHVKIAKQMNDEGFSTLNQFKSVTGGWSQSSVTELLSNRSVIGFKVPSKSMAVKGVSEIPNYYPSIITDEQFYAVQQLKQGSGRKPSSDLPLLTNLFKGVLRCSECGFIVVVAGVSAKRSGIYKCSMKSEGRCNSVGFSRLQTDRALVQGLLYNTNRLALNRDNGSAIGSLQSELEQLQKQRERLIKLAMLADDTESMAKDLKALNSQIKDAEKAVSEVHQREQSSQLETISHLDLTVKKDRIEAQIIIKRIVKEIRLNTARKKCDVFLHNGLKLLNFPLDRVVDGAQWLEVLPLIDGDEFDFEGFTTKPQHIALEEAPEWVKEMEEQPNQPL

SEQ ID NO: 33122 - DNA, 50 bp, Klebsiella aerogenes; identical to SEQ ID NO: 32992
  source 1..50: mol_type = genomic DNA

SEQ ID NO: 33123 - DNA, 40 bp, Klebsiella aerogenes
  source 1..40: mol_type = genomic DNA
atgtaccgggcggctatcgaggatcacgcggttggcgttg

SEQ ID NO: 33124 - DNA, 40 bp, Klebsiella aerogenes
  source 1..40: mol_type = genomic DNA
atgtaccgggcggctatcgcagatcacgcggttggcgttg

SEQ ID NO: 33125 - DNA, 50 bp, Klebsiella aerogenes; identical to SEQ ID NO: 1340
  source 1..50: mol_type = genomic DNA

SEQ ID NO: 33126 - protein, 541 aa, Klebsiella aerogenes
MPKAISYIRFSTKIQSVGDSTKRQSKYINDWLKRNPDYYLDESLRFQDLGISGFSGANAKSGAFGEFLAAVESGYIEAGSVLLVESLDRVSRQDIDTAGEQLRKILRSGVEVVTLVDNEWYTKESLKDSLSMIKAMLVMERAHEESAMKSTRLRSVWAAKRERAAKGEIMSKRCAAWLKVSEDRSHFEFIPENVKAVQRVFQLRLEGLSHVKIAKQMNDEGFSTLNQFKSVTGGWSQSSVTELLSNRSVIGFKVPSKSMAVKGVSEIPNYYPSIITDEQFYAVQQLKQGSGRKPSSDLPLLTNLFKGVLRCSECGFIVVVAGVSAKRSGIYKCSMKSEGRCNSVGFSRLQTDKSLVQGLLYNTNRLSLNRNNGSAIGTLQSELEQLQKQRERLIKLAMLADDTESMAKDLKALNSQIKDAEKAVSEVHQREQSSQLETISHLDLTVKKDRIEAQIIIKRIVKEIRLNTAGKKCDVFLHNGLKLLNFPLDRVVDGAQWLEVLPLIDGDEFDFEGFTTKPQHIALEEAPEWVKDMEEQSNQPL

SEQ ID NO: 33127 - DNA, 50 bp, Klebsiella aerogenes
  source 1..50: mol_type = genomic DNA
gtgtattaatagaaaggtctcttcaggattacacctttcttatgatacac

SEQ ID NO: 33128 - DNA, 40 bp, Klebsiella aerogenes; identical to SEQ ID NO: 33123
  source 1..40: mol_type = genomic DNA

SEQ ID NO: 33129 - DNA, 40 bp, Klebsiella aerogenes; identical to SEQ ID NO: 33124
  source 1..40: mol_type = genomic DNA

SEQ ID NO: 33130 - DNA, 50 bp, Klebsiella aerogenes; identical to SEQ ID NO: 1340
  source 1..50: mol_type = genomic DNA

SEQ ID NO: 33131 - protein, 518 aa, Klebsiella aerogenes
MPKAISYIRFSTKIQSVGDSTKRQSKYINDWLKRNPDYYLDESLRFQDLGISGFSGANAKSGAFGEFLAAVEYGYIEAGSVLLVESLDRVSRQDIDTAGEQLRKILRSGVEVVTLVDNEWYTKESLKDSLSMIKAMLVMERAHEESAMKSTRLRSMWAAKRERAANGEIMSKRCAAWLKVSQDRSHFEFIPENVKAVQRVFQLRLEGLSHVKIAKQMNDEGFSTLNQFKSVTGGWSQSSVTELLSNRSVIGFKVPSKSMAVKGVSEIPNYYPSIITDEQFYAVQQLKQGSGRKPSSDLPLLTNLFKGVLRCSECGFIMVVAGVSAKRSGIYKCSMKSEGRCNSVGFSRLQTDRALVQGLLYNTNRLSLNRDNGSAIGSLQSDLEKLHKQRERLIKLAMLADDTESMAKDLKALNSQIKDAEKAVSEVHQREQSSQLETISHLDLTVKKDRIEAQIIIKRIVKEIRLNTARKKCDVFLHNGLRLLNFPLDRVVDGEIFLEVLPVLEADEFDFDTYRMIE

SEQ ID NO: 33132 - DNA, 50 bp, Klebsiella aerogenes; identical to SEQ ID NO: 32992
  source 1..50: mol_type = genomic DNA

SEQ ID NO: 33133 - DNA, 40 bp, Klebsiella aerogenes; identical to SEQ ID NO: 33123
  source 1..40: mol_type = genomic DNA

SEQ ID NO: 33134 - DNA, 40 bp, Klebsiella aerogenes; identical to SEQ ID NO: 33124
  source 1..40: mol_type = genomic DNA

SEQ ID NO: 33135 - DNA, 50 bp, Klebsiella aerogenes; identical to SEQ ID NO: 1340
  source 1..50: mol_type = genomic DNA

SEQ ID NO: 33136 - protein, 540 aa, Klebsiella aerogenes
MPKAISYIRFSTKIQSVGDSTKRQSKYINDWLKRNPDYYLDESLRFQDLGISGFSGANAKSGAFGEFLAAVESGYIEAGSVLLVESLDRVSRQDIDTAGEQLRKILRSGVEVVTLVDNEWYTKESLKDSLSMIKAMLVMERAHEESAMKSTRLRSVWAAKRERAAKGEIMSKRCAAWLKVSEDRSHFEFIPENVKAVQRVFQLRLEGLSHVKIAKQMNDEGFSTLNQFKSVTGGWSQSSVTELLSNRSVIGFKVPSKSMAVKGVSEIPNYYPSIITDEQFYAVQQLKQGSGRKPSSDLPLLTNLFKGVLRCSECGFIVVVAGVSAKRSGIYKCSMKSEGRCNSVGFSRLQTDRALVQGLLYNTNRLSLNRDNGSAIGSLQSELEHLQKQRERLIKLAMLADDTESMAKDLKALNSQIKDAEKAVSEVHQREQSSQLETISHLDLTVKKDRIEAQIIIKRIVKEIRLNTARKKCDVFLHNGLRLLNFPLDRVVDGAQWLEVLPLIDGDEFDFEGFITKPRHVALEEAPEWVKEMEEQSNQP

SEQ ID NO: 33137 - DNA, 50 bp, Klebsiella aerogenes; identical to SEQ ID NO: 32992
  source 1..50: mol_type = genomic DNA

SEQ ID NO: 33138 - DNA, 40 bp, Klebsiella aerogenes
  source 1..40: mol_type = genomic DNA
atgtaccggacggctatcgaggatcacgcggttcactttg

SEQ ID NO: 33139 - DNA, 40 bp, Klebsiella aerogenes
  source 1..40: mol_type = genomic DNA
atgtaccggacggctatcgcagatcacgcggttcactttg

SEQ ID NO: 33140 - DNA, 50 bp, Klebsiella aerogenes; identical to SEQ ID NO: 1340
  source 1..50: mol_type = genomic DNA

SEQ ID NO: 33141 - protein, 541 aa, Klebsiella aerogenes
MPKAISYIRFSTKIQSVGDSTKRQSKYINDWLKRNPDYYLDELLRFQDLGISGFSGANAKSGAFGEFLAAVESGYIESGSVLLVESLDRVSRQDIDTAGEQLRKILRAGVEVVTLVDNEWYTKESLKDSLSMIKAMLVMERAHEESAMKSTRLRSVWAAKRERAANGEIMSKRCAAWFKVSEDRSHFEFIPENVKAVQRVFQLRLEGLSHVKIAKQMNDEGFSTLNQFKSVTGGWSQSSVTELLSNRSVIGFKVPSKSMAVKGVSEIPNYYPSIISDEQFYAVQQLKQGSGRKPSSDLPLLTNLFKGVLRCSECGFIVVVAGVSAKRSGIYKCSMKSEGRCNSVGFSRLQTDRALVQGLLYNTNRLSLNRRDGSAIGALQSELEQLQKQRERLIKLAMLADDTESMAKDLKALNSQIRDAEKAVSEVHQREQSSQLETISHLDLTVKKDRIEAQIIIKRIVKEIRLNTAGKKCDVFLHNGLKLYNFPLDRVVDGAQWLEILPLIDGDEFDFEGLTTKPRHIALEEAPEWVKEMEEQPNQPL

SEQ ID NO: 33142 - DNA, 50 bp, Klebsiella aerogenes; identical to SEQ ID NO: 32992
  source 1..50: mol_type = genomic DNA

SEQ ID NO: 33143 - DNA, 40 bp, Klebsiella aerogenes; identical to SEQ ID NO: 33123
  source 1..40: mol_type = genomic DNA

SEQ ID NO: 33144 - DNA, 40 bp, Klebsiella aerogenes; identical to SEQ ID NO: 33124
  source 1..40: mol_type = genomic DNA

SEQ ID NO: 33145 - DNA, 50 bp, Klebsiella aerogenes; identical to SEQ ID NO: 1340
  source 1..50: mol_type = genomic DNA

SEQ ID NO: 33146 - protein, 541 aa, Klebsiella aerogenes
MPKAISYIRFSTKIQSVGDSTKRQSKYINDWLKRNPDYYLDESLRFQDLGISGFSGANAKSGAFGEFLAAVESGYIEAGSVLLVESLDRVSRQDIDTAGEQLRKILRSGVEVVTLVDNEWYTKESLKDSLSMIKAMLVMERAHEESAMKSTRLRSVWAAKRERAAKGEIMSKRCAAWLKVSEDRSRFEFIPENVKAVQRVFQLRLEGLSHVKIAKQMNDEGFSTLNQFKSVTGGWSQSSVTELLSNRSVIGFKVPSKSMAVKGVSEIPNYYPSIITDEQFYAVQQLKQGSGRKPSSDLPLLTNLFKGVLRCSECGFIVVVAGVSAKRSGIYKCSMKSEGRCNSVGFSRLQTDRALVQGLLYNTNRLSLNRDNGSAIGSLQSELEQLQKQRERLIKLAMLADDTESMAKDLKALNSQIKDAEKAVSEVHQREQSSQLETISHLDLTVKKDRIEAQIIIKRIVKEIRLNTAGKKCDVFLHNGLKLLNFPLDRVVDGAQWLEVLPLIDGDEFDFVEFTTKPRHIALEEAPDWVKEMDEQSNQPL

SEQ ID NO: 33147 - DNA, 50 bp, Klebsiella aerogenes; identical to SEQ ID NO: 32992
  source 1..50: mol_type = genomic DNA

SEQ ID NO: 33148 - DNA, 40 bp, Klebsiella aerogenes; identical to SEQ ID NO: 33138
  source 1..40: mol_type = genomic DNA

SEQ ID NO: 33149 - DNA, 40 bp, Klebsiella aerogenes; identical to SEQ ID NO: 33139
  source 1..40: mol_type = genomic DNA

SEQ ID NO: 33150 - DNA, 50 bp, Klebsiella aerogenes; identical to SEQ ID NO: 1340
  source 1..50: mol_type = genomic DNA

SEQ ID NO: 33151 - protein, 541 aa, Klebsiella pneumoniae
MPKAISYIRFSTKIQSVGDSTKRQSKYINDWLKRNPDYYLDESLRFQDLGISGFSGANAKSGAFGEFLAAVESGYIEAGSVLLVESLDRVSRQDIDTAGEQLRKILRSGVEVVTLVDNEWYTKESLKDSLSMIKAMLVMERAHEESAMKSTRLRSVWAAKRERAAKGEIMSKRCAAWLKVSEDRSRFEFIPENVKAVQRVFQLRLEGLSHVKIAKQMNDEGFSTLNQFKSVTGGWSQSSVTELLSNRSVIGFKVPSKSMAVKGVSEIPNYYPSIITDEQFYSVQQLKQGSGRKPSSDLPLLTNLFKGVLRCSECGFIVVVAGVSAKRSGIYKCSMKSEGRCNSVGLSRLQTDRALVQGLLYNTNRLSLNRDNGSAIGTLQSELEQLQKQRERLIKLAMLADDTESMAKDLKALNSQIKDAEKAVSEVHQREQSSQLETISHLDLTLKKDRIEAQIIIKRIIKEIRLNTAGKKCDVFLHNGLKLLNFPLDRVVDGGQWIEILPLIDGDEFDFEGFTTKPRHIALEEAPEWVKEMEEQPNQPL

SEQ ID NO: 33152 - DNA, 50 bp, Klebsiella pneumoniae
  source 1..50: mol_type = genomic DNA
gtgtatcaatagaaaggtctcttcaggattatacctttcttatgatacac

SEQ ID NO: 33153 - DNA, 40 bp, Klebsiella pneumoniae; identical to SEQ ID NO: 8148
  source 1..40: mol_type = genomic DNA

SEQ ID NO: 33154 - DNA, 40 bp, Klebsiella pneumoniae; identical to SEQ ID NO: 8149
  source 1..40: mol_type = genomic DNA

SEQ ID NO: 33155 - DNA, 50 bp, Klebsiella pneumoniae; identical to SEQ ID NO: 1340
  source 1..50: mol_type = genomic DNA

SEQ ID NO: 33156 - protein, 539 aa, Klebsiella pneumoniae
MPKAISYIRFSTKIQSVGDSTKRQSKYINDWLKRNPDYYLDESLRFQDLGISGFSGANAKSGAFGEFLAAVESGYIEAGSVLLVESLDRVSRQDIDTAGEQLRKILRSGVEVVTLVDNEWYTKESLKDSLSMIKAMLVMERAHEESAMKSTRLRSVWAAKRERAAKGEIMSKRCAAWLKVSEDRSRFEFIPENVKAVQRVFQLRLEGLSHVKIAKQMNDEGFSTLNQFKSVTGGWSQSSVTELLSNRSVIGFKVPSKSMAVKGVSEIPNYYPSIITDEQFYSVQQLKQGSGRKPSSDLPLLTNLFKGVLRCSECGFIVVVAGVSAKRSGIYKCSMKSEGRCNSVGFSRLQTDRALVQGLLYNTNRLSLNRDNGSAIGTLQSELEQLQKQRERLIKLAMLADDTESMAKDLKALNSQIKDAEKAVSEVHQREQSSQLETISHLDLTVKKDRIESQIIIKRIVKEIRLNTAGKKCDVFLHNGLKLYNFPLDRVVDGAQWLEILPLIDGDEFDFEGFTTKPRHIALEEAPEWVKEMEEQPKQ

SEQ ID NO: 33157 - DNA, 50 bp, Klebsiella pneumoniae; identical to SEQ ID NO: 32992
  source 1..50: mol_type = genomic DNA

SEQ ID NO: 33158 - DNA, 40 bp, Klebsiella pneumoniae; identical to SEQ ID NO: 1338
  source 1..40: mol_type = genomic DNA

SEQ ID NO: 33159 - DNA, 40 bp, Klebsiella pneumoniae; identical to SEQ ID NO: 1339
  source 1..40: mol_type = genomic DNA

SEQ ID NO: 33160 - DNA, 50 bp, Klebsiella pneumoniae; identical to SEQ ID NO: 1340
  source 1..50: mol_type = genomic DNA

SEQ ID NO: 33161 - protein, 541 aa, Klebsiella pneumoniae
MPKAISYIRFSTKIQSVGDSTKRQSKYINDWLKRNPDYYLDESLRFQDLGISGFSGANAKSGAFGEFLAAVESGYIEAGSVLLVESLDRVSRQDIDTAGEQLRKILRSGVEVVTLVDNEWYTKESLKDSLSMIKAMLVMERAHEESAMKSTRLRSVWAAKRERAAKGEIMSKRCAAWLKVSEDRSRFEFIPENVKAVQRVFQLRLEGLSHVKIAKQMNDEGFSTLNQFKSVTGGWSQSSVTELLSNRSVIGFKVPSKSMAVKGVSEIPNYYPSIITDEQFYSVQQLKQGSGRKPSSDLPLLTNLFKGVLRCSECGFIVVVAGVSAKRSGIYKCSMKSEGRCNSVGFSRLQTDRALVQGLLYNTNRLSLNRDNGSAIGTLQSELEQLQKQRERLIKLAMLADDTESMAKDLKALNSQIKDAEKAVSEVHQREQSSQLETISHLDLTLKKDRIEAQIIIKRIIKEIRLNTAGKKCDVFLHNGLRLLNFPLDRVVDGAQWLEILPLIDGDEFDFEGFSTKPRHLAFEEAPEWVKEMEAQPNQPL

SEQ ID NO: 33162 - DNA, 50 bp, Klebsiella pneumoniae; identical to SEQ ID NO: 32992
  source 1..50: mol_type = genomic DNA

SEQ ID NO: 33163 - DNA, 40 bp, Klebsiella pneumoniae; identical to SEQ ID NO: 8148
  source 1..40: mol_type = genomic DNA

SEQ ID NO: 33164 - DNA, 40 bp, Klebsiella pneumoniae; identical to SEQ ID NO: 8149
  source 1..40: mol_type = genomic DNA

SEQ ID NO: 33165 - DNA, 50 bp, Klebsiella pneumoniae; identical to SEQ ID NO: 1340
  source 1..50: mol_type = genomic DNA

SEQ ID NO: 33166 - protein, 518 aa, Klebsiella pneumoniae
MPKAISYIRFSTKIQSVGDSTKRQSKYINDWLKRNPDYYLDESLRFQDLGISGFSGANAKSGAFGEFLAAVESGYIEAGAVLLVESLDRVSRQDIDTAGEQLRKILRAGVEVVTLVDNEWYTKESLKDSLSMIKAMLVMERAHEESAMKSTRLRSMWAGKRERAANGEIMSKRCAAWLKVSEDRSHFEFIPENVKAVQRVFQLRLEGLSHVKIAKQMNDEGFSTLNQFKPVKGGWSQSSVTELLSNRSVIGYKVPSKSMAVKGVAEIPNYYPAIITDEQFYAVQQLKQGSGRKPSSDLPLLTNLFKGVLRCSECGFIVVVAGVSAKRSGIYKCSMKSEGRCNSVGFSRLQTDKALVQGLLYNTNRLSLNRDSGSAIGTLQSELEQLQKQRERLIKLAMLADDTESMAKDLKALNSQIKDAEKAVSEVHQREQSSQLETISHLDLTVKKDRIEAQIIIKRIVKEIRLNTAGKKCDVFLHNGLKLLNFPLDRVVDGEIFLEVLPVLEADEFDFDTYRMIE

SEQ ID NO: 33167 - DNA, 50 bp, Klebsiella pneumoniae; identical to SEQ ID NO: 32992
  source 1..50: mol_type = genomic DNA

SEQ ID NO: 33168 - DNA, 40 bp, Klebsiella pneumoniae; identical to SEQ ID NO: 8148
  source 1..40: mol_type = genomic DNA

SEQ ID NO: 33169 - DNA, 40 bp, Klebsiella pneumoniae; identical to SEQ ID NO: 8149
  source 1..40: mol_type = genomic DNA

SEQ ID NO: 33170 - DNA, 50 bp, Klebsiella pneumoniae; identical to SEQ ID NO: 1340
  source 1..50: mol_type = genomic DNA

SEQ ID NO: 33171 - protein, 518 aa, Klebsiella pneumoniae
MPKAISYIRFSTKIQSVGDSTKRQSKYINDWLKRNPDYYLDESLRFQDLGISGFSGANAKSGAFGEFLAAVESGYIESGSVLLVESLDRVSRQDIDTAGEQLRKILRSGVEVVTLVDNEWYTKESLKDSLSMIKAMLVMERAHEESAMKSTRLRSMWAAKRERAANGEIMSKRCAAWLKVSDDRSHFEFIPENVKAVQRVFQLRLEGLSHVKIAKQMNDEGFSTLNQFKSVTGGWSQSSVTELLSNRSVIGFKVPSKSMAVKGVSEIPNYYPSIITDEQFYAVQQLKQGSGRKPSSDLPLLTNLFKGVLRCSECGFIVVVAGVSAKRSGIYKCSMKSEGRCNSVGFSRLQTDRALVQGLLYNTNRLSLNRDNGSAIGALQSELEQLQKQRERLIKLSMLTDDTESMAKDLKALNSQIKDVERAVSEVHQREQSSQLETISHLDLTVKKDRIEAQIIIKRIVKEIRLNTAAKKCDVFLHNGLKLYNFPLDRVVDGEIFLEVLPVLEADEFDFDTYRMIE

SEQ ID NO: 33172 - DNA, 50 bp, Klebsiella pneumoniae; identical to SEQ ID NO: 32992
  source 1..50: mol_type = genomic DNA

SEQ ID NO: 33173 - DNA, 40 bp, Klebsiella pneumoniae; identical to SEQ ID NO: 8148
  source 1..40: mol_type = genomic DNA

SEQ ID NO: 33174 - DNA, 40 bp, Klebsiella pneumoniae; identical to SEQ ID NO: 8149
  source 1..40: mol_type = genomic DNA

SEQ ID NO: 33175 - DNA, 50 bp, Klebsiella pneumoniae; identical to SEQ ID NO: 1340
  source 1..50: mol_type = genomic DNA

SEQ ID NO: 33176 - protein, 518 aa, Klebsiella pneumoniae
MPKAISYIRFSTKIQSVGDSTKRQSKYINDWLKRNPDYYLDESLRFQDLGISGFSGANAKSGAFGEFLAAVESGYIEAGSVLLVESLDRVSRQDIDTAGEQLRKILRSGVEVVTLVDNEWYTKESLKDSLSMIKAMLVMERAHEESAMKSTRLRSMWAAKRERAANGEIMSKRCAAWLKVSEDRSHFEFIPENVKAVQRVFQLRLEGLSHVKIAKQMNDEGFSTLNQFKSVTGGWSQSSVTELLSNRSVIGFKVPSKSMAVKGVSEIPNYYPSIITDEQFYAVQQLKQGSGRKPSSDLPLLTNLFKGVLRCSECGFIMVVAGVSAKRSGIYKCSMKSEGRCNSVGFSRLQTDRALVQGLLYNTNRLSLNRDNGSAIGSLQSDLEKLHKQRERLIKLAMLADDTESMAKDLKALNSQIKDAEKAVSEVHQREQSSQLETISHLDLTVKKDRIEAQIIIKRIVKEIRLNTARKKCDVFLHNGLRLLNFPLDRVVDGEIFLEVLPVLEADEFDFDTYRMIE

SEQ ID NO: 33177 - DNA, 50 bp, Klebsiella pneumoniae; identical to SEQ ID NO: 32992
  source 1..50: mol_type = genomic DNA

SEQ ID NO: 33178 - DNA, 40 bp, Klebsiella pneumoniae; identical to SEQ ID NO: 8148
  source 1..40: mol_type = genomic DNA

SEQ ID NO: 33179 - DNA, 40 bp, Klebsiella pneumoniae; identical to SEQ ID NO: 8149
  source 1..40: mol_type = genomic DNA

SEQ ID NO: 33180 - DNA, 50 bp, Klebsiella pneumoniae; identical to SEQ ID NO: 1340
  source 1..50: mol_type = genomic DNA

SEQ ID NO: 33181 - protein, 518 aa, Klebsiella pneumoniae
MPKAISYIRFSTKIQSVGDSTKRQSKYINDWLKRNPDYYLDESLRFQDLGISGFSGANAKSGAFGEFLAAVESGYIESGSVLLVESLDRVSRQDIDTAGEQLRKILRSGVEVVTLVDNEWYTRDSLKDSLSMIKAMLVMERAHEESAMKSTRLRSVWAAKRERAAKGEIMSKRCAAWLKVSEDRSHFEFIPENVKAVQRVFQLRLEGLSHVKIAKQMNDEGFSTLNQFKSVTGGWSQSSVTELLSNRSVIGFKVPSKSMAVKGVSEIPNYYPSIITDEQFYAVQQLKQGSGRKPSSDLPLLTNLFKGVLRCSECGFIVVVAGVSAKRSGIYKCSMKSEGRCNSVGFSRLQTDRALVQGLLYNTNRLALNRDNGSAIGSLQSELEQLQKQRERLIKLAMLADDTESMAKDLKALNSQIKDAEKAVSEVHQREQSSQLETISHLDLTVKKDRIEAQIIIKRIVKEIRLNTAGKKCDVFLHNGLKLLNFPLDRVVDGEIFLEVLPVLEADEFDFDTYRMIE

SEQ ID NO: 33182 - DNA, 50 bp, Klebsiella pneumoniae; identical to SEQ ID NO: 32992
  source 1..50: mol_type = genomic DNA

SEQ ID NO: 33183 - DNA, 40 bp, Klebsiella pneumoniae; identical to SEQ ID NO: 8148
  source 1..40: mol_type = genomic DNA

SEQ ID NO: 33184 - DNA, 40 bp, Klebsiella pneumoniae; identical to SEQ ID NO: 8149
  source 1..40: mol_type = genomic DNA

SEQ ID NO: 33185 - DNA, 50 bp, Klebsiella pneumoniae; identical to SEQ ID NO: 1340
  source 1..50: mol_type = genomic DNA

SEQ ID NO: 33186 - protein, 541 aa, Klebsiella pneumoniae
MPKAISYIRFSTKIQSVGDSTKRQSKYINDWLKRNPDYYLDESLRFQDLGISGFSGANAKSGAFGEFLAAVESGYIEAGSVLLVESLDRVSRQDIDTAGEQLRKILRSGVEVVTLVDNEWYTKESLKDSLSMIKAMLVMERAHEESAMKSTRLRSVWAAKRERAAKGEIMSKRCAAWLKVSEDRSHFEFIPENVKAVQRVFQLRLEGLSHIKIAKQMNDEGFYTLNQHKSVKGGWSQSSVTELLSNRSVIGFKVPSKSMAVKGVSEIPNYYPSIITDEQFYAVQQLKQGSGRKPSSDLPLLTNLFKGVLRCSECGFIVVVAGVSAKRSGIYKCSMKSEGRCNSVGFSRLQTDKALVQGLLYNTNRLSLNRDSGSAIGTLQSELEQLHKQRERLIKLAMLADDTESMAKDLKALNSQIKDAEKAVSEVHQREQSSQLETISHLDLTVKKDRIEAQIIIKRIVKEIRLNTAGKKCDVFLHNGLKLLNFPLDRVVDGAQWLEVLPLIDGDEFDFEGFTTKPRHLVLEEAPEWVKEIEAQPNQPL

SEQ ID NO: 33187 - DNA, 50 bp, Klebsiella pneumoniae; identical to SEQ ID NO: 32992
  source 1..50: mol_type = genomic DNA

SEQ ID NO: 33188 - DNA, 40 bp, Klebsiella pneumoniae; identical to SEQ ID NO: 8148
  source 1..40: mol_type = genomic DNA

SEQ ID NO: 33189 - DNA, 40 bp, Klebsiella pneumoniae; identical to SEQ ID NO: 8149
  source 1..40: mol_type = genomic DNA

SEQ ID NO: 33190 - DNA, 50 bp, Klebsiella pneumoniae; identical to SEQ ID NO: 1340
  source 1..50: mol_type = genomic DNA

SEQ ID NO: 33191 - protein, 541 aa, Klebsiella pneumoniae
MPKAISYIRFSTKIQSVGDSTKRQSKYINDWLKRNPDYYLDESLRFQDLGISGFSGANAKSGAFGEFLAAVESGYIESGSVLLVESLDRVSRQDIDTAGEQLRKILRSGVEVVTLVDNEWYTKESLKDSLSMIKAMLVMERAHEESAMKSTRLRSMWAAKRERAANGEIMSKRCAAWLKVSEDRSHFEFITENVKAVQRVFQLRLEGLSHIKIAKQMNDEGFYTLNQHKSVKGGWSQSSVTELLSNRSVIGFKVPSKSMAVKGVSEIPNYYPAIITDEQFYAVQQLKQGSGRKPSSDLPLLTNLFKGVLRCSECGFIVVVAGVSAKRSGIYKCSMKSEGRCNSVGFSRLQTDRALVQGLLYNTNRLSLNRDNGSAIGTLQSELEQLQKQRERLIKLAMLADDTESMAKDLKALNSQIKDAEKAVSEVHQREQSSQLETISHLDLTVKKDRIEAQIIIKRIVKEIRLNTAQKKCDVFLHNGLRLLNFPLDRVVDGAQWLEILPLIDGDEFDFEGFTTKPRHIALEEAPEWVKEMEEQPSQPL

SEQ ID NO: 33192 - DNA, 50 bp, Klebsiella pneumoniae; identical to SEQ ID NO: 32992
  source 1..50: mol_type = genomic DNA

SEQ ID NO: 33193 - DNA, 40 bp, Klebsiella pneumoniae; identical to SEQ ID NO: 8148
  source 1..40: mol_type = genomic DNA

SEQ ID NO: 33194 - DNA, 40 bp, Klebsiella pneumoniae; identical to SEQ ID NO: 8149
  source 1..40: mol_type = genomic DNA

SEQ ID NO: 33195 - DNA, 50 bp, Klebsiella pneumoniae; identical to SEQ ID NO: 1340
  source 1..50: mol_type = genomic DNA

SEQ ID NO: 33196 - protein, 518 aa, Klebsiella pneumoniae
MPKAISYIRFSTKIQSVGDSTKRQSKYINDWLKRNPDYYLDESLRFQDLGISGFSGANAKSGAFGEFLAAVESGYIESGSVLLVESLDRVSRQDIDTAGEQLRKILRAGVEVVTLVDNEWYTKESLKDSLSMIKAMLVMERAHEESAMKSTRLRSVWAAKRERAAKGEIMSKRCAAWLKVSEDRSHFEFIPENVKAVQRVFQLRLEGLSHVKIAKQMNDEGFSTLNQFKSVTGGWSQSSVTELLSNRSVIGFKVPSKSMAVKGVSEIPNYYPSIITDEQFYAVQQLKQGSGRKPSSDLPLLTNLFKGVLRCSECGFIVVVAGVSAKRSGIYKCSMKSEGRCNSVGFSRLQTDRALVQGLLYNTNRLSLNRDNGSAIGTLQSELEQLQKQRERLIKLAMLADDTESMAKDLKALNSQIKDAEKAVSEVHQREQSSQLETISHLDLTLKKDRIEAQIIIKRIVKEIRLNTAQKKCDVFLHNGLKLLNFPLDRVVDGEIFLEVLPLLEADEFDFDTYRVIE

SEQ ID NO: 33197 - DNA, 50 bp, Klebsiella pneumoniae; identical to SEQ ID NO: 32992
  source 1..50: mol_type = genomic DNA

SEQ ID NO: 33198 - DNA, 40 bp, Klebsiella pneumoniae; identical to SEQ ID NO: 8148
  source 1..40: mol_type = genomic DNA

SEQ ID NO: 33199 - DNA, 40 bp, Klebsiella pneumoniae; identical to SEQ ID NO: 8149
  source 1..40: mol_type = genomic DNA

SEQ ID NO: 33200 - DNA, 50 bp, Klebsiella pneumoniae; identical to SEQ ID NO: 1340
  source 1..50: mol_type = genomic DNA

SEQ ID NO: 33201 - protein, 541 aa, Klebsiella pneumoniae; identical to SEQ ID NO: 33106

SEQ ID NO: 33202 - DNA, 50 bp, Klebsiella pneumoniae; identical to SEQ ID NO: 32992
  source 1..50: mol_type = genomic DNA

SEQ ID NO: 33203 - DNA, 40 bp, Klebsiella pneumoniae; identical to SEQ ID NO: 8148
  source 1..40: mol_type = genomic DNA

SEQ ID NO: 33204 - DNA, 40 bp, Klebsiella pneumoniae; identical to SEQ ID NO: 8149
  source 1..40: mol_type = genomic DNA

SEQ ID NO: 33205 - DNA, 50 bp, Klebsiella pneumoniae; identical to SEQ ID NO: 1340
  source 1..50: mol_type = genomic DNA

SEQ ID NO: 33206 - protein, 518 aa, Klebsiella pneumoniae
MPKAISYIRFSTKIQSVGDSTKRQSKYINDWLKRNPDYYLDESLRFQDLGISGFSGANARSGAFGEFLAAVESGYIEAGSVLLVESLDRVSRQDIDTAGEQLRKILRSGVEVVTLVDNEWYTKESLKDSLSMIKAMLVMERAHEESAMKSTRLRSVWAAKRERAAKGEIMSKRCAAWLKVSEDRSHFEFIPENVKAVQRVFQLRLEGLSHVKIAKQMNDEGFSTLNQFKSVKGGWSQSSVTELLSNRSVIGFKVPSKSMAVKGVSEIPNYYPSIITDEQFYAVQQLKQGSGRKPSSDLPLLTNLFKGVLRCSECGFIMVVAGVSAKRSGIYKCSMKSEGRCNSVGFSRLQTDRALVQGLLYNTNRLALNRDNGSAIGSLQSELEHLQKQRERLIKLAMLADDTESMAKDLKALNSQIKDAEKAVSEVHQREQSSQLETISHLDLTVKKDRIEAQIIIKRIVKEIRLNTAGKKCDVFLHNGLKLLNFPLDRALDGEIFLEVLPVLEADEFDFDTYRMIE

SEQ ID NO: 33207 - DNA, 50 bp, Klebsiella pneumoniae; identical to SEQ ID NO: 32992
  source 1..50: mol_type = genomic DNA

SEQ ID NO: 33208 - DNA, 40 bp, Klebsiella pneumoniae
  source 1..40: mol_type = genomic DNA
atggaccgggcggctgtcgaggatcacacggttgacgtta

SEQ ID NO: 33209 - DNA, 40 bp, Klebsiella pneumoniae
  source 1..40: mol_type = genomic DNA
atggaccgggcggctgtcgcagatcacacggttgacgtta

SEQ ID NO: 33210 - DNA, 50 bp, Klebsiella pneumoniae; identical to SEQ ID NO: 1340
  source 1..50: mol_type = genomic DNA

SEQ ID NO: 33211 - protein, 518 aa, Klebsiella pneumoniae
MPKAISYIRFSTKIQSVGDSTKRQSKYINDWLKRNPDYYLDESLRFQDLGISGFSGANAKSGAFGEFLAAVESGYIEAGSVLLVESLDRVSRQDIDTAGEQLRKILRSGVEVVTLVDNEWYTKESLKDSLSMIKAMLVMERAHEESAMKSTRLRSMWAAKRERAANGEIMSKRCAAWLKVSDDRSHFEFIPENVKAVQRVFQLRLEGLSHVKIAKQMNDEGFSTLNQFKSVTGGWSQSSVTELLSNRSVIGFKVPSKSMAVKGVSEIPNYYPSIITDEQFYAVQQLKQGSGRKPSSDLPLLTNLFKGVLRCSECGFIVVVAGVSAKRSGIYKCSMKSEGRCNSVGFSRLQTDRALVQGLLYNTNRLSLNRDNGSAIGSLQSELEQLQKQRERLIKLAMLADDTESMAKDLKALNSQIKDAEKAVSEVHQREQSSQLETISHLDLTVKKDRIEAQIIIKRIVKEIRLNTAGKKCDVFLHNGLKLLNFPLDRVVDGEIFLEVLPVLEADEFDFDTYRVIE

SEQ ID NO: 33212 - DNA, 50 bp, Klebsiella pneumoniae; identical to SEQ ID NO: 32992
  source 1..50: mol_type = genomic DNA

SEQ ID NO: 33213 - DNA, 40 bp, Klebsiella pneumoniae; identical to SEQ ID NO: 8148
  source 1..40: mol_type = genomic DNA

SEQ ID NO: 33214 - DNA, 40 bp, Klebsiella pneumoniae; identical to SEQ ID NO: 8149
  source 1..40: mol_type = genomic DNA

SEQ ID NO: 33215 - DNA, 50 bp, Klebsiella pneumoniae; identical to SEQ ID NO: 1340
  source 1..50: mol_type = genomic DNA

SEQ ID NO: 33216 - protein, 518 aa, Klebsiella pneumoniae; identical to SEQ ID NO: 33171

SEQ ID NO: 33217 - DNA, 50 bp, Klebsiella pneumoniae; identical to SEQ ID NO: 33127
  source 1..50: mol_type = genomic DNA

SEQ ID NO: 33218 - DNA, 40 bp, Klebsiella pneumoniae; identical to SEQ ID NO: 8148
  source 1..40: mol_type = genomic DNA

SEQ ID NO: 33219 - DNA, 40 bp, Klebsiella pneumoniae; identical to SEQ ID NO: 8149
  source 1..40: mol_type = genomic DNA

SEQ ID NO: 33220 - DNA, 50 bp, Klebsiella pneumoniae; identical to SEQ ID NO: 1340
  source 1..50: mol_type = genomic DNA

SEQ ID NO: 33221 - protein, 541 aa, Klebsiella pneumoniae
MPKAISYIRFSTKIQSVGDSTKRQSKYINDWLKRNPDYYLDESLRFQDLGISGFSGANAKSGAFSEFLAAVESGYIEAGSVLLVESLDRVSRQDIDTAGEQLRKILRSGVEVVTLVDNEWYTKESLKDSLSMIKAMLVMERAHEESAMKSTRLRSVWAAKRERAAKGEIMSKRCAAWLKVSEDRSHFEFIPENVKAVQRVFQLRLEGLSHVKIAKQMNDEGFSTLNQFKSVTGGWSQSSVTELLSNRSVIGFKVPSKSMAVKGVSEIPNYYPSIITDEQFYAVQQLKQGSGRKPSSDLPLLTNLFKGVLRCSECGFIVVVAGVSAKRSGIYKCSMKSEGRCNSVGFSRLQTDRALVQGLLYNTNRLSLNRDNGSAIGSLQSELEQLQKQRERLIKLAMLADDTESMAKDLKALNSQIKDAEKAVSEVHQREQSSQLETISHLDLTVKKDRIEAQIIIKRIVKEIRLNTAGKKCDVFLHNGLKLLNFPLDRVVDGAQWLEVLPLIDGDEFDFAEFTTKPRHIALEEAPEWVKEMEEQPNQPL

SEQ ID NO: 33222 - DNA, 50 bp, Klebsiella pneumoniae; identical to SEQ ID NO: 32992
  source 1..50: mol_type = genomic DNA

SEQ ID NO: 33223 - DNA, 40 bp, Klebsiella pneumoniae; identical to SEQ ID NO: 8148
  source 1..40: mol_type = genomic DNA

SEQ ID NO: 33224 - DNA, 40 bp, Klebsiella pneumoniae; identical to SEQ ID NO: 8149
  source 1..40: mol_type = genomic DNA

SEQ ID NO: 33225 - DNA, 50 bp, Klebsiella pneumoniae; identical to SEQ ID NO: 1340
  source 1..50: mol_type = genomic DNA

SEQ ID NO: 33226 - protein, 541 aa, Klebsiella pneumoniae; identical to SEQ ID NO: 33066

SEQ ID NO: 33227 - DNA, 50 bp, Klebsiella pneumoniae; identical to SEQ ID NO: 32992
  source 1..50: mol_type = genomic DNA

SEQ ID NO: 33228 - DNA, 40 bp, Klebsiella pneumoniae; identical to SEQ ID NO: 8148
  source 1..40: mol_type = genomic DNA

SEQ ID NO: 33229 - DNA, 40 bp, Klebsiella pneumoniae; identical to SEQ ID NO: 8149
  source 1..40: mol_type = genomic DNA

SEQ ID NO: 33230 - DNA, 50 bp, Klebsiella pneumoniae; identical to SEQ ID NO: 1340
  source 1..50: mol_type = genomic DNA

SEQ ID NO: 33231 - protein, 539 aa, Klebsiella pneumoniae; identical to SEQ ID NO: 33156

SEQ ID NO: 33232 - DNA, 50 bp, Klebsiella pneumoniae
  source 1..50: mol_type = genomic DNA
gtgtatcaatagaaaggtctcttcagcattacacctttcttatgatacac

SEQ ID NO: 33233 - DNA, 40 bp, Klebsiella pneumoniae; identical to SEQ ID NO: 8148
  source 1..40: mol_type = genomic DNA

SEQ ID NO: 33234 - DNA, 40 bp, Klebsiella pneumoniae; identical to SEQ ID NO: 8149
  source 1..40: mol_type = genomic DNA

SEQ ID NO: 33235 - DNA, 50 bp, Klebsiella pneumoniae; identical to SEQ ID NO: 1340
  source 1..50: mol_type = genomic DNA

SEQ ID NO: 33236 - protein, 540 aa, Klebsiella oxytoca
MPKAISYIRFSTKIQSVGDSTKRQSKYINDWLKRNPDYYLDESLRFQDLGISGFSGANAKSGAFGEFLAAVESGYIEAGSVLLVESLDRVSRQDIDTAGEQLRKILRSGVEVVTLVDNEWYTKESLKDSLSMIKAMLVMERAHEESAMKSTRLRSMWAAKRERAANGEIMSKRCAAWLKVSEDRSHFEFIPENVKAVQRVFQLRLEGLSHIKIAKQMNDEGFYTLNQHKSVKGGWSQSSVTELLSNRSVIGFKVPSKSMAVKGVSEIPNYYPSIITDEQFYAVQQLKQGSGRKPSSGLPLLTNLFKGVLRCSECGFIVVVAGVSAKRSGIYKCSMKSEGRCNSVGFSRLQTDRALVQGLLYNTNRLSLNRDNGSAIGTLQSELEQLQKQRERLIKLAMLADDTESMAKDLKALNSQIKDAEKAVSEVHQREQSSQLETISHLDLTVKKDRVEAQIIIKRIVKEIRLNTAGKKCDVFLHNGLKLLNFPLDRVVDGAQWLEVLPLIDGDEFDFEGFTTKPRHIALEEAPNWVKEMEEQSNQP

SEQ ID NO: 33237 - DNA, 50 bp, Klebsiella oxytoca; identical to SEQ ID NO: 32992
  source 1..50: mol_type = genomic DNA

SEQ ID NO: 33238 - DNA, 40 bp, Klebsiella oxytoca
  source 1..40: mol_type = genomic DNA
gtgaaccgggcggctatcgaggataacgcggttgacgttt

SEQ ID NO: 33239 - DNA, 40 bp, Klebsiella oxytoca
  source 1..40: mol_type = genomic DNA
gtgaaccgggcggctatcgcagataacgcggttgacgttt

SEQ ID NO: 33240 - DNA, 50 bp, Klebsiella oxytoca; identical to SEQ ID NO: 1340
  source 1..50: mol_type = genomic DNA

SEQ ID NO: 33241 - protein, 541 aa, Klebsiella oxytoca
MPKAISYIRFSTKIQSVGDSTKRQSKYINDWLKRNPDYYLDESLRFQDLGISGFSGANAKSGAFGEFLAAVESGYIEAGSVLLVESLDRVSRQDIDTAGEQLRKILRSGVEVVTLVDNEWYTKESLKDSLSMIKAMLVMERAHEESAMKSTRLRSMWAAKRERAANGEIMSKRCAAWLKVSDDRSHFEFIPENVKAVQRVFQLRLEGLSHVKIAKQMNDEGFSTLNQFKSVTGGWSQSSVTELLSNRSVIGFKVPSKSMAVKGVSEIPNYYPSIITDEQFYAVQQLKQGSGRKPSSDLPLLTNLFKGVLRCSECGFIVVVAGVSAKRSGIYKCSMKSEGRCNSVGFSRLQTDRALVQGLLYNTNRLSLNRDNGSAIGTLQSELEQLQKQRERLIKLAMLADDTESMAKDLKALNSQIKDAEKAVSEVHQREQSSQLETISHLDLTVKKDRIEAQIIIKRIVKEIRLNTAQKKCDVFLHNGLKLLNFPLDRVVDGAQWLEVLPLIDGDEFDFAEFTAKPRHIALEEAPEWVKEMEEQPNQPL

SEQ ID NO: 33242 - DNA, 50 bp, Klebsiella oxytoca; identical to SEQ ID NO: 32992
  source 1..50: mol_type = genomic DNA

SEQ ID NO: 33243 - DNA, 40 bp, Klebsiella oxytoca
  source 1..40: mol_type = genomic DNA
atgaaccggacggctatccaggatgacgcggttgacgttt

SEQ ID NO: 33244 - DNA, 40 bp, Klebsiella oxytoca
  source 1..40: mol_type = genomic DNA
atgaaccggacggctatcccagatgacgcggttgacgttt

SEQ ID NO: 33245 - DNA, 50 bp, Klebsiella oxytoca; identical to SEQ ID NO: 1340
  source 1..50: mol_type = genomic DNA

SEQ ID NO: 33246 - protein, 518 aa, Klebsiella oxytoca; identical to SEQ ID NO: 33176

SEQ ID NO: 33247 - DNA, 50 bp, Klebsiella oxytoca; identical to SEQ ID NO: 32992
  source 1..50: mol_type = genomic DNA

SEQ ID NO: 33248 - DNA, 40 bp, Klebsiella oxytoca; identical to SEQ ID NO: 8143
  source 1..40: mol_type = genomic DNA

SEQ ID NO: 33249 - DNA, 40 bp, Klebsiella oxytoca; identical to SEQ ID NO: 8144
  source 1..40: mol_type = genomic DNA

SEQ ID NO: 33250 - DNA, 50 bp, Klebsiella oxytoca; identical to SEQ ID NO: 1340
  source 1..50: mol_type = genomic DNA

SEQ ID NO: 33251 - protein, 541 aa, Klebsiella oxytoca; identical to SEQ ID NO: 33106

SEQ ID NO: 33252 - DNA, 50 bp, Klebsiella oxytoca; identical to SEQ ID NO: 32992
  source 1..50: mol_type = genomic DNA

SEQ ID NO: 33253 - DNA, 40 bp, Klebsiella oxytoca
  source 1..40: mol_type = genomic DNA
atgaaccggacggctatcaaggatcacgcgattgacgtta

SEQ ID NO: 33254 - DNA, 40 bp, Klebsiella oxytoca
  source 1..40: mol_type = genomic DNA
atgaaccggacggctatcacagatcacgcgattgacgtta

SEQ ID NO: 33255 - DNA, 50 bp, Klebsiella oxytoca; identical to SEQ ID NO: 1340
  source 1..50: mol_type = genomic DNA

SEQ ID NO: 33256 - protein, 518 aa, Klebsiella oxytoca; identical to SEQ ID NO: 33181

SEQ ID NO: 33257 - DNA, 50 bp, Klebsiella oxytoca; identical to SEQ ID NO: 32992
  source 1..50: mol_type = genomic DNA

SEQ ID NO: 33258 - DNA, 40 bp, Klebsiella oxytoca; identical to SEQ ID NO: 8143
  source 1..40: mol_type = genomic DNA

SEQ ID NO: 33259 - DNA, 40 bp, Klebsiella oxytoca; identical to SEQ ID NO: 8144
  source 1..40: mol_type = genomic DNA

SEQ ID NO: 33260 - DNA, 50 bp, Klebsiella oxytoca; identical to SEQ ID NO: 1340
  source 1..50: mol_type = genomic DNA

SEQ ID NO: 33261 - protein, 540 aa, Klebsiella michiganensis
MPKAISYIRFSTKIQSVGDSTKRQSKYINDWLKRNPDYYLDESLRFQDLGISGFSGANAKSGAFGEFLAAVESGYIESGSVLLVESLDRVSRQDIDTAGEQLRKILRSGVEVVTLVDNEWYTRDSLKDSLSMIKAMLVMERAHEESAMKSTRLRSVWAAKRERAAKGEIMSKRCAAWLKVSEDRSRFEFIPENVKAVQRVFQLRLEGLSHVKIAKQMNDEGFSTLNQFKSVTGGWSQSSVTELLSNRSVIGFKVPSKSMAVKGVSEIPNYYPSIITDEQFYAVQQLKQGSGRKPSSDLPLLTNLFKGVLRCSECGFIVVVAGVSAKRSGIYKCSMKSEGRCNSVGFSRLQTDRALVQGLLYNANRLFLNRDNGSAIGALQGELEQLQKQRERLIKLAMLADDTESMAKDLKALNSQIKNAEKAVSEVHQREQSSQLETISHLDLTVKKDRIEAQIIIKRIVKEIRLNTAEKKCDVLLHNGLRLLNFPLDRVVDGAQWLEILPLIDGDEFDFEGFSTKPRHLAFEEAPEWVKELEFNSKIQ

SEQ ID NO: 33262 - DNA, 50 bp, Klebsiella michiganensis; identical to SEQ ID NO: 32992
  source 1..50: mol_type = genomic DNA

SEQ ID NO: 33263 - DNA, 40 bp, Klebsiella michiganensis; identical to SEQ ID NO: 8143
  source 1..40: mol_type = genomic DNA

SEQ ID NO: 33264 - DNA, 40 bp, Klebsiella michiganensis; identical to SEQ ID NO: 8144
  source 1..40: mol_type = genomic DNA

SEQ ID NO: 33265 - DNA, 50 bp, Klebsiella michiganensis; identical to SEQ ID NO: 1340
  source 1..50: mol_type = genomic DNA

SEQ ID NO: 33266 - protein, 541 aa, Klebsiella michiganensis
MPKAISYIRFSTKIQSVGDSTKRQSKYINDWLKRNPDYYLDESLRFQDLGISGFSGANAKSGAFGEFLAAVESGYIEAGSVLLVESLDRVSRQDIDTAGEQLRKILRSGVEVVTLVDNEWYTKESLKDSLSMIKAMLVMERAHEESAMKSTRLRSVWAAKRERAAKGEIMSKRCAAWLKVSEDRSHFEFIPENVKAVQRVFQLRLEGLSHVKIAKQMNDEGFSTLNQFKSVTGGWSQSSVTELLSNRSVIGFKVPSKSMAVKGVSEIPNYYPSIITDEQFYAVQQLKQGSGRKPSSDLPLLTNLFKGVLRCSECGFIVVVAGVSAKRSGIYKCSMKSEGRCNSVGFSRLQTDKALVQGLLYNTNRLSLNRDSGSAIGTLQSELEQLHKQRERLIKLAMLADDTESMAKDLKALNSQIKDVEKAVSEVHQREQSSQLETISHLDLTVKKDRIEAQIIIKRIVKEIRLNTPGKKCDVFLHNGLKLLNFPLDRVVDGAQWLEVLPLIDGDEFDFEGFTTKPRHIVLEEAPEWVKEIEAQPNQPL

SEQ ID NO: 33267 - DNA, 50 bp, Klebsiella michiganensis; identical to SEQ ID NO: 32992
  source 1..50: mol_type = genomic DNA

SEQ ID NO: 33268 - DNA, 40 bp, Klebsiella michiganensis; identical to SEQ ID NO: 8143
  source 1..40: mol_type = genomic DNA

SEQ ID NO: 33269 - DNA, 40 bp, Klebsiella michiganensis; identical to SEQ ID NO: 8144
  source 1..40: mol_type = genomic DNA

SEQ ID NO: 33270 - DNA, 50 bp, Klebsiella michiganensis; identical to SEQ ID NO: 1340
  source 1..50: mol_type = genomic DNA

SEQ ID NO: 33271 - protein, 518 aa, Klebsiella michiganensis
MPKAISYIRFSTKIQSVGDSTKRQSKYINDWLKRNPDYYLDESLRFQDLGISGFSGANAKSGAFGEFLAAVESGYIEAGSVLLVESLDRVSRQDIDTAGEQLRKILRSGVEVVTLVDNEWYTKESLKDSLSMIKAMLVMERAHEESAMKSTRLRSMWAAKRERAANGEIMSKRCAAWLKVSEDRSHFEFIPENVKAVQRVFQLRLEGLSHVKIAKQMNDEGFSTLNQFKSVTGGWSQSSVTELLSNRSVIGFKVPSKSMAVKGVSEIPNYYPSIITDEQFYAVQQLKQGSGRKPSSDLPLLTNLFKGVLRCSECGFIMVVAGVCAKRSGIYKCSMKSEGRCNSVGFSRLQTDRALVQGLLYNTNRLSLNRDNGSAIGSLQSDLEKLHKQRERLIKLAMLADDTESMAKDLKALNSQIKDAEKAVSEVHQREQSSQLETISHLDLTVKKDRIEAQIIIKRIVKEIRLNTARKKCDVFLHNGLRLLNFPLDRVVDGEIFLEVLPVLEADEFDFDTYRMIE

SEQ ID NO: 33272 - DNA, 50 bp, Klebsiella michiganensis; identical to SEQ ID NO: 32992
  source 1..50: mol_type = genomic DNA

SEQ ID NO: 33273 - DNA, 40 bp, Klebsiella michiganensis; identical to SEQ ID NO: 33253
  source 1..40: mol_type = genomic DNA

SEQ ID NO: 33274 - DNA, 40 bp, Klebsiella michiganensis; identical to SEQ ID NO: 33254
  source 1..40: mol_type = genomic DNA

SEQ ID NO: 33275 - DNA, 50 bp, Klebsiella michiganensis; identical to SEQ ID NO: 1340
  source 1..50: mol_type = genomic DNA

SEQ ID NO: 33276 - protein, 539 aa, Klebsiella michiganensis
MPKAISYIRFSTKIQSVGDSTKRQSKYINDWLKRNPDYYLDESLRFQDLGISGFSGANAKSGAFGEFLAAVESGYIEAGSVLLVESLDRVSRQDIDTAGEQLRKILRSGVEVVTLVDNEWYTKESLKDSLSMIKAMLVMERAHEESAMKSTRLRSVWAAKRERAAKGEIMSKRCAAWLKVSEDRSHFEFIPENVKAVQRVFQLRLEGLSHVKIAKQMNDEGFSTLNQFKSVTGGWSQSSVTELLSNRSVIGFKVPSKSMAVKGVSEIPNYYPSIITDEQFYAVQQLKQGSGRKPSSDLPLLTNLFKGVLRCSECGFIVVVAGVSAKRSGIYKCSMKSEGRCNSVGFSRLQTDRALVQGLLYNSNRLALNRDNGSAIGSLQSELEHLQKQRERLIKLAMLADDTESMAKDLKALNSQIKDAEKAVSEVHQREQSSQLETISHLDLTVKKDRTEAQIIIKRIVKEIRLNTAGKKCDVFLHNGLKLLNFPLDRVVDGAQWLEVLPLINGDEFDFEGFTTKPRHIALEEAPEWVKEMEEQPNQ

SEQ ID NO: 33277 - DNA, 50 bp, Klebsiella michiganensis; identical to SEQ ID NO: 32992
  source 1..50: mol_type = genomic DNA

SEQ ID NO: 33278 - DNA, 40 bp, Klebsiella michiganensis; identical to SEQ ID NO: 8143
  source 1..40: mol_type = genomic DNA

SEQ ID NO: 33279 - DNA, 40 bp, Klebsiella michiganensis; identical to SEQ ID NO: 8144
  source 1..40: mol_type = genomic DNA

SEQ ID NO: 33280 - DNA, 50 bp, Klebsiella michiganensis; identical to SEQ ID NO: 1340
  source 1..50: mol_type = genomic DNA

SEQ ID NO: 33281 - protein, 541 aa, Klebsiella michiganensis; identical to SEQ ID NO: 33066

SEQ ID NO: 33282 - DNA, 50 bp, Klebsiella michiganensis; identical to SEQ ID NO: 32992
  source 1..50: mol_type = genomic DNA

SEQ ID NO: 33283 - DNA, 40 bp, Klebsiella michiganensis; identical to SEQ ID NO: 8143
  source 1..40: mol_type = genomic DNA

SEQ ID NO: 33284 - DNA, 40 bp, Klebsiella michiganensis; identical to SEQ ID NO: 8144
  source 1..40: mol_type = genomic DNA

SEQ ID NO: 33285 - DNA, 50 bp, Klebsiella michiganensis; identical to SEQ ID NO: 1340
  source 1..50: mol_type = genomic DNA

SEQ ID NO: 33286 - protein, 518 aa, Klebsiella quasipneumoniae; identical to SEQ ID NO: 33176

SEQ ID NO: 33287 - DNA, 50 bp, Klebsiella quasipneumoniae; identical to SEQ ID NO: 32992
  source 1..50: mol_type = genomic DNA

SEQ ID NO: 33288 - DNA, 40 bp, Klebsiella quasipneumoniae; identical to SEQ ID NO: 33003
  source 1..40: mol_type = genomic DNA

SEQ ID NO: 33289 - DNA, 40 bp, Klebsiella quasipneumoniae; identical to SEQ ID NO: 33004
  source 1..40: mol_type = genomic DNA

SEQ ID NO: 33290 - DNA, 50 bp, Klebsiella quasipneumoniae; identical to SEQ ID NO: 1340
  source 1..50: mol_type = genomic DNA

SEQ ID NO: 33291 - protein, 518 aa, Klebsiella quasipneumoniae; identical to SEQ ID NO: 33081

SEQ ID NO: 33292 - DNA, 50 bp, Klebsiella quasipneumoniae; identical to SEQ ID NO: 32992
  source 1..50: mol_type = genomic DNA

SEQ ID NO: 33293 - DNA, 40 bp, Klebsiella quasipneumoniae; identical to SEQ ID NO: 33003
  source 1..40: mol_type = genomic DNA

SEQ ID NO: 33294 - DNA, 40 bp, Klebsiella quasipneumoniae; identical to SEQ ID NO: 33004
  source 1..40: mol_type = genomic DNA

SEQ ID NO: 33295 - DNA, 50 bp, Klebsiella quasipneumoniae; identical to SEQ ID NO: 1340
  source 1..50: mol_type = genomic DNA

SEQ ID NO: 33296 - protein, 539 aa, Klebsiella quasipneumoniae; identical to SEQ ID NO: 33156

SEQ ID NO: 33297 - DNA, 50 bp, Klebsiella quasipneumoniae; identical to SEQ ID NO: 32992
  source 1..50: mol_type = genomic DNA

SEQ ID NO: 33298 - DNA, 40 bp, Klebsiella quasipneumoniae; identical to SEQ ID NO: 33003
  source 1..40: mol_type = genomic DNA

SEQ ID NO: 33299 - DNA, 40 bp, Klebsiella quasipneumoniae; identical to SEQ ID NO: 33004
  source 1..40: mol_type = genomic DNA

SEQ ID NO: 33300 - DNA, 50 bp, Klebsiella quasipneumoniae; identical to SEQ ID NO: 1340
  source 1..50: mol_type = genomic DNA

SEQ ID NO: 33301 - protein, 518 aa, Klebsiella quasipneumoniae
MPKAISYIRFSTKIQSVGDSTKRQSKYINDWLKRNPDYYLDESLRFQDLGISGFSGANAKSGAFGEFLAAVESGYIEAGSVLLVESLDRVSRQDIDTAGEQLRKILRSGVEVVTLVDNEWYTKESLKDSLSMIKAMLVMERAHEESAMKSTRLRSMWAAKRERAANGEIMSKRCAAWLKVSDDRSHFEFIPENVKAVQRVFQLRLEGLSHVKIAKQMNDEGFSTLNQFKSVTGGWSQSSVTELLSNRSVIGFKVPSKSMAVKGVSEIPNYYPSIITDEQFYAVQQLKQGSGRKPSSDLPLLTNLFKGVLRCSECGFIVVVAGVSAKRSGIYKCSMKSEGRCNSVGFSRLQTDRALVQGLLYNTNRLSLNRDNGSAIGTLQSELEQLQKQRERLIKLAMLADDTESMAKDLKALNSQIKDAEKAVSEVHQREQSSQLETISHLDLTLKKDRIEAQIIIKRIVKEIRLNTAQKKCDVFLHNGLKLLNFPLDRVVDGEIFLEVLPLLEADEFDFDTYRVIE

SEQ ID NO: 33302 - DNA, 50 bp, Klebsiella quasipneumoniae; identical to SEQ ID NO: 32992
  source 1..50: mol_type = genomic DNA

SEQ ID NO: 33303 - DNA, 40 bp, Klebsiella quasipneumoniae; identical to SEQ ID NO: 32993
  source 1..40: mol_type = genomic DNA

SEQ ID NO: 33304 - DNA, 40 bp, Klebsiella quasipneumoniae; identical to SEQ ID NO: 32994
  source 1..40: mol_type = genomic DNA

SEQ ID NO: 33305 - DNA, 50 bp, Klebsiella quasipneumoniae; identical to SEQ ID NO: 1340
  source 1..50: mol_type = genomic DNA

SEQ ID NO: 33306 - protein, 539 aa, Klebsiella quasipneumoniae
MPKAISYIRFSTKIQSVGDSTKRQSKYINDWLKRNPDYYLDESLRFQDLGISGFSGANAKSGAFGEFLAAVESGYIEAGSVLLVESLDRVSRQDIDTAGEQLRKILRSGVEVVTLVDNEWYTKESLKDSLSMIKAMLVMERAHEESAMKSTRLRSVWAAKRERAAKGEIMSKRCAAWLKVSEDRSRFEFIPENVKAVQRVFQLRLEGLSHVKIAKQMNDEGFSTLNQFKSVTGGWSQSSVTELLSNRSVIGFKVPSKSMAVKGVSEIPNYYPSIITDEQFYSVQQLKQGSGRKPSSDLPLLTNLFKGVLRCSECGFIVVVAGVSAKRSGIYKCSMKSEGRCNSVGFSRLQTDRALVQGLLYNTNRLSLNRDNGSAIGTLQSELEQLQKQRERLIKLAMLADDTESMAKDLKALNSQIKDAEKAVSEVHQREQSSQLETISHLDLTVKKDRIESQIIIKRIVKEIRLNTAGKKCDVFLHNGLKLYNFPLDRVVDGAQWLEILPLIDGDEFDFEGFTTKPRHIAFEEAPEWVKEMEEQPKQ

SEQ ID NO: 33307 - DNA, 50 bp, Klebsiella quasipneumoniae; identical to SEQ ID NO: 33152
  source 1..50: mol_type = genomic DNA

SEQ ID NO: 33308 - DNA, 40 bp, Klebsiella quasipneumoniae; identical to SEQ ID NO: 33003
  source 1..40: mol_type = genomic DNA

SEQ ID NO: 33309 - DNA, 40 bp, Klebsiella quasipneumoniae; identical to SEQ ID NO: 33004
  source 1..40: mol_type = genomic DNA

SEQ ID NO: 33310 - DNA, 50 bp, Klebsiella quasipneumoniae; identical to SEQ ID NO: 1340
  source 1..50: mol_type = genomic DNA

SEQ ID NO: 33311 - protein, 518 aa, Enterobacter hormaechei; identical to SEQ ID NO: 33301

SEQ ID NO: 33312 - DNA, 50 bp, Enterobacter hormaechei; identical to SEQ ID NO: 32992
  source 1..50: mol_type = genomic DNA

SEQ ID NO: 33313 - DNA, 40 bp, Enterobacter hormaechei; identical to SEQ ID NO: 33033
  source 1..40: mol_type = genomic DNA

SEQ ID NO: 33314 - DNA, 40 bp, Enterobacter hormaechei; identical to SEQ ID NO: 33034
  source 1..40: mol_type = genomic DNA

SEQ ID NO: 33315 - DNA, 50 bp, Enterobacter hormaechei; identical to SEQ ID NO: 1340
  source 1..50: mol_type = genomic DNA

SEQ ID NO: 33316 - protein, 518 aa, Enterobacter hormaechei; identical to SEQ ID NO: 33081

SEQ ID NO: 33317 - DNA, 50 bp, Enterobacter hormaechei; identical to SEQ ID NO: 32992
  source 1..50: mol_type = genomic DNA

SEQ ID NO: 33318 - DNA, 40 bp, Enterobacter hormaechei; identical to SEQ ID NO: 33033
  source 1..40: mol_type = genomic DNA

SEQ ID NO: 33319 - DNA, 40 bp, Enterobacter hormaechei; identical to SEQ ID NO: 33034
  source 1..40: mol_type = genomic DNA

SEQ ID NO: 33320 - DNA, 50 bp, Enterobacter hormaechei; identical to SEQ ID NO: 1340
  source 1..50: mol_type = genomic DNA

SEQ ID NO: 33321 - protein, 518 aa, Enterobacter hormaechei; identical to SEQ ID NO: 33196

SEQ ID NO: 33322 - DNA, 50 bp, Enterobacter hormaechei; identical to SEQ ID NO: 32992
  source 1..50: mol_type = genomic DNA

SEQ ID NO: 33323 - DNA, 40 bp, Enterobacter hormaechei; identical to SEQ ID NO: 33033
  source 1..40: mol_type = genomic DNA

SEQ ID NO: 33324 - DNA, 40 bp, Enterobacter hormaechei; identical to SEQ ID NO: 33034
  source 1..40: mol_type = genomic DNA

SEQ ID NO: 33325 - DNA, 50 bp, Enterobacter hormaechei; identical to SEQ ID NO: 1340
  source 1..50: mol_type = genomic DNA

SEQ ID NO: 33326 - protein, 541 aa, Enterobacter hormaechei; identical to SEQ ID NO: 33266

SEQ ID NO: 33327 - DNA, 50 bp, Enterobacter hormaechei; identical to SEQ ID NO: 32992
  source 1..50: mol_type = genomic DNA

SEQ ID NO: 33328 - DNA, 40 bp, Enterobacter hormaechei
  source 1..40: mol_type = genomic DNA
atgtacggggcggctgtcgaggatcacgcggttgaccgat

SEQ ID NO: 33329 - DNA, 40 bp, Enterobacter hormaechei
  source 1..40: mol_type = genomic DNA
atgtacggggcggctgtcgcagatcacgcggttgaccgat

SEQ ID NO: 33330 - DNA, 50 bp, Enterobacter hormaechei; identical to SEQ ID NO: 1340
  source 1..50: mol_type = genomic DNA

SEQ ID NO: 33331 - protein, 518 aa, Enterobacter hormaechei
MPKAISYIRFSTKIQSVGDSTKRQSKYINDWLKRNPDYYLDESLRFQDLGISGFSGANSKSGAFGEFLAAVESGYIEAGSVLLVESLDRVSRQDIDTAGEQLRKILRSGVEVVTLVDNEWYTKESLKDSLSMIKAMLVMERAHEESAMKSTRLRSMWAGKRERAANGEIMSKRCAAWLKVSEDRSHFEFIPENVKAVQRVFQLRLEGLSHVKIAKQMNDEGFSTLNQFKSVTGGWSQSSVTELLSNRSVIGFKVPSKSMAVKGVSEIPNYYPSIITDEQFYAVQQLKQGSGRKPSSDLPLLTNLFKGVLRCSECGFIVVVAGVSAKRSGIYKCSMKSEGRCNSVGFSRLQTDKALVQGLLYNTNRLSLNRDSGSAIGTLQSELEQLHKQRERLIKLAMLADDTESMAKDLKALNSQIKDAEKAVSEVHQREQSSQLETISHLDLTVKKDRIEAQIIIKRIVKEIRLNTAQKKCDVFLHNGLRLLNFPLDRVVDGEIFLEVLPVLEADEFDFDTYRMIE

SEQ ID NO: 33332 - DNA, 50 bp, Enterobacter hormaechei; identical to SEQ ID NO: 32992
  source 1..50: mol_type = genomic DNA

SEQ ID NO: 33333 - DNA, 40 bp, Enterobacter hormaechei; identical to SEQ ID NO: 33043
  source 1..40: mol_type = genomic DNA

SEQ ID NO: 33334 - DNA, 40 bp, Enterobacter hormaechei; identical to SEQ ID NO: 33044
  source 1..40: mol_type = genomic DNA

SEQ ID NO: 33335 - DNA, 50 bp, Enterobacter hormaechei; identical to SEQ ID NO: 1340
  source 1..50: mol_type = genomic DNA

SEQ ID NO: 33336 - protein, 518 aa, Enterobacter hormaechei; identical to SEQ ID NO: 33176

SEQ ID NO: 33337 - DNA, 50 bp, Enterobacter hormaechei; identical to SEQ ID NO: 32992
  source 1..50: mol_type = genomic DNA

SEQ ID NO: 33338 - DNA, 40 bp, Enterobacter hormaechei; identical to SEQ ID NO: 33033
  source 1..40: mol_type = genomic DNA

SEQ ID NO: 33339 - DNA, 40 bp, Enterobacter hormaechei; identical to SEQ ID NO: 33034
  source 1..40: mol_type = genomic DNA

SEQ ID NO: 33340 - DNA, 50 bp, Enterobacter hormaechei; identical to SEQ ID NO: 1340
  source 1..50: mol_type = genomic DNA

SEQ ID NO: 33341 - protein, 541 aa, Enterobacter hormaechei; identical to SEQ ID NO: 33026

SEQ ID NO: 33342 - DNA, 50 bp, Enterobacter hormaechei; identical to SEQ ID NO: 32992
  source 1..50: mol_type = genomic DNA

SEQ ID NO: 33343 - DNA, 40 bp, Enterobacter hormaechei; identical to SEQ ID NO: 33328
  source 1..40: mol_type = genomic DNA

SEQ ID NO: 33344 - DNA, 40 bp, Enterobacter hormaechei; identical to SEQ ID NO: 33329
  source 1..40: mol_type = genomic DNA

SEQ ID NO: 33345 - DNA, 50 bp, Enterobacter hormaechei; identical to SEQ ID NO: 1340
  source 1..50: mol_type = genomic DNA

SEQ ID NO: 33346 - protein, 540 aa, Enterobacter hormaechei; identical to SEQ ID NO: 33011

SEQ ID NO: 33347 - DNA, 50 bp, Enterobacter hormaechei; identical to SEQ ID NO: 32992
  source 1..50: mol_type = genomic DNA

SEQ ID NO: 33348 - DNA, 40 bp, Enterobacter hormaechei; identical to SEQ ID NO: 33328
  source 1..40: mol_type = genomic DNA

SEQ ID NO: 33349 - DNA, 40 bp, Enterobacter hormaechei; identical to SEQ ID NO: 33329
  source 1..40: mol_type = genomic DNA

SEQ ID NO: 33350 - DNA, 50 bp, Enterobacter hormaechei; identical to SEQ ID NO: 1340
  source 1..50: mol_type = genomic DNA

SEQ ID NO: 33351 - protein, 541 aa, Klebsiella grimontii
MPKAISYIRFSTKIQSVGDSTKRQSKYINDWLKRNPDYYLDESLRFQDLGISGFSGANAKSGAFSEFLAAVESGYIEAGSVLLVESLDRVSRQDIDTAGEQLRKILRSGVEVVTLVDNEWYTKESLKDSLSMIKAMLVMERAHEESAMKSTRLRSVWAAKRERAAKGEIMSKRCAAWLKVSEDRSHFEFIPENVKAVQRVFQLRLEGLSHVKIAKQMNDEGFSTLNQFKSVTGGWSQSSVTELLSNRSVIGFKVPSKSMAVKGVSEIPNYYPSIITDEQFYAVQQLKQGSGRKPSSDLPLLTNLFKGVLRCSECGFIVVVAGVSAKRSGIYKCSMKSEGRCNSVGFSRLQTDRALVQGLLYNTNRLALNRDNGSAIGSLQSELEQLQKQRERLIKLAMLADDTESMAKDLKALNSQIKDAEKAVSEVHQREQSSQLETISHLDLTVKKDRIEAQIIIKRIVKEIRLNTAKKRCDVFLHNGLKLLSFPLDRVVDGAQWLEILPLIDGDEFDFEGFTTKPRHLVLEEAPEWVKEIEAQPNQPL

SEQ ID NO: 33352 - DNA, 50 bp, Klebsiella grimontii; identical to SEQ ID NO: 32992
  source 1..50: mol_type = genomic DNA

SEQ ID NO: 33353 - DNA, 40 bp, Klebsiella grimontii; identical to SEQ ID NO: 33253
  source 1..40: mol_type = genomic DNA

SEQ ID NO: 33354 - DNA, 40 bp, Klebsiella grimontii; identical to SEQ ID NO: 33254
  source 1..40: mol_type = genomic DNA

SEQ ID NO: 33355 - DNA, 50 bp, Klebsiella grimontii; identical to SEQ ID NO: 1340
  source 1..50: mol_type = genomic DNA

SEQ ID NO: 33356 - protein, 540 aa, Klebsiella grimontii; identical to SEQ ID NO: 33011

SEQ ID NO: 33357 - DNA, 50 bp, Klebsiella grimontii; identical to SEQ ID NO: 32992
  source 1..50: mol_type = genomic DNA

SEQ ID NO: 33358 - DNA, 40 bp, Klebsiella grimontii; identical to SEQ ID NO: 33253
  source 1..40: mol_type = genomic DNA

SEQ ID NO: 33359 - DNA, 40 bp, Klebsiella grimontii; identical to SEQ ID NO: 33254
  source 1..40: mol_type = genomic DNA

SEQ ID NO: 33360 - DNA, 50 bp, Klebsiella grimontii; identical to SEQ ID NO: 1340
  source 1..50: mol_type = genomic DNA

SEQ ID NO: 33361 - protein, 518 aa, Klebsiella grimontii; identical to SEQ ID NO: 33181

SEQ ID NO: 33362 - DNA, 50 bp, Klebsiella grimontii; identical to SEQ ID NO: 32992
  source 1..50: mol_type = genomic DNA

SEQ ID NO: 33363 - DNA, 40 bp, Klebsiella grimontii; identical to SEQ ID NO: 33253
  source 1..40: mol_type = genomic DNA

SEQ ID NO: 33364 - DNA, 40 bp, Klebsiella grimontii; identical to SEQ ID NO: 33254
  source 1..40: mol_type = genomic DNA

SEQ ID NO: 33365 - DNA, 50 bp, Klebsiella grimontii; identical to SEQ ID NO: 1340
  source 1..50: mol_type = genomic DNA

SEQ ID NO: 33366 - protein, 541 aa, Enterobacter roggenkampii; identical to SEQ ID NO: 33186

SEQ ID NO: 33367 - DNA, 50 bp, Enterobacter roggenkampii; identical to SEQ ID NO: 32992
  source 1..50: mol_type = genomic DNA

SEQ ID NO: 33368 - DNA, 40 bp, Enterobacter roggenkampii
  source 1..40: mol_type = genomic DNA
gtgcaccggacggctatcgaggatcacccggttaacggag

SEQ ID NO: 33369 - DNA, 40 bp, Enterobacter roggenkampii
  source 1..40: mol_type = genomic DNA
gtgcaccggacggctatcgcagatcacccggttaacggag

SEQ ID NO: 33370 - DNA, 50 bp, Enterobacter roggenkampii; identical to SEQ ID NO: 1340
  source 1..50: mol_type = genomic DNA

SEQ ID NO: 33371 - protein, 520 aa, Enterobacter kobei
MPKAISYIRFSTKIQSVGDSTKRQSKYINDWLKRNPDYYLDESLRFQDLGISGFSGANAKSGAFGEFLAAVESGYIEAGSVLLVESLDRVSRQDIDTAGEQLRKILRSGVEVVTLVDNEWYTKESLKDSLSMIKAMLVMERAHEESAMKSTRLRSMWAAKRERAANGEIMSKRCAAWLKVSDDRSHFEFIPENVKAVQRVFQLRLEGLSHVKIAKQMNDEGFSTLNQFKSVTGGWSQSSVTELLSNRSVIGFKVPSKSMAVKGVSEIPNYYPSIITDEQFYAVQQLKQGSGRKPSSDLPLLTNLFKGVLRCSECGFIVVVAGVSAKRSGIYKCSMKSEGRCNSVGFSRLQTDRALVQGLLYNTNRLSLNRDNGSAIGTLQSELEQLQKQRERLIKLAMLADDTESMAKDLKALNSQIKDAEKAVSEVHQREQSSQLETISHLDLTVKKDRIEAQIIIKRIVKEIRLNTAQKKCDVFLHNGLKLLNFPLDRVVDGAQWLEVLPLIDGDEFDFAEFTAKPRH

SEQ ID NO: 33372 - DNA, 50 bp, Enterobacter kobei; identical to SEQ ID NO: 32992
  source 1..50: mol_type = genomic DNA

SEQ ID NO: 33373 - DNA, 40 bp, Enterobacter kobei
  source 1..40: mol_type = genomic DNA
gtggacggggcgactgtcaagaatgacacggttgaccgca

SEQ ID NO: 33374 - DNA, 40 bp, Enterobacter kobei
  source 1..40: mol_type = genomic DNA
gtggacggggcgactgtcacaaatgacacggttgaccgca

SEQ ID NO: 33375 - DNA, 50 bp, Enterobacter kobei; identical to SEQ ID NO: 1340
  source 1..50: mol_type = genomic DNA

SEQ ID NO: 33376 - protein, 518 aa, Cronobacter sakazakii
MPKAISYIRFSTKIQSVGDSTKRQSKYINDWLKRNPDYYLDESLRFQDLGISGFSGANAKSGAFGEFLAAVESGYIESGSVLLVESLDRVSRQDIDTAGEQLRKILRAGVEVVTLVDNEWYTKESLKDSLSMIKAMLVMERAHEESAMKSTRLRSVWAAKRERAANGEIMSKRCAAWLKVSEDRSHFEFIPENVKAVQRVFQLRLEGLSHIKIAKQMNDEGFYTLNQHKSVKGGWSQSSVTELLSNRSVIGFKVPSKSMAVKGVSEIPNYYPAIITDEQFYAVQQLKQGSGRKPSSDLPLLTNLFKGVLRCSECGFIVVVAGVSAKRSGIYKCSMKSEGRCNSVGFSRLQTDKALVQGLLYNTNRLSLNRDSGSAIGTLQSELEQLQKQRERLIKLAMLADDTESMAKDLKALNSRIKDAEKAVSEVHQREQSSQLETISHLDLTVKKDRIEAQIIIKRIVKEIRLNTAGKKCDVFLHNGLKLLNFPLDRVVDGEIFLEVLPVLEADEFDFDTYRMIE

SEQ ID NO: 33377 - DNA, 50 bp, Cronobacter sakazakii; identical to SEQ ID NO: 32992
  source 1..50: mol_type = genomic DNA

SEQ ID NO: 33378 - DNA, 40 bp, Cronobacter sakazakii; identical to SEQ ID NO: 33108
  source 1..40: mol_type = genomic DNA

SEQ ID NO: 33379 - DNA, 40 bp, Cronobacter sakazakii; identical to SEQ ID NO: 33109
  source 1..40: mol_type = genomic DNA

SEQ ID NO: 33380 - DNA, 50 bp, Cronobacter sakazakii; identical to SEQ ID NO: 1340
  source 1..50: mol_type = genomic DNA

SEQ ID NO: 33381 - protein, 541 aa, Cronobacter sakazakii
MPKAISYIRFSTKIQSVGDSTKRQSKYINDWLKRNPDYYLDESLRFQDLGISGFSGANAKSGAFSEFLAAVESGYIEAGSVLLVESLDRVSRQDIDTAGEQLRKILRSGVEVVTLVDNEWYTKESLKDSLSMIKAMLVMERAHEESAMKSTRLRSVWAAKRERAAKGEIMSKRCAAWLKVSEDRSHFEFIPENVKAVQRVFQLRLEGLSHVKIAKQMNDEGFSTLNQFKSVKGGWSQSSITELLSNRAVIGVKVPSKSMVVKGVSEILGYYPAIISEQQFYAVQQLKQGSGRKPSSDLPLLTNLFKGVLRCSECGFIVVVAGVSAKRSGIYKCSMKSEGRCNSVGFSRLQTDKALVQGLLYNTNRLSLNRDNGSAIGSLQSELEQLQKQRERLIKLAMLADDTESMAKDLKALNSQIKDAEKAVSEVHQREQSSQLETISHLDLTVKKDRVEAQIIIKRIVKEIRLNTARKKCDVFLHNGLKLLNFPLDRVVDGAQWLEVLPLIDGDEFDFEGFNTKPQHIALEEAPEWVKEMEEQPNQPL

SEQ ID NO: 33382 - DNA, 50 bp, Cronobacter sakazakii; identical to SEQ ID NO: 32992
  source 1..50: mol_type = genomic DNA

SEQ ID NO: 33383 - DNA, 40 bp, Cronobacter sakazakii; identical to SEQ ID NO: 33108
  source 1..40: mol_type = genomic DNA

SEQ ID NO: 33384 - DNA, 40 bp, Cronobacter sakazakii; identical to SEQ ID NO: 33109
  source 1..40: mol_type = genomic DNA

SEQ ID NO: 33385 - DNA, 50 bp, Cronobacter sakazakii; identical to SEQ ID NO: 1340
  source 1..50: mol_type = genomic DNA

SEQ ID NO: 33386 - protein, 541 aa, Cronobacter dublinensis; identical to SEQ ID NO: 33106

SEQ ID NO: 33387 - DNA, 50 bp, Cronobacter dublinensis; identical to SEQ ID NO: 32992
  source 1..50: mol_type = genomic DNA

SEQ ID NO: 33388 - DNA, 40 bp, Cronobacter dublinensis
  source 1..40: mol_type = genomic DNA
atgcaccgggcggctgtcgagcatcacgcgattaacgccg

SEQ ID NO: 33389 - DNA, 40 bp, Cronobacter dublinensis
  source 1..40: mol_type = genomic DNA
atgcaccgggcggctgtcgcacatcacgcgattaacgccg

SEQ ID NO: 33390 - DNA, 50 bp, Cronobacter dublinensis; identical to SEQ ID NO: 1340
  source 1..50: mol_type = genomic DNA

SEQ ID NO: 33391 - protein, 541 aa, Cronobacter dublinensis
MPKAISYIRFSTKIQSVGDSTKRQSKYINDWLKRNPDYYLDESLRFQDLGISGFSGANAKSGAFGEFLAAVESGYIEAGSVLLVESLDRVSRQDIDTAGEQLRKILRSGVEVVTLVDNEWYTKESLKDSLSMIKAMLVMERAHEESAMKSTRLRSVWAAKRERAAKGEIMSKRCAAWLKVSEDRSHFEFIPENVKAVQRVFQLRLEGLSHVKIAKQMNDEGFSTLNQFKSVTGGWSQSSVTELLSNRSVIGFKVPSKSMAVKGVSEIPNYYPSIITDEQFYAVQQLKQGSGRKPSSDLPLLTNLFKGVLRCSECGFIVVVAGVSAKRSGIYKCSMKSEGRCNSVGFSRLQTDRALVQGLLYNTNRLALNRDNGSAIGSLQSELEQLQKQRERLIKLAMLADDTESMAKDLKALNSQIKDAEKAVSEVHQREQSSQLETISHLDLTVKKDRIEAQIIIKRIVKEIRLNTARKKCDVFLHNGLKLLNFPLDRVVDGAQWLEVLPLIDGDEFDFEGFTTKPQHIALEEAPEWVKEMEEQPNQPL

SEQ ID NO: 33392 - DNA, 50 bp, Cronobacter dublinensis; identical to SEQ ID NO: 32992
  source 1..50: mol_type = genomic DNA

SEQ ID NO: 33393 - DNA, 40 bp, Cronobacter dublinensis; identical to SEQ ID NO: 33388
  source 1..40: mol_type = genomic DNA

SEQ ID NO: 33394 - DNA, 40 bp, Cronobacter dublinensis; identical to SEQ ID NO: 33389
  source 1..40: mol_type = genomic DNA

SEQ ID NO: 33395 - DNA, 50 bp, Cronobacter dublinensis; identical to SEQ ID NO: 1340
  source 1..50: mol_type = genomic DNA

SEQ ID NO: 33396 - protein, 541 aa, Enterobacter ludwigii
MPKAISYIRFSTKIQLVGDSTKRQSKYINDWLKRNPDYYLDESLRFQDLGISGFSGANAKSGAFGEFLAAVESGYIEAGSVLLVESLDRVSRQDIDTAGEQLRKILRSGVEVVTLVDNEWYTKESLKDSLSMIKAMLVMERAHEESAMKSTRLRSVWAAKRERAAKGEIMSKRCAAWLKVSEDRSRFEFIPENVKAVQRVFQLRLEGLSHVKIAKQMNDEGFSTLNQFKSVTGGWSQSSVTELLSNRSVIGFKVPSKSMAVKGVSEIPNYYPSIITDEQFYAVQQLKQGSGRKPSSDLPLLTNLFKGVLRCSECGFIVVVAGVSAKRSGIYKCSMKSEGRCNSVGFSRLQTDRALVQGLLYNTNRLSLNRDNGSAIGSLQSELEQLQKQRERLIKLAMLADDTESMAKDLKALNSQIKDAEKAVSEVHQREQSSQLETISHLDLTVKKDRIEAQIIIKRIVKEIRLNTAGKKCDVFLHNGLKLLNFPLDRVVDGAQWLEVLPLIDGDEFDFVEFTTKPRHIALEEAPDWVKEMDEQSNQPL

SEQ ID NO: 33397 - DNA, 50 bp, Enterobacter ludwigii; identical to SEQ ID NO: 32992
  source 1..50: mol_type = genomic DNA

SEQ ID NO: 33398 - DNA, 40 bp, Enterobacter ludwigii
  source 1..40: mol_type = genomic DNA
gtgcacggggcggctgtcgagaatcacccggttcaccccg

SEQ ID NO: 33399 - DNA, 40 bp, Enterobacter ludwigii
  source 1..40: mol_type = genomic DNA
gtgcacggggcggctgtcgcaaatcacccggttcaccccg

SEQ ID NO: 33400 - DNA, 50 bp, Enterobacter ludwigii; identical to SEQ ID NO: 1340
  source 1..50: mol_type = genomic DNA

SEQ ID NO: 33401 - protein, 540 aa, Klebsiella variicola
MPKAISYIRFSTKIQSVGDSTKRQSKYINDWLKRNPDYYLDESLRFQDLGISGFSGANAKSGAFGEFLAAVESGYIEAGSVLLVESLDRVSRQDIDTAGEQLRKILRSGVEVVTLVDNEWYTKESLKDSLSMIKAMLVMERAHEESAMKSTRLRSVWAAKRERAAKGEIMSKRCAAWLKVSEDRSRFEFIPENVKAVQRVFQLRLEGLSHVKIAKQMNDEGFSTLNQFKSVTGGWSQSSVTELLSNRSVIGFKVPSKSMAVKGVSEIPYYYPSIITDEQFYAVQQLKQGSGRKPSSDLPLLTNLFKGVLRCSECGFIVVVAGVSAKRSGIYKCSMKSEGRCNSVGFSRLQTDRALVQGLLYNANRLFLNRDNGSAIGALQGELEQLQKQRERLIKLAMLADDTESMAKDLKALNSQIKDAEKAVSEVHQREQSSQLETISHLDLTVKKDRIEAQIIIKRIVKEIRLNTAEKKCDVLLHNGLRLLNFPLDMVVDGAQWLEILPLIDGDEFDFEGFSTKPRHLAFEEAPEWVKELEFNSKIQ

SEQ ID NO: 33402 - DNA, 50 bp, Klebsiella variicola; identical to SEQ ID NO: 32992
  source 1..50: mol_type = genomic DNA

SEQ ID NO: 33403 - DNA, 40 bp, Klebsiella variicola; identical to SEQ ID NO: 33068
  source 1..40: mol_type = genomic DNA

SEQ ID NO: 33404 - DNA, 40 bp, Klebsiella variicola; identical to SEQ ID NO: 33069
  source 1..40: mol_type = genomic DNA

SEQ ID NO: 33405 - DNA, 50 bp, Klebsiella variicola; identical to SEQ ID NO: 1340
  source 1..50: mol_type = genomic DNA

SEQ ID NO: 33406 - protein, 518 aa, Klebsiella variicola
MPKAISYIRFSTKIQSVGDSTKRQSKYINDWLKRNPDYYLDESLRFQDLGISGFSGANAKSGAFGEFLAAVESGYIEAGSVLLVESLDRVSRQDIDTAGEQLRKILRSGVEVVTLVDNEWYTKESLKDSLSMIKAMLVMERAHEESAMKSTRLRSMWAGKRERAANGEIMSKRCAAWLKVSEDRSHFEFIHENVKAVQRVFQLRLEGLSHVKIAKQMNDEGFSTLNQFKSVTGGWSQSSVTELLSNRSVIGFKVPSKSMAVKGVSEIPNYYPSIITDEQFYAVQQLKQGSGRKPSSDLPLLTNLFKGVLRCSECGFIVVVAGVSAKRSGIYKCSMKSEGRCNSVGFSRLQTDRALVQGLLYNTNRLSLNRDNGSAIGTLQSELEQLQKQRERLIKLAMLADDTESMAKDLKALNSQIKDAEKAVSEVHQREQSSQLETISHLDLTLKKDRIEAQIIIKRIVKEIRLNTAQKKCDVFLHNGLKLLNFPLDRVVDGEIFLEVLPLLEADEFDFDTYRVIE

SEQ ID NO: 33407 - DNA, 50 bp, Klebsiella variicola
  source 1..50: mol_type = genomic DNA
gtgtatcaatagaaaggtctcttcaggattacatctttcttatgatacac

SEQ ID NO: 33408 - DNA, 40 bp, Klebsiella variicola; identical to SEQ ID NO: 33063
  source 1..40: mol_type = genomic DNA

SEQ ID NO: 33409 - DNA, 40 bp, Klebsiella variicola; identical to SEQ ID NO: 33064
  source 1..40: mol_type = genomic DNA

SEQ ID NO: 33410 - DNA, 50 bp, Klebsiella variicola; identical to SEQ ID NO: 1340
  source 1..50: mol_type = genomic DNA

SEQ ID NO: 33411 - protein, 541 aa, Klebsiella variicola; identical to SEQ ID NO: 33186

SEQ ID NO: 33412 - DNA, 50 bp, Klebsiella variicola; identical to SEQ ID NO: 32992
  source 1..50: mol_type = genomic DNA

SEQ ID NO: 33413 - DNA, 40 bp, Klebsiella variicola; identical to SEQ ID NO: 33068
  source 1..40: mol_type = genomic DNA

SEQ ID NO: 33414 - DNA, 40 bp, Klebsiella variicola; identical to SEQ ID NO: 33069
  source 1..40: mol_type = genomic DNA

SEQ ID NO: 33415 - DNA, 50 bp, Klebsiella variicola; identical to SEQ ID NO: 1340
  source 1..50: mol_type = genomic DNA

SEQ ID NO: 33416 - protein, 518 aa, Klebsiella variicola
MPKAISYIRFSTKIQSVGDSTKRQSKYINDWLKRNPDYYLDESLRFQDLGISGFSGANAKSGAFSEFLAAVESGYIEAGSVLLVESLDRVSRQDIDTAGEQLRKILRSGVEVVTLVDNEWYTKESLKDSLSMIKAMLVMERAHEESAMKSTRLRSVWAAKRERAAKGEIMSKRCAAWLKVSEDRSHFEFIPENVKAVQRVFQLRLEGKSHAKIAKQMNEEGFYTLNQFKSVKGGWSQSSITELLSNRAVIGVKVPSKSMVVKGVSEIPNYYPSIITDEQFYAVQQLKQGSGRKPSSDLPLLTNLFKGVLRCSECGFIVVVAGVSAKRSGIYKCSMKSEGRCNSVGFSRLQTDRALVQGLLYNTNRLSLNRDNGSAIGTLQSELEQLQKQRERLIKLAMLADDTESMAKDLKALNSQIKDAEKTVSEVHQREQSSQLETISHLDLTVKKDRIEAQIIIKRIVKEIRLNTAQKKCDVFLHNGLKLLNFPLDRLVDGEIFLEVLPVLEADEFDFDTYRMIE

SEQ ID NO: 33417 - DNA, 50 bp, Klebsiella variicola; identical to SEQ ID NO: 32992
  source 1..50: mol_type = genomic DNA

SEQ ID NO: 33418 - DNA, 40 bp, Klebsiella variicola; identical to SEQ ID NO: 33068
  source 1..40: mol_type = genomic DNA

SEQ ID NO: 33419 - DNA, 40 bp, Klebsiella variicola; identical to SEQ ID NO: 33069
  source 1..40: mol_type = genomic DNA

SEQ ID NO: 33420 - DNA, 50 bp, Klebsiella variicola; identical to SEQ ID NO: 1340
  source 1..50: mol_type = genomic DNA

SEQ ID NO: 33421 - protein, 541 aa, Serratia marcescens; identical to SEQ ID NO: 33026

SEQ ID NO: 33422 - DNA, 50 bp, Serratia marcescens; identical to SEQ ID NO: 32992
  source 1..50: mol_type = genomic DNA

SEQ ID NO: 33423 - DNA, 40 bp, Serratia marcescens; identical to SEQ ID NO: 33098
  source 1..40: mol_type = genomic DNA

SEQ ID NO: 33424 - DNA, 40 bp, Serratia marcescens; identical to SEQ ID NO: 33099
  source 1..40: mol_type = genomic DNA

SEQ ID NO: 33425 - DNA, 50 bp, Serratia marcescens; identical to SEQ ID NO: 1340
  source 1..50: mol_type = genomic DNA

SEQ ID NO: 33426 - protein, 508 aa, Cronobacter malonaticus
MPKAISYIRFSTKIQSVGDSTKRQSKYINDWLKRNPDYYLDESLRFQDLGISGFSGANAKSGAFGEFLAAVESGYIEAGSVLLVESLDRVSRQDIDTAGEQLRKILRAGVEVVTLVDNEWYTKESLKDSLSMIKAMLVMERAHEESAMKSTRLRSMWAGKRERAANGEIMSKRCAAWLKVSEDRSHFEFIPENVKAVQRVFQLRLEGLSHVKIAKQMNDEGFSTLNQFKPVKGGWSQSSVTELLSNRSVIGFKVPSKSMAVKGVSEIPNYYPSIITDEQFYAVQQLKQGSGRKPSSDLPLLTNLFKGVLRCSECGFIVVVAGVSAKRSGIYKCSMKSEGRCNSVGFSRLQTDRALVQGLLYNTNRLSLNRDNGSAIGSLQSELEQLQKQRERLIKLAMLADDTESMAKDLKALNRQIKDAEKAVSEVHQREQSSQLETISHLDLTVKKDRIEAQIIIKRIVKEIRLNTAGKKCDVFLHNGLKLLNFPLDRIVDGEIFLEVLPVLEVVL

SEQ ID NO: 33427 - DNA, 50 bp, Cronobacter malonaticus; identical to SEQ ID NO: 32992
  source 1..50: mol_type = genomic DNA

SEQ ID NO: 33428 - DNA, 40 bp, Cronobacter malonaticus
  source 1..40: mol_type = genomic DNA
atgcaccgggcggctgtcgagcatcacgcggttgacaccg

SEQ ID NO: 33429 - DNA, 40 bp, Cronobacter malonaticus
  source 1..40: mol_type = genomic DNA
atgcaccgggcggctgtcgcacatcacgcggttgacaccg

SEQ ID NO: 33430 - DNA, 50 bp, Cronobacter malonaticus; identical to SEQ ID NO: 1340
  source 1..50: mol_type = genomic DNA

SEQ ID NO: 33431 - protein, 518 aa, Raoultella planticola; identical to SEQ ID NO: 33301

SEQ ID NO: 33432 - DNA, 50 bp, Raoultella planticola; identical to SEQ ID NO: 32992
  source 1..50: mol_type = genomic DNA

SEQ ID NO: 33433 - DNA, 40 bp, Raoultella planticola; identical to SEQ ID NO: 33103
  source 1..40: mol_type = genomic DNA

SEQ ID NO: 33434 - DNA, 40 bp, Raoultella planticola; identical to SEQ ID NO: 33104
  source 1..40: mol_type = genomic DNA

SEQ ID NO: 33435 - DNA, 50 bp, Raoultella planticola; identical to SEQ ID NO: 1340
  source 1..50: mol_type = genomic DNA

SEQ ID NO: 33436 - protein, 541 aa, Klebsiella oxytoca
MPKAISYIRFSTKIQSVGDSTKRQSKYINDWLKRNPDYYLDESLRFQDLGISGFSGANAKSGAFGEFLAAVESGYIESGSVLLVESLDRVSRQDIDTAGEQLRKILRSGVEVVTLVDNEWYTKESLKDSLSMIKAMLVMERAHEESAMKSTRLRSMWAAKRERAANGEIMSKRCAAWLKVSEDRSHFEFITENVKAVQRVFQLRLEGLSHIKIAKQMNDEGFYTLNQHKSVKGGWSQSSVTELLSNRSVIGFKVPSKSMAVKGVSEIPNYYPAIITDEQFYAVQQLKQGSGRKPSSDLPLLTNLFKGVLRCSECGFIVVVAGVSAKRSGIYKCSMKSEGRCNSVGFSRLQTDRALVQGLLYNTNRLSLNRDTGSAIGSLQSELEQLQKQRERLVKLAMLTDDVESMAKDLKALNSQIKDAEKAVSEVHQREQSSQLETISHLDLTMKKDRIEAQIIIKRIVKEIRLNTAQKKCDVFLHNGLKLLNFPLDRVVDGAQWLEVLPLIDGDEFDFAEFITKPRHTALEEAPEWVKEMEEQPNQPL

SEQ ID NO: 33437 - DNA, 50 bp, Klebsiella oxytoca; identical to SEQ ID NO: 32992
  source 1..50: mol_type = genomic DNA

SEQ ID NO: 33438 - DNA, 40 bp, Klebsiella oxytoca; identical to SEQ ID NO: 8143
  source 1..40: mol_type = genomic DNA

SEQ ID NO: 33439 - DNA, 40 bp, Klebsiella oxytoca; identical to SEQ ID NO: 8144
  source 1..40: mol_type = genomic DNA

SEQ ID NO: 33440 - DNA, 50 bp, Klebsiella oxytoca; identical to SEQ ID NO: 1340
  source 1..50: mol_type = genomic DNA

SEQ ID NO: 33441 - protein, 541 aa, Raoultella ornithinolytica
MPKAISYIRFSTKIQSVGDSTKRQSKYINDWLKRNPDYYLDESLRFQDLGISGFSGANAKSGAFGEFLAAVESGYIEAGSVLLVESLDRVSRQDIDTAGEQLRKILRSGVEVVTLVDNEWYTKESLKDSLSMIKAMLVMERAHEESAMKSTRLRSVWAAKRERAAKGEIMSKRCAAWLKVSEDRSRFEFIPENVKAVQRVFQLRLEGLSHVKIAKQMNDEGFSTLNQFKSVTGGWSQSSVTELLSNRSVIGFKVPSKSMAVKGVSEIPNYYPSIITDEQFYAVQQLKQGSGRKPSSDLPLLTNLFKGVLRCSECGFIVVVAGVSAKRSGIYKCSMKSEGRCNSVGFSRLQTDRALVQGLLYNTNRLALNRDNGSAIGSLQSELEQLQKQRERLIKLAMLADDTESMAKDLKALNSQIKDAEKAVSEVHQREQSSQLETISHLDLTVKKDRIEAQIIIKRIVKEIRLNTARKKCDVFLHNGLKLLNFPLDRVVDGAQWLEVLPLIDGDEFDFEGFTTKPQHIALEEAPEWVKEMEEQPNQPL

SEQ ID NO: 33442 - DNA, 50 bp, Raoultella ornithinolytica; identical to SEQ ID NO: 32992
  source 1..50: mol_type = genomic DNA

SEQ ID NO: 33443 - DNA, 40 bp, Raoultella ornithinolytica; identical to SEQ ID NO: 33093
  source 1..40: mol_type = genomic DNA

SEQ ID NO: 33444 - DNA, 40 bp, Raoultella ornithinolytica; identical to SEQ ID NO: 33094
  source 1..40: mol_type = genomic DNA

SEQ ID NO: 33445 - DNA, 50 bp, Raoultella ornithinolytica; identical to SEQ ID NO: 1340
  source 1..50: mol_type = genomic DNA

SEQ ID NO: 33446 - protein, 541 aa, Raoultella ornithinolytica; identical to SEQ ID NO: 33036

SEQ ID NO: 33447 - DNA, 50 bp, Raoultella ornithinolytica; identical to SEQ ID NO: 32992
  source 1..50: mol_type = genomic DNA

SEQ ID NO: 33448 - DNA, 40 bp, Raoultella ornithinolytica; identical to SEQ ID NO: 33093
  source 1..40: mol_type = genomic DNA

SEQ ID NO: 33449 - DNA, 40 bp, Raoultella ornithinolytica; identical to SEQ ID NO: 33094
  source 1..40: mol_type = genomic DNA

SEQ ID NO: 33450 - DNA, 50 bp, Raoultella ornithinolytica; identical to SEQ ID NO: 1340
  source 1..50: mol_type = genomic DNA

SEQ ID NO: 33451 - protein, 518 aa, Raoultella ornithinolytica
MPKAISYIRFSTKIQSVGDSTKRQSKYINDWLKRNPDYYLDESLRFQDLGISGFSGANAKSGAFGEFLAAVESGYIEAGSVLLVESLDRVSRQDIDTAGEQLRKILRSGVEVVTLVDNEWYTKESLKDSLSMIKAMLVMERAHEESAMKSTRLRSVWAGKRERAANGEIMSKRCAAWLKVSDDRSHFEFIPENVKAVQRVFQLRLEGLSHVKIAKQMNDEGFSTLNQFKSVTGGWSQSSVTELLSNRSVIGFKVPSKSMAVKGVSEIPNYYPSIITDEQFYAVQQLKQGSGRKPSSDLPLLTNLFKGVLRCSECGFIVVVAGVSAKRSGIYKCSMKSEGRCNSVGFSRLQTDRALVQGLLYNTNRLSLNRGNGSAIGTLQSELEQLQKQRERLIKLAMLADDTESMAKDLKALNSQIKDAEKAVSEVHQREQSSQLETISHLDLTLKKDRIEAQIIIKRIVKEIRLNTAQKKCDVFLHNGLKLLNFPLDRVVDGEIFLEVLPLLEADEFDLDTYRVIE

SEQ ID NO: 33452 - DNA, 50 bp, Raoultella ornithinolytica; identical to SEQ ID NO: 32992
  source 1..50: mol_type = genomic DNA

SEQ ID NO: 33453 - DNA, 40 bp, Raoultella ornithinolytica; identical to SEQ ID NO: 33093
  source 1..40: mol_type = genomic DNA

SEQ ID NO: 33454 - DNA, 40 bp, Raoultella ornithinolytica; identical to SEQ ID NO: 33094
  source 1..40: mol_type = genomic DNA

SEQ ID NO: 33455 - DNA, 50 bp, Raoultella ornithinolytica; identical to SEQ ID NO: 1340
  source 1..50: mol_type = genomic DNA

SEQ ID NO: 33456 - protein, 541 aa, Serratia liquefaciens; identical to SEQ ID NO: 33026

SEQ ID NO: 33457 - DNA, 50 bp, Serratia liquefaciens; identical to SEQ ID NO: 32992
  source 1..50: mol_type = genomic DNA

SEQ ID NO: 33458 - DNA, 40 bp, Serratia liquefaciens
  source 1..40: mol_type = genomic DNA
atgcaccggccggctgtcgaggatcacccggttgataccc

SEQ ID NO: 33459 - DNA, 40 bp, Serratia liquefaciens
  source 1..40: mol_type = genomic DNA
atgcaccggccggctgtcgcagatcacccggttgataccc

SEQ ID NO: 33460 - DNA, 50 bp, Serratia liquefaciens; identical to SEQ ID NO: 1340
  source 1..50: mol_type = genomic DNA

SEQ ID NO: 33461 - protein, 518 aa, Enterobacter dykesii; identical to SEQ ID NO: 33301

SEQ ID NO: 33462 - DNA, 50 bp, Enterobacter dykesii
  source 1..50: mol_type = genomic DNA
gtgtatcaatagaaaggtctcttcaggattaaacctttcttatgatacac

SEQ ID NO: 33463 - DNA, 40 bp, Enterobacter dykesii
  source 1..40: mol_type = genomic DNA
gtgcaccgggcggctatcgagaatcacccggtttacggaa

SEQ ID NO: 33464 - DNA, 40 bp, Enterobacter dykesii
  source 1..40: mol_type = genomic DNA
gtgcaccgggcggctatcgcaaatcacccggtttacggaa

SEQ ID NO: 33465 - DNA, 50 bp, Enterobacter dykesii; identical to SEQ ID NO: 1340
  source 1..50: mol_type = genomic DNA

SEQ ID NO: 33466 - protein, 541 aa, Klebsiella pneumoniae
MPKAISYIRFSTKIQSVGDSTKRQSKYINDWLKRNPDYYLDESLRFQDLGISGFSGANAKSGAFGEFLAAVESGYIEAGSVLLVESLDRVSRQDIDTAGEQLRKILRSGVEVVTLVDNEWYTKESLKDSLSMIKAMLVMERAHEESAMKSTRLRSMWAAKRERAANGEIMSKRCAAWLKVSDDRSHFEFIPENVKAVQRVFQLRLEGLSHVKIAKQMNDEGFSTLNQFKSVTGGWSQSSVTELLSNRSVIGFKVPSKSMAVKGVSEIPNYYPSIITDEQFYAVQQLKQGSGRKPSSDLPLLTNLFKGVLRCSECGFIVVVAGVSAKRSGIYKCSMKSEGRCNSVGFSRLQTDRALVQGLLYNTNRLSLNRDNGSAIGTLQSELEQLQKQRERLIKLAMLADDTESMAKDLKALNSQIKDAEKAVSEVHQREQSSQLETISHLDLTVKKDRVEAQIIIKRIVKEIRLNTAGKKCDVFLHNGLKLLNFPLDRVVDGAQWLEVLPLIDGDEFDFEGFTTKPRHIALEEAPDWVKEMDEQSNQPL

SEQ ID NO: 33467 - DNA, 50 bp, Klebsiella pneumoniae; identical to SEQ ID NO: 32992
  source 1..50: mol_type = genomic DNA

SEQ ID NO: 33468 - DNA, 40 bp, Klebsiella pneumoniae; identical to SEQ ID NO: 8148
  source 1..40: mol_type = genomic DNA

SEQ ID NO: 33469 - DNA, 40 bp, Klebsiella pneumoniae; identical to SEQ ID NO: 8149
  source 1..40: mol_type = genomic DNA

SEQ ID NO: 33470 - DNA, 50 bp, Klebsiella pneumoniae; identical to SEQ ID NO: 1340
  source 1..50: mol_type = genomic DNA

SEQ ID NO: 33471 - protein, 518 aa, Klebsiella pneumoniae
MPKAISYIRFSTKIQSVGDSTKRQSKYINDWLKRNPDYYLDESLRFQDLGISGFSGANAKSGAFGEFLAAVESGYIEAGSVLLVESLDRVSRQDIDTAGEQLRKILRAGVEVVTLVDNEWYTKESLKDSLSMIKAMLVMERAHEESAMKSTRLRSMWAGKRERAANGEIMSKRCAAWLKVSEDRSHFEFIPENVKAVQRVFQLRLEGLSHVKIAKQMNDEGFSTLNQFKPVKGGWSQSSVTELLSNRSVIGFKVPSKSMAVKGVSEIPNYYPSIITDEQFYAVQQLKQGSGRKPSSDLPLLTNLFKGVLRCSECGFIVVVAGVSAKRSGIYKCSMKSEGRCNSVGFSRLQTDRALVQGLLYNTNRLSLNRDNGSAIGAIQSELEHLQKQRERLIKLAMLADDTESMAKDLKALNSQIKDAEKAVSEVHQREQSSQLETISHLDLTVKKDRIEAQIIIKRIVKEIRLNTAGKKCDVFLHNGLKLLNFPLDRVVDGEIFLEVLPVLEADEFDFDTYRMIE

SEQ ID NO: 33472 - DNA, 50 bp, Klebsiella pneumoniae; identical to SEQ ID NO: 32992
  source 1..50: mol_type = genomic DNA

SEQ ID NO: 33473 - DNA, 40 bp, Klebsiella pneumoniae; identical to SEQ ID NO: 8148
  source 1..40: mol_type = genomic DNA

SEQ ID NO: 33474 - DNA, 40 bp, Klebsiella pneumoniae; identical to SEQ ID NO: 8149
  source 1..40: mol_type = genomic DNA

SEQ ID NO: 33475 - DNA, 50 bp, Klebsiella pneumoniae; identical to SEQ ID NO: 1340
  source 1..50: mol_type = genomic DNA

SEQ ID NO: 33476 - protein, 540 aa, Klebsiella pneumoniae
MPKAISYIRFSTKIQSVGDSTKRQSKYINDWLKRNPDYYLDESLRFQDLGISGFSGANAKSGAFGEFLAAVESGYIEAGSVLLVESLDRVSRQDIDTAGEQLRKILRSGVEVVTLVDNEWYTKESLKDSLSMIKAMLVMERAHEESAMKSTRLRSMWAAKRERAANGEIMSKRCAAWLKVSEDRSHFEFIPENVKAVQRVFQLRLEGLSHVKIAKQMNDEGFSTLNQFKSVTGGWSQSSVTELLSNRSVIGFKVPSKSMAVKGVSEIPNYYPSIITDEQFYAVQQLKQGSGRKPSSDLPLLTNLFKGVLRCSECGFIMVVAGVSAKRSGIYKCSMKSEGRCNSVGFSRLQTDRALVQGLLYNTNRLSLNRDNGSAIGSLQSELEHLQKQRERLIKLAMLADDTESMAKDLKALNSQIKDAEKAVSEVHQREQSSQLETISHLDLTVKKDRIEAQIIIKRIVKEIRLNTARKKCDVFLHNGLRLLNFPLDRVVDGAQWLEVLPLIDGDEFDFEGFITKPRHVALEEAPEWVKEMEEQSNQP

SEQ ID NO: 33477 - DNA, 50 bp, Klebsiella pneumoniae; identical to SEQ ID NO: 32992
  source 1..50: mol_type = genomic DNA

SEQ ID NO: 33478 - DNA, 40 bp, Klebsiella pneumoniae; identical to SEQ ID NO: 8148
  source 1..40: mol_type = genomic DNA

SEQ ID NO: 33479 - DNA, 40 bp, Klebsiella pneumoniae; identical to SEQ ID NO: 8149
  source 1..40: mol_type = genomic DNA

SEQ ID NO: 33480 - DNA, 50 bp, Klebsiella pneumoniae; identical to SEQ ID NO: 1340
  source 1..50: mol_type = genomic DNA

SEQ ID NO: 33481 - protein, 518 aa, Klebsiella pneumoniae
MPKAISYIRFSTKIQSVGDSTKRQSKYINDWLKRNPDYYLDESLRFQDLGISGFSGANAKSGAFGEFLAAVESGYIESGSVLLVESLDRVSRQDIDTAGEQLRKILRAGVEVVTLVDNEWYTKESLKDSLSMIKAMLVMERAHEESAMKSTRLRSVWAAKRERAANGEIMSKRCAAWLKVSEDRSHFEFIPENVKAVQRVFQLRLEGLSHVKIAKQMNDEGFSTLNQFKSVTGGWSQSSVTELLSNRSVIGFKVPSKSMAVKGVSEIPNYYPSIISDEQFYAVQQLKQGSGRKPSSDLPLLTNLFKGVLRCSECGFIVVVAGVSAKRSGIYKCSMKSEGRCNSVGFSRLQTDRALVQGLLYNTNRLSLNRRDGSAIGALQSELEQLQKQRERLIKLAMLADDTESMAKDLKALNSQIRDAEKAVSEVHQREQSSQLETISHLDLTVKKDRTEAQIIIKRIVKEIRLNTAGKKCDVFLHNGLKLYNFPLDRVVDGEIFLEVLPVLEADEFDFDAYRMIE

SEQ ID NO: 33482 - DNA, 50 bp, Klebsiella pneumoniae; identical to SEQ ID NO: 32992
  source 1..50: mol_type = genomic DNA

SEQ ID NO: 33483 - DNA, 40 bp, Klebsiella pneumoniae; identical to SEQ ID NO: 1338
  source 1..40: mol_type = genomic DNA

SEQ ID NO: 33484 - DNA, 40 bp, Klebsiella pneumoniae; identical to SEQ ID NO: 1339
  source 1..40: mol_type = genomic DNA

SEQ ID NO: 33485 - DNA, 50 bp, Klebsiella pneumoniae; identical to SEQ ID NO: 1340
  source 1..50: mol_type = genomic DNA

SEQ ID NO: 33486 - protein, 541 aa, Klebsiella pneumoniae
MPKAISYIRFSTKIQSVGDSTKRQSKYINDWLKRNPDYYLDESLRFQDLGISGFSGANAKSGAFGEFLAAVESGYIESGSVLLVESLDRVSRQDIDTAGEQLRKILRAGVEVVTLVDNEWYTKESLKDSLSMIKAMLVMERAHEESAMKSTRLRSVWAAKRERAANGEIMSKRCAAWLKVSEDRSHFEFIPENVKAVQRVFQLRLEGLSHVKIAKQMNDEGFSTLNQFKSVTGGWSQSSVTELLSNRSVIGFKVPSKSMAVKGVSEIPNYYPSIISDEQFYAVQQLKQGSGRKPSSDLPLLTNLFKGVLRCSECGFIVVVAGVSAKRSGIYKCSMKSEGRCNSVGFSRLQTDRALVQGLLYNTNRLSLNRRNGSAIGALQSELEQLQKQRERLIKLAMLADDTESMAKDLKALNSQIRDAEKAVSEVHQREQSSQLETISHLDLTVKKDRIEAQIIIKRIVKEIRLNTAGKKCDVFLHNGLKLYNFPLDRVVDGAQWLEILPLIDGDEFDFEGLTTKPRHIALEEAPEWVKEMEEQPNQPL

SEQ ID NO: 33487 - DNA, 50 bp, Klebsiella pneumoniae; identical to SEQ ID NO: 32992
  source 1..50: mol_type = genomic DNA

SEQ ID NO: 33488 - DNA, 40 bp, Klebsiella pneumoniae; identical to SEQ ID NO: 8148
  source 1..40: mol_type = genomic DNA

SEQ ID NO: 33489 - DNA, 40 bp, Klebsiella pneumoniae; identical to SEQ ID NO: 8149
  source 1..40: mol_type = genomic DNA

SEQ ID NO: 33490 - DNA, 50 bp, Klebsiella pneumoniae; identical to SEQ ID NO: 1340
  source 1..50: mol_type = genomic DNA

SEQ ID NO: 33491 - protein, 541 aa, Klebsiella pneumoniae
MPKAISYIRFSTKIQSVGDSTKRQSKYINDWLKRNPDYYLDESLRFQDLGISGFSGANAKSGAFGEFLAAVESGYIESGSVLLVESLDRVSRQDIDTAGEQLRKILRSGVEVVTLVDNEWYTKESLKDSLSMIKAMLVMERAHEESAMKSTRLRSVWAAKRERAAKGEIMSKRCAAWLKVSEDRSHFEFIPENVKAVQRVFQLRLEGLSHVKIAKQMNDEGFSTLNQFKSVTGGWSQSSVTELLSNRSVIGFKVPSKSMAVKGVAEIPNYYPSIITDEQFYAVQQLKQGSGRKPSSDLPLLTNLFKGVLRCSECGFIVVVAGVSAKRSGIYKCSMKSEGRCNSVGFSRLQTDRALVQGLLYNTNRLSLNRDNGSAIGTLQSDLEQLHKQRERLIKLAMLADDTESMAKDLKALNSQIKDAEKAVSEVHQREQSSQLETISHLDLTVKKDRIEAQIIIKRIVKEIRLNTAQKKCDVFLHNGLKLLNFPLDRVVDGAQWLEVLPLIDGDEFDFVEFTTKPRHIALEEAPDWVKEMDEQSNQLL

SEQ ID NO: 33492 - DNA, 50 bp, Klebsiella pneumoniae; identical to SEQ ID NO: 32992
  source 1..50: mol_type = genomic DNA

SEQ ID NO: 33493 - DNA, 40 bp, Klebsiella pneumoniae; identical to SEQ ID NO: 8148
  source 1..40: mol_type = genomic DNA

SEQ ID NO: 33494 - DNA, 40 bp, Klebsiella pneumoniae; identical to SEQ ID NO: 8149
  source 1..40: mol_type = genomic DNA

SEQ ID NO: 33495 - DNA, 50 bp, Klebsiella pneumoniae; identical to SEQ ID NO: 1340
  source 1..50: mol_type = genomic DNA

SEQ ID NO: 33496 - protein, 540 aa, Klebsiella pneumoniae; identical to SEQ ID NO: 33011

SEQ ID NO: 33497 - DNA, 50 bp, Klebsiella pneumoniae; identical to SEQ ID NO: 32992
  source 1..50: mol_type = genomic DNA

SEQ ID NO: 33498 - DNA, 40 bp, Klebsiella pneumoniae; identical to SEQ ID NO: 8148
  source 1..40: mol_type = genomic DNA

SEQ ID NO: 33499 - DNA, 40 bp, Klebsiella pneumoniae; identical to SEQ ID NO: 8149
  source 1..40: mol_type = genomic DNA

SEQ ID NO: 33500 - DNA, 50 bp, Klebsiella pneumoniae; identical to SEQ ID NO: 1340
  source 1..50: mol_type = genomic DNA

SEQ ID NO: 33501 - protein, 541 aa, Klebsiella pneumoniae
MPKAISYIRFSTKIQSVGDSTKRQSKYINDWLKRNPDYYLDESLRFQDLGISGFSGANAKSGAFGEFLAAVESGYIEAGSVLLVESLDRVSRQDIDTAGEQLRKILRSGVEVVTLVDNEWYTKESLKDSLSMIKAMLVMERAHEESAMKSTRLRSMWAAKRERAANGEIMSKRCAAWLKVSDDRSHFEFIPENVKAVQRVFQLRLEGLSHVKIAKQMNDEGFSTLNQFKSVTGGWSQSSVTELLSNRSVIGFKVPSKSMAVKGVSEIPNYYPSIITDEQFYAVQQLKQGSGRKPSSDLPLLTNLFKGVLRCSECGFIVVVAGVSAKRSGIYKCSMKSEGRCNSVGFSRLQTDKALVHGLLYNTNRLSLNRDSGSAIGTLQSELEQLQKQRERLIKLAMLADDTESMAKDLKALNSQIKDAEKAVSEVHQREQSSQLETISHLDLTLKKDRIEAQIIIKRIVKEIRINTAGKKCDVFLHNGLKLLNFPLDRVVDGAQWLEVLPLIDGDEFDFEGFTTKPRHLVLEEAPEWVKEIEAQPNQPL

SEQ ID NO: 33502 - DNA, 50 bp, Klebsiella pneumoniae; identical to SEQ ID NO: 32992
  source 1..50: mol_type = genomic DNA

SEQ ID NO: 33503 - DNA, 40 bp, Klebsiella pneumoniae; identical to SEQ ID NO: 8148
  source 1..40: mol_type = genomic DNA

SEQ ID NO: 33504 - DNA, 40 bp, Klebsiella pneumoniae; identical to SEQ ID NO: 8149
  source 1..40: mol_type = genomic DNA

SEQ ID NO: 33505 - DNA, 50 bp, Klebsiella pneumoniae; identical to SEQ ID NO: 1340
  source 1..50: mol_type = genomic DNA

SEQ ID NO: 33506 - protein, 518 aa, Klebsiella pneumoniae; identical to SEQ ID NO: 33301

SEQ ID NO: 33507 - DNA, 50 bp, Klebsiella pneumoniae; identical to SEQ ID NO: 32992
  source 1..50: mol_type = genomic DNA

SEQ ID NO: 33508 - DNA, 40 bp, Klebsiella pneumoniae; identical to SEQ ID NO: 8148
  source 1..40: mol_type = genomic DNA

SEQ ID NO: 33509 - DNA, 40 bp, Klebsiella pneumoniae; identical to SEQ ID NO: 8149
  source 1..40: mol_type = genomic DNA

SEQ ID NO: 33510 - DNA, 50 bp, Klebsiella pneumoniae; identical to SEQ ID NO: 1340
  source 1..50: mol_type = genomic DNA

SEQ ID NO: 33511 - protein, 518 aa, Klebsiella pneumoniae
MPKAISYIRFSTKIQSVGDSTKRQSKYINDWLKRNPDYYLDESLRFQDLGISGFSGANAKSGAFGEFLAAVESGYIESGSVLLVESLDRVSRQDIDTAGEQLRKILRSGVEVVTLVDNEWYTKESLKDSLSMIKAMLVMERAHEESAMKSTRLRSMWAAKRERAANGEIMSKRCAAWLKVSDDRSHFEFIPENVKAVQRVFQLRLEGLSHVKIAKQMNDEGFSTLNQFKSVTGGWSQSSVTELLSNRSVIGFKVPSKSMAVKGVSEIPNYYPSIITDEQFYAVQQLKQGSGRKPSSDLPLLTNLFKGVLRCSECGFIVVVAGVSAKRSGIYKCSMKSEGRCNSVGFSRLQTDRALVQGLLYNTNRLSLNRDNGSAIGALQSELEQLQKQRERLIKLSMLTDDTESMAKDLKVLNSQIKDVERAVSEVHQREQSSQLETISHLDLTVKKDRIEAQIIIKRIVKEIRLNTAAKKCDVFLHNGLKLYNFPLDRVVDGEIFLEVLPVLEADEFDFDTYRMIE

SEQ ID NO: 33512 - DNA, 50 bp, Klebsiella pneumoniae; identical to SEQ ID NO: 32992
  source 1..50: mol_type = genomic DNA

SEQ ID NO: 33513 - DNA, 40 bp, Klebsiella pneumoniae; identical to SEQ ID NO: 8148
  source 1..40: mol_type = genomic DNA

SEQ ID NO: 33514 - DNA, 40 bp, Klebsiella pneumoniae; identical to SEQ ID NO: 8149
  source 1..40: mol_type = genomic DNA

SEQ ID NO: 33515 - DNA, 50 bp, Klebsiella pneumoniae; identical to SEQ ID NO: 1340
  source 1..50: mol_type = genomic DNA

SEQ ID NO: 33516 - protein, 518 aa, Klebsiella pneumoniae
MPKAISYIRFSTKIQSVGDSTKRQSKYINDWLKRNPDYYLDESLRFQDLGISGFSGANAKSGAFGEFLAAVESGYIESGSVLLVESLDRVSRQDIDTAGEQLRKILRAGVEVVTLVDNEWYTKESLKDSLSMIKAMLVMERAHEESAMKSTRLRSVWAAKRERAANGEIMSKRCAAWLKVSEDRSHFEFIPENVKAVQRVFQLRLEGLSHVKIAKQMNDEGFSTLNQFKSVTGGWSQSSVTELLSNRSVIGFKVPSKSMAVKGVSEIPNYYPSIISDEQFYAVQQLKQGSGRKPSSDLPLLTNLFKGVLRCSECGFIVVVAGVSAKRSGIYKCSMKSEGRCNSVGFSRLQTDRALVQGLLYNTNRLSLNRRDGSAIGALQSELEQLQKQRERLIKLAMLADDTESMAKDLKALNSQIRDAEKAVSEVHQREQSSQLETISHLDLTVKKDRIEAQIIIKRIVKEIRLNTAGKKCDVFLHNGLKLYNFPLDRVVDGEIFLEVLPVLEADEFDFDAYRMIE

SEQ ID NO: 33517 - DNA, 50 bp, Klebsiella pneumoniae; identical to SEQ ID NO: 32992
  source 1..50: mol_type = genomic DNA

SEQ ID NO: 33518 - DNA, 40 bp, Klebsiella pneumoniae; identical to SEQ ID NO: 8148
  source 1..40: mol_type = genomic DNA

SEQ ID NO: 33519 - DNA, 40 bp, Klebsiella pneumoniae; identical to SEQ ID NO: 8149
  source 1..40: mol_type = genomic DNA

SEQ ID NO: 33520 - DNA, 50 bp, Klebsiella pneumoniae; identical to SEQ ID NO: 1340
  source 1..50: mol_type = genomic DNA

SEQ ID NO: 33521 - protein, 541 aa, Klebsiella pneumoniae
MPKAISYIRFSTKIQSVGDSTKRQSKYINDWLKRNPDYYLDESLRFQDLGISGFSGANAKSGAFGEFLAAVESGYIESGSVLLVESLDRVSRQDIDTAGEQLRKILRSGVEVVTLVDNEWYTKESLKDSLSMIKAMLVMERAHEESAMKSTRLRSMWAAKRERAANGEIMSKRCAAWLKVSDDRSHFEFIPENVKAVQRVFQLRLEGLSHTKIAKQMNDEGFSTLNQFKSVTGGWSQSSVTELLSNRSVIGFKVPSKSMAVKGVSEIPNYYPSIITDEQFYAVQQLKQGSGRKPSSDLPLLTNLFKGVLRCSECGFIVVVAGVSAKRSGIYKCSMKSEGRCNSVGFSRLQTDRALVQGLLYNTNRLSLNRDNGSAIGTLQSELQELQKQRERLIKLSMLTDDIESMAKDLKSLNSQIKDAEKAVSEVHQREQSSQLETISHLDLTVKKDRIEAQIIIKRIVKEIRLNTAGKKCDVFLHNGLKLLNFPLDRVVDGAQWLEVLPLIDGDEFDFEGFTTKPRHLVLEEAPEWVKEIEAQPNQPL

SEQ ID NO: 33522 - DNA, 50 bp, Klebsiella pneumoniae; identical to SEQ ID NO: 32992
  source 1..50: mol_type = genomic DNA

SEQ ID NO: 33523 - DNA, 40 bp, Klebsiella pneumoniae; identical to SEQ ID NO: 8148
  source 1..40: mol_type = genomic DNA

SEQ ID NO: 33524 - DNA, 40 bp, Klebsiella pneumoniae; identical to SEQ ID NO: 8149
  source 1..40: mol_type = genomic DNA

SEQ ID NO: 33525 - DNA, 50 bp, Klebsiella pneumoniae; identical to SEQ ID NO: 1340
  source 1..50: mol_type = genomic DNA

SEQ ID NO: 33526 - protein, 540 aa, Enterobacter asburiae
MPKAISYIRFSTKIQSVGDSTKRQSKYINDWLKRNPDYYLDESLRFQDLGISGFSGANAKSGAFGEFLAAVESGYIEAGSVLLVESLDRVSRQDIDTAGEQLRKILRSGVEVVTLVDNEWYTKESLKDSLSMIKAMLVMERAHEESAMKSTRLRSMWAAKRERAANGEIMSKRCAAWLKVSEDRSHFEFIPENVKAVQRVFQLRLEGLSHVKIAKQMNDEGFSTLNQFKSVTGGWSQSSVTELLSNRSVIGFKVPSKSMAVKGVSEIPNYYPSIITDEQFYAVQQLKQGSGRKPSSDLPLLTNLFKGVLRCSECGFIMVVAGVSAKRSGIYKCSMKSEGRCNSVGFSRLQTDRALVQGLLYNTNRLSLNRDNGSAIGSLQSDLEKLHKQRERLIKLAMLADDTESMAKDLKALNSQIKDAEKAVSEVHQREQSSQLETISHLDLTVKKDRIEAQIIIKRIVKEIRLNTARKKCDVFLHNGLRLLNFPLDRVVDGAQWLEVLPLIDGDEFDFEGFITKPRHVALEEAPEWVKEMEEQSNQP

SEQ ID NO: 33527 - DNA, 50 bp, Enterobacter asburiae; identical to SEQ ID NO: 32992
  source 1..50: mol_type = genomic DNA

SEQ ID NO: 33528 - DNA, 40 bp, Enterobacter asburiae
  source 1..40: mol_type = genomic DNA
gtgcaccggccggctatcgaggatcacccggttaacggaa

SEQ ID NO: 33529 - DNA, 40 bp, Enterobacter asburiae
  source 1..40: mol_type = genomic DNA
gtgcaccggccggctatcgcagatcacccggttaacggaa

SEQ ID NO: 33530 - DNA, 50 bp, Enterobacter asburiae; identical to SEQ ID NO: 1340
  source 1..50: mol_type = genomic DNA

SEQ ID NO: 33531 - protein, 518 aa, Klebsiella pneumoniae
MPKAISYIRFSTKIQLVGDSTKRQSKYINDWLKRNPDYYLDESLRFQDLGISGFSGANAKSGAFGEFLAAVESGYIASGSVLLVESLDRVSRQDIDTAGEQLRKILRSGVEVVTLVDNEWYTKESLKDSLSMIKAMLVMERAHEESAMKSTRLRSVWAAKRERAAKGEIMSKRCAAWLKVSEDRSHFEFIPENVKAVQRVFQLRLEGLSHVKIAKQMNDEGFSTLNQFKSVTGGWSQSSVTELLSNRSVIGFKVPSKSMAVKGVAEIPNYYPSIISEQQFYAVQQLKQGSGRKPSSDLPLLTNLFKGVLRCSECGFIVVVAGVSAKRSGIYKCSMKSEGRCNSVGFSRLQTDRALVQGLLYNTNRLSLNRDNGSAIGTLQSELEQLQKQRERLIKLAMLADDTESMAKDLKALNSQIKDAEKAVSEVHQREQSSQLETISHLDLTLKKDRIEAQIIIKRIVKEIRLNTAQKKCDVFLHNGLKLLNFPLDRVVDGEIFLEVLPLLEADEFDFDTYRVIE

SEQ ID NO: 33532 - DNA, 50 bp, Klebsiella pneumoniae; identical to SEQ ID NO: 32992
  source 1..50: mol_type = genomic DNA

SEQ ID NO: 33533 - DNA, 40 bp, Klebsiella pneumoniae; identical to SEQ ID NO: 8148
  source 1..40: mol_type = genomic DNA

SEQ ID NO: 33534 - DNA, 40 bp, Klebsiella pneumoniae; identical to SEQ ID NO: 8149
  source 1..40: mol_type = genomic DNA

SEQ ID NO: 33535 - DNA, 50 bp, Klebsiella pneumoniae; identical to SEQ ID NO: 1340
  source 1..50: mol_type = genomic DNA

SEQ ID NO: 33536 - protein, 541 aa, Klebsiella pneumoniae; identical to SEQ ID NO: 33066

SEQ ID NO: 33537 - DNA, 50 bp, Klebsiella pneumoniae; identical to SEQ ID NO: 33407
  source 1..50: mol_type = genomic DNA

SEQ ID NO: 33538 - DNA, 40 bp, Klebsiella pneumoniae; identical to SEQ ID NO: 8148
  source 1..40: mol_type = genomic DNA

SEQ ID NO: 33539 - DNA, 40 bp, Klebsiella pneumoniae; identical to SEQ ID NO: 8149
  source 1..40: mol_type = genomic DNA

SEQ ID NO: 33540 - DNA, 50 bp, Klebsiella pneumoniae; identical to SEQ ID NO: 1340
  source 1..50: mol_type = genomic DNA

SEQ ID NO: 33541 - protein, 541 aa, Klebsiella pneumoniae
MPKAISYIRFSTKIQSVGDSTKRQSKYINDWLKRNPDYYLDESLRFQDLGISGFSGANAKSGAFGEFLAAVESGYIESGSVLLVESLDRVSRQDIDTAGEQLRKILRSGVEVVTLVDNEWYTKESLKDSLSMIKAMLVMERAHEESAMKSNRLRSVWAAKRERAAKGEIMSKRCAAWLKVSEDRSHFEFIPENVKAVQRVFQLRLEGLSHVKIAKQMNDEGFSTLNQFKSVTGGWSQSSVTELLSNRSVIGFKVPSKSMAVKGVSEIPDYYPAIITDEQFYAVQQLKQGSGRKPSSDLPLLTNLFKGVLRCSECGFIVVVAGVSAKRSGIYKCSMKSEGRCNSVGFSRLQTDRALVQGLLYNTNRLSLNRGNGSAIGSLQSELEQLQKQRERLIKLAMLADDTESMAKDLKALNSQIKDAEKAVSEVHQREQSSQLETISHLDLTVKKDRIEAQIIIKRIVKEIRLNTAGKKCDVFLHNGLKLLNFPLDRVVDGAQWLEVLPLIDGDEFDFEGFTTKPRHLVLEEAPEWVKEIEAQPNQPL

SEQ ID NO: 33542 - DNA, 50 bp, Klebsiella pneumoniae; identical to SEQ ID NO: 32992
  source 1..50: mol_type = genomic DNA

SEQ ID NO: 33543 - DNA, 40 bp, Klebsiella pneumoniae; identical to SEQ ID NO: 8148
  source 1..40: mol_type = genomic DNA

SEQ ID NO: 33544 - DNA, 40 bp, Klebsiella pneumoniae; identical to SEQ ID NO: 8149
  source 1..40: mol_type = genomic DNA

SEQ ID NO: 33545 - DNA, 50 bp, Klebsiella pneumoniae; identical to SEQ ID NO: 1340
  source 1..50: mol_type = genomic DNA

SEQ ID NO: 33546 - protein, 518 aa, Klebsiella pneumoniae
MPKAISYIRFSTKIQSVGDSTKRQSKYINDWLKRNPDYYLDESLRFQDLGISGFSGANAKSGAFGEFLAAVESGYIEAGSVLLVESLDRVSRQDIDTAGEQLRKILRSGVEVVTLVDNEWYTKESLKDSLSMIKAMLVMERAHEESAMKSTRLRSMWAAKRERAANGEIMSKRCAAWLKVSDDRSHFEFIPENVKAVQRVFQLRLEGLSHVKIAKQMNDEGFSTLNQFKSVTGGWSQSSVTELLSNRSVIGFKVPSKSMAVKGVSEIPNYYPSIITDEQFYAVQQLKQGSGRKPSSDLPLLTNLFKGVLRCSECGFIVVVAGVSAKRSGIYKCSMKSEGRCNSVGFSRLQTDRALVQGLLYNTNRLSLNRDNGSAIGSLQSELEQLQKQRERLIKLAMLADDTESMAKDLKALNSQIKDAEKAVSEVHQREQSSQLETISHLDLTVKKDRIEAQIIIKRIVKEIRLNTAQKKCDVFLHNGLKLLNFPLDRVVDGEIFLEVLPLLEADEFDLDTYRVIE

SEQ ID NO: 33547 - DNA, 50 bp, Klebsiella pneumoniae; identical to SEQ ID NO: 32992
  source 1..50: mol_type = genomic DNA

SEQ ID NO: 33548 - DNA, 40 bp, Klebsiella pneumoniae; identical to SEQ ID NO: 8148
  source 1..40: mol_type = genomic DNA

SEQ ID NO: 33549 - DNA, 40 bp, Klebsiella pneumoniae; identical to SEQ ID NO: 8149
  source 1..40: mol_type = genomic DNA

SEQ ID NO: 33550 - DNA, 50 bp, Klebsiella pneumoniae; identical to SEQ ID NO: 1340
  source 1..50: mol_type = genomic DNA

SEQ ID NO: 33551 - protein, 541 aa, Klebsiella pneumoniae
MPKAISYIGFSTKIQSVGDSTKRQSKYINDWLKRNPDYYLDESLRFQDLGISGFSGANAKSGAFGEFLAAVESGYIEAGSVLLVESLDRVSRQDIDTAGEQLRKILRSGVEVVTLVDNEWYTKESLKDSLSMIKAMLVMERAHEESAMKSTRLRSMWAAKRERAAKGEIMSKRCAAWLKVSEDRSHFEFIPENVKAVQRVFQLRLEGLSHIKIAKQMNDEGFYTLNQHKSVKGGWSQSSVTELLSNRSVIGFKVPSKSMAVKGVSEIPNYYPSIITDEQFYAVQQLKQGSGRKPSSDLPLLTNLFKGVLRCSECGFIVVVAGVSAKRSGIYKCSMKSEGRCNSVGFSRLQTDRALVQGLLYNTNRLSLNRDNGSAIGSLQSELEQLQKQRERLIKLAMLADDTESMAKDLKALNSQIKDAEKAVSEVHQREQSSQLETISHLDLTVKKDRIEAQIIIKRIVKEIRLNTAGKKCDVFLHNGLKLLNFPLDRVVDGAQWLEVLPLIDGDEFDFVEFTTKPRHIALEEAPDWVKEMDEQSNQPL

SEQ ID NO: 33552 - DNA, 50 bp, Klebsiella pneumoniae; identical to SEQ ID NO: 32992
  source 1..50: mol_type = genomic DNA

SEQ ID NO: 33553 - DNA, 40 bp, Klebsiella pneumoniae; identical to SEQ ID NO: 8148
  source 1..40: mol_type = genomic DNA

SEQ ID NO: 33554 - DNA, 40 bp, Klebsiella pneumoniae; identical to SEQ ID NO: 8149
  source 1..40: mol_type = genomic DNA

SEQ ID NO: 33555 - DNA, 50 bp, Klebsiella pneumoniae; identical to SEQ ID NO: 1340
  source 1..50: mol_type = genomic DNA

SEQ ID NO: 33556 - protein, 541 aa, Klebsiella pneumoniae
MPKAISYIRFSTKIQSVGDSTKRQSKYINDWLKRNPDYYLDESLRFQDLGISGFSGANAKSGAFGEFLAAVESGYIEAGSVLLVESLDRVSRQDIDTAGEQLRKILRSGVEVVTLVDNEWYTKESLKDSLSMIKAMLVMERAHEESAMKSTRLRSMWAAKRERAANGEIMSKRCAAWLKVSDDRSHFEFIPENVKAVQRVFQLRLEGLSHVKIAKQMNDEGFSTLNQFKSVTGGWSQSSVTELLSNRSVIGFKVPSKSMAVKGVSEIPDYYPAIISEQQFYAVQQLKQGSGRKPSSDLPLLTNLFKGVLRCSECGFIVVVAGVSAKRSGIYKCSMKSEGRCNSVGFSRLQTDRALVQGLFYNTNRLSLNRRNGSAIGSLQSELEQLQKQRERLIKLAMLADDTESMAKDLKALNSQIKDAEKAVSEVHQREQSSQLETISHLDLTVKKDRIEAQIIIKRIVKEIRLNTAGKKCDVFLHNGLKLLNFPLDRVVDGAQWLEILPLIDGDEFDFEGFTTKPRHLVLEEAPEWVKEIEAQPNQPQ

SEQ ID NO: 33557 - DNA, 50 bp, Klebsiella pneumoniae; identical to SEQ ID NO: 32992
  source 1..50: mol_type = genomic DNA

SEQ ID NO: 33558 - DNA, 40 bp, Klebsiella pneumoniae; identical to SEQ ID NO: 8148
  source 1..40: mol_type = genomic DNA

SEQ ID NO: 33559 - DNA, 40 bp, Klebsiella pneumoniae; identical to SEQ ID NO: 8149
  source 1..40: mol_type = genomic DNA

SEQ ID NO: 33560 - DNA, 50 bp, Klebsiella pneumoniae; identical to SEQ ID NO: 1340
  source 1..50: mol_type = genomic DNA

SEQ ID NO: 33561 - protein, 503 aa, Klebsiella pneumoniae
MPKAISYIRFSTKIQSVGDSTKRQSKYINDWLKRNPDYYLDESLRFQDLGISGFSGANAKSGAFGEFLAAVESGYIESGSVLLVESLDRVSRQDIDTAGEQLRKILRSGVEVVTLVDNEWYTKESLKDSLSMIKAMLVMERAHEESAMKSTRLRSMWAAKRERAANGEIMSKRCAAWLKVSEDRSHFEFITENVKAVQRVFQLRLEGLSHIKIAKQMNDEGFYTLNQHKSVKGGWSQSSVTELLSNRSVIGFKVPSKSMAVKGVSEIPNYYPAIITDEQFYAVQQLKQGSGRKPSSDLPLLTNLFKGVLRCSECGFIVVVAGVSAKRSGIYKCSMKSEGRCNSVGFSRLQTDRALVQGLLYNTNRLSLNRDNGSAIGTLQSDLEQLQKQRERLIKLAMLADDTESMAKDLKALNSQIKDAEKAVSEVHQREQSSQLETVSHLDLTVKKDRIEAQIITKRIVKEIRLNTAQKKCDVFLHNGLKLLNFPLDRVVDGAQCESPQII

SEQ ID NO: 33562 - DNA, 50 bp, Klebsiella pneumoniae; identical to SEQ ID NO: 32992
  source 1..50: mol_type = genomic DNA

SEQ ID NO: 33563 - DNA, 40 bp, Klebsiella pneumoniae; identical to SEQ ID NO: 8148
  source 1..40: mol_type = genomic DNA

SEQ ID NO: 33564 - DNA, 40 bp, Klebsiella pneumoniae; identical to SEQ ID NO: 8149
  source 1..40: mol_type = genomic DNA

SEQ ID NO: 33565 - DNA, 50 bp, Klebsiella pneumoniae; identical to SEQ ID NO: 1340
  source 1..50: mol_type = genomic DNA

SEQ ID NO: 33566 - protein, 518 aa, Klebsiella pneumoniae
MPKAISYIRFSTKIQSVGDSTKRQSKYINDWLKRNPDYYLDESLRFQDLGISGFSGANAKSGAFGEFLAAVESGYIEAGSVLLVESLDRVSRQDIDTAGEQLRKILRSGVEVVTLVDNEWYTKESLKDSLSMIKAMLVMERAHEESAMKSTRLRSMWAAKRERAANGEIMSKRCAAWLKVSEDRSHFEFIPENVKAVQRVFQLRLEGLSHVKIAKQMNDEGFSTLNQFKSVTGGWSQSSVTELLSNRSVIGFKVPSKSMAVKGVSEIPNYYPSIITDEQFYAVQQLKQGSGRKPSSDLPLLTNLFKGVLRCSECGFIMVVAGVSAKRSGIYKCSMKSEGRCNSVGFSRLQTDRALVQGLLYNTNRLSLNRDNGSAIGSLQSDLEKLHNQRERLIKLAMLADDTESMAKDLKALNSQIKDAEKAVSEVHQREQSSQLETISHLDLTVKKDRIEAQIIIKRIVKEIRLNTARKKCDVFLHNGLRLLNFPLDRVVDGEIFLEVLPVLEADEFDFDTYRMIE

SEQ ID NO: 33567 - DNA, 50 bp, Klebsiella pneumoniae; identical to SEQ ID NO: 32992
  source 1..50: mol_type = genomic DNA

SEQ ID NO: 33568 - DNA, 40 bp, Klebsiella pneumoniae; identical to SEQ ID NO: 8148
  source 1..40: mol_type = genomic DNA

SEQ ID NO: 33569 - DNA, 40 bp, Klebsiella pneumoniae; identical to SEQ ID NO: 8149
  source 1..40: mol_type = genomic DNA

SEQ ID NO: 33570 - DNA, 50 bp, Klebsiella pneumoniae; identical to SEQ ID NO: 1340
  source 1..50: mol_type = genomic DNA

SEQ ID NO: 33571 - protein, 541 aa, Klebsiella pneumoniae
MPKAISYIRFSTKIQSVGDSTKRQSKYINDWLKRNPDYYLDESLRFQDLGISGFSGANAKSGAFGEFLAAVESGYIEAGSVLLVESLDRVSRQDIDTAGEQLRKILRSGVEVVTLVDNEWYTKESLKDSLSMIKAMLVMERAHEESAMKSTRLRSMWAAKRERAANGEIMSKRCAAWLKVSDDRSHFEFIPENVKAVQRVFQLRLEGLSHVKIAKQMNDEGFSTLNQFKSVTGGWSQSSVTELLSNRSVIGFKVPSKSMAVKGVSEIPNYYPSIITDEQFYAVQQLKQGSGRKPSSDLPLLTNLFKGVLRCSECGFIVVVAGVSAKRSGIYKCSMKSEGRCNSVGFSRLQTDRALVQGLLYNTNRLSLNRDNGSAIGTLQSELEQLKKQRERLIKLAMLADDTESMAKDLKALNSQIKDAEKAVSEVHQREKSSQLETISHLDLTVKKDRVEAQIIIKRIVKEIRINTAGKKCDVLLHNGLKLLNFPLDKVVDGAQWLEILPLIDGDEFDFEGFTSKPRHIALEEAPEWVKEMEEQPSQPL

SEQ ID NO: 33572 - DNA, 50 bp, Klebsiella pneumoniae; identical to SEQ ID NO: 32992
  source 1..50: mol_type = genomic DNA

SEQ ID NO: 33573 - DNA, 40 bp, Klebsiella pneumoniae; identical to SEQ ID NO: 8148
  source 1..40: mol_type = genomic DNA

SEQ ID NO: 33574 - DNA, 40 bp, Klebsiella pneumoniae; identical to SEQ ID NO: 8149
  source 1..40: mol_type = genomic DNA

SEQ ID NO: 33575 - DNA, 50 bp, Klebsiella pneumoniae; identical to SEQ ID NO: 1340
  source 1..50: mol_type = genomic DNA

SEQ ID NO: 33576 - protein, 518 aa, Klebsiella pneumoniae; identical to SEQ ID NO: 33271

SEQ ID NO: 33577 - DNA, 50 bp, Klebsiella pneumoniae; identical to SEQ ID NO: 32992
  source 1..50: mol_type = genomic DNA

SEQ ID NO: 33578 - DNA, 40 bp, Klebsiella pneumoniae; identical to SEQ ID NO: 1338
  source 1..40: mol_type = genomic DNA

SEQ ID NO: 33579 - DNA, 40 bp, Klebsiella pneumoniae; identical to SEQ ID NO: 1339
  source 1..40: mol_type = genomic DNA

SEQ ID NO: 33580 - DNA, 50 bp, Klebsiella pneumoniae; identical to SEQ ID NO: 1340
  source 1..50: mol_type = genomic DNA

SEQ ID NO: 33581 - protein, 519 aa, Enterobacter cloacae; identical to SEQ ID NO: 33086

SEQ ID NO: 33582 - DNA, 50 bp, Enterobacter cloacae; identical to SEQ ID NO: 33087
  source 1..50: mol_type = genomic DNA

SEQ ID NO: 33583 - DNA, 40 bp, Enterobacter cloacae
  source 1..40: mol_type = genomic DNA
gtgcaccggtcggctatcgaggatcacccggttaacggaa

SEQ ID NO: 33584 - DNA, 40 bp, Enterobacter cloacae
  source 1..40: mol_type = genomic DNA
gtgcaccggtcggctatcgcagatcacccggttaacggaa

SEQ ID NO: 33585 - DNA, 50 bp, Enterobacter cloacae; identical to SEQ ID NO: 1340
  source 1..50: mol_type = genomic DNA

SEQ ID NO: 33586 - protein, 518 aa, Enterobacter cloacae; identical to SEQ ID NO: 33181

SEQ ID NO: 33587 - DNA, 50 bp, Enterobacter cloacae; identical to SEQ ID NO: 32992
  source 1..50: mol_type = genomic DNA

SEQ ID NO: 33588 - DNA, 40 bp, Enterobacter cloacae; identical to SEQ ID NO: 33528
  source 1..40: mol_type = genomic DNA

SEQ ID NO: 33589 - DNA, 40 bp, Enterobacter cloacae; identical to SEQ ID NO: 33529
  source 1..40: mol_type = genomic DNA

SEQ ID NO: 33590 - DNA, 50 bp, Enterobacter cloacae; identical to SEQ ID NO: 1340
  source 1..50: mol_type = genomic DNA

SEQ ID NO: 33591 - protein, 541 aa, Enterobacter cloacae
MPKAISYIRFSTKIQSVGDSTKRQSKYINDWLKRNPDYYLDESLRFQDLGISGFSGANAKSGAFGEFLAAVESGYIEAGSVLLVESLDRVSRQDIDTAGEQLRKILRSGVEVVTLVDNEWYTKESLKDSLSMIKAMLVMERAHEESAMKSTRLRSVWAAKRERAAKGEIMSKRCAAWLKVSEDRSHFEFIPENVKAVQRVFQLRLEGLSHVKIAKQMNDEGFSTLNQFKSVTGGWSQSSVTELLSNRSVIGFKVPSKSMAVKGVSEIPNYYPSIITDEQFYAVQQLKQGSGRKPSSDLPLLTNLFKGVLRCSECGFIVVVAGVSAKRSGIYKCSMKSEGRCNSVGFSRLQTDKALVQGLLYNTNRLSLNRDSGSAIGTLQSELEQLHKQRERLIKLAMLADDTESMAKDLKALNSQIKDVEKAVSEVHQREQSSQLETISHLDLTVKKDRIEAQIIIKRIVKEIRLNTAGKECDVFLHNGLKLLNFPLDRVVDGAQWLEVLPLIDGDEFDFEGFTTKPQHIALEEAPEWVKEMEEQPNQPL

SEQ ID NO: 33592 - DNA, 50 bp, Enterobacter cloacae; identical to SEQ ID NO: 32992
  source 1..50: mol_type = genomic DNA

SEQ ID NO: 33593 - DNA, 40 bp, Enterobacter cloacae
  source 1..40: mol_type = genomic DNA
atgaacaggacgactgtcaaggatgacgcggttgactgag

SEQ ID NO: 33594 - DNA, 40 bp, Enterobacter cloacae
  source 1..40: mol_type = genomic DNA
atgaacaggacgactgtcacagatgacgcggttgactgag

SEQ ID NO: 33595 - DNA, 50 bp, Enterobacter cloacae; identical to SEQ ID NO: 1340
  source 1..50: mol_type = genomic DNA

SEQ ID NO: 33596 - protein, 539 aa, Enterobacter cloacae
MPKAISYIRFSTKIQSVGDSTKRQSKYINDWLKRNPDYYLDESLRFQDLGISGFSGANAKSGAFGEFLAAVESGYIEAGSVLLVESLDRVSRQDIDTAGEQLRKILRSGVEVVTLVDNEWYTKESLKDSLSMIKAMLVMERAHEESAMKSTRLRSMWAAKRERAANGEIMSKRCAAWLKVSEDRSHFEFIPENVKAVQRVFQLRLEGLSHVKIAKQMNDEGFSTLNQFKSVKGGWSQSSVTELLSNRSVIGFKVPSKSMAVKGVAEIHNYYPSIITDEQFYAVQQLKQGSGRKPSSDLPLLTNLFKGVLRCSKCGFIIVVAGVTAKRSGIYKCSMKSEGRCNSVGFSRLQTDKALVQGLLYNTNRLSLNRDNGSAIGSLQSELEELHKQRERLIKLAMLADDTESMAKDLKALNSQIKDAEKAVSEVHQREQSSQLETISHLDLTVKKDRTEAQIIIKRIVKEIRLNTAGKKCDVFLHNGLKLLNFPLDRVVDGAQWLEVLPLINGDEFDFEGFTTKPRHIALEEAPEWVKEMEEQPNQ

SEQ ID NO: 33597 - DNA, 50 bp, Enterobacter cloacae
  source 1..50: mol_type = genomic DNA
gtgtatcaatagaaaggtctgttcaggattatacctttcttatgatacac

SEQ ID NO: 33598 - DNA, 40 bp, Enterobacter cloacae
  source 1..40: mol_type = genomic DNA
gtgaacaggacgactgtcaaggatgacgcggttgactgag

SEQ ID NO: 33599 - DNA, 40 bp, Enterobacter cloacae
  source 1..40: mol_type = genomic DNA
gtgaacaggacgactgtcacagatgacgcggttgactgag

SEQ ID NO: 33600 - DNA, 50 bp, Enterobacter cloacae; identical to SEQ ID NO: 1340
  source 1..50: mol_type = genomic DNA

SEQ ID NO: 33601 - protein, 540 aa, Klebsiella pneumoniae
MPKAISYIRFSTKIQSVGDSTKRQSKYINDWLKRNPDYYLDESLRFQDLGISGFSGANAKSGAFGEFLAAVESGYIEAGSVLLVESLDRVSRQDIDTAGEQLRKILRSGVEVVTLVDNEWYTKESLKDSLSMIKAMLVMERAHEESAMKSTRLRSVWAAKRERAAKGEIMSKRCAAWLKVSEDRSRFEFIPENVKAVQRVFQLRLEGLSHVKIAKQMNDEGFSTLNQFKSVTGGWSQSSVTELLSNRSVIGFKVPSKSMAVKGVSEIPNYYPSIITDEQFYAVQQLKQGSGRKPSSDLPLLTNLFKGVLRCSECGFIVVVAGVSAKRSGIYKCSMKSEGRCNSVGFSRLQTDRALVQGLLYNANRLFLNRDNGSAIGALQGELEQLQKQRERLIKLAMLADDTESMAKDLKALNSQIKDAEKAVSEVHQREQSSQLETISHLDLTVKKDRIEAQIIIKRIVKEIRLNTAEKKCDVLLHNGLRLLNFPLDMVVDGAQWLEILPLIDGDEFDFEGFSTKPRHLAFEEAPEWVKELEFNSKIQ

SEQ ID NO: 33602 - DNA, 50 bp, Klebsiella pneumoniae; identical to SEQ ID NO: 32992
  source 1..50: mol_type = genomic DNA

SEQ ID NO: 33603 - DNA, 40 bp, Klebsiella pneumoniae; identical to SEQ ID NO: 8148
  source 1..40: mol_type = genomic DNA

SEQ ID NO: 33604 - DNA, 40 bp, Klebsiella pneumoniae; identical to SEQ ID NO: 8149
  source 1..40: mol_type = genomic DNA

SEQ ID NO: 33605 - DNA, 50 bp, Klebsiella pneumoniae; identical to SEQ ID NO: 1340
  source 1..50: mol_type = genomic DNA

SEQ ID NO: 33606 - protein, 541 aa, Klebsiella pneumoniae
MPKAISYIRFSTKIQSVGDSTKRQSKYINDWLKRNPDYYLDESLRFQDLGISGFSGANAKSGAFGEFLAAVESGYIEAGSVLLVESLDRVSRQDIDTAGEQLRKILRSGVEVVTLVDNEWYTKESLKDSLSMIKAMLVMERAHEESAMKSTRLRSMWAGKRERAANGEIMSKRCAAWLKVSEDRSHFEFIHENVKAVQRVFQLRLEGLSHIKIAKKMNDEGFYTLNQHKSIKGGWSQSSVTELLSNRSVIGFKVPSKSMAVKGVSEIPNYYPSIITDEQFYAVQQLKQGSGRKPSSDLPLLTNLFKGVLRCSECGFIVVVAGVSAKRSGIYKCSMKSEGRCNSVGFSRLQTDRALVQGLLYNTNRLALNRDNGSAIGSLQSELEQLQKQRERLIKLAMLADDTESMAKDLKALNSQIKDAEKAVSEVHQREKSSQLETISHLDLTVKKDRVEAQIIIKRIVKEIRINTAGKKCDVLLHNGLKLLNFPLDKVVDGAQWLEILPLIDGDEFDFEGFTTKPRHIALEEAPEWVKEMEEQPSQPL

SEQ ID NO: 33607 - DNA, 50 bp, Klebsiella pneumoniae; identical to SEQ ID NO: 33127
  source 1..50: mol_type = genomic DNA

SEQ ID NO: 33608 - DNA, 40 bp, Klebsiella pneumoniae; identical to SEQ ID NO: 8148
  source 1..40: mol_type = genomic DNA

SEQ ID NO: 33609 - DNA, 40 bp, Klebsiella pneumoniae; identical to SEQ ID NO: 8149
  source 1..40: mol_type = genomic DNA

SEQ ID NO: 33610 - DNA, 50 bp, Klebsiella pneumoniae; identical to SEQ ID NO: 1340
  source 1..50: mol_type = genomic DNA

SEQ ID NO: 33611 - protein, 540 aa, Klebsiella pneumoniae; identical to SEQ ID NO: 33011

SEQ ID NO: 33612 - DNA, 50 bp, Klebsiella pneumoniae; identical to SEQ ID NO: 32992
  source 1..50: mol_type = genomic DNA

SEQ ID NO: 33613 - DNA, 40 bp, Klebsiella pneumoniae
  source 1..40: mol_type = genomic DNA
atggaccggccggctgtcgaggatcacgcggttgacgtta

SEQ ID NO: 33614 - DNA, 40 bp, Klebsiella pneumoniae
  source 1..40: mol_type = genomic DNA
atggaccggccggctgtcgcagatcacgcggttgacgtta

SEQ ID NO: 33615 - DNA, 50 bp, Klebsiella pneumoniae; identical to SEQ ID NO: 1340
  source 1..50: mol_type = genomic DNA

SEQ ID NO: 33616 - protein, 541 aa, Klebsiella pneumoniae
MPKAISYIRFSTKIQSVGDSTKRQSKYINDWLKRNPDYYLDESLRFQDLGISGFSGANAKSGAFGEFLAAVESGYIEAGSVLLVESLDRVSRQDIDTAGEQLRKILRSGVEVVTLVDNEWYTKESLKDSLSMIKAMLVMERAHEESAMKSTRLRSMWAAKRERAANGEIMSKRCAAWLKVSDDRSHFEFIPENVKAVQRVFQLRLEGLSHVKIAKQMNDEGFSTLNQFKSVTGGWSQSSVTELLSNRSVIGFKVPSKSMAVKGVSEIPNYYPSIITDEQFYAVQQLKQGSGRKPSSDLPLLTNLFKGVLRCSECGFIVVVAGVSAKRSGIYKCSMKSEGRCNSVGFSRLQTDRALVQGLLYNTNRLALNRDNGSAIGSLQSELEQLQKQRERLIKLAMLADDTESMAKDLKALNRQIKDAEKAVSEVHQREQSSQLETISHLDLTVKKDRIEAQIIIKRIVKEIRLNTAGKKCDVFLHNGLKLLNFPLDRVVDGAQWLEVLPLIDGDEFDFEGFTTKPRHLVLEEAPEWVKEIEAQPNQPL

SEQ ID NO: 33617 - DNA, 50 bp, Klebsiella pneumoniae; identical to SEQ ID NO: 32992
  source 1..50: mol_type = genomic DNA

SEQ ID NO: 33618 - DNA, 40 bp, Klebsiella pneumoniae; identical to SEQ ID NO: 8148
  source 1..40: mol_type = genomic DNA

SEQ ID NO: 33619 - DNA, 40 bp, Klebsiella pneumoniae; identical to SEQ ID NO: 8149
  source 1..40: mol_type = genomic DNA

SEQ ID NO: 33620 - DNA, 50 bp, Klebsiella pneumoniae; identical to SEQ ID NO: 1340
  source 1..50: mol_type = genomic DNA

SEQ ID NO: 33621 - protein, 541 aa, Klebsiella pneumoniae
MPKAISYIRFSTKIQSVGDSTKRQSKYINDWLKRNPDYYLDESLRFQDLGISGFSGANAKSGAFGEFLAAVESGYIESGSVLLVESLDRVSRQDIDTAGEQLRKILRAGVEVVTLVDNEWYTKDSLKDSLSMIKAMLVMERAHEESAIKSTRLRSMWAGKRERAANGEIMSKRCAAWLKVSEDRSHFEFIPENVKAVQRVFQLRLEGLSHVKIAKQMNDEGFSTLNQFKSVTGGWSQSSVTELLSNRSVIGFKVPSKSMAVKGVSEIPNYYPAIITDEQFYAVQQLKQGSGRKPSSDLPLLTNLFKGVLRCSECGFIVVVAGVSAKRSGIYKCSMKSEGRCNSVGFSRLQTDRALVQGLLYNTNRLSLNRDNGSAIGALAGELEQLQKQRERLIKLAMLADDTESMAKDLKALNSQIKDAEKAVSEVHQREQSSQLETISHLDLTVKKDRIEAQIIIKRIVKEIRLNTAQKKCDVFLHNGLKLLNFPLDRVVDGAQWLEVLPLIDGDEFDFAEFTTKPRHITLEEAPEWVKAMEKQPNQPL

SEQ ID NO: 33622 - DNA, 50 bp, Klebsiella pneumoniae; identical to SEQ ID NO: 32992
  source 1..50: mol_type = genomic DNA

SEQ ID NO: 33623 - DNA, 40 bp, Klebsiella pneumoniae; identical to SEQ ID NO: 1338
  source 1..40: mol_type = genomic DNA

SEQ ID NO: 33624 - DNA, 40 bp, Klebsiella pneumoniae; identical to SEQ ID NO: 1339
  source 1..40: mol_type = genomic DNA

SEQ ID NO: 33625 - DNA, 50 bp, Klebsiella pneumoniae; identical to SEQ ID NO: 1340
  source 1..50: mol_type = genomic DNA

SEQ ID NO: 33626 - protein, 540 aa, Klebsiella pneumoniae; identical to SEQ ID NO: 33021

SEQ ID NO: 33627 - DNA, 50 bp, Klebsiella pneumoniae; identical to SEQ ID NO: 32992
  source 1..50: mol_type = genomic DNA

SEQ ID NO: 33628 - DNA, 40 bp, Klebsiella pneumoniae; identical to SEQ ID NO: 33208
  source 1..40: mol_type = genomic DNA

SEQ ID NO: 33629 - DNA, 40 bp, Klebsiella pneumoniae; identical to SEQ ID NO: 33209
  source 1..40: mol_type = genomic DNA

SEQ ID NO: 33630 - DNA, 50 bp, Klebsiella pneumoniae; identical to SEQ ID NO: 1340
  source 1..50: mol_type = genomic DNA

SEQ ID NO: 33631 - protein, 541 aa, Klebsiella pneumoniae
MPKAISYIRFSTKIQSVGDSTKRQSKYINDWLKRNPDYYLDESLRFQDLGISGFSGANAKSGAFGEFLAAVESGYIEAGSVLLVESLDRVSRQDIDTAGEQLRKILRSGVEVVTLVDNEWYTKESLKDSLSMIKAMLVMERAHEESAMKSTRLRSVWAGKRERAANGEIMSKRCAAWLKVSDDRSHFEFIPENVKAVQRVFQLRLEGLSHVKIAKQMNDEGFSTLNQFKSVTGGWSQSSVTELLSNRSVIGFKVPSKSMAVKGVSEIPNYYPSIITDEQFYAVQQLKQGSGRKPSSDLPLLTNLFKGVLRCSECGFIVVVAGVSAKRSGIYKCSMKSEGRCNSVGFSRLQTDRALVQGLLYNTNRLSLNRDNGSAIGTLQSELEQLQKQRERLVKLSMLTDDVESMAKDLKSLNSQIKDAEKAVSEVHQREQSSQLETISHLDLTVKKDRIEAQIIIKRIVKEIRLNTAGKKCDVFLHNGLKLLNFPLDRVVDGAQWLEVLPLIDGDEFDFEGFTTKPRHLVLEEAPEWVKEIEAQPNQPL

SEQ ID NO: 33632 - DNA, 50 bp, Klebsiella pneumoniae; identical to SEQ ID NO: 32992
  source 1..50: mol_type = genomic DNA

SEQ ID NO: 33633 - DNA, 40 bp, Klebsiella pneumoniae; identical to SEQ ID NO: 8148
  source 1..40: mol_type = genomic DNA

SEQ ID NO: 33634 - DNA, 40 bp, Klebsiella pneumoniae; identical to SEQ ID NO: 8149
  source 1..40: mol_type = genomic DNA

SEQ ID NO: 33635 - DNA, 50 bp, Klebsiella pneumoniae; identical to SEQ ID NO: 1340
  source 1..50: mol_type = genomic DNA

SEQ ID NO: 33636 - protein, 541 aa, Klebsiella pneumoniae
MPKAISYIRFSTKIQSVGDSTKRQSKYINDWLKRNPDYYLDESLRFQDLGISGFSGANAKSGAFGEFLAAVESGYIEAGSVLLVESLDRVSRQDIDTAGEQLRKILRSGVEVVTLVDNEWYTKESLKDSLSMIKAMLVMERAHEESAMKSTRLRSMWAAKRERAVNGEIMSKRCAAWLKVSDDRSHFEFIPENVKAVQRVFQLRLEGLSHVKIAKQMNDEGFSTLNQFKSVTGGWSQSSVTELLSNRSVIGFKVPSKSMAVKGVSEIPDYYPAIISEQQFYAVQQLKQGSGRKPSSDLPLLTNLFKGVLRCSECGFIVVVAGVSAKRSGIYKCSMKSEGRCNSVGFSRLQTDRALVQGLLYNTNRLSLNRRNGSAIGSLQSELEQLQKQRERLIKLAMLADDTESMAKDLKALNSQIKDAEKAVSEVHQREQSSQLETISHLDLTVKKDRIEAQIIIKRIVKEIRLNTAGKKCDVFLHNGLKLLNFPLDRVVDGAQWLEILPLIDGDEFDFEGFTTKPRHLVLEEAPEWVKEIEAQPNQPQ

SEQ ID NO: 33637 - DNA, 50 bp, Klebsiella pneumoniae; identical to SEQ ID NO: 32992
  source 1..50: mol_type = genomic DNA

SEQ ID NO: 33638 - DNA, 40 bp, Klebsiella pneumoniae; identical to SEQ ID NO: 8148
  source 1..40: mol_type = genomic DNA

SEQ ID NO: 33639 - DNA, 40 bp, Klebsiella pneumoniae; identical to SEQ ID NO: 8149
  source 1..40: mol_type = genomic DNA

SEQ ID NO: 33640 - DNA, 50 bp, Klebsiella pneumoniae; identical to SEQ ID NO: 1340
  source 1..50: mol_type = genomic DNA

SEQ ID NO: 33641 - protein, 541 aa, Klebsiella pneumoniae; identical to SEQ ID NO: 33071

SEQ ID NO: 33642 - DNA, 50 bp, Klebsiella pneumoniae; identical to SEQ ID NO: 32992
  source 1..50: mol_type = genomic DNA

SEQ ID NO: 33643 - DNA, 40 bp, Klebsiella pneumoniae; identical to SEQ ID NO: 8148
  source 1..40: mol_type = genomic DNA

SEQ ID NO: 33644 - DNA, 40 bp, Klebsiella pneumoniae; identical to SEQ ID NO: 8149
  source 1..40: mol_type = genomic DNA

SEQ ID NO: 33645 - DNA, 50 bp, Klebsiella pneumoniae; identical to SEQ ID NO: 1340
  source 1..50: mol_type = genomic DNA

SEQ ID NO: 33646 - protein, 416 aa, Raoultella terrigena
MPKAISYIRFSTKIQSVGDSTKRQSKYINDWLKRNPDYYLDESLRFQDLGISGFSGANAKSGAFGEFLAAVESGYIEAGSVLLVESLDRVSRQDIDTAGEQLRKILRSGVEVVTLVDNEWYTKESLKDSLSMIKAMLVMERAHEESAMKSTRLRSVWAAKRERAAKGEIMSKRCAAWLKVSEDRSRFEFIPENVKAVQRVFQLRLEGLSHVKIAKQMNDEGFSTLNQFKSVTGGWSQSSVTELLSNRSVIGFKVPSKSMAVKGVSEIPNYYPSIITDEQFYAVQQLKQGSGRKPSSDLPLLTNLFKGVLRCSECGFIVVVAGVSAKRSGIYKCSMKSEGRCNSVGFSRLQTDRALVQGLLYNANRLFLNRDNGSAIGALQGELEQLQKQRERLIKLAMLADDTESMAKDLNESPRV

SEQ ID NO: 33647 - DNA, 50 bp, Raoultella terrigena; identical to SEQ ID NO: 32992
  source 1..50: mol_type = genomic DNA

SEQ ID NO: 33648 - DNA, 40 bp, Raoultella terrigena
  source 1..40: mol_type = genomic DNA
gtgcaccggacggctatcgaggatcacccggttaacggcg

SEQ ID NO: 33649 - DNA, 40 bp, Raoultella terrigena
  source 1..40: mol_type = genomic DNA
gtgcaccggacggctatcgcagatcacccggttaacggcg

SEQ ID NO: 33650 - DNA, 50 bp, Raoultella terrigena; identical to SEQ ID NO: 1340
  source 1..50: mol_type = genomic DNA

SEQ ID NO: 33651 - protein, 540 aa, Klebsiella aerogenes; identical to SEQ ID NO: 33011

SEQ ID NO: 33652 - DNA, 50 bp, Klebsiella aerogenes; identical to SEQ ID NO: 32992
  source 1..50: mol_type = genomic DNA

SEQ ID NO: 33653 - DNA, 40 bp, Klebsiella aerogenes; identical to SEQ ID NO: 33123
  source 1..40: mol_type = genomic DNA

SEQ ID NO: 33654 - DNA, 40 bp, Klebsiella aerogenes; identical to SEQ ID NO: 33124
  source 1..40: mol_type = genomic DNA

SEQ ID NO: 33655 - DNA, 50 bp, Klebsiella aerogenes; identical to SEQ ID NO: 1340
  source 1..50: mol_type = genomic DNA

SEQ ID NO: 33656 - protein, 540 aa, Klebsiella aerogenes; identical to SEQ ID NO: 33601

SEQ ID NO: 33657 - DNA, 50 bp, Klebsiella aerogenes; identical to SEQ ID NO: 32992
  source 1..50: mol_type = genomic DNA

SEQ ID NO: 33658 - DNA, 40 bp, Klebsiella aerogenes; identical to SEQ ID NO: 33123
  source 1..40: mol_type = genomic DNA

SEQ ID NO: 33659 - DNA, 40 bp, Klebsiella aerogenes; identical to SEQ ID NO: 33124
  source 1..40: mol_type = genomic DNA

SEQ ID NO: 33660 - DNA, 50 bp, Klebsiella aerogenes; identical to SEQ ID NO: 1340
  source 1..50: mol_type = genomic DNA

SEQ ID NO: 33661 - protein, 518 aa, Leclercia adecarboxylata
MPKAISYIRFSTKIQSVGDSTKRQSKYINDWLKRNPDYYLDESLRFQDLGISGFSGANAKSGAFGEFLAAVESGYIESGSVLLVESLDRVSRQDIDTAGEQLRKILRSGVEVVTLVDNEWYTKESLKDSLSMIKAMLVMERAHEESAMKSTRLRSVWAAKRERAAKGEIMSKRCAAWLKVSEDRSHFEFIPENVKAVQRVFQLRLEGLSHVKIAKQMNDEGFSTLNQFKSVTGGWSQSSVTELLSNRSVIGFKVPSKSMAVKGVSEIPNYYPAIITDEQFYAVQQLKQGSGRKPSSDLPLLTNLFKGVLRCSECGFIVVVAGVSAKRSGIYKCSMKSEGRCNSVGFSRLQTDRALVQGLLYNTNRLSLNHDNGSAIGALQTELEQLQKQRERLIKLAMLADDTESMAKDLKALNSQIKDAEKAVSEVHQREQSSQLETISHLDLTLKKDRIEAQIIIKRIVKEIRINTAGKKCDVLLHNGLKLLNFPLDRVVDGEIFLEVLPLLDADEFDFDTYRMIE

SEQ ID NO: 33662 - DNA, 50 bp, Leclercia adecarboxylata; identical to SEQ ID NO: 32992
  source 1..50: mol_type = genomic DNA

SEQ ID NO: 33663 - DNA, 40 bp, Leclercia adecarboxylata
  source 1..40: mol_type = genomic DNA
atgtaccggacggctgtcaaggatggtgcgattgacgccg

SEQ ID NO: 33664 - DNA, 40 bp, Leclercia adecarboxylata
  source 1..40: mol_type = genomic DNA
atgtaccggacggctgtcacagatggtgcgattgacgccg

SEQ ID NO: 33665 - DNA, 50 bp, Leclercia adecarboxylata; identical to SEQ ID NO: 1340
  source 1..50: mol_type = genomic DNA

SEQ ID NO: 33666 - protein, 565 aa, Vibrio cyclitrophicus
MIDSSVGGTMTNKYYLYHRVSKKEQASSGEGIFRQQELTNNWIENENKRLILDGKEPYAEGGVYEDSGRSGFTDDNFKKGELGRLFKDVSRGRIRSGDIIVIELIDRFSRGKRKNVVKRFQNLLEHGIKVAFTKWNLVFEEDMDGVQGASAWMMFEIGLYLAHLESVQKSDRIRATNKLMKDKGYVTTAKTPIWLNRTLDRKGYEVVQENAEVIQRIYQLRMEGLGPQKILNSIGGVELKRYTYNTEEKLVVSSTNSPLCESTIKSYLANKAVIGVANGELKFEPIIDEKIFNAVQQKVVRNIGGGGKRKVFKNILSGIGFCKRCGYSMSYQDSTSTYGKVRSYLYCNGKRKRKQCDAKNIKYPLLESKVYEILSKLDYKDEESVDILSLEQQLKEIKDEVSSIRQNMIKFPNDQEFEKLYTERFSNQEDLELKLVEAKTSRSGDLSFLNVDYSRPEGKQQLNEIFKDYGIKVLVEDDTIEITVGAWNDFMIKGSLSSTVNPIAALNGKKYGSKGIDYDANTSIERYMLEAPKEDVGSCVSSELGKQVLNLYPEIKDHILKGNKQ

SEQ ID NO: 33667 - DNA, 50 bp, Vibrio cyclitrophicus
  source 1..50: mol_type = genomic DNA
gagctgtctaatagctattttcctaaagaataatgtatgatagacagctc

SEQ ID NO: 33668 - DNA, 40 bp, Vibrio cyclitrophicus; identical to SEQ ID NO: 8193
  source 1..40: mol_type = genomic DNA

SEQ ID NO: 33669 - DNA, 40 bp, Vibrio cyclitrophicus
  source 1..40: mol_type = genomic DNA
tggcaatccacagttggcaacagagacgaatggtcctcgc

SEQ ID NO: 33670 - DNA, 50 bp, Vibrio cyclitrophicus
  source 1..50: mol_type = genomic DNA
gagctgtctatcttctattcttccacagaaggaggtgactaagtcatctg

SEQ ID NO: 33671 - protein, 533 aa, Rhizobacter gummiphilus
MTKRPAKTPSAAAAPPAASSPPKAYSYVRFSTPEQSKGDSFRRQASAATAYCQKHGLELDTRISFHDLGVSAFKGQNAETGALRAFLRAVEDGHIPRGSYLLVESLDRITRGHVLQAQTIFNSIVMAGITLVTLGDQREYSEESLIANPTDLLISLLVMMRGNDESATKARRLKAAWANKRVLAGEKKLFTRLVPGWIRVTPDETLEAIPERAEVVQRIFSMFLSGIGKGAIAKAFNSEGLETWGMAGRKPGQHWHASYVAKILDNPAVLGILTTRTVEFEDGREVIREAQRIDDYYPRVIDDETFARVRAIRDTATVVRQKGRSVSRNLVAGLSVCPICSGAMIRVNKGTAKRGKPYLVCSKAKAGAGCSYKAVGLEAVEFAVRGAFSEFSEALLAEGSQSLAADVQRLESDSLVLNDEMENVADAIAKQGTSSVLSRKLRELQTEMDRVVSELRDRRVQLFTETHAMRHARIEELRAALEGTDIQAANVLLRELFKAITVDYRTGQLQCVTKADVRVDVSYRWVHDEEEAT

SEQ ID NO: 33672 - DNA, 50 bp, Rhizobacter gummiphilus
  source 1..50: mol_type = genomic DNA
gtgaggtcgtattgacacaatatgagcaggctgttagcataagaccccat

SEQ ID NO: 33673 - DNA, 40 bp, Rhizobacter gummiphilus
  source 1..40: mol_type = genomic DNA
gcccggcgggccgatcatcagcaggctgtggccgccgatc

SEQ ID NO: 33674 - DNA, 40 bp, Rhizobacter gummiphilus
  source 1..40: mol_type = genomic DNA
gcccggcgggccgatcatcatcaggctgtggccgccgatc

SEQ ID NO: 33675 - DNA, 50 bp, Rhizobacter gummiphilus
  source 1..50: mol_type = genomic DNA
gagtggtctaattcacacaaaatgatttaactgttgaagcaagaccccat

SEQ ID NO: 33676 - protein, 584 aa, Streptococcus agalactiae
MNTKVKLIKASNTGARNRNALHLDLKRVAAYCRVSTDSKDQLESYKSQVDYYTNLIKNNKNWTLAGIYADEATTGTTATKRADFMRLISDCQNGDIDMIITKSISRFARNTLDTLKYVRLLKENNVGVVFEEENIDTLTMDGELLLTILSSVAQQEVENTSAHVKKGLKMKMENGELIGFQGCLGYDYDPVTKSISINEEEAKIVRYIFKRYLEGNGGSVIGRELEEQGYLTPRGKTKWSDTTVLGIIKNEKYIGDILMGKTFTVDPITKRRLANFGESDKYHIENHHEPIISREDFEKAQEIRLRRAQNRNTIANKDRKREKLSRQYAFSSMLECGFCGEILSRRTWHTSSIYKKINWQCVKSTKKGKKYCPHSKGIQEAAIEKAFVESYRQLCHADSTVIDDFLKIVEEEINDNTLVKDLKKLENQLNRIISQERKLVDLHLEDSIDEEVYAKKYKKLTKQKEELLDEKKTLELTIKDENSIKERLKQFKKVLENKEIIEEFNRTVFESIVDKVVVGRIDKDGTVHPYDLTFYFKTGVKDSQDSNNFKDKRKNAKDNDINKLCSYKNDEDKKLCSQAKDNAC

SEQ ID NO: 33677 - DNA, 50 bp, Streptococcus agalactiae
  source 1..50: mol_type = genomic DNA
atgttcccaagcaaaagacaatgcatgtcgagactatagcgttgatacaa

SEQ ID NO: 33678 - DNA, 40 bp, Streptococcus agalactiae; identical to SEQ ID NO: 23678
  source 1..40: mol_type = genomic DNA

SEQ ID NO: 33679 - DNA, 40 bp, Streptococcus agalactiae; identical to SEQ ID NO: 23678
  source 1..40: mol_type = genomic DNA

SEQ ID NO: 33680 - DNA, 50 bp, Streptococcus agalactiae
  source 1..50: mol_type = genomic DNA
atctacccaagagaaggaaaatacatgtccatacaaagacttggatacaa

SEQ ID NO: 33681 - protein, 585 aa, Streptococcus pyogenes
MNTKVKLIKASNTGARNRNALHLDLKRVAAYCRVSTDSKDQLESYKSQVDYYTNLIKNNKNWTLAGIYADEATTGTTTTKRADFMRLISDCQNGDIDMIITKSISRFARNTLDTLKYVRLLKENNVGVVFEEENIDTLTMDGELLLTILSSVAQQEVENTSAHVKKGLKMKMEKGELIGFQGCLGYDYDPITKSISINEEEAKIVRYIFKRYLEGNGGSVIGRELEEKGYLTPRGKTNWSDTTVLGVIKNEKYIGDILMGKTFTVDPITKRRLANFGESDKYHIENHHEPIISKEDFEKAQEIRLRRAQNRNTIANKDRKREKLSRQYAFSSMLECGFCGEILSRRTWHTSSIYKKINWQCVKSTKKGKKYCSHSKGIQEAAIEKAFVESYRQLCHADSTVIDDFLKIVEEEINDNTLVKDLKKIENQLNRIISQERKLVDLHLEDSIDEEVYAKKYKKLTKQKEELLDEKKTLELTIKDEDSIKERLKQFKKVLENKEIIEEFNRTVFESIVDKVVVGRIDKDGTVHPYDLTFYFKTGVKDSQDSNNFKDKRKNAKDNDINKLCSYKNDEDKKLCSQSKDNTRR

SEQ ID NO: 33682 - DNA, 50 bp, Streptococcus pyogenes
  source 1..50: mol_type = genomic DNA
atgttcccaatcaaaagacaacacatgtcgagactatagcgttgatacaa

SEQ ID NO: 33683 - DNA, 40 bp, Streptococcus pyogenes; identical to SEQ ID NO: 23708
  source 1..40: mol_type = genomic DNA

SEQ ID NO: 33684 - DNA, 40 bp, Streptococcus pyogenes
  source 1..40: mol_type = genomic DNA
ttgtttccgcaaacgcatcatgtcgagtgcgtagtgttgc

SEQ ID NO: 33685 - DNA, 50 bp, Streptococcus pyogenes; identical to SEQ ID NO: 33680
  source 1..50: mol_type = genomic DNA

SEQ ID NO: 33686 - protein, 623 aa, Faecalibacterium prausnitzii
MKKKKVKEIGITALYERLSRDDDGDGDSNSIVHQKQMLEAYAKEHGFVNLRHYTDDGWSGASFDRPAWNELVAGVKAEEITTVIVKDLSRVGRDHLQVGFFTDILFREKEVHFIAIGNGIDSNDQQSSEFAPFLNIMNEWYVRDTSKKIKSVLKARGMSGSAHTSNCACYGYKKDPENPDKWVIDEEAASVVREIFQMCVDGKGPYEIARCLAERKVERPSYYLAKRGLGNHQSDCDYSNPYTWRGHTVATILERPEYTGCTVNFRTYKNSYKDKKIKKADKSDWVIFEGTQEPIIDKETWSIVQNLRKHTRRTDSLGEANPLTGKVFCGECGSLMYNHRRKNGRVRVYYTSKGERRESYSKPEDCYACSKHILTRQTYKAACSGHHIRTSALRSIVLECIRKTCSYVQSNPEEFLELYNQISESQNQSHLQELRSRITKAEHRTKDIDALIRKIYEDNIAGRLSDKMLENLLEGYEKEKNELEEEQKDCQQQLDSAEKQADNTNHFIELAKKYTDFSELTPAMVNEFVSKIIVHRPFELNGTRAVQVEVYLNYIGKFDVPEEPMILSEEELATQKIREEKLEKHRIASRKYMAKYRKRLKEMKKAGTILPENLPAETKGEWL

SEQ ID NO: 33687 - DNA, 50 bp, Faecalibacterium prausnitzii
  source 1..50: mol_type = genomic DNA
ttcccaccttgacaactctaatcagatgtgatatgttatcatcgtgggta

SEQ ID NO: 33688 - DNA, 40 bp, Faecalibacterium prausnitzii
  source 1..40: mol_type = genomic DNA
cccgccgaagcattttaccgaggaccttctacttcatgcg

SEQ ID NO: 33689 - DNA, 40 bp, Faecalibacterium prausnitzii
  source 1..40: mol_type = genomic DNA
cccgccgaagcattttaccacggaccttctacttcatgcg

SEQ ID NO: 33690 - DNA, 50 bp, Faecalibacterium prausnitzii
  source 1..50: mol_type = genomic DNA
ttcccatcacttctactctaatccacattgctatgtttcctccctgggtt

SEQ ID NO: 33691 - protein, 654 aa, Vibrio splendidus
MSLIPYARVSSGKQLDGLSMSLQGDSKLLDKLAKEHNTTVSNLVYNDEGKSAYKGKNVDDGELGRLINDIKRNVIKQGDIIVMRALDRLSRQNLTDSENLYNSIVGSNVCILTTIDNHLYKRDCVMSSVLKTLAFKTANEESAKKSHLTNTYASHRIQQFLSNEKPDNGTAYDIGIGRHPFWIEISNRVIQKGKHFTLARIMFEKAMQGYGVARLQKFALEQGLELSYSAVGKMFRNHTVFGDLHITHQGKKHTLKSYYPALATENEYYKVRAIKDRLTKESNAQRKHVSILAGMQKLYCGCCNSSVGISRNTKQDINYYSCINKLEKCYQPLRQDIIDNIVLNAIDIHIFNVDSTDTTVVDGLELEFSEKKKQHESAVERYMLLGDSAGDSAVNVIHQLKSELDDIQGKIETEKSQAASYAIDYDAITSFHDAMADYKAQQDKITEYVHGDSELKQEIKDVLKLILKRITIDHRHMITIEMLDGSISYLYLLRRKDGKRVHDRYYVPIKVHDKETVNIIRTSTPELVNWVTQSELDKLDIYYEDVTNPFLTIERNRHVRDLEQEFFDLLQGNVYEWKRAGIIKAGATTTQWQDFKDADVSKYGFTKAECTITTRHYTKQHKTIIYKEFNESALISHFDCKRIEFKLTNHVTRL

SEQ ID NO: 33692 - DNA, 50 bp, Vibrio splendidus
  source 1..50: mol_type = genomic DNA
atgtcagagcaacttgacttagcatcaccaaaatcaaatttctatctaag

SEQ ID NO: 33693 - DNA, 40 bp, Vibrio splendidus
  source 1..40: mol_type = genomic DNA
tagacagctctgtttagcatcaccaaacagcatctgcgta

SEQ ID NO: 33694 - DNA, 40 bp, Vibrio splendidus
  source 1..40: mol_type = genomic DNA
tagacagctctgtttagcaccaccaaacagcatctgcgta

SEQ ID NO: 33695 - DNA, 50 bp, Vibrio splendidus
  source 1..50: mol_type = genomic DNA
atgccaaagccagttgtcttgccaccaccaaaatgagttctgaatccaag

SEQ ID NO: 33696 - protein, 518 aa, Bacillus cytotoxicus
MKTKVALYVRVSTEEQANNGYSIDAQLNTLRNHCEISGKTIVEEYADKGISGTSISGRHGLQKMLEDAKKGLFSEVIVWKISRLARNTIDILKIVEELNKNNVVFRSFSENFETETPMGKFALQMMGAVAELERNTIVDNVKLGMTQRAKEGKWNGGSMLGYTCIDKELKIVEEEAKIVRYIFDLYINGKGYKAIANKLNHEGYKTKRKKSFSINSIRTIIANPAYAGFIRFNQVENWSKKRRKGKSENTTTVKGTHEPIISLDVWETSRIISNQKSHKPAKTFSGTFPLTTLLRCPMCGQGMIGHKIKKNKNGTEYIRYYQCGNFHYKGSAVCKSNLINADIAEEYVFKKIEEITSKPTILQEIVDRVNRDIKTLKEPIQNNLNYISKALADNQKSIQKFMNIIETEDTLPQLILKRIHELEAKREELLEQKKSLEYELAKPTIKEISFEQISNVLNTFSKILPNISPEQQKDFLHSIINKITVNTGNSPTERSIKDIELFFDASSKNNYVLTYGKV

SEQ ID NO: 33697 - DNA, 50 bp, Bacillus cytotoxicus
  source 1..50: mol_type = genomic DNA
ctatgtgcttacttatggtaaggttcaccgaacatcactaaagaacatag

SEQ ID NO: 33698 - DNA, 40 bp, Bacillus cytotoxicus
  source 1..40: mol_type = genomic DNA
ccatcacttgtgatacggttccccacgattaatccggaac

SEQ ID NO: 33699 - DNA, 40 bp, Bacillus cytotoxicus
  source 1..40: mol_type = genomic DNA
ccatcacttgtgatacggtgacccacgattaatccggaac

SEQ ID NO: 33700 - DNA, 50 bp, Bacillus cytotoxicus
  source 1..50: mol_type = genomic DNA
ctatgtgtctttctgtggtatggtgaaaagaacattagattagaaggtag

SEQ ID NO: 33701 - protein, 551 aa, Streptococcus dysgalactiae
MSKEKIKVYLYTRVSTSIQIDGYSLEAQKSRMKAFALYNDYEIVGEYEDAGKSGKSIEGRIQFTRMMEDIKSGKDGVSFVLVFKLSRFARNAADVLSTLQIMQDFGVNLICVEDGIDSSKDAGKLMISVLSAVAEIERENIRVQTMEGRIQKAREGKWNGGFAPYGYQLIDGKLLINEEEAIAIRTIFDQYVNTSIGANGLSKYLENHGIRKIPRQNGKNPLFDAGLIRKILKNPVYNGKIAFGRRTLEKVHGTRNEYRQVEQDDYLVAEGIHEAIIPDELWQAAQVKLKAQAKKYEHVNKGKNMRTHLLSGIVKCPICGAGMFGNKSIKYKKDGTKYKDFYYYGCKHRLMNRGHKCTYNKQIREELLDDAVAEVIIKLVSNPKFASMMQEKINMKVDTSAIENEIDNYQKELRKSHSTKFKLIEEIDNLDVDDKHYKRRKQDLDDRLYRMYDKIEELEGQLIEAKAKKETIEAEKLTGDNIYKVLIYFDKLYKVMNDVERRQLIEALISEIQIYEEKQPNGQWLKSITFKLPIIDEDLNISLDNDEQVEC

SEQ ID NO: 33702 - DNA, 50 bp, Streptococcus dysgalactiae
  source 1..50: mol_type = genomic DNA
aagtttggacaatgatgaacaagttgagtgcatagcgttgatacaaagag

SEQ ID NO: 33703 - DNA, 40 bp, Streptococcus dysgalactiae
  source 1..40: mol_type = genomic DNA
ttccacagacgcatcatgtggagtgtgtagtgttgctaca

SEQ ID NO: 33704 - DNA, 40 bp, Streptococcus dysgalactiae
  source 1..40: mol_type = genomic DNA
ttccacagacgcatcatgtaaagtgtgtagtgttgctaca

SEQ ID NO: 33705 - DNA, 50 bp, Streptococcus dysgalactiae
  source 1..50: mol_type = genomic DNA
aaatttgtatagacataaacaagtaaaatacatagaacacacacacacag

SEQ ID NO: 33706 - protein, 452 aa, Listeria monocytogenes; identical to SEQ ID NO: 8206

SEQ ID NO: 33707 - DNA, 50 bp, Listeria monocytogenes
  source 1..50: mol_type = genomic DNA
tttagtttctcatttcctctcactggagggagaggaaatgggatacaaaa

SEQ ID NO: 33708 - DNA, 40 bp, Listeria monocytogenes; identical to SEQ ID NO: 1298
  source 1..40: mol_type = genomic DNA

SEQ ID NO: 33709 - DNA, 40 bp, Listeria monocytogenes; identical to SEQ ID NO: 25804
  source 1..40: mol_type = genomic DNA

SEQ ID NO: 33710 - DNA, 50 bp, Listeria monocytogenes; identical to SEQ ID NO: 8210
  source 1..50: mol_type = genomic DNA

SEQ ID NO: 33711 - protein, 537 aa, Subdoligranulum sp
MTTSNQKKTALYCRLSQDDNTENESNSIQNQKMILQRYASDHHFPNPCFYVDDGYSGANFQRPGFQQMMADMENGEIGIIITKDLSRLGRNQLHTGLYIEERFPMFGVRYIAINDNVDTDSSESNELTPFKNLFNEWYVRDSSRKVRAVLRAKAERGERLGTRAPYGYRKDENDKKQLVVDEEAAAIVRRIFAMCAAGSGPMRIAKELQNDQILCPSVYTYRKYGHTHTRLNLERPYHWSGDSVRAILENEVYLGNTINMRYSTKSYKDKRKIERPREECLVFENTHPALVTKEVWDIVQRVRQNKRRRNNFDEQNKYSGLVVCADCGRTMVLHRTRLKGPSGNNFTCYTYKRLGTEGCTAHYIRECVLDDIALEDLRQVTAMAREHTKEFAEYIGSKQSAEIQREIRRLEKELTTVRKRSAELDAIFKKLYEDRVLGHISVEQFQVLSSGYTEEQTALTKGLEEKEFAIQKLKESVSNTAHFIDKAKKYTDITELTPELLRLFIQKIVVHEKSVKYSKHAEQTVEIHYIDIGYIGG

SEQ ID NO: 33712 - DNA, 50 bp, Subdoligranulum sp
  source 1..50: mol_type = genomic DNA
agatacccttatgcgggggcggccaagggcctccccgcataaggacaaca

SEQ ID NO: 33713 - DNA, 40 bp, Subdoligranulum sp
  source 1..40: mol_type = genomic DNA
ttgataacatcgcacagggaaaggccctgcacagggtctt

SEQ ID NO: 33714 - DNA, 40 bp, Subdoligranulum sp
  source 1..40: mol_type = genomic DNA
ttgataacatcgcacagggcaaggccctgcacagggtctt

SEQ ID NO: 33715 - DNA, 50 bp, Subdoligranulum sp
  source 1..50: mol_type = genomic DNA
agaaaacctggggcgggagcgccccacggcctaacccgccgaggaaagca

SEQ ID NO: 33716 - protein, 581 aa, Streptomyces chrestomyceticus
MTPLTNRTPDWRLNLDSVRAVSYIRQSKRREDDSQASPMAQRERCSSLIASKGWDDAGHFEDLGKSGWDPGVHRPGFEEMMAAVRGGHVDAVIVFSLSRLTRRGALEAMKIIDELERYGVRLVSVEEPYLDTSTPVGVGILAIIAGLAQQESDLKSEYITSTKDTLRRAGSHVSGHAPFGFRTERKARGKLIVTRLIPDPVEAPIVRDMVTWVGDGLTASAVSKRLNESGVLTKAAGLGESGAKRIDARRERVGSSEAATRTGWTSSTVLRILRDPRLAGYAMEWQGRQKKVIDADGDVIPGKAGKRVILRDDEGRPVEAHEAIVPADEWWKLQDVLNGRTKTVVRSGRRVPTLLAGHGLLFCDVCGSVMVSDRRSGKLYYKCNRASGVVAGHGGLVISMADADDEVARRVWARLTAMDPDDEDDREWLAEAARRFAHQRDTSQREVERTATRAELEHVREALRTLYQDRQQGLYAGEVGSAMFRESVERLSAHEQRVAERLADLDQAANVAIKIPAEWTAVDGDPIGEGTPWYGWSLEERREFLAFFIDSVRIAKAAGRGRYANTRDRILIRWAEKPDNG

SEQ ID NO: 33717 - DNA, 50 bp, Streptomyces chrestomyceticus
  source 1..50: mol_type = genomic DNA
tatgtgcgtggcttgacacactcattgatctttaccacgctgggcacatg

SEQ ID NO: 33718 - DNA, 40 bp, Streptomyces chrestomyceticus
  source 1..40: mol_type = genomic DNA
ggcgggaacggtcagcacattgatcttcacgatgctcata

SEQ ID NO: 33719 - DNA, 40 bp, Streptomyces chrestomyceticus
  source 1..40: mol_type = genomic DNA
ggcgggaacggtcagcacagtgatcttcacgatgctcata

SEQ ID NO: 33720 - DNA, 50 bp, Streptomyces chrestomyceticus
  source 1..50: mol_type = genomic DNA
tatgtgtgaggagagactcactcagtggtctttaaccactggggacccag

SEQ ID NO: 33721 - protein, 515 aa, Neobacillus mesonae
MSRPTGLTIDIYLRKSRKDLEEEKKASESGETYDTLERHRRTLFAVAKKERHNIANIYEEVVSGESVSERPQIQAMLRNLETSHIEGVLVMDLDRLGRGDMLDQGLLDRAFRYSGAKILTPTEVYDPESETWELVFGIKSLVAREELKAITRRMQRGRVASAGEGKSISKVPPYGYLRDENLRLYPDPETAWVVKKMFEMMRDGHGRIAVAQELDKLGIKPPNDKRRSWAPSSITAIIKNEVYLGTIIWGQVKYSKRNGKYKKTKLPRSKWTIKENAHEPIVSRELFEAANRAHTGRWRPSTNATKTLSNPLAGVLKCDVCGFTMLYQPRPNRPNDFIRCTQPTCQAVQKGATLALVEQHILDGLKQFAQELELQTEVPELDNDKDIAVKKSLVGNKQEEIAQLETQKSKLHDLLERGIYDVDTFLERQQNLNNRINGLQDDIRNIESEIKKEEVRNSSVLNLLPQLQTVISEYENADTESKNRLLKSVLEKATYLRKKEWTKRDQFIIQLYPKI

SEQ ID NO: 33722 - DNA, 50 bp, Neobacillus mesonae
  source 1..50: mol_type = genomic DNA
agtgtagagcgtctacgattgtactgatttaaatgttaaccctatacaca

SEQ ID NO: 33723 - DNA, 40 bp, Neobacillus mesonae
  source 1..40: mol_type = genomic DNA
ggtcgagtgacgattgtactgatttacctcaccgtagccg

SEQ ID NO: 33724 - DNA, 40 bp, Neobacillus mesonae
  source 1..40: mol_type = genomic DNA
ggtcgagtgacgattgtacgcatttacctcaccgtagccg

SEQ ID NO: 33725 - DNA, 50 bp, Neobacillus mesonae
  source 1..50: mol_type = genomic DNA
agtgtacagttcctacgattgtcggcatttaaatgtatgtcttcttttta

SEQ ID NO: 33726 - protein, 481 aa, Hydrogenobacter thermophilus
MSLRGIVYARVSTDKQAERETPIESQISQCLKYAQEKGIEVVAIFKDEGISGSTDKRPQFQQAISYAVKNNVDCFIVFDTSRFARNREDAIYYKRLLRKNGIELHYVVTPLPDDPVSSYLTEGIFELLDEYYTLMIKKHTLRGIEESIKKRIYPKNKCPVGYKVVKGEDGKGRIYKDEETSHIYLKILTLFRRGLGALEIAHYLNRELGTDEWNKKKILRVLKNPLYKGIIEYGEIKVYFEDLRYISDEEWGKIQKELQRRHKEEKGRHKAKMFFVGLLKCGRCGSAMTTRTGKGKGGLYFYYVCYNRLHRKCKQEILPAHKVDEFLSKEILDYILNEQTLQELTARLKETIQKASNNFLEREKELREEKEKIENQINNLIKAITAGIDPHTVKDELNRLQAIKDKISAELSHIKNLKTLNVAPRINPAQVRAVFEELVASNDYRRIRSFFKTLIKEIVYDNKTFDIQYSPALFVIEGNQG

SEQ ID NO: 33727 - DNA, 50 bp, Hydrogenobacter thermophilus
  source 1..50: mol_type = genomic DNA
ttgttcgtaatagagggaaatcaggggactttaacatcccttgctacgaa

SEQ ID NO: 33728 - DNA, 40 bp, Hydrogenobacter thermophilus
  source 1..40: mol_type = genomic DNA
attagagcttcctcttgtggggagggtgacgggactcgaa

SEQ ID NO: 33729 - DNA, 40 bp, Hydrogenobacter thermophilus
  source 1..40: mol_type = genomic DNA
attagagcttcctcttgtgtagagggtgacgggactcgaa

SEQ ID NO: 33730 - DNA, 50 bp, Hydrogenobacter thermophilus
  source 1..50: mol_type = genomic DNA
tatttggcattcctgggaaataagtagattttagctgctcttgctacaaa

SEQ ID NO: 33731 - protein, 554 aa, Methylobacterium durans
MGEAVRYAISYSRFSHERQAKGSTIERQEKALNDYLARNPDVHLVQHLSDDGVSSFRGKHAREGALSRIIAGLEQGDFPRPLILIVESLDRLSREPFMDAFDRFSTILKHDCTIAICDMNQDLSRESLKKEPNRIWEIIGAMNRAHGESARKSDLVTSAWRSRIKLALKTGCAIKGYLGPPWVSIDPVTNRYVVGLDELRVVETVNLIFEWRADGVNDHSIAKRLNEQRREVFRASVGKDHKRQGWYQSYISKLLQNRQVLGEMTIRGVEMPKGYIPEIITPELFHRAQAARSPREGKPGRKGLTLSNLFTGVAKCSHCGGTMEMTRNRAQTQDGPAPIKFLMCSSRKRRFKCESQGMINYEKLESAVLGFLSKIPWTEIVKAENPDNPLPAIEDAIARTEIEIAALTEQRDRAIAMILKEAGFEEEFGPVIDRLRPVLRDAQARLSDLKADSNREAHAWRARPGLINNAIEFFEKMNIASDAERLVIRNRLADALAQMITQMKCDTSAKRTKIEVGNYWFSVETPNRSHVTTRGGFGENAALLHQKQTAASRL

SEQ ID NO: 33732 - DNA, 50 bp, Methylobacterium durans
  source 1..50: mol_type = genomic DNA
aaggtgggaatttgaaaaaatagccacctcgtattgcgattcctcacctt

SEQ ID NO: 33733 - DNA, 40 bp, Methylobacterium durans
  source 1..40: mol_type = genomic DNA
aggtcatgatcgcgcgggccaaccaccgcgtgacctatcc

SEQ ID NO: 33734 - DNA, 40 bp, Methylobacterium durans
  source 1..40: mol_type = genomic DNA
aggtcatgatcgcgcgggcataccaccgcgtgacctatcc

SEQ ID NO: 33735 - DNA, 50 bp, Methylobacterium durans
  source 1..50: mol_type = genomic DNA
aaagtgggattaccataaaataacatctacatgttgtttattctcatctt

SEQ ID NO: 33736 - protein, 545 aa, Vibrio parahaemolyticus
MNKYHLYQRVSKQIQAEEGQGIQRQEQACEHWISDYNKRLLSEGKSAYSKGLIYEDRGKSAYTAANFKRGELGALINDIENGKIEKGDLIVIELIDRFSRANVDFVRSQFQRIIDAGVKIAITKWNLVFEENMESVSSVTGRILLEIGMYLAYQESSQKSSRIKASRKLLEDSGRKSIAKPPFWLARNSDLKSYTIIEENAEIIRKIFDLKLNFNYGPQKIIKSLGDLDIYRYSFDENGNLIKTTKNSPLSESSINAYIRNTNVIGKLDGKDYYPRIIDDRTFYAVQKRTRENTGGVGEIFRNVFVGVGKCGCLIRKENENGCGSLAKCGYIMAFSSRKVKNPTKGMYLKCNRKRKSTKCDSENINYYLAQNKIYNVLKSLKFDIDQSVDISHLEEKINTIDKSMSKIREYMTQYSDDEEWENQYKIKRMEREKIENEIKASKSRITGKLSNLDIDFSKEKDRVLFNQFLKDNRITVYFTKERMEIIIGSLNNFSIKCGYDDSNRDIDHIIESYSKNGLVGIEEKSGKSEGKGLLRFNLPTVPGS

SEQ ID NO: 33737 - DNA, 50 bp, Vibrio parahaemolyticus
  source 1..50: mol_type = genomic DNA
atgtcgtcaatcatttagttgactaatgacaactacatgttatactacat

SEQ ID NO: 33738 - DNA, 40 bp, Vibrio parahaemolyticus; identical to SEQ ID NO: 5003
  source 1..40: mol_type = genomic DNA

SEQ ID NO: 33739 - DNA, 40 bp, Vibrio parahaemolyticus; identical to SEQ ID NO: 5004
  source 1..40: mol_type = genomic DNA

SEQ ID NO: 33740 - DNA, 50 bp, Vibrio parahaemolyticus; identical to SEQ ID NO: 1345
  source 1..50: mol_type = genomic DNA

SEQ ID NO: 33741 - protein, 545 aa, Vibrio parahaemolyticus
MNKYHLYQRVSKQIQAEEGQGIQRQEQACEHWISDYNKRLLSEGKSAYSKGLIYEDRGKSAYTAANFKRGELGALINDIENGKIEKGDLIVIELIDRFSRANVDFVRSQFQRIIDAGVKIAITKWNLVFEENMESVSSVTGRILLEIGMYLAYQESSQKSSRIKASRKLLEDSGRKSIAKPPFWLARNLDLKSYTIIEKNAEIIRKIFDLKLNFNYGPQKIIKSLGDLDIYRYSFDENGNLIKTTKNSPLSESSINAYIRNTNVIGKLDGKDYYPRIIDDRTFYAVQKRTRENTGGVGEIFRNVFVGVGKCGCLIRKENENGCGSLAKCGYIMAFSSRKVKNPTKGMYLKCNRKRKSTKCDSENINYYLAQNKIYNVLKSLKFDIDQSVDISHLEEKINTIDKSMSKIREYMTQYSDDEEWENQYKIKRMEREKIENEIKASKSRITGKLSNLDIDFSKEKDRVLFNQFLKDNRITVYFTKERMEIIIGSLNNFSIKCGYDDSNRDIDHIIESYSKNGLVGIEEKSGKSEGKGLLRFNLPTVPGS

SEQ ID NO: 33742 - DNA, 50 bp, Vibrio parahaemolyticus
  source 1..50: mol_type = genomic DNA
atgtcgtcaatcatttagttgactaaagacaactaaatgttatactacat

SEQ ID NO: 33743 - DNA, 40 bp, Vibrio parahaemolyticus; identical to SEQ ID NO: 1343
  source 1..40: mol_type = genomic DNA

SEQ ID NO: 33744 - DNA, 40 bp, Vibrio parahaemolyticus; identical to SEQ ID NO: 1344
  source 1..40: mol_type = genomic DNA

SEQ ID NO: 33745 - DNA, 50 bp, Vibrio parahaemolyticus; identical to SEQ ID NO: 1345
  source 1..50: mol_type = genomic DNA

SEQ ID NO: 33746 - protein, 545 aa, Vibrio alginolyticus
MNKYHLYQRVSKQIQAEEGQGIQRQEQACEHWISDYNKRLLSEGKSAYSKGLIYEDRGKSAYTAANFKRGELGALINDIENGKIEKGDLIVIELIDRFSRANVDFVRSQFQRIIDAGVKIAITKWNLVFEENMESVSSVTGRILLEIGMYLAYQESSQKSSRIKASRKLLEDSGRKSIAKPPFWLARNSDLKSYTIIEENAEIIRKIFYLKLNFNYGPQKIIKSLGDLDIYRYSFDENGNLIKTTKNSPLSESSINAYIRNTNVIGKLDGKDYYPRIIDDRTFYAVQKRTRENTGGVGEIFRNVFVGVGKCGCLIRKENENGCGSLAKCGYIMAFSSRKVKNPTKGMYLKCNRKRKSTKCDSENINYYLAQNKIYNVLKSLKFDIDQSVDISHLEEKINTIDKSMSKIREYMTQYSDDEEWENQYKIKRMEREKIENEIKASKSRITGKLSNLDIDFSKEKDRVLFNQFLKDNRITVYFTKERMEIIIGSLNNFSIKCGYDDSNRDIDHIIESYSKNGLVGIEEKSGKSEGKGLLRFNLPTVPGS

SEQ ID NO: 33747 - DNA, 50 bp, Vibrio alginolyticus
  source 1..50: mol_type = genomic DNA
atgtcgtcaatcatacagttgactaaagacaactaaatgttatactacat

SEQ ID NO: 33748 - DNA, 40 bp, Vibrio alginolyticus; identical to SEQ ID NO: 8223
  source 1..40: mol_type = genomic DNA

SEQ ID NO: 33749 - DNA, 40 bp, Vibrio alginolyticus; identical to SEQ ID NO: 8224
  source 1..40: mol_type = genomic DNA

SEQ ID NO: 33750 - DNA, 50 bp, Vibrio alginolyticus; identical to SEQ ID NO: 1345
  source 1..50: mol_type = genomic DNA

SEQ ID NO: 33751 - protein, 545 aa, Vibrio alginolyticus
MNKYHLYQRVSKQIQAEEGQGIQRQEQACEHWISDYNKRLLSEGKSAYSKGLIYEDRGKSAYTAANFKRGELGALINDIENGKIEKGDLIVIELIDRFSRANVDFVRSQFQRIIDAGVKIAITKWNLVFEENMESVSSVTGRILLEIGMYLAYQESSQKSSRIKASRKLLEDSGRKSIAKPPFWLARNLDLKSYTIIEENAEIIRKIFDLKLNFNYGPQKIIKSLGDLDIYRYSFDESGNLIKTTKNSPLSESSINAYIRNTNVIGKLDGKDYYPRIIDDRTFYAVQKRTRENTGGVGEIFRNVFVGVGKCGCLIRKENENGCGSLAKCGYIMAFSSRKVKNPTKGMYLKCNRKRKSTKCDSENISYYLAQNKIYNVLKSLKFDIDQSVDISHLEEKINTIDKSMSKIREYMTQYSDDEEWENQYKIKRMEREKIENEIKASKSRITGKLSNLDIDFSKEKDRVLFNQFLKDNRITVYFTKERMEIIIGSLNNFSIKCGYDDSSRDIDHIIESYSKNGLVGIEEKVGKSEGKGLLRFNLPTVSGS

SEQ ID NO: 33752 - DNA, 50 bp, Vibrio alginolyticus; identical to SEQ ID NO: 33747
  source 1..50: mol_type = genomic DNA

SEQ ID NO: 33753 - DNA, 40 bp, Vibrio alginolyticus; identical to SEQ ID NO: 8223
  source 1..40: mol_type = genomic DNA

SEQ ID NO: 33754 - DNA, 40 bp, Vibrio alginolyticus; identical to SEQ ID NO: 8224
  source 1..40: mol_type = genomic DNA

SEQ ID NO: 33755 - DNA, 50 bp, Vibrio alginolyticus; identical to SEQ ID NO: 1345
  source 1..50: mol_type = genomic DNA

SEQ ID NO: 33756 - protein, 545 aa, Vibrio alginolyticus
MNKYHLYQRVSKQIQAEEGQGIQRQEQACEHWISDYNKRLLSEGKSAYSKGLIYEDRGKSAYTAANFKRGELGALINDIENGKIEKGDLIVIELIDRFSRANVDFVRSQFQRIIDAGVKIAITKWNLVFEENMESVSSVTGRILLEIGMYLAYQESSQKSSRIKASRKLLEDSGRKSIAKPPFWLARNLDLKSYTIIEENAEIIRKIFDLKLNFNYGPQKIIKSLGDLDIYRYSFDENGNLIKTTKNSPLSESSINAYIRNTNVIGKLDGKDYYPRIIDDRTFYAVQKRTRENTGGVGEIFRNVFVGVGKCGCLIRKENENGCGSLAKCGYIMAFSSRKVKNPTKGMYLKCNRKRKSTKCDSENINYHLAQNKIYNVLKSLKFDIDQSVDISHLEEKINTIDKSMSKIREYMTQYSDDEEWENQYKIKRMEREKIENEIKASKSRITGKLSNLDIDFSKEKDRVLFNQFLKDNRITVYFTKERMEIIIGSLNNFSIKCGYDDSSRDIDHIIESYSKNGLVGIEEKVGKSEGKGLLRFNLPTVSGS

SEQ ID NO: 33757 - DNA, 50 bp, Vibrio alginolyticus; identical to SEQ ID NO: 33747
  source 1..50: mol_type = genomic DNA

SEQ ID NO: 33758 - DNA, 40 bp, Vibrio alginolyticus; identical to SEQ ID NO: 8223
  source 1..40: mol_type = genomic DNA

SEQ ID NO: 33759 - DNA, 40 bp, Vibrio alginolyticus; identical to SEQ ID NO: 8224
  source 1..40: mol_type = genomic DNA

SEQ ID NO: 33760 - DNA, 50 bp, Vibrio alginolyticus; identical to SEQ ID NO: 1345
  source 1..50: mol_type = genomic DNA

SEQ ID NO: 33761 - protein, 545 aa, Vibrio alginolyticus
MNKYHLYQRVSKQIQAEEGQGIQRQEQACEHWISDYNKRLLSEGKSAYSKGLIYEDRGKSAYTAANFKRGELGALINDIENGKIEKGDLIVIELIDRFSRANVDFVRSQFQRIIDAGVKIAITKWNLVFEENMESVSSVTGRILLEIGMYLAYQESSQKSSRIKASRKLLEDSGRKSIAKPPFWLARNLDLKSYTIIEENAEIIRKIFDLKLNFNYGPQKIIKSLGDLDIYRYSFDENGNLIKTTKNSPLSESSINAYIRNTNVIGKLDGKDYYPRIIDDRTFYAVQKRTRENTGGVGEIFRNVFVGVGKCGCLIRKENENGCGSLAKCGYIMAFSSRKVKNPTKGMYLKCNRKRKSTKCDSENINYYLAQNKVYNVLKSLKFDIDQSVDISHLEEKINTIDKSMSKIREYMTQYSDDEEWENQYKIKRMEREKIENEIKASKSRITGKLSNLDIDFSKEKDRVLFNQFLKDNRITVYFTKERMEIIIGSLNNFSIKCGYDDSSRDIDHIIESYSKNGLVGIEEKVGKSEGKGLLRFNLPTVSGS

SEQ ID NO: 33762 - DNA, 50 bp, Vibrio alginolyticus; identical to SEQ ID NO: 33747
  source 1..50: mol_type = genomic DNA

SEQ ID NO: 33763 - DNA, 40 bp, Vibrio alginolyticus
  source 1..40: mol_type = genomic DNA
gggcaagccacagtttgcaaatgacacaaatggaccgcgt

SEQ ID NO: 33764 - DNA, 40 bp, Vibrio alginolyticus
  source 1..40: mol_type = genomic DNA
gggcaagccacagtttgcatttgacacaaatggaccgcgt

SEQ ID NO: 33765 - DNA, 50 bp, Vibrio alginolyticus; identical to SEQ ID NO: 1345
  source 1..50: mol_type = genomic DNA

SEQ ID NO: 33766 - protein, 545 aa, Vibrio alginolyticus; identical to SEQ ID NO: 33736

SEQ ID NO: 33767 - DNA, 50 bp, Vibrio alginolyticus
  source 1..50: mol_type = genomic DNA
atgtcgtctatcatacagttgactaaagacaactacatgttatactacat

SEQ ID NO: 33768 - DNA, 40 bp, Vibrio alginolyticus; identical to SEQ ID NO: 8223
  source 1..40: mol_type = genomic DNA

SEQ ID NO: 33769 - DNA, 40 bp, Vibrio alginolyticus; identical to SEQ ID NO: 8224
  source 1..40: mol_type = genomic DNA

SEQ ID NO: 33770 - DNA, 50 bp, Vibrio alginolyticus; identical to SEQ ID NO: 1345
  source 1..50: mol_type = genomic DNA

SEQ ID NO: 33771 - protein, 545 aa, Vibrio alginolyticus
MKKYHLYQRVSKQIQAEEGLGIQRQEQVCEHWISEYNKRLLDDGKSAYSKGLVYEDHGKSAYTTANFKRGELGTLMKDIESGKIAKGDLIVIELIDRFSRANVDFVRKKFQSILDAGVKVAITKWNLVFEENMEGISSVSARLLLEIGMHLAYQESSQKSTRIKASRKLLERSGKKSIAKPPFWLVRNLDLRSYTIIEENAEIVRKIFDLKLKFNYGPQKIIKSLGELEIYRYKFDDNGNLVKTTKNSPLSESSINAYIRNPNVIGKLDGKDYYPRIIDDKTYYAVQKRTRENTGGASDIFRNVFVGVGKCGCLIRNEDENGYVKFTKCGYIMAYSSRKVKNPTKGQYLKCNKKRKNTKCKSENINYYLAQNKVYSVLKSLKFDFSQSVDISHLEEKINILNKEMSKIRTFMAKYTDDDEWENHYNVKRMEREKIENEIKNSKSLITGKISSLDLDFSAEKDRVLFNQFLKDNRVIVYFTKENMEIIIGSLNNFSIKCGYDDSSRDIDHIIESYSKNGLVGIEEKVGKSEGKGLLRFNLPTVSGS

SEQ ID NO: 33772 - DNA, 50 bp, Vibrio alginolyticus
  source 1..50: mol_type = genomic DNA
atgtcgtcaatcatgtagttgactaatgacaattgtatgataagctacat

SEQ ID NO: 33773 - DNA, 40 bp, Vibrio alginolyticus; identical to SEQ ID NO: 33763
  source 1..40: mol_type = genomic DNA

SEQ ID NO: 33774 - DNA, 40 bp, Vibrio alginolyticus; identical to SEQ ID NO: 33764
  source 1..40: mol_type = genomic DNA

SEQ ID NO: 33775 - DNA, 50 bp, Vibrio alginolyticus; identical to SEQ ID NO: 1345
  source 1..50: mol_type = genomic DNA

SEQ ID NO: 33776 - protein, 421 aa, Limosilactobacillus reuteri
MQQLIKDADTGLYDAVLVYKLDRLSRSQKDTLYLIEDVFQKNNIHFISLSENFDTSTAFGKAMIGILSVFAQLEREQIKERMSMGRVGRAKSGKIMEFNNPAFGYEIDGDNYKVDPLRAEIVKRIYKMYLSGTSINKIKETLNSEGHIGNKKNWSDTRIRYILSNPTYLGKIRYDGKTYDGKFSPIIDEETFNKTQNELKERQTATYKRFNMKLRPFQSKYMLSGLLRCGYCGATLFVNSYVYNGKRKLRYNCPSTYKSKQKTRTYKIMDPNCPFKLVYAKDLEPAVINEINNLALNPQSIQKPIKKKPDIDVEAIQKELAKIRKQQQRLIDLYVISDDVNIDNISKKSADLKLQEETLKKQLAPLEEPDNDDKIVAFNEILAQIKDIDSLDYDKQKFIVKKLIKKIDVWNDNKIKIHWNI

SEQ ID NO: 33777 - DNA, 50 bp, Limosilactobacillus reuteri
  source 1..50: mol_type = genomic DNA
ttcgtatattaggtgtttccaattgaaactggttatacctaatatacgaa

SEQ ID NO: 33778 - DNA, 40 bp, Limosilactobacillus reuteri
  source 1..40: mol_type = genomic DNA
aaagattccccaaactattgaaactgggatcgggggccag

SEQ ID NO: 33779 - DNA, 40 bp, Limosilactobacillus reuteri
  source 1..40: mol_type = genomic DNA
aaagattccccaaactattcaaactgggatcgggggccag

SEQ ID NO: 33780 - DNA, 50 bp, Limosilactobacillus reuteri; identical to SEQ ID NO: 8265
  source 1..50: mol_type = genomic DNA

SEQ ID NO: 33781 - protein, 421 aa, Limosilactobacillus reuteri
MQQLIKDADTGLYDAVLVYKLDRLSRSQKDTLYLIEDVFQKNNIHFISLSENFDTSTAFGKAMIGILSVFAQLEREQIKERMSMGRVGRAKSGKIMEFNNPAFGYEVDGDNYKVDPLRAEIVKRIYKMYLSGTSINKIKETLNLEGHIGNKKNWSDTRIRYILSNPTYLGKIRYDGKTYDGKFSPIIDEETFNKTQNELKERQTATYKRFNMKLRPFQSKYMLSGLLRCGYCGATLFVNSYVYNGKRKLRYNCPSTYKSKQKTRTYKIMDPNCPFKLVYAKDLEPAVINEIKNLALNPQSIQKPVKKKPDIDVEAIQKELAKVRKQQQRLIDLYVISDDVNIDNISKKSADLKLQEETLKKQLAPLEEPNDDDKIVAFNEILAQIKDIDSLDYDKQKFIVKKLIKKIDVWNDNKIKIHWNI

SEQ ID NO: 33782 - DNA, 50 bp, Limosilactobacillus reuteri
  source 1..50: mol_type = genomic DNA
ttcgtatattaggtatttccaattgaaaccggttatatctaatatacgaa

SEQ ID NO: 33783 - DNA, 40 bp, Limosilactobacillus reuteri; identical to SEQ ID NO: 33778
  source 1..40: mol_type = genomic DNA

SEQ ID NO: 33784 - DNA, 40 bp, Limosilactobacillus reuteri; identical to SEQ ID NO: 33779
  source 1..40: mol_type = genomic DNA

SEQ ID NO: 33785 - DNA, 50 bp, Limosilactobacillus reuteri; identical to SEQ ID NO: 8265
  source 1..50: mol_type = genomic DNA

SEQ ID NO: 33786 - protein, 452 aa, Listeria welshimeri; identical to SEQ ID NO: 22461

SEQ ID NO: 33787 - DNA, 50 bp, Listeria welshimeri
  source 1..50: mol_type = genomic DNA
tttagtttctcatttcctctcactggacggagaagaaacgagatgcaaaa

SEQ ID NO: 33788 - DNA, 40 bp, Listeria welshimeri
  source 1..40: mol_type = genomic DNA
tttcggttcgagctatgagggtcgcaaagagggaaccaag

SEQ ID NO: 33789 - DNA, 40 bp, Listeria welshimeri
  source 1..40: mol_type = genomic DNA
tttcggttcgagctatgagtttcgcaaagagggaaccaag

SEQ ID NO: 33790 - DNA, 50 bp, Listeria welshimeri
  source 1..50: mol_type = genomic DNA
tgtagtatccttactgctctcactttacagatgagaaaacagaggcacag

SEQ ID NO: 33791 - protein, 452 aa, Listeria monocytogenes
MKAAIYIRVSTQEQVENYSIQAQTEKLTALCRSKDWDVYDIFIDGGYSGSNMNRPALNEMLSKLHEIDAVVVYRLDRLSRSQRDTITLIEEYFLKNNVEFVSLSETLDTSSPFGRAMIGILSVFAQLERETIRDRMVMGKIKRIEAGLPLTTAKGRTFGYDVIDTKLYINEEEAKQLQMIYDIFEEEKSITTLQKRLKKLGFKVKSYSSYNNWLTNDLYCGYVSYADKVHTKGVHEPIISEEQFYRVQEIFSRMGKNPNMNRDSASLLNNLVVCGKCGLGYVHRRKDTVSRGKKYHYRYYSCKTYKHTHELEKCGNKIWRADKLEELIIDRVNNYSFASRNVDKEDELDSLNEKLKTEHAKKKRLFDLYISGSYEVSELDGMMADIDAQINYYEAQIEANEELKKNKKIQENLADLATVDFDSLEFREKQLYLKSLINKIYIDDEQVTIEWL

SEQ ID NO: 33792 - DNA, 50 bp, Listeria monocytogenes; identical to SEQ ID NO: 33787
  source 1..50: mol_type = genomic DNA

SEQ ID NO: 33793 - DNA, 40 bp, Listeria monocytogenes; identical to SEQ ID NO: 7733
  source 1..40: mol_type = genomic DNA

SEQ ID NO: 33794 - DNA, 40 bp, Listeria monocytogenes
  source 1..40: mol_type = genomic DNA
tttcggttcaagctatgagttacgcaaagagggaactaaa

SEQ ID NO: 33795 - DNA, 50 bp, Listeria monocytogenes; identical to SEQ ID NO: 33790
  source 1..50: mol_type = genomic DNA

SEQ ID NO: 33796 - protein, 452 aa, Listeria monocytogenes
MKAAIYIRVSTQEQIENYSIQAQTEKLTALCRSKDWDVYDIFIDGGYSGSNMNRPALNEMLSKLHEIDAVVVYRLDRLSRSQRDTITLIEEYFLKNNVEFVSLSETLDTSSPFGRAMIGILSVFAQLERETIRDRMVMGKIKRIEAGLPLTTAKGRTFGYDVIDTKLYINEEEAKQLQMIYDIFEEEKSITTLQKRLKKLGFKVKSYSSYNNWLTNDLYCGYVSYADKVHTKGVHEPIISEEQFYRVQEIFSRMGKNPNMNRDSASLLNNLVVCGKCGLGYVHRRKDTVSRGKKYHYRYYSCKTYKHTHELEKCGNKIWRADKLEELIIDRVNNYSFASRNVDKEDELDSLNEKLKTEHTKKKRLFDLYISGSYEVSELDAMMSDIDAQINYYEAQIEANEELKKNKKIQENLADLATVDFDSLEFREKQLYLKSLINKIYIDDEQVTIEWL

SEQ ID NO: 33797 - DNA, 50 bp, Listeria monocytogenes; identical to SEQ ID NO: 33787
  source 1..50: mol_type = genomic DNA

SEQ ID NO: 33798 - DNA, 40 bp, Listeria monocytogenes; identical to SEQ ID NO: 1298
  source 1..40: mol_type = genomic DNA

SEQ ID NO: 33799 - DNA, 40 bp, Listeria monocytogenes; identical to SEQ ID NO: 20354
  source 1..40: mol_type = genomic DNA

SEQ ID NO: 33800 - DNA, 50 bp, Listeria monocytogenes; identical to SEQ ID NO: 33790
  source 1..50: mol_type = genomic DNA

SEQ ID NO: 33801 - protein, 452 aa, Listeria monocytogenes; identical to SEQ ID NO: 22461

SEQ ID NO: 33802 - DNA, 50 bp, Listeria monocytogenes; identical to SEQ ID NO: 33787
  source 1..50: mol_type = genomic DNA

SEQ ID NO: 33803 - DNA, 40 bp, Listeria monocytogenes; identical to SEQ ID NO: 7733
  source 1..40: mol_type = genomic DNA

SEQ ID NO: 33804 - DNA, 40 bp, Listeria monocytogenes; identical to SEQ ID NO: 33794
  source 1..40: mol_type = genomic DNA

SEQ ID NO: 33805 - DNA, 50 bp, Listeria monocytogenes; identical to SEQ ID NO: 33790
  source 1..50: mol_type = genomic DNA

SEQ ID NO: 33806 - protein, 452 aa, Listeria monocytogenes; identical to SEQ ID NO: 8206

SEQ ID NO: 33807 - DNA, 50 bp, Listeria monocytogenes; identical to SEQ ID NO: 33787
  source 1..50: mol_type = genomic DNA

SEQ ID NO: 33808 - DNA, 40 bp, Listeria monocytogenes; identical to SEQ ID NO: 7733
  source 1..40: mol_type = genomic DNA

SEQ ID NO: 33809 - DNA, 40 bp, Listeria monocytogenes; identical to SEQ ID NO: 33794
  source 1..40: mol_type = genomic DNA

SEQ ID NO: 33810 - DNA, 50 bp, Listeria monocytogenes; identical to SEQ ID NO: 33790
  source 1..50: mol_type = genomic DNA

SEQ ID NO: 33811 - protein, 452 aa, Listeria monocytogenes
MKAAIYIRVSTQEQTENYSIQAQTEKLTALCRSKDWDVYDTFIDGGYSGSNMKRPALNEMLSKLHEIDAVVVYRLDRLSRSQRDTITLIEEYFLKNNVEFVSLSETLDTSSPFGRAMIGILSVFAQLERETIRDRMVMGKIKRIESGLPLTTAKGRTFGYDVVDTKLYINEEEAKQLQMIYDIFEEEKSITFLQKRLKKLGFKVRTYNRYNNWLTNDLYCGYVSYKDKVHVKGIHEPIISEEQFYRVQEIFSRMGKNPNMNKESASLLNNLVVCSKCGLGFVHRRKDTVSRGKKYHYRYYSCKTYKHTHELEKCGNKIWRADKLEELIIDRVNNYSFASRNVDKEDELDYLNEKLKIEHAKKKRLFDLYINGSYEVSELDAMMADIDAQINYYEAQIEANEELKKNKKIQENLADLATVDFDSLEFREKQLYLKSLINKIYIDDEQVTIEWL

SEQ ID NO: 33812 - DNA, 50 bp, Listeria monocytogenes; identical to SEQ ID NO: 33787
  source 1..50: mol_type = genomic DNA

SEQ ID NO: 33813 - DNA, 40 bp, Listeria monocytogenes; identical to SEQ ID NO: 7733
  source 1..40: mol_type = genomic DNA

SEQ ID NO: 33814 - DNA, 40 bp, Listeria monocytogenes; identical to SEQ ID NO: 33794
  source 1..40: mol_type = genomic DNA

SEQ ID NO: 33815 - DNA, 50 bp, Listeria monocytogenes; identical to SEQ ID NO: 33790
  source 1..50: mol_type = genomic DNA

SEQ ID NO: 33816 - protein, 452 aa, Listeria monocytogenes
MKAAIYIRVSTQEQVENYSIQAQTEKLTALCRSKDWDVYDTFIDGGYSGSNMNRPALNEMLSKLHEIDAVVVYRLDRLSRSQKDTITLIEEYFLKNNVEFVSLSETLDTSSPFGRAMIGILSVFAQLERETIRDRMVMGKIKRIEAGLPLTTAKGRTFGYDVIDTKLYINEEEAKQLRLIYDIFEEEQSITFLQKRLKKLGFKVRTYNRYNNWLTNDLYCGYVSYKDKVHVKGIHEPIISEEQFYRVQEIFSRMGKNPNMNKESASLLNNLVVCSKCGLGFVHRRKDTVSRGKKYHYRYYSCKTYKHTHELEKCGNKIWRADKLEELIIDRVNNYSFASRNVDKEDELDYLNEKLKIEHAKKKRLFDLYINGSYEVSELDAMMADIDAQINYYEAQIEANEELKKNKKIQENLADLATVDFDSLEFREKQLYLKSLINKIYIDDEQVTIEWL

SEQ ID NO: 33817 - DNA, 50 bp, Listeria monocytogenes; identical to SEQ ID NO: 33787
  source 1..50: mol_type = genomic DNA

SEQ ID NO: 33818 - DNA, 40 bp, Listeria monocytogenes; identical to SEQ ID NO: 1298
  source 1..40: mol_type = genomic DNA

SEQ ID NO: 33819 - DNA, 40 bp, Listeria monocytogenes; identical to SEQ ID NO: 20354
  source 1..40: mol_type = genomic DNA

SEQ ID NO: 33820 - DNA, 50 bp, Listeria monocytogenes; identical to SEQ ID NO: 33790
  source 1..50: mol_type = genomic DNA

SEQ ID NO: 33821 - protein, 452 aa, Listeria monocytogenes; identical to SEQ ID NO: 33816

SEQ ID NO: 33822 - DNA, 50 bp, Listeria monocytogenes; identical to SEQ ID NO: 33787
  source 1..50: mol_type = genomic DNA

SEQ ID NO: 33823 - DNA, 40 bp, Listeria monocytogenes; identical to SEQ ID NO: 7733
  source 1..40: mol_type = genomic DNA

SEQ ID NO: 33824 - DNA, 40 bp, Listeria monocytogenes; identical to SEQ ID NO: 33794
  source 1..40: mol_type = genomic DNA

SEQ ID NO: 33825 - DNA, 50 bp, Listeria monocytogenes; identical to SEQ ID NO: 33790
  source 1..50: mol_type = genomic DNA

SEQ ID NO: 33826 - protein, 452 aa, Listeria monocytogenes
MKAAIYIRVSTQEQVENYSIQAQTEKLTALCRSKDWDVYDIFIDGGYSGSNMNRPALNEMLSKLHEIDAVVVYRLDRLSRSQRDTITLIEEYFLKNNVEFVSLSETLDTSSPFGRAMIGILSVFAQLERETIRDRMVMGKIKRIEAGLPLTTAKGRTFGYDVIDTKLYINEEEAKQLRLIYDIFEEEQSITFLQKRLKKLGFKVRTYNRYNNWLTNDLYCGYVSYKDKVHVKGIHEPIISEEQFYRVQEIFARMGKNPNMNRDSASLLNNLVVCGKCGLGFVHRRKDTVSRGKKYHYRYYSCKTYKHTHELEKCGNKIWRADKLEELIIDRVNNYSFASRNVDKEDELDYLNEKLKIEHAKKKRLFDLYINGSYEVSELDAMMADIDAQINYYEAQIEANEELKKNKKIQENLADLATVDFDSLEFREKQLYLKSLINKIYIDDEQVTIEWL

SEQ ID NO: 33827 - DNA, 50 bp, Listeria monocytogenes; identical to SEQ ID NO: 33787
  source 1..50: mol_type = genomic DNA

SEQ ID NO: 33828 - DNA, 40 bp, Listeria monocytogenes; identical to SEQ ID NO: 1298
  source 1..40: mol_type = genomic DNA

SEQ ID NO: 33829 - DNA, 40 bp, Listeria monocytogenes; identical to SEQ ID NO: 20354
  source 1..40: mol_type = genomic DNA

SEQ ID NO: 33830 - DNA, 50 bp, Listeria monocytogenes; identical to SEQ ID NO: 33790
  source 1..50: mol_type = genomic DNA

SEQ ID NO: 33831 - protein, 452 aa, Listeria monocytogenes
MKAAIYIRVSTQEQVENYSIQAQTEKLTALCRSKDWDVYDIFIDGGYSGSNMNRPALNEMLSKLHEIDAVVVYRLDRLSRSQRDTITLIEEYFLKNNVEFVSLSETLDTSSPFGRAMIGILSVFAQLERETIRDRMVMGKIKRIEAGLPLTTAKGRTFGYDVIDTKLYINEEEAKQLRLIYDIFEEEQSITFLQKRLKKLGFKVRTYNRYNNWLTNDLYCGYVSYKDKVHVKGIHEPIISEEQFYRVQEIFSRMGKNPNMNKESASLLNNLVVCSKCGLGFVHRRKDTVSRGKKYHYRYYSCKTYKHTHELEKCGNKIWRADKLEELIIDRVNNYSFASRNVDKEDELDYLNEKLKIEHAKKKRLFDLYINGSYEVSELDAMMADIDAQINYYEAQIEANEELKKNKKIQENLADLATVDFDSLEFREKQLYLKSLINKIYIDDEQVTIEWL

SEQ ID NO: 33832 - DNA, 50 bp, Listeria monocytogenes; identical to SEQ ID NO: 33787
  source 1..50: mol_type = genomic DNA

SEQ ID NO: 33833 - DNA, 40 bp, Listeria monocytogenes; identical to SEQ ID NO: 1298
  source 1..40: mol_type = genomic DNA

SEQ ID NO: 33834 - DNA, 40 bp, Listeria monocytogenes; identical to SEQ ID NO: 20354
  source 1..40: mol_type = genomic DNA

SEQ ID NO: 33835 - DNA, 50 bp, Listeria monocytogenes; identical to SEQ ID NO: 33790
  source 1..50: mol_type = genomic DNA

SEQ ID NO: 33836 - protein, 536 aa, Sphingomonas melonis
MRTVVYARYSSQLQNSRSIEDQIAVCRERADREGWTIVDVFTDYAISGAAGIGEAQRPGLNAMLTAIEAGDIDQILTESTDRIARHQGDAFAIRERIQFAGARIFTLMDGEVDDITGTIKGLMDARFRKDLGARVKRGQRGAVQQGRAAAGIAYGYSRANRLDERGELIRGLRAIDPEQAAIVVRIFTEYANGQSPKAIAARLNAEGIPAPRGETWRMTTILGDRKRQNGMLNNRLYIGELIVNRTSKVVNPVTRRTVIRPNPETEWIIEAVPSLRIVGDDLWTKAQAVKESLQGVPFDQTRRPKHLLSGLGQCAVCGGGWIKYNRDQWGCGRYRDGRGCSNTRSISTKQFEKRVLAGLQDELLHPDLVASYVRAWHVENARRAQVTTRERAAIERRHDEAARRVDRLIEAVACGADDFREIRDVLAKARAERDALASQLADLDALPVIALHPGLADDYRRQVAALNEALDENDASRLEAVPRLRSLIDRIVLSPHDSGRGVSVSITGRLDEIVRLATGCPAMIVTKSGKRRASNT

SEQ ID NO: 33837 - DNA, 50 bp, Sphingomonas melonis
  source 1..50: mol_type = genomic DNA
atacctgatagcgcccaattcccgttacccgctccatttttatcaggtgt

SEQ ID NO: 33838 - DNA, 40 bp, Sphingomonas melonis
  source 1..40: mol_type = genomic DNA
tacacgggttcgattcccgttacccgctccatccctcccc

SEQ ID NO: 33839 - DNA, 40 bp, Sphingomonas melonis
  source 1..40: mol_type = genomic DNA
tacacgggttcgattcccggcacccgctccatccctcccc

SEQ ID NO: 33840 - DNA, 50 bp, Sphingomonas melonis
  source 1..50: mol_type = genomic DNA
aagcctgattacccccaatgcctggcacactggccacacacagcaggtgt

SEQ ID NO: 33841 - protein, 563 aa, Vibrio cholerae
MQKIIYPYVRFSSEQQSGGSSYKRQLGDILKYAKENGYTVNDSLELRDLGLSAYKADHIKKGSLGDFFDAIDTGIIETDGTAYLCVEQFDRLSRQSLDDASDVLRKILRANINVITLMDKRVYTKESLNDLMSVMYSSMLMAQANEESAKKSERILKSFDARLDALHDGKQIQYVGIFPGWIDNKGTKKETNFVLNKKAEIVKKIFKMYINGTSFNEIARTLNYEKIPQVAKKRQKNFTNLWSSAKVNHILKNRCVLGELYIKKTGDTFKNYYPQIISNDDWDIVQSMSKTKKLIKTSGRNSINIFTGKLFCSGCGQKYYFETDDKTLKSGKKYYHMLKCSGRRGLQCKSTSIKYDDFLTSMPNMFGLIDKKPQDNSDKINKIKEKISEISGYSKDINEKLLLLEELNNNNELDFTIYLKESSKLQKQIRENDARIASFKVSISRLSSDNKLDYFDKNDPISIKKAKKFINENFAGFIVSSDSRNCTALYNNGQIIHFKVKNSKIEKTKNIIEKADGFKEFFDLKEEVVQAYKNGTMDGRFAEVLKATNFWGIETPEKDYTLE

SEQ ID NO: 33842 - DNA, 50 bp, Vibrio cholerae
  source 1..50: mol_type = genomic DNA
ttcctgtaaatattgcataacactgtactttttaatatgatttacaggaa

SEQ ID NO: 33843 - DNA, 40 bp, Vibrio cholerae
  source 1..40: mol_type = genomic DNA
agctggcgctaaattgaccgtaatgcgcttcgctggaaac

SEQ ID NO: 33844 - DNA, 40 bp, Vibrio cholerae
  source 1..40: mol_type = genomic DNA
agctggcgctaaattgaccagaatgcgcttcgctggaaac

SEQ ID NO: 33845 - DNA, 50 bp, Vibrio cholerae
  source 1..50: mol_type = genomic DNA
tttgtgtaaccatggcataagaccagcctttttcatgcccttgacagcca

SEQ ID NO: 33846 - protein, 587 aa, Vibrio splendidus
MTPKVYPYHRYSTKNQRKGTSIKRQRAFAEKVATQLNLTLGDSFIDDGQSGFHGKNSEDGGALFDFIAKAKSGAIPRGSVLAVESWDRFSRQDFRKPLKRLLDLLDEDIKVAVGTGSEYQLFEKQADNDADAEFMGFSTLLVAQMEMFRAWSESKRKSEMQIKSYYHTIDNHNSTGQTVRKIPGHYPKWIVSDKNGFQLHEDSKYLEQAIELYLSGMSYEDIAGKLKGKPCFWTNGWNAPALRKAFISPQLHGDRPVEVQGETKTAKEYFPALITKDKFNELQRAIERRKGHQGQQTFVSIVTGGGWLFCGFCGSPMSGQTQSFRESSRYTGIKLGDHTFDYSKVKCGSKKSDCICGMSHTTTIEKILLEFCADKANMSFLESSNSYDSEIIQVKNEIEQCSLRLTNLSNAIADFGYTTETQAVFKATTKQKSELEEKLAGYLSLEQKQTQVTGDTLERMLTLYDENTDESRQTISEILSSTIKKCSLITWKTRDSSLYETKINKFGKNKGKRTKEIKLERVREYPLCMELTTDARLPIKGEVCVVLEFVSGAKRLVYADDKGNWTMCYDGGLDRYYTRIDDKIIRT

SEQ ID NO: 33847 - DNA, 50 bp, Vibrio splendidus
  source 1..50: mol_type = genomic DNA
tgtactatacttctcaaccactgcttgatgtaattaaaaagtgtagtaca

SEQ ID NO: 33848 - DNA, 40 bp, Vibrio splendidus
  source 1..40: mol_type = genomic DNA
taaatagacaaaccattgtttcactctattggggtagtac

SEQ ID NO: 33849 - DNA, 40 bp, Vibrio splendidus
  source 1..40: mol_type = genomic DNA
taaatagacaaaccattgttacactctattggggtagtac

SEQ ID NO: 33850 - DNA, 50 bp, Vibrio splendidus
  source 1..50: mol_type = genomic DNA
tgtgccataacactcaactaatgctaaatataattaagtattctaaaaca

SEQ ID NO: 33851 - protein, 455 aa, Enterococcus faecalis
MANEIKQVALYIRVSTDQQAKHGDSLDEQQHTLNEYVRQQGNMRVFKTYIDDGISGQKLYRDEFQKLLDDVKKGKIDTILFTKLDRWFRNLRHYLNIQEILDKNNVTWLAVTQPFFNTETAMGRSFVNQSMGFAELEAQMTSERIRSVFDNKIRKGEVVSGKVPLGYDIKDKHLVPNEKAEIVKEIFQYYLETGSMRATVRHLENHFSMTRDYQSVRQMLTNRKYIGELRDNKNFCEPIIDRDVFERVQLQLSKNIRMNKKRDYMFTGLLVCSECGCNYSATAVISRYVRKDGTTNPNERHLYRCTKNRNNTKKCSNKKGVYETTLENFLLENIEKQAKELSVKMQREPEVKKNKNTNDKIKKKIDRLKKAYLNEVITLEEYKKDREELEALLIPEQDNKIAKIDLNSLHNYSTAEFRDGYKQLTISEKSSLWRQVIKNIVVYPDGNLKINFLGY

SEQ ID NO: 33852 - DNA, 50 bp, Enterococcus faecalis
  source 1..50: mol_type = genomic DNA
atttgcactaacaaatattaaccagatggatgatgtattttagtgcaaat

SEQ ID NO: 33853 - DNA, 40 bp, Enterococcus faecalis
  source 1..40: mol_type = genomic DNA
agacggcgtcggattgccagatggatgattatgagctaat

SEQ ID NO: 33854 - DNA, 40 bp, Enterococcus faecalis
  source 1..40: mol_type = genomic DNA
agacggcgtcggattgccaattggatgattatgagctaat

SEQ ID NO: 33855 - DNA, 50 bp, Enterococcus faecalis
  source 1..50: mol_type = genomic DNA
atttgcccttttatttataaacctattgaattaggtatataaatgaaaat

SEQ ID NO: 33856 - protein, 455 aa, Enterococcus faecalis
MANEIKQVALYIRVSTDQQAKHGDSLDEQQHTLNEYVRQQGNMRVFKTYIDDGISGQKLYRDEFQKLLDDVKKGKIDTILFTKLDRWFRNLRHYLNIQEILDKNNVTWLAVTQPFFNTETAMGRSFVNQSMGFAELEAQMTSERIRAVFDNKIRKGEVVSGKVPLGYDIKDKHLVPNEKAEIVKEIFQYYLETGSMRATVRHLENHFSMTRDYQSVRQMLTNRKYIGELRDNKNFCEPIIDRDVFERVQLQLSKNIRMNKKRDYMFTGLLVCSECGCNYSATAVISRYVRKDGTTNPNERHLYRCTKNRNNVKKCSNKKGIYETTLENFLLENIEKQAEELSVKMQQESEVKKTKNTNDKIKKKIDRLKKAYLNEVITLEEYKKDREELEALLIPEQDNKISKIDLNSLHNYSTAEFRDGYKQLTVSEKSSLWRQVIKNIVVYPDGNLKINFLGY

SEQ ID NO: 33857 - DNA, 50 bp, Enterococcus faecalis
  source 1..50: mol_type = genomic DNA
atttgcactaataaatattaaccagatggatgatgtgacttagtgcaaat

SEQ ID NO: 33858 - DNA, 40 bp, Enterococcus faecalis
  source 1..40: mol_type = genomic DNA
agacggtgtcggattgccagatggatgattatgagctaat

SEQ ID NO: 33859 - DNA, 40 bp, Enterococcus faecalis
  source 1..40: mol_type = genomic DNA
agacggtgtcggattgccaattggatgattatgagctaat

SEQ ID NO: 33860 - DNA, 50 bp, Enterococcus faecalis; identical to SEQ ID NO: 33855
  source 1..50: mol_type = genomic DNA

SEQ ID NO: 33861 - protein, 563 aa, Acutalibacter muris
MGTDTLTLAVDYLRLSDEEANGGESSSIVNQRKLIKSYCEQNNITLVREFVDDGWSGGNFQRPGFQAMLRLLEKGQVNMVITKDLSRLGRDMREASYYAEQYFPERGIRFLTVSDNFDTERDNVLAPFQFAMNEVYLRDGSRKVKDVLRNKRENGEYCACPPYGYRRDQHDRTRLAPDEMTAPVVQRIFARAARGDSTRQIALDLTADGILPPLKYRVLYTGNFKEGSAAKASDQWNYTTVKRILKNPVYLGHTLLGKSKKVSFKSKVKVAVPKENWAVTRDTHPPLVSQMDYERAQKNLGRGTKTYLEFDKIRKSIFSGVAVCGKCGHALCSCGTVYKGEREKYWYLSCNHQRKDIADPCQGVRIRYSDLVELVRQDLNALLSLEPGEIDELVQRVLKKSGSADAIKEQAMQREKAETRLATIDRIIGKLYTDNAEGKLDDDRLDRMVVGLQQEAQGLKAMLRSVEQDAKAAQTENNFQRFFNMVKQYTHLETLDRDTLLTFVDRIEVGPKELPPGVEKTTHRNQPYRQNVRIFYKFIGELAPDPAIEFPRGIKGAEGKVLL

SEQ ID NO: 33862 - DNA, 50 bp, Acutalibacter muris
  source 1..50: mol_type = genomic DNA
tttgttgtagcagggacatcaaaggaggttgatgtacccggagcatctta

SEQ ID NO: 33863 - DNA, 40 bp, Acutalibacter muris
  source 1..40: mol_type = genomic DNA
taagatgcaggccgcgtccgaggtgggcgtcaacctgaag

SEQ ID NO: 33864 - DNA, 40 bp, Acutalibacter muris
  source 1..40: mol_type = genomic DNA
taagatgcaggccgcgtccttggtgggcgtcaacctgaag

SEQ ID NO: 33865 - DNA, 50 bp, Acutalibacter muris
  source 1..50: mol_type = genomic DNA
tttgttttgcttttgacattgatgttggttgacgttctctgagcttccta

SEQ ID NO: 33866 - protein, 515 aa, Micromonospora saelicesensis
MSHHEHLADLYLRLSLDREGKTAIERQEADCRAWATRAGLEVRTVHIDRGRSGYKAVDRAGFDAAVSALTTGTVGTLVVWKVDRLSRRGMGQVGQVLDDVEKVGGRIVFVQDGLDTSHSQARLVLALLSEVARSESANIGLRVASAKAHLRGLGRWIGGQPPYGLAVAENGRLDHDPRTAPTAREIADRALSGEPLVRIARDLNAREIPAPRGGSWAVGTLSTLLKSPAFAGLLPETIKRDGKYTAKVVPWRDPETGEAVEVGRGIVTPAEQLQAVRLLEQRTAADKSGRSRGVRAQVAHLLTGYLRCGGCAGRMSAAGQSYVCQARRLGRPCPAHTTAMIPAVDRAVVDAFINRLAATEPGDPLLDAVAERWVARHDPAVIRERATITAALDDANAALVDLEDARYLRGEFVGPEAIQRWTRLHERLTARVAGLRRNLAEFPLPEADISPLLDPVLAREAWDAATLPDRRDLLGLALNAVTITPAGGRRGYRFDPAARLRFTWADEPEPVPADA

SEQ ID NO: 33867 - DNA, 50 bp, Micromonospora saelicesensis
  source 1..50: mol_type = genomic DNA
agtcgttgcgtcatcttagatttctggaagtcctagaagaagcttgtaac

SEQ ID NO: 33868 - DNA, 40 bp, Micromonospora saelicesensis
  source 1..40: mol_type = genomic DNA
gatcgtcattgcggatttctggacgttctgctgtatcaac

SEQ ID NO: 33869 - DNA, 40 bp, Micromonospora saelicesensis
  source 1..40: mol_type = genomic DNA
gatcgtcattgcggatttccagacgttctgctgtatcaac

SEQ ID NO: 33870 - DNA, 50 bp, Micromonospora saelicesensis
  source 1..50: mol_type = genomic DNA
agaggttccgtaaacttagttttccagaagacttaggcaatgctaggaag

SEQ ID NO: 33871 - protein, 493 aa, Fusobacterium nucleatum
MKRAVAYCRFSSSNQREESIDAQVRAIKEYCDKNKLKLLKIYKDEAISGTSTKDREMFLEMILDCKKNLFDCVIVHKYDRFARNRYDHALYEKILNDNNVKLISVLEQLVDDSPESVILKSVLAGMNEYYSKNLSREVKKGKKENALKAIHNGGIPPLGYDLDVNKKYIVNKKEAEAVKLIFELALDGVGYVSIADILNKRGYKNKRGKEFKKISIRDTLLNIKYIGTYYYGLKDGHGRLQKEPIIIENSHEAIIDKDIFYKVQSKMKKNLKGPRNRNGQLYFLTGYCVCGECGGPFSGGYRSVNRNGSVSYGYYCQKKKRKETKCNNKAIRKELLETFIFDIIKKEVFNDEKVEKIIKDIISFSENKKLIREEEIKEYTKEIEKLQKITLKLLEKNLEGNILDEIFNIKNNELKEKIQVLREKIYSVKNITKINEKELRKYLIKFKESANEQAKRKVVEAFVQEIRVYRDKIKIVLRKFPKDLDMVKIGGDD

SEQ ID NO: 33872 - DNA, 50 bp, Fusobacterium nucleatum
  source 1..50: mol_type = genomic DNA
gatatggttaagattggtggagatgacgaaataaaaattataaccatagg

SEQ ID NO: 33873 - DNA, 40 bp, Fusobacterium nucleatum; identical to SEQ ID NO: 22143
  source 1..40: mol_type = genomic DNA

SEQ ID NO: 33874 - DNA, 40 bp, Fusobacterium nucleatum
  source 1..40: mol_type = genomic DNA
tgatagaaatggtggagataccgagagtcgaactcgtgtc

SEQ ID NO: 33875 - DNA, 50 bp, Fusobacterium nucleatum
  source 1..50: mol_type = genomic DNA
gatatggttctaggtgctagagatactgagataaagatgaaatcctttgc

SEQ ID NO: 33876 - protein, 467 aa, Mycobacteroides immunogenum
MICSDLVKAVIYTRVSYDDAGRSRSTDDQERECRAFCDSQGWPVRRVLCDKDVGASRYSKGKREAFEELKKILQPGDILVMWENSRAERRLGGFAELRDQCAELQVPWAYKGRVFDMNRSSDRLQATFEAVIAENEIEQMVERMVRGKRSAAAEGKPFGHPPWGYKILRDQLSGRAINFVFDPEEIHLVRDAVRSALAGESMRSIAKRVNADGTRPRFRPQSGSSLRRAIINPQLAGLRMYRGEVIGDALWEPIISREEHEKLVALITDPRRKSHNRGYEPRWLLTGIAVCGVCGALVARKTNRGQDIYICRSSSGCVGRNIDYTDEVVKESVLTVLENLDPMIFAEEDGSSGETLTELRRLEDLLDEYVELAATGEISPRAYAKFEQKLIPQIESARSRLTASQRASAALAIAGPDVRRLWAAYEANGAQGLLDRRAVLRFFDITIRPIGRGRKLVPESIDVQWRV

SEQ ID NO: 33877 - DNA, 50 bp, Mycobacteroides immunogenum
  source 1..50: mol_type = genomic DNA
gatcatctatatgtaaccagcaatgagctacacgtttcatatggatgata

SEQ ID NO: 33878 - DNA, 40 bp, Mycobacteroides immunogenum
  source 1..40: mol_type = genomic DNA
gatcatcgtgacgagcaacgatattcccgggtacaagatc

SEQ ID NO: 33879 - DNA, 40 bp, Mycobacteroides immunogenum
  source 1..40: mol_type = genomic DNA
gatcatcgtgacgagcaacattattcccgggtacaagatc

SEQ ID NO: 33880 - DNA, 50 bp, Mycobacteroides immunogenum
  source 1..50: mol_type = genomic DNA
gagcacttactagggaccagcattatgctacacagttttcatggattatc

SEQ ID NO: 33881 - protein, 452 aa, Listeria monocytogenes; identical to SEQ ID NO: 23461

SEQ ID NO: 33882 - DNA, 50 bp, Listeria monocytogenes
  source 1..50: mol_type = genomic DNA
tttagtatctcgttatctctcgttggacggagaagaaacgagatgcaaaa

SEQ ID NO: 33883 - DNA, 40 bp, Listeria monocytogenes; identical to SEQ ID NO: 1298
  source 1..40: mol_type = genomic DNA

SEQ ID NO: 33884 - DNA, 40 bp, Listeria monocytogenes; identical to SEQ ID NO: 22394
  source 1..40: mol_type = genomic DNA

SEQ ID NO: 33885 - DNA, 50 bp, Listeria monocytogenes
  source 1..50: mol_type = genomic DNA
tgtagtaaccctttctcttccgatctccggagaagaaaggtcatgcaata

SEQ ID NO: 33886 - protein, 452 aa, Listeria monocytogenes
MKAAIYIRVSTQEQVENYSIQAQTEKLTALCRSKDWDVYDIFIDGGYSGSNMNRPALNEMLSKLHEIDAVVVYRLDRLSRSQRDTITLIEEYFLKNNVEFVSLSETLDTSSPFGRAMIGILSVFAQLERETIRDRMVMGKIKRIEAGLPLTTAKGRTFGYDVIDTKLYINEEEAKQLRLIYDIFEEEQSITFLQKRLKKLGFKVRTYNRYNNWLTNDLYCGYVSYKDKVHVKGIHEPIISEEQFYRVQEIFTRMGKNPNMNRDSASLLNNLVVCGKCGLGFVHRRKDTVSRGKKYHYRYYSCKTYKHTHELEKCGNKIWRADKLEELIIDRVNNYSFASRNVDKEDELDYLNEKLKTEHVKKKRLFDLYISGSYKVSELDAMMADIDAQINYYEAQIEANEELKKNKKIQENLADLATVDFDSLEFREKQLYLKSLINKIYIDGEQVTIEWL

SEQ ID NO: 33887 - DNA, 50 bp, Listeria monocytogenes
  source 1..50: mol_type = genomic DNA
tttagtacctcgatttctctcgttggacggagaagaaacgagatgcaaaa

SEQ ID NO: 33888 - DNA, 40 bp, Listeria monocytogenes; identical to SEQ ID NO: 7733
  source 1..40: mol_type = genomic DNA

SEQ ID NO: 33889 - DNA, 40 bp, Listeria monocytogenes; identical to SEQ ID NO: 22389
  source 1..40: mol_type = genomic DNA

SEQ ID NO: 33890 - DNA, 50 bp, Listeria monocytogenes; identical to SEQ ID NO: 33885
  source 1..50: mol_type = genomic DNA

SEQ ID NO: 33891 - protein, 452 aa, Listeria monocytogenes
MKAAIYIRVSTQEQIENYSIQAQTEKLTALCRSKDWDVYDIFIDGGYSGSNMNRPALNEMLSKLHEIDAVVVYRLDRLSRSQRDTITLIEEYFLKNNVEFVSLSETLDTSSPFGRAMIGILSVFAQLERETIRDRMVMGKIKRIEAGLPLTTAKGRTFGYDVIDTKLYINEEEAKQLRLIYDIFEEEQSITFLQKRLKKLGFKVRTYNRYNNWLTNDLYCGYVSYKDKVHVKGIHEPIISEEQFYRVQEIFARMGKNPNMNRDSASLLNNLVVCGKCGLGFVHRRKDTVSRGKKYHYRYYSCKTYKHTHELEKCGNKIWRADKLEELIIDRVNNYSFASRNVDKEDELDYLNEKLKIEHAKKKRLFDLYINGSYEVSELDSMMNDIDAQINYYESQIEANEELKKNKKIQENLADLATVDFDSLEFREKQLYLKSLINKIYIDDEQVTIEWL

SEQ ID NO: 33892 - DNA, 50 bp, Listeria monocytogenes; identical to SEQ ID NO: 33887
  source 1..50: mol_type = genomic DNA

SEQ ID NO: 33893 - DNA, 40 bp, Listeria monocytogenes; identical to SEQ ID NO: 7733
  source 1..40: mol_type = genomic DNA

SEQ ID NO: 33894 - DNA, 40 bp, Listeria monocytogenes; identical to SEQ ID NO: 22389
  source 1..40: mol_type = genomic DNA

SEQ ID NO: 33895 - DNA, 50 bp, Listeria monocytogenes; identical to SEQ ID NO: 33885
  source 1..50: mol_type = genomic DNA

SEQ ID NO: 33896 - protein, 463 aa, Staphylococcus epidermidis
MKVAIYTRVSTQEQNLNGHSIHEQKRKLISYCEINEWEQYEVFTDGGFSGGSTKRPALQQLFNRLDQFDLVLVYKLDRLTRNVRDLLEMLERFEKHDVSFKSATEVFDTTTAIGKLFITIVGAMAEWERETIRERSLFGSRAAVESGKYIRIEPFMYDNVDGKLVPNEHVKYIDYIVDKFKKGVSASEIARLLNGKKKPPKIKNWNRQSIIRIMKNPVLRGHTKHGDIFIENTHEPVISEDDYYRVIDVIENRTHRSKTKHPAIFRGVIQCPQCGSKLHLYAGTIKPKNGKPYDVRRYMCDKCHRDKSVRNISFNETEIEDKFVDELNKMDLSRFEVHKPQQQTNDIENDEKKIKEQRTKLLRAYTMGYVEEEEFKTIMDETQRLLDDIKREDEPEVIKEISEQQIRSISNFIVKGWNNLTVEEKEKLILSTVENINIQFIPRRLNENGNTNTVNIEKIHFIF

SEQ ID NO: 33897 - DNA, 50 bp, Staphylococcus epidermidis
  source 1..50: mol_type = genomic DNA
aatgtgtgttatgtcactattgccgtgcctcttgttacacaacacttata

SEQ ID NO: 33898 - DNA, 40 bp, Staphylococcus epidermidis; identical to SEQ ID NO: 5678
  source 1..40: mol_type = genomic DNA

SEQ ID NO: 33899 - DNA, 40 bp, Staphylococcus epidermidis; identical to SEQ ID NO: 27219
  source 1..40: mol_type = genomic DNA

SEQ ID NO: 33900 - DNA, 50 bp, Staphylococcus epidermidis
  source 1..50: mol_type = genomic DNA
aatgagtgtgtgctcactatcgccttgcatcttttgccaatgctcttctt

SEQ ID NO: 33901 - protein, 500 aa, Vibrio cyclitrophicus
MAIAYSYIRFSSKAQAEGDSLRRQLQRTKEWCRKNNVELSDKNFQDLGISAFKEKTRPSLDDLFAAIQTDSIIEGDYIILENLDRLSRQGIDHTTEMLRKILRSGVNVVDLTNGLELNKTSLNDLVSVIRIALAADLAYQESKKKSERVLAAKATQRKLVREGKVINKRLPFWITNSDGYRLNDKAQIVRDIIKQRTSGVGFHRIAMNLNGAYEAPKAKHWSDTTIREIVKSRALYGSMVDKDGEVESVFPALISFTEWQAIQAEHVSSAGGYTQHNHLARLVKCECGSAMSKKIQKSKTKTKTHEYNTWKCVAATSGGCEHKGVIRDLDVDIFKSLNHLKINKTKSDTQLNKISKQIEKKSVRQQELEQALLEDDAPIAALTKAIKKTTEELKQLRSERDLLSVRTDSKLLIELQDNAVEFNIELRKLVDKIVVTPITRNRFQIKIHQHNGHIVNCLKGRKSQRSEWTRVFGKTEEKLRIATEDDGMPWVDWAETDEPD

SEQ ID NO: 33902 - DNA, 50 bp, Vibrio cyclitrophicus
  source 1..50: mol_type = genomic DNA
gtttactacgtaaaacgatttacagtaatatagtattataggtagtgaac

SEQ ID NO: 33903 - DNA, 40 bp, Vibrio cyclitrophicus
  source 1..40: mol_type = genomic DNA
tgcgggagctaagttaaccgtgatccttttcgatggaaac

SEQ ID NO: 33904 - DNA, 40 bp, Vibrio cyclitrophicus
  source 1..40: mol_type = genomic DNA
tgcgggagctaagttaaccttgatccttttcgatggaaac

SEQ ID NO: 33905 - DNA, 50 bp, Vibrio cyclitrophicus
  source 1..50: mol_type = genomic DNA
gtttaccacagtcaacaattttcattaatctaaacttaaatatagtgatc

SEQ ID NO: 33906 - protein, 644 aa, Klebsiella pneumoniae; identical to SEQ ID NO: 14356

SEQ ID NO: 33907 - DNA, 50 bp, Klebsiella pneumoniae
  source 1..50: mol_type = genomic DNA
atgttcccattgattatggtatgcgtcctttcgtatactatgggaacatt

SEQ ID NO: 33908 - DNA, 40 bp, Klebsiella pneumoniae; identical to SEQ ID NO: 20373
  source 1..40: mol_type = genomic DNA

SEQ ID NO: 33909 - DNA, 40 bp, Klebsiella pneumoniae
  source 1..40: mol_type = genomic DNA
aatatattcatggcatgccttcctttcgttttttagcaca

SEQ ID NO: 33910 - DNA, 50 bp, Klebsiella pneumoniae; identical to SEQ ID NO: 8340
  source 1..50: mol_type = genomic DNA

SEQ ID NO: 33911 - protein, 644 aa, Klebsiella pneumoniae
MLRPICYERVSSIQQIEGGGGLDDQRSALEGYLDRNSDKFSNDRIFIQDRGVSAFKNSNISSESQLGIFLQDVQNRKYGEGDALIVMSLDRISRRSSWAEDTIRFIVNSGIEVHDISASTVLRKDDPHSKLIMELIQMRSHNESLMKSVRAKAAWDRKIIEAVQNGTVISNKMPMWLKNVDNRYQVIQEKADLIIRCFEWYRDGFSTGEIVKRIADPKWQMVTVSRLVRDRRLLGEHKRYNDEIIHNVYPKVIDDDLFLTANRMMDRVMLEKNKPAEDLLLESDVVQEIFQLYESGLGSGAIVKRLPKGWSTVNVLRVLRDKNVVTQKIIDNLTFERVNQKLSMNGVANRIRKDITIAQDDYITNLFPKILKCGCCGGNIAIHYNHVRTKYVICRNREERKICDAKSIQYIRIEKNILKCVKNVDFQKLMIESTGSETSVLDGLREELSSLRREESSYNDKINERKLAGKRVGIHLNDGLTEVQDRIEEIEKEIISAQTVREIPKFDFDMDEVLDPMNIELRAKVRKQLRLVLKAVKYWMFDKRIFIQLEYFNDVLSHMLVIDNKRCGGEVMYEMSIEEKKGERIYTVHENGYAVFIASVTIGTELWSLALSRTRTIDSVGNYLSLLAREGFEIFVNEDQIDWF

SEQ ID NO: 33912 - DNA, 50 bp, Klebsiella pneumoniae; identical to SEQ ID NO: 33907
  source 1..50: mol_type = genomic DNA

SEQ ID NO: 33913 - DNA, 40 bp, Klebsiella pneumoniae; identical to SEQ ID NO: 20373
  source 1..40: mol_type = genomic DNA

SEQ ID NO: 33914 - DNA, 40 bp, Klebsiella pneumoniae; identical to SEQ ID NO: 33909
  source 1..40: mol_type = genomic DNA

SEQ ID NO: 33915 - DNA, 50 bp, Klebsiella pneumoniae; identical to SEQ ID NO: 8340
  source 1..50: mol_type = genomic DNA

SEQ ID NO: 33916 - protein, 612 aa, Streptococcus agalactiae; identical to SEQ ID NO: 71

SEQ ID NO: 33917 - DNA, 50 bp, Streptococcus agalactiae; identical to SEQ ID NO: 62
  source 1..50: mol_type = genomic DNA

SEQ ID NO: 33918 - DNA, 40 bp, Streptococcus agalactiae
  source 1..40: mol_type = genomic DNA
gtgattggtttttgcctcggagctgcagcattatcaatgt

SEQ ID NO: 33919 - DNA, 40 bp, Streptococcus agalactiae
  source 1..40: mol_type = genomic DNA
gtgattggtttttgcctcgaagctgcagcattatcaatgt

SEQ ID NO: 33920 - DNA, 50 bp, Streptococcus agalactiae
  source 1..50: mol_type = genomic DNA
aagctcattaggatgtggttacagaagaaatagaagatataatcacactg

SEQ ID NO: 33921 - protein, 612 aa, Enterococcus faecalis
MRNFEKITALYERLSRDDELQGESNSIINQKKILEEYASKNNLSNIIHFTDDGISGTQFDRPGFMAMMNGVNQGNIGCIIVKDMSRLGRDYLKVGQCMEILRQKGVRLIAINDNVDSFYREDDFTPFRNIMNEWYARDTSRKIQSTFRSKGESGKHTASTPPYGYIKDEKDKNKWIVDEKAAEIVRRIFNLTMQGNGPYRIAKILESEKVDIPAYHQQKLGYGLYQSKNFEHPYRWCSSTIASILKKQEYLGHTVNFKTRKHFKDKKSKYVSEDNWLIFENTHEPIIDQETFDNVQRIRGNVKRYPDGWGEYHPLTGLMYCADCGSKMYVHRTSNYKNIPYYTCSAYTKTPCGMLCPSAHRIKAEVVLNLIQDTLKDIKKYLDEDNEAFICSIQNEMEEKEKIEIEKKKVRLTESQNRLRELERLMCRIYEDMILNKIPNSRYEILNNQYETEQITLSKEIKDLEQQVSRYEKETDRAKKFISLISRYENFDELTTTMINEFVEKIVVHERDRKGSQTSKQKIEIYFNFIGNYELPQAELSDEEKQKLEEEERKIKKRKDKLHQNYLKRKASGKQKEYEDKYKARREQKKQGKIKVLKRVGIPVSEYIKTNI

SEQ ID NO: 33922 - DNA, 50 bp, Enterococcus faecalis; identical to SEQ ID NO: 62
  source 1..50: mol_type = genomic DNA

SEQ ID NO: 33923 - DNA, 40 bp, Enterococcus faecalis
  source 1..40: mol_type = genomic DNA
tgatttaaacttgccgcgggtggaactaattctttaaatg

SEQ ID NO: 33924 - DNA, 40 bp, Enterococcus faecalis
  source 1..40: mol_type = genomic DNA
tgatttaaacttgccgcggaaggaactaattctttaaatg

SEQ ID NO: 33925 - DNA, 50 bp, Enterococcus faecalis; identical to SEQ ID NO: 33920
  source 1..50: mol_type = genomic DNA

SEQ ID NO: 33926 - protein, 604 aa, Streptococcus dysgalactiae; identical to SEQ ID NO: 17261

SEQ ID NO: 33927 - DNA, 50 bp, Streptococcus dysgalactiae; identical to SEQ ID NO: 62
  source 1..50: mol_type = genomic DNA

SEQ ID NO: 33928 - DNA, 40 bp, Streptococcus dysgalactiae
  source 1..40: mol_type = genomic DNA
atggatatagttgtgaacggggtcacgaaatactttttca

SEQ ID NO: 33929 - DNA, 40 bp, Streptococcus dysgalactiae
  source 1..40: mol_type = genomic DNA
atggatatagttgtgaacgaagtcacgaaatactttttca

SEQ ID NO: 33930 - DNA, 50 bp, Streptococcus dysgalactiae; identical to SEQ ID NO: 33920
  source 1..50: mol_type = genomic DNA

SEQ ID NO: 33931 - protein, 529 aa, Vibrio owensii
MTIAYSYIRFSSSQQSQGDSLRRQTQLVERYCNEHNLTLSDTTFQDLGVSAFNSANSNEDSGLGQFLSALNQGLIDTGSYLIVESLDRLSRARVQTALRQMLNIIELGVKIVTLMDNRIYDQESDTTDLIISLTIMERAHNESKTKSERIRAAWENKRQNPHTTNRHSITPFWLTLNSDKRSYTVVNKHADIVRKIYQLSIDGWGVVKIVRFLNESEIPAPKGGSWSGTTVCRILNTKAVLGHYEPTQNRQSLNTVIENYYPAVIDEQTYYLSQKRKSERSTPESAGRKTEYPNPLHQIAKCKLCGSSMYYDNKSKTLKYLTCREFKKKNCTNKPIRIELIHRFILEVFNSPMYIKQHVELTDKSSQKETNEILILESDLEQDKKELKDLLSLSNDFTNALIRDEIKTRSNRIQEKEKRLESAKAEEAVQSDIDAHVSFKEARELTINAFRLPLEGKTELSTEELFNIRVRLNRVLKHTFNALSILHDKESKRITIETEVTDNNKFSYNFETNKKAISEPLSNNIWSMY

SEQ ID NO: 33932 - DNA, 50 bp, Vibrio owensii
  source 1..50: mol_type = genomic DNA
taaaggtaaatattgccaacaactgtactggttggtagcattaacctttt

SEQ ID NO: 33933 - DNA, 40 bp, Vibrio owensii
  source 1..40: mol_type = genomic DNA
ttccggtagacccactagcgtaaagcccggcatcccatta

SEQ ID NO: 33934 - DNA, 40 bp, Vibrio owensii
  source 1..40: mol_type = genomic DNA
ttccggtagacccactagcagaaagcccggcatcccatta

SEQ ID NO: 33935 - DNA, 50 bp, Vibrio owensii
  source 1..50: mol_type = genomic DNA
taaatgaagtagtggcccacaattagtctgattggtcgcagaaagctttt

SEQ ID NO: 33936 - protein, 546 aa, Flavonifractor plautii
MKRRTKCYIYTRVSTSMQVDGYSLDAQKDKLRKYAEYEDMTIVGEYSDEGFSGKNIQGRLEFQRMLNDIQEGKDDVSFVLVFKLSRFGRNAADVLNSLQLMQDFGVNLICVEDGIDSSKDSGKLMISVLSAVAEIERENIRTQTMAGREQKAREGKWNGGFAPYGYKLVDGKLEIAEDEVEVVRLIYDRYIHTNDGINGVAKYLNDHGYKKKIRQNGTIPGFSSNFVKDVLDNPVYMGKIAYGRRRTEKKLGTRNEMHVVEQDEFPIYEGQHEAIISEEDWNLAQDKRKANAFRREKVIDPEHAHILSGILKCPCCGKSLYGNIAKAHSKDKKTRYYYYCKNTLGATGHKCTFRVNIEQTEMNRMVAAIISAMVNDPQFSKAIKEKIGTSVDTEDLEKQLSTLQAQLRQTLGIKARLERQMDTLDINDPYFDRKILDLQRRYDEQYGRIEEIETQLDEVKSQIQSIRQEKISGDNIYQLLLAFDEVYGAATEIEQKEFMRAFIERIDLYPEKQKDGNWIRNMVFNFPVPVNGQEVTELPLESGTML

SEQ ID NO: 33937 - DNA, 50 bp, Flavonifractor plautii
  source 1..50: mol_type = genomic DNA
cccttggaatccgggacaatgctcgagacggttgtcttgctttccaaggg

SEQ ID NO: 33938 - DNA, 40 bp, Flavonifractor plautii
  source 1..40: mol_type = genomic DNA
cccccgcaccgcgcatgtggaaaccgtggcgcggctggaa

SEQ ID NO: 33939 - DNA, 40 bp, Flavonifractor plautii
  source 1..40: mol_type = genomic DNA
cccccgcaccgcgcatgtgagaaccgtggcgcggctggaa

SEQ ID NO: 33940 - DNA, 50 bp, Flavonifractor plautii
  source 1..50: mol_type = genomic DNA
ccactggcaaaacggaaaagactcaggaagattgtctttcatttcaaggg

SEQ ID NO: 33941 - protein, 479 aa, Mycobacterium marseillense
MSRRKTTAQRVGVESAAIYARISADVEGAGLGVARQLEDCRKLAADRGWPVGAEYVDNDVSAFSGKPRREYARMLADLQSGARDAVIVYNLDRLHRRPVELEEFVALCESVGVRDVATVTADIDLGNDDGLFMARIFAAFAAKESGRKSARIRRRMLQNAEQGRPHGSVRPFGYEPDKITVREPEAAVVREMVDRYLAGASIRSLTMWLNDSGIAPAASKSWRTSAVRQILCSGRIAGLREHHGQVIGEAAWPAIITPAQRDQVLARMTARALAKTRAPRTYLLSGLLRCGRCGNRLYSQARHVNPENRVRRYVCLSGPDQGGCGRLTVVAQPVEELLTDAVLTRLDSPALADALAGRASVDADVAALSARLDADTTRLDELAALYANGAVTAREWIAARDPIIARIAETRRAIAAATDTTDVQELAGTGRLLRLQWDSLDIDRQQAVIRSVLDHAVIAPGTPGSRSLDIARVRPVWRT

SEQ ID NO: 33942 - DNA, 50 bp, Mycobacterium marseillense
  source 1..50: mol_type = genomic DNA
tgggcacattcatgacttgtcactaagctgagatgatgttaaactaccct

SEQ ID NO: 33943 - DNA, 40 bp, Mycobacterium marseillense
  source 1..40: mol_type = genomic DNA
cgggcccacccatgccgccaacctcaaggcgctgtgtcgt

SEQ ID NO: 33944 - DNA, 40 bp, Mycobacterium marseillense
  source 1..40: mol_type = genomic DNA
cgggcccacccatgccgccggcctcaaggcgctgtgtcgt

SEQ ID NO: 33945 - DNA, 50 bp, Mycobacterium marseillense
  source 1..50: mol_type = genomic DNA
tgggcacagccaaaccatgtcactgggctgcactgactcccaattccccc

SEQ ID NO: 33946 - protein, 471 aa, Mediterraneibacter faecis
MRNIRIGKNTSNNKKTGLYIRVSTNFQFEEGYSVGAQTEKLEKYCNYQEIDNYDLYIDGGYSGSNLNRPEMKRLIKEIQEGKVESVVVVKLDRLSRSQKDTIYLLEDVFEANDVGFISLNENFDTTTPYGKAMVGILSVFAQYERENIRERTQMGITERIKTGKWRGTKPPFGYDYNNGDDVLVPNKDAETVRKIFELYKEGYSTYALAKMFDLKGDKQVSDMLSRVTYIGKLKYNKEIVDGLHEPIVDKKLFDEVQELRKTRTRATSHKSQYLLTGLIYCGLCGGAKMRYQKWSGGRVMIYCYSLDHSKPHLVKNPNCQNGKLDAAEVEEVVVSDMLKLSKEYEVIEEKSEQQNQKGFEAMNQRKSVLEGKLKSLYNLYASDTNNSVLLETIGEINKELENLNTQIEQYTLKNTRAKDMTARAKAFKSVADSWEFMSFNERQKTVREYIKKIKISNDYVEIEYNDLLTLQ

SEQ ID NO: 33947 - DNA, 50 bp, Mediterraneibacter faecis; identical to SEQ ID NO: 3152
  source 1..50: mol_type = genomic DNA

SEQ ID NO: 33948 - DNA, 40 bp, Mediterraneibacter faecis
  source 1..40: mol_type = genomic DNA
gttttctacttacgcggttcctatgatcataggagaaatc

SEQ ID NO: 33949 - DNA, 40 bp, Mediterraneibacter faecis
  source 1..40: mol_type = genomic DNA
gttttctacttacgcggtttatatgatcataggagaaatc

SEQ ID NO: 33950 - DNA, 50 bp, Mediterraneibacter faecis
  source 1..50: mol_type = genomic DNA
aaatgtcaaatagtatatattctataaatacagtaaaaattaagaaatgc

SEQ ID NO: 33951 - protein, 470 aa, Coprococcus comes; identical to SEQ ID NO: 3151

SEQ ID NO: 33952 - DNA, 50 bp, Coprococcus comes; identical to SEQ ID NO: 3152
  source 1..50: mol_type = genomic DNA

SEQ ID NO: 33953 - DNA, 40 bp, Coprococcus comes
  source 1..40: mol_type = genomic DNA
attttcaacctatgcagttccgatgatcacgggagaaata

SEQ ID NO: 33954 - DNA, 40 bp, Coprococcus comes
  source 1..40: mol_type = genomic DNA
attttcaacctatgcagtttagatgatcacgggagaaata

SEQ ID NO: 33955 - DNA, 50 bp, Coprococcus comes; identical to SEQ ID NO: 33950
  source 1..50: mol_type = genomic DNA

SEQ ID NO: 33956 - protein, 527 aa, Tenacibaculum maritimum
MDNLTLFKQFAPKAPKKFQEGNNAVIYTRVSSSDQEDNTSLASQKKHCDLYAQRRNLNVVGYFGGTYESAKTDDRKEFNQLLKFVKRSKNINYIIVYSYERFSRSGINGASIAEELLKKYGVITLAITQELDPTTPSGSFQQKIFFLFGQMDNELRRDKTVTGMKELLLKGYWVWAVPRGYEDLNKGKATERKLVVNEEGKLLKKAFEWKAYSQLPNVEIVRRLKKMGINLSEKRLNDLFSNPFYCGLITSKMIPDQVIQGNHEAMISKELFLKVHNIRKEKRIHGFVHNKDNDNLPLKIFTKCEKCGKGMTGYLVKNKNLYYYKCRTKGCKVNRSAKAMHELFNKALASFKIEKEELEIIKVQLEEQMGVFFKSKTENEKILKTNLNTLKKKLENIEERFVIGEIDRQLYDKYSSKYKKEYFEIEQEVEKTSGYSSNLKKVINFVTKTSTNVLPLWESSTLENKKVFQQMLFPDGIFYNHELDQVRTTRVNSFFSLIPEMTSNIGNKKSGNFIQFDKKSALVSPEG

SEQ ID NO: 33957 - DNA, 50 bp, Tenacibaculum maritimum
  source 1..50: mol_type = genomic DNA
tttgataaaaaatccgctttagtgagccctgaaggagaagtatcgaactt

SEQ ID NO: 33958 - DNA, 40 bp, Tenacibaculum maritimum
  source 1..40: mol_type = genomic DNA
taaagtgaagctttatgtgagccctgaaggattcgaacct

SEQ ID NO: 33959 - DNA, 40 bp, Tenacibaculum maritimum
  source 1..40: mol_type = genomic DNA
taaagtgaagctttatgtgtgccctgaaggattcgaacct

SEQ ID NO: 33960 - DNA, 50 bp, Tenacibaculum maritimum
  source 1..50: mol_type = genomic DNA
tttgaaaaatacaatgcataagtttggcctaatggacatatatcgaaatt

SEQ ID NO: 33961 - protein, 664 aa, Vibrio cholerae
MFSFDKSKFKGICVPYARFSTKGQSKIGKKSLERQIEEARRYAKSNNLYINEDLIFADKGISGFAQQGNIAKAFKKGQMQVMLALLEEVPYQEREFIYVTFHNFDRFSRMSPKQARTYFDLILQKGFNVVTTIDNQLYTRHDKDLGKMLISTIKMTTAWEESQVKSIYIKDALARKKKVVEYLYNHPSQKGKYKHIGVVQPNMPRWIDHEKIELTYTDESGSKRTDSFKKFTLNKEKAKIVNYIFDLKIQGLGYARICRRLNEEGIPTFDQGKHRIAKKWHVFAVQNLICNEMVLGHITLHTHNEEEYMCEIDKVFKKRKIKQTATEKLYNYYPAAVSEAKYLEAHKNTIQQDKPKKLGRIGERTNIFAQILLCECGGTLQYRRTKKNKKKSESVSVNEYLQCNNAFVNHKCNSQTINYTMLETAFFRYVNNIDFKKICSTTNSKHALKIIDIDADIKELTDEIESLKLREAGLAKTYMSLASAGLDGSTALIDREKTKKEIAEKVLELENLELKKKGLEIEADKDNREFVDINDYMLNKDNYSSDEKIIIRKKINDFLHSKIEWMEVVSTERQKFVIIAFHDTVIRTFSFDDRYANDLMFNEIDVDLSGLNRVQASNLMFTLIKAIRNSLKGVEAVITKADLISYLQHIKQDYLKNIGEQASV

SEQ ID NO: 33962 - DNA, 50 bp, Vibrio cholerae; identical to SEQ ID NO: 11802
  source 1..50: mol_type = genomic DNA

SEQ ID NO: 33963 - DNA, 40 bp, Vibrio cholerae
  source 1..40: mol_type = genomic DNA
gttgttgattttaatatctttcaaggtaaacatgccgaga

SEQ ID NO: 33964 - DNA, 40 bp, Vibrio cholerae
  source 1..40: mol_type = genomic DNA
gttgttgattttaatatctaacaaggtaaacatgccgaga

SEQ ID NO: 33965 - DNA, 50 bp, Vibrio cholerae; identical to SEQ ID NO: 8395
  source 1..50: mol_type = genomic DNA

SEQ ID NO: 33966 - protein, 664 aa, Vibrio cholerae
MFSFDKSKFKGICVPYARFSTKGQSKIGKKSLERQIEEARRYAKSNNLYINEDLIFADKGISGFAQQGNIAKAFKKGQMQVMLALLEEVPYQEREFIYVTFHNFDRFSRMSPKQARTYFDLILQKGFNVVTTIDNQLYTRHDKDLGKMLISTIKMTTAWEESQVKSIYIKDALARKKKVVEYLYTHPSQKGKYKHIGVVQPNMPRWIDHEKIELTYTDEIGSKRTDSFKKFTLNKEKTKIVNYIFDLKIQGLGYARICRRLNEEGIPTFDQGKHRIAKKWHVFAVQNLICNEMVLGHITLHTHNEEEYMCEIDKVFKKRKIKQTATEKLYNYYPAAVSEAKYLEAHKNTIQQDKPKKLGRIGERTNIFAQILLCECGGTLQYRRTKKNKKKSESVSVNEYLQCNNAFVNHKCNSQTINYTMLETAFFRYVNNIDFKKICSTTNSKHALKIIDLDTDIKELTDEIESLKLREAGLAKTYMSLASAGLDGSTALIDREKTKKEIAEKVLELENLKLKKKGLEIEADKDNREFVDINDYMLNKDNYSSDEKIIIRKKINDFLHSKIEWMEVVSTERQKFVIIAFHDTVIRTFAFDDRCANDLMFNEIDVDLSGLNRVQASNLMFTLIKAIRNSLKGVEAVITKADLISYLQHIKQDYLNNIGEQASV

SEQ ID NO: 33967 - DNA, 50 bp, Vibrio cholerae; identical to SEQ ID NO: 11802
  source 1..50: mol_type = genomic DNA

SEQ ID NO: 33968 - DNA, 40 bp, Vibrio cholerae
  source 1..40: mol_type = genomic DNA
attgttgattttaatatctttcaaggtaaacatgccgaga

SEQ ID NO: 33969 - DNA, 40 bp, Vibrio cholerae
  source 1..40: mol_type = genomic DNA
attgttgattttaatatctaacaaggtaaacatgccgaga

SEQ ID NO: 33970 - DNA, 50 bp, Vibrio cholerae; identical to SEQ ID NO: 8395
  source 1..50: mol_type = genomic DNA

SEQ ID NO: 33971 - protein, 664 aa, Vibrio vulnificus
MFSFDKSKFKGICVPYARFSTKGQSKIGKKSLERQIEEARRYAKSNNLYINEDLIFADKGISGFAQQGNIAKAFKKGQMQVMLALLEEVPYQEREFIYVTFHNFDRFSRMSPKQARTYFDLILQKGFNVVTTIDNQLYTRHDKDLGKMLISTIKMTTAWEESQVKSIYIKDALARKKMVVEYLYNHPSQKGKYKHIGVVQPNMPRWIDHEKIELTYTDESGSKRTDSFKKFTLNKEKTKIVNYIFDLKIQGLGYARICRRLNEEGIPTFDQGKHRIAKKWHIFAVQNLICNEMVLGHITLHTHNEEEYMCEIDKVFKKRKIKQTATDKLYNYYPAAVSEAKYLEAHKNTIQQDKPKKLGRIGERTNIFAQILLCECGGTLQYRRTKKNKKKSESVSVNEYLQCNNAFVNHKCNSQTINYTLLETAFFRYVNNIDFKKICSTTNSKHALKIIDLDTDIKELTDEVESLKLREAGLAKTYMSLASAGLDGSTALIDREKTKKEIAEKVLELESLELKKKGLEIEADKDNREFVDINDYMMNKDNYSSDEKIIIRKKINDFLHSKIEWMEVVSTERQKFVIIAFHDTVIRTFAFDDRCANDLMFNEIDVDLSGLNRVQASNLMFTLIKAIRNSLKGVEAVITKADLISYLQHIKQDYLNNIGEQASV

SEQ ID NO: 33972 - DNA, 50 bp, Vibrio vulnificus; identical to SEQ ID NO: 11802
  source 1..50: mol_type = genomic DNA

SEQ ID NO: 33973 - DNA, 40 bp, Vibrio vulnificus
  source 1..40: mol_type = genomic DNA
cgaggtgattttaatgtcctttagggtaaaccaacccaag

SEQ ID NO: 33974 - DNA, 40 bp, Vibrio vulnificus
  source 1..40: mol_type = genomic DNA
cgaggtgattttaatgtccaatagggtaaaccaacccaag

SEQ ID NO: 33975 - DNA, 50 bp, Vibrio vulnificus; identical to SEQ ID NO: 8395
  source 1..50: mol_type = genomic DNA

SEQ ID NO: 33976 - protein, 576 aa, Aeromonas hydrophila
MKSYLYSRISTLQQVQGFGIERQIQTVTDFLENAVLDSRLGYQLDPNDYEILESDIGKSAFRGNNWKPNSNLGRFYDDVINKRITRGALIVENIDRLTRLSNYQASHKLSTLITHGIDIIEVESGTCFSDRIPESNSILNMSISRAHNESKRKSNMGQKTWTNRISKLRDEGKASVKICPRWLTVQDGKYVLDPEQAAILLSIHQQYVEGHGSSAIVRRLNDEGKLNSGKLWNTLTLHKVLRDERLTGKMVIGKQRVVDTSKSKEEQKKQREEIKNNLITVDDAFPVVVDQELFNRVQAKINSSKHGTQKPKTTKLMRNLFNGISICGVCGNPFIVCSNGRGNLFYTCLGRRSEKTCTNIGVKYTQFEMSILRHIKELNWNSIYNGENEKTDSLNECRQKIVDVERRIGDFNRELADLDDDDLEFHIIRRIKKNKEVLNELVIELNTLMANSDTFTDFNPDLNLVHDQSNTYLRQDTNVAVRKVIRQLSIAREGNLVQCWIKYYTDSISHLFIYDVKKENVVSKTYISDDGVFHFDAGSINIRTGTINITSTELKEEDKIAFELWAAMIEKATSQL

SEQ ID NO: 33977 - DNA, 50 bp, Aeromonas hydrophila
  source 1..50: mol_type = genomic DNA
gtgtctaaaatacttccttgttccttgtaaccgtgatatgatttacgcca

SEQ ID NO: 33978 - DNA, 40 bp, Aeromonas hydrophila; identical to SEQ ID NO: 23328
  source 1..40: mol_type = genomic DNA

SEQ ID NO: 33979 - DNA, 40 bp, Aeromonas hydrophila; identical to SEQ ID NO: 23328
  source 1..40: mol_type = genomic DNA

SEQ ID NO: 33980 - DNA, 50 bp, Aeromonas hydrophila
  source 1..50: mol_type = genomic DNA
gagcccaaactgattccttgtgacttctaaccctgatattttttgcgcta

SEQ ID NO: 33981 - protein, 535 aa, Pseudomonas fulva
MIRSALKHRRKVFAVMNAGHNTLSRSPQAISYVRFSSLRQTSGTSVERQEEMIGIWLANNPQFQLSPLQYKDLGRSGFHGEHINGGGFGKLLEAVHAGAIQAGDVVLVEAIDRTGRLDAVDMLGILHPILSAGVSIITLDDNTTYNRASLNGAGLFMLSAKIQSAHQYSAALSRRIEATYEKRRREAKAGVVPKRHTPVWLNSDGSVRELVAKQVAIAFDLYISGLGKNTIARRMRESGLPELAKASGPGVQGWLRNRAAIGEWSGYTVYPPIVSLSTFQKAQMHSENVKTVRPKKTANNFLVGLVKCASCGKNYIVQNVNGKPHTMRCRTHQNDKACDNSASLPIAVLRGLVAFTADHAKRQAVSSLHSSINETEIAALRAEVDSLTAKITGLVDSVQALGAIPELLEPLKKHQADRDSYNARITLLERSVSSGSYWATEADVWRMEAEDPQRLSSLLQQVGYTITVHPNKTIRVSGFDNVWQYLKPVRKPKSNATQGFIITNNGLPQEIGVSDYCDTGVYRRIDDDNLDILDD

SEQ ID NO: 33982 - DNA, 50 bp, Pseudomonas fulva
  source 1..50: mol_type = genomic DNA
ccgtgtatcaaattaaatacttgtgaccagaaattcaatatgatacgttc

SEQ ID NO: 33983 - DNA, 40 bp, Pseudomonas fulva
  source 1..40: mol_type = genomic DNA
gcgagtaatcaaggggtgggaccagggcatcatgggcatg

SEQ ID NO: 33984 - DNA, 40 bp, Pseudomonas fulva
  source 1..40: mol_type = genomic DNA
gcgagtaatcaaggggtgggcccagggcatcatgggcatg

SEQ ID NO: 33985 - DNA, 50 bp, Pseudomonas fulva
  source 1..50: mol_type = genomic DNA
cctagtataaatataaatatttatgcccagaaatacttattgatatatgc

SEQ ID NO: 33986 - protein, 586 aa, Pseudomonas syringae
MPKIWPYIRFSSEEQKRGDSLRRQKELIARFAARPEIVAEGAQIDESLNLNDLGVSGYTGKNLLKGRFKAFLDAVDSEVVKAGDYLAVEALNRITRLNPLESLPIILRLVQEKDVRIAITSSSQIYRRGDDISALYIAIGELQRGYKESQEKGMRVKEAWNSKKRRAADFGEIATSRVPLWLSVDSIKLGSGDIKRVIKEIDARVAVVKEIFRLSDSNIGAVATARILTERGVPTFTRENARKNSNYGDFWQVTYVRKILSNRAVLGNYQPMQWLEVGGKRTRVNHGREIEGYFPQIITRELFDRVQIKKDARKIEGQGNKGLRFSNLFTKIAFCSACGAVAHHVNKGKDTKKGGRYLVCYRAKYGSCTYKSWKYEKVEAMILSYLAEADIKSIMRDEDKVELLVNERYKVESEQVAIGEMLDNFKRDFKELKGRVSNVERELAIENEARLADIKSQLHALDARILEAIEQQKADLKNEVRALQELDGVADENKVFEIRSKINARLKLIVESIILNFDLQVAEVRFKSGIVRHVHERGVFANILPPATTEQSAEDMREIEEWASLSNEEKKAKWANDEFKIVPLKI

SEQ ID NO: 33987 - DNA, 50 bp, Pseudomonas syringae
  source 1..50: mol_type = genomic DNA
tgggtccaatgctagctttaaagaaggatttagattaccattggacccat

SEQ ID NO: 33988 - DNA, 40 bp, Pseudomonas syringae
  source 1..40: mol_type = genomic DNA
gccgggcggcccgctgaacagcaggttatgcgcaccggca

SEQ ID NO: 33989 - DNA, 40 bp, Pseudomonas syringae
  source 1..40: mol_type = genomic DNA
gccgggcggcccgctgaaccacaggttatgcgcaccggca

SEQ ID NO: 33990 - DNA, 50 bp, Pseudomonas syringae
  source 1..50: mol_type = genomic DNA
tggttcaaagaaggtctttcaagacagaaattgattgggattgggcacat

SEQ ID NO: 33991 - protein, 648 aa, Pseudomonas aeruginosa
MTSTAPSGSEPAGYAYIRHSTKRQGGDDKDSVSRQKTSIRALAKQYGLEIPDQNFYYENGVSAFSGKNRTHGKLKELIDQIDGMRIRKGDYVFVESIDRLTRQRLLQAKELVNGLLEKGIILVTTLDNQKYQKATLENGIDDLTQDILLSVISKRAWDESNTKSIRRKSAWNKAKEAAEKDLKPFNAKRPPYGIQFNELAGKFELDPVKSKEVIAVFESLKMQGVTNTIKLINQTSVHKWTSQRVKDLFITKYPIGYLYSQKKIDGQMVFDKYIENYYPQIISFQLFEEARLAMQGRKGSKSIGRVAADNSNIFRHTAVCDICNESMYFSNNSNGKAKYINLNCRNNFESTNKCSNRFRFDLAVYVLFEIVRRAEIINKLSSNYTPKPNEKSPLDDFYDEFGVIQSKGIVQPQRSDFSQNNKYVWDFLYNPQKHISQSIYLAEKFSKIMQGNSEQKKFHKENVDLLNEKAQMQQRIESLNKKVNSLVLADADIPDVIVMQLVNAKKRITAIDEEIAQLTVQQATKATVKIETLSEFESLFKTDEGRLKIITFLNSSGLSFNFNYDKKSRILTTTLYQEFDPLEEPEPINHIWTDRKFKRAYRHRDKMRLREIVHRKELTTVETYYETNFAPMRPYGYENLGEFLMNQK

SEQ ID NO: 33992 - DNA, 50 bp, Pseudomonas aeruginosa
  source 1..50: mol_type = genomic DNA
atgttagaagtaggtgggttgttcttgtatactacccctatatctaacat

SEQ ID NO: 33993 - DNA, 40 bp, Pseudomonas aeruginosa
  source 1..40: mol_type = genomic DNA
taccggcatgtggttggtcttgaagtagataccgaccatc

SEQ ID NO: 33994 - DNA, 40 bp, Pseudomonas aeruginosa; identical to SEQ ID NO: 33993
  source 1..40: mol_type = genomic DNA

SEQ ID NO: 33995 - DNA, 50 bp, Pseudomonas aeruginosa
  source 1..50: mol_type = genomic DNA
atgttagaaaagatttgattctttttgtatagtcccagtggattgaacct

SEQ ID NO: 33996 - protein, 648 aa, Pseudomonas aeruginosa
MTSTAPSGSEPAGYAYIRHSTKRQGGDDKDSVSRQKTSIRALAKQYGLEIPDQNFYYENGVSAFSGKNRTHGKLKELIDQIDGMRIRKGDYVFVESIDRLTRQRLLQAKELVNGLLEKGIILVTTLDNQKYQKATLENGIDDLTQDILLSVISKRAWDESNTKSIRRKSAWNKAKEAAEKDLKPFNAKRPPYGIQFNELAGKFELDPVKSKEVIAVFESLKMQGVTNTIKLINQTSVHKWTSQRVKDLFITKYPIGYLYSQKKIDGQMVFDKYIENYYPQIISFQLFEEARLAMQGRKGSKSIGRVAADNSNIFRHTAVCDICNESMFFSNNSNGKAKYINLNCRNNFESTNKCSNRFRFDLAVYVLFEIVRRAEIINKLSSNYTPKPNEKSPLDDFYDEFGVIQSKGIVQPQRSDFSQNNKYVWDFLYNPQKHISQSIYLAEKFSKIMQGNSEQKKFHKENVDLLNEKAQMQQRIESLNKKVNSLVLADADIPDVIVMQLVNAKKRITAIDEEIAQLTVQQATKATVKIETLSEFESLFKTDEGRLKIITFLNSSGLSFNFNYDKKSRILTTTLYQEFDPLEEPEPINHIWTDRKFKRAYRHRDKMRLREIVHRKELTTVETYYETNFAPMRPYGYENLGEFLMNQK

SEQ ID NO: 33997 - DNA, 50 bp, Pseudomonas aeruginosa; identical to SEQ ID NO: 33992
  source 1..50: mol_type = genomic DNA

SEQ ID NO: 33998 - DNA, 40 bp, Pseudomonas aeruginosa; identical to SEQ ID NO: 33993
  source 1..40: mol_type = genomic DNA

SEQ ID NO: 33999 - DNA, 40 bp, Pseudomonas aeruginosa; identical to SEQ ID NO: 33993
  source 1..40: mol_type = genomic DNA

SEQ ID NO: 34000 - DNA, 50 bp, Pseudomonas aeruginosa; identical to SEQ ID NO: 33995
  source 1..50: mol_type = genomic DNA

SEQ ID NO: 34001 - protein, 543 aa, Paenibacillus terrae
MNAYITAIYPRVSTGMQASEGTSLEGQVEICFNKARKLGIQENTLHVYQEEGFTGEDIDRPALNRLMQDIKLGKIKSLIVTHPDRLTRDLTDKLIICRELEKHDVELIFVDTEYKNTPEGQLFFNMMSSIAQYELSLIKKRTVRGRLRAVEKDKKIMPMRVAPYGYDLIDGRLIINEEEAKFVQLIYHWYVHDSKTMKQIGENLYLMGAVPKRAESKQWSASSIGRVLTSEIYIGKYYYNRRSTKKVKGEKTASGKAKKTYTMRNKEEWICVDVPPLIDLGTFELAQKKKRTNFTRTGRNVKHHYLLRSLIKCSHCGRVWEATSYPGKAKNGEKKSYPIYRCANKYPKRYGEGVEKCDIPVIRTEILDEYIWGIIVKVLNNPEHLKNDLSKKDSHATDELMNLKNIFEKQVEEKEKEREKIKFMFRKGVIEEDELETDMTTLNKEVKRIQGELGRLEEKISLLNRQSMSEDVIKVMVSKYQEVLNNELAPEIKRRIVENLIDEIIIRYDHEKKQFSLSFYGFLNRMVDGFSKDNYFVSGTQPV

SEQ ID NO: 34002 - DNA, 50 bp, Paenibacillus terrae
  source 1..50: mol_type = genomic DNA
actttgtttctggaacacaacctgttgaagatgtgaatacaaaacaaagt

SEQ ID NO: 34003 - DNA, 40 bp, Paenibacillus terrae
  source 1..40: mol_type = genomic DNA
accggtgttatcaaactttttcacaatatgagccactagt

SEQ ID NO: 34004 - DNA, 40 bp, Paenibacillus terrae
  source 1..40: mol_type = genomic DNA
accggtgttatcaaactttaacacaatatgagccactagt

SEQ ID NO: 34005 - DNA, 50 bp, Paenibacillus terrae
  source 1..50: mol_type = genomic DNA
attttgttttaaaaacacagcctgaagaatttggttgaataaaaaatagt

SEQ ID NO: 34006 - protein, 566 aa, Parvibaculum sp
MSRNLNRMTAAYSYLRMSRPEQARGDSLRRQLKGAREYATANGLTLVEDMRDIGVSAYKGKNSTEGILATFLAAVEAGAIAPGSVLIVENLDRLSRQQVPKALRLFLAILEGGIEIVTLSDGQRYTEASISDGPTQILISILALSRAHEESALKAQRIGESWQKKREIASGGVPMTAMAPAWLCLSPSRSEWHFREGRDGIVRRIFEEASDGIGAMTIARRLTVEGVEPWGPRRRKSLPGPRGWHPSAIKKILANEAVVGVFQPHQIRNGKRVPSGPPIPDYFPAAIPADLFWRARAAIEGRKRGGAGRKGKRFSNLLAGLCVCGACGGPVHFVDKGAPPKGGRYFQCDHARRRAGCISGDLYRYDDVERGVFALLSDALFASVFAAERETTRLWQARAEELNAQIQTLKRKQARYIDIFEDDGDVDDAASQRMRALRTEIQTASAERRQLLERIRATDSVGKPQSVGESFEIAKDRLDAIEDLPSDAERYRARAEIAQALRRVIREIVFHIDLATIEFADGEEKMIILGNRWCDPDTERLLEERIRHVEAARGQVGSGNKNIDRN

SEQ ID NO: 34007 - DNA, 50 bp, Parvibaculum sp
  source 1..50: mol_type = genomic DNA
actttgagaattggccacaacatgctagtgatggggccaattaaacttca

SEQ ID NO: 34008 - DNA, 40 bp, Parvibaculum sp
  source 1..40: mol_type = genomic DNA
cgccggcggtcacaacatgctgatggtcggcccgccgggc

SEQ ID NO: 34009 - DNA, 40 bp, Parvibaculum sp
  source 1..40: mol_type = genomic DNA
cgccggcggtcacaacatggcgatggtcggcccgccgggc

SEQ ID NO: 34010 - DNA, 50 bp, Parvibaculum sp
  source 1..50: mol_type = genomic DNA
cctttgagttgctatcacaacatggcatagattgggtaatttatacataa

SEQ ID NO: 34011 - protein, 516 aa, Bacillus cereus
MYRPESLDVCIYLRKSRKDVEEERRALEEGNSYNALERHRKRLFAIAKAENHNIIDIFEEVASGESIQERPQMQQLLRKLEGNEIDGVLVIDLDRLGRGDMLDAGMIDRAFRYSSTKIITPTDVYDPDDESWELVFGIKSLISRQELKSITKRLQNGRIDSVKEGKHIGKKPPYGYLKDENLRLYPDPEKAWIVKKIFELMCDGKGRQMIAAELDKLGIDPPVTKRGAWDASTITSIIKNEVYTGVIVWGKFKHKKRNGKYTRQKTPQEKWVVYENAHEPIVSKELFDAAKEAHSSRHRPAVVSSKELANPLAGILKCKLCGYTILIQRRKNRPNDYLRCNNPACKGKQKQSIFNLVEEKLLYSLQQVVDEYQAQKIEEVAIDDSKLISFKEKAILSKEKESKELQVQKGNLHDLLEQGIYTVETFLERQKNLVDRITSIENDIEVLKKEIEVEQVKEHNKTDFIPALKTVIESYHKTTNVELKNQLLKTILSTVTYYRHPDWKTNEFEIQVYFKI

SEQ ID NO: 34012 - DNA, 50 bp, Bacillus cereus
  source 1..50: mol_type = genomic DNA
cgtgtacatggtggagtgttaaactggtttaactctctaccatgtacaca

SEQ ID NO: 34013 - DNA, 40 bp, Bacillus cereus
  source 1..40: mol_type = genomic DNA
cgtactatggcggttgtactgattcacttccccataccca

SEQ ID NO: 34014 - DNA, 40 bp, Bacillus cereus
  source 1..40: mol_type = genomic DNA
cgtactatggcggttgtactaattcacttccccataccca

SEQ ID NO: 34015 - DNA, 50 bp, Bacillus cereus
  source 1..50: mol_type = genomic DNA
catgtacactctttagtgataaaatagtttagctacaaagaatgaataca

SEQ ID NO: 34016 - protein, 582 aa, Pseudomonas syringae
MAKTIYTDNLTASGKVKTYSYLRYSSAAQGEQFGGDSVRRQNDLIQAFLDTHNAEIVKSFEDLGISSFRGKNAKNLKTAEFAKFLQKVENGEIEKGSYLIVEGFDRISRQKGLNTVKIITDILHKHIKIFTLSDKRLYDIEAQNHLEQIIMITVINERAHNESLEKSNRQKAYFSGKRRGMDSGKEERVATGIYPSMSKRSPWWLRVDEKGNYQPIPERVAEIKYVVDLLTTKGFGIKRACHLVNSNGSLRVWNRDYIMKLIHEDCLFGHHTPLETKHSESTGGVTFRFTGEKYENVFPTVISEEEILAVRGAFKERLGTRGGKKSHQQNNIFTGLAKCGYCGSPMRQHQLASRGRTYFYLSCSASQIGTCVTSVAVTTRYDEFLKNFFKASDHFDFNSLLNNDNESFSTVHIESKKELMIKLEKEERIYSGLQETISSLLENGEALPALYTKKIVEVEAKIKYLKDEKDKIEFKIMSENRKAKDFIKVDIDFFEQLKNDINLRLKTYSHLHDYIHAIYFRNKKVYFDEVDHFTVIFKNGYVLSFNEHFTKLKEAAPLINEPINLLEHGYTIESYVDSILDV

SEQ ID NO: 34017 - DNA, 50 bp, Pseudomonas syringae
  source 1..50: mol_type = genomic DNA
ttttactttgtacccggctttagcccgctgaaaccggcctcatagtaaaa

SEQ ID NO: 34018 - DNA, 40 bp, Pseudomonas syringae
  source 1..40: mol_type = genomic DNA
gctgatgtacgacaccgaaccgatgaagccgaccaatact

SEQ ID NO: 34019 - DNA, 40 bp, Pseudomonas syringae
  source 1..40: mol_type = genomic DNA
gctgatgtacgacaccgaacggatgaagccgaccaatact

SEQ ID NO: 34020 - DNA, 50 bp, Pseudomonas syringae
  source 1..50: mol_type = genomic DNA
atttactttgtttccagttttggacggttaaaacagccattttagtaaaa

SEQ ID NO: 34021 - protein, 472 aa, Streptococcus equi
MNTKRKVAIYSRVSTLHQAEEGYSIGQQIEALTKYCQAMDWTIYDNYSDAGFSGGKLERPAMQKMIQDAESGKFDTVVVYKLDRLSRNVRDTLYLVKDVFNANNVDFVSLQENIDTKSAMGNLFITLLSAIAEFEREQIKERMQLGVKGRAKSGKTTSWTTPPFGYEYDTNTQLMTINHYQAEIVRDMFDKIISGWSIMGITTHLRKTDNKKWTHVRVKRILENVAYIGKVKYRDEIFDGEHAPILTEEIFYKAQKALEERTSKKDNTRPFQGLYMLSNIAKCGYCGTPLKIDSYKPRKDGTRKRTYTCINRNPKRIKTATYNDGKQCKESGRYDVKDVERYVLNEISKLQLNPKSIESLYRDKPEENIAAHQEQLKKIETKLSKLNDLYINELISMDILKQKSAELLKEKSSLETFINSNKRKTNNKPAFEKLAKMDDIFKMSYDDQKRIVKTLIKRVEVKRDEINVIFKL

SEQ ID NO: 34022 - DNA, 50 bp, Streptococcus equi
  source 1..50: mol_type = genomic DNA
ttacagtatttaggagcaccaactagaatagttgtgcatgaatcagaact

SEQ ID NO: 34023 - DNA, 40 bp, Streptococcus equi
  source 1..40: mol_type = genomic DNA
ggtcgcttttttaccgacaagaatagttgtgcatgacatg

SEQ ID NO: 34024 - DNA, 40 bp, Streptococcus equi
  source 1..40: mol_type = genomic DNA
ggtcgcttttttaccgacactaatagttgtgcatgacatg

SEQ ID NO: 34025 - DNA, 50 bp, Streptococcus equi
  source 1..50: mol_type = genomic DNA
ttaaactataacctaccatcaactctaatatatatgctgatttcagaagt

SEQ ID NO: 34026 - protein, 527 aa, Enterobacter hormaechei
MKVSVWSYARVSTLSQVDGFGIQRQVQTINQFIQYLVLDHRLPFTLDTTNVTQMVAEGRSAFKGKNWNPKTKLGQYRKNVMDGVVKESVLIVENIDRLTRLDPFQAVEIISGLINRGTTILEIETGMTYSRYIPESITVLTMQINRANGESKRKSIMMQKSHQNRFGNVSKVRPRWFDVVEIDGIKQYRTNDTAKAIQRMFNDYVNGIGAAQIVRTYGKTDNGKEWTLVTVLRTLSDKRVADDPRYPPIIDKELYTKVQAIKTNNSNSKTHQKNMLNLFTGMSRCTICGQAIIAKWNSHGGLYTVCLGKRTNKTCEAKAIAYNALERPLLDAINGLDFSEVYQREDANVVTLRDQWIQNEKDIAMFRERLGKASRHEKFAILDELEQISKEQDELTIRLKSVDAPKDLQLTYNDDKLDLDVEYRIELNNRLKKLIQRINVLRIDAGSGKYTIYCSIKYWTDFMAHLVIIDVESKRTGKGGKNTLTTTLRSVSSITSDLQISGNPDMEALEYWESVFKEAVDIAEKSL

SEQ ID NO: 34027 - DNA, 50 bp, Enterobacter hormaechei
  source 1..50: mol_type = genomic DNA
gggtgtacatactttaccaactaggagcagttgtgttagagtgtacacca

SEQ ID NO: 34028 - DNA, 40 bp, Enterobacter hormaechei
  source 1..40: mol_type = genomic DNA
gggacccatcagcagtaatgaacagtccgtcgtaccgccg

SEQ ID NO: 34029 - DNA, 40 bp, Enterobacter hormaechei
  source 1..40: mol_type = genomic DNA
gggacccatcagcagtaatgtacagtccgtcgtaccgccg

SEQ ID NO: 34030 - DNA, 50 bp, Enterobacter hormaechei
  source 1..50: mol_type = genomic DNA
ggggatacagctaagccctattaggtgtagtggtgtgcacctgcacacca

SEQ ID NO: 34031 - protein, 600 aa, Cronobacter malonaticus
MAQKLYSYQRWSSAVQADGTTKARQTKAAEEYAQKNGLEIEEIVDAGVSGFKSANSDESGALGQFLRAVDEGLIARNAVLFVESLDRITRDEIDTALELFLGILRRGITIVTGMDNKVYTREAIKGNPVDLLTSILMFSRAHEESKTKQNRTNGNALALIDRFLKKGLPVNIKSVGSHPWWIDDSGSMYEAVKPHPVLWACAQLAMDNFMEGISVFKVTQMLNERFPHYYKGKAWAMANVRKLRLNKAVYGVREISVGGKTYVLPDYYPALISEGQFLRLQQIRTTTKYIGKVGEGRVVTDAEGNSKVIAERNNINLLSGMKLFRCGHCGGTMMAMRHGDTIRYLCEKGRGYHHDCKTWSLPGILVEHTLMLVTTIAYIELQQKGQGAKADYTQQINAMESTINGYSTQINKATKLAIALDDVDVDELAETIKELKAKRDNAIIELEVLQRKQLLANDSTFETVMMDFFTYAQYGVLQDPVHEYRSKLRDVVYSAISDVRAWKHDRRLFISFQIKGNDEYYNFSAGNTPYEWGCYVGALPFSQQELEVADGDVPEKVLERVRERYAELHAANMMMLHQAKELLSHVGYPELDSKMFWPRK

SEQ ID NO: 34032 - DNA, 50 bp, Cronobacter malonaticus
  source 1..50: mol_type = genomic DNA
agatgtgtagaaaatgctttcgggaacccaaagagaaattctacacatta

SEQ ID NO: 34033 - DNA, 40 bp, Cronobacter malonaticus
  source 1..40: mol_type = genomic DNA
tatcatcagccaccctggtaacccgaaatatcccgtcgat

SEQ ID NO: 34034 - DNA, 40 bp, Cronobacter malonaticus
  source 1..40: mol_type = genomic DNA
tatcatcagccaccctggtttcccgaaatatcccgtcgat

SEQ ID NO: 34035 - DNA, 50 bp, Cronobacter malonaticus
  source 1..50: mol_type = genomic DNA
agacctgtctcaaatactttcaggttcacaaatacgtatcatacacatta

SEQ ID NO: 34036 - protein, 571 aa, Lachnoclostridium phocaeense
MPRRKQNPQSLKQTVSTAITKIVWRVAIYIRLSKDDGNDESYSVKNQRERLNDTLEQLMLDEDGIEFVGYYIDDGFTGVDSDRDDFQRLLTDIHNGKVNCVLVKDLSRLSRNDWECKYYLQMLFVKMNVRFISLELPKLDSFKRPEGVYELDVSFQSMYNENHCRETSIKVRGTLDKKREKGQFIGAFAPYGYLKDPEDYHHLVVNPETAPVVKDIFRWYMEGMSKSAITKELIRLGIPSPYEYKRQHGMKCFNPQAVKKGGVVYWSTRTVDQILHNPTYIGDMVQGRHKVTSYKIHDIIPVDEADWFWVEGTHEAIIDADTFQKVQDLMSRNTRVSPKRNNLYLFSGFLRCADCGRGMVRNSSHGYSYYSCRTYRTLSKDLCTGGSHNIKEDIIAEAALKAIQAQIALVENMAEVIKEINSAPTRISRTIFIDNLLKDKERELQKTAGISDSLYMDWKNGDITREEYHRMKARFQTEAEQLKKAIANLQEERKEYEKEVTTDDPYLTTFLKYKNIKELDRNIVVDLIDAIYIHADKGVEIHFKFQDQHKRLMEFIDNNLAAARRSKIKAV

SEQ ID NO: 34037 - DNA, 50 bp, Lachnoclostridium phocaeense
  source 1..50: mol_type = genomic DNA
ttttgtgtataaatacatgaagcggtggcctcatgtttatatacacaaat

SEQ ID NO: 34038 - DNA, 40 bp, Lachnoclostridium phocaeense
  source 1..40: mol_type = genomic DNA
ctttgggtccagcatggctgtggcctcatccagcacaaga

SEQ ID NO: 34039 - DNA, 40 bp, Lachnoclostridium phocaeense
  source 1..40: mol_type = genomic DNA
ctttgggtccagcatggcttgggcctcatccagcacaaga

SEQ ID NO: 34040 - DNA, 50 bp, Lachnoclostridium phocaeense
  source 1..50: mol_type = genomic DNA
tcttgagtacatctagaagtagcttgggccttatgttctgacacacaatt

SEQ ID NO: 34041 - protein, 537 aa, Blautia sp YL58
MKQQIYNTALYLRLSRDDELQGESSSITTQRSMLRLYAKEHHLNVIDEYIDDGWSGTNFERPSFQRMIEDIEAGKINCVVTKDLSRLGRNYIMTGQYTELYFPSHNVRYIAIDDGVDSEKGESEIAPFKNIINEWVARDTSRKVKSAFRTKFAEGAHYGAYAPLGYKKHPDIKGKLLIDDETKWIVEKIFSLAYQGYGSAKITKILREEKVPTASWLNFTRYGTFAHIFEGKPESKRYEWTIAHVKAILKNEVYIGNSVHNMQSTVSFKSKKKVRKPESEWFRVENTHEPIIDKEVFYRVQEQIKSRRRQTKEKATPIFAGLVKCADCGWSMRFATNKANKTPYSYYSCSFYGQFGKGYCSMHYIRYDALYQAVLERLQYWANAVQQDEEKVLNKIQKVGNAERIREKKKKASALKKAENRQNEIDRLFVKMYEDRACEKITERNFVMLSSKYQKEQIELEQQITNLREELSKMEQDMIGAEKWIELIKEYSVPKELTASLLNAMIEKILIHEATTNEDNERIQEIEIYYRFIGKVD

SEQ ID NO: 34042 - DNA, 50 bp, Blautia sp YL58; identical to SEQ ID NO: 1657
  source 1..50: mol_type = genomic DNA

SEQ ID NO: 34043 - DNA, 40 bp, Blautia sp YL58
  source 1..40: mol_type = genomic DNA
ggtttcaaaatgggagtcgggtcagtctgtaccggaattg

SEQ ID NO: 34044 - DNA, 40 bp, Blautia sp YL58
  source 1..40: mol_type = genomic DNA
ggtttcaaaatgggagtcgaatcagtctgtaccggaattg

SEQ ID NO: 34045 - DNA, 50 bp, Blautia sp YL58
  source 1..50: mol_type = genomic DNA
ttctatcatccagaaagagaaagcaaagtttcctgttgaaaaggaagtta

SEQ ID NO: 34046 - protein, 537 aa, Hungatella hathewayi
MKQQIYNTALYLRLSRDDELQGESSSITTQRSMLRLYAKEHHLNVIDEYIDDGWSGTNFERPSFQRMIEDIEAGKINCVVIKDLSRLGRNYIMTGQYTELYFPSHNVRYIAIDDGVDSEKGESEIAPFKNIINEWVARDTSRKVKSAFKTKFAEGAYYGAYAPLGYKKHPDIKGKLLVDEETKWIVEKIFSLAYQGYGSAKITKILREEKVPTASWLNFTRYGTFAHIFEGKPESKRYEWTIAHVKAILKSEVYIGNSVHNRQSTVSFKSKKKVRKPESEWFRVENTHEPIIDKEVFYRVQEQIKLRRRQTKEKATPIFAGLVKCADCGWSMRFATNKANKTPYSYYACSYYGQFGKGTCSMHYIRYDVLYQAVLERLQYWAKAVQQDEEKVLNKIQKAGNAERIREKKKKASALKKAENRQNEIDRLFTKMYEDRACEKITERNFIMLSGKYQKEQIELEQQITNLREELSKMEQDMIGAEKWIELIKEYSVPKELTAPLLNAMIEKILIHEATTNEENERIQEIEIYYRFIGKVD

SEQ ID NO: 34047 - DNA, 50 bp, Hungatella hathewayi; identical to SEQ ID NO: 1657
  source 1..50: mol_type = genomic DNA

SEQ ID NO: 34048 - DNA, 40 bp, Hungatella hathewayi; identical to SEQ ID NO: 26403
  source 1..40: mol_type = genomic DNA

SEQ ID NO: 34049 - DNA, 40 bp, Hungatella hathewayi
  source 1..40: mol_type = genomic DNA
ggtttccaaatgggagtcgaaacaatcctatccggagatg

SEQ ID NO: 34050 - DNA, 50 bp, Hungatella hathewayi; identical to SEQ ID NO: 34045
  source 1..50: mol_type = genomic DNA

SEQ ID NO: 34051 - protein, 537 aa, Blautia producta
MKQQIYNTALYLRLSRDDELQGESSSITTQRSMLRLYAKEHHLNVIDEYIDDGWSGTNFDRPSFQRMIEDIEVGKINCVVTKDLSRLGRNYIMTGQYTELYFPSHNVRYIAIDDGVDSEKGESEIAPFKNIINEWVARDTSRKVKSAFKTKFAEGAYYGAYAPLGYKKHPDIKGKLLVDEETKWIVEKIFSLAYQGYGSAKITKILREEKVPTASWLNFTRYGTFAHIFEGKPESKRYEWTIAHVKAILKSEVYIGNSVHNRQSTVSFKSKKKVRKPESEWFRVENTHEPIIDKEVFYRVQEQIKSRRRQTKEKATPIFAGLVKCADCGWSMRFATNKANKTPYSYYSCSFYGQFGKGYCSMHYIRYDVLYQAVLERLQYWAKAVQQDEEKVLNKIQKVGNAERIREKKKKASALKKAENRQNEIDRLFAKMYEDRACEKITERNFIMLSGKYQKEQIELEQQITNLREELSKMEQDMIGAEKWIELIKEYSVPKELTAPLLNAMIEKILIHEATTNEENERIQEIEIYYRFIGKVD

SEQ ID NO: 34052 - DNA, 50 bp, Blautia producta; identical to SEQ ID NO: 1657
  source 1..50: mol_type = genomic DNA

SEQ ID NO: 34053 - DNA, 40 bp, Blautia producta
  source 1..40: mol_type = genomic DNA
gatttctaattgggaaaacggaaagagttatccggacata

SEQ ID NO: 34054 - DNA, 40 bp, Blautia producta
  source 1..40: mol_type = genomic DNA
gatttctaattgggaaaacaaaaagagttatccggacata

SEQ ID NO: 34055 - DNA, 50 bp, Blautia producta; identical to SEQ ID NO: 34045
  source 1..50: mol_type = genomic DNA

SEQ ID NO: 34056 - protein, 537 aa, Eubacterium ramulus
MKQQIYNTALYLRLSRDDELQGENSSITTQRSMLRLYAKEHHLNVIDEYIDDGWSGTNFDRPSFQRMIEDIEAGKINCVVTKDLSRLGRNYIMTGQYTELYFPSHNVRYIAIDDGVDSEKGESEIAPFKNIINEWVARDTSRKVKSAFKTKFAEGAYYGAYAPLGYKKHPDIKGKLLVDEETKWIVEKIFSLAYQGYGSAKITKILREEKVPTASWLNFTRYGTFAHIFEGKPESKRYEWTIAHVKAILKSEVYIGNSVHNRQSTVSFKSKKKVRKPESEWFRVENTHEPIIDKEMFYRVQEQIKSRRRQTKEKATPIFAGLVKCADCGWSMRFATNTANKTPYSYYACSFYGQFGKGYCSMHYIRYDALYQAVLERLQYWANAVQQDEEKVLNKIQKVGNAERIREKKKKASALKKAENRQNEIDRLFVKMYEDRACEKITERNFVMLSSKYQKEQIELEQQITNLREELSKMEQDMIGAEKWIELIKEYSVPKELTASLLNAMIEKILIHEATTNEDNERIQEIEIYYRFIGKVD

SEQ ID NO: 34057 - DNA, 50 bp, Eubacterium ramulus; identical to SEQ ID NO: 1657
  source 1..50: mol_type = genomic DNA

SEQ ID NO: 34058 - DNA, 40 bp, Eubacterium ramulus
  source 1..40: mol_type = genomic DNA
cgtcagcaaatgggaacgcggtctgtcctatccggatatg

SEQ ID NO: 34059 - DNA, 40 bp, Eubacterium ramulus
  source 1..40: mol_type = genomic DNA
cgtcagcaaatgggaacgcaatctgtcctatccggatatg

SEQ ID NO: 34060 - DNA, 50 bp, Eubacterium ramulus; identical to SEQ ID NO: 34045
  source 1..50: mol_type = genomic DNA

SEQ ID NO: 34061 - protein, 510 aa, Bacillus amyloliquefaciens; identical to SEQ ID NO: 5976

SEQ ID NO: 34062 - DNA, 50 bp, Bacillus amyloliquefaciens
  source 1..50: mol_type = genomic DNA
ttatgtcgtactcaatcaataatcgtcacaagcattatagtttaagtata

SEQ ID NO: 34063 - DNA, 40 bp, Bacillus amyloliquefaciens
  source 1..40: mol_type = genomic DNA
taaggtcatcccgataatcgtcacgacagatccggttacg

SEQ ID NO: 34064 - DNA, 40 bp, Bacillus amyloliquefaciens
  source 1..40: mol_type = genomic DNA
taaggtcatcccgataatcaacacgacagatccggttacg

SEQ ID NO: 34065 - DNA, 50 bp, Bacillus amyloliquefaciens
  source 1..50: mol_type = genomic DNA
ttatttcttcatccataaaaaatgaacacaaccatcaccaatgacgtata

SEQ ID NO: 34066 - protein, 541 aa, Escherichia coli
MYATLEHSENNKMKVPVWSYARVSTLSQIDGFGIQRQVNTINQFIQYMVLDHRLPFTLDVENITQMVAEGKSAFKGKNWNPRTMLGQYRQHVMNGVITESVLIVENIDRLTRLDPFQAVEIISGLINRGCTILEIETGMTYSRYIPESITVLTMQINRANGESKRKSIMMKKSHENRFAKVSKVRPRWFDVVEIDGVKQYRPNETAKAIQRMYGDYVNGIGAAQIVRTYGSTDNGKPWTLVTVLRALSDKRVADDARYPSIVDKTLYERVQAMKLSTNKKGNTHQRNMLNIFSGMSRCPVCKQSIIVKRNSHGGLFTVCLGKRTNKTCEARSMAYSALERPLLEAIRGLDFSEVYNHEESNVMTLRDQWIQNERDIAAFRDRLSKASRHEKFAILDELETISKEQEELGIRLKSVDAPKDVQITYSEEKLEQDVEYRIELNNRMKKLIQHINIGRVNTSNSTYTIYCVIKYWTDVITHFVIIDVESIRTGKGGTNTLTSKLRSVSSINADGTYYGNPDREALEYWKSLMDMAHEIVEKHSA

SEQ ID NO: 34067 - DNA, 50 bp, Escherichia coli
  source 1..50: mol_type = genomic DNA
cggtgtacatacttgctcaactacgagcagtcatgttagtatgtacgcca

SEQ ID NO: 34068 - DNA, 40 bp, Escherichia coli
  source 1..40: mol_type = genomic DNA
cggtcccatcagcagcaatgaacagtcagtcgtaccaccg

SEQ ID NO: 34069 - DNA, 40 bp, Escherichia coli
  source 1..40: mol_type = genomic DNA
cggtcccatcagcagcaatccacagtcagtcgtaccaccg

SEQ ID NO: 34070 - DNA, 50 bp, Escherichia coli
  source 1..50: mol_type = genomic DNA
gggtttgcatcgcagctccacaacccacagccatgtgaccctggaggcca

SEQ ID NO: 34071 - protein, 516 aa, Dehalococcoides mccartyi
MKVALYARVSSEAQDVELSIAAQLRALKDYAGKNNYQVTCEFVDEAESGRTAARPEFKRMIAMSKSSVPPFEAILVWKLNRFSRNRADSITYKLLLQKKGIKVISINEPLDDSPTGKLMEGIIESLDEFYSANLGQDIKRGMKENALRGFYNGSQPPLGYELVKVKDGPKQRNKLAPEADSSPGVKTVKYIFALADRGKGCKEIANILNREEYITKAGKPWGRTTVHKILSNEAYTGTLVWGARPSQGLAKNEEIVRLENAWPSIIDKETFQRIQQSMISRQPKNTHPRTVPSQYLLSGMAFCSCGAALTGHSAKSGQYAYYQCNRKFKQGNGVCNCQAIPKTKLESAVIKQIKSRVLTEENLEELVTQVNEALKSTSSHHKEKLAVLDAELDDTRQRLNRLYEAIESGKLNYDDLSPRIRELRERQTKLEKSRVLAEAEMVADGNDSFNLEMVKAYANDLKQLLNESQITDCKAFLKTFVKKIETDSRKVSLKYTLPLPGTNRRREVLPIDTFGG

SEQ ID NO: 34072 - DNA, 50 bp, Dehalococcoides mccartyi
  source 1..50: mol_type = genomic DNA
gttctacctattgatacctttggtggagctgaggtggcagtaggcagaac

SEQ ID NO: 34073 - DNA, 40 bp, Dehalococcoides mccartyi
  source 1..40: mol_type = genomic DNA
gtgcttttagctttatggtggagccggagggattcgaacc

SEQ ID NO: 34074 - DNA, 40 bp, Dehalococcoides mccartyi; identical to SEQ ID NO: 34073
  source 1..40: mol_type = genomic DNA

SEQ ID NO: 34075 - DNA, 50 bp, Dehalococcoides mccartyi
  source 1..50: mol_type = genomic DNA
gttccccttctggttccctttggtggttctggcgtggcttcaggcagaag

SEQ ID NO: 34076 - protein, 545 aa, Photobacterium rosenbergii
MTKKSAVALVRVSTAIQEHGHGLSRQDSEISNFLSQHEEYELTRTISAIGESAYSGAVHDSANEFGNFLEGIEKHPTAAPDALLVASIDRLSRLPYFDAHKLIHRILAVIPELILCDTGAVYRDNGSNGLGSVVALALKISLANEESEQKSKRLRLAREKRKHQIANKEKIPNYLPFWLAWSGEEYVFNEHVKTVRKMVELRLHGLGSVAIQSYLNENLDSYPVPQRKSKQASGTRWTKSRIDDILFKEQTITGDYVIKTTYTPEEKRAAKREGKTLPQFNRELDFVCEGLFPAVIDKVKYFKLKKGRGKGQVANNHYNLLKGIAKCPCGSSFVLSHDSKHKDIENRLYLICNRRNQEGRVSTCKNKSTKLFPLSRAILSHILDKPLVASGEALTTTSRVDELEVELEIARKDKTKADRILKSCDDDEFDMRMSEYNAAKAAVKTLELELEIAIQEASKSVDSNTALENLKGMDLTSPEGRLAVNAQLRELVSTMLIDNIKPTVEIAFKDGTTMLFDPTQAGDIADTYSWEFESDREQIASLEFE

SEQ ID NO: 34077 - DNA, 50 bp, Photobacterium rosenbergii
  source 1..50: mol_type = genomic DNA
accaccgcaataagatgattaatagtaattgatcaccttttatggaagcg

SEQ ID NO: 34078 - DNA, 40 bp, Photobacterium rosenbergii
  source 1..40: mol_type = genomic DNA
cgctgcaatgtggttgatggtaaatgcgaccccggcagtt

SEQ ID NO: 34079 - DNA, 40 bp, Photobacterium rosenbergii
  source 1..40: mol_type = genomic DNA
cgctgcaatgtggttgatgtcaaatgcgaccccggcagtt

SEQ ID NO: 34080 - DNA, 50 bp, Photobacterium rosenbergii
  source 1..50: mol_type = genomic DNA
accaccgcaggtctgtgaatgatatcatttgcccccagcagagggaagca

SEQ ID NO: 34081 - protein, 585 aa, Aeromonas hydrophila
MNLTGDVVAYIKTHVYTRISKTSQQEGSGIDEQLSRIESYIKSKPEQFHDEPQHWQDIGLSAFKNKNIIDGQLAEFIQQVEEGSIGEGHALVIYSLDRLSRRSSWDEDTIQKLVKAGVDIHDVSTPVVLKHDDPFSKIIMELIVQRGNNESKIKSERSTSGWAKRLKDTIENGKVFTKQLPRWLAADENNKYIVIPEQAEIIKRIFREYTNGMSSTMIARRLNDEGLKSFSGSKWWHNTITNLIKDERLRGCFIRTVDSTKIPDIYPAIIDGELFTIANRILQVNSVGIKGRPRENNKTREIKNIITGFVLCGKCGSKVTTSKNPRGVSYVKCRGRRNDEIFCGQKSIKLIELERLVINYTKQLDMSKIFSYEEVDISLEASLQSELLSLEADEKNCLAKIEQRKKEKKTASLHLADTLTDIQDRIDEIRSELLEISVRDPLVEIGQYNLEELMDTSNIELRMSLRKYLVQVVDKITFRNIDDNILLELTYNKDVFRHVLITDKKVSKVLNEINIVKEDGFVKYQTNNFSIIEDVDLGTCTFKGLNNVSVADYFLLANYIDAIAGKRWIIDLMHDPINVETVFNN

SEQ ID NO: 34082 - DNA, 50 bp, Aeromonas hydrophila
  source 1..50: mol_type = genomic DNA
ttgtgtgaaatgcttcacatgatcgtgattgtgtaatactattcacacac

SEQ ID NO: 34083 - DNA, 40 bp, Aeromonas hydrophila
  source 1..40: mol_type = genomic DNA
gggggcgcgcgatatcactgtggtgctctcccgcccgctg

SEQ ID NO: 34084 - DNA, 40 bp, Aeromonas hydrophila
  source 1..40: mol_type = genomic DNA
gggggcgcgcgatatcacttcggtgctctcccgcccgctg

SEQ ID NO: 34085 - DNA, 50 bp, Aeromonas hydrophila
  source 1..50: mol_type = genomic DNA
ttgtgtggagaggatcaaatgaggtcatttgtgaaaaatacttaacacag

SEQ ID NO: 34086 - protein, 535 aa, Intestinimonas massiliensis
MLQVAAYCRVSTDKEDQANSFEAQQRYFHDYIERQPDWELQGIYADEGISGTSTRKRVEFNKMLHAAEMGQIDLIVTKEVSRFARNTVDALQITRDLLKRKVGVLFLSDNIDTRDDDINLRLAMMSTFAEEESRKTSKRSKWGQMRSMEQGVVFGGSLLGYDVVGGKMSINPEGAEIVRLIFHKYLQERKGCSTIAKELREAGILSSKGNCLWSSATVTKILKNEKYCGDLIQKKTYTPDVLTHEKKYNHGDEPLVELKDHHEPIIDRETWQAVQRELYRRNTAKGSGGHGNRYPLSGKIRCGECGKSFVSRTKKRKDGSSYKRWCCFTATNEGLRRTDGAGNPMGCSVGRQIRDDIAMDILRRSVNAVTLDKKAIISNLTRIVESVLASGEDSGEQELRRLEIELEKLQARNDTIHDRFFDESISKADFQRAKARCEGEINRVQEKITAIKQRQALNTDTQTLKPDIRSAITGIVSGRTENDAFYGHLLQQMTVYQDGRVEVALNLLPAKWTYVLDGLEKYRAKIGAHSASSVP

SEQ ID NO: 34087 - DNA, 50 bp, Intestinimonas massiliensis
  source 1..50: mol_type = genomic DNA
ggggcgcatagtgcttcttctgtgccgactgtggaggcaaaagggccacg

SEQ ID NO: 34088 - DNA, 40 bp, Intestinimonas massiliensis
  source 1..40: mol_type = genomic DNA
atggcccagctcttctgtgccgatgtcggtcagtagcccc

SEQ ID NO: 34089 - DNA, 40 bp, Intestinimonas massiliensis
  source 1..40: mol_type = genomic DNA
atggcccagctcttctgtggggatgtcggtcagtagcccc

SEQ ID NO: 34090 - DNA, 50 bp, Intestinimonas massiliensis
  source 1..50: mol_type = genomic DNA
gtggggctgtggtgttcttctgctgggagtgtgggggacgcagggccccg

SEQ ID NO: 34091 - protein, 510 aa, Burkholderia cepacia
MSEVKAAKPKAFSYLRFSTPEQTKGDSFKRQTRMALEYAARNGLELDESLTFHDLGVSAYRGLNAEAGRLADFLEAVRVGLVPTGSYLLVEALDRLSRLTPRKAVRVLEDIVEAGVTVVTLNDGRAYTAENLDDDPVSLLVAIVYFMRANEESATKSRRLKSAWESKRNALDTKPLTAVVPAWIRLDQETGTLQLIPERADIIRRIFEMHQAGTGVALIAATLNREGVPCFGAGAHWHRTYIRKVLSNPAAMGTFIPHRLVYLEGKRTRVPLEPVPDYFPAVVSSDEFSSAQRQVETPARHRAGKVVNLLAGLAKCPKCGSTMTRVNKGSGTKAAKPKLVCTRAKAGAGCEYKAVTLEDVEDALVSSADYLSGSAPSGAGTLDADLAEAEQAIEVTRESIDNLVSVLAATPSQAVAARLSELETALEALNDKRDHLAAQVIAASGPLLVKRLDELEAALSAEPRDNAKANAMLRTMFGSITVDYETGTLEMHWKQGGVSSLTYAWPSAAR

SEQ ID NO: 34092 - DNA, 50 bp, Burkholderia cepacia
  source 1..50: mol_type = genomic DNA
taagggtcttttgcgcacaatatcagcatgttattatctaaagacccaaa

SEQ ID NO: 34093 - DNA, 40 bp, Burkholderia cepacia
  source 1..40: mol_type = genomic DNA
gcccggcggcccgatcatcagcatgtgatggccgcccgcg

SEQ ID NO: 34094 - DNA, 40 bp, Burkholderia cepacia
  source 1..40: mol_type = genomic DNA
gcccggcggcccgatcatcttcatgtgatggccgcccgcg

SEQ ID NO: 34095 - DNA, 50 bp, Burkholderia cepacia
  source 1..50: mol_type = genomic DNA
taagagactatataggaaaatatctttatgttcttagggtaagaaggaaa

SEQ ID NO: 34096 - protein, 481 aa, Streptococcus agalactiae; identical to SEQ ID NO: 2986

SEQ ID NO: 34097 - DNA, 50 bp, Streptococcus agalactiae
  source 1..50: mol_type = genomic DNA
taaagaaatttactatccttggtttctaaaagcgtatctaaaactctcat

SEQ ID NO: 34098 - DNA, 40 bp, Streptococcus agalactiae; identical to SEQ ID NO: 22358
  source 1..40: mol_type = genomic DNA

SEQ ID NO: 34099 - DNA, 40 bp, Streptococcus agalactiae
  source 1..40: mol_type = genomic DNA
aaccaatgctaccaaacatgttaaaagtgtaaatgcttta

SEQ ID NO: 34100 - DNA, 50 bp, Streptococcus agalactiae
  source 1..50: mol_type = genomic DNA
gaatggaattccagatcctgggttgttagaaccttaagggatactttcat

SEQ ID NO: 34101 - protein, 529 aa, Vibrio vulnificus
MSRAYVYCRYSSNLQDESSIERQLQLAIEWCQRSNVELNGQFIDRATSGYKTALTERDGLQEFLNSPEVMAGDYLLVEKLDRLTRTDVQTTLPLIWQIEAKGVKIVTTMDGRELSSTDIGSLIMTLVEADKGNAYVRDLSARSKKAKKIKMEKQIYHGGEKTASAIPDWIYLSDDKMSYLIREERASVIRRVFDMAIDMGNGTIAQILNNERIPCWKKTKYGRWTGSMIKTMCANHRVHGEKHTRQFGVIPDFFPAIISKEKFLIVRDAMEKRKFDPNSKFRPAGGKKTKLSNLFSGIARCSNCGHTLHYKYTGDKVRVEKNGKEYSGYRLTRSYLICAERCTKTHGNYKVFEYALVEFSKAVDWSQFATVKSDTEKYKGALLINQESINEISGKIANLTEAVASTGNLSLITALEQNEEKLQELHNDSEELKAKLAAELAIEKRLEDEDVGAVARRIKDGDMETRIKFNSALKNRVDWLKVQLDNKPRPHIAIKISDRIEYIFPHDEKSYHYGWDAINGFEVDFDGEE

SEQ ID NO: 34102 - DNA, 50 bp, Vibrio vulnificus
  source 1..50: mol_type = genomic DNA
aatagtgatttaggcgtatgtatagatatacaaaccccttaaccactacg

SEQ ID NO: 34103 - DNA, 40 bp, Vibrio vulnificus
  source 1..40: mol_type = genomic DNA
ctgtggcggcgtgcctagtgacgtgcgtatcaccactcga

SEQ ID NO: 34104 - DNA, 40 bp, Vibrio vulnificus
  source 1..40: mol_type = genomic DNA
ctgtggcggcgtgcctagttacgtgcgtatcaccactcga

SEQ ID NO: 34105 - DNA, 50 bp, Vibrio vulnificus
  source 1..50: mol_type = genomic DNA
catacgtatatatacgtatgtatatatatacacacacatatacacatacg

SEQ ID NO: 34106 - protein, 583 aa, Listeria monocytogenes
MKEVEVIKARSSSSNSARGKMIEQLRVAAYCRVSTDSEDQLNSYNSQKEYYTDLIQKNAEWIFAGIYADEAITGTQVTKREDFQRMINDCMNGEIDMLITKSISRFARNTLDTLKYVRMLKEKNIAVYFEDEKINTLTMDGELLLVVLSSVAQQEVENISANVKKGLKMKMKRGELVGFQGCLGYDYHPEDKSITVNEEEAEIVRYIFNRYIEGAGGSVIGQELENLGYLTKYGNSTWVPTTVLGIIKNEKYKGDILLGKTFTVDPISKRRLENLGEEDQFYIRNHHEPIISEEVFDKAQEILNRRSKNRGKIGDGNSKREKYSRKYAFSCLLECGFCGGTLTRRRWHSGTEYNKVIWQCVTSTKKGKKHCPHSKGIPETAIEEAFIESYRLLCDNNKDVLEEFLNRIDETLSSSSVNKKLLKVDKEIEAIEKKKSKLVDMRLEDTIDSDTYESKFSSMTSKQEDLLKERLQLQETARNEKDIKRRLRDFKKTLEQNEVLNEFDRYVFESIVEKVIVGGYDEDGNIDPAQLVFVYKTGFKNSLDGNRFKPERKNARGNRKSKDLCSHANDENQSLCSDTKADT

SEQ ID NO: 34107 - DNA, 50 bp, Listeria monocytogenes
  source 1..50: mol_type = genomic DNA
gtgttccgatactaaagccgacacatgtagagactattgtgttgctacaa

SEQ ID NO: 34108 - DNA, 40 bp, Listeria monocytogenes
  source 1..40: mol_type = genomic DNA
atgtttccaatgacaacacatatagaagctgtgactgttc

SEQ ID NO: 34109 - DNA, 40 bp, Listeria monocytogenes
  source 1..40: mol_type = genomic DNA
atgtttccaatgacaacacggatagaagctgtgactgttc

SEQ ID NO: 34110 - DNA, 50 bp, Listeria monocytogenes
  source 1..50: mol_type = genomic DNA
ttgatccaatacctaagttgacctggctagagactatagggttgctacca

SEQ ID NO: 34111 - protein, 584 aa, Lacticaseibacillus paracasei
MKEVEVIKARSSSSNSARGKMIEQLRVAAYCRVSTDSEDQLNSYNSQKEYYTDLIQKNAEWIFAGIYADEAITGTQVTKREDFQRMINDCMNGEIDMLITKSISRFARNTLDTLKYVRMLKEKNIAVYFEDEKINTLTMDGELLLVVLSSVAQQEVENISANVKKGLKMKMKRGELVGFQGCLGYDYHPEDKSITVNEEEAEIVRYIFNRYIEGAGGSVIGQELENLGYLTKYGNSTWVPTTVLGIIKNEKYKGDILLGKTFTVDPISKRRLENLGEEDQFYIRNHHEPIISEEVFDKAQEILNRRSKNRGKIGDGNSKREKYSRKYAFSCLLECGFCGGTLTRRRWHSGTEYNKVIWQCVTSTKKGKKHCPHSKGIPETAIEEAFIESYRLLCDNNKDVLEEFLNRIDETLSSSSVNKKLLKVDKEIEAIEKKKSKLVDMRLEDTIDSDTYESKFSSMTSKQEDLLKERLQLQETARNEKDIKRRLRDFKKTLEQNEVLNEFDRYVFESIVEKVIVGGYDEDGNIDPAQLVFVYKTGFKNSLDGNRFKPERKNARGNRKSKDLCSHANDENQSLCSDTKADTY

SEQ ID NO: 34112 - DNA, 50 bp, Lacticaseibacillus paracasei
  source 1..50: mol_type = genomic DNA
gtgttccgatactaaagccgacacatatagagactattgtgttgctacaa

SEQ ID NO: 34113 - DNA, 40 bp, Lacticaseibacillus paracasei
  source 1..40: mol_type = genomic DNA
atgttcccgcagacgcagcatattgagagtattacggctt

SEQ ID NO: 34114 - DNA, 40 bp, Lacticaseibacillus paracasei
  source 1..40: mol_type = genomic DNA
atgttcccgcagacgcagcggattgagagtattacggctt

SEQ ID NO: 34115 - DNA, 50 bp, Lacticaseibacillus paracasei; identical to SEQ ID NO: 34110
  source 1..50: mol_type = genomic DNA

SEQ ID NO: 34116 - protein, 463 aa, Mammaliicoccus sciuri
MKVAIYCRVSTLEQFKGGHSIEEQQKKLISFCEINDWNNYEVFIDGGISGKDTERPALQNLLNNLNNIDLVLVYKLDRLTRSVRDLLSLLDTFEANNVSFRSATEVYDTSNAMGRLFVTLVGAMAEWERTTITERTMLGKTSAAEKGYYLNIPPFCFNKVDRQLVPNDKRKVIDYMVKLAKNNTSASVIASELNKRSIPSPTGKSWTRRSVIALLRNPTLRGHTFHGDIKKYNTHEAIISEDDFKMIDYNISDRTNTKVHKHNAVFRGKIVCKECGNHYNLDVQRRKRANGEISETKYYRCSECHKNKRHSPTVRADILEEDFINFIKYNKLIIDNYEMPKPTEEKQIDIDKVMKQREKYQKAWSMDLMTDDEFKKLMNETSDIIEEYNKQQNVNVQKEVDTNQIKTINNLVLKIWSKLNDKDKEKLIKENIKSIDCDIIEGSGYGVKRIPNRVRINQITYNI

SEQ ID NO: 34117 - DNA, 50 bp, Mammaliicoccus sciuri
  source 1..50: mol_type = genomic DNA
agatgtaagtatgtaacgcctatcaatgtaaatgtaacgaacttacaagc

SEQ ID NO: 34118 - DNA, 40 bp, Mammaliicoccus sciuri
  source 1..40: mol_type = genomic DNA
gtatggtggtacgtgtatcaatgttggttgtattccgagt

SEQ ID NO: 34119 - DNA, 40 bp, Mammaliicoccus sciuri
  source 1..40: mol_type = genomic DNA
gtatggtggtacgtgtatctgtgttggttgtattccgagt

SEQ ID NO: 34120 - DNA, 50 bp, Mammaliicoccus sciuri
  source 1..50: mol_type = genomic DNA
ggatgtaaaattgtaatgcgtatatgtacaaatgtacaatttttacatgc

SEQ ID NO: 34121 - protein, 540 aa, Faecalibacterium prausnitzii
MKQPNNTMIYNTALYLRLSRDDELQGESGSIQTQRMMLRQYAEEHGLTVVGEYIDDGWSGTNFDRPGFQRMIDDIEEGKINCVVTKDLSRLGRNYILTGQYTEIYFPSKGVRYIAVNDNVDTLNGESELAPFLNILNEMHARQTSKKVKAAMRTRFANGAHYGAYAPLGYIKDPDKSGHLLVDPETKWIIEKIFDLAVHGHGAASITHILVDEKVPTPGWLNFQRYGTFANIYAGASEEKSYAWTVAQVKSILKEETYIGHSVHNKQSNISFKNKKKVRKPQEEWYRVENTHEAIISADVFRQVQEQIAHRRRKQKDGTTQIFSGLVKCADCGWSMAYGMNKQNKKPYGYYHCSKNGQGLHQCSMHYIRYDVLYTYILARVQYWSQQAQQDGDKLLQRLLNASDKERNTAKKKQTAELKKATKRKAEVDNLFAKMYEDWSVGRITEYNFNMLSEKYQAEQHELDEKIQELQAELDAAVQTAVDAEKWIELMKKYVNPTQLTAELLNALIEKILIHEAVKHEDGTREQEVEIFYRFIGKVE

SEQ ID NO: 34122 - DNA, 50 bp, Faecalibacterium prausnitzii
  source 1..50: mol_type = genomic DNA
caatatctttaagtgagggattctcccgtttcccttaattaaagatacca

SEQ ID NO: 34123 - DNA, 40 bp, Faecalibacterium prausnitzii
  source 1..40: mol_type = genomic DNA
cacgtccggcagactgaggccccgctcccacttgctgacc

SEQ ID NO: 34124 - DNA, 40 bp, Faecalibacterium prausnitzii
  source 1..40: mol_type = genomic DNA
cacgtccggcagactgaggttccgctcccacttgctgacc

SEQ ID NO: 34125 - DNA, 50 bp, Faecalibacterium prausnitzii
  source 1..50: mol_type = genomic DNA
caatattttgtattgatgtatgctttcatttctcttgggagtatataccc

SEQ ID NO: 34126 - protein, 540 aa, Faecalibacterium prausnitzii; identical to SEQ ID NO: 34121

SEQ ID NO: 34127 - DNA, 50 bp, Faecalibacterium prausnitzii; identical to SEQ ID NO: 34122
  source 1..50: mol_type = genomic DNA

SEQ ID NO: 34128 - DNA, 40 bp, Faecalibacterium prausnitzii
  source 1..40: mol_type = genomic DNA
ggtgttcggctccgaggtgccgttctcccacttggacact

SEQ ID NO: 34129 - DNA, 40 bp, Faecalibacterium prausnitzii
  source 1..40: mol_type = genomic DNA
ggtgttcggctccgaggtgttgttctcccacttggacact

SEQ ID NO: 34130 - DNA, 50 bp, Faecalibacterium prausnitzii; identical to SEQ ID NO: 34125
  source 1..50: mol_type = genomic DNA

SEQ ID NO: 34131 - protein, 549 aa, Streptococcus pneumoniae
MSKEKIKVYLYTRVSTSIQIEGYSLGAQKSRMKAFAIYNDYEIVGEYEDAGKSGKSIEGRIQFNRMMEDIKSGKDGVSFVLVFKLSRFARNAADVLSTLQIMQDYGVNLICVEDGIDSFKDAGKLMISVLSAVAEIERENIRIQTMEGCIQKAREGKWNGGFAPYGYKLEDGKLFINEEEAVAIRTIFDQYVNTTIGANGISKYLENHGIRKIPRQNGKNPLFDAGLIRKILKNPVYNGKIAFGRRTLEKVHGTRNEYKQVEQDEYLISEGIHEAIVSDEVWQAAQVKLKSQAKKYERVNKGKDTRTHLLSGIVKCPICGVGMFGNKCIKKKKDGTKYKDFYYYGCKHRQMIRGHECTFSKQIREELLDDAVAEVIVKIVSNPKFASMMQEKINMKVDTSEIEKEIDNYQKELRKSHSTKFKLIEEIDNLDVEDKHYKRRKQDLDDRLCRMYDKIDELESSLIDAKAKKQTIEAEKLTGDNIYKVLIYFDKLYKVMNDVEHRQLISALISEIQVYEEKQSNGQWLKSITFKLPIIEENLNIGLDNDEQV

SEQ ID NO: 34132 - DNA, 50 bp, Streptococcus pneumoniae
  source 1..50: mol_type = genomic DNA
ggtttggataatgatgaacaagttgagacagtagcacttttgtccaaact

SEQ ID NO: 34133 - DNA, 40 bp, Streptococcus pneumoniae; identical to SEQ ID NO: 20423
  source 1..40: mol_type = genomic DNA

SEQ ID NO: 34134 - DNA, 40 bp, Streptococcus pneumoniae
  source 1..40: mol_type = genomic DNA
tcctcaaacgcatcacgtcagatgtgtaagtttattagag

SEQ ID NO: 34135 - DNA, 50 bp, Streptococcus pneumoniae
  source 1..50: mol_type = genomic DNA
gatttggatgttttttaaaaagttaggagagtatcaaataaggtcaaaga

SEQ ID NO: 34136 - protein, 407 aa, Mycolicibacterium vanbaalenii
MLEAMKAGQFDALLCFHTDRLYRNMSDLERVIELADARRVEIRTVQGGTLDLSTSAGRMVARILGSVARQESEHSSERRKRANVQRAANGDWVAARRPFGYTMDGEPLEPEATAIRSAITDVLSGKSVRAVARDWNDAGLATTGKADKWTATSVRRVLLRPRYAALVVHQGKVVGPGSWTPLIDTDTHHGIVAYLNDPARKGKVGFERKYQGSGVYRCGVCGTPVITHMSSGGSPNRVARRAYACPNGFHVRRQGDGLDTYVDTIVIGRLSQPDAAELLSTLSNSEGVDIGALHAQRTALQARQEELASLFADGAISAPQLKLGSAKLTNALETLERDLAAATQGNPASALLQDVNGVAQLEGRWAELSPDLRGKVIDQLMTVTINRSPKGLRRFDPDYVTVDWKQG

SEQ ID NO: 34137 - DNA, 50 bp, Mycolicibacterium vanbaalenii
  source 1..50: mol_type = genomic DNA
gggtgtagaaatcacaccttctttggcaagaaaagtcaataccaacgctt

SEQ ID NO: 34138 - DNA, 40 bp, Mycolicibacterium vanbaalenii
  source 1..40: mol_type = genomic DNA
gggcggcgccacgttcctcgggctggagaacgcgaaccac

SEQ ID NO: 34139 - DNA, 40 bp, Mycolicibacterium vanbaalenii
  source 1..40: mol_type = genomic DNA
gggcggcgccacgttcctcgtgctggagaacgcgaaccac

SEQ ID NO: 34140 - DNA, 50 bp, Mycolicibacterium vanbaalenii
  source 1..50: mol_type = genomic DNA
gtgtgtagacccagcactttctgtgtcatgaacagtgttacccaatcttg

SEQ ID NO: 34141 - protein, 461 aa, Listeria booriae
MTVGIYIRVSTEEQAKEGFSISAQREKLQAYCIAQGWNEFKFYVDEGLSAKNMERPLLKSLLKHIETRLIDTVLVYKLDRLTRSVVDLHNMLNFFDKYDCSFKSATEVYDTSSAMGRFFITIISSVAQFERENTSERVSFGMEERARQGKYIPLAPFGYKKGEDGVLVIYEEEAALVLELVDRLQKGYSIRQCCTYLDNLGVKTRRSNNVWKNTTLRRILGNHALYGATSWSGKVFKNTHTGILTEAEFLELQSILKARTGHVSSRKRALTHIFAGKIVCPNCGYRMSCVRTKYKERYNNDYRCPNCKIHYTHTSVSERKLLKAFDEYIESYRLTSFDIKKESKKENNQMKIEKQVVNLSKKREKYQKGWALDLIDDQEFSKLMKETQLELNQLESKLETDKYSSEKTFNQTAINNIVKNIKMNWSELTIEERKDFVNMFLKDIHYVKVAGVAEITKIDFY

SEQ ID NO: 34142 - DNA, 50 bp, Listeria booriae
  source 1..50: mol_type = genomic DNA
ctctgtatttatgacaactatagactactgtacttatcataagtacggtt

SEQ ID NO: 34143 - DNA, 40 bp, Listeria booriae; identical to SEQ ID NO: 4853
  source 1..40: mol_type = genomic DNA

SEQ ID NO: 34144 - DNA, 40 bp, Listeria booriae; identical to SEQ ID NO: 4854
  source 1..40: mol_type = genomic DNA

SEQ ID NO: 34145 - DNA, 50 bp, Listeria booriae
  source 1..50: mol_type = genomic DNA
aactataataaactctactataaacaactgtactcaaaaatagtactttt

SEQ ID NO: 34146 - protein, 477 aa, Staphylococcus caprae
MILWVVHLPLLFFAILRSENMKIAIYTRVSTLEQKEKGYSIDEQERKLRSYCEINDWKVHDVYVDAGYSGAKRSRPALSKLIDNLSKVDLVLVYKLDRLTRNVKDLLDLLEIFEENNVAFRSATEVYDTSTAMGRLFVTLVGAMAEWERETIRERVMMGKRAAIKQGMILTPPPFYYDRVDNTYIPNDYKKVVLWAYDEVMKGNSSKSIARKLNDSDISPPNGKKWEDRTITRALRSPITRGHYSWGDVFIEDSHEPIITDEMYQEVKDRLEERVNTKVISHTSVFRGKFICPKCDGVLTMNTNTRKTKKGYITHKSYYCDSCKSRKESFAFTEKEALDVFYDYLARLDLEQYKVQEKNNNDMVTIDINKVMEQRKRYHKLYANGMMQEDELFDLIKETDEAIAEYERQKELVPKKELDTNKIKQFKKLLLESWEIFTLEDKADFIKMTIKNINIDYKIVKKGKTTHSIEIKSIDFY

SEQ ID NO: 34147 - DNA, 50 bp, Staphylococcus caprae
  source 1..50: mol_type = genomic DNA
gtgtggaggtatgcacagtttattaatgttgattgagcatacttccgtat

SEQ ID NO: 34148 - DNA, 40 bp, Staphylococcus caprae
  source 1..40: mol_type = genomic DNA
gtatggcggaacatgcataaatattggctgtataccttcg

SEQ ID NO: 34149 - DNA, 40 bp, Staphylococcus caprae
  source 1..40: mol_type = genomic DNA
gtatggcggaacatgcatacttattggctgtataccttcg

SEQ ID NO: 34150 - DNA, 50 bp, Staphylococcus caprae
  source 1..50: mol_type = genomic DNA
gttgggagggtggggctgtttatccttgttgattgagaaacctactcttt

SEQ ID NO: 34151 - protein, 628 aa, Klebsiella oxytoca
MPQLYSYIRWSTDRQDKGTTRNRQLAAAKAYADENGLEMVEILEPGVSAFRGKNRTEKLGGFIDAVKNNAIPSDSYLYCENLDRISRDQVDKALSLFLELIGLGLTIITGMDRKVYNRDTIRQNPTDLMISILMFIRGNEESETKSNRTVGNVVALVERHKEGLPVNIKSVGRHPFWIDDTGSQYEAVKKHPFYWNIAREIIDMFLSGNGVYSVKKYLDEKYPNGLKGREWDYQVLKKMRDNRALIGERTINLRGVPYKLENYYPWLCKDEAEFFLLEKRKQQNNYKSKKDGADTIKLLSGLSILRCSKCGGTMHSFMNHGKARYICTNGVHLQKNCSGWSITAQLVEHCTMIALLIGYMDKSRKNGSDTTLIEEELNEKEKLIKDLDSKISNLVAAIAIAPEVSSLAHSLNEINGKRKELVLAVEKLKDRLVSLQGKGSFEVDIMEFLILIQWAVFTNMEDNDRDKIRKIIDAIIEYVVVDKTDECITIKIKYYGNDEVLVFGGVDRKPHWRFTIDFDTGKEGALTVLENDLKDVPEIQKAVSYLHKLEKGYLAMYDSAVTMLAEVGYPEIKGAQFWPNSGKHEKVTVSFDGMEYTISFNGRLPKAIASAIETTGLTRQQFIEKFKV

SEQ ID NO: 34152 - DNA, 50 bp, Klebsiella oxytoca; identical to SEQ ID NO: 3412
  source 1..50: mol_type = genomic DNA

SEQ ID NO: 34153 - DNA, 40 bp, Klebsiella oxytoca
  source 1..40: mol_type = genomic DNA
tgagtccaccagatttttcgggcagcccagagagacaaag

SEQ ID NO: 34154 - DNA, 40 bp, Klebsiella oxytoca
  source 1..40: mol_type = genomic DNA
tgagtccaccagatttttccagcagcccagagagacaaag

SEQ ID NO: 34155 - DNA, 50 bp, Klebsiella oxytoca
  source 1..50: mol_type = genomic DNA
tttggttttatccactgcttcttacagcaccgtaatctttaagaggcaat

SEQ ID NO: 34156 - protein, 461 aa, Salinicoccus roseus
MRTALYLRVSSHEQVQHGHSIKAQEERLRAYATAKDLDNIKVYKDEGASGASINRPGIQALIRDVKENRVSTILIYKLDRLSRSQKDTLHLIEDVFNQHDTALISISESFDTSTPFGRAMIGILSVFAQLERENIRERMMIGKEQNAKLGRWNGGGNQQGRVFGYRRKDKQWHVDDYEAKIIRDVFDTYNKGNGITRTRNAINEKYGEVFPDHTRVSTLLKNPFYLGKVKYGDKYYEGEHEAIVDEEVFNQAQVLREKRSKRTMTGKHDHFILRGLIECAHCGKRYSSRGKSKSRPERYDYYVCYTRFTNSRYPERKKCFNKNYRAEDLHKAVMDEVYSFTSPSFKFKTEPENGTLSIYTEKLLEVTKQIERVTDLYISGNVPAGILNDRMGKLNKEKEALEKSIEDHTPKSAVAIRELEKLQDIDLDSLTDLEMNNLLHVLIDKIVIDEEDVQIYYNFTT

SEQ ID NO: 34157 - DNA, 50 bp, Salinicoccus roseus
  source 1..50: mol_type = genomic DNA
atttcactacttagaggtagtgtctgcacagatactcaaagtagagaaaa

SEQ ID NO: 34158 - DNA, 40 bp, Salinicoccus roseus
  source 1..40: mol_type = genomic DNA
ttcgacgatcttggcggaatgcacggagaccggtttcccc

SEQ ID NO: 34159 - DNA, 40 bp, Salinicoccus roseus
  source 1..40: mol_type = genomic DNA
ttcgacgatcttggcggaactcacggagaccggtttcccc

SEQ ID NO: 34160 - DNA, 50 bp, Salinicoccus roseus
  source 1..50: mol_type = genomic DNA
atttcactacacctgggtaaggtactaacagattccagaaaaagacaaaa

SEQ ID NO: 34161 - protein, 547 aa, Escherichia coli; identical to SEQ ID NO: 16231

SEQ ID NO: 34162 - DNA, 50 bp, Escherichia coli
  source 1..50: mol_type = genomic DNA
atgaatgtacgtgtttagctatgtaaaagtactagtattcttgccttaac

SEQ ID NO: 34163 - DNA, 40 bp, Escherichia coli; identical to SEQ ID NO: 27138
  source 1..40: mol_type = genomic DNA

SEQ ID NO: 34164 - DNA, 40 bp, Escherichia coli; identical to SEQ ID NO: 27139
  source 1..40: mol_type = genomic DNA

SEQ ID NO: 34165 - DNA, 50 bp, Escherichia coli
  source 1..50: mol_type = genomic DNA
atgcatgtatcagatttgctttgttcaggcacgagttacagtgcatttag

SEQ ID NO: 34166 - protein, 547 aa, Escherichia coli
MKLLVTYIRWSTKEQDSGDSLRRQTNLIDAFYAKHKEEYYLLPAHRYVDKGKSGFHQQHKAQGSDFRRMFENVMSGVIPEGSLIVVENFDRFSRADIDTAIDDVRQILRKGVSILTLGDGELYDKSALTDPVKLIKHIIIAERAHQESLVKQKRIAQVWNHKTQLARELKKPMGKQAPGWLELSEDGSHYIVDEDKASLVNIIYDKRLSGMSMFAICKWLNEQGYPTINQRKVRISKTKKPDGNWSALSVKHILTSRSVLGYLPAKVSSEDRKTVLREEIEGFYPQIVTDSKFYAVQQLLEETGKGKTSSGEHWLYVNILKGLIRCKCGLVMTPTGIRKPVYQGTYRCNGNKESRCSYGTVSRKLLDTQLCSRLFSKLSQLHDEATDTAKLDELQRRLNTVDSELEKLTETLIQLPNITQIQEALRAKQEEKDELIVQLSREKARVKSVSSLDLSGLDMESVEGRTEAQIIIKRLVKEIVVSGNEKLVDIYLHNGNMIRGFPLDGKDDHTLTLEEATDEMQSLDDMLIFGEPVTRIYPAGDMEEVDA

SEQ ID NO: 34167 - DNA, 50 bp, Escherichia coli; identical to SEQ ID NO: 34162
  source 1..50: mol_type = genomic DNA

SEQ ID NO: 34168 - DNA, 40 bp, Escherichia coli; identical to SEQ ID NO: 27138
  source 1..40: mol_type = genomic DNA

SEQ ID NO: 34169 - DNA, 40 bp, Escherichia coli; identical to SEQ ID NO: 27139
  source 1..40: mol_type = genomic DNA

SEQ ID NO: 34170 - DNA, 50 bp, Escherichia coli; identical to SEQ ID NO: 34165
  source 1..50: mol_type = genomic DNA

SEQ ID NO: 34171 - protein, 547 aa, Escherichia coli; identical to SEQ ID NO: 15881

SEQ ID NO: 34172 - DNA, 50 bp, Escherichia coli; identical to SEQ ID NO: 34162
  source 1..50: mol_type = genomic DNA

SEQ ID NO: 34173 - DNA, 40 bp, Escherichia coli; identical to SEQ ID NO: 27138
  source 1..40: mol_type = genomic DNA

SEQ ID NO: 34174 - DNA, 40 bp, Escherichia coli; identical to SEQ ID NO: 27139
  source 1..40: mol_type = genomic DNA

SEQ ID NO: 34175 - DNA, 50 bp, Escherichia coli; identical to SEQ ID NO: 34165
  source 1..50: mol_type = genomic DNA

SEQ ID NO: 34176 - protein, 465 aa, Enterococcus faecium
MTEKNIMVIPARKRVGSTAAKEKIKKLRVAAYCRVSTETEEQNSSYEVQVSHYTEFIKKNNEWEFAGIFADDGISGTNTKKRDEFNRMIAECMDGNIDMVITKSISRFARNTLDCLQYIRQLKDKNISVYFEKENINTTDAKGEVLLTIMASLAQQESQSLSQNVKLGLQYRYQQGKVQVNHKRFMGYTKDEDGNLTIVPEEAEIIKRIYREYLEGQSLVGIGRALEKDGILTAAGKPRWRPESVKKILQNEKYIGDALLQKTVTVDFLTKKRVKNEGHVPQYYVENSHEAIIPKELFLQAQEEIHRRSNIYTGEGKNKRIYSSKYALSAITFCGDCGDIYRRVYWNIHGRKEFVWRCVTRIEQGPEVCKNRTVKEDELYGAVMTAINKLLAGGNNMIKTLEENIHAVIGETTEYQISEINNSLEEKQKELIKLANKGQDYDHLADEIDELRDKRQILLVEDASL

SEQ ID NO: 34177 - DNA, 50 bp, Enterococcus faecium
  source 1..50: mol_type = genomic DNA
ccttttagtagaagatgcctccctcatcgataacatacgagataaaaagg

SEQ ID NO: 34178 - DNA, 40 bp, Enterococcus faecium
  source 1..40: mol_type = genomic DNA
taaaactttgcaacagaaccagtggcgagaacgagcgaat

SEQ ID NO: 34179 - DNA, 40 bp, Enterococcus faecium
  source 1..40: mol_type = genomic DNA
taaaactttgcaacagaacctgtggcgagaacgagcgaat

SEQ ID NO: 34180 - DNA, 50 bp, Enterococcus faecium
  source 1..50: mol_type = genomic DNA
cattttaatataccatgcctccctcttttaaaaaataaattaaaaaaatc

SEQ ID NO: 34181 - protein, 526 aa, Vibrio parahaemolyticus
MRFVAYLRISSYSQREKGDSIDGQREYIQRWAKSNGHEIVHWYVDEAASAFKGRRFVFDVMLHELSEQIIDANGVVVYSLSRFSRNLKNQLLAMEVLEKKGMILQSASEALPSEPSSFKFMTNILGILHEHQSRENAAVVSDRLRDTARKGFHTGGPLLFGYQSVSVKGDTSKERKKLVVKSDEAEVVKEIYSLSDIGLNGKGLGVKEIAKILNDKKITNRGKRWNKNTIHRILTNSAYKGEFEFGKTQKNEPGKNIIKIPVPKIVSKELYNRVQNKLSERQVAYNNVKSLRSSSLLTGTLRCPVCGSTMVISTGKGGKYKYYQCSLQVRQDPKLCSSKRLRKNEADNALRKALLEHVFTYKHLANIYNDTLEIVKNKKKVSDEKLRPIRNQISSLKTKVRNLVDLIADGKIEPNPAINRNMDEYNAQIALYEEKLDSYKSLASIPIKRFGKAQISSFVDNVQQYVKEANDEKLKQFLLATITEVTITEQKKLVLKGSNLALLYLISNEKVGTDYSVPTFVTIWRR

SEQ ID NO: 34182 - DNA, 50 bp, Vibrio parahaemolyticus
  source 1..50: mol_type = genomic DNA
ccactttcgtcactatatggcggagagagtgggacgaatatgggaactgg

SEQ ID NO: 34183 - DNA, 40 bp, Vibrio parahaemolyticus
  source 1..40: mol_type = genomic DNA
tttttctaaatgtggcggagagatagggatttgaacccta

SEQ ID NO: 34184 - DNA, 40 bp, Vibrio parahaemolyticus
  source 1..40: mol_type = genomic DNA
tttttctaaatgtggcggaaggatagggatttgaacccta

SEQ ID NO: 34185 - DNA, 50 bp, Vibrio parahaemolyticus
  source 1..50: mol_type = genomic DNA
acactttggtgaggataaggaggcaggagttggacaaaggtgggagatgg

SEQ ID NO: 34186 - protein, 526 aa, Vibrio alginolyticus; identical to SEQ ID NO: 34181

SEQ ID NO: 34187 - DNA, 50 bp, Vibrio alginolyticus; identical to SEQ ID NO: 34182
  source 1..50: mol_type = genomic DNA

SEQ ID NO: 34188 - DNA, 40 bp, Vibrio alginolyticus
  source 1..40: mol_type = genomic DNA
tttttctaaaagtggcggagagatagggatttgaacccta

SEQ ID NO: 34189 - DNA, 40 bp, Vibrio alginolyticus
  source 1..40: mol_type = genomic DNA
tttttctaaaagtggcggaaggatagggatttgaacccta

SEQ ID NO: 34190 - DNA, 50 bp, Vibrio alginolyticus; identical to SEQ ID NO: 34185
  source 1..50: mol_type = genomic DNA

SEQ ID NO: 34191 - protein, 526 aa, Vibrio alginolyticus
MRFVAYLRISSYSQREKGDSIDGQREYIQRWAKSNGHEIVHWYVDEAASAFKGRRFVFDVMLHELSEQIIDANGVMVYSLSRFSRNLKNQLLAMEVLEKKGMILQSASEALPSEPSSFKFMTNILGILHEHQSRENAAVVSDRLRDTARKGFHTGGPLLFGYQSVSVKGDTSKERKKLVVKSDEAEVVKEIYSLSDIGLNGKGLGVKEIAKILNDKKITNRGKRWNKNTIHRILTNSAYKGEFEFGKTQKNEPGKNIIKIPVPKIVSKELYNRVQNKLSERQVAYNNVKSLRSSSLLTGTLRCPVCGSTMVISTGKGGKYKYYQCSLQVRQDPKLCSSKRLRKNEADNALRKALLEHVFTYKHLANIYNDTLEIVKNKKKVSDEKLRPIRNQISSLKTKVRNLVDLIADGKIEPNPAINRNMDEYNAQIALYEEKLDSYKSLASIPIKRFGKAQISSFVDNVQQYVKEANDEKLKQFLLATITEVTITEQKKLVLKGSNLALLYLISNEKVGTDYSVPTFVTIWRR

SEQ ID NO: 34192 - DNA, 50 bp, Vibrio alginolyticus; identical to SEQ ID NO: 34182
  source 1..50: mol_type = genomic DNA

SEQ ID NO: 34193 - DNA, 40 bp, Vibrio alginolyticus; identical to SEQ ID NO: 34188
  source 1..40: mol_type = genomic DNA

SEQ ID NO: 34194 - DNA, 40 bp, Vibrio alginolyticus; identical to SEQ ID NO: 34189
  source 1..40: mol_type = genomic DNA

SEQ ID NO: 34195 - DNA, 50 bp, Vibrio alginolyticus; identical to SEQ ID NO: 34185
  source 1..50: mol_type = genomic DNA

SEQ ID NO: 34196 - protein, 519 aa, Vibrio ishigakensis
MKTCDSLVRVSTKKQSTDTKTGLVRQSDNVQSWLSRNPDYELRNVIELKGVSGFSGKHLQGEFGSYLDDLENNVLACPDAFLVDEMSRLTRLPLQQGIALVNRFSALGVTLVFVAEGQTYSPSSSDDLGSFLALTVRLHQAHEESQRKSRMLRSARLQETKSYASGGLVKNRLPNWITISDNQYVVDEVKADAIRYLHKLYQSNHTYSDILKIFKAESVPVVSIRSRDWSTAVIKNLLTASTTYGLLTRNHADREPQTFENHFPAVISKECYDLTQALIASKKGTRSGGVGKNFNNIFRGCIVCADCGYSVSVKRNSQGRVYMSCEGRNRRGYTVADCKNGGYLQQTLIARVLYILKHERLVDSSTPSEDLPELRLQLSTQQAEYTKFKGRLALIDEDLLPEFQQELRNKKQLLSDLENRIQKATVTTGTAFDLDAELDNLSRIDITTPDGRRNLNKHLSRRFKFSYSTTKGLIGVRALDSEYWCYHDLEGETFAELYEFFTRDAQEDSGDGSEDFTYG

SEQ ID NO: 34197 - DNA, 50 bp, Vibrio ishigakensis
  source 1..50: mol_type = genomic DNA
aagtgtggaacaaaattaaatctgaggataaactcttgttctacactttt

SEQ ID NO: 34198 - DNA, 40 bp, Vibrio ishigakensis
  source 1..40: mol_type = genomic DNA
cgactcgtcctatacgtaaaagataaatgcccgcactgta

SEQ ID NO: 34199 - DNA, 40 bp, Vibrio ishigakensis
  source 1..40: mol_type = genomic DNA
cgactcgtcctatacgtaatagataaatgcccgcactgta

SEQ ID NO: 34200 - DNA, 50 bp, Vibrio ishigakensis
  source 1..50: mol_type = genomic DNA
tggggtggaattacattaaatctatagatcaactgggatagaacattttt

SEQ ID NO: 34201 - protein, 532 aa, Escherichia coli
MKVPVWSYARISTLKQVDGFGIQRQVNTINQFLQYVVLDHRLPFTLDTENITQMVAEGKSAFRGKNWNVKTKLGQYRKMVMDGVINDSVLIVENIDRLTRLDPFQAVEIISGLINRGTTILEIETGMTYSRYIPESITVLTMQINRANGESKRKSIMMQKSHQNRYGNVSKVRPRWFDVVEIDGVKQYRTNETAKAIQRMYNDYINGIGAAQIVRTYGNTDNGKPWTLVTVLRALSDKRVADDARYPPIIDKDLYDRVQALKASTNKKGNTHQKNMLNIFSGMSRCPVCNQSIIVKRNSHGNLFTVCLGKRTNKTCEARSIAYNALERPLLMAIRGLDFSEVYKHEDNNVLTLRDQWIQNERDIAAFRERLNKASRHEKFAILDELEIMNREQEELTIRLKSVDVPKDIQLTFDDDKLDLDTNYRIELNNRIKKLIQHINIVREDVSKSKYTIYCTIKYWSDALSHLVIIDVDIQRTGTGGTNTLTTTLRSVSSLSLDGTLSGDLDDDALGYWKNVVDGAMALATRMIDSRK

SEQ ID NO: 34202 - DNA, 50 bp, Escherichia coli
  source 1..50: mol_type = genomic DNA
tggcgtacatactttaccaactacgaacagttatgataggatgtacacca

SEQ ID NO: 34203 - DNA, 40 bp, Escherichia coli; identical to SEQ ID NO: 34068
  source 1..40: mol_type = genomic DNA

SEQ ID NO: 34204 - DNA, 40 bp, Escherichia coli
  source 1..40: mol_type = genomic DNA
cggtcccatcagcagcaatttacagtcagtcgtaccaccg

SEQ ID NO: 34205 - DNA, 50 bp, Escherichia coli
  source 1..50: mol_type = genomic DNA
tggcctaaaaattttaactactacttacatttatgaaaaagtatccatta

SEQ ID NO: 34206 - protein, 532 aa, Escherichia coli
MKVQVWCYARISTLKQVDGFGIQRQVNTINQFLQYVVLDHRLPFTLDTENITQMVAEGKSAFRGKNWNEKTLLGKYRKMVMDGVINDSVLIVENIDRLTRLDPFQAVEIISGLINRGTTILEIETGMTYSRYIPESITVLVMQCNRANGESKRKSIMMQKSHANRYGKVSKVRPRWFDVVDIDGVKQYRTNDTAKAIQRMYNDYINGIGAAQIVRTYGNTDNGKPWTLVTVLRALSDKRVADDARYPSIIDKDLYDRVQALKASTNKKGNTHQKNMLNIFSGMSRCPVCNQSIIVKRNSHGNLFTVCLGKRTNKTCEARSIAYNALERPLLTAIRGLDFSEVYKHEDNNVLTLRDQWIQNERDIAAFRERLNKASRHEKFAILDELEIMNREQEELTIRLKSVDVPKDIQLTFDDDKLDLDTNYRIELNNRIKKLIQHINIVREDVSKSKYTIYCTIKYWSDALSHLVIIDVDIQRTGTGGTNTLTTTLRSVSSLSLDGTLSGDLDDDALEYWKNVVDGAMELATTMIDSRK

SEQ ID NO: 34207 - DNA, 50 bp, Escherichia coli; identical to SEQ ID NO: 34202
  source 1..50: mol_type = genomic DNA

SEQ ID NO: 34208 - DNA, 40 bp, Escherichia coli; identical to SEQ ID NO: 23868
  source 1..40: mol_type = genomic DNA

SEQ ID NO: 34209 - DNA, 40 bp, Escherichia coli
  source 1..40: mol_type = genomic DNA
cggccccatcagcagcaatttacagtcagtcgtaccaccg

SEQ ID NO: 34210 - DNA, 50 bp, Escherichia coli; identical to SEQ ID NO: 34205
  source 1..50: mol_type = genomic DNA

SEQ ID NO: 34211 - protein, 490 aa, Bacillus thuringiensis
MYELKYAVYVRVSTDKDEQVSSIQNQIEICRYWIEKNGFEWDENSIYKDEAVSGTAWLERHAMQLILEKVRRKELDTVVFKSIHRLGRDLRDALEIKEILLGHGVRLVTIEEGYDSYYEGKNDLKFEMYAMFASQLPKTVSVSVSAALAAKVRRGEYTGGIVPYGYKIVDQKYTINEDEAELVKKMYELYDNGLGYMKIADAINDMGVPSRTGKLWAYPSIRAIITNAAYKGDYIMQKYAEVKVDGRKKMIINPKEKWVVFENHHPAIITRDLWDKVNNPKTDKKTKRRVAINNELRGLACCAHCGTPLALQQRMYKNKEGETRYYCYLICGRYKRMGARGCVKHSGLQYSDLRLFVLQKLKEKENDLEKVFNLNDTDKHQEKQKKLRKEKKELEIKRERLLDLYLDGGPIDKETFTKRDKNFEKIIKEKELEILKLDDVKALVVEQQKVKEAFELLEESKDLYSTFKKLITRIEVNQDGVINIVYRFEE

SEQ ID NO: 34212 - DNA, 50 bp, Bacillus thuringiensis
  source 1..50: mol_type = genomic DNA
ttttatccttattgacatatgaggaatcccatgtataattaggggataaa

SEQ ID NO: 34213 - DNA, 40 bp, Bacillus thuringiensis
  source 1..40: mol_type = genomic DNA
atttatcttttacaatgccaagcgggtatagcgggaagaa

SEQ ID NO: 34214 - DNA, 40 bp, Bacillus thuringiensis
  source 1..40: mol_type = genomic DNA
atttatcttttacaatgccatgcgggtatagcgggaagaa

SEQ ID NO: 34215 - DNA, 50 bp, Bacillus thuringiensis
  source 1..50: mol_type = genomic DNA
tttaatcctcaaaaaaatatgaggattcacatattgtcatatgtgagaaa

SEQ ID NO: 34216 - protein, 546 aa, Clostridium leptum
MNQQPDKITALYCRLSQDDALDGESNSITNQKALLSKYAAEHGFRNPMFFVDDGFSGTNFQRPGFQEMMKYVEDYSVSTLIVKDLSRLGREYSYMGRLQDFIFPAYDVRFIAINDDVDSAKGENDFAVFKNVFNDYYAKDTSKKIRAVVKMRGEAGEHIASNPPYGYVKDPQNKKKWIVDEEAAKVVRRIFDLCIAGKGPMQIAKILTADRVLTVTAYNARQKGWAMPDNLYRWCAKSVAGILERPEYTGCTVNFKTYTKSLKFKKRMENPKENQRIFEDTQPAIIERGQWERVQALRANKRRPTKTGKTSIFSGLVYCADCGAKLYYCTCNTYKDESQDHFVCSNYKSNTGSCQIHYIREVTLYKRVLECIQRTLTYVRLFRDDFTQEMLAQDEASRKAELTQKRKALSGTQKRMEDLDKIIQRLYEDSVLGKLSDLRFQKLSAQYETEQAEIQQLAASLEREIENEAGQIADVGRFLQLADRYSDLQELDASTVNELIEKIVVHSPEKISGKKHVTIEVYFTYVGKIRIPLAKPELLTDTEKPA

SEQ ID NO: 34217 - DNA, 50 bp, Clostridium leptum
  source 1..50: mol_type = genomic DNA
ttacttccttatgggcctccggctaatgacagtagcccataaggaaacat

SEQ ID NO: 34218 - DNA, 40 bp, Clostridium leptum
  source 1..40: mol_type = genomic DNA
cacaaaaaagctcctgcgaaaagcaggagcttttttattg

SEQ ID NO: 34219 - DNA, 40 bp, Clostridium leptum
  source 1..40: mol_type = genomic DNA
cacaaaaaagctcctgcgaagagcaggagcttttttattg

SEQ ID NO: 34220 - DNA, 50 bp, Clostridium leptum
  source 1..50: mol_type = genomic DNA
tttcttccttcagagccttttgctagtggaagaagctgagaatgaaaaat

SEQ ID NO: 34221 - protein, 657 aa, Leclercia adecarboxylata
MTKLYSYIRWSSERQANSTTLERQMSSAREFAREMDLELVEIIDPGVSAYRGKNANEGKLADFISAVEAGMIDRDSWLYVENLDRITRQSPTKAQTLFIKLLDLGLTVVTGMDRRIYTLQSVNDNPTELMVSLLLFSRSHEESKTKGNRTKGNVLALVKRFREEGLPVNIKSVGKHPWWIDDSGTQYEAVRKHEQYWPIAREIIDLFLSGQGAYKVKRHLDNTYPNGFIGGAEWDYQMLVRMRKSRALIGERTITLNKKNKSTKDKDIWKEITTDKEVTYILKNYYPSLCIDEVEFIKLQEVKNQNEYQSKDSTGTVNIKLLSGLGILRCGKCGGTMNSFMNKGKPRYICTNGRHLGKNCTGWSVNGLLIDHCSIIALIIGYMDTNNKGGVDTSQIEKMIEVGNEKLATLDNSINNISEAIEKGFNIDQMVTKGIALQQERERVISELDRLVKKKIALDGKGTFEMAMLDFLTLVQWEVIENTDHEVRNKIRGVINSIIETVIVNKIDGCISISIKLIGTDVFFVFSGDGRKPKWKFDISYGSGQGIEDESISTVMDAIKGSELMEKATEHLNNIRQSYLDLLDNVTNQMLPVLGYPDIDGKQFWPNTSGNERIAVNYNGQRYTLVAKGTLPADVALLIKESGLKRKDFIEKFRITN

SEQ ID NO: 34222 - DNA, 50 bp, Leclercia adecarboxylata
  source 1..50: mol_type = genomic DNA
tggtttggatttttatcattcgggcaccctaaagatataaatccaatttt

SEQ ID NO: 34223 - DNA, 40 bp, Leclercia adecarboxylata
  source 1..40: mol_type = genomic DNA
atccaccaggtttttcggacagcccagcgagacgaagccg

SEQ ID NO: 34224 - DNA, 40 bp, Leclercia adecarboxylata
  source 1..40: mol_type = genomic DNA
atccaccaggtttttcggatggcccagcgagacgaagccg

SEQ ID NO: 34225 - DNA, 50 bp, Leclercia adecarboxylata
  source 1..50: mol_type = genomic DNA
tggatttgcttaggatcattgagatgacctgaaaattagcctccaatttt

SEQ ID NO: 34226 - protein, 657 aa, Leclercia adecarboxylata
MTKLYSYIRWSSERQANSTTLERQMSSAREFAREMDLELVEIIDPGVSAYRGKNANEGKLADFISAVEAGMIDRDSWLYVENLDRITRQSPTKAQTLFIKLLDLGLTVVTGMDRRIYTLQSVNDNPTELMVSLLLFSRSHEESKTKANRTKGNVLALVKRFREEGLPVNIKSVGKHPWWIDDSGTQYEGVRKHEQYWPIAREIIDLFLSGQGAYKVKRHLDNTYPNGFIGGAEWDYQMLVRMRKSRALIGERTITLNKKNKSTKDKDIWKEITTDKEVTYILKNYYPSLCIDEVEFIKLQEVKNQNEYQSKDSTGTVNIKLLSGLGILRCGKCGGTMNSFMNKGKPRYICTNGRHLGKNCTGWSVNGLLIDHCSIIALIIGYMDTNNKGGIDTSQIEKMIEVGNEKLATLDNSINNISEAIEKGFNIDQMVTKGIALQQERERVISELDRLVKKKIALDGKGTFEMAMLDFLTLVQWEVIENTDHEVRNKIRGVINSIIETVIVNKIDGCISISIKLIGTDVFFVFSGDGRKPKWKFDISYGSGQGIEDESISTVMDAIKGSELMEKATEHLNNIRQSYLDLLDNVTNQMLPVLGYPDIDGKQFWPNTSGNERIAVNYNGQRYTLVAKGTLPADVALLIKESGLKRKDFIEKFRITN

SEQ ID NO: 34227 - DNA, 50 bp, Leclercia adecarboxylata; identical to SEQ ID NO: 34222
  source 1..50: mol_type = genomic DNA

SEQ ID NO: 34228 - DNA, 40 bp, Leclercia adecarboxylata; identical to SEQ ID NO: 34223
  source 1..40: mol_type = genomic DNA

SEQ ID NO: 34229 - DNA, 40 bp, Leclercia adecarboxylata; identical to SEQ ID NO: 34224
  source 1..40: mol_type = genomic DNA

SEQ ID NO: 34230 - DNA, 50 bp, Leclercia adecarboxylata; identical to SEQ ID NO: 34225
  source 1..50: mol_type = genomic DNA

SEQ ID NO: 34231 - protein, 530 aa, Anaerobutyricum hallii; identical to SEQ ID NO: 1636

SEQ ID NO: 34232 - DNA, 50 bp, Anaerobutyricum hallii; identical to SEQ ID NO: 1637
  source 1..50: mol_type = genomic DNA

SEQ ID NO: 34233 - DNA, 40 bp, Anaerobutyricum hallii
  source 1..40: mol_type = genomic DNA
tggaaataattatggttcacatcagggagattctctgctg

SEQ ID NO: 34234 - DNA, 40 bp, Anaerobutyricum hallii; identical to SEQ ID NO: 34233
  source 1..40: mol_type = genomic DNA

SEQ ID NO: 34235 - DNA, 50 bp, Anaerobutyricum hallii
  source 1..50: mol_type = genomic DNA
tttttcccctttctacaaagaacacatgtccatgtttcctcagtgaaaac

SEQ ID NO: 34236 - protein, 530 aa, Anaerobutyricum hallii; identical to SEQ ID NO: 1636

SEQ ID NO: 34237 - DNA, 50 bp, Anaerobutyricum hallii; identical to SEQ ID NO: 1637
  source 1..50: mol_type = genomic DNA

SEQ ID NO: 34238 - DNA, 40 bp, Anaerobutyricum hallii
  source 1..40: mol_type = genomic DNA
tggaaataactatggctcacacagaggagattccctgctg

SEQ ID NO: 34239 - DNA, 40 bp, Anaerobutyricum hallii; identical to SEQ ID NO: 34238
  source 1..40: mol_type = genomic DNA

SEQ ID NO: 34240 - DNA, 50 bp, Anaerobutyricum hallii; identical to SEQ ID NO: 34235
  source 1..50: mol_type = genomic DNA

SEQ ID NO: 34241 - protein, 530 aa, Ruminococcus gnavus; identical to SEQ ID NO: 1636

SEQ ID NO: 34242 - DNA, 50 bp, Ruminococcus gnavus; identical to SEQ ID NO: 1637
  source 1..50: mol_type = genomic DNA

SEQ ID NO: 34243 - DNA, 40 bp, Ruminococcus gnavus
  source 1..40: mol_type = genomic DNA
tggaaatacatacggttcccatgaaggaacttctctgttg

SEQ ID NO: 34244 - DNA, 40 bp, Ruminococcus gnavus; identical to SEQ ID NO: 34243
  source 1..40: mol_type = genomic DNA

SEQ ID NO: 34245 - DNA, 50 bp, Ruminococcus gnavus; identical to SEQ ID NO: 34235
  source 1..50: mol_type = genomic DNA

SEQ ID NO: 34246 - protein, 530 aa, Blautia luti; identical to SEQ ID NO: 1636

SEQ ID NO: 34247 - DNA, 50 bp, Blautia luti; identical to SEQ ID NO: 1637
  source 1..50: mol_type = genomic DNA

SEQ ID NO: 34248 - DNA, 40 bp, Blautia luti
  source 1..40: mol_type = genomic DNA
tgggaataattatggttcacacagaggggattcccttctg

SEQ ID NO: 34249 - DNA, 40 bp, Blautia luti; identical to SEQ ID NO: 34248
  source 1..40: mol_type = genomic DNA

SEQ ID NO: 34250 - DNA, 50 bp, Blautia luti; identical to SEQ ID NO: 34235
  source 1..50: mol_type = genomic DNA

SEQ ID NO: 34251 - protein, 598 aa, Ruminococcus gnavus; identical to SEQ ID NO: 11241

SEQ ID NO: 34252 - DNA, 50 bp, Ruminococcus gnavus; identical to SEQ ID NO: 11242
  source 1..50: mol_type = genomic DNA

SEQ ID NO: 34253 - DNA, 40 bp, Ruminococcus gnavus
  source 1..40: mol_type = genomic DNA
tgcctccaagtgtgtggaaaacgaaatcctgatgcatttg

SEQ ID NO: 34254 - DNA, 40 bp, Ruminococcus gnavus
  source 1..40: mol_type = genomic DNA
tgcctccaagtgtgtggaagccgaaatcctgatgcatttg

SEQ ID NO: 34255 - DNA, 50 bp, Ruminococcus gnavus
  source 1..50: mol_type = genomic DNA
aaactaatttctgtgagcctcggggctgctctcctgtgtaaaatggggat

SEQ ID NO: 34256 - protein, 598 aa, Ruminococcus gnavus; identical to SEQ ID NO: 11241

SEQ ID NO: 34257 - DNA, 50 bp, Ruminococcus gnavus; identical to SEQ ID NO: 11242
  source 1..50: mol_type = genomic DNA

SEQ ID NO: 34258 - DNA, 40 bp, Ruminococcus gnavus
  source 1..40: mol_type = genomic DNA
tgcctccaagtgtgtggaaaacgaaatcctgatgcatctg

SEQ ID NO: 34259 - DNA, 40 bp, Ruminococcus gnavus
  source 1..40: mol_type = genomic DNA
tgcctccaagtgtgtggaagccgaaatcctgatgcatctg

SEQ ID NO: 34260 - DNA, 50 bp, Ruminococcus gnavus; identical to SEQ ID NO: 34255
  source 1..50: mol_type = genomic DNA

SEQ ID NO: 34261 - protein, 501 aa, Ruminococcus albus
MSYCIYLRKSRADTELERLGEGETLARHKRTLLSLAQSKSYAIGEIYEEIVSGETIAARPQMQRLLSDVEQGRWDGVLVMELERLARGDSIDQGIVAQTFRITGTLIITPNKVYNPLNEFDEEYFEFGLFMSRREYKTINRRLQAGRIASIKEGNYIGSAAPFGYNKVRLDNGKGFTLEENDESPYVKMIFDWYVNSGMTAGKIAEKLTLMGVTPKKGGSHFPTESVRSILRNRLYTGKITWNWRPVKKTVEHGMVKRSRPRNDESDMIIVDGIHPALISEELFEAAQERTGLNPRVAVSRELVNPFAHVMVCKGCGNAIIRKPSKKNPDYLICPNKYCGVSSAPFDIVEKQVLERLAEICGKLKLQSDKANKSQEDTNTLQIDKIEKELAKLKDQQNKLYDLLEQGIYSQEIFLERQQVLNDKRSSMQKELVELRSKIPAPVDYTDIIASIERLLSEYATLSVAEKNSLLCSCVRKITYYRDKSNRYDQKPVSMEIELKV

SEQ ID NO: 34262 - DNA, 50 bp, Ruminococcus albus
  source 1..50: mol_type = genomic DNA
actttacaacatcgtggtgcaaacgaactggctccacgaacatacaagta

SEQ ID NO: 34263 - DNA, 40 bp, Ruminococcus albus
  source 1..40: mol_type = genomic DNA
gacggatatcggtacggaagaactggctcatatggagatg

SEQ ID NO: 34264 - DNA, 40 bp, Ruminococcus albus
  source 1..40: mol_type = genomic DNA
gacggatatcggtacggaacaactggctcatatggagatg

SEQ ID NO: 34265 - DNA, 50 bp, Ruminococcus albus
  source 1..50: mol_type = genomic DNA
cttttaaaagaaattgctgcaagccagctggctcctaggggacacaagga

SEQ ID NO: 34266 - protein, 501 aa, Mycobacterium kansasii
MAATAKEQVRAACYCRISSDPKDKREGVDRQREDTTALCEVKGWTPVGFYIDNDRSASNGKPRPEWDRLLADVRAGKIDAVAAWDQDRVNRMMEDFVAYKRLFTERGILLATSNNGDIDLSTPSGVLTATIKTAVSEHEIAMMRVRQLRAARQRAERGLPKWKRAFGYIPDARSKEDDDGTRQVDEKVQQLVKAAYAAVLAGSSLGDIARMFNEAGAYGERWVKPKDADGNPIKDAKSELKRHPWTASTVSLFLRKPRNAGLRDHNDELVYGKDGKPVKGTWPPLVEERLWNSVQAKLNEPGRAPGRKTVRQHLLTGLLQCGKPGCGGYLSGYQTAKGVAAYRCKSCRGVAIRTADVEPLMNELVSGRLAKPDAVDLLKAEIHDEAEAEKLRTELNALYGELEQIGVERGQRLLTGQQAKIATDLINADIKELERRQQDQERVRVFEGLPLGKPEVADAVAKLSPDRFRAVLDVLCTATVMPVGKGSHTFNPKRVRVDPKQ

SEQ ID NO: 34267 - DNA, 50 bp, Mycobacterium kansasii
  source 1..50: mol_type = genomic DNA
aaaggtactttagctagccggtaacattaccggtttgccgtagtacactt

SEQ ID NO: 34268 - DNA, 40 bp, Mycobacterium kansasii
  source 1..40: mol_type = genomic DNA
tagatgcctatgccgaaaacattagcggctgaagacattt

SEQ ID NO: 34269 - DNA, 40 bp, Mycobacterium kansasii
  source 1..40: mol_type = genomic DNA
tagatgcctatgccgaaaaagttagcggctgaagacattt

SEQ ID NO: 34270 - DNA, 50 bp, Mycobacterium kansasii
  source 1..50: mol_type = genomic DNA
aaatgtactttttgtagcgtttaaaggtacttttttttactagtaaactt

SEQ ID NO: 34271 - protein, 514 aa, Vibrio lentus
MKDNKGLAYLYIRFSTKKQEQGDSLRRQIEVAEKWCSENNIELSAQTYEDLGVSAFKEGGKRPALEDLIAAIRMGKIVRGSYLLIEDHDRLSRRGWRHTQELVHQLVLSGVRLVMLKDGKVYDSSNIDNIFDNIMLMLSAERAQEESERKSRLIKASREKARRDKKVTGKLPAWISRDGDGFTFNDKKATIQELINCKLAGKSHQSTAKHLNSLKMTTGNDSAWSASGVRAIIQNHALYGAKAYFDTGKDGRMNKEPIEIISDIFPALITHEQYQVLNTRQQAGRTSKRGAYSRLLKCGACGGAMTTRTSNYKGKPRAYKMCVRATEGSCNQIERIREPEVYLNQALHFLKYESSSTLYVSRTSEYQQRLETLNATVDLLTKNGNVDALARVYTDIKEVSDLIEESKAQDQNNVDVKVDFNLISNIEDVEQRNIELRKVLREIRFYCIEKVGQTSKWKVVIEQINGIKKYLVLDQQYGFGNTVVDYASLLTQGTEDNREPWEIEDSEECESYSY

SEQ ID NO: 34272 - DNA, 50 bp, Vibrio lentus
  source 1..50: mol_type = genomic DNA
gtgcattgtaataagcatgttactaaagtactatacagattataatgcac

SEQ ID NO: 34273 - DNA, 40 bp, Vibrio lentus
  source 1..40: mol_type = genomic DNA
atttggctggcacgtagttaaggttctttacagaacttag

SEQ ID NO: 34274 - DNA, 40 bp, Vibrio lentus
  source 1..40: mol_type = genomic DNA
atttggctggcacgtagttgtggttctttacagaacttag

SEQ ID NO: 34275 - DNA, 50 bp, Vibrio lentus
  source 1..50: mol_type = genomic DNA
gtgcatggcccacagtaagtaaatgtagtactttatggtttataaagcac

SEQ ID NO: 34276 - protein, 514 aa, Vibrio vulnificus
MNNNKALAVLYVRFSTKKQEAGDSQRRQIESAEQWCERNNAELSAQTYEDLGVSAFKEGGKRPALEDLINAIRMGKIPRDSYLLIEDHDRLSRRGWRYTQDLVYQLVQLGVRLVMLKTGVVYDADNINNIADNIVLMISAERAHQESERKSHLIKASREKARRDKKVTGKLPAWVSRDGDGFTFNDKKATIQELINCKLSGKSHQSTAKHLNSLKMTTGNDSAWSASGVRAIVQNHALYGAKAYFDTGKDGRMNKEPIEIVSDIFPALITYEQYQVLNKRQQAGRTSKRGAYSRLLKCGACGGAMTTRTSNYKGKPRAYKMCVKATEGSCNQVERIREPEVYLNEALHYLKYESSSTLYVSRTSEYQQRLETLNATVDLLTKNGNIEALARVYTDIKEVSDLIEESKVLDQNNVDVKVDFSLISSIEDVEQRNIELRKVLREIRFYCIEKVGQTSKWKIVIEQINGIKKYLVLDQKYGFGNTVVDYASLLTQGTEDNREPWEIEDSEEWESYSY

SEQ ID NO: 34277 - DNA, 50 bp, Vibrio vulnificus
  source 1..50: mol_type = genomic DNA
gtgcattgcaatgagcacgttactaaagtactatacagattatgatgcac

SEQ ID NO: 34278 - DNA, 40 bp, Vibrio vulnificus; identical to SEQ ID NO: 5483
  source 1..40: mol_type = genomic DNA

SEQ ID NO: 34279 - DNA, 40 bp, Vibrio vulnificus
  source 1..40: mol_type = genomic DNA
gttcggttggcacgtgttggtggtgttgtacagaacctaa

SEQ ID NO: 34280 - DNA, 50 bp, Vibrio vulnificus; identical to SEQ ID NO: 34275
  source 1..50: mol_type = genomic DNA

SEQ ID NO: 34281 - protein, 594 aa, Priestia aryabhattai
MDDFQSLFKDMSSRPKRKGNVINKAEKKKDKYGILVRVSTDMQVEDGDSIQMQKELAGDIVTKNEGVIHDWYIEEGISASKNRIAQRPELQRLLDDIESGIVTKLVAYKRDRLTRNTGDWLQILEICAKNQCDIIFSASGEAQLFNDPVYGKVFETILGSISEMESANTSMRVRDTMSSLAKSGEWTGGTLPYGYVKNEFDQIEIEEDKVAIVDEIVDLYLSGLGLYSIVKWLNGELVKTLGRREGGAVKKEAAHKARVTHWTKSSVESVLFNPFYAGVIEYSKEGHKAYQKDETKFVRAQGKHPAMRTLEKQREIYKMREKKSLRPARSYNTTFLFSDLIVCGYCGEKYQTRNTTKNGNQYSYYCCSSRHNSSKTGVGHHCLNKNYKKSILEDFLIGHLKDYLKQLSFASMSDYLSENMNKQKSGVKKSIEAIDDDLKKLAQDEEKILRLLMDLDLSSPLYETFKEKYETEYARVLSEVAEKKKAKYEMESSLTEKEDNELSTKRAMEVMKDFTKAIDTASMQKKRMLIDKIINKIVLHADGTCDIELFAPIAAVENPQNNNGGASNNGEDNGNGENLDNSGNPVIINDSFGD

SEQ ID NO: 34282 - DNA, 50 bp, Priestia aryabhattai
  source 1..50: mol_type = genomic DNA
gttattattaatgactcgttcggagatgcgattaagccaaaaataataac

SEQ ID NO: 34283 - DNA, 40 bp, Priestia aryabhattai
  source 1..40: mol_type = genomic DNA
tgcacacagcttaatgggagaccctaacgcttcaattcca

SEQ ID NO: 34284 - DNA, 40 bp, Priestia aryabhattai
  source 1..40: mol_type = genomic DNA
tgcacacagcttaatgggaagccctaacgcttcaattcca

SEQ ID NO: 34285 - DNA, 50 bp, Priestia aryabhattai
  source 1..50: mol_type = genomic DNA
catattatttttcgctcatttggaagtgtggttaagtccataataccagc

SEQ ID NO: 34286 - protein, 577 aa, Rahnella aquatilis
MTTRRPHVYTRISKTTQTEGSGLDEQTTRIEQYLESKKHLFEGEVTYWQDIGLSAYKNKNIQDGQLAEFIKQVDEGKIGEGDALIIYSLDRLSRRSSWDETTIQHLVKKGVEIHDVSTPVVLNREDSMSKIIMELIVTRGNNESKIKSERSTAGWEKRLNDTLNDGRVFTRKLPRWLGSNDDEYVVIKEEAEIIQRIFREYTNGMTSPMIARRLNEEGIKSTGESLWRPTTVTKLIKDERLRGNLVREKITLIPNVFPKIIDDELFVLANRILSTNAVGKKGRPRENNKTREVNNIITGLVRCGKCGSKVTTSKNGRGMRYIVCLARLNYLICGQKSIRLEEVEKIVINHVKQVDMNKVLSISNVDTTSEALLQAELIELEIEEQKCNDKIEERKRLKQRTSLPLATALTDIQDRIEEVKSNLLNLQVQEPLPDISNVDLLALMDVSNVELRMSLRKYLIQTVETITFRYLDEHCLIELNYKNDVYRHVVVTTKKLEVLHDIGIERTGDVVIYSTGSFSIIEDESAGVCTFSGLNNVETKAYFLLANYMGVLEGKQWIVDWMYEKENMECVIGSTPH

SEQ ID NO: 34287 - DNA, 50 bp, Rahnella aquatilis
  source 1..50: mol_type = genomic DNA
atgtgtaaaatacttgtggaaaccgtggttttaagttagtatacacacct

SEQ ID NO: 34288 - DNA, 40 bp, Rahnella aquatilis
  source 1..40: mol_type = genomic DNA
ctggcgaaattccgaaaccgtggttatcgggcaggcgcag

SEQ ID NO: 34289 - DNA, 40 bp, Rahnella aquatilis
  source 1..40: mol_type = genomic DNA
ctggcgaaattccgaaaccctggttatcgggcaggcgcag

SEQ ID NO: 34290 - DNA, 50 bp, Rahnella aquatilis
  source 1..50: mol_type = genomic DNA
atgtgaaaagggtatgtaaaaaccctgcttctcagtaaaaatccaccccc

SEQ ID NO: 34291 - protein, 484 aa, Bacillus thuringiensis
MKYAVYVRVSTDRDEQVSSVENQIDVCRYWLDQHGYDWDENSIYFDDGITGTVLLERHAMQLILEKAKKRELQMVLFKSIHRLARDLKDALEIKEILIANGIRLVTIEEGYDSHYEGKNDMKFEMFAMFASQYPKTLSVSISAALSAKVRRGEHTGGRLPFGYSDREKKYVINEEEAEIVREIYDMYSKGIGYIGIAKILNERGIPSKTGGKWQMSSVQRIIKNPIYKGDYILNQYTTVKISGRKKQIKNPEEKWTIFKKHHPAIVSEEQWELVNKPRSAKKRRPALWNEFRGIMFCAHCGSAMQVVYSAKKKKDGTKEEWRYLKCSRYKRYGSDECVRHAPIQYHEFREFILENLKEKEKQLETEFNLNEDSSNAEKKNKLQREIQRIEEKRKKLIDLYMEELIEKEEFLSRRNELEKTIKEKEVQFVSMEDKSEVKRTQDEFRKAFALLDESKNLYEEFKRIIDRIEIFENGDIKIVYRIEM

SEQ ID NO: 34292 - DNA, 50 bp, Bacillus thuringiensis; identical to SEQ ID NO: 12792
  source 1..50: mol_type = genomic DNA

SEQ ID NO: 34293 - DNA, 40 bp, Bacillus thuringiensis
  source 1..40: mol_type = genomic DNA
agttcgcaaccatatctcaaacgcaatgcaaaagctaggg

SEQ ID NO: 34294 - DNA, 40 bp, Bacillus thuringiensis
  source 1..40: mol_type = genomic DNA
agttcgcaaccatatctcaagcgcaatgcaaaagctaggg

SEQ ID NO: 34295 - DNA, 50 bp, Bacillus thuringiensis; identical to SEQ ID NO: 8485
  source 1..50: mol_type = genomic DNA

SEQ ID NO: 34296 - protein, 514 aa, Marinovum algicola
MNLQEKQQDQGVRYAVIYCRVSSTKQTTRGDGLGSQETRCREFAKYKGYEIVEVFGDDMSGSVTARPGMSSLLSFLRKTRNEPHAVIIDDISRLARGLMAHFELRMEIENAGGVLVSPSIEFGKDSDSQLVENLLASVSQHQRQKNGEQTINRMRARTQNGYWVFQAPVGYRYERSSGHGKILVRDEPKASILEEALEGYASGRFETQVEVKRFLERQPAWPKDLPNGEIRNQRVYELLTRVIYAGYVEVPNWGVSLREGKHEGLISLQTFEKIQSRLQSTAKAPARKDISADFPLRGFILCNDCGKPLTACWSKGKNKKYPYYLCPTKGCDSYRKSIKRDALEGEFEALLDRLEPSEGLFELVRAMFKDAWEMRLAQASEAASGLKASIRSLDKQIDRLLDRIVEASNTSLVTAYEKKISKLEREKALVSEQLATSGKPRHTFEESFEHALRFLANPWKIWKNADIVGQKTVLRLAFSEPLPYCRKEGLRTPNLAFPFKALGSFCGEKSEMAH

SEQ ID NO: 34297 - DNA, 50 bp, Marinovum algicola
  source 1..50: mol_type = genomic DNA
cattctgtggtgaaaaaagtgagatggcgcaccttgaaggagaaagttcg

SEQ ID NO: 34298 - DNA, 40 bp, Marinovum algicola
  source 1..40: mol_type = genomic DNA
acggatttttaaggaagtttggcgcacctgaaaggattcg

SEQ ID NO: 34299 - DNA, 40 bp, Marinovum algicola
  source 1..40: mol_type = genomic DNA
acggatttttaaggaagttgagcgcacctgaaaggattcg

SEQ ID NO: 34300 - DNA, 50 bp, Marinovum algicola
  source 1..50: mol_type = genomic DNA
cactttgtgtacaaaacagtgagagagatcgcttttatgtggaaagttca

SEQ ID NO: 34301 - protein, 452 aa, Listeria monocytogenes
MKAAIYIRVSTQEQVENYSIQAQTEKLTALCRSKDWDVYDTFIDGGYSGSNMNRPALNEMLSKLHEIDAVVVYRLDRLSRSQKDTITLIEEYFLKNNVEFVSLSETLDTSSPFGRAMIGILSVFAQLERETIRDRMVMGKIKRIEAGLPLTTAKGRTFGYDVIDTKLYINEEEAKQLRLIYDIFEEEQSITFLQKRLKKLGFKVRTYNRYNNWLTNDLYCGYVSYKDKVHVKGIHEPIISEEQFYRVQEIFSRMGKNPNMNKESASLLNNLVVCSKCGLGFVHRRKDTVSRGKKYHYRYYSCKTYKHTHELEKCGNKIWRADKLEELIIDRVNNYSFASRNVDKEDELDYLNEKLKIEHAKKKRLFDLYINGSYEVSELDSMMNDIDAQINYYESQIEANEELKKNKKIQENLADLATVDFDSLEFREKQLYLKSLINKIYIDGEQVTIEWL

SEQ ID NO: 34302 - DNA, 50 bp, Listeria monocytogenes
  source 1..50: mol_type = genomic DNA
tttagtacctcgttttctctcgttggagggagaagaaacgggataccaaa

SEQ ID NO: 34303 - DNA, 40 bp, Listeria monocytogenes; identical to SEQ ID NO: 7733
  source 1..40: mol_type = genomic DNA

SEQ ID NO: 34304 - DNA, 40 bp, Listeria monocytogenes
  source 1..40: mol_type = genomic DNA
tttcggttcaagctatgagtgacgcaaagagggaactaaa

SEQ ID NO: 34305 - DNA, 50 bp, Listeria monocytogenes
  source 1..50: mol_type = genomic DNA
tttattaccagttcttttcttttctgaaggataagaaatttaataccaag

SEQ ID NO: 34306 - protein, 452 aa, Listeria monocytogenes; identical to SEQ ID NO: 33891

SEQ ID NO: 34307 - DNA, 50 bp, Listeria monocytogenes
  source 1..50: mol_type = genomic DNA
tttagtacctcgatttctctcgttggagggagaagaaacgggataccaaa

SEQ ID NO: 34308 - DNA, 40 bp, Listeria monocytogenes; identical to SEQ ID NO: 7733
  source 1..40: mol_type = genomic DNA

SEQ ID NO: 34309 - DNA, 40 bp, Listeria monocytogenes; identical to SEQ ID NO: 34304
  source 1..40: mol_type = genomic DNA

SEQ ID NO: 34310 - DNA, 50 bp, Listeria monocytogenes; identical to SEQ ID NO: 34305
  source 1..50: mol_type = genomic DNA

SEQ ID NO: 34311 - protein, 452 aa, Listeria monocytogenes
MKAAIYIRVSTQEQIENYSIQAQTEKLTALCRSKDWDVYDIFIDGGYSGSNMNRPALNEMLSKLHEIDAVVVYRLDRLSRSQRDTITLIEEYFLKNNVEFVSLSETLDTSSPFGRAMIGILSVFAQLERETIRDRMVMGKIKRIEAGLPLTTAKGRTFGYDVIDTKLYINEEEAKQLRLIYDIFEEEQSITFLQKRLKKLGFKVRTYNRYNNWLTNDLYCGYVSYKDKVHVKGIHEPIISEEQFYRVQEIFTRMGKNPNMNRDSASLLNNLVVCSKCGLGFVHRRKDTMSRGKKYHYRYYSCKTYKHTHELEKCGNKIWRADKLEELIINRVNNYSFASRNVDKEDELDSLNEKLKIEHAKKKRLFDLYINGSYEVSELDSMMNDIDAQINYYESQIEANEELKKNKKIQENLADLATVDFDSLEFREKQLYLKSLINKIYIDGEQVTIEWL

SEQ ID NO: 34312 - DNA, 50 bp, Listeria monocytogenes; identical to SEQ ID NO: 34302
  source 1..50: mol_type = genomic DNA

SEQ ID NO: 34313 - DNA, 40 bp, Listeria monocytogenes; identical to SEQ ID NO: 7733
  source 1..40: mol_type = genomic DNA

SEQ ID NO: 34314 - DNA, 40 bp, Listeria monocytogenes; identical to SEQ ID NO: 34304
  source 1..40: mol_type = genomic DNA

SEQ ID NO: 34315 - DNA, 50 bp, Listeria monocytogenes; identical to SEQ ID NO: 34305
  source 1..50: mol_type = genomic DNA

SEQ ID NO: 34316 - protein, 452 aa, Listeria monocytogenes
MKAAIYIRVSTQEQIENYSIQAQTEKLTALCRSKDWDVYDIFIDGGYSGSNMNRPALNEMLSKLHEIDAVVVYRLDRLSRSQRDTITLIEEYFLKNNVEFVSLSETLDTSSPFGRAMIGILSVFAQLERETIRDRMVMGKIKRIEAGLPLTTAKGRTFGYDVIDTKLYINEEEAKQLQMIYDIFEEEKSITTLQKRLKKLGFKVKSYSSYNNWLTNDLYCGYVSYADKVHTKGVHEPIISEEQFYRVQEIFSRMGKNPNMNRDSASLLNNLVVCGKCGLGYVHRRKDTVSRGKKYHYRYYSCKTYKHTHELEKCGNKIWRADKLEELIIDRVNNYSFASRNVDKEDELDYLNEKLKIEHAKKKRLFDLYINGSYEVSELDSMMNDIDAQINYYESQIEANEELKKNKKIQENLADLATVDFDSLEFREKQLYLKSLINKIYIDDEQVTIEWL

SEQ ID NO: 34317 - DNA, 50 bp, Listeria monocytogenes; identical to SEQ ID NO: 34307
  source 1..50: mol_type = genomic DNA

SEQ ID NO: 34318 - DNA, 40 bp, Listeria monocytogenes; identical to SEQ ID NO: 1298
  source 1..40: mol_type = genomic DNA

SEQ ID NO: 34319 - DNA, 40 bp, Listeria monocytogenes
  source 1..40: mol_type = genomic DNA
tttcggatcaagctatgagtgacgcaaagagggaactaaa

SEQ ID NO: 34320 - DNA, 50 bp, Listeria monocytogenes; identical to SEQ ID NO: 34305
  source 1..50: mol_type = genomic DNA

SEQ ID NO: 34321 - protein, 452 aa, Listeria monocytogenes
MKAAIYIRVSTQEQIENYSIQAQTEKLTALCRSKDWDVYDIFIDGGYSGSNMNRPALNEMLSKLHEIDAVVVYRLDRLSRSQRDTITLIEEYFLKNNVEFVSLSETLDTSSPFGRAMIGILSVFAQLERETIRDRMVMGKIKRIEAGLPLTTAKGRTFGYDVIDTKLYINEEEAKQLRLIYDIFEEEQSITFLQKRLKKLGFKVRTYNRYNNWLTNDLYCGYVSYKDKVHVKGIHEPIISEEQFYRVQEIFARMGKNPNMNRDSASLLNNLVVCGKCGLGFVHRRKDTISRGKKYHYRYYSCKTYKHTHELEKCGNKIWRADKLEELIIDRVNNYSFASRNVDKEDELDYLNEKLKIEHAKKKRLFDLYINGSYEVSELDSMMNDIDAQINYYESQIEANEELKKNKKIQENLADLATVDFDSLEFREKQLYLKSLINKIYIDDEQVTIEWL

SEQ ID NO: 34322 - DNA, 50 bp, Listeria monocytogenes; identical to SEQ ID NO: 34307
  source 1..50: mol_type = genomic DNA

SEQ ID NO: 34323 - DNA, 40 bp, Listeria monocytogenes; identical to SEQ ID NO: 1298
  source 1..40: mol_type = genomic DNA

SEQ ID NO: 34324 - DNA, 40 bp, Listeria monocytogenes; identical to SEQ ID NO: 34319
  source 1..40: mol_type = genomic DNA

SEQ ID NO: 34325 - DNA, 50 bp, Listeria monocytogenes; identical to SEQ ID NO: 34305
  source 1..50: mol_type = genomic DNA

SEQ ID NO: 34326 - protein, 612 aa, Bacteroides xylanisolvens; identical to SEQ ID NO: 2416

SEQ ID NO: 34327 - DNA, 50 bp, Bacteroides xylanisolvens; identical to SEQ ID NO: 2417
  source 1..50: mol_type = genomic DNA

SEQ ID NO: 34328 - DNA, 40 bp, Bacteroides xylanisolvens
  source 1..40: mol_type = genomic DNA
tcggttgaattccggcaattcatctaagaaaagtacccca

SEQ ID NO: 34329 - DNA, 40 bp, Bacteroides xylanisolvens
  source 1..40: mol_type = genomic DNA
tcggttgaattccggcaatagatctaagaaaagtacccca

SEQ ID NO: 34330 - DNA, 50 bp, Bacteroides xylanisolvens
  source 1..50: mol_type = genomic DNA
taggcaaattcacttaagtatagtagcctatacttagaatcctttaagca

SEQ ID NO: 34331 - protein, 612 aa, Bacteroides xylanisolvens; identical to SEQ ID NO: 2416

SEQ ID NO: 34332 - DNA, 50 bp, Bacteroides xylanisolvens; identical to SEQ ID NO: 2417
  source 1..50: mol_type = genomic DNA

SEQ ID NO: 34333 - DNA, 40 bp, Bacteroides xylanisolvens
  source 1..40: mol_type = genomic DNA
tcggttgaattccggcaattcatctaaaaaaagtacccca

SEQ ID NO: 34334 - DNA, 40 bp, Bacteroides xylanisolvens
  source 1..40: mol_type = genomic DNA
tcggttgaattccggcaatagatctaaaaaaagtacccca

SEQ ID NO: 34335 - DNA, 50 bp, Bacteroides xylanisolvens; identical to SEQ ID NO: 34330
  source 1..50: mol_type = genomic DNA

SEQ ID NO: 34336 - protein, 509 aa, Vibrio mediterranei
MGQRKQAISYQRFSSDRQRNNSSLDRQSDSIKSWLKQNPDVDLIDQYVDEAMSGWSGKHIEQGSLGKLLQAIEEGIVQPETLILVEHFSRLSRQNIDKTEELLRKIWQHGITIVTIRDNGLYPPSTINDMPLRIRLIVEIEQAFKESEWRSAKVKGSYVKREKDAKNGLTPRMRRPFWLNKDGTLNDHHVVIKDIFNWYMEGLGQQRIIVKLKQKYQSVPSVQKMNPSTVMRWLDSDVVRGMWRGYKVYEAAVDDTLYFNVQTVHNSRLYHNVKPDRNWPLSGLLQCGVCGRGMSIQKSKGSLPVIRCSSKQRDKSCQRKTTFPYALAHLYMFNTVRKRASRLYTQKTVSKENALKLGQIDNDLVKLKTQLKEEKQLYDEASSEGKSGRLILKIMLETDERIQDLERERDSIQSSIKASNNLFISDEANNLVLTPRNFNLEMHKLGFKIVVGEYSLNTEGLSDKAPEWQYLGYSRKKRAYEWEVLGKKYFMPTASFNEEVLMLEDKEKI

SEQ ID NO: 34337 - DNA, 50 bp, Vibrio mediterranei
  source 1..50: mol_type = genomic DNA
cacatgcacacccattcttttagtgagctaatagcttaggtgtgcatatg

SEQ ID NO: 34338 - DNA, 40 bp, Vibrio mediterranei
  source 1..40: mol_type = genomic DNA
tatcgaccacttattgtgtgagttgaaagcaggtcagtcg

SEQ ID NO: 34339 - DNA, 40 bp, Vibrio mediterranei
  source 1..40: mol_type = genomic DNA
tatcgaccacttattgtgttagttgaaagcaggtcagtcg

SEQ ID NO: 34340 - DNA, 50 bp, Vibrio mediterranei
  source 1..50: mol_type = genomic DNA
tacatttacttgtattcatttatttagctaatcgctcagctattcatttg

SEQ ID NO: 34341 - protein, 520 aa, Erysipelatoclostridium ramosum
MNKLKVAIYCRLSEEDRNKESEDDDSNSIQNQKSMLNKYALEQGWEIFKVYSDDDYTGSDRRRPEFNNLLRDAKAQKFNIILCKTQSRFTRELELVEKYIHGLFPIWGIRFVSVVDNADTANKGNKKSRQINGLVNEWYLEDMSENIKSVLIDRRKNGFHIGAFALYGYKKDPDMKGHLIIDEEAAKVVREVFTLFSNGYGKTAIARILNERGIPNPTEYKRLHGLRFKAPKTRNSTLWSYYAIADMLINEIYIGNMVQGKYGSVSYKTKQNKPRPKSQWYIVEGTHEAIIDRELWDRVQLLIVQKAKPFTIGQIGLFARKTRCMYCGYIMRSSKNRGKHYLRCSSRFKSKDACIGSFVSVDKLEQVVIEELNRLSKEYLDNSELEKNVVFNNDFKEKQDYLKEEIATYQRKIMEYTKGIRELYLDKVKGILSQQDYLDLSNDFSVQKRRLEKLVEDKQKQLDTLKKKMMTQDNRKKLIEQYTNLEHLDRFTVEKLIDYIDIGKRNTETKELPIEIHWNF

SEQ ID NO: 34342 - DNA, 50 bp, Erysipelatoclostridium ramosum
  source 1..50: mol_type = genomic DNA
tgttgttcttatgagatagcagcagatggcacaatcatgtaagaacaacc

SEQ ID NO: 34343 - DNA, 40 bp, Erysipelatoclostridium ramosum
  source 1..40: mol_type = genomic DNA
aacggaggacatggcggcagagcaaaaagcacgtacaact

SEQ ID NO: 34344 - DNA, 40 bp, Erysipelatoclostridium ramosum
  source 1..40: mol_type = genomic DNA
aacggaggacatggcggcattgcaaaaagcacgtacaact

SEQ ID NO: 34345 - DNA, 50 bp, Erysipelatoclostridium ramosum
  source 1..50: mol_type = genomic DNA
tgtttttctttactaataacagcatttgtcaaaatgtatccacatcaaca

SEQ ID NO: 34346 - protein, 484 aa, Bacillus thuringiensis; identical to SEQ ID NO: 12791

SEQ ID NO: 34347 - DNA, 50 bp, Bacillus thuringiensis
  source 1..50: mol_type = genomic DNA
cactatctacaattatgcataacaaatgaaatgtataattgtaactagtt

SEQ ID NO: 34348 - DNA, 40 bp, Bacillus thuringiensis; identical to SEQ ID NO: 34293
  source 1..40: mol_type = genomic DNA

SEQ ID NO: 34349 - DNA, 40 bp, Bacillus thuringiensis; identical to SEQ ID NO: 34294
  source 1..40: mol_type = genomic DNA

SEQ ID NO: 34350 - DNA, 50 bp, Bacillus thuringiensis
  source 1..50: mol_type = genomic DNA
aaatatgaaatctagttcataacaagtgatatatattaaattgactagtt

SEQ ID NO: 34351 - protein, 542 aa, Sphingobium xenophagum
MNAQSPNVALRAALYLRVSTARQAEHDVSIPDQRKQGEAWCAARGYQLVEIFVEPGNTATNDRRPEFQRMIEAGTSKPTPFDVVLVHSFSRFFRDAFDMEYYYRKLAKNDVRLISITQELGDDPIHDMMRRIMSLFDEYQSKENGKHVTRALKENARQGFWNGALPPIGYRIAAAEQRGAKTKKKLEIDPLHADTIRLIYRLALEGQGDSGQMGVKAIVKHLNAKGIFTRDGGRWGIGQVHRVLTRRTYIGEHEWGKRSKHNDPRSAGEIVIVPVPAIIERETFYAVQSLLQARNPKTELPARVVIGPTLLTGICYCGNCGGAMTIRTGKSGRYRYYACSIKARQGETGCKGRAIPMDKLDDMVVSHIEDRLLDPDRLEKLLGSILGRREDQAERRREHIASLQRQATESESRLKRLYDAIEAGVADLDDPALKERIAGLKVLRDQARADADRAQALLESPGHSALSPAMIEGFARRARERIRGHEGGYRRDHLRALAQRVEVADDAIRIMGSKTELLKTLIAGQGRQSAAIGVPRGGLKWR

SEQ ID NO: 34352 - DNA, 50 bp, Sphingobium xenophagum
  source 1..50: mol_type = genomic DNA
tgcccagaggcggtctgaaatggcgggccatgcgagatagcgatgagaac

SEQ ID NO: 34353 - DNA, 40 bp, Sphingobium xenophagum
  source 1..40: mol_type = genomic DNA
agcgagatgcgatattggcggaaggggtgggattcgaacc

SEQ ID NO: 34354 - DNA, 40 bp, Sphingobium xenophagum
  source 1..40: mol_type = genomic DNA
agcgagatgcgatattggctgaaggggtgggattcgaacc

SEQ ID NO: 34355 - DNA, 50 bp, Sphingobium xenophagum
  source 1..50: mol_type = genomic DNA
tgggcagagacagtctgaaaaggctgcccaggtgaggcagggaggagatg

SEQ ID NO: 34356 - protein, 542 aa, Roseomonas sp FDAARGOS 362
MNAQSANVALRAALYLRVSTARQAEHDVSIPDQRKQGEAYCAARGYQLVEIFVEPGNTATNDRRPEFQRMIEAGTSKPAPFDVVLVHSFSRFFRDAFDMEYYYRKLAKNDVRLISITQELGDDPIHDMMRRIMALFDEYQSKENGKHVTRALKENARQGFWNGALPPIGYRIAAAEQRGAKTKKKLEIDPLHADTIRLIYRLALEGQGDSGQMGVKAIVKHLNAKGIFTRDGGRWGIGQVHRVLTRRTYIGEHEWGKRSKHNDARTPGEIVIVPVPAIIERETFDAVQSLLQARNPKTELPARVVIGPTLLTGICYCGNCGGAMTIRTGKSGRYRYYACSIKARQGETGCKGRAIPMDKLDDMVVSHIEERLLDPTRLEKLLGSILGRREDQAERRREHIASLQRQATESESRLKRLYDAIEAGVADLDDPALKERIAGLKVLRDQARADADRAQALLESPGHSALSPAMIEGFARRARERIRGHEGGYRRDHLRALAQRVEVADDAIRIMGSKTELLKTLIAGQGRQSAAIGVPRGGLKWR

SEQ ID NO: 34357 - DNA, 50 bp, Roseomonas sp FDAARGOS 362
  source 1..50: mol_type = genomic DNA
tgcccagaggcggactgaaatggcgggccatgcgagatagcgatgagaac

SEQ ID NO: 34358 - DNA, 40 bp, Roseomonas sp FDAARGOS 362
  source 1..40: mol_type = genomic DNA
cgggagcgtacgatctggcggagagggtgggattcgaacc

SEQ ID NO: 34359 - DNA, 40 bp, Roseomonas sp FDAARGOS 362
  source 1..40: mol_type = genomic DNA
cgggagcgtacgatctggctgagagggtgggattcgaacc

SEQ ID NO: 34360 - DNA, 50 bp, Roseomonas sp FDAARGOS 362; identical to SEQ ID NO: 34355
  source 1..50: mol_type = genomic DNA

SEQ ID NO: 34361 - protein, 497 aa, Bacillus nitratireducens
MDTIKRVAVYVRKSRQEEDNQALDNQRDVLIRICEDNKWKYDLYIEVGSSNDLQRPELQKMLTQVRNFKYNSIVCADQDRLSRNTGHLGQIKEIMNQYGCHILVTPSKVYNYKDSADDLMSDISSIFAKQELKKITERLIRGTRESAKSGNWLGKRVPIGYKYNRTTKSLELSEDAPVIKRMFMLYLEGISTKDIAYKFTNEGVKTTVNMKWTPAGISRMLNNIVYAGHSLYGRTTQPKIEGKRVVRQTLPEEQILVENTHEAIVSPELWEEVQKVKQDRNSRPPVLKLGKHKFSGLIRCGLCGGIHSFQTSRYKRKRISSCQTRTYNRTLDSYSVCSNAGANITEFEELFYLYFRKYVDQLEQYVELIKVNGSNDTYSVEEEIDKKQKQIKELKVQRKRVRDGFKIGMSTLEEAYEDTKELEQQVKTLENQIKELKESGNYTELERKEFTLDKMKQFLNGSSDMDERQANNILREFVETVIYTKTGTEITLDIVMK

SEQ ID NO: 34362 - DNA, 50 bp, Bacillus nitratireducens
  source 1..50: mol_type = genomic DNA
ggttgcaaaataggattaatttgtttacaattcgattgtattctgcaatg

SEQ ID NO: 34363 - DNA, 40 bp, Bacillus nitratireducens
  source 1..40: mol_type = genomic DNA
tgttgcatctttcgttaatttataaatcattgtagcaatc

SEQ ID NO: 34364 - DNA, 40 bp, Bacillus nitratireducens; identical to SEQ ID NO: 34363
  source 1..40: mol_type = genomic DNA

SEQ ID NO: 34365 - DNA, 50 bp, Bacillus nitratireducens
  source 1..50: mol_type = genomic DNA
ggtttcattttctcattcatctgttttcaattgcattgatttctgcaatt

SEQ ID NO: 34366 - protein, 498 aa, Nocardia cyriacigeorgica
MTTKKATTGKLSILRIAIYLRISQDRSGEGLGVARQEDDCRKLAEQIAAQAGAVAHIVPFTDNDISASAYTRKKRPEYRAMCDAIGRGEIDVVVAWHDTRLIRQMRELEDFIDLIDSRHVVVHFCKAGRWDLKTASGRMQARIGGVVAQHESELKSERIKAARVQQAQQGRFHGGIRPYGFESDGVTVRQAEAREIVRMYEQIVAGVSMRQIVRDLNTREIPTARARGPWTSVAVGGIIKNPRNAGHSVHNGQIVGKAVWPALVSEETWQAAVGVLRDPGRRTTPGNTPKWLGSGVYLCGVCGQAELRAGVSGSGRRPSYRCRSRETTGQGHVSRDAGQVDALVEETIVARLERPDALAQLSAGLDSGGEDIAALRLEQTALRQRLDSLADLFAAGDIDARQLSTASGTMKAKIAEIDAALAAAGMRSPLDELKGKDIRKAWFGTKEDRSDGLSLGSRRAIVDMLVTVTVLPAPKGRRVSGAYFDPEFIDIAWKQSLV

SEQ ID NO: 34367 - DNA, 50 bp, Nocardia cyriacigeorgica
  source 1..50: mol_type = genomic DNA
gtgtgtctttttgcatatgccgtattgcccgcatatgggttgtggcacac

SEQ ID NO: 34368 - DNA, 40 bp, Nocardia cyriacigeorgica
  source 1..40: mol_type = genomic DNA
tccggacaagagcgtggtcttgcccgcgccagtgccgccg

SEQ ID NO: 34369 - DNA, 40 bp, Nocardia cyriacigeorgica
  source 1..40: mol_type = genomic DNA
tccggacaagagcgtggtccggcccgcgccagtgccgccg

SEQ ID NO: 34370 - DNA, 50 bp, Nocardia cyriacigeorgica
  source 1..50: mol_type = genomic DNA
gtatgtcttctaacatatgccatacggttggcatatggtcaatgtctcaa

SEQ ID NO: 34371 - protein, 489 aa, Bacillus cereus
MISNENIKHVAIYLRLSRDEENKGIDRILANHRKTLTDLCQQNKWKYDIFQEIASSRTIELREQLVSMLEQVKQKHYDAVVVMDIDRLSRNDFDALQIFKILSDSDTVIVTPSRIYDWTKNGDSLLLKIESLIAAQEYEQIKKRMTAGKRSASELGLWVHGIPPLGYDKDPETRKLLPNKDAKHVKFIFDSIVNGKTVSDVYHELNKMGVKTRTNSTFAFNSIVRIVNNEVYKGTIVSNKYLNKNAMRPKSEWNYIPNVHPAIVDEATWEKANKIVNTYSFSSPRSRNKIYPTTKLIFCGNCGKVQGTQMAHTGKMYIKVCRHCKNRTYLYEPILRYVKQAVIAQRESILKKIVLIEKNDNTAEMKYKEQQIIKQMNVAERALNKLLPLYEEDLISRRQFLERKAQREDEITQLKQELAKIKQETPKDKIASYNEVLKQVDYLIQNWQCLDGEGLTDEEVNRSLHFIIDRIEWTYGKGDTEPKLNIKYK

SEQ ID NO: 34372 - DNA, 50 bp, Bacillus cereus
  source 1..50: mol_type = genomic DNA
aaataatccctaaattcgtaacaaactggttgagaatttagggactaaat

SEQ ID NO: 34373 - DNA, 40 bp, Bacillus cereus; identical to SEQ ID NO: 21053
  source 1..40: mol_type = genomic DNA

SEQ ID NO: 34374 - DNA, 40 bp, Bacillus cereus
  source 1..40: mol_type = genomic DNA
actcgtgtttactggaccgaatggttctgggaagacaacg

SEQ ID NO: 34375 - DNA, 50 bp, Bacillus cereus
  source 1..50: mol_type = genomic DNA
aagaaatcctttaattcacaacagaatgattgagaatgaaaggacattat

SEQ ID NO: 34376 - protein, 577 aa, Faecalibacterium prausnitzii
MEIELIKANEFSEGSARKRVERLRVAAYCRVSTDDEDQIKSYNSMVRYYTDLIQNNKEWIFAGVYADKAITGTKTDKRDEFQRLIQDCMDGKIDLIIAKSIPRFARNTLDTLKYVRMLKERNIAVYFEVEKINTLKDGEFLMTILSSVAQQEVENTSAYVKKGLKMKMKRGELVGFQGCMGYDYDVATKSISINEEGAKVVRYIFERYVAGAGSTMIARELNEQGIMTIKGNPWVSSSVMGIINNEKYKGDILLGKTFTVDPISKRRLENLGEEDRYYIHDHHEPIISEEMFARAQEIRSRRNGNRKHGVTPGKREKFSRQYAFSCLLECGFCGANLSRRRWHSNSKYKKTIWQCVKATKDGKRFCPDSKGIPEQVIEEAFVESYRMLCRDNKDVLEEFLKRTEKALGENSVEDQLNKLQKKIDNLSYKRKKLLDNYLSGIVEQDIYEETDVSLKTDLSNAKAKLEYFQQQADEESSLQKRIADFKKALSHNEVLEEFDRGIFESIIEKVIVGGYDENGEKDPYKITFIYKTGFKNEIGNAKERFDKSKSVGDKAKELCSHIVNEVKDVCSYVSDNT

SEQ ID NO: 34377 - DNA, 50 bp, Faecalibacterium prausnitzii
  source 1..50: mol_type = genomic DNA
tgtgttcctatgttagtgacaacacatgtggagacagtggtgggactaca

SEQ ID NO: 34378 - DNA, 40 bp, Faecalibacterium prausnitzii
  source 1..40: mol_type = genomic DNA
tatgttcccgcatacggagcatatcgagacggtatgtgca

SEQ ID NO: 34379 - DNA, 40 bp, Faecalibacterium prausnitzii
  source 1..40: mol_type = genomic DNA
tatgttcccgcatacggagggtatcgagacggtatgtgca

SEQ ID NO: 34380 - DNA, 50 bp, Faecalibacterium prausnitzii
  source 1..50: mol_type = genomic DNA
agtggttctcaaatattggcaactggcttggagacaacctggagactaca

SEQ ID NO: 34381 - protein, 465 aa, Mycobacteroides chelonae
MLAVVYTRISKDRVGAGLGVERQRDDCQQLADSLGWTVVETFSDNDLSAYSGKKRPAYEAMLAALEGDKARAVIAWHTDRLHRQPIELEGFIDLCERKKIEVRAVKAGTIDLSTPSGRMVARMLGAAARHEVEHMIERTKSQKKQAALDGKYRGGQRPFGYEPDGLRLREAEADAIRSGVESVLSGVSLRQIARDWNALGLRTSAGNKEFSSVEVRKVLLRPRNAGIALHQGQPVGKGQWDAIIDTDSFAALEAILRDPERAKHVSYIRKYQGSGVYLCGMDECGAVTRISSQGPAKGSRERRSVYVCSRTKHLGRLVEYVDEYVDEHVIRRLSEPDARKIFVGPEVDLTAMHAQREGLRSRLNELSALFAEGAIDGPQLKRGSAELKEKLAAVDAELTSVRSASAVALLLEADDIEAEWKITPPDIRGRIIDTLMTVTILPIGRGRQPDGSYFDPSKIQITWKS

SEQ ID NO: 34382 - DNA, 50 bp, Mycobacteroides chelonae
  source 1..50: mol_type = genomic DNA
aaagggcttagttagatgtttgacaggtcattaatcgacttgataccatt

SEQ ID NO: 34383 - DNA, 40 bp, Mycobacteroides chelonae
  source 1..40: mol_type = genomic DNA
gaaggcgttgccgtgcgagaggtccagcaccagccagtcc

SEQ ID NO: 34384 - DNA, 40 bp, Mycobacteroides chelonae
  source 1..40: mol_type = genomic DNA
gaaggcgttgccgtgcgagtagtccagcaccagccagtcc

SEQ ID NO: 34385 - DNA, 50 bp, Mycobacteroides chelonae
  source 1..50: mol_type = genomic DNA
aaagcacttttatagttgtttaactagtaattattttcatgaacaccatt

SEQ ID NO: 34386 - protein, 465 aa, Mycobacteroides abscessus
MLAVVYTRISKDRVGAGLGVERQRDDCQQLADSLGWTVVETFSDNDLSAYSGKKRPAYEAMLAALEGDKARAVIAWHTDRLHRQPIELEGFIDLCERKKIEVRAVKAGTIDLSTPSGRMVARMLGAAARHEVEHMIERTKSQKKQAALDGKYRGGQRPFGYEPDGLRLREAEADAIRSGVESVLSGVSLRQIARDWNALGLRTSAGNKEFSSVEVRKVLLRPRNAGIALHQGQPVGKGQWDAIIDTDSFAALEAILRDPERAKHVSYIRKYQGSGVYLCGMDECGAVTRISSQGPAKGSRERRSVYVCSRTKHLGRLVEYVDEYVDEHVIRRLSEPDARKIFVGPEVNLTAMHAQREGLRSRLNELSALFAEGAIDGPQLKRGSAELKEKLAAVDAELTSVRSASAVALLLEADDIEAEWRITPPDIRGRIIDTLMTVTILPIGRGRQPDGSYFDPSKIQITWKS

SEQ ID NO: 34387 - DNA, 50 bp, Mycobacteroides abscessus; identical to SEQ ID NO: 34382
  source 1..50: mol_type = genomic DNA

SEQ ID NO: 34388 - DNA, 40 bp, Mycobacteroides abscessus
  source 1..40: mol_type = genomic DNA
gaaggcgttgccgtgcgagagatccagcaccagccagtcc

SEQ ID NO: 34389 - DNA, 40 bp, Mycobacteroides abscessus
  source 1..40: mol_type = genomic DNA
gaaggcgttgccgtgcgagtaatccagcaccagccagtcc

SEQ ID NO: 34390 - DNA, 50 bp, Mycobacteroides abscessus; identical to SEQ ID NO: 34385
  source 1..50: mol_type = genomic DNA

SEQ ID NO: 34391 - protein, 465 aa, Mycobacteroides abscessus
MLAVVYTRISKDRVGAGLGVERQRDDCQQLADSLGWTVVETFSDNDLSAYSGKKRPAYEAMLAALEGDKARAVIAWHTDRLHRQPIELEGFIDLCERKKIEVRAVKAGTIDLSTPSGRMVARMLGAAARHEVEHMIERTKSQKKQAALDGKYRGGQRPFGYEPDGLRLREVEADAIRSGVESVLSGVSLRQIARDWNALGLRTSAGNKEFSSVEVRKVLLRPRNAGIALHQGQPVGKGQWDAIIDTDSFAALEAILRDPERAKHVSYIRKYQGSGVYLCGMDECGAVTRISSQGPAKGSRERRSVYVCSRTKHLGRLVEYVDEYVDEHVIRRLSEPDARKVFVGPEVDLTAMHAQREGLRSRLNELSALFAEGAIDGPQLKRGSAELKEKLAAVDAELTSVRSASAVALLLEADDIEAEWKITPPDIRGRVIDTLMTVTILPIGRGRQPDGSYFDPSKIQITWKS

SEQ ID NO: 34392 - DNA, 50 bp, Mycobacteroides abscessus; identical to SEQ ID NO: 34382
  source 1..50: mol_type = genomic DNA

SEQ ID NO: 34393 - DNA, 40 bp, Mycobacteroides abscessus; identical to SEQ ID NO: 34388
  source 1..40: mol_type = genomic DNA

SEQ ID NO: 34394 - DNA, 40 bp, Mycobacteroides abscessus; identical to SEQ ID NO: 34389
  source 1..40: mol_type = genomic DNA

SEQ ID NO: 34395 - DNA, 50 bp, Mycobacteroides abscessus; identical to SEQ ID NO: 34385
  source 1..50: mol_type = genomic DNA

SEQ ID NO: 34396 - protein, 604 aa, Klebsiella pneumoniae
MKSKLFSYIRWSSAVQGKNGGTTEERQLEGARRYALKHGYELVTMIDAGVSAFRGRNAARASNSTSKVGELGKFIDAVEEGLIPKDSVLYVESQDRISRSDIITANKLFLQLLDLGITIVTGIDERSYSKESVNTNPFDLMYSIMLFSRANEESNTKKNRVEDNALERIKRFKSGLPTTIKSVGSHPFWIDASTTYDKQVRKHPQYWQVAQYAMELFLEGASAFKVCKELNTRFPEGWKGKMWSVPNVRKLRTNPAVYGLRILSVKGIEYKLEGYYPALITEAEFARLQDIQQNNKYITTGEKNQINLMAGLRLFRCGHCGSTMMAMRHKDKIRYLCEKGRAAGNLKSKDDKLKKLKGCRTWSLSGELVEHTLMYAMTYAFIYKNKDNKEKIDYETQINDTKEKIFSVTARITNLTELISAGLGNVAEVVESIKKLNEERQVLNLHLDKLQQNNLLQESSHFEELMINYFENIQWPIIKTVDHPERVKIREIVRSTIDKAVVWKADKKITIYYVTKDGTDFTFEAGDEKDTWRFYFGVPDLVKRSDGFEQAKQALEMNNELFDKILALKNQEAEAAGNALKTVVKALQVVGYPAIDGKLFWPRK

SEQ ID NO: 34397 - DNA, 50 bp, Klebsiella pneumoniae
  source 1..50: mol_type = genomic DNA
atgtgttcacaaattactttcggcaacccgaagtacaaaagtgaacacta

SEQ ID NO: 34398 - DNA, 40 bp, Klebsiella pneumoniae; identical to SEQ ID NO: 5423
  source 1..40: mol_type = genomic DNA

SEQ ID NO: 34399 - DNA, 40 bp, Klebsiella pneumoniae; identical to SEQ ID NO: 5424
  source 1..40: mol_type = genomic DNA

SEQ ID NO: 34400 - DNA, 50 bp, Klebsiella pneumoniae
  source 1..50: mol_type = genomic DNA
atgtcggtacagccaacttactgcttccagaagtattcttctgaacacta

SEQ ID NO: 34401 - protein, 531 aa, Streptomyces platensis
MTLVDPQPKKKLTAAEVERLVERLRGVPTGAPSLEEAKALRAEGWHLLLAYCRISDDAHKRDGHGVEDQTRHCGRIAGHMRGIVIHHYIDNDKSASKANVTRDDFDKMIEALERGSTEHGYPVDGVVCVADDRLYRGAHAYERFVDSFTAHPDRVYADDTGRHDLYGDGAEYRGLLGVAASRSETKKKKRRARLNHLARAERGEPVSGRRPFGWNDDKLTLHPEESKVVRQGVTDLLAGKSITTVTWNFVESGLKTTMGNSWQLQTVKQILRNPRICGYRKMKGELVTDTDGNPIVGKWEPIVTPKEWYAVTALLEKNRGAGGWDGSGDSPRTPRKYLLTGLLRCGKKLEDGRTCNAKMHGAPARKTHKYRCRSVLDGGCDKLSRQGPAIDKLIKELVLAKLEKRNAERQPVEETWADEHKLEASQRRKTALEEQWHAEEISDSTFFSLLKKEEAEIKRLSNDRKAWAARQETEKHRVTDARAEWKGMDLQQRRGVIFDALEAVIVLPGVKGSHTFDPETIIPVWKDEEAS

SEQ ID NO: 34402 - DNA, 50 bp, Streptomyces platensis
  source 1..50: mol_type = genomic DNA
atctgaccttcggcatcttcctgctggcagcagtattgctaaattcatat

SEQ ID NO: 34403 - DNA, 40 bp, Streptomyces platensis
  source 1..40: mol_type = genomic DNA
ctccgccacatagttgtggtggcaggagatcacctcgtcg

SEQ ID NO: 34404 - DNA, 40 bp, Streptomyces platensis
  source 1..40: mol_type = genomic DNA
ctccgccacatagttgtggaagcaggagatcacctcgtcg

SEQ ID NO: 34405 - DNA, 50 bp, Streptomyces platensis
  source 1..50: mol_type = genomic DNA
ttcttatggctcccacctgcctgcaagcagcagtatagactaactcttat

SEQ ID NO: 34406 - protein, 534 aa, Pseudomonas syringae
MKQAISYIRFSSARQEGGSSVERQEGMIAKWLLDHQDYELSKLNYSDLGKSGFHGEHVKEGGNFGKLLKAVMDGYIKRDDVVLVEAIDRTGRLPALQMLSDVIAPILRAGVSIITLDDNTTYTEASVGGPHLFMLVAKIQAAHEYSRTLSRRVEDSYKKRRKDAKEKGVAPKRMTPVWLNSDGTVREDVAPWIKTAFELYVSGVGKSTIAKRLRESGVERLAKASGPGVEGWLRNKAVIGKWETLIGTPEHHVIDDVYPLIIEPSLFYKAQVHAEKMKTQRPIKTAKHFLVGLVHCGECGKNYIMQNLHGKPHSMRCRTRQSQNNCSNSYVVPKAVLDAIYRYTSVTAALEAVQLQQLGVNEKEIVTREAELLTITKRVEGFVQAVNEAGPMPELLVALKQARIERESAENALVILRATVVTPPANQWREMGKVWSLEAEDAQRLAAMLRQVGYNITVGEGAIIKSSHSDVVYQYLGVDRVKDMYRVLANGEMKLIHKSQVDDYPYYEPFQGVVGEATMDEADKENLLLQYQGS

SEQ ID NO: 34407 - DNA, 50 bp, Pseudomonas syringae
  source 1..50: mol_type = genomic DNA
ctgtgttacttacaaaaaccttgctcccaaccttttcacatgtaacactg

SEQ ID NO: 34408 - DNA, 40 bp, Pseudomonas syringae
  source 1..40: mol_type = genomic DNA
catgcccataaggccctgatcccagcccttgataacgcgt

SEQ ID NO: 34409 - DNA, 40 bp, Pseudomonas syringae
  source 1..40: mol_type = genomic DNA
catgcccataaggccctgagaccagcccttgataacgcgt

SEQ ID NO: 34410 - DNA, 50 bp, Pseudomonas syringae
  source 1..50: mol_type = genomic DNA
ctgtgatagtccctaaaagctctcgaccaacctttgaaaaagtctctctg

SEQ ID NO: 34411 - protein, 523 aa, Brevibacillus laterosporus
MTRPINLDVIIHLRKSRKDIEEEKKALETGIPFDTLDKHKRELMELVRREQHNVIKIFEEIVSGEFLSERPEAQEMLRNVEDEECDAVIVMDLDRLGRGDMIDAGTIFRAFKYSETLIITPTEVIDCNAEGAELLFGVKSIIAREELKQINKRLQGGRRRAVKDGRHIAKNPPYGYLRDENLKLYPHPEEAPVVKKIFELLAEGSGRYKVIDYLMRSGYKAPSNKDIWEQSTISYIVKNEVYLGHLVWGKKKHTKRNGRRVTKKLPPELWTRHDNAHEPIVSQELFDRANEAHTGRLRVSRKEGTAISNPLAGIAKCGVCERTLTQTHSYDRPNPQIRCNNPACKSVQKGSLTHFFEEKLISSLEELVEQRKMTQSELSNSAERKNKNEERIIALTNYIQKATTELNEQHSMRETTFEMLERKVYTEELFLQRHKIISDKIKQLEAEMEKSQEEIAQLKIRMKMQAQLIPKIHKVIQAYKSLEDPEQKNNLLKTVIEKVMYIRKKEWLKPEQFELEVILRFPT

SEQ ID NO: 34412 - DNA, 50 bp, Brevibacillus laterosporus
  source 1..50: mol_type = genomic DNA
cgtatatatctcagtgagttatactggttgaactccccaacatatatacg

SEQ ID NO: 34413 - DNA, 40 bp, Brevibacillus laterosporus
  source 1..40: mol_type = genomic DNA
agtactgtggcgattatactggtttacttcaccatatcca

SEQ ID NO: 34414 - DNA, 40 bp, Brevibacillus laterosporus
  source 1..40: mol_type = genomic DNA
agtactgtggcgattatacttgtttacttcaccatatcca

SEQ ID NO: 34415 - DNA, 50 bp, Brevibacillus laterosporus
  source 1..50: mol_type = genomic DNA
ggtataaatgtatgtgtattaaacttgatgaactcaaaataataaataag

SEQ ID NO: 34416 - protein, 547 aa, Streptomyces venezuelae
MKRDLPSTFRGSRTPGEPWLGYIRVSTWREEKISPELQQSAIESWAARTGRRIVDWIVDLDATGRNFKRKIMGGIQRVEGREAVGIAVWKFSRFGRNDLGIAINLARLEQAGGDLASATEEVDARTAVGRFNRAILFDLAVFESDRAGEQWKETHAHRRALKLPATGRQRFGYVWHPRRVPDLTAPGGFRLQEERYERHPEFAPVAAELYERKLAGQGFSQLAYWLNDELLIPTTRGNRWGTNTVQRYLDSGFAAGLLRVHDPECRCKLGQDHFSACKENRWLWLPGAQPALIVPEQWKEYGAHREQTRKTPPRARRASYPTSGIMRHGHCRGTAVARSGRDGKGGFVPGHVFVCFNRRNKGKSACEPGLYVRRDEVEAEVLKWLADTVADDIDNAPALPAQRTAPGTAPDPRARLVEERTRTEAELAKIEGALDRLVTDYALDPDKYPADTFGRVRDQLLGKKGDIIKHLKSLSEVEVAPTREEFRPLIVGLLQEWDILHTTEKNAILRRLLRRLVIHNRKSDQGAQWSVVRSFEFHPVWEPDPWS

SEQ ID NO: 34417 - DNA, 50 bp, Streptomyces venezuelae
  source 1..50: mol_type = genomic DNA
gcgagtcctttagagacactgacccacgtcagtggatctaaaggaccaca

SEQ ID NO: 34418 - DNA, 40 bp, Streptomyces venezuelae
  source 1..40: mol_type = genomic DNA
ccgcgtgcggtcgttcacccaggggtccggcaggaacagc

SEQ ID NO: 34419 - DNA, 40 bp, Streptomyces venezuelae
  source 1..40: mol_type = genomic DNA
ccgcgtgcggtcgttcaccgtggggtccggcaggaacagc

SEQ ID NO: 34420 - DNA, 50 bp, Streptomyces venezuelae
  source 1..50: mol_type = genomic DNA
gccagccctttgtggaaactgacagtggtcagtggtggggctgcacaaca

SEQ ID NO: 34421 - protein, 524 aa, Ruminococcus bromii
MSAFDSNNNYIVYNVGIYLRLSKEDENTGQSESIENQRKIVENFISNYNWNIVEIYIDDGFSGLNFNRPAFKRMLEDIENKKINLVITKDLSRLGRDYIYTGYYLERYFPTKNIRYIAISDGIDTYGDNGNNDISPFKSVINDMYAKDISKKIRAVMDTKRLNGEFIGAFAPYGYLKDPNNRNTFIIDDKASKVVKRIFDMYIEGNSMGRIVKILNDENIPCPSKYKSTHCSYKNAMVKRYKWCQETVKRILSNPTYIGNMTQHRQEKISYKIDKFRKIPCSNWITVEGTHEPIISPEIFETVQNLIKRQTVKYSRGKESFHLLNGLVFCKECGRKMTYRRDSSGKMIMNCITYTKFGKSECTSHRIREELLTDYVINDLKRISKQYLDNGFFQSISELETCEDKSLKSELRTIEKRFEEIKNIVKSLYEDKIKGTISEEDFLCMTKEYSEEKSRLQNKMETINDRLNEKTREFSYIKLLKDIAEFNIVNKVILLQLIDRIEVDSNRKITVYYMFTNPQIDNTD

SEQ ID NO: 34422 - DNA, 50 bp, Ruminococcus bromii
  source 1..50: mol_type = genomic DNA
acaaactaataataaccgtcaccatctggtgagttgaacttatggaaaat

SEQ ID NO: 34423 - DNA, 40 bp, Ruminococcus bromii
  source 1..40: mol_type = genomic DNA
tgacgcacccaactcaccatccggaccgccgtatggcaga

SEQ ID NO: 34424 - DNA, 40 bp, Ruminococcus bromii
  source 1..40: mol_type = genomic DNA
tgacgcacccaactcaccaatcggaccgccgtatggcaga

SEQ ID NO: 34425 - DNA, 50 bp, Ruminococcus bromii
  source 1..50: mol_type = genomic DNA
acaatagaaatgttacagtcagcaattgctgagttgcgctcatgggtaac

SEQ ID NO: 34426 - protein, 537 aa, Enterocloster clostridioformis
MKQPIYNTALYLRLSRDDELQGESGSIQTQRMMLQEYARTHGLCVVGEYVDDGWSGTNYDRPGFQRMIDDIEDGKINCVVTKDLSRLGRNYILTGQYTEIYFPSKGVRYIAVNDNVDTLNGESELAPFLNILNELHARQTSKKVKAALHTRRMNGAHLGSHTPLGYRKDPDRKGHLLVDPETKWIVEKIFDLAAHGMGAAKITRILVEEKIPTPGWLHYSRDGTYAQFYQDAPEQKRYDWNLPTVKKILRDEVYIGNNICNRASTVSFKNKKQTRNPKAEWICVENTHDPIISRDVFDQVQGQIANRRRTQKDGTTQMFAGLLKCADCGWTMRFGRQSNGNHPGYYACGKYYQTVDRKCSMHFIRYDVLYAYVLDRLQFWAALAAADERQLLEQLLQSGGENRIAERKKRAAELRKAEKRKNTVNDLFVKMYEDWSAGRITESNFNLLSERYQTEQAELDDKITALKAAMEGAEQSAEDAGKWVKLIRQYSEITELDAPLLNTLIEKILVHEGKRGPDGIREQEVEIFYRFVGKIDR

SEQ ID NO: 34427 - DNA, 50 bp, Enterocloster clostridioformis
  source 1..50: mol_type = genomic DNA
ttacatcttaaagtaagatttacggaagttaaactcagttaaagatataa

SEQ ID NO: 34428 - DNA, 40 bp, Enterocloster clostridioformis
  source 1..40: mol_type = genomic DNA
tatttcgggctgatagacggagggcagacagctgtcatcg

SEQ ID NO: 34429 - DNA, 40 bp, Enterocloster clostridioformis
  source 1..40: mol_type = genomic DNA
tatttcgggctgatagacgacgggcagacagctgtcatcg

SEQ ID NO: 34430 - DNA, 50 bp, Enterocloster clostridioformis
  source 1..50: mol_type = genomic DNA
ttacattttccaaaaatacttaacacagttcacctggtcaaaagagataa

SEQ ID NO: 34431 - protein, 553 aa, Faecalibacterium prausnitzii
MREVEILKKKQLKCYLYTRVSTSMQVDGYSLDAQRDKLRKYAAYEDMIVAGEYSDEGFSGKNIQGRQDFQRMLNDIQDGKDDVSYVLVFKLSRFGRNAADVLNSLQLMQDFGVNLICVEDGIDSSKDAGKLMISVLSAVAEIERENIRTQTMAGREQKAREGKWNGGFAPYGYKLEDGNLVIAEDEVEVIRVIYDRYIHTNEGVAGVAKYLNRNGYVKKLRQNNTIPGFSRDFVKNVLYNPVYMGKIAYGRRRTEKKQGTRNEMHVVEQSEFPVYEGQHEAIISEEDWHLAQEKRKINSFKREKVNNPDHAHILSGILKCPCCGKSMYGNIAKAHSKDKKTRYYYYCKNTVTPTGHECSFRLNIEQTEINKFVAKIISAMVNNPRFVEAIQAKIGTAVDTEDMEKQIAVLQGQLKQAFGTKSRLERQMDTLDINDVHYDRKILDLQRRYDEQYDTIEEIEVQIGELQSQIRNIQQEKISGDNIYRLLLAFDEVYHSATEAEQKEFMKAFIERIEMFPEKRKDGSWIKKIVFNFPVPVDGEEVKELPLETETTV

SEQ ID NO: 34432 - DNA, 50 bp, Faecalibacterium prausnitzii
  source 1..50: mol_type = genomic DNA
cccttggaaactgaaacaactgttgagacggtatgtttattgtccaaact

SEQ ID NO: 34433 - DNA, 40 bp, Faecalibacterium prausnitzii
  source 1..40: mol_type = genomic DNA
cccgaggacgaagcattgcgaatgtgtgctcttgatgtca

SEQ ID NO: 34434 - DNA, 40 bp, Faecalibacterium prausnitzii
  source 1..40: mol_type = genomic DNA
cccgaggacgaagcattgcggatgtgtgctcttgatgtca

SEQ ID NO: 34435 - DNA, 50 bp, Faecalibacterium prausnitzii
  source 1..50: mol_type = genomic DNA
ccctttgtaaatgtaacatctgttggaacggtatctcactcttccataac

SEQ ID NO: 34436 - protein, 578 aa, Sphingobium xenophagum
MGQIATIYARFSNAEQGRGSSLDRQFRICLEMAERHSWQTDPSRILSDEGRSAFSGANRQPGGTLYEFEQQVEQGFYLNGHVLIVEHLDRISRQGYDEVLPFLTKLTQSGVTIATVDGDRVYPAFERVPMGQVMEVILKAELARDESQKKAKRLAAAWHSKIEKAQTNNGDHVAITSTVPAWLDVAPDTKKMTLNEDRVRVLREIFQLTIDGYGTPAIAKRLNARGEPVWNYRGVRSNNGWTVGYLTKIVLNRAVLGEYRPMKRPRGNVRPESKGVVILDYYPQAIDPIMFAKAQAARKERANSSGSWQLSHGNILSGIAKCSECGGRMSQQVTVRKGQLRTDGKRKGRKYPANNDISYLYCANARHRVFDEEAGQLKCSQTSKIRYEPLERTIVDIIAGYAAQAQDNTDPARIRELEIQIAEARRQQEGKRQQAESAARSFVSNGSAIMEKVMLELEGEVSEIEKRITALEKQLDAERANIPTDDPRAPEQAWFKRVGEIKRQIYSDDEQQRKEARVKMKQIVGRFVSQLSCDRNKETHMILGGAVGMFIGADGTILATGVVQDEIVGPNGERNWIP

SEQ ID NO: 34437 - DNA, 50 bp, Sphingobium xenophagum
  source 1..50: mol_type = genomic DNA
gctgttgactcctgcaacgcactggtaatagtgttataggagttacaatg

SEQ ID NO: 34438 - DNA, 40 bp, Sphingobium xenophagum
  source 1..40: mol_type = genomic DNA
cgtcggcacctccgccccggtcagcagcgtataaccgatc

SEQ ID NO: 34439 - DNA, 40 bp, Sphingobium xenophagum
  source 1..40: mol_type = genomic DNA
cgtcggcacctccgccccgatcagcagcgtataaccgatc

SEQ ID NO: 34440 - DNA, 50 bp, Sphingobium xenophagum
  source 1..50: mol_type = genomic DNA
gctgttgaccacacctattcagtgataatgttgttaggaagattatattg

SEQ ID NO: 34441 - protein, 638 aa, Phytobacter ursingii
MKPKLYSYVRFSSVKQREGNSLERQQDTALKIAARYNLELDTTAFHDLGMSAFKGKNAHEGKLSEFIKQIGAKVPVGSWLVVENLDRISRDDAWSALDIFKNILSKGIVVVTGMDEKVYKYADVKNNPTDLIISLLMFTRAHDESLTKKNRVEAQARSLIRHNLTREPGTPAKAIESVGQNVWWVDTKSGYVTPHPIYFTAAQKIIELKQNGETLIGIQRYLNEHYPAPKKRVYKDQTGQALTPKTELWGKHLIRTFLNPTIHGQKTFTLDKRDESGAIIYDFESDEPLKETFIIPDYYPALMSEVDYLTLSKLDRHRAITRSSSKYPAGNPEPEIPLLSGLGILFCGKCGSFMFKSGSSENKYRYICGSKIVQGKPCGKKGFTSYQLEHTVLQLIADHVWNNHQEDKTAWYESEIKQTSEVIDKLLKLATLTDSLEELAEQINSNKHKKVALEREFQQYKINRSEIQTTGWEQFRHFDVHDTKNPDRKRIRLKVKQAIKRIDCHDIDERHGYFEVTFADGKKQRIVIKFNRNRSPGVSYVEAQTVNDHDLLKMQGLVLHSFIDALISPEKFTQHIKDKHEVSILNPTFITELEDGTNQDKGNGMAIRVNNSTSKSYATVNGIKYEINSLEDLEKLSR

SEQ ID NO: 34442 - DNA, 50 bp, Phytobacter ursingii
  source 1..50: mol_type = genomic DNA
actgcgaataattgactgtcaggcttgcctaatatataattattcattgt

SEQ ID NO: 34443 - DNA, 40 bp, Phytobacter ursingii
  source 1..40: mol_type = genomic DNA
acaacgcgtgttggccggcttgccctgtggcataccgggg

SEQ ID NO: 34444 - DNA, 40 bp, Phytobacter ursingii
  source 1..40: mol_type = genomic DNA
acaacgcgtgttggccggcacgccctgtggcataccgggg

SEQ ID NO: 34445 - DNA, 50 bp, Phytobacter ursingii
  source 1..50: mol_type = genomic DNA
actgggaaaacccctcagtcagtcactccaaaaataaatctattcattct

SEQ ID NO: 34446 - protein, 528 aa, Escherichia coli
MKVPVWCYARISTLKQIDGFGIQRQINTINQFLQYVVLDHRLPFTLDVDNVTQMVAEGKSAFRGKNWNEKTKLGQYRKMVMDGVINDSVLIVENIDRLTRLDTFQAVEIISGLVNRGTTILEIETGMTYSRYIPESITVLVMQCNRANGESKRKSIMMQKSHANRYGKVSKVRPRWFDVVEIDGIKQYRPNETAKAIQRMYNDYINGIGAAHIVRTYGNTDNGKAWTLVTVLRALSDKRVADDARYPPIIDKELYDSVQALKAATNKKGNTHQKNMLNIFSGMSRCPVCNQSIIVKRNSHGNLFTVCLGKRTNKTCEARSISYFALERPLLTAISGLDFSEVYKHEDKNVLTLRDQWIQNERDIAAFRERLNKASRHEKFAILDELEIMNREQEELTIRLKSVDVPKDIQLTFDDDKLDLDTNYRIELNNRIKKLIQHINIVREDVSKSSYTIYCTIKYWTDVISHLVIIDVNIKRTGTGGTNTLTTTLRSVSSLNMDGTVSGNPDSDAWEYWKSFLDGTIGLVDYKK

SEQ ID NO: 34447 - DNA, 50 bp, Escherichia coli
  source 1..50: mol_type = genomic DNA
ggtgtacattcttgcatgactacgacagttatgttatgatgtacaccaca

SEQ ID NO: 34448 - DNA, 40 bp, Escherichia coli
  source 1..40: mol_type = genomic DNA
ggccccatcagcagcaatgaacagtcagtcgtaccaccgc

SEQ ID NO: 34449 - DNA, 40 bp, Escherichia coli
  source 1..40: mol_type = genomic DNA
ggccccatcagcagcaatgaccagtcagtcgtaccaccgc

SEQ ID NO: 34450 - DNA, 50 bp, Escherichia coli
  source 1..50: mol_type = genomic DNA
ggtgtacatggtgaaatgattaccacagtaaagttagttaatacatctat

SEQ ID NO: 34451 - protein, 561 aa, Burkholderia cepacia
MAASKKTKSKVYSYLRFSDPKQAAGSSADRQMEYAARWAAEHDMQLDASLTLRDEGLSAFHQRHIKQGALGVFLRAVEDGRILPGSVLIVEGLDRLSRAEPIQAQAQLAQIINAGITVVTASDGREYNRERLKAQPMDLVYSLLVMIRAHEESDTKSKRVKAAIRRQCEGWIAGTWRGIVRNGKDPHWIQQREDGAFELCPERVLAIKTMIDLFLAGHGAMEIARILSERALYVSNAGNYSTHMYRIVRNRALIGEKSLTVDGEEFRLSGYYPTLLTDEEFATLQDAMSERGRRKGKGEIPGIITGLSITSCGYCDMAVVSQNATKKRAKGSEIVRRLSCSGSTFNAGCPVGGTCDTETVERALMRYCSDQFNLTRLLEGDDGSARRASQLAVARQRAAEIESQIQRVTDALLSDDGVAPAAFMRRARELETELAQQRREIETLEHQIAASNAHEIPAAAEAWARLVDGVLALDYDARLKARQLVADTFRKIVLFQRGFTPLDDAPADRWKRTGSIGLLLVTKRGGMRLLNIDRKTGHWEAEDNLDLAPRHVNEVPLPHDM

SEQ ID NO: 34452 - DNA, 50 bp, Burkholderia cepacia
  source 1..50: mol_type = genomic DNA
tatacatttagcctaactctcggcaacccgaaagttaggcaaaatacata

SEQ ID NO: 34453 - DNA, 40 bp, Burkholderia cepacia
  source 1..40: mol_type = genomic DNA
catgctcgtcacgctcggcaacccgaagatcatggtgttc

SEQ ID NO: 34454 - DNA, 40 bp, Burkholderia cepacia
  source 1..40: mol_type = genomic DNA
catgctcgtcacgctcggcctcccgaagatcatggtgttc

SEQ ID NO: 34455 - DNA, 50 bp, Burkholderia cepacia
  source 1..50: mol_type = genomic DNA
cctacatttgaatcaaatctctccctccctaatgtttaactagaaacata

SEQ ID NO: 34456 - protein, 531 aa, Streptococcus equi
MSNTKRIGQTALYERLSRDDEMQGESNSITNQKQLLESYAKRNGFANIYHYTDDGVSGTTFDREGFQKMIKAVEENKVSTVIVKDMSRFGRDYLKVGFYTEILFKEKGVRFIAINNGIDSEKQAESDFTPFLNIMNEWYARDTSRKIQSIFRARMEEGKRVSPSVPYGYYRNPKNKQELLVDKESAKVVKRIYRLVIEGYGVTQIADILTKDKVLIPSAYAEIHYPENNHSSKKRGIEDPYFWTPTTVSYILEKQEYMGHTVLGKTICVDYKTKKRRKAKEDELIIFKNTHEAIIDEETWNNAQRLRKTVRRSPKYGTTSHPFTGLLICADCGGKLSYREPAEHKEKKYDSDYSFVCQHYRHRKGSCSMHYIKVKTVNEILLKSIKEITDFAKEEKQEFLKVMNKLSDEKREEKYQDDKTKLEKLSSRNEELTTLITKLYEDHALGKIPAKHFDRLFNIYDTEQQDLEKQIQYFEQEIESYHQRKVDTDKFLKMIEKYTDIEELTVPMINEYIEKVVVHEATGGRQGKNRK

SEQ ID NO: 34457 - DNA, 50 bp, Streptococcus equi
  source 1..50: mol_type = genomic DNA
ttatgtccttgacaaatcttcccaaaaggattaaccttttagggacagag

SEQ ID NO: 34458 - DNA, 40 bp, Streptococcus equi
  source 1..40: mol_type = genomic DNA
ctctagtgagactaaagggaatgaatcagtcatggaggaa

SEQ ID NO: 34459 - DNA, 40 bp, Streptococcus equi
  source 1..40: mol_type = genomic DNA
ctctagtgagactaaagggtgtgaatcagtcatggaggaa

SEQ ID NO: 34460 - DNA, 50 bp, Streptococcus equi
  source 1..50: mol_type = genomic DNA
ctttgtcaggggtacatcttcggctgaggattagcccaagagggacagag

SEQ ID NO: 34461 - protein, 556 aa, Streptococcus agalactiae
MSNTKRIGQTALYERLSRDDEMQGESNSITNQKQLLESYAKRNGFVNIYHYTDDGVSGTTFDREGFQKMIKAVEENKVSTVIVKDMSRFGRDYLKVGFYTEILFKEKGVRFIAINNGIDSEKQAESDFTPFLNIMNEWYARDTSRKIQSIFRARMEEGKRVSPSVPYGYYRNPKNKQELLVDKESAKVIKRIYRFVIEGYGVTQIADILTKDKVLIPSAYAEIHYPENNHSSKKRGIEDPYFWTPTTVSYILEKQEYMGHTVLGKTICLDYKTKKRRKAKEEELIIFKNTHEAIIDEETWNNAQRLRKTVRRSPKYGTTSHPFTGLLICADCGGKLSYREPAEHKEKKYDCDYCFVCQHYRHRKGSCSMHYIKVKTVNEILLKSIKEITDFAKEEKQEFLKVMNKLSDEKREEKYQEDKEKLEKLLSRNEELTTLITKLYEDHALGKIPVKHFDRLFNIYDTEQQDLEKQIQYFEQEIESYHQRKVDTDKFLKMIEKYTDIEELTVPMINEYIEKVVVHEATGGRKGKDRKQQVDVFFNFIGNCQVPQKADIEKMA

SEQ ID NO: 34462 - DNA, 50 bp, Streptococcus agalactiae; identical to SEQ ID NO: 34457
  source 1..50: mol_type = genomic DNA

SEQ ID NO: 34463 - DNA, 40 bp, Streptococcus agalactiae
  source 1..40: mol_type = genomic DNA
gtgtgtgctaattgatccaaagtgaaaagtgtttcagtaa

SEQ ID NO: 34464 - DNA, 40 bp, Streptococcus agalactiae
  source 1..40: mol_type = genomic DNA
gtgtgtgctaattgatccatggtgaaaagtgtttcagtaa

SEQ ID NO: 34465 - DNA, 50 bp, Streptococcus agalactiae; identical to SEQ ID NO: 34460
  source 1..50: mol_type = genomic DNA

SEQ ID NO: 34466 - protein, 551 aa, Streptococcus anginosus
MSNTKRTGQTALYERLSRDDEMQGESNSITNQKQLLESYAKRNGFVNIYHYTDDGVSGTTFDREGFQKMIKAVEENKVSTVIVKDMSRFGRDYLKVGFYTEILFKEKGVRFIAINNGIDSEKQAESDFTPFLNIMNEWYARDTSRKIQSIFRARMEEGKRVSPSVPYGYYRNPKNKQELLVDKESAKVVKRIYRLVIEGYGVTQIADILTKDKVLIPSAYAQIHYPENNHSSKKRGIDDPYFWTPTTVGYILEKREYMGHTVLGKTICLDYKTKKRRKAKEDELIIFKNTHEAIIDEETWNNAQRLRKTVRRSPKYGTTSHPFTGLLICSDCGGKLSYREPAEHKEKKYDCDYCFVCQHYRHRKGTCSMHYIKVKTVNEILLKSIKEITNFAKEEKQEFLKVMNKLSDEKREEKYQEDTTKLEKLSSRNAELTTLITKLYEDHALGKIPVKHFDRLFNTYDTEQQDLEKQIQYFEQEIESYHQRKVDTDKFLKMIEKYTNIEKLTVPMINEYIEKVVVHESTGGRKGKYRKQQVDVYFNFIGNCQVPQSEE

SEQ ID NO: 34467 - DNA, 50 bp, Streptococcus anginosus
  source 1..50: mol_type = genomic DNA
ttatgtccttgacaaatcttcacaaaaggattaacctcttagggacagag

SEQ ID NO: 34468 - DNA, 40 bp, Streptococcus anginosus
  source 1..40: mol_type = genomic DNA
atattgtgttacagatcctaaaggaacgatagtccttgag

SEQ ID NO: 34469 - DNA, 40 bp, Streptococcus anginosus
  source 1..40: mol_type = genomic DNA
atattgtgttacagatccttgaggaacgatagtccttgag

SEQ ID NO: 34470 - DNA, 50 bp, Streptococcus anginosus; identical to SEQ ID NO: 34460
  source 1..50: mol_type = genomic DNA

SEQ ID NO: 34471 - protein, 556 aa, Streptococcus constellatus
MSNTKRTGQTALYERLSRDDEMQGESNSITNQKQLLESYAKRNGFVNIYHYTDDGVSGTTFDREGFQKMIKAVEENKVSTVIVKDMSRFGRDYLKVGFYTEILFKEKGVRFIAINNGIDSEKQAESDFTPFLNIMNEWYARDTSRKIQSIFRARMEEGKRVSPSVPYGYYRNPKNKQELLVDKESSKVVNRIYRLVIEGYGVTQIADILTKDKVLIPSAYAEIHYPENNHSSKKRGIEDPYFWTPTTVGYILEKREYMGHTVLGKTICLDYKTKKRRKAKEDELIIFKNTHEAIIDEETWNNAQRLRKTVRRSPKYGTTSHPFTGLLICSDCGGKLSYREPAEHKEKKYDCDYCFVCQHYRHRKGTCSMHYIKVKTVNEILLKSIKEITDFAKEEKQEFLKVMNKLSDEKREEKYQDDKTKLEKLSSRNEELTTLITKLYEDHALGKIPVKHFDRLFNTYDTEQQELEKQIQYFENEIESYHQRKVDTDKFLKMIEKYTDIEELTVPMINEYIEKVVVHEATGGRKGKDRKQQVDVYFNFIGNCQVPQKADIEKMA

SEQ ID NO: 34472 - DNA, 50 bp, Streptococcus constellatus; identical to SEQ ID NO: 34457
  source 1..50: mol_type = genomic DNA

SEQ ID NO: 34473 - DNA, 40 bp, Streptococcus constellatus
  source 1..40: mol_type = genomic DNA
ttattgcgtaaccgatccgaaaggaacgatagtccttgag

SEQ ID NO: 34474 - DNA, 40 bp, Streptococcus constellatus
  source 1..40: mol_type = genomic DNA
ttattgcgtaaccgatccgtgaggaacgatagtccttgag

SEQ ID NO: 34475 - DNA, 50 bp, Streptococcus constellatus; identical to SEQ ID NO: 34460
  source 1..50: mol_type = genomic DNA

SEQ ID NO: 34476 - protein, 556 aa, Eubacterium sulci
MSNTKRTGQTALYERLSRDDEMQGESNSITNQKQLLESYAKRNGFVNIYHYTDDGVSGTTFDREGFQKMIKAVEENKVSTVIVKDMSRFGRDYLKVGFYTEILFKEKGVRFIAINNGIDSEKQAESDFTPFLNIMNEWYARDTSRKIQSIFRARMEEGKRVSPSVPYGYYRNPKNKQELLVDKESAKVVKRIYRLVIEGYGVTQIADILTKDKVLIPSAYAETHYPENNHSSKKRGIEDPYFWTPTTVGYILEKREYMGHTVLGKTISLDYKTKKRRKAKENELIIFKNTHEAIIDEETWNNAQRLRKTVRRSPKYGTTSHPFTGLLICSDCGGKLSYREPAEHKEKKYDCDYCFVCQHYRHRKGSCSMHYIKVKTVNEILLKSIKEITDFAKEEKQEFLKVMNKLSDEKREEKYQEDKEKLEKLSSRNAELTTLITKLYEDHALGKIPVKHFDRLFNTYDMEQQDLEKQIQYFEQEIESYHQRKVDTDKFLKMIEKYTDIEKLTVPMINEYIEKVVVYEATGGRQGKYRKQQVDVYFNFIGNCQVPQKVDIEKMA

SEQ ID NO: 34477 - DNA, 50 bp, Eubacterium sulci; identical to SEQ ID NO: 34457
  source 1..50: mol_type = genomic DNA

SEQ ID NO: 34478 - DNA, 40 bp, Eubacterium sulci
  source 1..40: mol_type = genomic DNA
ctatatcattatctttcggaacgattccattcactttatc

SEQ ID NO: 34479 - DNA, 40 bp, Eubacterium sulci
  source 1..40: mol_type = genomic DNA
ctatatcattatctttcggtgcgattccattcactttatc

SEQ ID NO: 34480 - DNA, 50 bp, Eubacterium sulci; identical to SEQ ID NO: 34460
  source 1..50: mol_type = genomic DNA

SEQ ID NO: 34481 - protein, 551 aa, Streptococcus agalactiae
MSNTKRTGQTALYERLSRDDEMQGESNSITNQKQLLESYAKRNGFTNIYHYTDDGVSGTTFDREGFQKMIKAVEENKVSTVIVKDMSRFGRDYLKVGFYTEILFKEKGVRFIAINNGIDSEKQAESDFTPFLNIMNEWYARDTSRKIQSIFRARMEEGKRVSPSVPYGYFRNPKNKQELLVDKESAKVVKRIYRLVIEGYGVTQIADILTKDKVLIPSAYAEIHYPENNHSSKKRGIEDPYFWTPTTVGYILEKREYMGHTILGKTICVDYKTKKRRKAKEDELIIFKNTHEAIIDEETWNNAQRLRKTVRRSPKYGTTSHPFTGLLICADCGGKLSYREPAEHKEKKYDSDYSFVCQHYRHRKGSCSMHYIKVKTVNEILLKSIKEITDFAKEEKQEFLKVMNKLSDEKRKEKYQEDTTKLEKLSSRNAELTTLITKLYEDHALGKIPAKHFDRLFNIYDTEQQDLENQIQYFENEIGSYHQRKVDTDKFLKMIEKYTDIEELTVPMINEYIEKVVVHEATGERKGKYRKQQVDVYFNFIGNCQVPQSEE

SEQ ID NO: 34482 - DNA, 50 bp, Streptococcus agalactiae; identical to SEQ ID NO: 34457
  source 1..50: mol_type = genomic DNA

SEQ ID NO: 34483 - DNA, 40 bp, Streptococcus agalactiae; identical to SEQ ID NO: 34463
  source 1..40: mol_type = genomic DNA

SEQ ID NO: 34484 - DNA, 40 bp, Streptococcus agalactiae; identical to SEQ ID NO: 34464
  source 1..40: mol_type = genomic DNA

SEQ ID NO: 34485 - DNA, 50 bp, Streptococcus agalactiae; identical to SEQ ID NO: 34460
  source 1..50: mol_type = genomic DNA

SEQ ID NO: 34486 - protein, 552 aa, Streptococcus equi
MSNTKRIGQTALYERLSRDDEMQGESNSITNQKQLLESYAKRNGFANIYHYTDDGVSGTTFDREGFQKMIKAVEENKVSTVIVKDMSRFGRDYLKVGFYTEILFKEKGVRFIAINNGIDSEKQAESDFTPFLNIMNEWYARDTSRKIQSIFRARMEEGKRVSPSVPYGYYRNPKNKQELLVDKESAKVVKRIYRLVIEGYGVTQIADILTKGKVLIPSAYAEIHYPENNHSSKKRGIEDPYFWTPTTVSYILEKQEYMGHTVLGKTICLDYKTKKRRKAKEDELIIFKNTHEAIIDEETWNNAQRLRKTVRRSPKYGTTSHPFTGLLICSDCGGKLSYREPAEHKEKKYDCDYCFVCQHYRHRKGSCSMHYIKVKTVNEILLKSIKEITDFAKEEKQEFLKVMNKLSDEKREEKYQEDKEKLEKLSSRNAELTTLITKLYEDHALGKIPVKHFERLFNTYDTEQQDLEKQIQYFEQEIESYHQRKVDTDKFLKMIEKYTDIEELTVPMINEYIEKIVVHEATGGRQGKNRKQQVDVYFNFIGNCQVPKKCYN

SEQ ID NO: 34487 - DNA, 50 bp, Streptococcus equi; identical to SEQ ID NO: 34457
  source 1..50: mol_type = genomic DNA

SEQ ID NO: 34488 - DNA, 40 bp, Streptococcus equi
  source 1..40: mol_type = genomic DNA
atattgcgtaactgacccaaaaggaacgatagtcattgaa

SEQ ID NO: 34489 - DNA, 40 bp, Streptococcus equi
  source 1..40: mol_type = genomic DNA
atattgcgtaactgacccatgaggaacgatagtcattgaa

SEQ ID NO: 34490 - DNA, 50 bp, Streptococcus equi; identical to SEQ ID NO: 34460
  source 1..50: mol_type = genomic DNA

SEQ ID NO: 34491 - protein, 556 aa, Bifidobacterium breve
MSNMKRTGQTALYERLSRDDEMQGESNSITNQKQLLESYAKRNGFINIYHYTDDGVSGTTFDREGFQKMIKAVEENKVSTVIVKDMSRFGRDYLKVGFYTEILFKEKGVRFIAINNGIDSEKQAESDFTPFLNIMNEWYARDTSRKIQSIFRARMEEGKRVSPSVPYGYYRNPKNKQELLVDKESSKVVKRIYRLVIEGYGVTQIADILTKDKVLIPSAYAEIHYPENNHSSKKRGIEDPYFWTPTTVGYILEKQEYMGHTVLGKTICLDYKTKKRRKAKEDELIIFKNTHEAIIDEETWNNAQRLRKTVRRSPKYGTTSHPFTGLLICSDCGGKLSYREPAEHKEKKYDSDYSFVCQHYRHRKGTCSMHYIKVKTVNEILLKSIKEITDFAKEEKQEFLKVMNKLSDEKREEKYQGDKEKLEKLSSRNAELTTLITKLYEDHALGKIPVKHFDRLFNIYDTEQQDLEKQIQYFEEEIESYHQRKVETDKFLKMIEKYTDIEELTVPMINEYIEKVVVHEATGGRKGKDRKQQVDVYFNFIGNCQVPQKEEIEKLA

SEQ ID NO: 34492 - DNA, 50 bp, Bifidobacterium breve
  source 1..50: mol_type = genomic DNA
ttatgtccttgacaaatcttcccaaaaggattaacctcatagggacagag

SEQ ID NO: 34493 - DNA, 40 bp, Bifidobacterium breve
  source 1..40: mol_type = genomic DNA
ctgggccgtcacggaccccaagggcgagctcaaacgagac

SEQ ID NO: 34494 - DNA, 40 bp, Bifidobacterium breve
  source 1..40: mol_type = genomic DNA
ctgggccgtcacggacccctggggcgagctcaaacgagac

SEQ ID NO: 34495 - DNA, 50 bp, Bifidobacterium breve; identical to SEQ ID NO: 34460
  source 1..50: mol_type = genomic DNA

SEQ ID NO: 34496 - protein, 548 aa, Parvimonas micra
MSNTKRTGQTALYERLSRDDEMQGESNFITNQKQLLESYAKRNGFVNIYHYTDDGVSGTTFDREGFQKMIKAVEENKVSTVIVKDMSRFGRDYLKVGFYTEILFKEKGVRFIAINNGIDSEKQAESDFTPFLNIMNEWYARDTSRKIQFIFRARMEEGKRVSSSVPYGYYRNPKNKQELLVDKESAKVVKRIYRLVIEGYGVTHIADILTKDKVLIPSAYAQIHYPENNHSSKKRGIEDPYFWTPTTVGYILEKREYMGHTVLGKTICLDYKTKKRRKAKEDELIIFKNTHKAIIDEETWNNAQRLRKTVRRSPKYGTTSHPFTGLLICADCGGKLSYREPAEYKEKKYDCDYYFVCQHYRHRKGSCSMHYIKVKTVNEILLKSIKEITDFAKEEKQEFLKVMNKLSDEKREEKYQDDKTKLEKLSSRNEELTTLITKLYEDHALGKIPAKHFDRLFNIYEQELEKQIQYFEDEIESYHQRKVDTDKFLKMIEKYTDIEELTVPMINEYIEKVVVHEATGGRKGKDRKQQVDVYFNFIGNCQVPQSEE

SEQ ID NO: 34497 - DNA, 50 bp, Parvimonas micra; identical to SEQ ID NO: 2087
  source 1..50: mol_type = genomic DNA

SEQ ID NO: 34498 - DNA, 40 bp, Parvimonas micra
  source 1..40: mol_type = genomic DNA
atgtaggataattgaaccaaatgtttctactacaaaggaa

SEQ ID NO: 34499 - DNA, 40 bp, Parvimonas micra
  source 1..40: mol_type = genomic DNA
atgtaggataattgaaccatgtgtttctactacaaaggaa

SEQ ID NO: 34500 - DNA, 50 bp, Parvimonas micra; identical to SEQ ID NO: 34460
  source 1..50: mol_type = genomic DNA

SEQ ID NO: 34501 - protein, 476 aa, Mycolicibacterium rutilum
MALRAAIYVRISQDRDGTRLGVERQEQDCRKLAQRLGWDVRNVYVDNDISAYSGKRRPEYQALLADIEDGALDGVVAWHPDRLHRSPLELETYIDLSNKFGIQTHTVQAGAWDLSTASGRAVARTLGAWARCESEHKGERIRRARQQQAKAGGWHGGIRPYGFEKDGVTIRPDEAAEIAKATEAIVSGVSLRSLVRDLNERGVPTATGRGPWTSVALKDTIMRPRTAGLSSYHGEIVGPAVWPPIVPEDTWRAACAILSDPARRTNGGRGGTIRWLGSGLYVCGVCGEAQLRVGTGGSVKRHTYRCGNRNIRDGGGHVTREASTLDAYVEEVIVTRLSEPGLLDGLLEADDDRDTAALRVELVAVRERQDELAGLFAAGQITARQLAIGTEQLTAKEEALAKALASAGRRNPIQMLCGAKDLRSLWFGTREGRSDGLSLGQRRALLDVLMTVTVLPAPRNRGGFDPNYVRIEWKVG

SEQ ID NO: 34502 - DNA, 50 bp, Mycolicibacterium rutilum
  source 1..50: mol_type = genomic DNA
gggtgccacaggtcagctgccgtgttcccgacactcaatctatggcacac

SEQ ID NO: 34503 - DNA, 40 bp, Mycolicibacterium rutilum
  source 1..40: mol_type = genomic DNA
tgcggccagcagtgtcgtcttgcccgccccggttccgccg

SEQ ID NO: 34504 - DNA, 40 bp, Mycolicibacterium rutilum
  source 1..40: mol_type = genomic DNA
tgcggccagcagtgtcgtctcgcccgccccggttccgccg

SEQ ID NO: 34505 - DNA, 50 bp, Mycolicibacterium rutilum
  source 1..50: mol_type = genomic DNA
gggtgcctctgtacagctgcccaatccgcgacacccacgtcaaagcacag

SEQ ID NO: 34506 - protein, 531 aa, Streptomyces lydicus
MAVEYACIICGKTEPNAIDLYTRKSKRLSKDDHRREQSTDAQREQGHRWGHRHGYAVRKVWKDIASGFKDVKRSDFDRALRALADEETPALWAYAIDRFSRKGAEDLLKVIGKARVIFDMDGLDSNEPRDRRWIINRAEEAREYSEGLSKRVRDTKEEQRDNGLWVAGRAPWGYTASRDRILSPDNEPFVCHIATHKEWSRAALVREVFRKIAQDGASTRDICRWLDGMGVPSPGGKKWRHTYVHRVTHNPAYSGWQVIQIRPGHAEAYRNSKGQRVRLKGTSLIAPELQRGAQEALTGQNLVPVERTYDTRPKHPLTGLLRCEGCGRSMPMGGRGYKCQAALGGRACQAIASARADAIERYVFERWLDRLTAAEDDDPILVAASERWTAREKPEETEEEQAVRAALRAAEAGLKRLLDDRQAGVYDGAAARYFGPLLRDATGAVDAARAEVSKYEGGGKVRLPFLSVDTETLTDAWESADLPLKRDLLRLAIDRITVRKAPRQGVRFNGRERVTIEWATPSDQEDMTRAA

SEQ ID NO: 34507 - DNA, 50 bp, Streptomyces lydicus
  source 1..50: mol_type = genomic DNA
aggtgtacaagagtcctcctcgccgaggaggagtagccccttagacacct

SEQ ID NO: 34508 - DNA, 40 bp, Streptomyces lydicus
  source 1..40: mol_type = genomic DNA
gatcaaggtcctgctggccgaggatcagggaatgatgcgg

SEQ ID NO: 34509 - DNA, 40 bp, Streptomyces lydicus
  source 1..40: mol_type = genomic DNA
gatcaaggtcctgctggccctggatcagggaatgatgcgg

SEQ ID NO: 34510 - DNA, 50 bp, Streptomyces lydicus
  source 1..50: mol_type = genomic DNA
aggtgtgcctggtgcttccaggccctggagaagaaggggatcagccacct

SEQ ID NO: 34511 - protein, 600 aa, Nocardia seriolae
MSQDLGMSPFIAPDVPEHLLDTVRVFLYARQSKGRSDGSDVSTEAQLAAGRALVASRNAQGGARWVVAGEFVDVGRSGWDPNVTRADFERMMGEVRAGEGDVVVVNELSRLTRKGAHDALEIDNELKKHGVRFMSVLEPFLDTSTPIGVAIFALIAALAKQDSDLKAERLKGAKDEIAALGGVHSSSAPFGMRAVRKKVDNLVISVLEPDEDNPDHVELVERMAKMSFEGVSDNAIATTFEKEKIPSPGMAERRATEKRLASIKARRLNGAEKPIMWRAQTVRWILNHPAIGGFAFERVKHGKAHINVIRRDPGGKPLTPHTGILSGSKWLELQEKRSGKNLSDRKPGAEVEPTLLSGWRFLGCRICGGSMGQSQGGRKRNGDLAEGNYMCANPKGHGGLSVKRSELDEFVASKVWARLRTADMEDEHDQAWIAAAAERFALQHDLAGVADERREQQAHLDNVRRSIKDLQADRKAGLYVGREELETWRSTVLQYRSYEAECTTRLAELDEKMNGSTRVPSEWFSGEDPTAEGGIWASWDVYERREFLSFFLDSVMVDRGRHPETKKYIPLKDRVTLKWAELLKEEDEASEATERELAAL

SEQ ID NO: 34512 - DNA, 50 bp, Nocardia seriolae
  source 1..50: mol_type = genomic DNA
gtgctgggttgttgtctctggacagtgatccatgggaaactactcagcac

SEQ ID NO: 34513 - DNA, 40 bp, Nocardia seriolae
  source 1..40: mol_type = genomic DNA
gagccggtttcacgcgatagtcatcgcgcggaaccggctc

SEQ ID NO: 34514 - DNA, 40 bp, Nocardia seriolae
  source 1..40: mol_type = genomic DNA
gagccggtttcacgcgatactcatcgcgcggaaccggctc

SEQ ID NO: 34515 - DNA, 50 bp, Nocardia seriolae
  source 1..50: mol_type = genomic DNA
gggctgggtctccccctctgggcactggaccgtggggccgtgctgggcac

SEQ ID NO: 34516 - protein, 600 aa, Nocardia brasiliensis; identical to SEQ ID NO: 34511

SEQ ID NO: 34517 - DNA, 50 bp, Nocardia brasiliensis; identical to SEQ ID NO: 34512
  source 1..50: mol_type = genomic DNA

SEQ ID NO: 34518 - DNA, 40 bp, Nocardia brasiliensis
  source 1..40: mol_type = genomic DNA
catccccgttgacgctttcgttatctccataaacctgcgg

SEQ ID NO: 34519 - DNA, 40 bp, Nocardia brasiliensis
  source 1..40: mol_type = genomic DNA
catccccgttgacgctttccttatctccataaacctgcgg

SEQ ID NO: 34520 - DNA, 50 bp, Nocardia brasiliensis; identical to SEQ ID NO: 34515
  source 1..50: mol_type = genomic DNA

SEQ ID NO: 34521 - protein, 573 aa, Paenibacillus naphthalenovorans
MALEVEVIKASRKISDRNAGKLSDVLRVAPYARVSTDTEEQLNSYKSQVAYYTDLVSKRSDWVLVDIYADEAITGTQVTKREDFQRMIKDCMDGKIDMIITKSISRFARNTLDTLKYVRMLKEKNIAVFFEDENINTLTMDGELLLVILSSVAQQEVENISANVKKGLKMKMKRGELVGFQSCLGYDYDVNTKQITVNQEEAKIVRYIFERYTSGIGAYVIAKELTEAGHKTKYGRVEWQDTTILGIIKNEKYKGDLLQGKTFTVDPISKRRLDNYGEEDQFYVKNHHEPIVSEEVFEKAQDILHRRGENRRRGARGKRDKYSRKFAFSSKLECAFCGSNLSRRNWHSGTPHEKVIWQCVTATKKGKKYCSHSKALEEKLIEGAFVESYKLVCRNNSDVLDELMKRMESLFSDQNNQKRLNKIISDIEALERKRCRLIDLCLDEKIDRATYEQKYAELDTSLTKLLEEKEQLEQSAQEEIDLGKRLEHFRKVLQTNEVLTAFDRNVFESIVDKVIIGENTDQGSPEPYKLTFVYKTGFHNSIQSKMDKQKKSLRSERGKVPSYSENDTCGVSN

SEQ ID NO: 34522 - DNA, 50 bp, Paenibacillus naphthalenovorans
  source 1..50: mol_type = genomic DNA
tgccttcctattccgagaacgacacatgtggagtgtgtaataggaatgca

SEQ ID NO: 34523 - DNA, 40 bp, Paenibacillus naphthalenovorans
  source 1..40: mol_type = genomic DNA
tatgttcccgcataccgcgcatgtggagtgtctaatattg

SEQ ID NO: 34524 - DNA, 40 bp, Paenibacillus naphthalenovorans
  source 1..40: mol_type = genomic DNA
tatgttcccgcataccgcgggtgtggagtgtctaatattg

SEQ ID NO: 34525 - DNA, 50 bp, Paenibacillus naphthalenovorans
  source 1..50: mol_type = genomic DNA
tgcctcactggctccagaaatgcaggtatggagcgggtttcaggaatgca

SEQ ID NO: 34526 - protein, 698 aa, Faecalibacterium prausnitzii
MPKEPKITALYERLSRDDDLAGESNSITNQKKYLEDYAQKNGFKNIRHFTDDGFSGVNFNRPGFQSLIKEVEAGNVETLIVKDMSRLGRNYLQVGFYTEVLFPQKNVRFLAINNSIDSNNASDNDFAPFLNIMNEWYAKDTSNKIKAVFDARMKDGKRCSGSIPYGYNRLPNDKQTLVVDPVASEVVKRIFLLANEGKSPRTIAELLTEEKVLIPAAYAKKYHPGQYNGTKFSNPYLWGTSSVRTILGRQEYLGHTVLRKSVSTNFKLHKRKETDEDEQYVFQNTHEPIISQELWDSVQKRRCRVNRASAWGTHTNRLSGYLYCADCGRRLTLQTHYSKKDGSTQYSYRCGGYASRVNGCTAHSISADNVEALILASVKRFSRFVLKDEETFALELQSLWKEKREEKPKQNQSELKRCQKRYDELSALIRSLYENLMSGLLPERQYKQLMAQYDSEQAELESQMETMKSEIAEDKSSSADIRHFISLIRKCKNPTEISDSMFNELVDKIVVYEAEGAGNARTQKVDIYFNYVGQVDIAYTEEELAELKAQKEQEERQRMEKQRKREKAYREKRKAKKIAENGGEIIRTKTCPYCGKVFTPTSNRQLFCSRDCWNQARQEQKKADREAERGTHYYRQRACAVCGHSYWPTHSQQEFCSEECRRINHNRKTLEFYHKKKGNLKLDPEATPTPKPKEDNAA

SEQ ID NO: 34527 - DNA, 50 bp, Faecalibacterium prausnitzii
  source 1..50: mol_type = genomic DNA
aaacctcttgacgaagtccagcccgaaggctatactttaataggatgata

SEQ ID NO: 34528 - DNA, 40 bp, Faecalibacterium prausnitzii
  source 1..40: mol_type = genomic DNA
tgccatcgaacttgcgcccgaaggcaccggataccgtgca

SEQ ID NO: 34529 - DNA, 40 bp, Faecalibacterium prausnitzii
  source 1..40: mol_type = genomic DNA
tgccatcgaacttgcgccctcaggcaccggataccgtgca

SEQ ID NO: 34530 - DNA, 50 bp, Faecalibacterium prausnitzii
  source 1..50: mol_type = genomic DNA
aatactcctgccaaattcaagcactcaggctaaattgccagaggatgaga

SEQ ID NO: 34531 - protein, 544 aa, Streptomyces albidoflavus
MDTEPRADRQTLEALGFSPEELQELGLWEPPTGAPNDLADVYLRRSKKSDTLSVLREQLRRMVRRVHDHNRQVRHVWFEQRSASKAYVKREEFDKANAAVLSDRASTALYVYKVSRLSRRGAGQVGLLLDSYDEAGAYIYVVSEGLDSRSSRMILTMLSEQAREQVRDLTDFVEIGIAAAKAEGRWTGGVTPYGLRCEPGSGKLSHDPAEYPTARRIAEYLVANRTPGWVKDKLNSEGLTSRSGKPWSTTGIIALAHSVSWAGLVPKRERALINGKYVGKYHRGGEPLIGPDGMPVRCGEGVITPAERQKILANLASRSRPGSPIGDRSRGKRETKALLLGWGTCGRCKGPYRNDGPHYRCRNRKELGATVCIGSSANRQAADDAMAVLWINHITALPPDSPVILAIAREWLSYQNPEASARRADVQAALESAVRRELTLGKERFVIGRMPEAVYETLYAELTAQIESLKRELAELDTEPDLTPLMDPLSVIDLWNDQDVAGKRALIGAALESVEFRPSKGRGYREPMLDRMTPRWKHQGGGAW

SEQ ID NO: 34532 - DNA, 50 bp, Streptomyces albidoflavus
  source 1..50: mol_type = genomic DNA
gaattggttcccttagtccaagggtgcccctgggctaagattgccaacta

SEQ ID NO: 34533 - DNA, 40 bp, Streptomyces albidoflavus
  source 1..40: mol_type = genomic DNA
gatctggtccgacatcgcctgtccctggtgctatgtagga

SEQ ID NO: 34534 - DNA, 40 bp, Streptomyces albidoflavus
  source 1..40: mol_type = genomic DNA
gatctggtccgacatcgccgctccctggtgctatgtagga

SEQ ID NO: 34535 - DNA, 50 bp, Streptomyces albidoflavus
  source 1..50: mol_type = genomic DNA
gagatggcacctcctgtgcaaggggccccctggggtggagcagccaacaa

SEQ ID NO: 34536 - protein, 564 aa, Streptococcus suis; identical to SEQ ID NO: 11786

SEQ ID NO: 34537 - DNA, 50 bp, Streptococcus suis; identical to SEQ ID NO: 11787
  source 1..50: mol_type = genomic DNA

SEQ ID NO: 34538 - DNA, 40 bp, Streptococcus suis
  source 1..40: mol_type = genomic DNA
gaatataaaatggcgcgtgaagccttagctatgtttcgtg

SEQ ID NO: 34539 - DNA, 40 bp, Streptococcus suis
  source 1..40: mol_type = genomic DNA
gaatataaaatggcgcgtggtgccttagctatgtttcgtg

SEQ ID NO: 34540 - DNA, 50 bp, Streptococcus suis
  source 1..50: mol_type = genomic DNA
aaactcccaggactgagcccagctgtagaaggcatggaaaccctcagagt

SEQ ID NO: 34541 - protein, 526 aa, Pseudooceanicola nitratireducens
MKRRVAIYARYSADLQKATSITDQVAMAQKYCDEQGYDVVEIFTDEEITGRHLRRPGFQELKKAVEERRIDLVVVEMLDRLSRRTADALHSWELLKFSGVDLFSIKEGQQDFLTVLLRGYGAQAFSESVGFHTRRGMQGALGRGRLHTSAFGYRVLSEKTEGLSREVDAEQAVVVLRIYEEAAAGKSALQIAHGLNADGIKAPRGGTWDASTIRGNRKRGEGILHNRLYIGEAQVCRTTQSYHPETGARRVDLSPNEMVSATFPELQIVPDKLWAAVQAKLKEDQVGRTENPVRSRRRKHLFSGLMVCGCCGAHYVKMSSTSFACNEGRKKACKNRTNISQKRLERRVFGRLRDAFRSPELFAAFEAALREERQKLASFDPATEIARLESLIRKEEAKQESIFRAIEEGAPFAAFRARSKAIDGELTALRARLEEASSRGRVAAHDLPDTATLFARAVDAMETLLGDPDLVHQAHTYLRNLITRIVLVPDPAAEHGVSIKLETDFAALLGGADTGHAHGLASCLMC

SEQ ID NO: 34542 - DNA, 50 bp, Pseudooceanicola nitratireducens
  source 1..50: mol_type = genomic DNA
acttcaaatatcggttggggagggggcgctgccttaccgttgtttgaagt

SEQ ID NO: 34543 - DNA, 40 bp, Pseudooceanicola nitratireducens
  source 1..40: mol_type = genomic DNA
aatgacaaaggggaaagggggcgctgccccctcggcgtca

SEQ ID NO: 34544 - DNA, 40 bp, Pseudooceanicola nitratireducens
  source 1..40: mol_type = genomic DNA
aatgacaaaggggaaagggaccgctgccccctcggcgtca

SEQ ID NO: 34545 - DNA, 50 bp, Pseudooceanicola nitratireducens
  source 1..50: mol_type = genomic DNA
aattcaaatgtagtttgaggaggaacaggtgccttaaaaatgtgtaaaaa

SEQ ID NO: 34546 - protein, 510 aa, Bacillus velezensis; identical to SEQ ID NO: 5981

SEQ ID NO: 34547 - DNA, 50 bp, Bacillus velezensis
  source 1..50: mol_type = genomic DNA
ttatgtcgtactcaatcaataatcgtcacaagcattatagtataagtata

SEQ ID NO: 34548 - DNA, 40 bp, Bacillus velezensis
  source 1..40: mol_type = genomic DNA
taaggtcatcccgataatcgttacgacagatccggttacg

SEQ ID NO: 34549 - DNA, 40 bp, Bacillus velezensis
  source 1..40: mol_type = genomic DNA
taaggtcatcccgataatccgtacgacagatccggttacg

SEQ ID NO: 34550 - DNA, 50 bp, Bacillus velezensis
  source 1..50: mol_type = genomic DNA
ttaggtcgtctaccatgatttatacgctgaagcaatttcccataagcata

SEQ ID NO: 34551 - protein, 510 aa, Pantoea ananatis
MIDKTYKIHKVRVAQYLRMSTNHQEFSLDNQAQFIKKYADEHNMEILHTYDDAGKSGVSTTGRHDFNKLVNDVLTKEINIDAVLVYDVSRFGRFKDPQEGIYYKYLLKMNNVDVIYCADNLPENSETETFILSSLMYAAGAYSKNLSIKVFAGHVNLVKRGYYQGGTPGYGLKRKLLDNNNKPKMLLAHGERKSLQTDRIVLVPGTKKEIELIKKIFNMFIFDGLNEYLIASRLNQEGYRFSDKTEWTRGRIHSVLINSRYTGRYIYNRTSQKLKTKRIKNPEEDWVEYNSFFKPIISEEKFRLAKEIIDNRSIKMSDEKILDCLRKILSKHGKISGFIIDEENSSPSSSVIANRFGGLLNAYKLIDYTPERDYQYLEINSYLRKKHSDIVNKIQNEIISSEVKILENKLISVNKALSFSIVLSRCKKTGLNKHRWVVRLDRSLNPEISIIARMNSLNTEPVDYYILPSIEFLEHELKIKDNNTLLFEMYRFDDIKPFFDMLSTDDKDVL

SEQ ID NO: 34552 - DNA, 50 bp, Pantoea ananatis
  source 1..50: mol_type = genomic DNA
aggacttttcaacccatacgccaatgatgcagcagtacctataatatcaa

SEQ ID NO: 34553 - DNA, 40 bp, Pantoea ananatis
  source 1..40: mol_type = genomic DNA
ttgagtacgcacacgccaatgatgcagcaatatttacgcc

SEQ ID NO: 34554 - DNA, 40 bp, Pantoea ananatis
  source 1..40: mol_type = genomic DNA
ttgagtacgcacacgccaaccatgcagcaatatttacgcc

SEQ ID NO: 34555 - DNA, 50 bp, Pantoea ananatis
  source 1..50: mol_type = genomic DNA
atgatttttatcaccacactccagcctggcagcagtccaaataataataa

SEQ ID NO: 34556 - protein, 509 aa, Pantoea ananatis; identical to SEQ ID NO: 29981

SEQ ID NO: 34557 - DNA, 50 bp, Pantoea ananatis
  source 1..50: mol_type = genomic DNA
aggacttttccacccatactccgatgatgcagcagtacctataatatcaa

SEQ ID NO: 34558 - DNA, 40 bp, Pantoea ananatis; identical to SEQ ID NO: 34553
  source 1..40: mol_type = genomic DNA

SEQ ID NO: 34559 - DNA, 40 bp, Pantoea ananatis; identical to SEQ ID NO: 34554
  source 1..40: mol_type = genomic DNA

SEQ ID NO: 34560 - DNA, 50 bp, Pantoea ananatis; identical to SEQ ID NO: 34555
  source 1..50: mol_type = genomic DNA

SEQ ID NO: 34561 - protein, 595 aa, Clostridium leptum
MKGQDNRKYAIYSRKSKFTGKGESIENQIELCRQHIKLHHDNVLEEDILIFEDEGFSGGNVNRPQFQAMMKQIRANQIQAVVCYRLDRISRNVGDFAKLKDEFDYYNVEFTSIRDDFDTTSPSGRAMMMMVSVFAQLERETTAERIRDNMHELAKSGRWLGGTTPTGYKSTQIVGSVTVDGKERKAYKLDIIKEEAEIIRLIFTKFIETNSLTKTDTYLLQNNITTKNGKNFTRFSIRSILQNPVYMIADQNAWEYFDSLGVEIYAEQSEFDGKHGIMAYNKTIQKSGKSNQMRDMDEWIVAVGKHKGLIAGADWVKVQDMLHQNRSKSYRKPKSNVALLSGLLYCGNCGSFMRPKLSQRTNAQGEKIYSYLCETKERSRCKLCNSKNPNGNELDKMICEQIKLISEDSSDFIKNLESVQRKLEGNREEYDQQLNALKKELQENEQQIANLVDTLAKMPNTPAFDYITEQINTLHEKNEKIKNRTQELESLTKNHLYSSEEFDRTKELLKSFGQSFDTMGVEQKRMALRAFIRRIVWDGKNVHVVLFGDSETDIDSEDLLQALSDDAGAEPEESAMPNARTASGGSPQPKRGDSE

SEQ ID NO: 34562 - DNA, 50 bp, Clostridium leptum
  source 1..50: mol_type = genomic DNA
cgcagccaaagcgaggggatagcgaaaccaatcccctcataacggctctt

SEQ ID NO: 34563 - DNA, 40 bp, Clostridium leptum
  source 1..40: mol_type = genomic DNA
tgcggccaggtgcattgaaaatgaagtcctgatgtttttc

SEQ ID NO: 34564 - DNA, 40 bp, Clostridium leptum
  source 1..40: mol_type = genomic DNA
tgcggccaggtgcattgaagatgaagtcctgatgtttttc

SEQ ID NO: 34565 - DNA, 50 bp, Clostridium leptum
  source 1..50: mol_type = genomic DNA
cgaagcaaatgcctgggggtagaggaagcattcccccagcatttgctctt

SEQ ID NO: 34566 - protein, 558 aa, Stenotrophomonas maltophilia
MCGTLHPMTRAYTYIRFSTPEQSEGNSLERQQAAIDAFVREKNLTLTESSAFQDLGVSSYRGANLRNGLGKFIAEVDAGRVPKGSYLLVESLDRLSRQKVMDALSLLVSLIDKGIKIVPLNDDGAQVLDKASGLGPLVIALSVMHRANEESETKSRRVKAAWQAKRRNAANKPVSRRAPEWLEFDEATGSFKPIPERVDAVRKIYELADAGLGRGRIVKYLNSNGFASFRNPNEGWQTSSVSKILRNRSLIGFYQPHRMYYDSATGVKKRVPDGDEVPDYYPKVLDEDLFLRVNARQYAPIASLVGRQGETLTNLFTGFVYCHWCGAPMSMANKGPGRKGGRYLVCSKGRRGKDCKYRSWNYDDVEMYVLYALRQLDLAAVLAGVDTNQRRQDIRTELARVSLELADSERRLASLSAELVSQAPANVRTLVSVVATLEGVADEQRRRCDELQAEDAALGMAVDDPGTFAQNLLRLYDQMASVEKQQLYLLRVRLRQNISRLLSRIDVMAVGRGEPHVTKNGNNSPKLFLTFKDGRRRMVLPIGKNSVHLSDLPPIGKG

SEQ ID NO: 34567 - DNA, 50 bp, Stenotrophomonas maltophilia
  source 1..50: mol_type = genomic DNA
aggggtgtaatggcttccaaatggaagcaatgtgtggcacattacacccc

SEQ ID NO: 34568 - DNA, 40 bp, Stenotrophomonas maltophilia
  source 1..40: mol_type = genomic DNA
gccaggactaccgatcaacaacagatggtgcccaccggca

SEQ ID NO: 34569 - DNA, 40 bp, Stenotrophomonas maltophilia
  source 1..40: mol_type = genomic DNA
gccaggactaccgatcaacgacagatggtgcccaccggca

SEQ ID NO: 34570 - DNA, 50 bp, Stenotrophomonas maltophilia
  source 1..50: mol_type = genomic DNA
aagggacaatggatttctaaatgggagaaaggtgtgatgccttccacacc

SEQ ID NO: 34571 - protein, 528 aa, Paenibacillus naphthalenovorans
MKTAIYTRKSTLKVGQKETIENQIKICKRKAKELGLVIVDVKTDSATGTDDNSRPEVKELIKDAINGNYQCVIMKGISRLYRKTSKGLELIERLDQSGIRVVTVEEHFDSFAPENRTGTGKLDLSRLTMYLMFAEMESKKLADRVKYTQIEKAYAGEWNQPSSVPYGYEYVPETKKLQIKDSQADIIRLIFKLYIEGMGMKSIAHYLNGNNQDKIQYPSPKSKRWNEYTIGFILKNEVYIGSVVYNKRSKKERPYKNPEAIGKTTEDIYIGNDFNDKDKWITVKNAHDPIIGEDTFSKAQEIMGVKAARKGIRNNVSLFAGVAKCGKCGHGMTFKRGKKNSDGKVVTRNNYYCMNYIRYGSQYCDSHHVRAEDLEETIFNKLDELRNNKEQFDQIFNDSIKHIDDGSVSDDKEMKRIEKEIEQVAKKMDKLLEKNMEGKINDNQFELFNKRYSDDLDRLTSRLEEIKLKSQNNIDKELLLKSFRNRLDEIADYRNKSLEEKRYTILKLIDFIIIEDGIIKHLQFNFSY

SEQ ID NO: 34572 - DNA, 50 bp, Paenibacillus naphthalenovorans
  source 1..50: mol_type = genomic DNA
agtatctacactgttagtatgggcgttcctatttaatcactgtagataat

SEQ ID NO: 34573 - DNA, 40 bp, Paenibacillus naphthalenovorans
  source 1..40: mol_type = genomic DNA
ggtttacacggagcagggcgttccggtcatggccgacggc

SEQ ID NO: 34574 - DNA, 40 bp, Paenibacillus naphthalenovorans
  source 1..40: mol_type = genomic DNA
ggtttacacggagcagggcaatccggtcatggccgacggc

SEQ ID NO: 34575 - DNA, 50 bp, Paenibacillus naphthalenovorans
  source 1..50: mol_type = genomic DNA
agaagaaactgacaaagtatgggaaatcctatttgaaaagggtagaaact

SEQ ID NO: 34576 - protein, 567 aa, Clostridium perfringens
MKTVAIYSRKSRFTGKGDSIENQIEMCKEHIKKFVSPKVEFLIYEDEGFSGGNTNRPAFQRLINDIKYGNIDLLICYRLDRISRNVADFSSVLDVLQEYKVDFISIKEQFDTSSPMGRAMIYIASVFAQLERETIAERIKDNMLEMAKKGKWTGGKLPLGFTSKKIAYIDEEGKKRFKVTLEHDSKDLEFVKFLYEKYLELGSLHKLETYTHENNIRSASGKIFEKSTLKIILQNPIYVKADENVFNYFENKGWSVYGEPDGLHSLLSYNKTETAKKDGKLTKRNKDESESLVAVSDVKGFIDSSLWLKVQYQFKKNKNTFPRLGKTHNALLVGKLFCGNCGTRMIIQHGRTSTKTGIKTFYYVCSLKKTSKKKLCSAHNVKTDFLENLVLDSLEKLYYKKDFINDSLKINLKENKDNIKEINTTKKLIELNKNKINSLIEKLSLDFDNVLSDILIPQIKKIKIENDVLESKLEELKLKKQESEMNRIEIDLITSLLNKCKNIKELTRTEQKQIIDCLVDSIYYYSNDNGNDKIKIKFINDIDSINTLLSDEEKRQFEKLSFYSHSM

SEQ ID NO: 34577 - DNA, 50 bp, Clostridium perfringens
  source 1..50: mol_type = genomic DNA
agttgtctttttattcacacagcatgttcaatatgaacaaaaagacaaca

SEQ ID NO: 34578 - DNA, 40 bp, Clostridium perfringens; identical to SEQ ID NO: 4918
  source 1..40: mol_type = genomic DNA

SEQ ID NO: 34579 - DNA, 40 bp, Clostridium perfringens
  source 1..40: mol_type = genomic DNA
agtagtcataagcttagcaattccagtatctaataaaaca

SEQ ID NO: 34580 - DNA, 50 bp, Clostridium perfringens
  source 1..50: mol_type = genomic DNA
cactgtcctggaggtcacacagcaattgcaataagatgagaaaaaaaaga

SEQ ID NO: 34581 - protein, 548 aa, Herbaspirillum rubrisubalbicans
MKFNKVYVYVRFSSDAQAEGNSLARQRELAQGYIAKLDVDARDVQWVEDAGTSAYSGAHLHTGELGKLLKLLEKEGAVGKLVIFESVDRASRQGSLGFFKILNMLLEAGASVYFLDQPQQPPFDRNSPAPFYMTYLSLKAEMAFAESARKSDMSKANWRKRRAMAIDEKQPYSKECPRWLKVVDGKYELIEERVESIRRVFELASKGWGKSKIVRYANSSKWPVPGKGNVWHTSLLTRLFDNRALIGEFRAHFLDEQNKVITSEPVENYFPPALKEDVFRAVAMQVNKEARFGNRKDSNSLNYLRGLAKCACGGTWRRLNKNSGKQAGYAQYSCARRVIGLTQCSNISSRNFDYSFIGVACAKIPSLLRMVEGTHHQQMTMLMDKLESVEDRINRLLDLYEQMLMPEVASRLQKARDEREELRRAIKNEELLAPPDASFDFGDALAVYLPAFLDLHGDDEAGMQAHETRLLFRARLLESVKSVSVAADRKAFTVTLATGLQFSEPIYDPSENEDDLGFGPPGDDIDADDLATLEEERTRAFKRLHRKP

SEQ ID NO: 34582 - DNA, 50 bp, Herbaspirillum rubrisubalbicans
  source 1..50: mol_type = genomic DNA
aaatctagttgcagctcaactatggtaatggtagagttctaaatagataa

SEQ ID NO: 34583 - DNA, 40 bp, Herbaspirillum rubrisubalbicans
  source 1..40: mol_type = genomic DNA
atcggggagcccgacgatggtgaaggccggcaagccattg

SEQ ID NO: 34584 - DNA, 40 bp, Herbaspirillum rubrisubalbicans
  source 1..40: mol_type = genomic DNA
atcggggagcccgacgatgcagaaggccggcaagccattg

SEQ ID NO: 34585 - DNA, 50 bp, Herbaspirillum rubrisubalbicans
  source 1..50: mol_type = genomic DNA
agatttgtttttccctcaactatgcagagggaagagggaagaatagaaat

SEQ ID NO: 34586 - protein, 427 aa, Aeromonas hydrophila
MIKAGDVVILEKLDRLSRQGIAKTQAMLQEILSQGVVVVSLMDGLTLDRDSLNDLTLVIRIAIASDIAHKESQAKSLRIQANKDAAKAKAKQGIAIPRKLPFWLSLIDGKYELNNRLSVLQTIIDHKRLGASLAKIAGALNNANIPTANQGGIWNPSTLRDVIANPALYGAHQVRTKVQGKYQPNEIITDYYPAVISFSEYTELNSKAVQRPAGASETNHISGLVYCDHCGKKMAAKSRKNKTGKVTYYYCRYALLKTCEHQAHVRDLHKHIISNADRLEIQQSIKEDKRANEILIELSQIDTRIQELSGSLANMSSVVATSAIISALSSLEGQKKALIAEQKQSVPIAADAVKTLLTLVDDPKQFNIQLKKIVNEIRVSQSGKGHIVKVKRHDGHKIVFHTNGIMGSSDTKQISAELQELLADVDV

SEQ ID NO: 34587 - DNA, 50 bp, Aeromonas hydrophila
  source 1..50: mol_type = genomic DNA
ttatgtgcttttaattgttatcgcaaaatgttacaatcaaaggcacacac

SEQ ID NO: 34588 - DNA, 40 bp, Aeromonas hydrophila
  source 1..40: mol_type = genomic DNA
ctgtgaagcccgctatcgcaagggattccacgcccacgaa

SEQ ID NO: 34589 - DNA, 40 bp, Aeromonas hydrophila
  source 1..40: mol_type = genomic DNA
ctgtgaagcccgctatcgcctgggattccacgcccacgaa

SEQ ID NO: 34590 - DNA, 50 bp, Aeromonas hydrophila
  source 1..50: mol_type = genomic DNA
ttctgtgctttatcttgttaatggctaatcccacaagtaatggcacaagc

SEQ ID NO: 34591 - protein, 646 aa, Ruminococcus sp
MNAGYVRLSRDDEKKNYVSIENQKLIISQYADDHGVKIDRWYEDDGISGYIFDRPGFRQMMADLDKEIDTVYVKDFSRLGRHNAKVLLLLDEFQERGKHLIVIDDNYDSMDSSDDTIGIKTWFNERYVKDTSKKIKRAIGARQKEGTLITRPPFGYRRNEKDKTILEIVPKEAEYIKQIYDLYLSGSGYRKIATYLTEHGAPTPSMIQREREIEEGRLSKRLVASKWSDAMIKEILDNDFYIGTFRLKKRARNTVHGKDKRVPKEEQCIFENHHPAIIDKATFSLMQELKEKRNCTNYRGSRGQWLGSEIPHPFGSCLYCKDCGSRLTPIKRQTSSRERKYYICTTYNTKGRRYCSKAHLIEEDNLMEDVLTYIKMCRNALCEVIATYDLKDFEAEKKTVEEKRKELHGEISDRKNQLKVLLTQKVKDLATSSGNEDLIHETYDSMQKDLLAQIHGLEMQLKELAETAIETPDVKDTLRNALDVVDKIIDGGTLDRRDIELLIEKIVVDEDGMPEITLKYGLSNLISYSPANEMNRRENTIIAIVLMLIAEDTRGYTSAKYLSEHITDLGFKKTKQSILPYIELAKSLGILEPTENSLKPYRIVKAKKEITLLASDYLPETFNLSAEMTAKQLSNGYLHCVTDDRW

SEQ ID NO: 34592 - DNA, 50 bp, Ruminococcus sp
  source 1..50: mol_type = genomic DNA
atttacattgtgttacagacgacaggtggcgtacatatatccatgtaaat

SEQ ID NO: 34593 - DNA, 40 bp, Ruminococcus sp
  source 1..40: mol_type = genomic DNA
agttcttggcggtcgtaagggtggcatgccggaaatggta

SEQ ID NO: 34594 - DNA, 40 bp, Ruminococcus sp
  source 1..40: mol_type = genomic DNA
agttcttggcggtcgtaagcttggcatgccggaaatggta

SEQ ID NO: 34595 - DNA, 50 bp, Ruminococcus sp
  source 1..50: mol_type = genomic DNA
atttaactttttaaacacaagaaactttgagtacatgttaacatataaac

SEQ ID NO: 34596 - protein, 484 aa, Cytobacillus firmus
MKVGLYIRVSTEEQAKEGYSISAQKQKLKSFCISQDWEVAGLYADEGVSAKDTNRPELKRMLEDIANNKVDCVLVYRLDRLTRSVFDLYKLLEVFEKHNCKFKSATEVYDTTTAMGRMFITIVAALAQWERENMGERIAFGFTEKVRQGKYALNFRPIGYDLDLETGKLTINTSEALIIKLIFDLYLKGYGANKICKYLNANGIKTKAGNNWNDKPLMQILKNPLYKGYIRWNENVIPSKHDAIIEPEVFDHVQNTIVSRRTADPRRVSSEYIFSGKLKCNSCGSSLVGFYTTSKVSSGEVRKYRQYRCLKKKTGECKGFRNVSERKLEEAFIDYISKEDFSNFIEESASAAENTLNTTNSPNGCDKAYLEKELEKIERRKKKWQYAWADDEDAMSYEDFKERMKEAKVEEERLKDLLSTFEVTQVDDLSYDQQEIIKVLKDIRRNWQNLETNEKKNTIDSLIEQIHIEYKDNELIIKEIDYYS

SEQ ID NO: 34597 - DNA, 50 bp, Cytobacillus firmus
  source 1..50: mol_type = genomic DNA
tttagttcttccataaccaatcaaccttcatagggaatggaagaactaaa

SEQ ID NO: 34598 - DNA, 40 bp, Cytobacillus firmus
  source 1..40: mol_type = genomic DNA
gcgtgtaccctcttttcttccttcatagcttgatccaaaa

SEQ ID NO: 34599 - DNA, 40 bp, Cytobacillus firmus
  source 1..40: mol_type = genomic DNA
gcgtgtaccctcttttcttacttcatagcttgatccaaaa

SEQ ID NO: 34600 - DNA, 50 bp, Cytobacillus firmus
  source 1..50: mol_type = genomic DNA
tttttttttaggattaacaatcaaacttcagaggaaacactagaaatata

SEQ ID NO: 34601 - protein, 542 aa, Eubacterium rectale
MIYQKGSSLFNVAIYIRLSREDGDKEESDSVGNQRKLLTEYVNKHDDFILYDVYIDDGFTGTNFDRPDFHRMIADIEDNKVNCVVVKDLSRFGRDYIDTGRYLERIFPELNVRFISVTDNIDSMKQAYDMLLPIKNIFNEQYARDISNKVQATVKSKQKAGEFIGAFTSYGYKKSPANKNKLVIDEYASEVVKRVFTMYAQGIGKQSIAKILNAEGILCPSEYKKLNGENYKNCNRLEKTSYWTYSTVNIMLKNEMYIGNMIQGKKHQRMRSKQRPVEKENWIRVENTHEPIIDRQLWDKVQKLLTKKHRDIDLETNKNIFAGFIKCGDCGRAMMKNFWRRADGSRSYSFYCGTYKRSGKDYCTPHTLPFQVLNDIVLGDLKQIIRNVENLQELVKSQSFTATKIRKSTDIELTKLKTELERVKKLKKSIYEDYKDELISKEEFLSYREDYQQKETLYSKQIETLEEKKKESVTEDVFETPWLRRLLELKDIEELDRDIIVEMIDQITVYENRKLKISYNFGNELEHLFSSVYCEDLEKKAI

SEQ ID NO: 34602 - DNA, 50 bp, Eubacterium rectale
  source 1..50: mol_type = genomic DNA
aatttgcgtaaactacaaccagcacatggaggttgtagataacgcaagtg

SEQ ID NO: 34603 - DNA, 40 bp, Eubacterium rectale
  source 1..40: mol_type = genomic DNA
tattgtaattgacccggggcatggtggaagtgatcccggt

SEQ ID NO: 34604 - DNA, 40 bp, Eubacterium rectale
  source 1..40: mol_type = genomic DNA
tattgtaattgacccggggtttggtggaagtgatcccggt

SEQ ID NO: 34605 - DNA, 50 bp, Eubacterium rectale; identical to SEQ ID NO: 8825
  source 1..50: mol_type = genomic DNA

SEQ ID NO: 34606 - protein, 542 aa, Eubacterium rectale
MIYQKGSSLFNVAIYIRLSREDGDKEESDSVGNQRKLLTEYVNKHDDFILYDVYIDDGFTGTNFDRPDFHRMIADIEDNKVNCVVVKDLSRFGRDYIDTGRYLERIFPELNVRFISVTDNIDSMKQAYDMLLPIKNIFNEQYARDISNKVQATVKSKQKAGEFIGAFTSYGYKKSPANKNKLVIDEYASEVVKRVFTMYAQGIGKQSIAKILNAEGILCPSEYKKLNGENYKNCNRLEKTSYWTYSTVNIMLKNEMYIGNMIQGKKHQRMRSKQRPVEKENWIRVENTHEPIIDRQLWDKVQKLLTKKHRDIDLETNKNIFAGFIKCGDCGRAMMKNFWRRADGSRSYSFYCGTYKRSGKDYCTPHTLPFQVLNDIVLGDLKQIISNVENLQELVKLQSFTAPKIRKSTDIELTKLKTELERVKRLQKAIYEDYKDELISKEEFLSYREDYQQKETLYSKQIETLEEKKNENVTESIFETPWLRRLLELKDIEELDRDIIVEMIDQITVYENRKIKISYNFGNELEHLFSSVYCEDLEKKAI

SEQ ID NO: 34607 - DNA, 50 bp, Eubacterium rectale; identical to SEQ ID NO: 34602
  source 1..50: mol_type = genomic DNA

SEQ ID NO: 34608 - DNA, 40 bp, Eubacterium rectale; identical to SEQ ID NO: 34603
  source 1..40: mol_type = genomic DNA

SEQ ID NO: 34609 - DNA, 40 bp, Eubacterium rectale; identical to SEQ ID NO: 34604
  source 1..40: mol_type = genomic DNA

SEQ ID NO: 34610 - DNA, 50 bp, Eubacterium rectale; identical to SEQ ID NO: 8825
  source 1..50: mol_type = genomic DNA

SEQ ID NO: 34611 - protein, 537 aa, Eubacterium rectale
MIYQKASNLFNAAVYIRLSREDGDKEESDSVGNQRKLLTEYVNKHDDFILYDVYIDDGFTGTNFDRPDFHRMIADIENNKVNCVVVKDLSRFGRDYIDTGRYLERIFPELNVRFISVTDNIDSMKQSYDMLLPIKNIFNEQYARDISNKIQATVKSKQKAGEFIGAFTSYGYNKSPANKNKLVIDEYASEVVKRVFSMYAQGIGKQSIAKILNAEGILCPSEYKKLNGENYKNCTRLEKTSYWTYSTINVMLQNELYIGNMVQGKKHQRMRSKQRLVDKENWIRVENTHEPIIDHQLWDKVQKLLTKKHRDIDLETNKNIFAGFIKCGDCGRAMMKNLWQHADGSKSYSFYCGTYKRSGKNYCTPHTLPFQVLNDIVLGDLKQIISNVENLQELVKLQSFTAPKIRKSTDIELTKLKTELERVKRLQKAIYEDYKDELISKEEFLSYREDYQQKETLYSKQIETLEEKKNENVTESIFETPWLRRLLELKDIEELDRDIIVEMIDQITVYENRKIKISYNFGNELEHLFSSVYCKDL

SEQ ID NO: 34612 - DNA, 50 bp, Eubacterium rectale
  source 1..50: mol_type = genomic DNA
aatttgcgtaaactacaatcaacacatggaggttgtagataacgcaagtg

SEQ ID NO: 34613 - DNA, 40 bp, Eubacterium rectale; identical to SEQ ID NO: 34603
  source 1..40: mol_type = genomic DNA

SEQ ID NO: 34614 - DNA, 40 bp, Eubacterium rectale; identical to SEQ ID NO: 34604
  source 1..40: mol_type = genomic DNA

SEQ ID NO: 34615 - DNA, 50 bp, Eubacterium rectale; identical to SEQ ID NO: 8825
  source 1..50: mol_type = genomic DNA

SEQ ID NO: 34616 - protein, 542 aa, Eubacterium rectale
MIYQKGSSLFNVAIYIRLSREDGDKEESDSVGNQRKLLTEYVNKHDDFILYDVYIDDGFTGTNFDRPDFHRMIADIEDNKVNCVVVKDLSRFGRDYIDTGRYLERIFPELNVRFISVTDNIDSMKQAYDMLLPIKNIFNEQYARDISNKVQATVKSKQKAGEFIGAFTSYGYKKSPANKNKLVIDEYASEVVKRVFTMYAQGIGKQSIAKILNAEGILCPSEYKKLNGENYKNCNRLEKTSYWTYSTVNIMLKNEMYIGNMIQGKKHQRMRSKQRPVEKENWIRVENTHEPIIDRQLWDKVQKLLTKKHRDIDLETNKNIFAGFIKCGDCGRAMMKNFWRRADGSRSYSFYCGTYKRSGKDYCTPHTLPFQVLNNIVLGDLKQIIRNVENLQELVKSQSFTATKIRKSTDIELTKLKTELERVKKLKKSIYEDYKDELISKEEFLSYREDYQQKETLYSKQIETLEEKKKESVTEDVFETPWLRRLLELKDIEELDRDIIVEMIDQITVYENRKLKISYNFGNELEHLFSSVYCEDLEKKAI

SEQ ID NO: 34617 - DNA, 50 bp, Eubacterium rectale; identical to SEQ ID NO: 34602
  source 1..50: mol_type = genomic DNA

SEQ ID NO: 34618 - DNA, 40 bp, Eubacterium rectale; identical to SEQ ID NO: 34603
  source 1..40: mol_type = genomic DNA

SEQ ID NO: 34619 - DNA, 40 bp, Eubacterium rectale; identical to SEQ ID NO: 34604
  source 1..40: mol_type = genomic DNA

SEQ ID NO: 34620 - DNA, 50 bp, Eubacterium rectale; identical to SEQ ID NO: 8825
  source 1..50: mol_type = genomic DNA

SEQ ID NO: 34621 - protein, 537 aa, Eubacterium rectale; identical to SEQ ID NO: 34611

SEQ ID NO: 34622 - DNA, 50 bp, Eubacterium rectale; identical to SEQ ID NO: 34612
  source 1..50: mol_type = genomic DNA

SEQ ID NO: 34623 - DNA, 40 bp, Eubacterium rectale
  source 1..40: mol_type = genomic DNA
tattgtaatagacccgggccatggtggaagtgatcccggt

SEQ ID NO: 34624 - DNA, 40 bp, Eubacterium rectale
  source 1..40: mol_type = genomic DNA
tattgtaatagacccgggctttggtggaagtgatcccggt

SEQ ID NO: 34625 - DNA, 50 bp, Eubacterium rectale; identical to SEQ ID NO: 8825
  source 1..50: mol_type = genomic DNA

SEQ ID NO: 34626 - protein, 542 aa, Eubacterium rectale
MIYQKGSSLFNVAIYIRLSREDGDKEESDSVGNQRKLLTEYVNKHDDFILYDVYIDDGFTGTNFDRPDFHRMIADIEDNKVNCVVVKDLSRFGRDYIDTGRYLERIFPELNVRFISVTDNIDSMKQAYDMLLPIKNIFNEQYARDISNKVQATVKSKQKAGEFIGAFTSYGYKKSPANKNKLVIDEYASEVVKRVFTMYAQGIGKQSIAKILNAEGILCPSEYKKLNGENYKNCNRLEKTSYWTYSTVNIMLKNEMYIGNMIQGKKHQRMRSKQRPVEKENWIRVENTHEPIIDRQLWDKVQKLLTKKHRDIDLETNKNIFAGFIKCGDCGRAMMKNFWRRADGSRSYSFYCGTYKRRGKDYCTPHTLPFQVLNDIVLGDLKQIIRNVENLQELVKSQSFTATKIRKSTDIELTKLKTELERVKKLKKSIYEDYKDELISKEEFLSYREDYQQKETLYSKQIETLEEKKKESVTEDVFETPWLRRLLELKDIEELDRDIIVEMIDQITVYENRKLKISYNFGNELEHLFSSVYCEDLEKKAI

SEQ ID NO: 34627 - DNA, 50 bp, Eubacterium rectale; identical to SEQ ID NO: 34602
  source 1..50: mol_type = genomic DNA

SEQ ID NO: 34628 - DNA, 40 bp, Eubacterium rectale; identical to SEQ ID NO: 34603
  source 1..40: mol_type = genomic DNA

SEQ ID NO: 34629 - DNA, 40 bp, Eubacterium rectale; identical to SEQ ID NO: 34604
  source 1..40: mol_type = genomic DNA

SEQ ID NO: 34630 - DNA, 50 bp, Eubacterium rectale; identical to SEQ ID NO: 8825
  source 1..50: mol_type = genomic DNA

SEQ ID NO: 34631 - protein, 542 aa, Blautia faecis
MLYQKGSNLFNVAIYIRLSREDGDKEESDSVGNQRKLLTEYVNKHDDFILYDVYIDDGFTGTNFNRPDFHRMIADIEDNKVNCVVVKDLSRFGRDYIDTGRYLERIFPELNVRFISVTDNIDSMKQAYDMLLPIKNIFNEQYARDISNKVQATVKSKQKAGEFIGAFTSYGYKKSPANKNKLVIDEYASEVVKRVFTMYAQGIGKQSIAKILNAEGILCPSEYKKLNGENYKNCNRLEKTSYWTYSTIKVMLQNEIYIGNMVQGKKHQRMRSKQRLVEKENWIRVENTHEPIIDRQLWDKVQKLLTKKHRDIDLETDKNIFAGFIKCGDCGRAMMKNFWRRADGSKSYSFYCGTYKRSGKDYCTPHTLPFQVLNDIVLGDLKQIIRNVENLQELVKSQSFTATKIRKSTDIELIKLKAELERVKKLKKSIYEDYKDELISKEEFLSYREDYQQKETLYSKQIETLEEKKKESVAEDVFETPWLRRLLELKDIEELDRDIIVEMIDQITVYENRKLKISYNFGNELEHLFSSVYCEDLEKKAI

SEQ ID NO: 34632 - DNA, 50 bp, Blautia faecis; identical to SEQ ID NO: 34602
  source 1..50: mol_type = genomic DNA

SEQ ID NO: 34633 - DNA, 40 bp, Blautia faecis
  source 1..40: mol_type = genomic DNA
tattatgattgacgccgggcatggcggcaacgacccggga

SEQ ID NO: 34634 - DNA, 40 bp, Blautia faecis
  source 1..40: mol_type = genomic DNA
tattatgattgacgccgggtttggcggcaacgacccggga

SEQ ID NO: 34635 - DNA, 50 bp, Blautia faecis; identical to SEQ ID NO: 8825
  source 1..50: mol_type = genomic DNA

SEQ ID NO: 34636 - protein, 494 aa, Paenibacillus odorifer
MKAAIYIRVSTDEQALEGFSIEAQKRRLLAYADSQDWEVAEVYIDDGWSAKDLKRPEMKRMISDIQEHIFDVVLVYKLDRMTRSASDCDHLLKIMETYNVKFQSCTESFETRTATGRLFIRLVADIAQWERENTAERVRFGMEQMVMEGRRPGGPINFGYDKDEKLVEDEVMQIRMLRKFYLEGDGIKGVAQKLNAMGFLRRGYKWTSFSVWYILDNPYYAGKLRYGGKKANGKYASRKKEGVVDLIIQEGSQETVFTWEEYEEHKAEMKRRSFDGYSKVREYWFSGVLICGKCGSKMSGRYHQNKRKDGSYNKITSYICVGRQTGRGCDMPMFRQELVEKLFLEWIEDRIAIDEGTMREIKVSKKEKANLSLRDDLNNELKRIKERRKKWQRMFADDLITQDELREHNKDEQENEKVVLSELEKLPEEETKLSEDMNEVLFGIPEVWPLMSDGDKKELILEIFKEIKLYTPVGKTHGRKGQFIPASIEQVIYN

SEQ ID NO: 34637 - DNA, 50 bp, Paenibacillus odorifer
  source 1..50: mol_type = genomic DNA
cgtgtgtgttttggtatccttggtaatccgtagatatcattctacacacg

SEQ ID NO: 34638 - DNA, 40 bp, Paenibacillus odorifer
  source 1..40: mol_type = genomic DNA
aggatcattgtggtaaggaaacgcatccaactcgtcaata

SEQ ID NO: 34639 - DNA, 40 bp, Paenibacillus odorifer
  source 1..40: mol_type = genomic DNA
aggatcattgtggtaaggatacgcatccaactcgtcaata

SEQ ID NO: 34640 - DNA, 50 bp, Paenibacillus odorifer
  source 1..50: mol_type = genomic DNA
cgtgtgtgtatatatatacgtatatatacgtgtatatatatatacacacg

SEQ ID NO: 34641 - protein, 556 aa, Agrobacterium rhizogenes
MALAFSYARISSKKQLGGDGLRRQVEAAEKYALEHGLEIDTSLSDVASGFHQDHVKFGALGGFLELVNNGKIPVGSVLIVESLDRLSRADVLTAQSQLLDIIRSGIDVVTLADKYRYSRNNDFSQLIFSLMSMARAHDESQVKSVRGKAYLAQLHSDVKAGIKARVHHLPSWLEQTQIGTSKEYEFTLRESVSTVQKIFELYEKGYGIAKIAIWLNENGILTLQESRRSNPDPNKIWRRKVVGEILNSVAVRGDLAIGDTVVEGYYPAAVDPVTWWRVNDRYNNKSKKATNGRTGLGYTNLFAGISKCFHCGGPARVIGGGSGHRYITCEKIKETGELCTGKGKYGKTSLRYDILEKAVLDNVATYCHLPEIPTVSSDDLKRQVIEIQTGIADIDRRISNIIAMAEITDHPDDKTDLMTRLKALRSDKSRQTAEIERVTSEIRTLETVRDDFTTIHKTIEDERSKWDTFSGDDLFQSRSLVNSKLREIVSVVSIDAVDQSAYVSVAGATRIWEINAKGEVTRSTDFSNLSEEALVKMANNVGLKTSHEAIQRVKRI

SEQ ID NO: 34642 - DNA, 50 bp, Agrobacterium rhizogenes
  source 1..50: mol_type = genomic DNA
aaactgacaagagttaccttgatgaagatcaaagggacacttgtcaattt

SEQ ID NO: 34643 - DNA, 40 bp, Agrobacterium rhizogenes
  source 1..40: mol_type = genomic DNA
aaaaaggatgtccttgatgaatctcaacacgccgcagttt

SEQ ID NO: 34644 - DNA, 40 bp, Agrobacterium rhizogenes
  source 1..40: mol_type = genomic DNA
aaaaaggatgtccttgatgattctcaacacgccgcagttt

SEQ ID NO: 34645 - DNA, 50 bp, Agrobacterium rhizogenes
  source 1..50: mol_type = genomic DNA
aatctcatagggggtaccttcataatgatcaaaggtaatattttcattta

SEQ ID NO: 34646 - protein, 557 aa, Agrobacterium tumefaciens
MTTAYIYARISSKKQIDGDGLRRQVEAAEKYAKDNNFDVDDTLYDIASGFHQKHVSGGALGAFLELVKSGKIQPGSVLIVEALDRLSRANVLVAQNQLFSLLLSGVDVVTLEDNFRYSRDNDSLNQFYNSPHKMARGYDESNIKSLRGKAYLAQLHEDVKAGRKARVHHLPSWLEQTQIGTSKEYEFTLRESVSTVQKIFELYEKGYGIAKIAIWLNENGILTLQESRRSNPDPNKIWRRKVVGEILNSVAVRGDLAIGDTVVEGYYPAAVDPVTWWRVNDRYNNKSKKATNGRTGLGYTNLFAGISKCFHCGGPARVIGGGSGHRYITCEKIKETGELCTGKGKYGKTSLRYDILEKAVLDNVATYCHLPEIPTVSSDDLKRQVIEIQTGIADIDRRISNIIAMAEITDHPDDKTDLMTRLKALRSDKSRQTAEIERVTSEIRTLETVRDDFTTIHKTIEDERTKWDTLSGDDLFQSRSLVNSKLREIVSVVSIDAVDQSAYVSVAGATRIWEINAKGEVTRSTDFSDLSEDALVKMASGVGLKADRNAIQRVKQI

SEQ ID NO: 34647 - DNA, 50 bp, Agrobacterium tumefaciens; identical to SEQ ID NO: 34642
  source 1..50: mol_type = genomic DNA

SEQ ID NO: 34648 - DNA, 40 bp, Agrobacterium tumefaciens
  source 1..40: mol_type = genomic DNA
aaaaaggatgtccttgatgaatctcaacatgccgcaattt

SEQ ID NO: 34649 - DNA, 40 bp, Agrobacterium tumefaciens
  source 1..40: mol_type = genomic DNA
aaaaaggatgtccttgatgattctcaacatgccgcaattt

SEQ ID NO: 34650 - DNA, 50 bp, Agrobacterium tumefaciens; identical to SEQ ID NO: 34645
  source 1..50: mol_type = genomic DNA

SEQ ID NO: 34651 - protein, 514 aa, Vibrio parahaemolyticus
MKAYIYSRISSAIQKKGHGLDRQQDIALTYATQLGFDISEEVLQDVASGYHGKQMEGRLGVFLEGIKRGKIESPAALIVESLDRLGREHTMDALPRFIDIVNHGVEIHEVSTGIVYNREETHKIHIAIAIMERAHNESLMKSKRARAAANKRLQRAQQGENVVINVNLPCWIRSQDGKLELVPEYAVVIRRIFELYLEGKGSNKVAQILREENHPYFTSNIHSKKIRSRVWTDQRVMDIIKKDSTCGVFRSTVNPDTVIDGYYPAAIDKATFERAQALRMSRVRTAKKSKKGLNILSGLLRCGHCGSSLQYTRSYSNKKKTRMYENLRCRDRAARMNCDSRSVPLRPLEKLILGWVGTIPLFDIKAASNDELEQKKAELTQLEQQAENLVELLATGLTRVKDKYLQLEQQIDSVKKEISSLSVTNSSSVDKIDYFKAIDLENEEYREQVQQELALIIDRVSVKCDGEDAEIDIFLNSRIHNHQRFIGKKKQLDKARQTMRTLRPCAAHVDSFVD

SEQ ID NO: 34652 - DNA, 50 bp, Vibrio parahaemolyticus
  source 1..50: mol_type = genomic DNA
tacagttgtttacattggaacagcacgctgttagcatgtataccacagtt

SEQ ID NO: 34653 - DNA, 40 bp, Vibrio parahaemolyticus
  source 1..40: mol_type = genomic DNA
gaaagtgcactaccacggcacgcttatcgatggcactgtt

SEQ ID NO: 34654 - DNA, 40 bp, Vibrio parahaemolyticus
  source 1..40: mol_type = genomic DNA
gaaagtgcactaccacggccagcttatcgatggcactgtt

SEQ ID NO: 34655 - DNA, 50 bp, Vibrio parahaemolyticus
  source 1..50: mol_type = genomic DNA
tacagttttacttgtagaaacagacaaattttagcaagatcacaacattt

SEQ ID NO: 34656 - protein, 472 aa, Streptococcus lutetiensis
MNTKRKVAIYSRVSTLHQAEEGYSIGQQIEALTKYCQAMGWVIYDNYSDGGFSGGKLERPAMQKMIQDAESGKFDTVVVYKLDRLSRNVRDTLYLVKDVFNANNVDFVSLQENIDTKSAMGNLFITLLSAIAEFEREQIKERMQLGVKGRAKSGKTTSWHTPPYGYIYNQETQMLNIEPFAAETVKNIFDKLNSGWSIMEITTFLRKNHPDNWRPTKVTRILSNISYTGKVKYKGEIFDGLHEPIISDETYTRAQQMLRERSEKATNTRAFQGKYLLSRIVKCGYCGAPLQIDSYRPKKDGTKTRTYSCPNRFTGRAKATIYNNGKFCEKSRRHKADDIEKYVLTEISKLQLNPKIIESLYKGKPEANLDTYYNQLKKVNDKLSKLNDLYINGLIDLDNLKEKSDKILKEKNSIEEIIAKNKNRPNNKPAFEKVIKMEDISTMTYEEQKKIVRMLVSRVEVTPDEIRLIFKL

SEQ ID NO: 34657 - DNA, 50 bp, Streptococcus lutetiensis
  source 1..50: mol_type = genomic DNA
tattaggatttagtcccgaccatcaatactatcgagactaaaacccaaca

SEQ ID NO: 34658 - DNA, 40 bp, Streptococcus lutetiensis
  source 1..40: mol_type = genomic DNA
catcggatttccaatcataaagtttggcgcaaagacgcgc

SEQ ID NO: 34659 - DNA, 40 bp, Streptococcus lutetiensis
  source 1..40: mol_type = genomic DNA
catcggatttccaatcatactgtttggcgcaaagacgcgc

SEQ ID NO: 34660 - DNA, 50 bp, Streptococcus lutetiensis
  source 1..50: mol_type = genomic DNA
tattattatggcaaatctaccatccttactttcctggaataaaccctaca

SEQ ID NO: 34661 - protein, 536 aa, Blautia wexlerae
MLRQTNQQPITALYPRLSHEDELQGESNSISNQKRILETYAKQNGFSNLRWYTDDGYSGANFQRPGFQAMLADIEAGKVGTVIVKDMSRLGRNYLQVGMYTEMIFPQKGVRFIAINDGVDSAQGDNDFAPLRNIFNEWLVRDTSKKIRAVKRSKGMSGKPITSKPVYGYLMDEDENFIIDEEAAPVVKQIYNLCLAGNGPTKIARMLTEQQIPTPGTLEYRRTGSTRRYHPGYECKWATNTVVHILENREYTGCLVNFKTEKLSYKVKHSVENPPEKQVIFENHHEPIIDTQTWERVQELRKQRKRPNRYDEVGLFSGILFCADCGSVMYQQRYQTDKRKQDCYICGNYKKRTHDCTAHFIRTDLLTAGVLSNLRKVTSYAAKHEARFMKLLIEQNEDGGKRRNAAKKKELEATEKRIAELSAIFKRLYEDSVTGRISDERFTELSADYEAEQRELKERAAAIQAELSKAQEATVNAEKFMNVVRRHTSFEELTPTLLREFVEKIVVHECSYDENKTRRQDIEIYYSFVGKVDLPE

SEQ ID NO: 34662 - DNA, 50 bp, Blautia wexlerae
  source 1..50: mol_type = genomic DNA
ttacttctttatcacacatcagtaaatgcttatgtttagtaaagaagcaa

SEQ ID NO: 34663 - DNA, 40 bp, Blautia wexlerae
  source 1..40: mol_type = genomic DNA
ctgttacagcccttatcagaatagacaccaaatgtcgcac

SEQ ID NO: 34664 - DNA, 40 bp, Blautia wexlerae
  source 1..40: mol_type = genomic DNA
ctgttacagcccttatcagtttagacaccaaatgtcgcac

SEQ ID NO: 34665 - DNA, 50 bp, Blautia wexlerae
  source 1..50: mol_type = genomic DNA
tttcttttttcctgttcttctgtattttcttatctttttacaataagcaa

SEQ ID NO: 34666 - protein, 590 aa, Streptococcus agalactiae
MKKDVKVIKGDTTLKRTASGCVERSIKRVAAYCRVSTDTEDQINSYNSQVEHYTDFIKQNNEWTLAGIYADEAITGTQVDRRIDFQRLINDCMNGDIDMVITKSISRFARNTLDTLKYVRKLKEYNVAVFFEEENINTLTMDGELLLTILSSVAQQEVENISANVKKGLRMKMERGEMVGFQGCLGYDYDPETKSISVNEKEAEIVRYIFRRYLEGVGGMVISRELEEQGYLSPRGYKRWTETTVLGIIKNEKYKGDLLMGKTFTVDPISKRRLDNFGEQDKFYIENHHEPIISEEDFEKAQGIRLRRAKNRNTVANNGGKREKYSRKYAFSSMLECGFCGHNLSRRNWHSSSEYTKVIWQCVNATKNGKKYCPHSKGIEEEAIEKAFMESYRQVCHNNVEITNEFLKTVEEELKDNSLAKDLKKITNQLDKILKKEKDLVELRLNESISMDIYQDKYNEIAISKEKLLAEKRTLEVTLTDEKALKKRLEGFKKLLESNKYLEEFDRAVFESIVDKIIIGGTNDEGEIDPAMITIIYKTGKKDSQNGRLFKSRRKNAKVVEENDGDKLYSQSSNEVNKLCSYSTDNTCGV

SEQ ID NO: 34667 - DNA, 50 bp, Streptococcus agalactiae
  source 1..50: mol_type = genomic DNA
atgttcctattcaacagacaacacatgtggagtgcatagcgttgatacaa

SEQ ID NO: 34668 - DNA, 40 bp, Streptococcus agalactiae; identical to SEQ ID NO: 23678
  source 1..40: mol_type = genomic DNA

SEQ ID NO: 34669 - DNA, 40 bp, Streptococcus agalactiae
  source 1..40: mol_type = genomic DNA
ttattcccaatgacacatctggtggagtgtgtggctctgc

SEQ ID NO: 34670 - DNA, 50 bp, Streptococcus agalactiae
  source 1..50: mol_type = genomic DNA
atgggcatttagtacagagaacactggtgaagtgaaaagttttgttagaa

SEQ ID NO: 34671 - protein, 590 aa, Streptococcus agalactiae
MKKDVKVIKGDTTLKRTASGCVERSIKRVAAYCRVSTDTEDQINSYNSQVEHYTDFIKQNNEWTLAGIYADEAITGTQVDRRIDFQRLINDCMNGDIDMVITKSISRFARNTLDTLKYVRKLKEYNVAVFFEEENINTLTMDGELLLTILSSVAQQEVENISANVKKGLRMKMERGEMVGFQGCLGYDYDPETKSISVNEKEAEIVRYIFRRYLEGVGGMVISRELEEQGYLSPRGYKRWTETTVLGIIKNEKYKGDLLIGKTFTVDPISKRRLDNFGEQDKFYIENHHEPIISEEDFEKAQGIRLRRAKNRNTVANNGGKREKYSRKYAFSSMLECGFCGHNLSRRNWHSSSEYTKVIWQCVNATKNGKKYCPHSKGIEEEAIEKAFMESYRQVCHNNVEITNEFLKTVEEELKDNSLAKDLKKITNQLDKILKKEKDLVELRLNESISMDIYQDKYNEIAISKEKLLAEKRTLEVTLTDEKALKKRLEGFKKLLESNKYLEEFDRAVFESIVDKIIIGGTNDEGEIDPAMITIIYKTGKKDSQNGRLFKSRRKNAKVVEENDGDKLYSQSSNEVNKLCSYSTDNTCGV

SEQ ID NO: 34672 - DNA, 50 bp, Streptococcus agalactiae; identical to SEQ ID NO: 34667
  source 1..50: mol_type = genomic DNA

SEQ ID NO: 34673 - DNA, 40 bp, Streptococcus agalactiae; identical to SEQ ID NO: 23678
  source 1..40: mol_type = genomic DNA

SEQ ID NO: 34674 - DNA, 40 bp, Streptococcus agalactiae; identical to SEQ ID NO: 34669
  source 1..40: mol_type = genomic DNA

SEQ ID NO: 34675 - DNA, 50 bp, Streptococcus agalactiae; identical to SEQ ID NO: 34670
  source 1..50: mol_type = genomic DNA

SEQ ID NO: 34676 - protein, 507 aa, Streptomyces europaeiscabiei
MQQANKERGLYGRLSKNRDGQSQSVKYQLSEGYDFFEQQGWPVCEDCVFSDDNISASEYSVKERPGFVALLRAIEQGKIGTVVVTEVSRLTRDYKIGIDIVDLARAAGGLVIYTTEGQMFDLMTNTGKHNFLEAVLKASRESGTTSDRVKRNKRNSAKEGRYHGGRRPFGRQGAIKDQFGRVTNTGDVGVLILEEEAQHIREAVNHILDDGWPLLSVVRDWKKRGINSPSGNAWSTSTFRKMLLSKHLKGVRDYHGKDYAGAFPCIIEPDRFDKLSALLTADERKAKPGQGVRSYLLTGFIFCSCGNKMGGRKRKRHGREVREYLCRPYDNFGEKVGCYRTRLADATELLVTDAVLYRYNSPAFVEYLKQAYEQDAESDGLADLLQQAKLKKQKLNELEDAWTDGVDGLDLATMLRLKAKTENELKQLNAQIGRRTSGKLLVSLAEGDIHTAWESFDLEQRRQIIGLIVERVVVLPQPQGETTVWTHEKTGQSWCFNPEYIQIKFKF

SEQ ID NO: 34677 - DNA, 50 bp, Streptomyces europaeiscabiei
  source 1..50: mol_type = genomic DNA
ggggtgtcctagccgatgttggctacgtccaagatcgacaaagacacccc

SEQ ID NO: 34678 - DNA, 40 bp, Streptomyces europaeiscabiei
  source 1..40: mol_type = genomic DNA
cgggatcaacttcttcgacacggcgaacgtctactccgac

SEQ ID NO: 34679 - DNA, 40 bp, Streptomyces europaeiscabiei
  source 1..40: mol_type = genomic DNA
cgggatcaacttcttcgacgtggcgaacgtctactccgac

SEQ ID NO: 34680 - DNA, 50 bp, Streptomyces europaeiscabiei
  source 1..50: mol_type = genomic DNA
ggagtgtccttccagttgatgtctgtgtgccagatagacacagccaccac

SEQ ID NO: 34681 - protein, 503 aa, Corynebacterium sp ATCC 6931
MTTRAAIYLRISLDAAMDGLAIDRQRQDCEALAEQRGWDVVHTYVDQSISASKKDVDRPDYDAMVASFERGEIDAIICWDLDRLTRQPWQLEEWIDRAEEQGLKLVTANGDADLATDGGRMYARIKAAVARGEIERKSMRQSRAQQQRAEQGRWYSGGVRPIGYTSTGEIIPSEAAAVLGMFRAVERGNSMRDIARALSGVDQPGLPDIPTTPRHMYTVVTERNARRRAEGQEEKPVPDAQPWAYTSLHSILRNPVYAGYSTYKKAKRKGVKNKYRRVTHIVRDPDTGEPVKGQWEPIVTPDLWWRVQNVLDDPDRLTNKERRNTRRHLGSGLYVCDECGNPVRTHADRYRCAACGLVRTHSVDDFVLAVIRARLGRDDLADLLPTVDDDEVNAIDDELAELRAKLARVQADYDEELIEARDLKRARNRYEPQIEKLETRRARLAGASALLDTTGYASPVDAFDNAELAVQRRVINTLCQVRLRRGVRGTKTFNPESVQIVWN

SEQ ID NO: 34682 - DNA, 50 bp, Corynebacterium sp ATCC 6931; identical to SEQ ID NO: 18152
  source 1..50: mol_type = genomic DNA

SEQ ID NO: 34683 - DNA, 40 bp, Corynebacterium sp ATCC 6931
  source 1..40: mol_type = genomic DNA
catgcacgacggtgatgtggtcgagttcaagttcaacgtg

SEQ ID NO: 34684 - DNA, 40 bp, Corynebacterium sp ATCC 6931
  source 1..40: mol_type = genomic DNA
catgcacgacggtgatgtgcacgagttcaagttcaacgtg

SEQ ID NO: 34685 - DNA, 50 bp, Corynebacterium sp ATCC 6931
  source 1..50: mol_type = genomic DNA
atactgattgctggaccacactcccaggatttctgattcagtgggacctg

SEQ ID NO: 34686 - protein, 554 aa, Ruthenibacterium lactatiformans
MNQPNYNTALYMRLSRDDEGYGDSISIETQRTILRKFAQDNQLRIYDEYIDDGWSGTNFERPNFKRMMADIESGKVNCVVTKDLSRFGREHIMMDYYLEFVFPEKCVRYIAVAENEDTEKGLSDFVPFKNLFNEWFAKDTSRKVKNSLAAKFEAGERVSAYAPLGYKKHPDVKNKLVIDEKTSWIIRRIYTLAFYGAGAAKITRTLTQEKIPTPGWLNYQRDGTFANIYRDAPEEKRYAWTIAQVKSILKDETYIGNTIHYRETNISYKNKKRIRKPQSEWMRVEGTQEAIISKEDFERVQQQIASRRRKQKNATTQIFAGLVRCADCGWSMKFATNKQNKIPYSYFSCTYYSQYGTGKCSKHYIRYDTLYAYVLARLQHWTEQVQLDRGQLICELQKSLGGERAVETRRMQNELARVKKRCEEVNRLFARLYEDWASGRLTEYNFTMLSSKYQAEQQELRQKILDAETKLDAQRELDNSAEKWVDLIRKYAGPTELTAELLNALIEKILVHEAVKLPDGSRQQKVEIFYRFIGNLDANSIQTSTVSQTVSLTT

SEQ ID NO: 34687 - DNA, 50 bp, Ruthenibacterium lactatiformans
  source 1..50: mol_type = genomic DNA
cggtgtccctaactacgtgataccggggcagccacatatctaaagacaca

SEQ ID NO: 34688 - DNA, 40 bp, Ruthenibacterium lactatiformans
  source 1..40: mol_type = genomic DNA
ggtgagcaaatgggaggcggggcagaccatgccggatctg

SEQ ID NO: 34689 - DNA, 40 bp, Ruthenibacterium lactatiformans
  source 1..40: mol_type = genomic DNA
ggtgagcaaatgggaggcgaggcagaccatgccggatctg

SEQ ID NO: 34690 - DNA, 50 bp, Ruthenibacterium lactatiformans
  source 1..50: mol_type = genomic DNA
aggtgtccactcacacgcggtcccagagctgccacatttgtagagacaga

SEQ ID NO: 34691 - protein, 505 aa, Intestinimonas butyriciproducens
MNDFYARDTSKKVSAVYRAKGNKGEHTGNHPIYGYLKDPENKQRWIIDEEAATVVRRIFHMVIEGKGVYQIADILSEEKVLCPSAYLAAKGAGNRRNSKFEDPYRWWGTTVSYILARVEYMGHTVNFKTFKTCYRDKHRKPAPKEDWKIFENTHEAIIDKTTWETAQKLRRTIRRGDRNKEPNPLTGLLYCGECGAKMYNERSDGDAYHKTLKDNYVCASYRKKTTSCTIHFIRTEIVRDLILDALRNVATYARANKEDFEQLVMQTTSDARKRSLQSGRTELDRIMRRTNELDTLLQKLYEDYALGRLPEKRHAKLSAQYEAEQEQLEQRSAELMEQMNAEQEESVNVDRFMALVDRYTDFTELTTPMLNEFIDKVIVYERRKINRYQYDQQIEIYFNFIGKVTLPEEETEAAPEAPKTLHVACNSSFAPIGDYLSAQTVETIALPFSKVEELTGKPLCKSAYKYASYWYPAQDRPLSNTIYNAGYDVDRVDLAAGIVYLTKAA

SEQ ID NO: 34692 - DNA, 50 bp, Intestinimonas butyriciproducens
  source 1..50: mol_type = genomic DNA
ctcaccgcccggctgggatgtgtggggaggtcaccttcccgcagaacggc

SEQ ID NO: 34693 - DNA, 40 bp, Intestinimonas butyriciproducens
  source 1..40: mol_type = genomic DNA
ctccgtgtgggcttctatacggaaatgaagttgcaagcga

SEQ ID NO: 34694 - DNA, 40 bp, Intestinimonas butyriciproducens
  source 1..40: mol_type = genomic DNA
ctccgtgtgggcttctatagtgaaatgaagttgcaagcga

SEQ ID NO: 34695 - DNA, 50 bp, Intestinimonas butyriciproducens
  source 1..50: mol_type = genomic DNA
cacacggccacctggggatgtggtgtgaggcctcctcttcccccaaaggc

SEQ ID NO: 34696 - protein, 549 aa, Pseudomonas lactis
MGKVFSYIRFSSAKQSAGDSYTRQVRAAKAFCDEYDLEMAAARDYLFFDSGRSAYKGRHLDDTGELARFLTYVEDGTIPAGSYLVVESLDRLSRERVRDALPRFLDLLAKGINVYTSTDKRLYTRDYNEIDLIISIITMSRAHEESATKGKRVSSAWRNKQKDARESGKPLGKLRPLWLDMSADGEAYVLNSEKAAVVRRIFDLSTKGHGSRIIAATLNQEGIPSFSAGRKNTSGLWGFSTVRHILDSRTTLGEYQPHIFIDGKRKPDGDPIKGQFPAVVSEDEFYLAHAARTSRKRHTVTRTTANFNVLAGILNCYKCGSAMHLQGQHGRKYYKCSKTTKGMCDAGIISAPRSEAVFKELLAKVDSLSLVQDSSGSLRKSLQVIEGRISELKARQDEAEDSHAEFPSRITAKLLSELESSITALEDERATLSEQLVADRVISKDDFFEKLDLVTFEGRAAANNLIKRLGLFIFVSKFGRTNEVYWVSADNAIPAPFSEGSSLLFYLRHKGVSIRLGALTDDILDLQVIQGEITDMEADLAKRNAGGRK

SEQ ID NO: 34697 - DNA, 50 bp, Pseudomonas lactis
  source 1..50: mol_type = genomic DNA
agtagtgttttgttgcacaatatcaagaagtgctgccacaattacctaca

SEQ ID NO: 34698 - DNA, 40 bp, Pseudomonas lactis
  source 1..40: mol_type = genomic DNA
tggcagtgggcagaaattcaagaagtgctgttccagctac

SEQ ID NO: 34699 - DNA, 40 bp, Pseudomonas lactis
  source 1..40: mol_type = genomic DNA
tggcagtgggcagaaattcttgaagtgctgttccagctac

SEQ ID NO: 34700 - DNA, 50 bp, Pseudomonas lactis
  source 1..50: mol_type = genomic DNA
actagagtttagtgacacaaaaccttgaagtgctttcaggattacataaa

SEQ ID NO: 34701 - protein, 522 aa, Anaerobutyricum hallii
MELLNVCIYLRKSRADQEAEARGEGETLARHERILLDLAKKRGYNVGAIYKEIVSGETISARPVMQQLLREVESGMWDGVLVVEVERLARGDTIDQGVVARSFQYSNTLIITPLKTYDPNNEYDEEYFEFGLFMSRREYKTIRRRLTAGRESSAKEGKYCGSKPPYGYSRVKLVGEKGWTLQPVPDQAEIVKLIFHLYVHGVAGERIGMAKICRKLNDSGIKTMDGGLWTISRVQAILRNPVYEGMIRWNSRKAVKHIKDGQITISRPFAQDYILVKGRHPAIVSRELFQQAQDIVNKNPARPLNSLHVLRNPLAGIVRCGKCDHVMTRKSPNGRQGDLIRCPYSSCSNISSKLPLVEKALLDGIQELVDGYRLNNSVSDQKYSLSISEREKMIQGKLKEIDILKKRKQRQYDLLEQGIYSTEEFLERSRATAAELSACDAVILSLKQEIEHEQELQFQRSSFIPKCEDLLANYWTWDTSTKNRFLRELIEKAVYTKNAKNTWKNGDDISFTLDIYPKIQQK

SEQ ID NO: 34702 - DNA, 50 bp, Anaerobutyricum hallii
  source 1..50: mol_type = genomic DNA
tgtgggtagcctttatgcacccacacattggcacataaatgatgatacaa

SEQ ID NO: 34703 - DNA, 40 bp, Anaerobutyricum hallii
  source 1..40: mol_type = genomic DNA
aaacgacatgatcgcaagaacattggcacgtatcgtgtcc

SEQ ID NO: 34704 - DNA, 40 bp, Anaerobutyricum hallii
  source 1..40: mol_type = genomic DNA
aaacgacatgatcgcaagacaattggcacgtatcgtgtcc

SEQ ID NO: 34705 - DNA, 50 bp, Anaerobutyricum hallii
  source 1..50: mol_type = genomic DNA
tgtgggttgatttcatgcacctaccaaaggccacagctcctacaagacaa

SEQ ID NO: 34706 - protein, 516 aa, Mesorhizobium sp
MRKTASKAPKAYSYVRFSTPDQQKGDSLRRQTEAAARWASARAIELDNSSYQDLGVSAYAGDNAEVGMLGEFLGAVRDGTIEAGSYLLIESLDRLSRDKARRAVRLLEDLCDSGIAVVTLADGKEYTKEALDNDPMGLMWALMVAMRANEESATKSRRVREAWAKKKEAAAAERRPMTKRLPAWLALSPDRTTITVDEARANVVRRIFKESIAGKGQHSIAQTLTAEGVETFGDGRRKALVWQRSYVKKLLESPTVIGTLIPHDTRKVRGRRVRDPLPPIPNYYPAIVSAADFARVNGSRKGSATPRVRAATGQVSNVLASLGKCPRCGATMTRVNKGRKGGTPYLVCVTAKAGGGCDYKQVRIEAIEVAIRGASGVFARDVPGRDDLLEEARRALEAKEHGIGDGIERLLEEIERGNASPALRKRLTDNEAQLATVRSELEEVEERIRQSGGRAIERRLARLVAVLGNERATVTEINVALRETFRECVVNYPEGTLDFVWQHSETPTEIRYAMPE

SEQ ID NO: 34707 - DNA, 50 bp, Mesorhizobium sp
  source 1..50: mol_type = genomic DNA
ggtgggtcctttgtaattaatttgctcaagatgttgacaaatgaccctac

SEQ ID NO: 34708 - DNA, 40 bp, Mesorhizobium sp
  source 1..40: mol_type = genomic DNA
ggccggcggccataatttgctgatgatcggaccgccgggt

SEQ ID NO: 34709 - DNA, 40 bp, Mesorhizobium sp
  source 1..40: mol_type = genomic DNA
ggccggcggccataatttgaggatgatcggaccgccgggt

SEQ ID NO: 34710 - DNA, 50 bp, Mesorhizobium sp
  source 1..50: mol_type = genomic DNA
ggtgggatccaagaaatcatttgtagcaggatgttaaaatgtgacccttc

SEQ ID NO: 34711 - protein, 539 aa, Brevundimonas diminuta
MPVKAYSYMRFSSAAQREGDSLRRQLQAAKDWAAARPDVELDTTTRDLGVSAYKGEHRVRGALASFLKRIEQGDIPTGSYFLIESFDRLSRETEMVAVNLLTSITLAGIKVVTLVDGHEYHAGSDAMDIMRAVIVMSRAHNENKARAEKLRAAWADKKRRARETGEVLSRRGPAWTKFDERSKKFVLIADRAKIVGRIFDECNQGLGITAISSRLNAEKVPPFVKGSDGWHQGYVLTILRSPSVCGYYQPTLTTNNPGQRMGREADGDIIENYYPRVIEDATFYTAQDMLARRNKRGGGKGRRGKTFSNLLLGLGRCEQCGGTLILGSRANSSAVRHFRCYQQSRKHNCDNTTRYLATEVEERLIYFLMRARMNEDRSAPDTAALVVKLAQIDDVKRRMEILLDQLEERVPGVAERLASRRDELTILEQEAAELRMSVERRSKTRGDESIRNTIEWLSVIEGEAPDADVYLARAKANAMLNDLFDFIMPADGGIYVGMGDRFRWIGEDMMTFDIPMPNIDGTITGKELGDYRGPLEFAV

SEQ ID NO: 34712 - DNA, 50 bp, Brevundimonas diminuta
  source 1..50: mol_type = genomic DNA
gcttgtgcattagtagggcaaggtataccttgggagactattaaacagcc

SEQ ID NO: 34713 - DNA, 40 bp, Brevundimonas diminuta
  source 1..40: mol_type = genomic DNA
gccgatcaactggcagttcatggggaccaagaagttcgag

SEQ ID NO: 34714 - DNA, 40 bp, Brevundimonas diminuta
  source 1..40: mol_type = genomic DNA
gccgatcaactggcagttcaaggggaccaagaagttcgag

SEQ ID NO: 34715 - DNA, 50 bp, Brevundimonas diminuta
  source 1..50: mol_type = genomic DNA
gctgggtcaacagaatggcaagctaaaacatgggattttctaaaacagcc

SEQ ID NO: 34716 - protein, 461 aa, Staphylococcus hominis
MNVAIYCRVSTLEQKEHGYSIEEQERKLKSFCEINDWNVADVFVDAGFSGAKRDRPELQRMMNNIKRFDLVLVYKLDRLTRNVRDLLDLLEIFEQNNVAFRSATEVYDTSTAMGRLFVTLVGAMAEWERETIRERTQMGKLAALKKGIMLTTPPFYYDRVDNKFVPNKYKEVVLFAYEEALKGKSAKSIARKLNNSDIPPPNNRKWEDRSITRALRSPFTRGHFEWGGVYLENNHESIITEEMYEKVKDRLEERTNTKKIKHVSIFRSKLVCPTCHNKLTMNTHKVTLKDRVYYNKHYYCNNCKETPNLKPVYIRAEEVERVFYEYLQHQDLTQYEVVEDTEEKEVAIDINKVMQQRKRYHKLYANGLMNEDELAELIEETDAAIEEYKKQNENKEVKQYSDEDITEYKSLLLEMWEISSDEEKAEFIQMAIKNIFIEYVLGKNDNKKKRRSLKIKDIEFY

SEQ ID NO: 34717 - DNA, 50 bp, Staphylococcus hominis
  source 1..50: mol_type = genomic DNA
ttatggaagtatgcacaattaaccaatgtataatgtgtgtacttccatat

SEQ ID NO: 34718 - DNA, 40 bp, Staphylococcus hominis; identical to SEQ ID NO: 21483
  source 1..40: mol_type = genomic DNA

SEQ ID NO: 34719 - DNA, 40 bp, Staphylococcus hominis
  source 1..40: mol_type = genomic DNA
ctatggcggtacatgcataatccatggctgtattccatct

SEQ ID NO: 34720 - DNA, 50 bp, Staphylococcus hominis
  source 1..50: mol_type = genomic DNA
ttagagaagatagtacaattaactattgtcccatcttctagcttcaacat

SEQ ID NO: 34721 - protein, 531 aa, Streptomyces albulus
MASHSSWEIHPDLAAALASGKTVEEWLDGRTPVVSYARISVDLQKVKAIGVARQHGMHCDPAAKEQGWAVVYRYTDNDLTAADPDVQRPAFLQMVRDLRARQTAEGIAIRGILAVEEERVVRLPEDYLKLYRALTVEEDAVLYYTDKRQLVDVYAEVEQTRGLMSSSMGETEVRKVKRRAKRSTKDRAAEGKYTGGARRFGWLGADKDLGRTQNEKLDPDESVWLRNMIDMKLCGKGWHTIAVWLISESIATVRGGEWTSTGVKSLLTNPAICGYRILNGELVLDPGTGEPKVGNWETIATPEEWHQICEMAWPGGKLAKTKKPKGTKRARKHLSTGILRCGWIPKSGPKEDMCLHSMVGRPPHGNHKWGNYVCNGTDCRKVSRRMDKIDRIVEGIVVRTLKDQFATLAPEEKTWHGQHTLERLTARRQELKAAYKAEHISMADYLEFIDPLDAQIKESQADRDAFYAEQAAKNFLAGFTEERWHDFDLEQKQTAIGTVLQAVIVHPLPEGRSRKAPFDPSLIEIVFKNPH

SEQ ID NO: 34722 - DNA, 50 bp, Streptomyces albulus
  source 1..50: mol_type = genomic DNA
gtgctattttgagcttgtaaggcatggtcgccttatgctctaagtagcac

SEQ ID NO: 34723 - DNA, 40 bp, Streptomyces albulus
  source 1..40: mol_type = genomic DNA
gtaggcgtcgtagagggcatggtcctcgtagaaggcgcag

SEQ ID NO: 34724 - DNA, 40 bp, Streptomyces albulus
  source 1..40: mol_type = genomic DNA
gtaggcgtcgtagagggcaaggtcctcgtagaaggcgcag

SEQ ID NO: 34725 - DNA, 50 bp, Streptomyces albulus
  source 1..50: mol_type = genomic DNA
gttatgtttttgccttgcaaggcaaggtcacctgatatactcagaggcac

SEQ ID NO: 34726 - protein, 505 aa, Bacillus licheniformis
MKAAIYIRVSTNKEEQKQSLENQKELFMNLLSEKGWDLYDIYLDVQSGTKTKKRPQLKRMIEDAKMKKFDIILAKELSRLARNGQLSYEIKNLAENRGIHILTLDGAIDTLSGNTQMFGLYAWMYEQESQRTSDRVKTALKVRAKGGKFKGSIPPYGYYVENGVLKIRNDNTPDVVRQIFNSYLLGKGFDSIAKELLKEGIPTPSEIAGKRNSSSLWHGSTIRGILENPHYIGHLVQQRETTINVTSERRKKNSPDDYVVIENTHEPIISKDDFLVVQQLISERKRKRPYAKKHLFTNISFCADCGKSMHFKKNRKGYVCGTYNKHGHTQCSDHYVRESELIEVISDDIKQMFSSLSTKSVQKDIEKKMAKFIQRDQKRLGNILKEIEHLKKDKTVALRMKIRGEIQDEEYRLLIEDNGNQLAKLNEEKAKLEQGLLHQKQTIDFTKLINQVEQFVKNPILDKEMLHKLIERIEIKEDGSPRIFYRFSDPYISSIFSRATHSTPH

SEQ ID NO: 34727 - DNA, 50 bp, Bacillus licheniformis
  source 1..50: mol_type = genomic DNA
acgagcaacacacagcactccacatgtgtagaatgctgactgtagataat

SEQ ID NO: 34728 - DNA, 40 bp, Bacillus licheniformis
  source 1..40: mol_type = genomic DNA
tacagccacacactccacatgcgccgtatgcggaaacata

SEQ ID NO: 34729 - DNA, 40 bp, Bacillus licheniformis
  source 1..40: mol_type = genomic DNA
tacagccacacactccacatacgccgtatgcggaaacata

SEQ ID NO: 34730 - DNA, 50 bp, Bacillus licheniformis
  source 1..50: mol_type = genomic DNA
accagcaaccagaagagctcctggtatgtagaatgtgctcagtaaatatt

SEQ ID NO: 34731 - protein, 497 aa, Streptococcus agalactiae
MSKIALYIRLSVEDMIKTDESESIINQRAYLNDYLDKNEEFKNFTREEYVDDGYSGTNENRPAFQRMLEDVKKNNIQTIIVKDLSRFMRDYITLGDYLENIFPFLGVRFIAINDGYDSDKEKGNGTDLDIQFKGLLYDFYTKDISEKVKSSMTTLKKQGKFLAWSPPLGYMKDPNDRHKIIVDEETAWIVKKIFKLALDGISSRNIAKILNEEKIPTPSKRKSELTNLDFEYSIIRTAKKPRPTWTNGNVIDVLANENYTGTYTFNMQDKSMLNPSSFKFKPKEEWGRVENNHEAIISKEDFEKVQKIKEKNLFMKGKNTDYEWRKKSPLQGFAKCPTCNHILGCTQSKRKRQDGSIRVHTYFTCRICKCNNVKHKNSRAGSREEQVFEAIKEKYGLEDSKIDEKVKVKPLEKSIEDLEAKKMQNFEKYKLGKMNRQKFIDSKNSIDEEIQAIKEKIQKAKEEKEVIDNTKLTRELMEKYIDSVFCEGNEVLNIIWK

SEQ ID NO: 34732 - DNA, 50 bp, Streptococcus agalactiae; identical to SEQ ID NO: 2317
  source 1..50: mol_type = genomic DNA

SEQ ID NO: 34733 - DNA, 40 bp, Streptococcus agalactiae
  source 1..40: mol_type = genomic DNA
ggtttgtgacccagcggttggatccggtcacttccttgtt

SEQ ID NO: 34734 - DNA, 40 bp, Streptococcus agalactiae
  source 1..40: mol_type = genomic DNA
ggtttgtgacccagcggttgaatccggtcacttccttgtt

SEQ ID NO: 34735 - DNA, 50 bp, Streptococcus agalactiae
  source 1..50: mol_type = genomic DNA
tttgtcataggttttgcttgagtggagattactggcttctcagtgataaa

SEQ ID NO: 34736 - protein, 497 aa, Streptococcus agalactiae; identical to SEQ ID NO: 14091

SEQ ID NO: 34737 - DNA, 50 bp, Streptococcus agalactiae; identical to SEQ ID NO: 2317
  source 1..50: mol_type = genomic DNA

SEQ ID NO: 34738 - DNA, 40 bp, Streptococcus agalactiae; identical to SEQ ID NO: 34733
  source 1..40: mol_type = genomic DNA

SEQ ID NO: 34739 - DNA, 40 bp, Streptococcus agalactiae; identical to SEQ ID NO: 34734
  source 1..40: mol_type = genomic DNA

SEQ ID NO: 34740 - DNA, 50 bp, Streptococcus agalactiae; identical to SEQ ID NO: 34735
  source 1..50: mol_type = genomic DNA

SEQ ID NO: 34741 - protein, 497 aa, Streptococcus agalactiae; identical to SEQ ID NO: 14211

SEQ ID NO: 34742 - DNA, 50 bp, Streptococcus agalactiae; identical to SEQ ID NO: 2317
  source 1..50: mol_type = genomic DNA

SEQ ID NO: 34743 - DNA, 40 bp, Streptococcus agalactiae; identical to SEQ ID NO: 34733
  source 1..40: mol_type = genomic DNA

SEQ ID NO: 34744 - DNA, 40 bp, Streptococcus agalactiae; identical to SEQ ID NO: 34734
  source 1..40: mol_type = genomic DNA

SEQ ID NO: 34745 - DNA, 50 bp, Streptococcus agalactiae; identical to SEQ ID NO: 34735
  source 1..50: mol_type = genomic DNA

SEQ ID NO: 34746 - protein, 497 aa, Streptococcus agalactiae
MSKIALYIRLSVEDMIKTDESESIINQRAYLNDYLDKNEEFKNFTREEYVDDGYSGTNENRPAFQRMLEDVKKNNIQTIIVKDLSRFMRDYITLGDYLENIFPFLGVRFIAINDGYDSNKEKGNGTDLDIQFKGLLYDFYTKDISEKVKSSMTTLKKQGKFLAWSPPLGYMKDPNDRHKIIVDEETAWIVKKIFKLALDGISSRNIAKILNEEKIPTPSKRKSELTNLDFEYSIIRTAKKPRPTWTNGNVIDVLANENYTGTYTFNMQDKSVLNPSSFKFKPKEEWGRVENNHEAIISKEDFEKVQKIKKKNLFMKGKNTDYEWRKKSPLQGFAKCPTCNHILGCTQSKHKRPDGSLRVHTYFTCRICKCNNVKHKNSRAGSLEEQVFEAIKEKYGLEDPIKDEKVKVKPMEKSIEDLEAKKMQNFEKYKLGKMNRQKFIDLKNSIVEEIQAIKEKIQKAKEEKEVIDNTKLTRELMEKYIDSVLCEGNEVLNIIWK

SEQ ID NO: 34747 - DNA, 50 bp, Streptococcus agalactiae; identical to SEQ ID NO: 2317
  source 1..50: mol_type = genomic DNA

SEQ ID NO: 34748 - DNA, 40 bp, Streptococcus agalactiae; identical to SEQ ID NO: 34733
  source 1..40: mol_type = genomic DNA

SEQ ID NO: 34749 - DNA, 40 bp, Streptococcus agalactiae; identical to SEQ ID NO: 34734
  source 1..40: mol_type = genomic DNA

SEQ ID NO: 34750 - DNA, 50 bp, Streptococcus agalactiae; identical to SEQ ID NO: 34735
  source 1..50: mol_type = genomic DNA

SEQ ID NO: 34751 - protein, 497 aa, Streptococcus agalactiae
MSKIALYIRLSVEDMIKTDESESIINQRAYLNDYLDKNEEFKNFTREEYVDDGYSGTNENRPAFQRMLEDVKKNKIQTIIVKDLSRFMRDYITLGDYLENIFPFLGVRFIAINDGYDSDKEKGNGTDLDIQFKGLLYDFYTKDISEKVKSSMTTLKKQGKFLAWSPPLGYMKDPNDRHKIIVDEETAWIVKKIFKLALDGISSRNIAKILNEEKIPTPSKRKSELTNLDFEYSIIRTEKKPRPTWTNGNVIDVLANENYTGTYTFNMQDKSVLNPSSFKFKPKEEWGRVENNHEAIISREDFEKVQKIKEKNLFMKGKNTDYEWRKKSPLQGFAKCPTCNHILGCVQSKRKRQDGSIRVHTYFTCRICKCNNVKHKNSRAGSLEEQVFEAIKEKYGLEDPIKDEKVKIKPMEKSIEDLEAKKMQNFEKYKLGKMNRQKFIDSKNLIDEEIQAIKEKILKAKEEKEVIDNTKLTRELMEKYIDSVFCEGNEVLNIIWK

SEQ ID NO: 34752 - DNA, 50 bp, Streptococcus agalactiae; identical to SEQ ID NO: 2317
  source 1..50: mol_type = genomic DNA

SEQ ID NO: 34753 - DNA, 40 bp, Streptococcus agalactiae; identical to SEQ ID NO: 34733
  source 1..40: mol_type = genomic DNA

SEQ ID NO: 34754 - DNA, 40 bp, Streptococcus agalactiae; identical to SEQ ID NO: 34734
  source 1..40: mol_type = genomic DNA

SEQ ID NO: 34755 - DNA, 50 bp, Streptococcus agalactiae; identical to SEQ ID NO: 34735
  source 1..50: mol_type = genomic DNA

SEQ ID NO: 34756 - protein, 497 aa, Streptococcus agalactiae
MSKIALYIRLSVEDMIKTDESESIINQRAYLNDYLDKNEEFKNFTREEYVDDGYSGTNENRPAFQRMLEDVKKNNIQTIIVKDLSRFMRDYITLGDYLENIFPFLGVRFIAINDGYDSNKEKGNGTDLDIQFKGLLYDFYTKDISEKVKSSMTTLKKQGKFLAWSPPLGYMKDPNDRHKIIVDEETAWIVKKIFKLALDGISSRNIAKILNEEKIPTPSKRKSELTNLDFEYSIIRTAKKPRPTWTNGNVIDVLANENYTGTYTFNMQDKSVLNPSSFKFKPKEEWGRVENNHEAIISKEDFEKVQKIKEKNLFMKGKNTDYEWRKKSPLQGFAKCPTCNHILGCVQSKRKRKDGSIRVHTYFTCRICKCNNVKHKNSRAGSLEEQVFEAIKEKYGLEDPIKDEKVKVKPMEKSIEDLEAKKMQNFEKYKLGKMNRQKFIDLKNSIVEEIQAIKEKIQKAKEEKEVIDNTKLTRELMEKYIDSVLCEGNEVLNIIWK

SEQ ID NO: 34757 - DNA, 50 bp, Streptococcus agalactiae; identical to SEQ ID NO: 2317
  source 1..50: mol_type = genomic DNA

SEQ ID NO: 34758 - DNA, 40 bp, Streptococcus agalactiae; identical to SEQ ID NO: 34733
  source 1..40: mol_type = genomic DNA

SEQ ID NO: 34759 - DNA, 40 bp, Streptococcus agalactiae; identical to SEQ ID NO: 34734
  source 1..40: mol_type = genomic DNA

SEQ ID NO: 34760 - DNA, 50 bp, Streptococcus agalactiae; identical to SEQ ID NO: 34735
  source 1..50: mol_type = genomic DNA

SEQ ID NO: 34761 - protein, 497 aa, Streptococcus agalactiae
MSKIALYIRLSVEDMIKTDESESIINQRAYLNDYLDKNEEFKNFTREEYVDDGYSGTNENRPAFQRMIEDVKKNNIQTIIVKDLSRFMRDYITLGDYLENIFPFLGVRFIAINDGYDSNKEKGNGTDLDIQFKGLLYDFYTKDISEKVKSSMTTLKKQGKFLAWSPPLGYMKDPNDRHKIIVDEETAWIVKKIFKLALDGISSRNIAKILNEEKIPTPSKRKSELTNLDFEYSIIRTAKKPRPTWTNGNVIDVLANENYTGTYTFNMQDKSVLNPSSFKFKPKEEWGRVENNHEAIISKEDFEKVQKIKEKNLFMKGKNTDYEWRKKSPLQGFAKCPTCNHILGCVQSKHKRPDGSLRVHTYFTCRICKCNNVKHKNSRAGSLEEQVFEAIKEKYGLEVPNKDEKVKVKPMEKSIEDLEAKKMQNFEKYKLGKMNRQKFIDSKNLIDEEIQAIKEKILKAKEEKEVIDNTKLTRELMEKYIDSVFCEGNEVLNIIWK

SEQ ID NO: 34762 - DNA, 50 bp, Streptococcus agalactiae; identical to SEQ ID NO: 2317
  source 1..50: mol_type = genomic DNA

SEQ ID NO: 34763 - DNA, 40 bp, Streptococcus agalactiae; identical to SEQ ID NO: 34733
  source 1..40: mol_type = genomic DNA

SEQ ID NO: 34764 - DNA, 40 bp, Streptococcus agalactiae; identical to SEQ ID NO: 34734
  source 1..40: mol_type = genomic DNA

SEQ ID NO: 34765 - DNA, 50 bp, Streptococcus agalactiae; identical to SEQ ID NO: 34735
  source 1..50: mol_type = genomic DNA

SEQ ID NO: 34766 - protein, 497 aa, Streptococcus agalactiae
MSKIALYIRLSVEDMIKTDESESIINQRAYLNDYLDKNEEFKNFTREEYVDDGYSGTNENRPAFQRMLEDVKKNNIQTIIVKDLSRFMRDYITLGDYLENIFPFLGVRFIAINDGYDSNKEKGNGTDLDIQFKGLLYDFYTKDISEKVKSSMTTLKKQGKFLAWSPPLGYMKDPNNRHKIIVDEETAWIVKKIFKLALDGISSRNIAKILNEEKIPTPSKRKSELTNLDFEYSIIRTAKKPRPTWTNGNVIDVLANENYTGTYTFNMQDKSVLNPSSFKFKPKEEWERVENNHEAIISKEYFEKVQKIKEKNLFMKGKNTDYEWRKKSPLQGFAKCPTCNHILGCIQSKHKRSDGSLRVHTYFTCRICKCNNVKHKNSRAGSLEEQVFEAIKEKYGLEDPTKDEKVKVKPMEKSIEDLEAKKMQNFEKYKLGKMNRQKFIDSKNSIDEEIQAIKEKIQKAKEEKEVIDNTKLTRELMEKYIDSVICEGNEVLNIIWK

SEQ ID NO: 34767 - DNA, 50 bp, Streptococcus agalactiae; identical to SEQ ID NO: 2317
  source 1..50: mol_type = genomic DNA

SEQ ID NO: 34768 - DNA, 40 bp, Streptococcus agalactiae; identical to SEQ ID NO: 34733
  source 1..40: mol_type = genomic DNA

SEQ ID NO: 34769 - DNA, 40 bp, Streptococcus agalactiae; identical to SEQ ID NO: 34734
  source 1..40: mol_type = genomic DNA

SEQ ID NO: 34770 - DNA, 50 bp, Streptococcus agalactiae; identical to SEQ ID NO: 34735
  source 1..50: mol_type = genomic DNA

SEQ ID NO: 34771 - protein, 497 aa, Streptococcus agalactiae; identical to SEQ ID NO: 14156

SEQ ID NO: 34772 - DNA, 50 bp, Streptococcus agalactiae; identical to SEQ ID NO: 2317
  source 1..50: mol_type = genomic DNA

SEQ ID NO: 34773 - DNA, 40 bp, Streptococcus agalactiae; identical to SEQ ID NO: 34733
  source 1..40: mol_type = genomic DNA

SEQ ID NO: 34774 - DNA, 40 bp, Streptococcus agalactiae; identical to SEQ ID NO: 34734
  source 1..40: mol_type = genomic DNA

SEQ ID NO: 34775 - DNA, 50 bp, Streptococcus agalactiae; identical to SEQ ID NO: 34735
  source 1..50: mol_type = genomic DNA

SEQ ID NO: 34776 - protein, 497 aa, Streptococcus agalactiae
MSKIALYIRLSVEDMIKTDESESIINQRAYLNDYLDKNEEFKNFTREEYVDDGYSGTNENRPAFQRMLEDVKKNNIQTIIVKDLSRFMRDYITLGDYLENIFPFLGIRFIAINDGYDSNKEKGNGTDLDIQFKGLLYDFYTKDISEKVKSSMTTLKKQGKFLAWSPPLGYMKDPNDRHKIIVDEETAWIVKKIFKLALDGISSRNIAKILNEEKIPTPSKRKSELTNLDFEYSIIRTAKKPRPTWTNGNVIDVLANENYTGTYTFNMQDKSVLNPSSFKFKPKEEWGRVENNHEAIISKEEFEKVQKIKEKNLFMKGKNTDYEWRKKSPLQGFAKCPTCNHILGCIQSKHKRPDGSLRVHTYFTCRICKCNNVKHKNSRAGSLEEQVFEAIKEKYGLEDPKKDEKVKVKPMEKSIEDLEAKKMQNFEKYKLGKMNRQKFIDSKNLIDEEIQAIKEKIEKAKEEKEVIDNTKLTRELMEKYIDSVFCEGNEVLNIIWK

SEQ ID NO: 34777 - DNA, 50 bp, Streptococcus agalactiae; identical to SEQ ID NO: 2317
  source 1..50: mol_type = genomic DNA

SEQ ID NO: 34778 - DNA, 40 bp, Streptococcus agalactiae; identical to SEQ ID NO: 34733
  source 1..40: mol_type = genomic DNA

SEQ ID NO: 34779 - DNA, 40 bp, Streptococcus agalactiae; identical to SEQ ID NO: 34734
  source 1..40: mol_type = genomic DNA

SEQ ID NO: 34780 - DNA, 50 bp, Streptococcus agalactiae; identical to SEQ ID NO: 34735
  source 1..50: mol_type = genomic DNA

SEQ ID NO: 34781 - protein, 497 aa, Streptococcus agalactiae
MSKIALYIRLSVEDMIKTDESESIINQRAYLNDYLDKNEEFKNFTREEYVDDGYSGTNENRPAFQRMLEDVKKNNIQTIIVKDLSRFMRDYITLGDYLENIFPFLGVRFIAINDGYDSDKEKGNGTDLDIQFKGLLYDFYTKDISEKVKSSMTTLKKQGKFLAWSPPLGYMKDPNDRHKIIVDEETAWIVKKIFKLALDGISSRNIAKILNEEKIPTPSKRKSELTNLDFEYSIIRTAKKPRPTWTNGNVIDVLANENYTGTYTFNMQDKSMLNPSSFKFKPKEEWGRVENNHEAIISKEDFEKVQKIKEKNLFMKGKNTDYEWRKKSPLQGFAKCPTCNHILGCTQSKRKRQDGSIRVHTYFTCRICKCNNVKHKNSRAGSLEEQVFEAIKEKYGLEDSKIDEKVKVKPLEKSIEDLEAKKMQNFEKYKLGKMNRQKFIDSKNSIDEEIQAIKEKIQKAKEEKEVIDNTKLTRELMEKYIDSVFCEGNEVLNIIWK

SEQ ID NO: 34782 - DNA, 50 bp, Streptococcus agalactiae; identical to SEQ ID NO: 2317
  source 1..50: mol_type = genomic DNA

SEQ ID NO: 34783 - DNA, 40 bp, Streptococcus agalactiae; identical to SEQ ID NO: 34733
  source 1..40: mol_type = genomic DNA

SEQ ID NO: 34784 - DNA, 40 bp, Streptococcus agalactiae; identical to SEQ ID NO: 34734
  source 1..40: mol_type = genomic DNA

SEQ ID NO: 34785 - DNA, 50 bp, Streptococcus agalactiae; identical to SEQ ID NO: 34735
  source 1..50: mol_type = genomic DNA

SEQ ID NO: 34786 - protein, 497 aa, Enterococcus faecium
MSKIALYIRLSVEDMIKTDESESIINQRAYLNDYLDKNEEFKNFTREEYVDDGYSGTNENRPAFQRMMEDVKKNNIQTIIVKDLSRFMRDYITLGDYLENIFPFLGVRFIAINDGYDSDKEKGNGTDLDIQFKGLLYDFYTKDISEKVKSSMTTLKKQGKFLAWSPPLGYMKDPNDRHKIIVDEETAWIVKKIFKLALDGISSRNIAKILNEEKIPTPSKRKSELTNLDFEYSIIRTAKKPRPTWTNGNVIDVLANENYTGTYTFNMQDKSVLNPSSFKFKPKEEWGRVENNHEAIISKEDFEKVQKIKEKNLFMKGKNTDYEWRKKSPLQGFAKCPTCNHILGCVQSKHKRPDGSLRVHTYFSCRICKCNNVKHKNSRAGSLEEQVFEAIKAKYGLEAPNKDEKVKVKPMEKSIEDLEAKKMQNFEKYKLGKMNRQKFIDSKNLIDEEIQAIKEKIQKAKEEKEVIDNTKLTRELMEKYIDSVFCEGNEVLNIIWK

SEQ ID NO: 34787 - DNA, 50 bp, Enterococcus faecium; identical to SEQ ID NO: 2317
  source 1..50: mol_type = genomic DNA

SEQ ID NO: 34788 - DNA, 40 bp, Enterococcus faecium
  source 1..40: mol_type = genomic DNA
cattgttgatgccggaaatggtgctggtggattctttgct

SEQ ID NO: 34789 - DNA, 40 bp, Enterococcus faecium
  source 1..40: mol_type = genomic DNA
cattgttgatgccggaaatgatgctggtggattctttgct

SEQ ID NO: 34790 - DNA, 50 bp, Enterococcus faecium; identical to SEQ ID NO: 34735
  source 1..50: mol_type = genomic DNA

SEQ ID NO: 34791 - protein, 497 aa, Aerococcus urinae
MSKIALYIRLSVEDMIKTDESESIINQRAYLNDYLDKNEEFKNFTREEYVDDGYSGTNENRPAFQRMLEDVKKNNIQTIIVKDLSRFMRDYITLGDYLENIFPFLGVRFIAINDGYDSDKEKGNGTDLDIQFKGLLYDFYTKDISEKVKSSMTTLKKQGKFLAWSPPLGYMKDPNDRHKIIVDEETAWIVKKIFKLALDGISSRNIAKILNEEKIPTPSKRKSELTNLDFEYSIIRTVKKPRPTWTNGNVIDVLANENYTGTYTFNMQDKSVLNPSSFKFKPKEEWGRVENNHEAIISKEDFEKVQKIKEKNLFMKGKNTDYEWRKKSPLQGFAKCPTCNHILGCVQSKHKRPDGSLRVHTYFTCRICKCNNVKHKNSRAGSLEEQVFEAIKEKYGLEDSNKDEKVKVKPMEKSIEDLEAKKMQNFEKYKLGKMNRQKFIDSKNSIDEEIQAIKEKIEKAKEEKEVIDNTKLTRELMEKYIDSVFCEGNEVLNIKWK

SEQ ID NO: 34792 - DNA, 50 bp, Aerococcus urinae; identical to SEQ ID NO: 2317
  source 1..50: mol_type = genomic DNA

SEQ ID NO: 34793 - DNA, 40 bp, Aerococcus urinae
  source 1..40: mol_type = genomic DNA
ggcttatgacccaaccatggggtcaggatctctgctctta

SEQ ID NO: 34794 - DNA, 40 bp, Aerococcus urinae
  source 1..40: mol_type = genomic DNA
ggcttatgacccaaccatggagtcaggatctctgctctta

SEQ ID NO: 34795 - DNA, 50 bp, Aerococcus urinae; identical to SEQ ID NO: 34735
  source 1..50: mol_type = genomic DNA

SEQ ID NO: 34796 - protein, 497 aa, Streptococcus pyogenes
MSKIALYIRLSVEDMIKTDESESIINQRAYLNDYLNKNEEFKNFTREEYIDDGYSGTNENRPAFQRMLEDVKKNNIQTIIVKDLSRFMRDYITLGDYLENIFPFLGVRFIAINDGYDSDKEKGNGTDLDIQFKGLLYDFYTKDISEKVKSSMTTLKKQGKFLAWSPPLGYMKDPNDRHKIIVDEETAWIVKKIFKLALDGISSRNIAKILNEEKIPTPSKRKSELTNLDFEYSIIRTVKKPRPTWTNGNVIDVLANENYTGTYTFNMQDKSVLNPSSFKFKPKEEWGRVENNHEAIISKENFEKVQKIKEKNLFMKGKNTDYEWRKKSPLQGFAKCPTCNHILGCTQSKRKRQDGSIRVHTYFTCRICKCNNVKHKNSRAGSLEEQVFEAIKEKYGLEDPIKEEKVKVKPMEKSIEDLEAKKMQNFEKYKLGKMNRKKFIDSKNLIDEEIQAIKEKILKAKEEKEVIDNTKLTRELMEKYIDSVICEGNEVLNIIWK

SEQ ID NO: 34797 - DNA, 50 bp, Streptococcus pyogenes; identical to SEQ ID NO: 2317
  source 1..50: mol_type = genomic DNA

SEQ ID NO: 34798 - DNA, 40 bp, Streptococcus pyogenes
  source 1..40: mol_type = genomic DNA
cgtttgtgattttagatgaggtagaagcggctcttgatga

SEQ ID NO: 34799 - DNA, 40 bp, Streptococcus pyogenes
  source 1..40: mol_type = genomic DNA
cgtttgtgattttagatgagatagaagcggctcttgatga

SEQ ID NO: 34800 - DNA, 50 bp, Streptococcus pyogenes; identical to SEQ ID NO: 34735
  source 1..50: mol_type = genomic DNA

SEQ ID NO: 34801 - protein, 497 aa, Streptococcus pyogenes
MSKIALYIRLSVEDIIKTDESESIINQRAYLNDYLDKNEEFKNFTREEYVDDGYSGTNENRPAFQRMLEDVKKNNIQTIIVKDLSRFMRDYITLGDYLENIFPFLGVRFIAINDGYDSNKEKGNGTDLDIQFKGLLYDFYTKDISEKVKSSMTTLKKQGKFLAWSPPLGYMKDPNDRHKIIVDEETAWIVKKIFKLALDGISSRNIAKILNEEKIPTPSKRKSELTNLDFEYSIIRTAKKPRPTWTNGNVIDVLANENYTGTYTFNMQDKSVLNPSSFKFKPKEEWGRVENNHEAIISKEDFEKVQKIKEKNLFMKGKNTDYEWRKKSPLQGFAKCPTCNHILGCVQSKRKRKDGSIRVHTYFTCRICKCNNVKHKNSRAGSLEEQVFEAIKEKYGLEDPIKDEKVKVKPMEKSIEDLEAKKMQNFEKYKLGKMNRQKFIDLKNSIVEEIQAIKEKIQKAKEEKEVIDNTKLTRELMEKYIDSVLCEGNEVLNIIWK

SEQ ID NO: 34802 - DNA, 50 bp, Streptococcus pyogenes; identical to SEQ ID NO: 2317
  source 1..50: mol_type = genomic DNA

SEQ ID NO: 34803 - DNA, 40 bp, Streptococcus pyogenes
  source 1..40: mol_type = genomic DNA
cctctatgaccctgctatgggatctggatcactccttcta

SEQ ID NO: 34804 - DNA, 40 bp, Streptococcus pyogenes
  source 1..40: mol_type = genomic DNA
cctctatgaccctgctatggaatctggatcactccttcta

SEQ ID NO: 34805 - DNA, 50 bp, Streptococcus pyogenes; identical to SEQ ID NO: 34735
  source 1..50: mol_type = genomic DNA

SEQ ID NO: 34806 - protein, 497 aa, Streptococcus pyogenes
MSKVALYIRLSVEDMIKTDESESIINQRAYLNDYLDKKEEFKNFTREEYVDDGYSGTNENRPAFQRMLEDVKKNNIQTIIVKDLSRFMRDYITLGDYLENIFPFLGVRFIAINDGYDSNKEKGNGTDLDIQFKGLLYDFYTKDISEKVKSSMTTLKKQGKFLAWSPPLGYMKDPNDRHKIIVDEETAWIVKKIFKLALDGISSRNIAKILNEEKIPTPSKRKSELTNLDFEYSIIRTAKKPRPTWTNGNVIDVLANENYTGTYTFNMQDKSVLNPSSFKFKPKEEWGRVENNHEAIISKEDFEKVQKIKEKNLFMKGKNTDYEWRKKSPLQGFAKCPTCNHILGCIQSKHKKPDGSLRVHTYFTCRICKCNNVKHKNSRAGSLEEQVFEVIKEKYGLEDQIKDEKVKVKPLEKSIEDLEAKKMQNFEKYKLGKMNRQKFIDSKNSIDEEIQAIKEKIQKAKEEKEVIDNTKLTRELMEKYIDSVFCEGNEVLDIIWK

SEQ ID NO: 34807 - DNA, 50 bp, Streptococcus pyogenes; identical to SEQ ID NO: 2317
  source 1..50: mol_type = genomic DNA

SEQ ID NO: 34808 - DNA, 40 bp, Streptococcus pyogenes; identical to SEQ ID NO: 34803
  source 1..40: mol_type = genomic DNA

SEQ ID NO: 34809 - DNA, 40 bp, Streptococcus pyogenes; identical to SEQ ID NO: 34804
  source 1..40: mol_type = genomic DNA

SEQ ID NO: 34810 - DNA, 50 bp, Streptococcus pyogenes; identical to SEQ ID NO: 34735
  source 1..50: mol_type = genomic DNA

SEQ ID NO: 34811 - protein, 497 aa, Streptococcus pneumoniae; identical to SEQ ID NO: 34746

SEQ ID NO: 34812 - DNA, 50 bp, Streptococcus pneumoniae; identical to SEQ ID NO: 2317
  source 1..50: mol_type = genomic DNA

SEQ ID NO: 34813 - DNA, 40 bp, Streptococcus pneumoniae
  source 1..40: mol_type = genomic DNA
catctcagatcccgctatgggttctgctggcttcttagta

SEQ ID NO: 34814 - DNA, 40 bp, Streptococcus pneumoniae
  source 1..40: mol_type = genomic DNA
catctcagatcccgctatggattctgctggcttcttagta

SEQ ID NO: 34815 - DNA, 50 bp, Streptococcus pneumoniae; identical to SEQ ID NO: 34735
  source 1..50: mol_type = genomic DNA

SEQ ID NO: 34816 - protein, 497 aa, Aerococcus urinae
MSKIALYIRLSVEDMIKTDESESIINQRAYLNDYLDKNEEFKNFTREEYVDDGYSGTNENRPAFQRMLEDVKKNNIQTIIVKDLSRFMRDYITLGDYLENIFPFLGVRFIAINDGYDSDKEKGNGTDLDIQFKGLLYDFYTKDISEKVKSSMTTLKKQGKFLAWSPPLGYMKDPNDRHKIIVDEETAWIVKKIFKLALDGISSRNIAKILNEEKIPTPSKRKSELTNLDFEYSIIRTAKKPRPTWTNGNVIDVLANENYTGTYTFNMQDKSVLNSSSFKFKPKEEWGRVENNHEAIISREDFEKVQKIKEKNLFMKGKNTDYEWRKKSPLQGFAKCPTCNHILGCTQSKRKRQDGTIRVHTYFTCRICKCNNVKHKNSRAGSLEEQVFEAIKEKYGLEDPIKDEKVKVKPMEKSIEDLEAKKMQNFEKYKLGKMNRQKFIDSKNLIDEEIQAIKEKILKAKEEKEVIDNTKLTRELMEKYIDSVFCEGNEVLNIIWK

SEQ ID NO: 34817 - DNA, 50 bp, Aerococcus urinae; identical to SEQ ID NO: 2317
  source 1..50: mol_type = genomic DNA

SEQ ID NO: 34818 - DNA, 40 bp, Aerococcus urinae; identical to SEQ ID NO: 34793
  source 1..40: mol_type = genomic DNA

SEQ ID NO: 34819 - DNA, 40 bp, Aerococcus urinae; identical to SEQ ID NO: 34794
  source 1..40: mol_type = genomic DNA

SEQ ID NO: 34820 - DNA, 50 bp, Aerococcus urinae; identical to SEQ ID NO: 34735
  source 1..50: mol_type = genomic DNA

SEQ ID NO: 34821 - protein, 497 aa, Streptococcus agalactiae
MSKIALYIRLSVEDMIKTDESESIINQRAYLNDYLDKNEEFKNFTREEYVDDGYSGTNENRPAFQRMLEDVKKNNIQTIIVKDLSRFMRDYITLGDYLENIFPFLGVRFIAINDGYDSNKEKGNGTDLDIQFKGLLYDFYTKDISEKVKSSMTTLKKQGKFLAWSPPLGYMKDPNDRHKIIVDEETAWIVKKIFKLALDGISSRNIAKILNEEKIPTPSKRKSELTNLDFEYSIIRTAKKPRPTWTNGNVIDVLANENYTGTYTFNMQDKSVLNPSSFKFKPKEEWGRVENNHEAIISKEDFEKVQKIKEKNLFMKGKNTDYEWRKKSPLQGFAKCPTCNHILGCVQSKRKRKDGSIRVHTYFTCRICKCNNVKHKNSRAGSLEEQVFEAIKEKYGLEDSNKDEKIKVKPMEKSIEDLEAKKMQNFEKYKLGKMNRQKFIDSKNLIDEEIQAIKEKILKAKEEKEVIDNTKLTRELMEKYIDSVICEGNEVLNIKWK

SEQ ID NO: 34822 - DNA, 50 bp, Streptococcus agalactiae; identical to SEQ ID NO: 2317
  source 1..50: mol_type = genomic DNA

SEQ ID NO: 34823 - DNA, 40 bp, Streptococcus agalactiae
  source 1..40: mol_type = genomic DNA
aatcctagatccttccatgggaacagggaatttctttgcg

SEQ ID NO: 34824 - DNA, 40 bp, Streptococcus agalactiae
  source 1..40: mol_type = genomic DNA
aatcctagatccttccatggaaacagggaatttctttgcg

SEQ ID NO: 34825 - DNA, 50 bp, Streptococcus agalactiae; identical to SEQ ID NO: 34735
  source 1..50: mol_type = genomic DNA

SEQ ID NO: 34826 - protein, 497 aa, Streptococcus agalactiae
MSKVALYIRLSVEDMIKTDESESIINQRAYLNDYLDKNEEFKNFTREEYVDDGYSGTNENRPAFQRMLEDVKKNNIQTIIVKDLSRFMRDYITLGDYLENIFPFLGVRFIAINDGYDSDKEKGNGTDLDIQFKGLLYDFYTKDISEKVKSSMTTLKKQGKFLAWSPPLGYMKDPNDRHKIIVDEETAWIVKKIFKLALDGISSRNIAKILNEEKIPTPSKRKSELTNLDFEYSIIRTAKKPRPTWTNGNVIDVLANENYTGTYTFNMQDKSVLNPSSFKFKPKEEWGRVENNHEAIISKEDFEKVQKIKEKNLFMKGKNTDYEWRKKSPLQGFAKCPTCNHILGCTQSKRKRQDGTIRVHTYFSCRICKCNNVKHKNSRAGSLEEQVFKAIKEKYGLEDPIKDEKVKVKPMEKSIEDLEAKKMQNFEKYKLGKMNRQKFIDSKNSIDEEIQAIKEKIQKAKEEKEVIDNTKLTRELMEKYIDSVFCEGNEVLNIIWK

SEQ ID NO: 34827 - DNA, 50 bp, Streptococcus agalactiae; identical to SEQ ID NO: 2317
  source 1..50: mol_type = genomic DNA

SEQ ID NO: 34828 - DNA, 40 bp, Streptococcus agalactiae; identical to SEQ ID NO: 34823
  source 1..40: mol_type = genomic DNA

SEQ ID NO: 34829 - DNA, 40 bp, Streptococcus agalactiae; identical to SEQ ID NO: 34824
  source 1..40: mol_type = genomic DNA

SEQ ID NO: 34830 - DNA, 50 bp, Streptococcus agalactiae; identical to SEQ ID NO: 34735
  source 1..50: mol_type = genomic DNA

SEQ ID NO: 34831 - protein, 497 aa, Erysipelothrix rhusiopathiae
MSKVAIYIRLSVEDMIKTDESESIINQRAYLNDYLDKNEEFKNFTREEYVDDGYSGTNENRPAFQRMLEDVKKNNIQTIIVKDLSRFMRDYITLGDYLENIFPFLGVRFIAINDGYDSNKEKGNGTDLDIQFKGLLYDFYTKDISEKVKSSMTTLKKQGKFLAWSPPLGYMKDPNDRHKIIVDEETAWIVKKIFKLALDGISSRNIAKILNEEKIPTPSKRKSEITNLDFEYSIIRTAKKPRPTWTNGNVIDVLANENYTGTYTFNMQDKSVLNPSSFKFKPKEEWERVENNHEAIISREDFEKVQKIKEKNLFMKGKNTDYEWRKKSPLQGFAKCPTCNHVLGCIQSKRKRQDGSIRVHTYFTCRICKCNNVKHKNSRAGSLEEQVFEAIKEKYGLEDPIKDEKVKVKPMEKSIEDLEAKKMHNFEKYKLGKMNRQKFIDSKNLIDEEIQAIKEKIQKAKEEKEVIDNTKLTRELMEKYIDSVICEGNEVLNIIWK

SEQ ID NO: 34832 - DNA, 50 bp, Erysipelothrix rhusiopathiae; identical to SEQ ID NO: 2317
  source 1..50: mol_type = genomic DNA

SEQ ID NO: 34833 - DNA, 40 bp, Erysipelothrix rhusiopathiae
  source 1..40: mol_type = genomic DNA
ggtaattgacccttgctgtggtacggcgggatttttaatt

SEQ ID NO: 34834 - DNA, 40 bp, Erysipelothrix rhusiopathiae
  source 1..40: mol_type = genomic DNA
ggtaattgacccttgctgtgatacggcgggatttttaatt

SEQ ID NO: 34835 - DNA, 50 bp, Erysipelothrix rhusiopathiae; identical to SEQ ID NO: 34735
  source 1..50: mol_type = genomic DNA

SEQ ID NO: 34836 - protein, 497 aa, Aerococcus sanguinicola; identical to SEQ ID NO: 34756

SEQ ID NO: 34837 - DNA, 50 bp, Aerococcus sanguinicola; identical to SEQ ID NO: 2317
  source 1..50: mol_type = genomic DNA

SEQ ID NO: 34838 - DNA, 40 bp, Aerococcus sanguinicola
  source 1..40: mol_type = genomic DNA
agcttacgacccgacaatgggctcgggatccctcctcttg

SEQ ID NO: 34839 - DNA, 40 bp, Aerococcus sanguinicola
  source 1..40: mol_type = genomic DNA
agcttacgacccgacaatggactcgggatccctcctcttg

SEQ ID NO: 34840 - DNA, 50 bp, Aerococcus sanguinicola; identical to SEQ ID NO: 34735
  source 1..50: mol_type = genomic DNA

SEQ ID NO: 34841 - protein, 521 aa, Escherichia coli
MKVPVWCYARISTLKQIDGFGIQRQINTINQFLQYVVLDHRLPFTLDVDNVTQMVAEGKSAFRGKNWNEKTKLGQYRKMVMDGVLPDSVLITESIDRLTRLDPYKAVEILSGLINRGTTIIEIETGMTYSRYIPESITVLTMTINRSNGESKRKSIMMQKSHANRYGKVSKVRPRWFDVVEIDGIKQYRPNETAKAIQRMYNDYINGIGAAHIVRTYGNTDNGKAWTLVTVLRALSDKRVADDARYPPIVDKELYDRVQALKAATNKKGNTHQKNMLNIFSGMSRCPVCNQSIIVKRNSHGNLFTVCLGKRTNKTCSARSISYFALERPLLTAIRGLDFSEVYKHEDKNVLTLRDQWIQNERDIAAFRERLNKASRHEKFAILDELEIMNREQEELTIRLKSVDVPKDIQLTFDDDKLDLDTNYRIELNNRIKKLIQHINIVREDVSKSKYTIYCTIKYWTDVISHLVIIDVNIKRTGTGGTNTLTTTLRSVSSLNMDGTVSGNPDSDAWEYWKSFLDNLK

SEQ ID NO: 34842 - DNA, 50 bp, Escherichia coli
  source 1..50: mol_type = genomic DNA
cggtgtacattattgcatgactacgaacagttgtgatatgatgtacacca

SEQ ID NO: 34843 - DNA, 40 bp, Escherichia coli; identical to SEQ ID NO: 23868
  source 1..40: mol_type = genomic DNA

SEQ ID NO: 34844 - DNA, 40 bp, Escherichia coli
  source 1..40: mol_type = genomic DNA
cggccccatcagcagcaatcaacagtcagtcgtaccaccg

SEQ ID NO: 34845 - DNA, 50 bp, Escherichia coli
  source 1..50: mol_type = genomic DNA
gggattacacaagggcatgaataccaaaagatgtgaatcaatggaggcca

SEQ ID NO: 34846 - protein, 521 aa, Escherichia coli
MKVPVWCYARISTLKQIDGFGIQRQINTINQFLQYVVLDHRLPFTLDVDNVTQMVAEGKSAFRGKNWNEKTKLGQYRKMVMDGVLPDSVLITESIDRLTRLDPYKAVEILSGLINRGTTIIEIETGMTYSRYIPESITVLTMTINRSNGESKRKSIMMQKSHANRYGKVSKVRPRWFDVVEIDGIKQYRPNETAKAIQRMYNDYINGIGAAHIVRTYGNTDNGKPWTLVTVLRALSDKRVADDARYPPIVDKELYDRVQALKAATNKKGNTHQKNMLNIFSGMSRCPVCNQSIIVKRNSHGNLFTVCLGKRTNKTCSARSISYFALERPLLTAIRGLDFSEVYKHEDKNVLTLRDQWIQNERDIAAFRERLNKASRHEKFAILDELEIMNREQEELTIRLKSVDVPKDIQLTFDDDKLDLDTNYRIELNNRIKKLIQHINIVREDVSKSKYTIYCTIKYWTDVISHLVIIDVNIKRTGTGGTNTLTTTLRSVSSLNMDGTVSGNPDSDAWEYWKSFLDNLK

SEQ ID NO: 34847 - DNA, 50 bp, Escherichia coli; identical to SEQ ID NO: 34842
  source 1..50: mol_type = genomic DNA

SEQ ID NO: 34848 - DNA, 40 bp, Escherichia coli
  source 1..40: mol_type = genomic DNA
cgggcccatcagcagcaatgaacagtcagtcgtaccaccg

SEQ ID NO: 34849 - DNA, 40 bp, Escherichia coli
  source 1..40: mol_type = genomic DNA
cgggcccatcagcagcaatcaacagtcagtcgtaccaccg

SEQ ID NO: 34850 - DNA, 50 bp, Escherichia coli; identical to SEQ ID NO: 34845
  source 1..50: mol_type = genomic DNA

SEQ ID NO: 34851 - protein, 521 aa, Escherichia coli
MKVPVWCYARISTLKQIDGFGIQRQINTINQFLQYVVLDHRLPFTLDVDNVTQMVAEGKSAFRGKNWNEKTKLGQYRKMVMDGVINDSVLIVENIDRLTRLDTFQAVEIISGLVNRGTTILEIETGMTYSRYIPESITVLVMQCNRANGESKRKSIMMQKSHANRYGKVSKVRPRWFDVVEIDGIKQYRPNETAKAIQRMYNDYINGIGAAHIVRTYGNTDNGKAWTLVTVLRALSDKRVADDARYPPIVDKELYDRVQALKAATNKKGNTHQKNMLNIFSGMSRCPVCNQSIIVKRNSHGNLFTVCLGKRTNKTCSARSISYFALERPLLTAIRGLDFSEVYKHEDKNVLTLRDQWIQNERDIAAFRERLNKASRHEKFAILDELEIMNREQEELTIRLKSVDVPKDIQLTFDDDKLDLDTNYRIELNNRIKKLIQHINIVREDVSKSKYTIYCTIKYWTDVISHLVIIDVNIKRTGTGGTNTLTTTLRSVSSLNMDGTVSGNPDSDAWEYWKSFLDNLK

SEQ ID NO: 34852 - DNA, 50 bp, Escherichia coli; identical to SEQ ID NO: 34842
  source 1..50: mol_type = genomic DNA

SEQ ID NO: 34853 - DNA, 40 bp, Escherichia coli; identical to SEQ ID NO: 23868
  source 1..40: mol_type = genomic DNA

SEQ ID NO: 34854 - DNA, 40 bp, Escherichia coli; identical to SEQ ID NO: 34844
  source 1..40: mol_type = genomic DNA

SEQ ID NO: 34855 - DNA, 50 bp, Escherichia coli; identical to SEQ ID NO: 34845
  source 1..50: mol_type = genomic DNA

SEQ ID NO: 34856 - protein, 521 aa, Escherichia coli
MKVPVWCYARISTLKQIDGFGIQRQINTINQFLQCVELDHRLPFTLDVDNVTQMVAEGNSAYRIKNWNEKTKLGQYRKMVMDGVISDSVLIVENIDRLTRLDPYMAIEIISGMINRGTTILEIETGMTYSRYIPESITVLTMQINRANGESKRKSIMMQKSHANRYGKVSKVRPRWFDVVEIDGIKQYRPNETAKAIQRMYNDYINGIGAAHIVRTYGNTDNGKPWTLVTVLRALSDKRVADDARYPPIIDKKLYDSVQALKAATNKKGNTHQKNMLNIFSGMSRCPVCNQSIIVKRNSHGNLFTVCLGKRTNKTCEARSISYFALERPLLTAIRGLDFSEVYKHEDKNVLTLRDQWIQNERDIAAFRERLNKASRYEKFVILDELETMNREQEELTIRLKSVDVPKDIQLTFDDDKLDLDTNYRIELNNRIKKLIQHINIVREDVSKSSYTIYCTIKYWTDVISHLVIIDVNIKRTGTGGTNTLTTTLRSVSSLNMDGTVSGNPDSDAWEYWKSFLDNLK

SEQ ID NO: 34857 - DNA, 50 bp, Escherichia coli; identical to SEQ ID NO: 34842
  source 1..50: mol_type = genomic DNA

SEQ ID NO: 34858 - DNA, 40 bp, Escherichia coli; identical to SEQ ID NO: 23868
  source 1..40: mol_type = genomic DNA

SEQ ID NO: 34859 - DNA, 40 bp, Escherichia coli; identical to SEQ ID NO: 34844
  source 1..40: mol_type = genomic DNA

SEQ ID NO: 34860 - DNA, 50 bp, Escherichia coli; identical to SEQ ID NO: 34845
  source 1..50: mol_type = genomic DNA

SEQ ID NO: 34861 - protein, 521 aa, Escherichia coli
MKVPVWCYARISTLKQIDGFGIQRQINTINQFLQYVVLDHRLPFTLDVDNVTQMVAEGKSAFRGKNWNEKTKLGQYRKMVMDGVINDSVLIVENIDRLTRLDTFQAVEIISGLVNRGTTILEIETGMTYSRYIPESITVLVMQCNRANGESKRKSIMMQKSHANRYGKVSKVRPRWFDVVEIDGIKQYRPNETAKAIQRMYNDYINGIGAAHIVRTYGNTDNGKAWTLVTVLRALSDKRVADDARYPPIVDKELYDRVQALKAATNKKGNTHQKNMLNIFSGMSRCPVCNQSIIVKRNSHGNLFTVCLGKRTNKTCSARSISYFALERPLLTAIRGLDFSEVYKHEDKNVLTLRDQWIQNERDIAAFRERLNKASRHEKFAILDELEIMNREQEELTIRLKSVDVPKDIQLTFDDDKLDLDTNYRIELNNRIKKLIQHINIVREDVTKSSYTIYCTIKYWTDVISHLVIIDVNIKRTGTGGTNTLTTTLRSVSSLNMDGTVSGNPDSDAWEYWKSFLDNLK

SEQ ID NO: 34862 - DNA, 50 bp, Escherichia coli; identical to SEQ ID NO: 34842
  source 1..50: mol_type = genomic DNA

SEQ ID NO: 34863 - DNA, 40 bp, Escherichia coli; identical to SEQ ID NO: 23868
  source 1..40: mol_type = genomic DNA

SEQ ID NO: 34864 - DNA, 40 bp, Escherichia coli; identical to SEQ ID NO: 34844
  source 1..40: mol_type = genomic DNA

SEQ ID NO: 34865 - DNA, 50 bp, Escherichia coli; identical to SEQ ID NO: 34845
  source 1..50: mol_type = genomic DNA

SEQ ID NO: 34866 - protein, 521 aa, Escherichia coli
MKVPVWCYARISTLKQIDGFGIQRQINTINQFLQYVVLDHRLPFTLDVDNVTQMVAEGKSAFRGKNWNEKTKLGQYRKMVMDGVLPDSVLITESIDRLTRLDPYKAVEILSGLINRGTTIIEIETGMTYSRYIPESITVLTMTINRSNGESKRKSIMMQKSHQNRYGKVSKVRPRWFDVVEIDGIKQYRPNETAKAIQRMYNDYINGIGAAHIVRTYGNTDNGKAWTLVTVLRALSDKRVADDARYPPIVDKELYDRVQALKAATNKKGNTHQKNMLNIFSGMSRCPVCNQSIIVKRNSHGNLFTVCLGKRTNKTCSARSISYFALERPLLTAIRGLDFSEVYKHEDKNVLTLRNQWIQNERDIAAFRERLNKASRHEKFAILDELEIMNREQEELTIRLKSVDVPKDIQLTFDDDKLDLDTNYRIELNNRIKKLIQHINIVREDVSKSKYTIYCTIKYWTDVISHLVIIDVNIKRTGTGGTNTLTTTLRSVSSLNMDGTVSGNPDSDAWEYWKSFLDNLK

SEQ ID NO: 34867 - DNA, 50 bp, Escherichia coli; identical to SEQ ID NO: 34842
  source 1..50: mol_type = genomic DNA

SEQ ID NO: 34868 - DNA, 40 bp, Escherichia coli; identical to SEQ ID NO: 23868
  source 1..40: mol_type = genomic DNA

SEQ ID NO: 34869 - DNA, 40 bp, Escherichia coli; identical to SEQ ID NO: 34844
  source 1..40: mol_type = genomic DNA

SEQ ID NO: 34870 - DNA, 50 bp, Escherichia coli; identical to SEQ ID NO: 34845
  source 1..50: mol_type = genomic DNA

SEQ ID NO: 34871 - protein, 521 aa, Escherichia coli
MKVPVWCYARISTLKQIDGFGIQRQINTINQFLQCVELDHRLPFTLDVDNVTQMVAEGNSAYRIKNWNEKTKLGQYRKMVMDGVISDSVLIVENIDRLTRLDPYMAIEIISGMINRGTTILEIETGMTYSRYIPESITVLTMQINRANGESKRKSIMMQKSHANRYGKVSKVRPRWFDVVEIDGIKQYRPNETAKAIQRMYNDYINGIGAAHIVRTYGNTDNGKPWTLVTVLRALSDKRVADDARYPPIIDKKLYDSVQALKAATNKKGNTHQKNMLNIFSGMSRCPVCNQSIIVKRNSHGNLFTVCLGKRTNKTCEARSISYFALERPLLTAIRGLDFSEVYKHEDKNVLTLRDQWIQNERDIAAFRERLNKASRYEKFVILDELETMNREQEELTIRLKSVDVPKDIQLTFDDDKLDLDTNYRIELNNRIKKLIQHINIVREDVTKSSYTIYCTIKYWTDVISHLVIIDVNIKRTGTGGTNTLTTTLRSVSSLNMDGTVSGNPDSDAWEYWKSFLDNLK

SEQ ID NO: 34872 - DNA, 50 bp, Escherichia coli; identical to SEQ ID NO: 34842
  source 1..50: mol_type = genomic DNA

SEQ ID NO: 34873 - DNA, 40 bp, Escherichia coli; identical to SEQ ID NO: 23868
  source 1..40: mol_type = genomic DNA

SEQ ID NO: 34874 - DNA, 40 bp, Escherichia coli; identical to SEQ ID NO: 34844
  source 1..40: mol_type = genomic DNA

SEQ ID NO: 34875 - DNA, 50 bp, Escherichia coli; identical to SEQ ID NO: 34845
  source 1..50: mol_type = genomic DNA

SEQ ID NO: 34876 - protein, 521 aa, Escherichia coli
MKVPVWCYARISTLKQIDGFGIQRQINTINQFLQCVELDHRLPFTLDVDNVTQMVAEGKSAFRDKNWNEKTKLGQYRKLVMDGVISDSVLIVENIDRLTRLDPYMAIEIISGLVNRGTTILEIETGMTYSRYIPESITVLVMQCNRANGESKRKSIMMQKSHANRYGKVSKVRPRWFDVVEIDGIKQYRPNETAKAIQRMYNDYINGIGAAHIVRTYGNTDNGKAWTLVTVLRALSDKRVADDARYPPIVDKELYDRVQALKAATNKKGNTHQKNMLNIFSGMSRCPVCNQSIIVKRNSHGNLFTVCLGKRTNKTCSARSISYFALERPLLTAIRGLDFSEVYKHEDKNVLTLRDQWIQNERDIAAFRERLNKASRHEKFAILDELEIMNREQEELTIRLKSVDVPKDIQLTFDDDKLDLDTNYRIELNNRIKKLIQHINIVRENVTKSSYTIYCTIKYWTDVISHLVIIDVNIKRTGTGGTNTLTTTLRSVSSLNMDGTVSGNPDSDAWEYWKSFLDNLK

SEQ ID NO: 34877 - DNA, 50 bp, Escherichia coli; identical to SEQ ID NO: 34842
  source 1..50: mol_type = genomic DNA

SEQ ID NO: 34878 - DNA, 40 bp, Escherichia coli; identical to SEQ ID NO: 34068
  source 1..40: mol_type = genomic DNA

SEQ ID NO: 34879 - DNA, 40 bp, Escherichia coli
  source 1..40: mol_type = genomic DNA
cggtcccatcagcagcaatcaacagtcagtcgtaccaccg

SEQ ID NO: 34880 - DNA, 50 bp, Escherichia coli; identical to SEQ ID NO: 34845
  source 1..50: mol_type = genomic DNA

SEQ ID NO: 34881 - protein, 528 aa, Escherichia coli
MKVPVWCYARISTLKQIDGFGIQRQINTINQFLQYVVLDHRLPFTLDVDNVTQMVAEGKSAFRGKNWNEKTKLGQYRKMVMDGVLPDSVLITESIDRLTRLDPYKAVEILSGLINRGTTIIEIETGMTYSRYIPESITVLTMTINRSNGESKRKSIMMQKSHQNRYGKVSKVRPRWFDVVEIDGIKQYRPNETAKAIQRMYNDYINGIGAAHIVRTYGNTDNGKPWTLVTVLRALSDKRVADDARYPPIIDKKLYDSVQALKAATNKKGNTHQKNMLNIFSGMSRCPVCNQSIIVKRNSHGNLFTVCLGKRTNKTCEARSISYFALERPLLTAIRGLDFSEVYKHEDKNVLTLRDQWIQNERDIAAFRERLNKASRHEKFAILDELEIMNREQEELTIRLKSVDVPKDIQLTFDDDKLDLDTNYRIELNNRIKKLIQHINIVREDVSKSKYTIYCTIKYWTDVISHLVIIDVNIKRTGTGGTNTLTTTLRSVSSLNMDGTVSGNPDSDAWEYWKSFLDGTIGLVDYKK

SEQ ID NO: 34882 - DNA, 50 bp, Escherichia coli; identical to SEQ ID NO: 34842
  source 1..50: mol_type = genomic DNA

SEQ ID NO: 34883 - DNA, 40 bp, Escherichia coli; identical to SEQ ID NO: 23868
  source 1..40: mol_type = genomic DNA

SEQ ID NO: 34884 - DNA, 40 bp, Escherichia coli; identical to SEQ ID NO: 34844
  source 1..40: mol_type = genomic DNA

SEQ ID NO: 34885 - DNA, 50 bp, Escherichia coli; identical to SEQ ID NO: 34845
  source 1..50: mol_type = genomic DNA

SEQ ID NO: 34886 - protein, 521 aa, Escherichia coli
MKVPVWCYARISTLKQIDGFGIQRQINTINQFLQYVVLDHRLPFTLDVDNVTQMVAEGKSAFRGKNWNEKTKLGQYRKMVMDGVINDSVLIVENIDRLTRLDTFQAVEIISGLVNRGTTILEIETGMTYSRYIPESITVLVMQCNRANGESKRKSIMMQKSHANRYGKVSKVRPRWFDVVEIDGIKQYRPNETAKAIQRMYNDYINGIGAAHIVRTYGNTDNGKPWTLVTVLRALSDKRVADDARYPPIIDKKLYDSVQALKAATNKKGNTHQKNMLNIFSGMSRCPVCNQSIIVKRNSHGNLFTVCLGKRTNKTCEARSISYFALERPLLTAIRGLDFSEVYKHEDKNVLTLRDQWIQNERDIAAFRERLNKASRHEKFAILDELEIMNREQEELTIRLKSVDVPKDIQLTFDDDKLDLDTNYRIELNNRIKKLIQHINIVREDVSKSKYTIYCTIKYWTDVISHLVIIDVNIKRTGTGGTNTLTTTLRSVSSLNMDGTVSGNPDSDAWEYWKSFLDNLK

SEQ ID NO: 34887 - DNA, 50 bp, Escherichia coli; identical to SEQ ID NO: 34842
  source 1..50: mol_type = genomic DNA

SEQ ID NO: 34888 - DNA, 40 bp, Escherichia coli; identical to SEQ ID NO: 34068
  source 1..40: mol_type = genomic DNA

SEQ ID NO: 34889 - DNA, 40 bp, Escherichia coli; identical to SEQ ID NO: 34879
  source 1..40: mol_type = genomic DNA

SEQ ID NO: 34890 - DNA, 50 bp, Escherichia coli; identical to SEQ ID NO: 34845
  source 1..50: mol_type = genomic DNA

SEQ ID NO: 34891 - protein, 521 aa, Escherichia coli; identical to SEQ ID NO: 34841

SEQ ID NO: 34892 - DNA, 50 bp, Escherichia coli; identical to SEQ ID NO: 34842
  source 1..50: mol_type = genomic DNA

SEQ ID NO: 34893 - DNA, 40 bp, Escherichia coli; identical to SEQ ID NO: 34068
  source 1..40: mol_type = genomic DNA

SEQ ID NO: 34894 - DNA, 40 bp, Escherichia coli; identical to SEQ ID NO: 34879
  source 1..40: mol_type = genomic DNA

SEQ ID NO: 34895 - DNA, 50 bp, Escherichia coli; identical to SEQ ID NO: 34845
  source 1..50: mol_type = genomic DNA

SEQ ID NO: 34896 - protein, 521 aa, Escherichia coli
MKVPVWCYARISTLKQIDGFGIQRQINTINQFLQYVVLDHRLPFTLDVDNVTQMVAEGKSAFRGKNWNEKTKLGQYRKMVMDGVLPDSVLITESIDRLTRLDPYKAVEILSGLINRGTTIIEIETGMTYSRYIPESITVLTMTINRSNGESKRKSIMMQKSHANRYGKVSKVRPRWFDVVEIDGIKQYRPNETAKAIQRMYNDYINGIGAAHIVRTYGNTDNGKAWTLVTVLRALSDKRVADDARYPPIIDKELYDSVQALKAATNKKGNTHQKNMLNIFSGMSRCPVCNQSIIVKRNSHGNLFTVCLGKRTNKTCEARSISYFALERPLLTAIRGLDFSEVYKHEDKNVLTLRDQWIQNERDIAAFRERLSKASRYEKFVILDELETMNREQEELTIRLKSVDVPKDIQLTFDDDKLDLDTNYRIELNNRIKKLIQHINIVREDVTKSSYTIYCTIKYWTDVISHLVIIDVNIKRTGTGGTNTLTTTLRSVSSLNMDGTVSGNPDSDAWEYWKSFLDNLK

SEQ ID NO: 34897 - DNA, 50 bp, Escherichia coli; identical to SEQ ID NO: 34842
  source 1..50: mol_type = genomic DNA

SEQ ID NO: 34898 - DNA, 40 bp, Escherichia coli; identical to SEQ ID NO: 34068
  source 1..40: mol_type = genomic DNA

SEQ ID NO: 34899 - DNA, 40 bp, Escherichia coli; identical to SEQ ID NO: 34879
  source 1..40: mol_type = genomic DNA

SEQ ID NO: 34900 - DNA, 50 bp, Escherichia coli; identical to SEQ ID NO: 34845
  source 1..50: mol_type = genomic DNA

SEQ ID NO: 34901 - protein, 521 aa, Escherichia coli
MKVPVWCYARISTLKQIDGFGIQRQINTINQFLQCVELDHRLPFTLDVDNVTQMVAEGNSAYRIKNWNEKTKLGQYRKMVMDGVISDSVLIVENIDRLTRLDPYMAIEIISGMINRGTTILEIETGMTYSRYIPESITVLTMQINRANGESKRKSIMMQKSHANRYGKVSKVRPRWFDVVEIDGIKQYRPNETAKAIQRMYNDYINGIGAAHIVRTYGNTDNGKAWTLVTVLRALSDKRVADDARYPPIVDKELYDRVQALKAATNKKGNTHQKNMLNIFSGMSRCPVCNQSIIVKRNSHGNLFTVCLGKRTNKTCSARSISYFALERPLLTAIRGLDFSEVYKHEDKNVLTLRDQWIQNERDIAAFRERLNKASRHEKFAILDELEIMNREQEELTIRLKSVDVPKDIQLTFDDDKLDLDTNYRIELNNRIKKLIQHINIVREDVSKSKYTIYCTIKYWTDVISHLVIIDVNIKRTGTGGTNTLTTTLRSVSSLNMDGTVSGNPDSDAWEYWKSFLDNLK

SEQ ID NO: 34902 - DNA, 50 bp, Escherichia coli; identical to SEQ ID NO: 34842
  source 1..50: mol_type = genomic DNA

SEQ ID NO: 34903 - DNA, 40 bp, Escherichia coli; identical to SEQ ID NO: 34068
  source 1..40: mol_type = genomic DNA

SEQ ID NO: 34904 - DNA, 40 bp, Escherichia coli; identical to SEQ ID NO: 34879
  source 1..40: mol_type = genomic DNA

SEQ ID NO: 34905 - DNA, 50 bp, Escherichia coli; identical to SEQ ID NO: 34845
  source 1..50: mol_type = genomic DNA

SEQ ID NO: 34906 - protein, 521 aa, Escherichia coli
MKVPVWCYARISTLKQIDGFGIQRQINTINQFLQCVELDHRLPFTLDVDNVTQMVAEGNSAYRIKNWNEKTKLGQYRKMVMDGVISDSVLIVENIDRLTRLDPYMAIEIISGMINRGTTILEIETGMTYSRYIPESITVLTMQINRANGESKRKSIMMQKSHANRYGKVSKVRPRWFDVVEIDGIKQYRPNETAKAIQRMYNDYINGIGAAHIVRTYGNTDNGKPWTLVTVLRALSDKRVADDARYPPIIDKKLYDSVQALKAATNKKGNTHQKNMLNIFSGMSRCPVCNQSIIVKRNSHGNLFTVCLGKRTNKTCEARSISYFALERPLLTAIRGLDFSEVYKHEDKNVLTLRDQWIQNERDIAAFRERLNKASRHEKFAILDELEIMNREQEELTIRLKSVDVPKDIQLTFDDDKLDLDTNYRIELNNRIKKLIQHINIVREDVSKSKYTIYCTIKYWTDVISHLVIIDVNIKRTGTGGTNTLTTTLRSVSSLNMDGTVSGNPDSDAWEYWKSFLDNLK

SEQ ID NO: 34907 - DNA, 50 bp, Escherichia coli; identical to SEQ ID NO: 34842
  source 1..50: mol_type = genomic DNA

SEQ ID NO: 34908 - DNA, 40 bp, Escherichia coli; identical to SEQ ID NO: 23868
  source 1..40: mol_type = genomic DNA

SEQ ID NO: 34909 - DNA, 40 bp, Escherichia coli; identical to SEQ ID NO: 34844
  source 1..40: mol_type = genomic DNA

SEQ ID NO: 34910 - DNA, 50 bp, Escherichia coli; identical to SEQ ID NO: 34845
  source 1..50: mol_type = genomic DNA

SEQ ID NO: 34911 - protein, 521 aa, Escherichia coli
MKVPVWCYARISTLKQIDGFGIQRQINTINQFLQYVVLDHRLPFTLDVDNVTQMVAEGKSAFRGKNWNEKTKLGQYRKMVMDGVINDSVLIVENIDRLTRLDTFQAVEIISGLVNRGTTILEIETGMTYSRYIPESITVLVMQCNRANGESKRKSIMMQKSHANRYGKVSKVRPRWFDVVEIDGIKQYRPNETAKAIQRMYNDYINGIGAAHIVRTYGNTDNGKAWTLVTVLRALSDKRVADDARYPPIIDKKLYDSVQALKAATNKKGNTHQKNMLNIFSGMSRCPVCNQSIIVKRNSHGNLFTVCLGKRNNKTCEARSFSYFALERPLLTAIRGLDFSEVYKHEDKNVLTLRDQWIQNERDIAAFRERLSKASRYEKFVILDELETMNREQEELTIRLKSVDVPKDIQLTFDDDKLDLDTNYRIELNNRIKKLIQHINIVREDVSKSKYTIYCTIKYWTDVISHLVIIDVNIKRTGTGGTNTLTTTLRSVSSLNMDGTVSGNPDSDAWEYWKSFLDNLK

SEQ ID NO: 34912 - DNA, 50 bp, Escherichia coli; identical to SEQ ID NO: 34842
  source 1..50: mol_type = genomic DNA

SEQ ID NO: 34913 - DNA, 40 bp, Escherichia coli; identical to SEQ ID NO: 23868
  source 1..40: mol_type = genomic DNA

SEQ ID NO: 34914 - DNA, 40 bp, Escherichia coli; identical to SEQ ID NO: 34844
  source 1..40: mol_type = genomic DNA

SEQ ID NO: 34915 - DNA, 50 bp, Escherichia coli; identical to SEQ ID NO: 34845
  source 1..50: mol_type = genomic DNA

SEQ ID NO: 34916 - protein, 521 aa, Escherichia coli
MKVPVWCYARISTLKQIDGFGIQRQINTINQFLQYVVLDHRLPFTLDVDNVTQMVAEGKSAFRGKNWNEKTKLGQYRKMVMDGVINDSVLIVENIDRLTRLDTFQAVEIISGLVNRGTTILEIETGMTYSRYIPESITVLVMQCNRANGESKRKSIMMQKSHANRYGKVSKVRPRWFDVVEIDGIKQYRPNETAKAIQRMYNDYINGIGAAHIVRTYGNTDNGKAWTLVTVLRALSDKRVADDARYPPIIDKKLYDSVQALKAATNKKGNTHQKNMLNIFSGMSRCPVCNQSIIVKRNSHGNLFTVCLGKRNNKTCEARSFSYFALERPLLTAIRGLDFSEVYKHEDKNVLTLRDQWIQNERDIAAFRERLNKASRHEKFAILDELEIMNREQEELTIRLKSVDVPKDIQLTFDDDKLDLDTNYRIELNNRIKKLIQHINIVREDVSKSKYTIYCTIKYWTDVISHLVIIDVNIKRTGTGGTNTLTTTLRSVSSLNMDGTVSGNPDSDAWEYWKSFLDNLK

SEQ ID NO: 34917 - DNA, 50 bp, Escherichia coli; identical to SEQ ID NO: 34842
  source 1..50: mol_type = genomic DNA

SEQ ID NO: 34918 - DNA, 40 bp, Escherichia coli; identical to SEQ ID NO: 23868
  source 1..40: mol_type = genomic DNA

SEQ ID NO: 34919 - DNA, 40 bp, Escherichia coli; identical to SEQ ID NO: 34844
  source 1..40: mol_type = genomic DNA

SEQ ID NO: 34920 - DNA, 50 bp, Escherichia coli; identical to SEQ ID NO: 34845
  source 1..50: mol_type = genomic DNA

SEQ ID NO: 34921 - protein, 521 aa, Escherichia coli
MKVPVWCYARISTLKQIDGFGIQRQINTINQFLQYVVLDHRLPFTLDVDNVTQMVAEGKSAFRGKNWNEKTKLGQYRKMVMDGVLPDSVLITESIDRLTRLDPYKAVEILSGLINRGTTIIEIETGMTYSRYIPESITVLTMTINRSNGESKRKSIMMQKSHANRYGKVSKVRPRWFDVVEIDGIKQYRPNETAKAIQRMYNDYINGIGAAHIVRTYGNTDNGKPWTLVTVLRALSDKRVADDARYPPIVDKELYDRVQALKAATNKKGNTHQKNMLNIFSGMSRCPVCNQSIIVKRNSHGNLFTVCLGKRTNKTCEARSISYFALERPLLTAIRGLDFSEVYKHEDKNVLTLRDQWIQNERDIAAFRERLNKASRHEKFAILDELEIMNREQEELTIRLKSVDVPKDIQLTFDDDKLDLDTNYRIELNNRIKKLIQHINIVREDVSKSKYTIYCTIKYWTDVISHLVIIDVNIKRTGTGGTNTLTTTLRSVSSLNMDGTVSGNPDSDAWEYWKSFLDNLK

SEQ ID NO: 34922 - DNA, 50 bp, Escherichia coli; identical to SEQ ID NO: 34842
  source 1..50: mol_type = genomic DNA

SEQ ID NO: 34923 - DNA, 40 bp, Escherichia coli; identical to SEQ ID NO: 23868
  source 1..40: mol_type = genomic DNA

SEQ ID NO: 34924 - DNA, 40 bp, Escherichia coli; identical to SEQ ID NO: 34844
  source 1..40: mol_type = genomic DNA

SEQ ID NO: 34925 - DNA, 50 bp, Escherichia coli; identical to SEQ ID NO: 34845
  source 1..50: mol_type = genomic DNA

SEQ ID NO: 34926 - protein, 521 aa, Escherichia coli
MKVPVWCYARISTLKQIDGFGIQRQINTINQFLQCVELDHRLPFTLDVDNVTQMVAEGNSAYRIKNWNEKTKLGQYRKMVMDGVISDSVLIVENIDRLTRLDPYMAIEIISGMINRGTTILEIETGMTYSRYIPESITVLTMQINRANGESKRKSIMMQKSHANRYGKVSKVRPRWFDVVEIDGIKQYRPNETAKAIQRMYNDYINGIGAAHIVRTYGNTDNGKPWTLVTVLRALSDKRVADDARYPPIIDKELYDRVQALKAATNKKGNTHQKNMLNIFSGMSRCPVCNQSIIVKRNSHGNLFTVCLGKRNNKTCEARSFSYFALERPLLTAIRGLDFSEVYKHEDKNVLTLRDQWIQNERDIAAFRERLSKASRYEKFVILDELETMNREQEELTIRLKSVDVPKDIQLTFDDDKLDLDTNYRIELNNRIKKLIQHINIVREDVTKSSYTIYCTIKYWTDVISHLVIIDVNIKRTGTGGTNTLTTTLRSVSSLNMDGTVSGNPDSDAWEYWKSFLDNLK

SEQ ID NO: 34927 - DNA, 50 bp, Escherichia coli; identical to SEQ ID NO: 34842
  source 1..50: mol_type = genomic DNA

SEQ ID NO: 34928 - DNA, 40 bp, Escherichia coli; identical to SEQ ID NO: 23868
  source 1..40: mol_type = genomic DNA

SEQ ID NO: 34929 - DNA, 40 bp, Escherichia coli; identical to SEQ ID NO: 34844
  source 1..40: mol_type = genomic DNA

SEQ ID NO: 34930 - DNA, 50 bp, Escherichia coli; identical to SEQ ID NO: 34845
  source 1..50: mol_type = genomic DNA

SEQ ID NO: 34931 - protein, 478 aa, Mycolicibacterium elephantis
MNTSTVERVALYARISQDATGKALGVADQLEHARTFAIARGYKIVAEHSDNDISAFRGANRPAYQKVLKLARDRKIDRVIVYHLTRMTRNRRERAEFIDAFHACKVNVSEAQGGDYDLSTAAGRTWVDIQGALATWESEIKSERITAAAARRARSGRPSGDLGYGWIKHGTGSTATWSEHPHEAEVVREIVDRLLAGETLRSITESLNDRGEPAPKAARWGKTSVKKLAIRESNIAQRVHHRGQPDEERFDGCWPPIVDRAKHEKVVALLTAPTRRTNGVARPGARKHLLSWGIGACGVCGSKLRAVTKRGKHGRPLDLYVCDDKGCVGRSEPMVDQLVTRLVIGRLAMPDALEWLIGDDQEARRWSERVDELNRRLADAADAFAEGAITAEQLRRITAKLQPDLDDAEKRRAELVVSLDLDSLRPLASPTAQERWDEMTVAQRRAVLEALGIRVIIDRTRPGPGFDPESVRIEWNQR

SEQ ID NO: 34932 - DNA, 50 bp, Mycolicibacterium elephantis
  source 1..50: mol_type = genomic DNA
tcagggtgtgttgtccggccaggaccgccgggaaataccgtaggctttga

SEQ ID NO: 34933 - DNA, 40 bp, Mycolicibacterium elephantis
  source 1..40: mol_type = genomic DNA
ctgccaggtcttgccgaccccgcctggaaacaggcagtcg

SEQ ID NO: 34934 - DNA, 40 bp, Mycolicibacterium elephantis
  source 1..40: mol_type = genomic DNA
ctgccaggtcttgccgaccaggcctggaaacaggcagtcg

SEQ ID NO: 34935 - DNA, 50 bp, Mycolicibacterium elephantis
  source 1..50: mol_type = genomic DNA
gcagggtgtgggtgccagccaggaaggcaaggcaagtcctcaggtttagg

SEQ ID NO: 34936 - protein, 533 aa, Mesorhizobium opportunistum
MNRAAIYARFSTDLQNERSIDDQLALCRTYAEREGLNVVATFDDRARSGGSVLGRDGLLQLMDKAREHEFDVLVVEALDRLSRDMEDLAGIHKRLSFLGIEIRAVHEGVVNTVLVGLRGLVGQLYREDVAHKVRRGQAGRIKNGLHAGGLTYGYAYVLGDPGKRMIVEEEARIVRRIFGEYVEGQTPRDIAHKLNKDGVPPPRGRTWNASTINGNVQRGTGLLQNELYAGRLIWNRVRMVKDPDTGKRVSRPNSRGEWQTVEVPDLAIVSAALFDAAQARKKARAITHPSHQRRPQHLLTGLLKCGACGAGMSSKGIDKTKRVRIRCSAATESGICSDPKTFYLDTVETAVLTGLAAELRHPDVIAHYVQTYQEERRRLAADTDARRARLERRLGELSREIDRLVTAIAKGHGDPAVLGPQSTTLNEERKAVVTELDQVPAAATVIALHPAVLARYEQQLNQLQAGLAKGLMAGDSESPEAMRDLIETVTVFRDPSRLGGVEVEIAGRLMALLGEKAFPNAVRASGGMVVAGE

SEQ ID NO: 34937 - DNA, 50 bp, Mesorhizobium opportunistum
  source 1..50: mol_type = genomic DNA
gtcggggggtatggtggtagcgggagagcgctaccgcctttccccccact

SEQ ID NO: 34938 - DNA, 40 bp, Mesorhizobium opportunistum; identical to SEQ ID NO: 29288
  source 1..40: mol_type = genomic DNA

SEQ ID NO: 34939 - DNA, 40 bp, Mesorhizobium opportunistum
  source 1..40: mol_type = genomic DNA
taggtaggctggtagcgggtgagggacttgaacccccgac

SEQ ID NO: 34940 - DNA, 50 bp, Mesorhizobium opportunistum
  source 1..50: mol_type = genomic DNA
cgcggggcgctaggtgggagccgctgagcgctcccggggccccgcccacc

SEQ ID NO: 34941 - protein, 507 aa, Escherichia coli
MKRVISYIRFSSEKQSRGDSLRRQSKMVTDWLKAHPEYYLDQDLSFRDLGVSGFTGKHLKGGLGDFLTAIEKGLVKAGDTLLIESLDRLSRQDIDIASELLRNILRSGVDVVTLSDGEHYTRESLKDPLALIKSILIMQRAHEESLRKSERIQAAWNRKKELISEGIKVSKRCPAWLKLNDDRKSFSVIPEKVETVKRCFQLRLEGKSIWEIVRTMNAEGHQTLNQYKAGSFGQTSVQDLLKNRSVIGYFTPKGCEEIAGYYPAIIDETTFYKVQQLSYARHGRKPASAKPLSVNLFKGVIRCSECGHALIITGFSDTRNGIYRCPLRNENRCSAKGLSRKQTDGTLLALLSRLDRFDSDTTNTIDTLKLHREHISSNIEKLVQLSLEIEDLNAITNKLKQLKNELSQVDADIEKETQRLKSIDVGCLSDCDLTTKAGRIEAQLIIKSAVKEVVLNTAKRRCKVTFHNGKVIDLSITENPSEDVTEAIQSLSEVTERGLIDVDEVII

SEQ ID NO: 34942 - DNA, 50 bp, Escherichia coli
  source 1..50: mol_type = genomic DNA
tagtgcatttagaccttgatgattttcatcagacacgtttaaatacacca

SEQ ID NO: 34943 - DNA, 40 bp, Escherichia coli; identical to SEQ ID NO: 5188
  source 1..40: mol_type = genomic DNA

SEQ ID NO: 34944 - DNA, 40 bp, Escherichia coli; identical to SEQ ID NO: 5188
  source 1..40: mol_type = genomic DNA

SEQ ID NO: 34945 - DNA, 50 bp, Escherichia coli
  source 1..50: mol_type = genomic DNA
gagtgcatttcttgcttgctgggtttcaacagacatcagccaaaagaaca

SEQ ID NO: 34946 - protein, 536 aa, Lachnospiraceae bacterium
MLRQTNQQPITALYPRLSHEDELQGESNSISNQKRILETYAKQNGFSNLRWYTDDGYSGANFQRPGFQAMLADIEAGKVGTVIVKDMSRLGRNYLQVGMYTEMIFPQKGVRFIAINDGVDSAQGDNDFAPLRNIFNEWLVRDTSKKIKAVKRSKGMSGKPITSKPVYGYLMDEDENFIIDEEAAPVVKQIYNLCLAGNGPTKIARMLTEQQIPTPGTLEYRRTGSTRRYHPGYECKWATNTVVHILENREYTGCLVNFKTEKLSYKVKHSVENPPEKQVIFENHHEPIIDTQTWERVQELRKQRKRPNRYDEVGLFSGILFCADCGSVMYQQRYQTDKRKQDCYICGSYKKRTHDCTAHFIRTDLLTAGVLSNLRKVTSYAAKHEARFMKLLIEQNEDGGKRRNAAKKKELEAAEKRIAELSAIFKRLYEDSVTGRISDERFTELSADYEAEQRELKERAAAIQAELSKAQEATVNAEKFMNVVRRHTSFEELTPTLLREFVEKIVVHECSYDENKTRRQDIEIYYSFVGKVDLPE

SEQ ID NO: 34947 - DNA, 50 bp, Lachnospiraceae bacterium
  source 1..50: mol_type = genomic DNA
ttacttctttatcacacatcagcaaatgctcatgtgccataaagtaacac

SEQ ID NO: 34948 - DNA, 40 bp, Lachnospiraceae bacterium
  source 1..40: mol_type = genomic DNA
gaatgacaatcccggcgctaagagccagggcatcaaacag

SEQ ID NO: 34949 - DNA, 40 bp, Lachnospiraceae bacterium
  source 1..40: mol_type = genomic DNA
gaatgacaatcccggcgctttgagccagggcatcaaacag

SEQ ID NO: 34950 - DNA, 50 bp, Lachnospiraceae bacterium
  source 1..50: mol_type = genomic DNA
taacttcttcactccagagcagcatttactcaagggcttccaagacacag

SEQ ID NO: 34951 - protein, 479 aa, Mycobacteroides abscessus
MAKAKNPGQRAAVQSAAIYARISADAEGTGLGVARQVQDCRKLASDRGWPVGDEYVDNDVSAYSGKPRREYARMLDDLKSGARDAVIVYNLDRLHRRPVELEDFVTLCESVGVRDVATVTADIDLGNDDGLFMARIFAAFAAKESGRKSARIRRKMLQNAEQGLPHGPARPFGYEPDKITIRPAEANVIREMVDRYLAGASIRSLTIWLNDAGVVPPASTSWQTTTVRHILASGRIAGLREHHGEVIGPAAWPAIITPAERDRILARITARAVTKTRAPRTYLLSGMLRCGRCGNRLFSQARHNNPTNRVRRYVCLKGPDHGGCGRLTVVAQPVEELLTDAVLTRLDSPQLADALAGKARVDADVAALATQLEADQARLDELAALYADGAVSAREWITARDPITDRITQTRRAIATATDTSSVVDLVGTGEVLRGQWDDLDIDRQQAIIKSVLDHAVIAAGTPGSRSLDINRVKPHWKV

SEQ ID NO: 34952 - DNA, 50 bp, Mycobacteroides abscessus
  source 1..50: mol_type = genomic DNA
caggtagatgaacgacttgcaaccaaggtcaactgtcgctaaactaccct

SEQ ID NO: 34953 - DNA, 40 bp, Mycobacteroides abscessus; identical to SEQ ID NO: 8958
  source 1..40: mol_type = genomic DNA

SEQ ID NO: 34954 - DNA, 40 bp, Mycobacteroides abscessus; identical to SEQ ID NO: 8959
  source 1..40: mol_type = genomic DNA

SEQ ID NO: 34955 - DNA, 50 bp, Mycobacteroides abscessus; identical to SEQ ID NO: 1455
  source 1..50: mol_type = genomic DNA

SEQ ID NO: 34956 - protein, 484 aa, Streptococcus agalactiae
MNKVAIYVRVSTTMQAEEGYSIDEQIDKLTSYCKIKDWTVYDIYKDGGFSGGNIERPAMERLISDAERKKFDTVLVYKLDRLSRSQKDTLFLIEEVFGKNDISFLSLNESFDTSTAFGKAMIGILSVFAQLEREQIKERMLLGKIGRAKTGKAMMFSKVSFGYTYDKLKDELVVNQAESIIVRKIFEAYLGGLSLNKLRDYLNSNGIYRGDKPWNYQGLRRILSNPVYIGMIRYRGEIYPGNHQAIIDIDDYNKTQEEIKKRQITALEFSNNPRPFRAKYMLSGIAKCGYCGTPLRIILGSKRKDGSRNMRYQCINRFPRNTKGVTVYNDGKKCNSGFYEKADVEEFVINQIRDLQFNINKLDNLFDKHPSIDIKSIERQISSLDNKLKRLNDLYLNDMIDLEDLKKQTQLLRQQKTMLEDELLNNPAITQEKNKKYFKEFLATKDITKLDYETQKNIVNNLINKVFVKSGYIKIEWKIPFKKM

SEQ ID NO: 34957 - DNA, 50 bp, Streptococcus agalactiae
  source 1..50: mol_type = genomic DNA
atgtgagttttaggtaccaagcattctaaaagcgtatctaaaactctcac

SEQ ID NO: 34958 - DNA, 40 bp, Streptococcus agalactiae; identical to SEQ ID NO: 22358
  source 1..40: mol_type = genomic DNA

SEQ ID NO: 34959 - DNA, 40 bp, Streptococcus agalactiae; identical to SEQ ID NO: 24494
  source 1..40: mol_type = genomic DNA

SEQ ID NO: 34960 - DNA, 50 bp, Streptococcus agalactiae
  source 1..50: mol_type = genomic DNA
gtcagaattatggttaccaagcataacataaccgttatgtaaactatcac

SEQ ID NO: 34961 - protein, 484 aa, Streptococcus agalactiae
MNKVAIYVRVSTTMQAEEGYSIDEQIDKLTSYCKIKDWTVYDIYKDGGFSGGNIERPAMERLISDAERKKFDTVLVYKLDRLSRSQKDTLFLIEEVFGKNDISFLSLNESFDTSTAFGKAMIGILSVFAQLEREQIKERMLLGKIGRAKTGKAMMFSKVSFGYTYDKLKDELVVNQAESIIVRKIFEAYLGGLSLNKLRDYLNNNGIYRGDKPWNYQGLRRILSNPVYIGMIRYRGEIYPGNHQAIIDIDDYNKTQEEIKKRQITALEFSNNPRPFRAKYMLSGIAKCGYCGTPLRIILGSKRKDGSRNMRYQCINRFPRNTKGVTVYNDGKKCNSGFYEKADVEEFVINQIRDLQFNINKLDNLFDKHPSIDIKSIERQISSLDNKLKRLNDLYLNDMIDLEDLKKQTQLLRQQKTMLEDELLNNPAITQEKNKKYFKEFLATKDITKLDYETQKNIVNNLINKVFVKSGYIKIEWKIPFKKM

SEQ ID NO: 34962 - DNA, 50 bp, Streptococcus agalactiae; identical to SEQ ID NO: 34957
  source 1..50: mol_type = genomic DNA

SEQ ID NO: 34963 - DNA, 40 bp, Streptococcus agalactiae; identical to SEQ ID NO: 22358
  source 1..40: mol_type = genomic DNA

SEQ ID NO: 34964 - DNA, 40 bp, Streptococcus agalactiae; identical to SEQ ID NO: 24494
  source 1..40: mol_type = genomic DNA

SEQ ID NO: 34965 - DNA, 50 bp, Streptococcus agalactiae; identical to SEQ ID NO: 34960
  source 1..50: mol_type = genomic DNA

SEQ ID NO: 34966 - protein, 411 aa, Rossellomorea marisflavi
MDIDRLSRNEFDASEIKRILYQTETYIITPHRIFDLTKDDDSLLLGITNLIASGEYKQILKRMRRGKEYAQKQGHWTNGIAPLGYKKDTKTKKLVPNERAKDIQFIFSEVDKGTTIPDVLKQLKSMGIKTREGNDFHYNSILRIINNEAYRGTIISNKTTGKHANTIRPKEEWIIVHNAHPAIIEEKTWESANKIVNEYSFKAPRSKNRIYPTSNLIYCANCGKSQGCNYLKRLDKVYIKHCKCGNRGFYYNPVLVEIKREVLQHKESILKALETLKEGKHEDNTQFIKDKLISRLKRSEKALEKINILFEEDEIDIVTYRERKATRLEEILKIEEEIFRVDSEDKTVRINDLQEQIETVDSLMEKWDFLDGEGFLDEKINRLLHGLISGIFWSYGKGEESPKIIIRFKEE

SEQ ID NO: 34967 - DNA, 50 bp, Rossellomorea marisflavi
  source 1..50: mol_type = genomic DNA
aggtcatccccaagtactatactaactagttgagtacttgggtagtacac

SEQ ID NO: 34968 - DNA, 40 bp, Rossellomorea marisflavi
  source 1..40: mol_type = genomic DNA
gatcttgtttaccggaccgacgggaagcgggaagacgaca

SEQ ID NO: 34969 - DNA, 40 bp, Rossellomorea marisflavi
  source 1..40: mol_type = genomic DNA
gatcttgtttaccggaccgcagggaagcgggaagacgaca

SEQ ID NO: 34970 - DNA, 50 bp, Rossellomorea marisflavi
  source 1..50: mol_type = genomic DNA
aggacatcctctgcatcttcactacacaggtgagtatttttgtggtagac

SEQ ID NO: 34971 - protein, 519 aa, Klebsiella aerogenes
MPKAISYIRFSSRIQASGDSTKRQNKYINEWLKNNPDYQLDESLRFQDLGISGYSGANAKAGAFGEFLSAVESGVIEAGSVLLVESLDRVSRQDIDTARERLRKILLAGVDVVTLADNSWYKKESLNDPLSLIKAVLIMQRANEESATKSKRLRSAWDAKREEAAKGKIMSRRCVAWLRVSDDMSHFELIPDNVKAVQRVFQLRLEGLPFVRIARQMNEEGFYTLNQRNPVKGAWSHTTVKALLDNRSVIGFKVPSNCTVTKGVKEIPNYYPAVISEEHFYSVQQLKQGAGRRPSSEKPLLTNLFKGVMRCAECGFVTIVNCATEKWHGVYRCSMRYEGRCHAKSINRRLADKALVQGLLYNTNRLSHNRDNGSAIGSLQSKLEQLQKQRERLIKLAMLADDTESMAKDLKALNIQIKDAEKAISDVHQREQSTQLETISHLDLTVKKDRTEAQIIIKRIVKEIRLNTAGKKCDVFLHNGLKLYNFPLDRVVDGEIFLEVLPLLEADEFDFDTYRIINP

SEQ ID NO: 34972 - DNA, 50 bp, Klebsiella aerogenes
  source 1..50: mol_type = genomic DNA
gttagttattagagagttgtaattaggactacacatctcttatgataaac

SEQ ID NO: 34973 - DNA, 40 bp, Klebsiella aerogenes
  source 1..40: mol_type = genomic DNA
gttagtatgcaatgtagagagcaccagatgcccggtttgt

SEQ ID NO: 34974 - DNA, 40 bp, Klebsiella aerogenes
  source 1..40: mol_type = genomic DNA
gttagtatgcaatgtagagaacaccagatgcccggtttgt

SEQ ID NO: 34975 - DNA, 50 bp, Klebsiella aerogenes
  source 1..50: mol_type = genomic DNA
ttttgatagaaaagagtttcaaaaaagacaacacatagacgatgataaac

SEQ ID NO: 34976 - protein, 566 aa, Clostridiaceae bacterium
MARIRKAVSGGVHSASRKIVWLIAAYIRLSREDGNDESLSVTNQKKIIGEYLETFFEGEFTLVDYYIDDGLTGTDYDRPDFQRMIHDMEAGKVNCIICKNLSRMFRNYSDQGYFLEKIFPMNKTRFITVSDPRVDSFLHPETLQGLEVPINGLMNDRFAAKTSHDVRDTFATKRRKGEFIGAFAPYGYKKAPENKNALIIDEEAAEVVRNIYQWFVYEGMSKNGIAHRLNDLGIVNPAAYKKSKGLNFCCPQGGKNDGLWSPSSVTTILKNKMYLGIMVQGKQTVISYKVHDKVAVPEEDWYMVPDTHEPIIEAELFQKAADLQTRDTRTAPSGRNLHLLSGFIRCADCKKAMTRQKTKNIVYYYCRTFREKSKNACTKHTIKEEVVIKAVLAAIQAQISLVDSLADVVEEINKSPIVKNESTRLKAMLHLRQKELDKVIGIADGLYGDWKSGDISKEEYTRLKQKYSSQAEQLKVTIQNIQSECQVMEKGISKNDPYLTYFLKYKNIKELNRGILVDLVKNIYIHQGGEISIEFNFADQHRRIIEWIENNQNELTIVGKKDGKTA

SEQ ID NO: 34977 - DNA, 50 bp, Clostridiaceae bacterium
  source 1..50: mol_type = genomic DNA
agttttgtataaataggtggggccacggagccatatatttatataaaagt

SEQ ID NO: 34978 - DNA, 40 bp, Clostridiaceae bacterium
  source 1..40: mol_type = genomic DNA
tgtgggtccggctggagccaccggtccaatgggaccagct

SEQ ID NO: 34979 - DNA, 40 bp, Clostridiaceae bacterium
  source 1..40: mol_type = genomic DNA
tgtgggtccggctggagcccacggtccaatgggaccagct

SEQ ID NO: 34980 - DNA, 50 bp, Clostridiaceae bacterium
  source 1..50: mol_type = genomic DNA
agttttgaactgaaagtgtagggccagaagacatatcatggtatgaaagt

SEQ ID NO: 34981 - protein, 585 aa, Bacteroides salyersiae
MKDIVAYLRVSTEAQDFERQRVDIDNWCRINEWKLNNTFTDKLSGFVEEREGLSELKEYLITNNIKNVIVWELSRLGRDKFNLMTLFKWFVDNQINIFFYTQNFWLLDVNGNLSSNVSLQIMILSNYAETEALMIKERMKSGKERAKKEGRWVHGAVAIGYKLSDDKRVYIDEENAKYVRQAFQLYANGDTSIKQLAVYCIKNNFPSSFGNYQSLRFILKNMIYTGQLNYVNIPAIIDIELYMKVQSIMEEKHTNKNKEYNNNKFLLEKLVTCPKCGAKYGGGGGHRYSCVNRVSSSAKVKCKSSSFDVRVLDAIVWYITKQIAAAQELYVQSNEEQIKDFEQQKELLNNKLETLEKKKKKQNTKFDLDAISIDEYKVIIKNLNSQINLIKNEIESLNIKINQSNFEMQNNNRATRVANNMDALNKLRDLETMRNLMKIIFKSIHVYKYHNNFNIIELETRMNYIYCFYNSHSSRNKTFTTNIALKQCWDDENKLLNDKNIDAEFYRDGIPIEIISDYKYKVKSQETIDKKRAQARERERRYRENRREEYNKHARELRHKRNELKKEAEERRNNISISKPKSKPD

SEQ ID NO: 34982 - DNA, 50 bp, Bacteroides salyersiae
  source 1..50: mol_type = genomic DNA
cgcatcaaaaactattaaataatcgaaattttcaacgcatttttatagcg

SEQ ID NO: 34983 - DNA, 40 bp, Bacteroides salyersiae
  source 1..40: mol_type = genomic DNA
cgtaatgtgctggaatgtagaaaatctattcgacacccac

SEQ ID NO: 34984 - DNA, 40 bp, Bacteroides salyersiae
  source 1..40: mol_type = genomic DNA
cgtaatgtgctggaatgtatgaaatctattcgacacccac

SEQ ID NO: 34985 - DNA, 50 bp, Bacteroides salyersiae
  source 1..50: mol_type = genomic DNA
cacatgaacagaacttaaaaattctgaattttcaattctgatttattcct

SEQ ID NO: 34986 - protein, 543 aa, Pseudomonas sp o96-267
MTDHGRTKISARVYSYLRFSDPRQATGSSADRQLQYAQRWAAERGLVLDESLSLRDEGLSAYHQNHVKQGALGTFLRAVDEGRIPDGSVLIVEGLDRLSRAEPIQAQAQMAQIINAGITVVTASDGREYNRAGLKAQPMDLVYSLLVMIRAHEESDTKSKRVKASIRRLCEGWVAGTYRGLIRNGKDPQWLQWDGQAWQLIPDRVEAVRYAIELYKQGEGATRAARKMAERGYVLSDWGIAGQQIYRLVKLPALRGAKRISVDGEDYLLEGYYPPVLTDDEFEALQAATETRHGRRGVPEIVGLVTGLGIAYCGYCGTAVVAQNLLSRAREDGSVADGHRRLHCVAYSKRTGCQAGSCSVVPVEKAVLSYCSDQMNLARLLEPADDGRQLRQRLQACRRKQGDVERQLQRVTDAVLADDSGVAPLAFVRKARELEAELQQLQAEADQLEREQAMVGQVQTPAGADLWRRLAIEAQDIKSPAREQLRQLVLDTFSRITVYMRGLVPDPASKVIHLVLVSRAGQRVALDVDRRSGAWKAGLDRRE

SEQ ID NO: 34987 - DNA, 50 bp, Pseudomonas sp o96-267
  source 1..50: mol_type = genomic DNA
agtttagaaaatgtagcctatgggcaccccaaggaaataaaccctacact

SEQ ID NO: 34988 - DNA, 40 bp, Pseudomonas sp o96-267
  source 1..40: mol_type = genomic DNA
gtcgacagtcgctttcgggcatccgagcgagacgaagccg

SEQ ID NO: 34989 - DNA, 40 bp, Pseudomonas sp o96-267
  source 1..40: mol_type = genomic DNA
gtcgacagtcgctttcgggtatccgagcgagacgaagccg

SEQ ID NO: 34990 - DNA, 50 bp, Pseudomonas sp o96-267
  source 1..50: mol_type = genomic DNA
attttataagttttagcttatgtatacacccaggaaatcatcgctacaat

SEQ ID NO: 34991 - protein, 559 aa, Streptococcus pyogenes; identical to SEQ ID NO: 20396

SEQ ID NO: 34992 - DNA, 50 bp, Streptococcus pyogenes
  source 1..50: mol_type = genomic DNA
ccttttgactcccgcagacccatcatgtggagtgtatagcgttgatacaa

SEQ ID NO: 34993 - DNA, 40 bp, Streptococcus pyogenes; identical to SEQ ID NO: 21023
  source 1..40: mol_type = genomic DNA

SEQ ID NO: 34994 - DNA, 40 bp, Streptococcus pyogenes
  source 1..40: mol_type = genomic DNA
ttgtttccccagacgcatcatgtcgagtgcgtagtgttgc

SEQ ID NO: 34995 - DNA, 50 bp, Streptococcus pyogenes
  source 1..50: mol_type = genomic DNA
ccttttgaagacttcagacacctcatcagcagtgtaaacatttcaaacac

SEQ ID NO: 34996 - protein, 503 aa, Faecalibacterium prausnitzii
MKKQPTGGKRLVAYYRYSGGSHQTEQSIEGQRRDCETYARIHGMVILHEYIDRHISGKTDDRPEFQQMIADAGKGMFDYVICWKTDRIARSRYDSIVYKKKLRDNGVELLYAAEANVEGSGGIIVEGLMEALAEYYSAELAEKVRRGMRESALKGKAIGSSRPLGLTVDKDKKYIIDPAGAAAVRYIFEQYAAGAASSAIVAHLNEQGLCTSRGNPFNKSSVVRIIQNEVYRGVYVSPKFDVRIEGAVPAIIDDDLWERAQKMFIRNRQSRSPRNDRADYILSGKLFCGECGTAMKGVSGHSSNGEVYFYYSCPCKDCHRRNIPKDELEGLVIRTVCNDVLQPDVMDRIADSVIEAQTAELNQPNPEKEALQHELADVQRKAKNLLSALENGTAGAMLTNRLAELEQQANTLSYQLSSLESEPKFPVFSKEEVLYLLEQFLIAPSEKTKAYRRRLIDTFVSKIEVSNTELTIYFNIAEEDCGKMKKAPQSNQPEGCSTEKQMV

SEQ ID NO: 34997 - DNA, 50 bp, Faecalibacterium prausnitzii
  source 1..50: mol_type = genomic DNA
ctgttcgactgagaagcaaatggtccaccttttgctcccccagtcgaact

SEQ ID NO: 34998 - DNA, 40 bp, Faecalibacterium prausnitzii
  source 1..40: mol_type = genomic DNA
cggattatttttgtttggtccgagtggcgagaatcgaact

SEQ ID NO: 34999 - DNA, 40 bp, Faecalibacterium prausnitzii
  source 1..40: mol_type = genomic DNA
cggattatttttgtttggtaggagtggcgagaatcgaact

SEQ ID NO: 35000 - DNA, 50 bp, Faecalibacterium prausnitzii
  source 1..50: mol_type = genomic DNA
ctgttcgaattgggagcaattgggagcccttaagctgaatgagtagactt

SEQ ID NO: 35001 - protein, 585 aa, Listeria booriae
MNDNMSVEIIKASKTVLDRMRKGNKLIRVAAYCRVSTDSEDQLNSYNSQVQYYTNLIKDNAEWEFAGIFADEAISGTRTKKRVNFLRLIDECRKGDIDMIITKSIPRFARNTVDTLKYVRELKALDIAVYFEDLSINTLTMDGELILTMFSSAAQQEVETTSSNVKKGLKMKMSRGELVGFQGCLGYDYDKESKSISVNEKEAEIVTYIFKRYCEGAGAHIIGRELQERGIKTKKGSERWAPSTILGIVKNEKYKGDIRLGKSFTTDPISGRRLINRGEQDQFYLRKNHVAIVSEETFEQAQEMLGKRSLPQVKNKEQLTSKKFSRKYAFSSLLECGYCGATLTRKIWRPGTKTEKHIWHCAIATGKGKKYCPHCKGIAESVIEDAFLEMFQRLCTDNKHLIDNALKTIEEVLMQEDTRPQIKKLTREIDVIKNKTKKLVDMYLEDKISKAIYEEKYQLLESDLVDTQNELLTLENTSIDTKTVKMRIENLKKVITNESVLSQFDRKVFENIIEKVVVGSINEDGEIEPYNLKFYFKSGLTRNIDGEDIIPSRVGKLDIVKDIERKLEADKANDSSYSYHSDKGC

SEQ ID NO: 35002 - DNA, 50 bp, Listeria booriae
  source 1..50: mol_type = genomic DNA
cgtattcttatcatagtgacaaggggtgttgtaactacgataggaatata

SEQ ID NO: 35003 - DNA, 40 bp, Listeria booriae
  source 1..40: mol_type = genomic DNA
agtaactgcctgtgcaacaggtgtagcccacacattcatg

SEQ ID NO: 35004 - DNA, 40 bp, Listeria booriae
  source 1..40: mol_type = genomic DNA
agtaactgcctgtgcaacatatgtagcccacacattcatg

SEQ ID NO: 35005 - DNA, 50 bp, Listeria booriae
  source 1..50: mol_type = genomic DNA
cgtcattttcacaaagtgaaaaggtacattttaactagtgaaagaataga

SEQ ID NO: 35006 - protein, 644 aa, Klebsiella quasipneumoniae
MLRPICYERVSSIQQVEMGNGLDDQRSSLTAYLDKNSDKFTNDRVFITDAGLSAFKNANISPESQLGIFLQDVGNRKYGKGDALIVISLDRLSRRSSWAESTIQYIVNSGVEIHDISTNLVLRADDPMSKIHMELIQHRSHNESLMKSVRAKLAWDNKILRALQNGEVISNRMPNWLKNVDNKYQVIPEQAELIVKCFEWYREGLSTGEIVKRIGKKWQMVTVSRLIRDRRLLGEHERYNGEVVPNVYPKIIDEDLFLTANRMMDRVMLEKKKPAEDLLLEPDVVREIFKLYESGLGSGAIVKRLPKGWSTVNVLQVLRDKKVVTMKIIDNLTFERVNEKLSRNGIANRIRKDITIAQDDYITNLFPKILKCGNCGGNIAIHYNHVRTKYVICRNREEKKICDAKSFQYTRIEKNILQLVKNIDFNKLMMEGQSDSDLLLASLREELSTLKKEEETYQIKINERKVAGKKTSLPLMTGLTEVQDRIEEIESDILNAKNIKEIPVFDFDINKVLDPMNVELRAKLRKELRLVLKSVKYWIFGKRIFVQLEYFNEILSHVLVIDNKRGGGEVLHEIVISESNGERVYTVNEEGKTVFIASVTSGTDMWSLAISRTKTLDDVGLYLNLLNRENFEIVVNEDLIDWID

SEQ ID NO: 35007 - DNA, 50 bp, Klebsiella quasipneumoniae; identical to SEQ ID NO: 17872
  source 1..50: mol_type = genomic DNA

SEQ ID NO: 35008 - DNA, 40 bp, Klebsiella quasipneumoniae; identical to SEQ ID NO: 20373
  source 1..40: mol_type = genomic DNA

SEQ ID NO: 35009 - DNA, 40 bp, Klebsiella quasipneumoniae
  source 1..40: mol_type = genomic DNA
aatatattcatggcatgcctacctttcgttttttagcaca

SEQ ID NO: 35010 - DNA, 50 bp, Klebsiella quasipneumoniae
  source 1..50: mol_type = genomic DNA
atattcctatgttgtatcatattctaccttatttttggcttgggagaagt

SEQ ID NO: 35011 - protein, 644 aa, Enterobacter cloacae
MLRPICYERVSSIQQVEMGNGLDDQRSSLTAYLDKNSDKFTNDRVFITDAGLSAFKNANISPESQLGIFLQDVGNRKYGKGDALIVISLDRLSRRSSWAESTIQYIVNSGVEIHDISTNLVLRADDPMSKIHMELIQHRSHNESLMKSVRAKLAWDNKILRALQNGEVISNRMPNWLKNVDNKYQVIPEQAELIVKCFEWYREGLSTGEIVKRIGKKWQMVTVSRLIRDRRLLGEHERYNGEVVPNVYPKIIDEDLFLTANRMMDRVMLEKKKPAEDLLLEPDVVREIFKLYESGLGSGAIVKRLPKGWSTVNVLRVLRDKKVVTMKIIDNLTFERVNEKLSRSGIANRIRKDITIAQDDYITNLFPKILKCGHCGGNIAIHYNHVRTKYVICRNREEKKICDAKSFQYTRIEKNILQLVKNIDFNNLMMEGQSDSDLLLTSLREELSTLKKEEETYQIKINERKVAGKKTSLPLMTGLTEVQDRIEEIESEILNAKNIKEIPVFDFDINKVLDPMNVELRAKLRKELRLVLKSVKYWIFGKRIFVQLEYFNEILSHVLVIDNKRGGGEVLHEIVISESNGERVYTVNEEGKTVFIASVLIGTDAWSLALSRTKKIIDVGNYLDLLSREKIEMIIHEKDIEWID

SEQ ID NO: 35012 - DNA, 50 bp, Enterobacter cloacae; identical to SEQ ID NO: 17872
  source 1..50: mol_type = genomic DNA

SEQ ID NO: 35013 - DNA, 40 bp, Enterobacter cloacae; identical to SEQ ID NO: 20373
  source 1..40: mol_type = genomic DNA

SEQ ID NO: 35014 - DNA, 40 bp, Enterobacter cloacae; identical to SEQ ID NO: 35009
  source 1..40: mol_type = genomic DNA

SEQ ID NO: 35015 - DNA, 50 bp, Enterobacter cloacae; identical to SEQ ID NO: 35010
  source 1..50: mol_type = genomic DNA

SEQ ID NO: 35016 - protein, 616 aa, Prevotella copri
MGNATMKKAAFLVRCSTNKQDYDRQVRDLQLVADRFRYSLYEIYGEHITGKDDTTKRDRLSIIRVRKDAELHKFDVLLVAEVSRMSRDSVSGRVYVRQFCNLGIPVYFRDKMKWTIDPQTMKEDESFVKELGLYFDGAAEYLKSMKTQIASGRRNSLMNNQLVVGHPPIGYKKRGGTDKYTKNELVIDEALAPMVKDVFAMYLEPEGTLKSVSLAISAKYSKELKGKRKTVSGVQQILCRKEYYTGEYTVYMSDPDNKDLEPEPFTITFEPLIDQETFDAATEKRDLKKSTDSPYPKQAIHPLSRLIKCPHCEHSFSPRVRSGDKPGEKHRIINGKKAYSWICMTRINNAGECNSHVNLNNEKTETIIWDLIKKELLTFADLNKDDRETRIYDLQQKIADAQNQIPVYEEEITRQDRKIKRAYNAYIDAPEIALEKAKEDYHKTLLDATKAKEDYAKEIKLLKKQIKGWEKSIDYYNNSNITTEYIDSIEDKEDEKRKIFLQLIQKIVPIGIRPGVVILQTHTINGIYWVLFDGNQVGQKRIAHYIHESFAVWHSTVKGEIQSSEAESYFSLKNTDVLVGTEDVDPAHVKFREMQMVCEANENVIPYNYIYERAHE

SEQ ID NO: 35017 - DNA, 50 bp, Prevotella copri
  source 1..50: mol_type = genomic DNA
tggcacaattcttttttcttgggtgaaaaaacgagaaaagacttgtgcca

SEQ ID NO: 35018 - DNA, 40 bp, Prevotella copri
  source 1..40: mol_type = genomic DNA
tggcgttctgttctgcgatgaacttccggagttcaataaa

SEQ ID NO: 35019 - DNA, 40 bp, Prevotella copri
  source 1..40: mol_type = genomic DNA
tggcgttctgttctgcgatccacttccggagttcaataaa

SEQ ID NO: 35020 - DNA, 50 bp, Prevotella copri
  source 1..50: mol_type = genomic DNA
tggctcaattcttgtttcttaagccccaaaatgtgacaaatcatgttcca

SEQ ID NO: 35021 - protein, 495 aa, Corynebacterium provencense
MGCMTDSPHPRAAIYARISLDKKEEAGVKRQVHLCTKLAEADEAVIIPDGKFVDNNISAFSGSRRPEYERLLQTIEAGDIDTVYVYALDRLARRTKDTLTLFELCEHHGVKVKATRGYSIDPSDPTSRLVIVILGLIAEQESIDRAARIRSAYEDRARTGRPKTGGRRMFGYEADAVTIVPAEAEALQEAARMVVSGKTLREAARMINSRGLTTTLGAPMSAYTLRDLLLNPRANGKSTFNPTDPETGYRLVKDRQVVGRGSWPAIIDDELFAQVGAVLNDPSRRTAHAGAAPTKFLSGVLKCSCGAPMYHRTRARKGGRAHYYACKREVAGATHTSVTDDVDDFIEKVVFARMAKPDAFDVLRVALCPDDSDETGDRLQELVARRAALLARREELEQHVVDGAMDTSAFVRLENKFSQQIEAVDVEVQELTMPTTADPILADIADAVDFPAWWVGASIEDQRRLVHLLMAIHITRGTPGAKSFEPERVKVVWKS

SEQ ID NO: 35022 - DNA, 50 bp, Corynebacterium provencense
  source 1..50: mol_type = genomic DNA
ggtaccaacaacccatgttcgtttaattttgaaccagggtagtgggtacg

SEQ ID NO: 35023 - DNA, 40 bp, Corynebacterium provencense
  source 1..40: mol_type = genomic DNA
cggcgccaccgggtcggggaaatccgagttcctccggtcc

SEQ ID NO: 35024 - DNA, 40 bp, Corynebacterium provencense; identical to SEQ ID NO: 35023
  source 1..40: mol_type = genomic DNA

SEQ ID NO: 35025 - DNA, 50 bp, Corynebacterium provencense
  source 1..50: mol_type = genomic DNA
gggaccaccttttaaagttcttttaattttgaacaatgtccctggagacc

SEQ ID NO: 35026 - protein, 495 aa, Corynebacterium renale
MGCMTDSPHPRAAIYARISLDKKEEAGVKRQVHLCTKLAEADDAVIIPDGKFVDNNISAFSGSRRPEYERLLQTIEAGDIDTVYVYALDRLARRTKDTLTLFELCEHHGVKVKATRGYSIDPSDPTSRLVIVILGLIAEQESIDRAARIRSAYEDRARTGRPKTGGRRMFGYEADAVTIVPAEAEALQEAARVIVSGKTLREAARRINSRGLTTTLGAPMSAYTLRDLLLNPRANGKSTFNPTDPKTGYRLVKDRQVVGRGSWPAIIDDELFAQVGAVLNDPSRRTAHVGAAPTKFLSGVLKCSCGAPMYHRTRARKGGRAHYYACKREVAGATHTSVTDDVDDFIEKAVFARMAKPDALDVLRVALCPDDSDEAGDRLQELVARRAELLARREELEQQVVDGAMDTSVFVRLENKFSQQIETIDDEVQELTTPTTADPILADIADAVDFPAWWVGASIEDQRRLTNLLMEIHITRGTPGAKSFEPERVKVTWKS

SEQ ID NO: 35027 - DNA, 50 bp, Corynebacterium renale
  source 1..50: mol_type = genomic DNA
ggtaccaacaatccatgttcgtttaattttgaaccaaggtagtgggtacg

SEQ ID NO: 35028 - DNA, 40 bp, Corynebacterium renale
  source 1..40: mol_type = genomic DNA
cggtgcgacgggttccggtaaatcggaactcctcaggacg

SEQ ID NO: 35029 - DNA, 40 bp, Corynebacterium renale; identical to SEQ ID NO: 35028
  source 1..40: mol_type = genomic DNA

SEQ ID NO: 35030 - DNA, 50 bp, Corynebacterium renale; identical to SEQ ID NO: 35025
  source 1..50: mol_type = genomic DNA

SEQ ID NO: 35031 - protein, 527 aa, Photobacterium damselae
MNKLFSYQRFSTSIQFDGDSLRRQTEAARTYAEQHDLDYQDKTFSDLGVSGYKAKKRSGLEALLEAVKNGSIAGGDVIFLENLDRITRKGFQDTNELIKQIVSTGVVLHVQSDNLTLDKSSLNDFTSIMRVALMADLAWKESEKKSQRLLETKGQKRLRAIEHNEAQARKLPFWIDYNKTTCQYQFNDLAKIVRRIVFERLSGKSDRTIINGLNNDGIMTPRGSRWYENSIRNIYTHKAVYGAYQTMRTVRSDPTDHTTAKIVLDKLVLNHYPAIMSPEDFESIQPIAGVRSGNHGSHNHLRRITRCMRCGEPVGKKLSKHSNGNTYVQWFCMGIKNTGKLKCDQPTFKDLDQVIFKITKHLKRVRSSSIDAEQKLIEQTIAQKEMALSEIQQAILGGVGVTALIATSIELEKEIDNLRSKITIDYGDQDYDLLSESVGDAVAWNILAVKLIKSINVDYITNPKRIGMGKDHGSYRVVINQSNGYTISAVVSGVDRIDYKDLNIIMSDTYDIASISPNLHEWELDQE

SEQ ID NO: 35032 - DNA, 50 bp, Photobacterium damselae
  source 1..50: mol_type = genomic DNA
actttgattacttataaaaacgtagtaatgtttgctgtactaatcaaagc

SEQ ID NO: 35033 - DNA, 40 bp, Photobacterium damselae
  source 1..40: mol_type = genomic DNA
ttcagcaccaaattgcattgtaatgtttgcggtagatatc

SEQ ID NO: 35034 - DNA, 40 bp, Photobacterium damselae
  source 1..40: mol_type = genomic DNA
ttcagcaccaaattgcatttgaatgtttgcggtagatatc

SEQ ID NO: 35035 - DNA, 50 bp, Photobacterium damselae
  source 1..50: mol_type = genomic DNA
actttgtttcaatctatttatgtctgaaagtatgctattccagtcaaagc

SEQ ID NO: 35036 - protein, 507 aa, Escherichia coli
MKRVISYIRFSSEKQAKGDSLRRQSKMVNDWLKAHPEYYLDQDLSFRDLGVSGFTGKHLKGGLGDFLTAIEKGLVKAGDTLLIESLDRLSRQDVDQASELLRNILRSGVDVVTLSDGEHYTRESLKDPLALIKSILIMQRSHEESLRKSERIQAAWNRKKELISEGIKISKRCPAWLKLNDDRKSFSVIPDKVETVKRCFQLRLEGKSIWEIVRTLNAEGHQSMSQYKPGKFGQTSVQDLLKNRSVIGYFTPKGCEEISGYYPAIIDETTFYKVQQLSYARYGRKPASDKPMAVNLFKGVIRCSECGHALIITGFSDTRSGIYRCPLRNENRCNAKGLSRKQTDSTLLALLSRLDRFDSDTTNVIDMLRLHREHISNNIEKLVQLSLEIEDLNAITNKLKQLKNELSQVDADIEKETQRLKSIDVGCLSDCDLTTKAGRIEAQLIIKSAVKEVVLNTAKRRCKVTFHNGKVIDLSITENPSEDVTEAIQSLSEVTERGLIDVDEVII

SEQ ID NO: 35037 - DNA, 50 bp, Escherichia coli
  source 1..50: mol_type = genomic DNA
tagtgtatttagaccttgatgattttcatcagacacgtttaaatacacta

SEQ ID NO: 35038 - DNA, 40 bp, Escherichia coli; identical to SEQ ID NO: 5188
  source 1..40: mol_type = genomic DNA

SEQ ID NO: 35039 - DNA, 40 bp, Escherichia coli
  source 1..40: mol_type = genomic DNA
cggcgttaatcgggtgattgaagacagccgcccggttcat

SEQ ID NO: 35040 - DNA, 50 bp, Escherichia coli
  source 1..50: mol_type = genomic DNA
ttgtgtgttttgtttttgttgattgaaatcacactatgtttaatacactt

SEQ ID NO: 35041 - protein, 507 aa, Escherichia coli
MKRVISYIRFSSEKQAKGDSLRRQSKMVNDWLKAHPEYYLDESLTFRDLGVSGFTGKHLKGGLGDFLTAIEKGLVKAGDTLLIESLDRLSRQAVDRASELLRNILRSGVDVVTLSDGEHYTSESLKDPLALIKSILIMQRAHEESLRKSERIQAAWDAKKEAAKAGIKVSKRCPAWLKLNDDRKSFSVIPEKVETVKRCFQLRLEGKSIWEIVRTLNDECHQSMNQYKPGKFGQTSVQDLLKNRSVIGYFTPKGCEEISGYFPPIIPETDFYKVQQLSYARHGRKPASAKPLSVNLFKGVIRCSECGHALIITGFSDTRNGIYRCPLRNENRCSAKGLSRKQTDGTLLALLSRLDRFDSDTTNTIDMLRLHREHISSNIEKLVQLSLEIEDLSAITSKLKQLKGELSQVDADIEKETQRLKSIDVGCLSDCDLTTKAGRIEAQLIIKSAVKEVVLNTAKRRCKVTFHNGKVIDLPITDPPSEDVTEAIQSLSEVTERGLIDVDEVII

SEQ ID NO: 35042 - DNA, 50 bp, Escherichia coli; identical to SEQ ID NO: 35037
  source 1..50: mol_type = genomic DNA

SEQ ID NO: 35043 - DNA, 40 bp, Escherichia coli; identical to SEQ ID NO: 21333
  source 1..40: mol_type = genomic DNA

SEQ ID NO: 35044 - DNA, 40 bp, Escherichia coli
  source 1..40: mol_type = genomic DNA
cggcgttaatcgggtgattgaagacggccgcccggttcat

SEQ ID NO: 35045 - DNA, 50 bp, Escherichia coli; identical to SEQ ID NO: 35040
  source 1..50: mol_type = genomic DNA

SEQ ID NO: 35046 - protein, 507 aa, Escherichia coli; identical to SEQ ID NO: 22721

SEQ ID NO: 35047 - DNA, 50 bp, Escherichia coli
  source 1..50: mol_type = genomic DNA
tagtgtatttagaccttgatgatttttatcagacacgtttaaatacacta

SEQ ID NO: 35048 - DNA, 40 bp, Escherichia coli; identical to SEQ ID NO: 5188
  source 1..40: mol_type = genomic DNA

SEQ ID NO: 35049 - DNA, 40 bp, Escherichia coli; identical to SEQ ID NO: 35039
  source 1..40: mol_type = genomic DNA

SEQ ID NO: 35050 - DNA, 50 bp, Escherichia coli; identical to SEQ ID NO: 35040
  source 1..50: mol_type = genomic DNA

SEQ ID NO: 35051 - protein, 507 aa, Escherichia coli
MKRVISYIRFSSEKQAKGDSLRRQSKMVNDWLKAHPEYYLDQDLSFRDLGVSGFTGKHLKGGLGDFLTAIEKGLVKAGDTLLIESLDRLSRQDIDIASELLRNILRSGVDVVTLSDGEHYTRESLKDPLSLIKSILIMQRAHEESLRKSERIQAAWNRKKELISEGIKVSRRCPAWLRLNDDRKSFSVIPEKVETVKRCFQLRLEGKSIWAIVKALNDEGHQSMSQYKPGKFGQTSVQDLLKNRSVIGYFTPKGCEEISGYYPAIIDETTFYKVQQLSHYRYGRKPVSDKPLSVNLFKGVIRCSECGHALIITGFSDTRNGIYRCPLRNENRCSAKGLSRKQTDGTLLTLLSRLDRFDSDTTNTIDTLKLHREHISSNIEKLVQLSLEIEDLSAITIKLRQLKGELSQVDADIEKETQRLKSIDVGCLSDCDLTTKAGRIEAQLIIKSAVKEVVLNTAKRRCKVTFHNGKVIDLPITENPSEDVTEAIQSLSEVIERGLIDVDEVIV

SEQ ID NO: 35052 - DNA, 50 bp, Escherichia coli; identical to SEQ ID NO: 35037
  source 1..50: mol_type = genomic DNA

SEQ ID NO: 35053 - DNA, 40 bp, Escherichia coli; identical to SEQ ID NO: 5188
  source 1..40: mol_type = genomic DNA

SEQ ID NO: 35054 - DNA, 40 bp, Escherichia coli; identical to SEQ ID NO: 35039
  source 1..40: mol_type = genomic DNA

SEQ ID NO: 35055 - DNA, 50 bp, Escherichia coli; identical to SEQ ID NO: 35040
  source 1..50: mol_type = genomic DNA

SEQ ID NO: 35056 - protein, 507 aa, Escherichia coli; identical to SEQ ID NO: 5406

SEQ ID NO: 35057 - DNA, 50 bp, Escherichia coli
  source 1..50: mol_type = genomic DNA
tagtgtatttagaccttgttgattttcatcagacacgtttaaatacacca

SEQ ID NO: 35058 - DNA, 40 bp, Escherichia coli; identical to SEQ ID NO: 5188
  source 1..40: mol_type = genomic DNA

SEQ ID NO: 35059 - DNA, 40 bp, Escherichia coli; identical to SEQ ID NO: 35039
  source 1..40: mol_type = genomic DNA

SEQ ID NO: 35060 - DNA, 50 bp, Escherichia coli; identical to SEQ ID NO: 35040
  source 1..50: mol_type = genomic DNA

SEQ ID NO: 35061 - protein, 567 aa, Streptococcus mitis
MNRTLTISDYRQVDTSRLSDITVVYCRLSQDDGLDGDSNSITNQKNILLDVVAREKLPNPVLFVDDGFSGTNFDRPAISEALRLVENRQVSNFVVKDLSRLGRSYIKVGQLTEITFPSFDVRFIALNDGVDSNKPNETNSIFLPIKSLMDEMYAADTSKKIRAVVQAKARAGERVTTNPPYGYLKDSNNPKNWIIDPVASEVVKRIFQEAKSGKSLSEIAKGLENDKIFKPDRHRIEIGLKPISSSSNVETLPYFWTRETLSAILGREEYLGHTVNLRTRKKSYKDKRKVDNPKEDWLIFKNTHEAIIDQETFDIVQKMRSHKRSNQRYKNRAGHENLFAGLVFCGTCGRKHYFCPQEKNGLNHDHYKCSGYRKPIDGCENPHYIQKSALIEIVSGKLRQTIQEAHFNQEDFLKKLEQQSQAQFNKDNKNQRQQLQKDEHRSKEIDTIIQKLYEDNLLGKISDERFVKLSQSYEEEQRQLQTSISDLTEKLAKQQEDNLNISKFMTRILKYTELPELTVEIVNELIDKIVIHKPTGTKRNRIIQIDIYYNFIGKLNNEKSEPNDLAR

SEQ ID NO: 35062 - DNA, 50 bp, Streptococcus mitis
  source 1..50: mol_type = genomic DNA
aaactgctatgtgtcaggtcaactaaagactggctgacactcagcactct

SEQ ID NO: 35063 - DNA, 40 bp, Streptococcus mitis
  source 1..40: mol_type = genomic DNA
taaatagaagagcctcgcgaaagcgaggttttttagagat

SEQ ID NO: 35064 - DNA, 40 bp, Streptococcus mitis
  source 1..40: mol_type = genomic DNA
taaatagaagagcctcgcgccagcgaggttttttagagat

SEQ ID NO: 35065 - DNA, 50 bp, Streptococcus mitis
  source 1..50: mol_type = genomic DNA
aaaatgcaaaatcttaggcccactccagacttactgaatcaaagaactct

SEQ ID NO: 35066 - protein, 628 aa, Phocaeicola dorei; identical to SEQ ID NO: 27431

SEQ ID NO: 35067 - DNA, 50 bp, Phocaeicola dorei
  source 1..50: mol_type = genomic DNA
atggttaaagtgtttattctgttgttcaacataaagaaattacttgcata

SEQ ID NO: 35068 - DNA, 40 bp, Phocaeicola dorei
  source 1..40: mol_type = genomic DNA
ttctattaaattccggcaactcgtctagaaagagcaaacc

SEQ ID NO: 35069 - DNA, 40 bp, Phocaeicola dorei
  source 1..40: mol_type = genomic DNA
ttctattaaattccggcaatacgtctagaaagagcaaacc

SEQ ID NO: 35070 - DNA, 50 bp, Phocaeicola dorei
  source 1..50: mol_type = genomic DNA
tttgttaaaccatttattctcttctacaaaatagagataatagtttcaca

SEQ ID NO: 35071 - protein, 556 aa, Bacillus nakamurai
MELKSIVNSYNITNILGYLRRSRQDLEREKRTGEDTLTEQKELMNKVLTATQVPYELRMEIGSGENIEGRPVFKDCLRDLENGKYQAIAVKEITRLSRGSYSDAGKIVHVLQSNRLLIITPYKVYDPRNPADMRQIRFELFMAREEFEMTRERMTGAKYTYAAQGKWISGLAPYGYKLNKKISRLEIVEERAKVVQLIFHLFLSGLNGKDYSYTAIASHLTHLQIPSPTEKKKWNPYTIKAILQNEAYIGTVKYKVREKTKDGKRTIRPENEQITVPDAHPPIIDKEQFGQVQTKIKNKIPLLPNKKNFELNELAGVCTCAECGSSLSKYEAERKHRNKNGTERVYHVKLLRCKNNKCINVRYNDVEEAVLDYVKSLKALNDNDLSRHIQSIIHAYESKKNMKSKKQMNEQFEQRKKELQHKLNFIFDKYESGIYSDEVFLQRKSALDQEIEELQKAKDEIHGLADITSGIDLDQIRDNMQNAVEIYETSESKEEKNKLLRIILQKVIVKMTAKRKGPIPAQFEILPILRFNFLTEDPILIEQTHSLYPKKPIKPF

SEQ ID NO: 35072 - DNA, 50 bp, Bacillus nakamurai
  source 1..50: mol_type = genomic DNA
tagtttatatcctaaaaaaccgataaagccgttttttaggatactaacga

SEQ ID NO: 35073 - DNA, 40 bp, Bacillus nakamurai
  source 1..40: mol_type = genomic DNA
gattaatatcagtaccgataaagccgtttccccggtaaat

SEQ ID NO: 35074 - DNA, 40 bp, Bacillus nakamurai
  source 1..40: mol_type = genomic DNA
gattaatatcagtaccgatttagccgtttccccggtaaat

SEQ ID NO: 35075 - DNA, 50 bp, Bacillus nakamurai
  source 1..50: mol_type = genomic DNA
tagttttttaaactaaaaactgattttgcagttttttcagaaactgaaaa

SEQ ID NO: 35076 - protein, 556 aa, Bacillus nakamurai
MELKSIVNSYNITNILGYLRRSRQDLEREKRTGEDTLTEQKELMNKVLTATQVPYELRMEIGSGENIEGRPVFKDCLRDLENGKYQAIAVKEITRLSRGSYSDAGKIVHVLQSNRLLIITPYKVYDPRNPADMRQIRFELFMAREEFEMTRERMTGAKYTYAAQGKWISGLAPYGYKLNKKISRLEIVEERAKVVQLIFHLFLNGLHGKDYSYTAIASHLTHLQIPSPTEKKKWNPYTIKAILQNEAYIGTVKYKVREKTKDGKRTIRPENEQITVPDAHPPIIDKEQFEQVQTKIENKIPLLPNRKNFELNELAGVCTCAECGSSLSKYEAERKHRNKNGTERVYHVKLLRCKNNKCINVRYNDVEEAVLDYVKSLKALNDNDLSRHIQSIIHAYESKKNMKSKKQMNEQFEQRKKELQHKLNFIFDKFESGIYSDEVFLQRKSALDQEIEELQKAKDEIHGLADITSGIDLDQIRDNMQNAVEIYETSESKEEKNKLLRIILQKVIVKMTAKRKGPIPAQFEILPILRFNFLTEDPILIEQTHSLYPKKPIKPF

SEQ ID NO: 35077 - DNA, 50 bp, Bacillus nakamurai; identical to SEQ ID NO: 35072
  source 1..50: mol_type = genomic DNA

SEQ ID NO: 35078 - DNA, 40 bp, Bacillus nakamurai
  source 1..40: mol_type = genomic DNA
gattaatatcagtaccgataaagccgtttccccagtaaac

SEQ ID NO: 35079 - DNA, 40 bp, Bacillus nakamurai
  source 1..40: mol_type = genomic DNA
gattaatatcagtaccgatttagccgtttccccagtaaac

SEQ ID NO: 35080 - DNA, 50 bp, Bacillus nakamurai; identical to SEQ ID NO: 35075
  source 1..50: mol_type = genomic DNA

SEQ ID NO: 35081 - protein, 522 aa, Bacillus licheniformis
MKRTFDHIKHVAIYLRISQEKRGENVETLENHRQILCDFCKENGYTYEEYGEVISGGKSEIEQRKELQRLLEDIEKFDAILCFELTRLSRNGLISQTVKQYCIDYDKPILTPYQSYDLANSETDRLLYDVGSMISSHEHGTIGKRSKANKKQMSKAGLHVSGNVPFGYRRNKETKKLEIYEEEAKVVRYIFKLHSEGLGSFKIRDILNAEGYKSATGKAFELPTIKRIIKNPTYKGTIVFNDRKKVKKNGKFVYEPVETIQVDNAHPAIIPPDEWDRANRERISRAKQAALIREKPASTTGTTMLKDLVYCGVCGRKMRIFFDDKSSTGYVIQRCYHLYNGEKCPNRGIKLELVEKEVTKALPNFKSLLEKSVQRLQQEKEAGVETDIKRKIKQQERKLNDLNEQQDKLIDLALKGIFNEEEIRNKKQELIDEIKYTESAIVDLKEKIGNIDLNDHINSLMNIIELIEKLPNMEPDEVNQSLKTFISKIVYTRVLPPELLKKSTRNKQRKEYPFEIEIEFIE

SEQ ID NO: 35082 - DNA, 50 bp, Bacillus licheniformis
  source 1..50: mol_type = genomic DNA
atacatgaaataaaaaacactgtccctactgcgttttttatttcatgtat

SEQ ID NO: 35083 - DNA, 40 bp, Bacillus licheniformis; identical to SEQ ID NO: 21298
  source 1..40: mol_type = genomic DNA

SEQ ID NO: 35084 - DNA, 40 bp, Bacillus licheniformis; identical to SEQ ID NO: 21298
  source 1..40: mol_type = genomic DNA

SEQ ID NO: 35085 - DNA, 50 bp, Bacillus licheniformis
  source 1..50: mol_type = genomic DNA
atacatgaagttttaaaaacttcacctactgtgtaccatttttcacgtag

SEQ ID NO: 35086 - protein, 495 aa, Bacillus cereus
MIILLFNNENIKHVAVYLRLSRDEENQGIEQVLANHRQTLISLCNENKWSYELFEEVASSSTIINREQMVKLLDRVEQNYYDAVVVMDVDRLSRNEFDASLIKRILLETETYIVTPYRMYDLTRDDDSLLLGITNLIASGEYKQILKRMRRGKEYAQKQGHWTNGIAPLGYTKDTKTKKLVPNERAKDIQFVFSEIAKGTTIPSLIRQLNNMGIKTRQGYDFKYNSIVRIVNNEAYKGTIVSNKTIGQYNPRPKEEWIVVHNVHPAIVDEATWDAANKIVNEYSFKAPRSKNRIYPTSNLIYCANCGKVQGCNNHKRLNKIYIKHCKCGNRSFYYNPVLAMIKEEVLGYKENILKALETLEEGKHEDDTQYRKEKLFSQLNRSTKALNKINILFEEDEIDIITYRERKAKRQEEIKLIEEQITALEREDKSTKIETLQEQIKSIEKLVDKWELLDGEGYSDERVNRLLHGLISGILWSFKKGAESPTLTIIYNGE

SEQ ID NO: 35087 - DNA, 50 bp, Bacillus cereus
  source 1..50: mol_type = genomic DNA
aaattatacccaaaaactgaacaaactggttgagtacttagggacaacgt

SEQ ID NO: 35088 - DNA, 40 bp, Bacillus cereus; identical to SEQ ID NO: 24323
  source 1..40: mol_type = genomic DNA

SEQ ID NO: 35089 - DNA, 40 bp, Bacillus cereus
  source 1..40: mol_type = genomic DNA
actcgtatttactggaccgagtggatctgggaagacgacg

SEQ ID NO: 35090 - DNA, 50 bp, Bacillus cereus
  source 1..50: mol_type = genomic DNA
aaataatttttaaaaaatgaacaaagtctttgagaaatatgggataatgt

SEQ ID NO: 35091 - protein, 508 aa, Vibrio cyclitrophicus
MKKALLYVRFSTAKQELGDSVERQTEKAESWCKDNNVELLDNRFHDLGVSAFKEGGKRPALADLIEVIESGKLSVDYCLFENADRLTRRGYAHALELVNKLVGLGVSLIILDGRYVYDKSTMGNGLTPILPLLFDADRAYNESLRKSNLIKSAKAKVVDGNIIKGKLPFWISLENEVPVLNDKAQHAELMLSGKLKGQSNQSIAKQLNAIHPEGLSGKGWGGSLVRQTIKNHALYGAKVYYSTGEDGRTLTPIKKVPDMFPALVDFDVWDSLQQKRKGRTSKKSAFTGLMKCGHCGSGMVQRTNTYKGKKLMYRKCIGATEGRCHNVHLIREPDVILEKMLSSMTYTVSQDYKSQTPELMSSLEFEKELLTDARQNKDLKAAKRANAEISQLEIQLDESRANDEKQSSEVEVEYRSIFDLPTEPEQNTMFKKLIDKVEVLFLRKYGKTGAVFKLTCIQANGHKIIRTLEQRHGFGNYRLMGTHDSEKLLNEIKAMAVGSHEDYEFYDE

SEQ ID NO: 35092 - DNA, 50 bp, Vibrio cyclitrophicus
  source 1..50: mol_type = genomic DNA
tagtgttagaataaacactttactaaagtactttggcgaaactaacatac

SEQ ID NO: 35093 - DNA, 40 bp, Vibrio cyclitrophicus
  source 1..40: mol_type = genomic DNA
atttggttggcacgtggttaaggttctttacagaacctag

SEQ ID NO: 35094 - DNA, 40 bp, Vibrio cyclitrophicus
  source 1..40: mol_type = genomic DNA
atttggttggcacgtggttttggttctttacagaacctag

SEQ ID NO: 35095 - DNA, 50 bp, Vibrio cyclitrophicus
  source 1..50: mol_type = genomic DNA
tagagtaagagtacaagcttaaatttagttctttggaaagactaatataa

SEQ ID NO: 35096 - protein, 507 aa, Escherichia coli; identical to SEQ ID NO: 5406

SEQ ID NO: 35097 - DNA, 50 bp, Escherichia coli
  source 1..50: mol_type = genomic DNA
tagtgtatttagaccttgatgtttttcatcagacacgtttaaatacacca

SEQ ID NO: 35098 - DNA, 40 bp, Escherichia coli; identical to SEQ ID NO: 5188
  source 1..40: mol_type = genomic DNA

SEQ ID NO: 35099 - DNA, 40 bp, Escherichia coli; identical to SEQ ID NO: 5188
  source 1..40: mol_type = genomic DNA

SEQ ID NO: 35100 - DNA, 50 bp, Escherichia coli
  source 1..50: mol_type = genomic DNA
tagtttttttgattattgatgtatttcagcatataccccagaaaacacaa

SEQ ID NO: 35101 - protein, 493 aa, Mycobacteroides chelonae
MGESLRALVGARVSVLRGEQKVSHIAQKETGTKWVTDRGHTIVGTFEDLDVSASISPFNRRDLGPWLTAEREHEWDVVVFSKIDRMFRSTRDCVRFAEWAEEHKKILVFAEDGMTLNYRDKDASGSIESMMSELFIYIGSFFAQLELNRFKSRTSDSHRVLRTTARWAGGTAPLGYRVVDHPDGKGKVLDTDPDGKALLHDIAGKLFDGWSLIRIAQWLNDTGVPSNRDKARIVNGKEAKERPWAVSTLTRTLTSYKTQGFKMHRQKPLLDASGEMIRMAPPTFDDDTWKKIQEAIALRQATKSRTNSPNPMLGIGYCDICGASLAQKFRRKGDVAYRYYRCGRSPVQCPGVNIRADEADETLENSFIANYGNENTSHKVFVPGEDNSHDLEQVRATIERLRRESDMGLVVTPEDEEIYLQRMKSLIERRTVLEATPVRPAGWATVVSDKTYADAWETEDHHKLLVDRGVKYFLISGTPRRFRLYVPELEGAT

SEQ ID NO: 35102 - DNA, 50 bp, Mycobacteroides chelonae
  source 1..50: mol_type = genomic DNA
gttagtcaatgtgttgcaatctgtgtgcagatagctatacactgactaaa

SEQ ID NO: 35103 - DNA, 40 bp, Mycobacteroides chelonae
  source 1..40: mol_type = genomic DNA
tttcccgatggccttcggggtgcacatcgcgatggcgacg

SEQ ID NO: 35104 - DNA, 40 bp, Mycobacteroides chelonae
  source 1..40: mol_type = genomic DNA
tttcccgatggccttcggggggcacatcgcgatggcgacg

SEQ ID NO: 35105 - DNA, 50 bp, Mycobacteroides chelonae
  source 1..50: mol_type = genomic DNA
cttagttattagtatgcaatctgtggagagacaccttaaagctgtgtaaa

SEQ ID NO: 35106 - protein, 513 aa, Bacillus amyloliquefaciens
MKYLALHENSRIAVYSRKSREDRDSEDTLAKHRNELEYLIKRENFKNVQWFEKVVSGETIDERPMFSLLLPRIENGEFDAVCAVAMDRLSRGSQIDSGRILEAFKQSGTLFITPKKTYDLSIEGDEMLSEFESIIARSEYRAIKRRTINGKKNATREGRLHSGSVPYGYKWDKNLKAAVVVEEKKKIYRMMIKWFLEEEYSCTVIAEMLNELKVPSPSGRSIWYGEVVSEILSNDFHRGYVWFGKYKKSKSNNSIVQNKNLDEVLIAKGHHETMKTDEEHALILNRIEKLRTYKVAGRRLNMNTHRLSGIVRCPYCHKAQAIEQPKGRRKHVRKCLRKSAERTKECEETKGIHEEVLFQSIMKEIKKYNESLFSPTEQDVNDDSYTAQLIGLREKAVKKAKGRIERIKEMYLDGDISKTEYKEKLKISQETLQKAENELAELIASTEFQNALSAETKKEKWSHHKVQEMIESTDGMSNSEINLILKMLISHVTYTVEDLGDGTKNLNIKVYYN

SEQ ID NO: 35107 - DNA, 50 bp, Bacillus amyloliquefaciens
  source 1..50: mol_type = genomic DNA
tgtcgtactcaatcaataattcttacaagcattattgtttaagtacaaca

SEQ ID NO: 35108 - DNA, 40 bp, Bacillus amyloliquefaciens
  source 1..40: mol_type = genomic DNA
ggtcattccgataatcgttacaacagatccggttacgaca

SEQ ID NO: 35109 - DNA, 40 bp, Bacillus amyloliquefaciens
  source 1..40: mol_type = genomic DNA
ggtcattccgataatcgttggaacagatccggttacgaca

SEQ ID NO: 35110 - DNA, 50 bp, Bacillus amyloliquefaciens
  source 1..50: mol_type = genomic DNA
cgtcttacggcactaataattcctggtggcactattttatgagttcaata

SEQ ID NO: 35111 - protein, 510 aa, Bacillus amyloliquefaciens
MALHENSRIAVYSRKSREDRDSEDTLAKHRNELEYLIKRENFKNVQWFEEVVSGETIDERPMFSLLLPRIENGEFDAVCAVAMDRLSRGSQIDSGRILEAFKQSGTLFITPKKTYDLSIEGDEMLSEFESIIARSEYRAIKRRTINGKKNATREGRLHSGSVPYGYKWDKNLKAAVVVEEKKKIYRMMIKWFLEEEYSCTVIAEMLNELKVPSPSGRSIWYGEVVSEILSNDFHRGYVWFGKYKKSKSNNSIVQNKNLDEVLIAKGHHETMKTDEEHALILNRIEKLRTYKVAGRRLNMNTHRLSGIVRCPYCHKAQAIEQPKGRRKHVRKCLRKSAERTKECEETKGIHEEVLFQSIMKEIKKYNESLFSPTEQDVNDDSYTAQLIGLREKAVKKAKGRIERIKEMYLDGDISKTEYKEKLKISQETLQKAENELAELIASTEFQNALSAETKKEKWSHHKVQEMIESTDGMSNSEINLILKMLISHVTYTVEDLGDGTKNLNIKVYYN

SEQ ID NO: 35112 - DNA, 50 bp, Bacillus amyloliquefaciens; identical to SEQ ID NO: 35107
  source 1..50: mol_type = genomic DNA

SEQ ID NO: 35113 - DNA, 40 bp, Bacillus amyloliquefaciens; identical to SEQ ID NO: 35108
  source 1..40: mol_type = genomic DNA

SEQ ID NO: 35114 - DNA, 40 bp, Bacillus amyloliquefaciens; identical to SEQ ID NO: 35109
  source 1..40: mol_type = genomic DNA

SEQ ID NO: 35115 - DNA, 50 bp, Bacillus amyloliquefaciens; identical to SEQ ID NO: 35110
  source 1..50: mol_type = genomic DNA

SEQ ID NO: 35116 - protein, 513 aa, Bacillus amyloliquefaciens
MKYLALHENSRIAVYSRKSREDRDSEDTLAKHRNELEYLIKRENFKNVQWFEEVVSGETIDERPMFSLLLPRIENGEFDAVCAVAMDRLSRGSQIDSGRILEAFKQSGTLFITPKKTYDLSIEGDEMLSEFESIIARSEYRAIKRRTINGKKNATREGRLHSGSVPYGYKWDKNLKAAVVVEEKKKIYRMMIKWFLEEEYSCTVIAEMLNELKVPSPSGRSIWYGEVVSEILSNDFHRGYVWFGKYKKSKSNNSIVQNKNLDEVLIAKGHHETMKTDEEHALILNRIEKLRTYKVAGRRLNMNTHRLSGIVRCPYCHKAQAIEQPKGRRKHVRKCLRKSAERTKECEETKGIHEEVLFQSIMKEIKKYNESLFSPTEQDVNDDSYTAQLIGLREKAVKKAKGRIERIKEMYLDGDISKTEYKEKLKISQETLQKAENELAELIASTEFQNALSAETKKEKWSHHKVQEMIESTDGMSNSEINLILKMLISHVTYTVEDLGDGTKNLNIKVYYN

SEQ ID NO: 35117 - DNA, 50 bp, Bacillus amyloliquefaciens; identical to SEQ ID NO: 35107
  source 1..50: mol_type = genomic DNA

SEQ ID NO: 35118 - DNA, 40 bp, Bacillus amyloliquefaciens; identical to SEQ ID NO: 35108
  source 1..40: mol_type = genomic DNA

SEQ ID NO: 35119 - DNA, 40 bp, Bacillus amyloliquefaciens; identical to SEQ ID NO: 35109
  source 1..40: mol_type = genomic DNA

SEQ ID NO: 35120 - DNA, 50 bp, Bacillus amyloliquefaciens; identical to SEQ ID NO: 35110
  source 1..50: mol_type = genomic DNA

SEQ ID NO: 35121 - protein, 511 aa, Clostridium acetobutylicum
MKVAIYSRKSKFTGKGDSIENQIEMCKNFITSKYNKKVEFLVYEDEGFSGGTINRPQFKKLIKDVELDKLDVLVCYRLDRISRNVSDFSNTLDTLQEHHVDFISISEQFDTSTPMGRAMVYIASVFAQLERETIAERVKDNMIEMAKNGRWTGGKIPLGFNSKRIKYIDENGLEREIPVLEINKEESKFVTSLYEKYLELGSLHKLEVYITQNEIKSRNGILFEKSSLKIILQNPIYVKSSYDVLKYLKNNEWKVYGNPDGAHSLLTYNKTEQTLRKGKHIKVDRPKEDRFAAISNILGFIEPELWLEVQKQFDKNRTSFPRLGKTHNALLTGKIKCGKCKKYMLIQHGRISKKTGEKAFYYVCSLKQKSHKKLCNNSNIRTDKIENLVLDSLKNFAKSKKEIMEALKRENNYKLKNNNSDIKLELNSALSERKKQIDRLTNALANGTGVEDILINKIKLIKKECIKIENKLSEIENNHEKSKSNKINLDIINSMLDSCKIIDTLSMQEQK

SEQ ID NO: 35122 - DNA, 50 bp, Clostridium acetobutylicum
  source 1..50: mol_type = genomic DNA
atactttatcgatgcaagagcaaaaacgtgaatttgctaaggtatgctct

SEQ ID NO: 35123 - DNA, 40 bp, Clostridium acetobutylicum
  source 1..40: mol_type = genomic DNA
atgctacatggatatagcagacgtatcattgacactttaa

SEQ ID NO: 35124 - DNA, 40 bp, Clostridium acetobutylicum
  source 1..40: mol_type = genomic DNA
atgctacatggatatagcatgcgtatcattgacactttaa

SEQ ID NO: 35125 - DNA, 50 bp, Clostridium acetobutylicum
  source 1..50: mol_type = genomic DNA
atactttctcagacaaacagcaaatgagagaatgtgttactgattgatct

SEQ ID NO: 35126 - protein, 575 aa, Serratia plymuthica
MTKRKLYSYVRWSSDRQSKGTSLERQTAKAKEFAHSHNLELVELLDAGLSAYRGKNTTQGALGGFIQAVESGAIPNDSYLFVENLDRLSRQDILTANKLFSHLLELGLTVVTGMDGRIYTRQSVTANPTDLMLSILLFSRANEESATKQKRVYGNIAALVERHKAGLPTTIKTAGSHVWWVDASGDKHTAVQPHPTLWKAARKAVELFLDGYSAHAVCDYLNEHYDAPPVRVTKATNNPDNLGKWSYPLLRRMKTSRTLIGERTINAGDITYTLENYYPPLCSPTEFAQLQDLNENNKLTQGPKKTRITLLSGLGILKCGHCGGAMTFMIGTKGKIRYMCANGKDRIGNCKAWSIGLDILERTLVPALVRGYMDYTLGGNAKGDDIKESIQSAQEALQAIESQIENITNAITLGGNLAPLVERMGALSKVKDSQLLEVERLNRLALLSESESGAIDKITDFILQIRPNVLTDLNHPLRLQLREAVRAVIESCTVHKREDRGLAIVYTIKGSPFRTVHAFVAANRGHYKETVVNIGSDGQPLPDVGDPQKFDDAITKIVDEMGLPPIDGGLMWARR

SEQ ID NO: 35127 - DNA, 50 bp, Serratia plymuthica
  source 1..50: mol_type = genomic DNA
attgttgtataaattacatcaacgaaacctagtgtgatttagaaaactaa

SEQ ID NO: 35128 - DNA, 40 bp, Serratia plymuthica
  source 1..40: mol_type = genomic DNA
gaatgcgtggctgctgggcaaaattgatgactataaattc

SEQ ID NO: 35129 - DNA, 40 bp, Serratia plymuthica
  source 1..40: mol_type = genomic DNA
gaatgcgtggctgctgggcggaattgatgactataaattc

SEQ ID NO: 35130 - DNA, 50 bp, Serratia plymuthica
  source 1..50: mol_type = genomic DNA
aatgatgtaacacattcctcctggggaccaagagtgattctgaaaactaa

SEQ ID NO: 35131 - protein, 612 aa, Rhodococcus hoagii
MESASPGLRVLGRLRLSRLTDESTSIARQRETIQRWAEIQGHTVIGWAEDADVSGAVDPFDTPQLGQWLNHRVEDYDVIAAWKLDRLGRNAIQLNKLFGWCIDHNKTLVSCSESIDLGSWSGRMLAGVIAGLAEGELEAIRERARSSRVKLREAARFAGGKPPFGYRKVRRDGGGWMLEIDEPAAELVGKIVADVLDGKPVSRVVMALNEGGYRTPRDYYETVKAGKPALKLAAGERRNSEWRSTALRNLLTNPALRGYVHHKGQIARGDDGMPLQLAEEPLVDADEWEGLQAIFNGHRERRSHYRRPDASPLVGLVYCYWCHSPLWHNRNVSRGHEYFYYRCPNIQKHERASMIPADQAEKAVADSFLDQAGDLPVMERVWVPGDSTERELRDAVAALDELTEVLGTLGSATARQRITRQITALDERIRDLEAQPVREARWEYKQLGGTYREAWESLGEAERWQLIMKSGMTFAFGLTDRGRGPNSVWVSSVYTPEPLKQTLVSGVTQRRTLADADPHRDVNSADHTKSLPEHWATMRKHGVEGIEVHEVKSVFVSKPGERVEIPHWLHEVGISEITNDDDVRIIWTQDGRGWYQHSDGEWIEVPLGELEE

SEQ ID NO: 35132 - DNA, 50 bp, Rhodococcus hoagii
  source 1..50: mol_type = genomic DNA
gttttgtggaggttgctgtccggctcgtggaacatcaacctgtacacaac

SEQ ID NO: 35133 - DNA, 40 bp, Rhodococcus hoagii
  source 1..40: mol_type = genomic DNA
attgggtgggatgcggggctcgtggaacatcactcggaac

SEQ ID NO: 35134 - DNA, 40 bp, Rhodococcus hoagii
  source 1..40: mol_type = genomic DNA
attgggtgggatgcggggcaggtggaacatcactcggaac

SEQ ID NO: 35135 - DNA, 50 bp, Rhodococcus hoagii
  source 1..50: mol_type = genomic DNA
atgctgtggctgttgctgtcccccagggagaccatctccttgtgcacaac

SEQ ID NO: 35136 - protein, 548 aa, Anaerotruncus colihominis
MTTKNYPDNITALYARLSQEDALDGESNSIANQRKILLKYATDNGFPNPTFFIDDGVSGVTFDRPGWNEMIRLAEAGKVQTVIVKDMSRMGRDYLKVGYYTESFFAERDIRYIAINDGVDSTKGDNDFTPFRNLFNDFYARDTSKKIRAVMRSKGNAGEHLCTNPPYGYRKDPADKKKWIVDEEAAEVVKRIFDLCIAGKGPMQIAKVLTADRVLTVKAYYAKRDGKTMPDNLYRWDYKSISGILERPEYTGCTVNFKTYSKSHKLKKRLQNAPENQRIFPNTQPAIIKGKVFERVLELRANKRRPAKTGRQGLFSGLLYCADCGEKLYFCTTNSFTPKQEHYVCSNYKSNTGTCSAHFIREETLKLFVRQRIFDVTAMFIDDIQGFQKIVYQQRFTEAEKAVKRQKKELEQARKRITELDRIFKRIYEDAINGTISHERFLKLSAEYEAEQKELTEFVQKEQAAVDTYEQDKSDFDSFAAIIRKYVGIRELTPTIVNEFVKKIIVHAPDKSSGHRRQKIQIVWNFIGELEQDENKQTIERQRKSKTA

SEQ ID NO: 35137 - DNA, 50 bp, Anaerotruncus colihominis
  source 1..50: mol_type = genomic DNA
ttacttccttatgggtgtgcccctttagatgaactccgataaggaagtat

SEQ ID NO: 35138 - DNA, 40 bp, Anaerotruncus colihominis
  source 1..40: mol_type = genomic DNA
aaaaaggggccgccggctgttaccggcggcccctttttac

SEQ ID NO: 35139 - DNA, 40 bp, Anaerotruncus colihominis
  source 1..40: mol_type = genomic DNA
aaaaaggggccgccggctggcaccggcggcccctttttac

SEQ ID NO: 35140 - DNA, 50 bp, Anaerotruncus colihominis
  source 1..50: mol_type = genomic DNA
ttacttactgttctgtttgcccttgcagatgacctttctgcatgtaccat

SEQ ID NO: 35141 - protein, 522 aa, Mycobacteroides abscessus
MATSLVRAVVGARVSIFTDGKESQITQRTKGTAYAESQGWTVVGAFEDLDVSAIKKSPWDRPDLKQWLTDRADDWDALVFAKTDRVFRSAADCVKLSEWCRDHKKILVLVDDGIKLDYFHPDSQQDAFAGAMSKVFLILASVFAEIEGQRFVQRALDRVTQYRHQPRWAYGVPPYGFQVVDRPEGGKTLGHDLEAQQVLQGIATRLLSGDSLTRITADLNETGVLSPADRLRQRTGKELRGSSWTVITVQTILTNPATQGIKTAKGKPVLDAGGEPVRVGPPSFDSETWGRIHSELAQRSQSGQQRRHSDNPLLGVAKCGVCGKNMRHFQRTKGGRHYRYYICGSTPKACPGVLINADNAELAVETSFLDVHTNRRIKERVWRAGSDHSAELEQTTNTITALWEDRALGLFTTPEDQDMFRSQMAALVAKRDALAQTPVIKAGWIDVETEQTYGAVWPDATPVERRKMLTDAGMKLTVYRANKYETYVDLDKAIGEGAVGEELHSELEARAAEERRRWGMPD

SEQ ID NO: 35142 - DNA, 50 bp, Mycobacteroides abscessus
  source 1..50: mol_type = genomic DNA
gcacttcggagtggaaataagtacgaccactactatacactccgcaacca

SEQ ID NO: 35143 - DNA, 40 bp, Mycobacteroides abscessus; identical to SEQ ID NO: 23988
  source 1..40: mol_type = genomic DNA

SEQ ID NO: 35144 - DNA, 40 bp, Mycobacteroides abscessus
  source 1..40: mol_type = genomic DNA
ggactcggtgtgggtctactaccactttcacaccgtgccg

SEQ ID NO: 35145 - DNA, 50 bp, Mycobacteroides abscessus
  source 1..50: mol_type = genomic DNA
gcaaatcaatattataataactactactactactattattactgccacca

SEQ ID NO: 35146 - protein, 521 aa, Escherichia coli
MKVPVWCYARISTLKQIDGFGIQRQINTINQFLQYVVLDHRLPFTLDVDNVTQMVAEGKSAFRGGNWKPSTKLGKYRKMVMDGVISDSVLIVENIDRLTRLDPFQAVEIISGMINRGTTILEIETGMTYSRYIPESITVLTMQINRANGESKRKSIMMQKSHANRYGKVSKVRPRWFDVVEIDGIKQYRPNETAKAIQRMYNDYINGIGAAHIVRTYGNTDNGKAWTLVTVLRALSDKRVADDARYPPIIDKELYDSVQALKAATNKKGNTHQKNMLNIFSGMSRCPVCNQSIIVKRNSHGNLFTVCLGKRTNKTCEARSISYFALERPLLTAIRDLDFSEVYKHEDKNVLTLRDQWIQNERDIAAFRERLSKASRYEKFVILDELETMNREQEELTIRLKSVDVPKDIQLTFDDDKLDLDTNYRIELNNRIKKLIQYINIVREDVSKSSYTIYCTIKYWTDVISHLVIIDVNIKRTGTGGTNTLTTTLRSVSSLNMDGTVSGNPDSDAWEYWKSFLDNLK

SEQ ID NO: 35147 - DNA, 50 bp, Escherichia coli
  source 1..50: mol_type = genomic DNA
aggtgtacattcttgcatgactacgaacagttatgttatgatgtacacca

SEQ ID NO: 35148 - DNA, 40 bp, Escherichia coli; identical to SEQ ID NO: 23868
  source 1..40: mol_type = genomic DNA

SEQ ID NO: 35149 - DNA, 40 bp, Escherichia coli; identical to SEQ ID NO: 23869
  source 1..40: mol_type = genomic DNA

SEQ ID NO: 35150 - DNA, 50 bp, Escherichia coli
  source 1..50: mol_type = genomic DNA
atgtgtacatgtacacatgtgtatatacatatatgtgtatatgtacacat

SEQ ID NO: 35151 - protein, 474 aa, Salimicrobium jeotgali
MNVGIYIRVSTEEQVKEGFSISAQKQKLEAYCMAQGWDSYKLYVDQGVSAKNTDRPELQRLLEDIKRQKIKTVLVYRLDRFTRSVLDLQNLLNDMEENECAFVSATELYDTTTAMGRMFINVVAAMAQWERENLGERIRMGLVEKARQGKYHAQTPFGFIKKDHKLYPHPERSEVLLDMIQKIEEGYSLQGLATYLNDSPHQPVRGYRWHGTSILSMLRNPVLYGGMMWQGELFEDVHEGLISKERFLHLGKLLTSRQNHKKRKVNSFFTYQMKLVCPQCSTHLTSERNTYERKDGSLLEHNRYTCQKCSRDKRKAVSFSETKFEEAFMNYIETLHVHGVPPEMKEKDPREEIDKKIKQLENQRAKYQKGWANDWISDEEFKTRMEETQYAINEWEEERSQLKAKVETASPEQIEIYAKSIIDNYKKLTPREKHEFLNIAVKDIYFDFKEEWYTGAKGKRQKRRHLWVTKVEFM

SEQ ID NO: 35152 - DNA, 50 bp, Salimicrobium jeotgali
  source 1..50: mol_type = genomic DNA
tttaccagttatgctaactttaaagcagtcgattgtatgagtatggtaaa

SEQ ID NO: 35153 - DNA, 40 bp, Salimicrobium jeotgali
  source 1..40: mol_type = genomic DNA
tttgacatcgagaaaaagggctacgaaatgttcctgtttt

SEQ ID NO: 35154 - DNA, 40 bp, Salimicrobium jeotgali
  source 1..40: mol_type = genomic DNA
tttgacatcgagaaaaaggattacgaaatgttcctgtttt

SEQ ID NO: 35155 - DNA, 50 bp, Salimicrobium jeotgali
  source 1..50: mol_type = genomic DNA
tttcccagttactataagtttaaaatagtctattataaccaaaagacaca

SEQ ID NO: 35156 - protein, 482 aa, Raoultella planticola
MTQYRRQGYDAIDEFTFLLKRNIDIIEVETEQIFSYRLNHKLTQLSTSIERAYQESKRKSRLITKSWANLKRKAVDEGVALKRNVPYWLVIDGDKYQLNKSEVERIRTIFDDYANGKGVTAIVRDLNKAGGKYDKKAFSTNFINVMLRDRRLIGWLTGKRRKNETIADWKLREIKIYPEIIDANLFELVQRKIDANAVAKNVRTSSKQISLFNGLARCGICNEPLVGHFTQKGSYLRCLGKRSKLGTCNSSLIRYKECEYAVINYVKNIDFKTIYGNNKNNTPMINSLQQRMAVVTTEINGIESLLNTSDNSSEIVALTKARRERVKERDKISYELIDIMRTIDVSDEEFMLDLESICDHNNVELRERFNAALKKVIKSIKIIQDNSSDDKIFIIKFEYHTDYAMHCVALNLNGELIGYSYIVDKGELCLKSSCMDVNFKTGEITTKHAPNYIEELIVKSAFENIEKVISGYDNSLAIADII

SEQ ID NO: 35157 - DNA, 50 bp, Raoultella planticola
  source 1..50: mol_type = genomic DNA
ggttgtatttgtattagaatctgggtgcaaatgctaacattgatacaaac

SEQ ID NO: 35158 - DNA, 40 bp, Raoultella planticola
  source 1..40: mol_type = genomic DNA
aatctgcacaatggcatgggtttatggctcggttcagggc

SEQ ID NO: 35159 - DNA, 40 bp, Raoultella planticola
  source 1..40: mol_type = genomic DNA
aatctgcacaatggcatggcattatggctcggttcagggc

SEQ ID NO: 35160 - DNA, 50 bp, Raoultella planticola
  source 1..50: mol_type = genomic DNA
ggtggtattatgaatagaagctgtcagcagctgctatgcttgctatcatc

SEQ ID NO: 35161 - protein, 629 aa, Raoultella planticola
MPQLYSYIRWSSDRQDKGTTRNRQVAAAKAYAEEAGLEMVEILEPGVSAFRGKNRAGKLGDFIDAVKNNAIPSDSWLYCENLDRLSRDQVDEALRLFLELIGLGLTIVTGMDRKVYNSKSIKQNPIDLMISILMFIRGNEESETKSNRTVGNVVALVERHKEGLPVNIKSVGRHPFWIDDSGSQYEAVKKHPVYWSIAREAIEMFLAGDGIYTVKRHLDDKYPNGLKGKEWDYQVLKKMRDNHALIGERTINVAGATYKLDNYYPWLCKDEAEFLTLAERKQQNNYKAKKDKTEEIKLLSGLQVLRCSKCGGTMHSFMNHGSARYICTNGVHLQKNCSGWSISAQLVEHCTMISLLIGYMDKSRKDGIDTTAIEEEISRKATLITDLESRISNMAKAIAIAPEVSELAVQLNAFDLERKKAVLEVDKLKERLHSLKGKGSLEVDITDFLMLIQWSVFTNMEDADRNKIRKIISSIIESIIIDKTDGCITIKIKCHNKDEWLVFGGVNRKPFWAFTIEYSTNDSKDIEGEDSSNFVSNPLFQKAVEQLDSIKQSYLNLFETANTMLGVVGYSDIRGASFWPNTGQYERANVEYEGITYSIAMNGRVSKAITTALEATGLSRKAFIERYKV

SEQ ID NO: 35162 - DNA, 50 bp, Raoultella planticola
  source 1..50: mol_type = genomic DNA
tagtttatttcttgattcttcgggcaccctaatgatataaatccaatctt

SEQ ID NO: 35163 - DNA, 40 bp, Raoultella planticola; identical to SEQ ID NO: 24218
  source 1..40: mol_type = genomic DNA

SEQ ID NO: 35164 - DNA, 40 bp, Raoultella planticola
  source 1..40: mol_type = genomic DNA
gtccacgaggtttttcgggttgcccagagagacaaagccg

SEQ ID NO: 35165 - DNA, 50 bp, Raoultella planticola
  source 1..50: mol_type = genomic DNA
cagtttattcagcgattcttccacttccccactgatagacatttagtctt

SEQ ID NO: 35166 - protein, 629 aa, Klebsiella aerogenes
MPQLYSYIRWSSDRQDKGTTRNRQVAAAKAYAEEAGLEMVEILEPGVSAFRGKNRAGKLGDFIDAVKNNAIPSDSWLYCENLDRLSRDQVDEALRLFLELIGLGLTIVTGMDRKVYNSKSIKQNPIDLMISILMFIRGNEESETKFNRTVGNVVALVERHKEGLPVNIKSVGRHPFWIDDSGSQYEAVKKHPVYWSIAREAIEMFLAGDGIYTVKRHLDDKYPNGLKGKEWDYQVLKKMRDNRALIGERTINVAGATYKLDNYYPWLCKDEAEFLTLAERKQQNNYKAKKDKTEEIKLLSGLQVLRCSKCGGTMHSFMNHGSARYICTNGVHLQKNCSGWSISAQLVEHCTMISLLIGYMDKSRKDGIDTTAIEEEISRKATLITDLESRISNMAKAIAIAPEVSELAVQLNAFDLERKKAVLEVDKLKERLHSLKGKGSLEVDITDFLMLIQWSVFTNMEDADRNKIRKIISSIIESIIIDKTDGCITIKIKCHNKDEWLVFGGVNRKPFWAFTIEYSTNDSKDIEGEDSSNFVSNPLFQKAVEQLDSIKQSYLNLFETANTMLGVVGYSDIRGASFWPNTGQYERANVEYEGITYSIAMNGRVSKAITTALEATGLSRKAFIERYKV

SEQ ID NO: 35167 - DNA, 50 bp, Klebsiella aerogenes; identical to SEQ ID NO: 35162
  source 1..50: mol_type = genomic DNA

SEQ ID NO: 35168 - DNA, 40 bp, Klebsiella aerogenes; identical to SEQ ID NO: 24223
  source 1..40: mol_type = genomic DNA

SEQ ID NO: 35169 - DNA, 40 bp, Klebsiella aerogenes; identical to SEQ ID NO: 32084
  source 1..40: mol_type = genomic DNA

SEQ ID NO: 35170 - DNA, 50 bp, Klebsiella aerogenes; identical to SEQ ID NO: 35165
  source 1..50: mol_type = genomic DNA

SEQ ID NO: 35171 - protein, 629 aa, Klebsiella aerogenes
MPQLYSYIRWSSDRQDKGTTRNRQVAAAKAYAEEAGLEMVEILEPGVSAFRGKNRAGKLGDFIDAVKSNAIPSDSWLYCENLDRLSRDQVDEALRLFLELIGLGLTIVTGMDRKVYNSKSIKQNPIDLMISILMFIRGNEESETKSNRTVGNVVALVERHKEGLPVNIKSVGRHPFWIDDSGSQYEAVKKHPVYWSIAREAIEMFLAGDGIYTVKRHLDDKYPNGLKGKEWDYQVLKKMRDNHALIGERTINVAGATYKLDNYYPWLCKDEAEFLTLAERKQQNNYKAKKDKTEEIKLLSGLQVLRCSKCGGTMHSFMNHGSARYICTNGVHLQKNCSGWSISAQLVEHCTMISLLIGYMDKSRKDGIDTTAIEEEISRKATLITDLESRISNMAKAIAIAPEVSELAVQLNAFDLERKKAVLEVDKLKERLHSLKGKGSLEVDITDFLMLIQWSVFTNMEDADRNKIRKIISSIIESIIIDKTDGCITIKIKCHNKDEWLVFGGVNRKPFWAFTIEYSTNDSKDIEGEDSSNFVSNPLFQKAVEQLDSIKQSYLNLFETANTMLGVVGYSDIRGASFWPNTGQYERANVEYEGITYSIAMNGRVSKAITTALEATGLSRKAFIERYKV

SEQ ID NO: 35172 - DNA, 50 bp, Klebsiella aerogenes; identical to SEQ ID NO: 35162
  source 1..50: mol_type = genomic DNA

SEQ ID NO: 35173 - DNA, 40 bp, Klebsiella aerogenes; identical to SEQ ID NO: 24223
  source 1..40: mol_type = genomic DNA

SEQ ID NO: 35174 - DNA, 40 bp, Klebsiella aerogenes; identical to SEQ ID NO: 32084
  source 1..40: mol_type = genomic DNA

SEQ ID NO: 35175 - DNA, 50 bp, Klebsiella aerogenes; identical to SEQ ID NO: 35165
  source 1..50: mol_type = genomic DNA

SEQ ID NO: 35176 - protein, 629 aa, Enterobacter hormaechei
MPQLYSYIRWSSDRQDKGTTRNRQVAAAKAYAEEAGLEMVEILEPGVSAFRGKNRAGKLGDFIDAVKNNAIPSDSWLYCENLDRLSRDQVDEALRLFLELIGLGLTIVTGMDRKVYNSKSIKQNPIDLMISILMFIRGNEESETKSNRTVGNVVALVERHKEGLPVNIKSVGRHPFWIDDSGSQYEAVKKHPVYWSIAREAIEMFLAGDGIYTVKRHLDDKYPNGLKGKEWDYQVLKKMRDNRALIGERTINVAGATYKLDNYYPWLCKDEAEFLTLAERKQQNNYKAKKDKTEEIKLLSGLQVLRCSKCGGTMHSFMNHGSARYICTNGVHLQKNCSGWSISAQLVEHCTMISLLIGYMDKSRKDGIDTTAIEEEISRKATLITDLESRISNMAKAIAIAPEVSELAVQLNAFDLERKKAVLEVDKLKERLHSLKGKGSLEVDITDFLMLIQWSVFTNMEDADRNKIRKIISSIIESIIIDKTDGCITIKIKCHNKDEWLVFGGVNRKPFWAFTIEYSTNDSKDIEGEDSSNFVSNPLFQKAVEQLDSIKQSYLNLFETANTMLGVVGYSDIRGASFWPNTGQYERANVEYEGITYSIAMNGRVSKAITTALEATGLSRKAFIERYKV

SEQ ID NO: 35177 - DNA, 50 bp, Enterobacter hormaechei; identical to SEQ ID NO: 35162
  source 1..50: mol_type = genomic DNA

SEQ ID NO: 35178 - DNA, 40 bp, Enterobacter hormaechei; identical to SEQ ID NO: 32078
  source 1..40: mol_type = genomic DNA

SEQ ID NO: 35179 - DNA, 40 bp, Enterobacter hormaechei; identical to SEQ ID NO: 32079
  source 1..40: mol_type = genomic DNA

SEQ ID NO: 35180 - DNA, 50 bp, Enterobacter hormaechei; identical to SEQ ID NO: 35165
  source 1..50: mol_type = genomic DNA

SEQ ID NO: 35181 - protein, 629 aa, Klebsiella aerogenes
MPQLYSYIRWSSDRQDKGTTRNRQVAAAKAYAEEAGLEMVEILEPGVSAFRGKNRAGKLGDFIDAVKNNAIPSDSWLYCENLDRLSRDQVDEALRLFLELIGLGLTIVTGMDRKVYNSKSIKQNPIDLMISILMFIRGNEESETKFNRTVGNVVALVERHKEGLPVNIKSVGRHPFWIDDSGSQYEAVKKHPVYWSIAREAIEMFLAGDGIYTVKRHLDDKYPNGLKGKEWGYQVLKKMRDNRALIGERTINVAGATYKLDNYYPWLCKDEAEFLTLAERKQQNNYKAKKDKTEEIKLLSGLQVLRCSKCGGTMHSFMNHGSARYICTNGVHLQKNCSGWSISAQLVEHCTMISLLIGYMDKSRKDGIDTTAIEEEISRKATLITDLESRISNMAKAIAIAPEVSELAVQLNAFDLERKKAVLEVDKLKERLHSLKGKGSLEVDITDFLMLIQWSVFTNMEDADRNKIRKIISSIIESIIIDKTDGCITIKIKCHNKDEWLVFGGVNRKPFWAFTIEYSTNDSKDIEGEDSSNFVSNPLFQKAVEQLDSIKQSYLNLFETANTMLGVVGYSDIRGASFWPNTGQYERANVEYEGITYSIAMNGRVSKAITTALEATGLSRKAFIERYKV

SEQ ID NO: 35182 - DNA, 50 bp, Klebsiella aerogenes; identical to SEQ ID NO: 35162
  source 1..50: mol_type = genomic DNA

SEQ ID NO: 35183 - DNA, 40 bp, Klebsiella aerogenes; identical to SEQ ID NO: 24223
  source 1..40: mol_type = genomic DNA

SEQ ID NO: 35184 - DNA, 40 bp, Klebsiella aerogenes; identical to SEQ ID NO: 32084
  source 1..40: mol_type = genomic DNA

SEQ ID NO: 35185 - DNA, 50 bp, Klebsiella aerogenes; identical to SEQ ID NO: 35165
  source 1..50: mol_type = genomic DNA

SEQ ID NO: 35186 - protein, 558 aa, Clostridioides difficile; identical to SEQ ID NO: 3206

SEQ ID NO: 35187 - DNA, 50 bp, Clostridioides difficile; identical to SEQ ID NO: 3207
  source 1..50: mol_type = genomic DNA

SEQ ID NO: 35188 - DNA, 40 bp, Clostridioides difficile
  source 1..40: mol_type = genomic DNA
aatcctataacctcttgtttttataggcatatccatactt

SEQ ID NO: 35189 - DNA, 40 bp, Clostridioides difficile
  source 1..40: mol_type = genomic DNA
aatcctataacctcttgttgctataggcatatccatactt

SEQ ID NO: 35190 - DNA, 50 bp, Clostridioides difficile; identical to SEQ ID NO: 9115
  source 1..50: mol_type = genomic DNA

SEQ ID NO: 35191 - protein, 558 aa, Anaerobutyricum hallii
MLQQSNNTITSIYPIGNQTEELTALYCRLSQDDKQEGDSNSIINQKKILKRYAIEHGYQPYVFFVDDGFSGTNFNRPDFQRMIAEVEAGRIKRVIVKDMSRLGRDYLQVGMYTEIMFPNLDVHFIAVNDGVDSHVGENEFTPFRNIINEWYAKDTSKKIRAVKRSKGMAGEHIGSHAPYGYMKNPDNKKEWLIDEEAAEVVREIFRLCVNGYGPTRIANILTERKILCPTYYALEHGEKPRTVLPPDKYLWSATVVSHILERMDYLGHTVNFKTHVKSYKNRKKIDNSPEQWRIFENTHEAIIDKETFEIVQKIRSGKRRPTKMGDMPMFSGLLYCADCGSKMTFHRQMAQSAEKHNFVCSNYRHNSKSCTMHYIRNVVVEQIVLENLKEVIRYVSDYEDEFVQMVMDTDMRQRNKELSQKKKRLTEIHSRIQELDKIFQRIYEDNISGKLSDERFMKLSKGYEEEQHTLQKEQTSLEKELQKEEKQSVDVKQFLSVVRKYTNLTELTPEIVHEFIDKIIVHAPDKSSGKRLQEIEIIYNHIGVFDHSKVTLWKGKAV

SEQ ID NO: 35192 - DNA, 50 bp, Anaerobutyricum hallii; identical to SEQ ID NO: 3207
  source 1..50: mol_type = genomic DNA

SEQ ID NO: 35193 - DNA, 40 bp, Anaerobutyricum hallii
  source 1..40: mol_type = genomic DNA
aacggccacaacacccatatttactgggtttgtagccgtt

SEQ ID NO: 35194 - DNA, 40 bp, Anaerobutyricum hallii
  source 1..40: mol_type = genomic DNA
aacggccacaacacccatagctactgggtttgtagccgtt

SEQ ID NO: 35195 - DNA, 50 bp, Anaerobutyricum hallii; identical to SEQ ID NO: 9115
  source 1..50: mol_type = genomic DNA

SEQ ID NO: 35196 - protein, 558 aa, Enterococcus faecium; identical to SEQ ID NO: 3206

SEQ ID NO: 35197 - DNA, 50 bp, Enterococcus faecium; identical to SEQ ID NO: 3207
  source 1..50: mol_type = genomic DNA

SEQ ID NO: 35198 - DNA, 40 bp, Enterococcus faecium
  source 1..40: mol_type = genomic DNA
aaacaagcaatgacgacaattgctaagcattgcggcgttt

SEQ ID NO: 35199 - DNA, 40 bp, Enterococcus faecium
  source 1..40: mol_type = genomic DNA
aaacaagcaatgacgacaagcgctaagcattgcggcgttt

SEQ ID NO: 35200 - DNA, 50 bp, Enterococcus faecium; identical to SEQ ID NO: 9115
  source 1..50: mol_type = genomic DNA

SEQ ID NO: 35201 - protein, 558 aa, Enterococcus faecium; identical to SEQ ID NO: 3206

SEQ ID NO: 35202 - DNA, 50 bp, Enterococcus faecium; identical to SEQ ID NO: 3207
  source 1..50: mol_type = genomic DNA

SEQ ID NO: 35203 - DNA, 40 bp, Enterococcus faecium
  source 1..40: mol_type = genomic DNA
aaatcccgcaacccctgatttcacaggatttgcgggattt

SEQ ID NO: 35204 - DNA, 40 bp, Enterococcus faecium
  source 1..40: mol_type = genomic DNA
aaatcccgcaacccctgatgccacaggatttgcgggattt

SEQ ID NO: 35205 - DNA, 50 bp, Enterococcus faecium; identical to SEQ ID NO: 9115
  source 1..50: mol_type = genomic DNA

SEQ ID NO: 35206 - protein, 558 aa, Clostridioides difficile; identical to SEQ ID NO: 17071

SEQ ID NO: 35207 - DNA, 50 bp, Clostridioides difficile; identical to SEQ ID NO: 3207
  source 1..50: mol_type = genomic DNA

SEQ ID NO: 35208 - DNA, 40 bp, Clostridioides difficile
  source 1..40: mol_type = genomic DNA
gagcgaaaaaagccttgatttatcaggctttgcaagcccc

SEQ ID NO: 35209 - DNA, 40 bp, Clostridioides difficile
  source 1..40: mol_type = genomic DNA
gagcgaaaaaagccttgatgcatcaggctttgcaagcccc

SEQ ID NO: 35210 - DNA, 50 bp, Clostridioides difficile; identical to SEQ ID NO: 9115
  source 1..50: mol_type = genomic DNA

SEQ ID NO: 35211 - protein, 558 aa, Clostridioides difficile; identical to SEQ ID NO: 35191

SEQ ID NO: 35212 - DNA, 50 bp, Clostridioides difficile; identical to SEQ ID NO: 3207
  source 1..50: mol_type = genomic DNA

SEQ ID NO: 35213 - DNA, 40 bp, Clostridioides difficile
  source 1..40: mol_type = genomic DNA
aaatgtagaacctcctgagttagaaggggtagcagatatt

SEQ ID NO: 35214 - DNA, 40 bp, Clostridioides difficile
  source 1..40: mol_type = genomic DNA
aaatgtagaacctcctgaggcagaaggggtagcagatatt

SEQ ID NO: 35215 - DNA, 50 bp, Clostridioides difficile; identical to SEQ ID NO: 9115
  source 1..50: mol_type = genomic DNA

SEQ ID NO: 35216 - protein, 477 aa, Eisenbergiella massiliensis; identical to SEQ ID NO: 9691

SEQ ID NO: 35217 - DNA, 50 bp, Eisenbergiella massiliensis; identical to SEQ ID NO: 3207
  source 1..50: mol_type = genomic DNA

SEQ ID NO: 35218 - DNA, 40 bp, Eisenbergiella massiliensis
  source 1..40: mol_type = genomic DNA
aaaagttgagataccggcattatccagcttctggttccaa

SEQ ID NO: 35219 - DNA, 40 bp, Eisenbergiella massiliensis
  source 1..40: mol_type = genomic DNA
aaaagttgagataccggcagcatccagcttctggttccaa

SEQ ID NO: 35220 - DNA, 50 bp, Eisenbergiella massiliensis; identical to SEQ ID NO: 9115
  source 1..50: mol_type = genomic DNA

SEQ ID NO: 35221 - protein, 558 aa, Faecalicatena fissicatena; identical to SEQ ID NO: 3206

SEQ ID NO: 35222 - DNA, 50 bp, Faecalicatena fissicatena; identical to SEQ ID NO: 3207
  source 1..50: mol_type = genomic DNA

SEQ ID NO: 35223 - DNA, 40 bp, Faecalicatena fissicatena
  source 1..40: mol_type = genomic DNA
atatgtagaaatccttgaatttacgcactttgtagagttt

SEQ ID NO: 35224 - DNA, 40 bp, Faecalicatena fissicatena
  source 1..40: mol_type = genomic DNA
atatgtagaaatccttgaagctacgcactttgtagagttt

SEQ ID NO: 35225 - DNA, 50 bp, Faecalicatena fissicatena; identical to SEQ ID NO: 9115
  source 1..50: mol_type = genomic DNA

SEQ ID NO: 35226 - protein, 558 aa, Blautia obeum; identical to SEQ ID NO: 35191

SEQ ID NO: 35227 - DNA, 50 bp, Blautia obeum; identical to SEQ ID NO: 3207
  source 1..50: mol_type = genomic DNA

SEQ ID NO: 35228 - DNA, 40 bp, Blautia obeum
  source 1..40: mol_type = genomic DNA
aaaagccggaaatgctatgttatcaagcatttccgaccta

SEQ ID NO: 35229 - DNA, 40 bp, Blautia obeum
  source 1..40: mol_type = genomic DNA
aaaagccggaaatgctatggcatcaagcatttccgaccta

SEQ ID NO: 35230 - DNA, 50 bp, Blautia obeum; identical to SEQ ID NO: 9115
  source 1..50: mol_type = genomic DNA

SEQ ID NO: 35231 - protein, 573 aa, Cutibacterium avidum
MTSEDTDEAAIDSLVASTPFAGAIAVSYLRVSTKEQAEKGGNAEGFSIPAQREANQRKADQLGATIVEEFVDAGESARKADRPELMRMIKYVAAHKTSYCIVHKVDRLARNRADDVTIHLALKDAGVTLVSATENIDETPSGMLLHGIMSSIAEFYSRNLATDVVKGLSQKAAQGGTVTKAPIGYRNVGIRDDMGREIRTVEVDEERAKLVRWAFQTFASGDWTTSQLHKELVARGLTTLPTPRRPSKPIAKSTVHRMLTNPYYKGVIVYQGVTYRGAHDPIVPVEVWEQVQIVLGAHTSAADATQIHDHYLKGSVFCGQCGSRLIVCNAKSSQGTIYPYFVCSARHAGRGDCTRQAMLIEDVEHLIERFYTRIQIPTETRQALSGMLHAKFDQMMSEGAAELAELATRRTELEGEQTKLLQAHYAGAIPLDLLKREQDRITASLETIDFRVRAPNGEYADARANLDDSLLLLVNIADIYANADDANRRLCNQALFKAIYVDEDNDIHVGYRTPYDGLSNPDLQADALTWADQARAHAEATGAESTGTRKKGQTRTSSKAGPLVESSHLTHLG

SEQ ID NO: 35232 - DNA, 50 bp, Cutibacterium avidum
  source 1..50: mol_type = genomic DNA
aagttcacacctgacccatctggggtgcctgcgtagcacgttcggcaact

SEQ ID NO: 35233 - DNA, 40 bp, Cutibacterium avidum
  source 1..40: mol_type = genomic DNA
ccccttgatgaaaactggggtggctaacgggacttgaacc

SEQ ID NO: 35234 - DNA, 40 bp, Cutibacterium avidum
  source 1..40: mol_type = genomic DNA
ccccttgatgaaaactgggctggctaacgggacttgaacc

SEQ ID NO: 35235 - DNA, 50 bp, Cutibacterium avidum
  source 1..50: mol_type = genomic DNA
aaggccaccctgaggccacctggtctgcctgcttagaaaattaggctact

SEQ ID NO: 35236 - protein, 585 aa, Nonlabens ulvanivorans
MLAIYTRLSVESESKSIDYQKREGIQFAKEMSLQYELYDEGAGVSGTNDITERPVLSKLISDISDTSKNISAVWMRSQDRLDRNSMVYFIFLDAVKKSNVLVYFGSKEQLDFNDPQTLLNTSILSAFNAYYAGASRKKIKRVLHDNAEKGKVWGIVPYGYRTDENQKLEIYEEESKVVELIFKLALKGWGGKRIATKLNLDKIPTRYHNYEGTLKTKNKYTKEVSRKSKKDIVWAAKTVTDMLQNKWYVGTRTYGEKTFACPIIINDIDFYKVQNLFKKRKNFRSFEGKHKYLLKGKLRCKCGRNLYGRYKKHGRENYYMCSSKREATMNCGSASINIPRLDSFIIQHLFESKNLINHLEEVLNNSDKLKTLNYELSEIISKISILSRKKNKYAKYLADELEGDETILDLYKKTKRELEIGIDTQMKIQAKIDDLSSKKGLNNYKEIKKKIKSNDLMNDFESLQEAIHQILDEIVIDSTIREDKSVFLKLSISYKNIDLEDKEKVLWVAERMNGKSIEKFEFIGKVNQVDDINDSIFNYLKQMSSMNENLVSHLKKEGLSNRYINKQKKFQTIYVDKKSLFHFNK

SEQ ID NO: 35237 - DNA, 50 bp, Nonlabens ulvanivorans
  source 1..50: mol_type = genomic DNA
acccccacaaatataacacacactgatgagaaaagtaattttgtgggggt

SEQ ID NO: 35238 - DNA, 40 bp, Nonlabens ulvanivorans
  source 1..40: mol_type = genomic DNA
tccacatcataccatatcagacgttgccttcgttggtggt

SEQ ID NO: 35239 - DNA, 40 bp, Nonlabens ulvanivorans
  source 1..40: mol_type = genomic DNA
tccacatcataccatatcatacgttgccttcgttggtggt

SEQ ID NO: 35240 - DNA, 50 bp, Nonlabens ulvanivorans
  source 1..50: mol_type = genomic DNA
aaccccacaatattaacacagagttatgtgaaaactgtctttctgtgaga

SEQ ID NO: 35241 - protein, 541 aa, Pseudomonas nitroreducens
MTKIGAKVYSYLRFSDPRQAAGHSADRQAQYAKAWAAERGLILDESLTLRDEGLSAYHQKHIKQGALGVFLQAVDAGRIPEGSVLVVEGLDRLSRAEPILAQAQLAQIINAGISVVTASDGREYNRQSLKAQPMDLVYSLLVMIRAHEESDTKSKRVKAAIRRQCEGWSAGTYRGLIRNGADPHWLEWDGVAWQFVPDRTEAVRFALDCYRQGLGAKRTLELMLERGMDPAGLKLGGQQLYRLVHLQPLRGAKRISVDDDEFVLEDYYPRLLSDAEFSELSALTGQRHRRRGKGAIPGIVTGIGLTWCGYCGSAMEAQNQMGKIRPDGTLLPGHRRLFCSMTARQSECRQHGSISVVPLERALMDYCSDQMNLQRFMEPVDQASALRQRLIAARVEVQKIEEQVSRVTDALLAGESEGAAPLAFVRKARELERELEARQADVQQLERELAGLARYQTPADAALWASLVKGVMSQESEVREQVRQMVMDTFSRIVVYVQGIMPAGRKSKCLDVLLVSRSGQKRWIRIDRKTGDWVAGQDRIP

SEQ ID NO: 35242 - DNA, 50 bp, Pseudomonas nitroreducens
  source 1..50: mol_type = genomic DNA
gatttaggttcgatgcttttagggttccccaatgcttgcgaatctaaatt

SEQ ID NO: 35243 - DNA, 40 bp, Pseudomonas nitroreducens; identical to SEQ ID NO: 20903
  source 1..40: mol_type = genomic DNA

SEQ ID NO: 35244 - DNA, 50 bp, Pseudomonas nitroreducens
  source 1..50: mol_type = genomic DNA
gatttaggttcgatgcttttagggaaccccaatgcttgcgaatctaaatt

SEQ ID NO: 35245 - DNA, 40 bp, Pseudomonas nitroreducens
  source 1..40: mol_type = genomic DNA
gctgagcagcggccacgggaagccaccggccacccagacc

SEQ ID NO: 35246 - protein, 481 aa, Mycobacterium kansasii
MGKTLTAPKVLRAAIYCRISEDPRGLERGVHRQQEDCQALATARGWEVVATFIDNDISALRGQQRAGYQKMMAAVGRGEIDRIVTYGLARLWRNRRERADGMEALAKARVSVALVKGSDLDFTSAAGRMYAGVLGEFDTAESEIKAERVARAAAQRALEGRANGQCAYGWKREYQRDQQGRVLGWQDVVDEPAADVVRGIVQDLLAGVPLRAITARLNAGGPPSPQGGHWITSSVRKLALRDLNIGVRTHGGQTYKAAWEPIVDEEQHLRVKALLADPNRRTQRVASRSHLLTFGIGTCGVCGGVLAVSRKGPPGKKMPLYVCRDRGCVGRREDWVDALVVRTVCHRLANRDAQTVFHNAVEGHGLEDARRRVDGLRGRLDDAAEAYANNQIDLQQLTMITEKIRPQLEAAEQVVRQVAPGVPEFVEELLTATDTLAAWNRLSLVQKRKALEVLGLHVVIKPARGGPGFKEDSVDVVWPGE

SEQ ID NO: 35247 - DNA, 50 bp, Mycobacterium kansasii
  source 1..50: mol_type = genomic DNA
tccggatttgttgtccgcccaggaccgcccggaaatacgcagtattctta

SEQ ID NO: 35248 - DNA, 40 bp, Mycobacterium kansasii
  source 1..40: mol_type = genomic DNA
ctgccacgttttgccgacgccgcccggaaacaggcagtcg

SEQ ID NO: 35249 - DNA, 50 bp, Mycobacterium kansasii
  source 1..50: mol_type = genomic DNA
tccggatttgttgtccgcccaggaatgcccggaaatacgcagtattctta

SEQ ID NO: 35250 - DNA, 40 bp, Mycobacterium kansasii
  source 1..40: mol_type = genomic DNA
ctgccccgacctcccgacgatgcccggcccctgccagtcg

SEQ ID NO: 35251 - protein, 464 aa, Rhodococcus opacus
MECVVYCRISQDREGAGLGVQRQESDCRALADSLGWNVARVYVDNDVSAYSGRVRPAYEEMLGHIERGNVDGIVAWHSDRLHRSPVELERFIDTISAHSVEVRLVKSGHIDLATPSGRMTARLLGVVARHEVEHSAERQKRAKNQMALDGKFRGGPRPFGYKAGGMELEPVEADALRDAADRMLRGVSLMSITRQWMDAGIKTARGRDTWTVTGLRKVLTRARNAGLVEQGGKIIGPALWPAIFDADTLHAVRAVIADPSRRVSTSYERVHQGAGIYRCGKCGGPMKVFTMRGGRAESYKSYRCAASPHLSQRKEPLDEFIDQVVVARLSREDAAALILDRGKGVDVVALQTERDGLQARKKELATLFASGAIDGIQLKAGSADLQSKIDVIDGKLSAARQSSPLADLVLAGDDLRAVWGGLSADVRGKVISQLMSVVVLPIGSGQRPKGGGLDVGRVQIEWKL

SEQ ID NO: 35252 - DNA, 50 bp, Rhodococcus opacus
  source 1..50: mol_type = genomic DNA
gacagtccaagttttaccctcgttgtcacggtatgtcaactggtactgtc

SEQ ID NO: 35253 - DNA, 40 bp, Rhodococcus opacus
  source 1..40: mol_type = genomic DNA
cgccgtgctgtattcggtcgtcaccggcgacagcatcgtc

SEQ ID NO: 35254 - DNA, 50 bp, Rhodococcus opacus; identical to SEQ ID NO: 35252
  source 1..50: mol_type = genomic DNA

SEQ ID NO: 35255 - DNA, 40 bp, Rhodococcus opacus
  source 1..40: mol_type = genomic DNA
cgccgggctcgatgcggccgtcagcggccacagccccgcc

SEQ ID NO: 35256 - protein, 594 aa, Cellulosimicrobium sp TH-20
MVRGTAVIYARISQDRTGKEHGVARQREDCLKLAAEKGLRVVDVVVDNDVSAYSGKRREGWRRVLEMIDSGEVDTLIAHHVDRMYRQVKDLLELVEILKYRDVGVITVKSGDIDLSTSAGRMQAGIGAQIAQTESEQKAERIARAHLQLAEAGQPKGGRRPWGYGIDHITIVEPEAEAIRDAAEMIVDGRTLRAAADHVTARMSEQKAELSVLLPDGAVKTNMSRTALREVLLSPRIAGYRSHLPQRERERLRRMRARSATRGGFPWNDLVCYPAVWKGILTEDMWRAVRGILLDPERIGGKKRPRRSMLASLLRCGRCLKDMGEDGEPVVSTLGYGPKGYTCARCGSVSVHPAPIENLIATKVRERLARSPEIFLEDPGLQSEEHLLTRQELAERKRQGLVEMYVRHPGATTALDAGLAQVEAELAAISAERDERDRQILLRRRAHSLLDAWDESDAVTRGTLIGIAADYFVIEPLGRTGCSFQPGRVIAHWADAPDEPERLGPQPRTQEDIARERAARDAEKEVLRLERDKAAELRYEAELERFHQREREREAELTAQLGRAPDPLDLARRGPANPPKERRGSRRNGRQSRG

SEQ ID NO: 35257 - DNA, 50 bp, Cellulosimicrobium sp TH-20
  source 1..50: mol_type = genomic DNA
acacctgatgggcgacgatctggatctacagatcttcgctgaacgggtct

SEQ ID NO: 35258 - DNA, 40 bp, Cellulosimicrobium sp TH-20
  source 1..40: mol_type = genomic DNA
gagatcgaggagatctggatcaacgcgctctcccaggtgt

SEQ ID NO: 35259 - DNA, 50 bp, Cellulosimicrobium sp TH-20
  source 1..50: mol_type = genomic DNA
acacctgatgggcgacgatctggaagtacagatcttcgctgaacgggtct

SEQ ID NO: 35260 - DNA, 40 bp, Cellulosimicrobium sp TH-20
  source 1..40: mol_type = genomic DNA
tggagccaggaggccacgaaggacgggctctcccaggtgt

SEQ ID NO: 35261 - protein, 528 aa, Ruthenibacterium lactatiformans
MKAAIYCRLSKEDEELEKDGSGRESESIQNQKSMLIHYAVEKGYDIYQIYCDEDYSGVDRARPAFNRMIEAAGQHKFDVILAKTQSRFTRDMELVEKYLHGKFIEWGVRFIAIVDHVDTADEANKKSRQINGLVNEWYLEDLSNNVRSVLSHKRREGKFIGSSALYGYQKDPADKNHLVIDPEAAEVVKRIFALYLAGNGTTRIARILNEECVPSPTQYKREHGVVWKRPARYKNEDLWGKATIYRMLTNRSYAGDMEQGRHKKVSYKSKKTVWIPKKDWIVVPGTHEGIIERDSFERVQQMLRAHARGGGRGTVNPLAGKVVCGICGCTMEQTASGCAGKKTGKANRYFRCRTSQRDKTRCPGQNYMPMEQLQELVLERTRFHIAGHLKPEWFEAEQIKSEAEQCRQAKREELERLKAEIQRRRKAMQELYLDKSSGTVSSAQFAQMNRAFLDEADRLEKRCVLLEDALARAANTPGQKKTLEHCFNAAGEIKALDRELACLLIRKVVVYPPDVMENTREIEIDWKF

SEQ ID NO: 35262 - DNA, 50 bp, Ruthenibacterium lactatiformans
  source 1..50: mol_type = genomic DNA
attgtggggttggttgagcctgctcaggtgggaccaaccaaacccacaaa

SEQ ID NO: 35263 - DNA, 40 bp, Ruthenibacterium lactatiformans
  source 1..40: mol_type = genomic DNA
ccgcagggcctgctccggccaggtgggatatacctcgctg

SEQ ID NO: 35264 - DNA, 50 bp, Ruthenibacterium lactatiformans
  source 1..50: mol_type = genomic DNA
attgtggggttggttgagcctgctaaggtgggaccaaccaaacccacaaa

SEQ ID NO: 35265 - DNA, 40 bp, Ruthenibacterium lactatiformans
  source 1..40: mol_type = genomic DNA
ccgcggggcctccgagggcaaggtggggtttctctggctg

SEQ ID NO: 35266 - protein, 528 aa, Ruthenibacterium lactatiformans
MKAAIYCRLSKEDEELEKDGSGRESESIQNQKSMLIHYAVEKGYDIYQIYCDEDYSGIDRARPAFNRMIEAAGQHKFDVILAKTQSRFTRDMELVEKYLHGKFIEWGVRFIAIVDHVDTADEANKKSRQINGLVNEWYLEDLSNNVRSVLSHKRREGKFIGSSALYGYQKDPADKNHLVIDPEAAEVVKRIFALYLAGNGTTRIARILNEECVPSPTQYKREHGVVWKRPARYKNEDLWGKATIYRMLTNRSYAGDMEQGRHKKVSYKSKKTVWIPKKDWIVVPGTHEGIIERDSFERVQQMLRAHARGGGRGTVNPLAGKVVCGICGCTMEQTASGCAGKKTGKANRYFRCRTSQRDKTRCPGQNYMPMEQLQELVLERTRFHIAGHLKPEWFEAEQIKSEAEQCRQAKREELERLKAEIQRRRKAMQELYLDKSSGTVSSAQFAQMNRAFLDEADRLEKRCVLLEDALARAANTPGQKKTLEHCFNAAGEIKALDRELACLLIRKVVVYPPDVMENTREIEIDWKF

SEQ ID NO: 35267 - DNA, 50 bp, Ruthenibacterium lactatiformans; identical to SEQ ID NO: 35262
  source 1..50: mol_type = genomic DNA

SEQ ID NO: 35268 - DNA, 40 bp, Ruthenibacterium lactatiformans; identical to SEQ ID NO: 35263
  source 1..40: mol_type = genomic DNA

SEQ ID NO: 35269 - DNA, 50 bp, Ruthenibacterium lactatiformans; identical to SEQ ID NO: 35264
  source 1..50: mol_type = genomic DNA

SEQ ID NO: 35270 - DNA, 40 bp, Ruthenibacterium lactatiformans; identical to SEQ ID NO: 35265
  source 1..40: mol_type = genomic DNA

SEQ ID NO: 35271 - protein, 528 aa, Ruthenibacterium lactatiformans
MKAAIYCRLSKEDEELEKDGSGRESESIQNQKSMLIHYAVEKGYDIYQIYCDEDYSGVDRARPAFNRMIEAAGQHKFDVILAKTQSRFTRDMELVEKYLHGKFIEWGVRFIAIVDHVDTADEANKKSRQINGLVNEWYLEDLSNNVRSVLSHKRREGKFIGSSALYGYQKDPADKNHLVIDPEAAEVVKRIFALYLAGNGTTRIARILNEECVPSPTQYKREHGVVWKRPARYKNEDLWGKATIYRMLTNRSYAGDMEQGRHKKVSYKSKKTVWIPKKDWIVVPGTHEGIIERDSFERVQQMLRAHARGGGRGTVNPLAGKVVCGICGCTMEQTASGCAGKKTGKANRYFRCRTSQRDKTRCPGQNYMPMEQLQELVLERTRFHIAGHLKPEWFEAEQIKSEAEQCRQAKREELERLKAEIQRRRKAMQELYLDKSSGTVSSAQFAQMNRAFLDEADRLEKRCVLLEDALARAANTPGQKKTLEHCFNAAGEIKALDRELACLLIRKVVVYPPDVMENTRKIEIDWKF

SEQ ID NO: 35272 - DNA, 50 bp, Ruthenibacterium lactatiformans
  source 1..50: mol_type = genomic DNA
attgtggggttggttgagcctacccaggtgggaccaaccaaacccacaaa

SEQ ID NO: 35273 - DNA, 40 bp, Ruthenibacterium lactatiformans; identical to SEQ ID NO: 35263
  source 1..40: mol_type = genomic DNA

SEQ ID NO: 35274 - DNA, 50 bp, Ruthenibacterium lactatiformans
  source 1..50: mol_type = genomic DNA
attgtggggttggttgagcctaccaaggtgggaccaaccaaacccacaaa

SEQ ID NO: 35275 - DNA, 40 bp, Ruthenibacterium lactatiformans; identical to SEQ ID NO: 35265
  source 1..40: mol_type = genomic DNA

SEQ ID NO: 35276 - protein, 528 aa, Ruthenibacterium lactatiformans
MKAAIYCRLSKEDEELEKDGSGRESESIQNQKSMLIHYAVEKGYDIYQIYCDEDYSGIDRARPAFNRMIEAAGQHKFDVILAKTQSRFTRDMELVEKYLHGKFIEWGVRFIAIVDHVDTADEANKKSRQINGLVNEWYLEDLSNNVRSVLSHKRREGKFIGSSALYGYQKDPADKNHLVIDPEAAEVVKRIFALYLAGNGTTRIARILNEECVPSPTQYKREHGVVWKRPARYKNEDLWGKATIYRMLTNRSYAGDMEQGRHKKVSYKSKKTVWIPKKDWIVVPGTHEGIIERDSFERVQQMLRAHARGGGRGTVNPLARKVVCGICGCTMEQTASGCAGKKTGKANRYFRCRTSQRDKTRCPGQNYMPMEQLQELVLERTRFHIAGHLKPEWFEAEQIKSEAEQCRQAKREELERLKAEIQRRRKAMQELYLDKSSGTVSSAQFAQMNRAFLDEADRLEKRCVLLEDALARAANTPGQKKTLEHCFNAAGEIKALDRELACLLIRKVVVYPPDVMENTRKIEIDWKF

SEQ ID NO: 35277 - DNA, 50 bp, Ruthenibacterium lactatiformans
  source 1..50: mol_type = genomic DNA
attgtggggttggttgagcctacccaggtgggaccaaccaaacccataaa

SEQ ID NO: 35278 - DNA, 40 bp, Ruthenibacterium lactatiformans; identical to SEQ ID NO: 35263
  source 1..40: mol_type = genomic DNA

SEQ ID NO: 35279 - DNA, 50 bp, Ruthenibacterium lactatiformans
  source 1..50: mol_type = genomic DNA
attgtggggttggttgagcctaccaaggtgggaccaaccaaacccataaa

SEQ ID NO: 35280 - DNA, 40 bp, Ruthenibacterium lactatiformans; identical to SEQ ID NO: 35265
  source 1..40: mol_type = genomic DNA

SEQ ID NO: 35281 - protein, 528 aa, Ruthenibacterium lactatiformans; identical to SEQ ID NO: 35271

SEQ ID NO: 35282 - DNA, 50 bp, Ruthenibacterium lactatiformans
  source 1..50: mol_type = genomic DNA
attgtggggttggttgagcctgcccaggtgggaccaaccaaacccacaaa

SEQ ID NO: 35283 - DNA, 40 bp, Ruthenibacterium lactatiformans; identical to SEQ ID NO: 35263
  source 1..40: mol_type = genomic DNA

SEQ ID NO: 35284 - DNA, 50 bp, Ruthenibacterium lactatiformans
  source 1..50: mol_type = genomic DNA
attgtggggttggttgagcctgccaaggtgggaccaaccaaacccacaaa

SEQ ID NO: 35285 - DNA, 40 bp, Ruthenibacterium lactatiformans; identical to SEQ ID NO: 35265
  source 1..40: mol_type = genomic DNA

SEQ ID NO: 35286 - protein, 528 aa, Ruthenibacterium lactatiformans; identical to SEQ ID NO: 35271

SEQ ID NO: 35287 - DNA, 50 bp, Ruthenibacterium lactatiformans; identical to SEQ ID NO: 35277
  source 1..50: mol_type = genomic DNA

SEQ ID NO: 35288 - DNA, 40 bp, Ruthenibacterium lactatiformans; identical to SEQ ID NO: 35263
  source 1..40: mol_type = genomic DNA

SEQ ID NO: 35289 - DNA, 50 bp, Ruthenibacterium lactatiformans; identical to SEQ ID NO: 35279
  source 1..50: mol_type = genomic DNA

SEQ ID NO: 35290 - DNA, 40 bp, Ruthenibacterium lactatiformans; identical to SEQ ID NO: 35265
  source 1..40: mol_type = genomic DNA

SEQ ID NO: 35291 - protein, 528 aa, Salmonella enterica
MKVPVWSYARVSTLNQVDGFGIQRQVNTINQFIQYLVLDHRLPFVLDTENITQMVAEGKSAFKGKNWNPKTKLGQYRKMVMDGVLPDSVLIVENIDRLTRLDPFQAVEIISGLINRGTTILEIETGMTYSRYIPESITVLTMQINRANGESKRKSVMMKKSHQNRYGNVSKVRPRWFDVVEIDGIKQYRANDTAKAIQRMYNDYVNGIGAAQIVRTYGKTDNGKAWTLVTVLRVLSDKRVADDPRYPPIIDKELYTKVQAMKVSGNKGKTHQKQMLNIFSGMSRCPVCKQSIIVKRNSHGGLYTVCLGKRTNKDCEARSVAYFALERPLLEAIKGLDFSEVYDREESNVATLRDQWIQNERDIAAFRERLTKASRHEKFAILDELETISKEQDELTIRLKSVDAPKDLQLTYNDDKLDLDVDYRIELNNRLKKIIQRIDVVRVDVEKSKYTIYCSIMYWSDFMTHLVIIDVESKRTASRGGANTLTTTLRSVSSICSDGSISGNPDLEALEYWKNVFNKAMAAALPNG

SEQ ID NO: 35292 - DNA, 50 bp, Salmonella enterica
  source 1..50: mol_type = genomic DNA
gcggtgtacatactttacttactggacagttagtgtattatgtacgccac

SEQ ID NO: 35293 - DNA, 40 bp, Salmonella enterica
  source 1..40: mol_type = genomic DNA
cggccccatcagcagcatggagcagtcggtggtgccgccg

SEQ ID NO: 35294 - DNA, 50 bp, Salmonella enterica
  source 1..50: mol_type = genomic DNA
gcggtgtacatactttacttactgggcagttagtgtattatgtacgccac

SEQ ID NO: 35295 - DNA, 40 bp, Salmonella enterica
  source 1..40: mol_type = genomic DNA
cggccccatcagccaccaggggcagcagctgatgacgctg

SEQ ID NO: 35296 - protein, 529 aa, Salmonella enterica
MMKIPVWSYARVSTLNQVDGFGIQRQVNTINQFIQYLVLDHRLPYVLDTDNITQMVAEGRSAFKGKNWNPKTKLGQYRKMVMDGVVPDSVLIVENIDRLTRLDPFQAVEIISGLINRGTTILEIETGMTYSRYIPESITVLTMQINRANGESKRKSVMMKKSHQNRYGNVSKVRPRWFDVVEVDGIKQYRTNNTAKAIQRMYNDYVNGIGAAQIVRTYGDTDNGKPWTLVTVLRALSDKRVADDARYPSIIDKALYERVQAMKLSPSKGNTHQKYMLNLFAGMSRCPLCGQAIITKRNSHGGLFTVCLGKRTDKTCTARSIAYNALERPLLNAIVGLDFSEVYGQEESNVLTLRDQWIQNERDIAAFRERLTKASRHEKFAILDELEVMNREQDELTIRLKSVDAPKDITLTYDDDKLDMNVEYRIELNNRMKKLIQRIDIVREDVSKTNYKIFCSIKYWTELLTHLVIIDVDVQRIGRGGTNQLTTTLRSVSSLDLEGNIKGNPDMEALEYWQSVVSKATQKAIESLT

SEQ ID NO: 35297 - DNA, 50 bp, Salmonella enterica
  source 1..50: mol_type = genomic DNA
gggtgtacttactataccaattgggaacagttgatgtataatgtacgcca

SEQ ID NO: 35298 - DNA, 40 bp, Salmonella enterica; identical to SEQ ID NO: 35293
  source 1..40: mol_type = genomic DNA

SEQ ID NO: 35299 - DNA, 50 bp, Salmonella enterica
  source 1..50: mol_type = genomic DNA
gggtgtacttactataccaattggggacagttgatgtataatgtacgcca

SEQ ID NO: 35300 - DNA, 40 bp, Salmonella enterica; identical to SEQ ID NO: 35295
  source 1..40: mol_type = genomic DNA

SEQ ID NO: 35301 - protein, 539 aa, Salmonella enterica
MYATIRDGEVQMKVPVWSYARVSTLNQVDGFGIQRQVNTINQFIQYLVLDHRLPFVLDTDNITQMISEGKSAFKGKNWNPKTKLGQYRKMVMDGVVPDSVLIVENIDRLTRLDPFQAVEIISGLINRGTTILEIETGMTYSRYIPESITVLTMQINRANGESKRKSVMMKKSHQNRYGNVSKVRPRWFDVVEVDGIKQYRTNNTAKAIQRMYNDYVNGIGAAQIVRTYGDTDNGKPWTLVTVLRALSDKRVADDARYPSIIDKALYERVQAMKLSPSKGNTHQKHMLNLFAGMSRCPLCGQAIITKRNSHGGLFTVCLGKRTDKTCTARSIAYNALERPLLNAIIGLDFSEVYGQEESNVLTLRDQWIQNERDIAAFRERLTKASRHEKFAILDELEVMNREQDELTIRLKSVDAPKDITLTYDDDKLDMNVEYRIELNNRMKKLIQRIDIVREDVSKTNYKIFCSIKYWTELLTHLVIIDVDVQRIGRGGTNQLTTTLRSVSSLDLEGNIKGNPDMEALEYWQSVVSKATQKAIESLT

SEQ ID NO: 35302 - DNA, 50 bp, Salmonella enterica
  source 1..50: mol_type = genomic DNA
gggcgtacttactataccaattgggaacagttagtgtataatgtacgcca

SEQ ID NO: 35303 - DNA, 40 bp, Salmonella enterica; identical to SEQ ID NO: 35293
  source 1..40: mol_type = genomic DNA

SEQ ID NO: 35304 - DNA, 50 bp, Salmonella enterica
  source 1..50: mol_type = genomic DNA
gggcgtacttactataccaattggggacagttagtgtataatgtacgcca

SEQ ID NO: 35305 - DNA, 40 bp, Salmonella enterica; identical to SEQ ID NO: 35295
  source 1..40: mol_type = genomic DNA

SEQ ID NO: 35306 - protein, 539 aa, Salmonella enterica
MYATIRDGEVQMKVPVWSYARVSTLNQVDGFGIQRQVNTINQFIQYLVLDHRLPFVLDTDNITQMISEGKSAFKGKNWNPKTKLGQYRKMVMDGVVPDSVLIVENIDRLTRLDPFQAVEIISGLINRGTTILEIETGMTYSRYIPESITVLTMQINRANGESKRKSVMMKKSHQNRYGNVSKVRPRWFDVVEVDGIKQYRTNNTAKAIQRMYNDYVNGIGAAQIVRTYGDTDNGKPWTLVTVLRALSDKRVADDARYPSIIDKELYERVQALKISPSKGKTHQKNMLNLFAGMSRCPLCGQAIITKRNSHGGLFTVCLGKRTDKTCTARSIAYNALERPLLNAIVGLDFSEVYGQEESNVLTLRDQWIQNERDIAAFRERLTKASRHEKFAILDELEVMNREQDELTIRLKSVDAPKDITLTYDDDKLDMNVEYRIELNNRMKKLIQRIDIVREDVSKTNYKIFCSIKYWTELLTHLVIIDVDVQRIGRGGTNQLTTTLRSVSSLDLEGNIKGNPDMEALEYWQSVVSKATQKAIESLT

SEQ ID NO: 35307 - DNA, 50 bp, Salmonella enterica; identical to SEQ ID NO: 35302
  source 1..50: mol_type = genomic DNA

SEQ ID NO: 35308 - DNA, 40 bp, Salmonella enterica; identical to SEQ ID NO: 35293
  source 1..40: mol_type = genomic DNA

SEQ ID NO: 35309 - DNA, 50 bp, Salmonella enterica; identical to SEQ ID NO: 35304
  source 1..50: mol_type = genomic DNA

SEQ ID NO: 35310 - DNA, 40 bp, Salmonella enterica; identical to SEQ ID NO: 35295
  source 1..40: mol_type = genomic DNA

SEQ ID NO: 35311 - protein, 529 aa, Salmonella enterica; identical to SEQ ID NO: 35296

SEQ ID NO: 35312 - DNA, 50 bp, Salmonella enterica
  source 1..50: mol_type = genomic DNA
tgggtgtacttactataccaattggaacagttgatgtataatgtacgcca

SEQ ID NO: 35313 - DNA, 40 bp, Salmonella enterica; identical to SEQ ID NO: 35293
  source 1..40: mol_type = genomic DNA

SEQ ID NO: 35314 - DNA, 50 bp, Salmonella enterica
  source 1..50: mol_type = genomic DNA
tgggtgtacttactataccaattgggacagttgatgtataatgtacgcca

SEQ ID NO: 35315 - DNA, 40 bp, Salmonella enterica; identical to SEQ ID NO: 35295
  source 1..40: mol_type = genomic DNA

SEQ ID NO: 35316 - protein, 539 aa, Salmonella enterica; identical to SEQ ID NO: 20886

SEQ ID NO: 35317 - DNA, 50 bp, Salmonella enterica; identical to SEQ ID NO: 35302
  source 1..50: mol_type = genomic DNA

SEQ ID NO: 35318 - DNA, 40 bp, Salmonella enterica; identical to SEQ ID NO: 35293
  source 1..40: mol_type = genomic DNA

SEQ ID NO: 35319 - DNA, 50 bp, Salmonella enterica; identical to SEQ ID NO: 35304
  source 1..50: mol_type = genomic DNA

SEQ ID NO: 35320 - DNA, 40 bp, Salmonella enterica; identical to SEQ ID NO: 35295
  source 1..40: mol_type = genomic DNA

SEQ ID NO: 35321 - protein, 500 aa, Moorella thermoacetica
MKAVAYARFSSDNQREESITAQLRAIHDYAEKNGVIIVREYVDEARSATTDDRPEFLRMIEEVTSGCLQVDYVYVHKLDRFARNRYDSAIYRRKLASKGIKLIAVTQPLDDSPESVILEAMLEAMAEYYSKNLGREVMKGMRETAFQCRHTGGKPPLGYDIEPGSNKYIINEREAEAVRIIFSMYLQGCSYKEIADYLNSHGYRTKLGSQFVKTSLYEILRNEKYTGVFVFNRAASKTGGKRNNHKSKDDEEIIRIPGGLPAIIDPSTFREVQKMMDRRKHAPGAAKAKEVYLLTGLVWCGACGGPMIGNRRRAGRNKDIYAAYECNNRKRLKACHAKSINKEYLEQYVLNELIRVIFSDEGIPILVKKLNEANKQRLERNSKELDYIRQQLSEVDKKISNIVNAIADGLYSPTMKETLAKLEEEKTRFQVAIDEIQRANVVELTEDMIKAYLEKDKQVILSGDLQACKAIISTYVDKVIVYEDHIDVILKIVDFTGGGG

SEQ ID NO: 35322 - DNA, 50 bp, Moorella thermoacetica
  source 1..50: mol_type = genomic DNA
attgtggatttcactggtggaggcggggcgcatactttcaaatccacaat

SEQ ID NO: 35323 - DNA, 40 bp, Moorella thermoacetica
  source 1..40: mol_type = genomic DNA
gcatacagatggtggaggcggggggagtcgaacccccgtc

SEQ ID NO: 35324 - DNA, 50 bp, Moorella thermoacetica
  source 1..50: mol_type = genomic DNA
attgtggatttcactggtggaggcagggcgcatactttcaaatccacaat

SEQ ID NO: 35325 - DNA, 40 bp, Moorella thermoacetica
  source 1..40: mol_type = genomic DNA
gcacactcatgggcgaggcagcgggactggagcccacgtc

SEQ ID NO: 35326 - protein, 500 aa, Moorella thermoacetica
MKAVAYARFSSDNQREESITAQLRAIHDYAEKNGVIIVREYVDEARSATTDDRPEFLRMIEEVTSGCLQVDYVYVHKLDRFARNRYDSAIYRRKLASKGIKLIAVTQPLDDSPESVILEAMLEAMAEYYSKNLGREVMKGMRETAFQCRHTGGKPPLGYDIDPGSNKYIINEREAEAVRIIFSMYLQGCSYKEIADYLNSHGYRTKLGSQFVKTSLYEILRNEKYTGVFVFNRAASKTGGKRNNHKSKDDEEIIRIPGGLPAIIDPSTFREVQKMMDRRKHAPGAAKAKEVYLLTGLVWCGACGGPMIGNRRRAGRNKDIYAAYECNNRKRLKACHAKSINKEYLEQYVLNELIRVIFSDEGISILVKKLNEANKQRLERNSKELDYTRQQLVEVEKKISNIVNAIADGLYSPTMKETLAKLEEEKARLQVAINEIQRANVVELTEDMIKAYLEKDKQVILSGDLQACKAIISTYVDKVIVYEDHIDVILKIVDFTGGGG

SEQ ID NO: 35327 - DNA, 50 bp, Moorella thermoacetica; identical to SEQ ID NO: 35322
  source 1..50: mol_type = genomic DNA

SEQ ID NO: 35328 - DNA, 40 bp, Moorella thermoacetica; identical to SEQ ID NO: 35323
  source 1..40: mol_type = genomic DNA

SEQ ID NO: 35329 - DNA, 50 bp, Moorella thermoacetica; identical to SEQ ID NO: 35324
  source 1..50: mol_type = genomic DNA

SEQ ID NO: 35330 - DNA, 40 bp, Moorella thermoacetica; identical to SEQ ID NO: 35325
  source 1..40: mol_type = genomic DNA

SEQ ID NO: 35331 - protein, 500 aa, Moorella thermoacetica
MKAVAYARFSSDNQREESITAQLRAIHDYAEKNGVIIVREYVDEARSATTDDRPEFLRMIEEVTSGCLQVDYVYVHKLDRFARNRYDSAIYRRKLASKGIKLIAVTQPLDDSPESVILEAMLEAMAEYYSKNLGREVMKGMRETAFQCRHTGGKPPLGYDIDPGSNKYIINEREAEAVRIIFSMYLQGCSYKEIADYLNSHGYRTKLGSQFVKTSLYEILRNEKYTGVFVFNRAASKTGGKRNNHKSKDDEEIIRIPGGLPAIIDPSTFREVQKMMDRRKHAPGAAKAKEVYLLTGLVWCGACGGPMIGNRRRAGRNKDIYVAYECNNRKRLKTCHAKSINKEYLEQYVLNELIRVIFSDEGISILVKKLNEANKQRLERNSKELDYTRQQLLEVEKKISNIVNAIADGLYSPTMKETLAKLEEEKARLQVAINEIQRANVVELTEDMIKAYLEKDKQVILSGDLQACKAIISTYVDKVIVYEDHIDVILKIVDFTGGGG

SEQ ID NO: 35332 - DNA, 50 bp, Moorella thermoacetica; identical to SEQ ID NO: 35322
  source 1..50: mol_type = genomic DNA

SEQ ID NO: 35333 - DNA, 40 bp, Moorella thermoacetica; identical to SEQ ID NO: 35323
  source 1..40: mol_type = genomic DNA

SEQ ID NO: 35334 - DNA, 50 bp, Moorella thermoacetica; identical to SEQ ID NO: 35324
  source 1..50: mol_type = genomic DNA

SEQ ID NO: 35335 - DNA, 40 bp, Moorella thermoacetica; identical to SEQ ID NO: 35325
  source 1..40: mol_type = genomic DNA

SEQ ID NO: 35336 - protein, 544 aa, Sphingobium cupriresistens
MTRIALYARYSSDQQSAASIEDQLRICRERAEREGWHVVHSYQDAAISGASMILRPGIQSLLQDAQAGKFDIVIAEALDRVSRDQADVATLYKHLQFARVPLVTLAEGEISELHVGLKGTMNALFLKDLAKKTHRGQRGRVEKGFSAGPVGYGYRTVRRLSSEGELVRGECRIAPAEAPIVERIFREFAAGKSPRGIARDLNRDGIPGPSGRPWSDTTIRGKPKLGIGILNNEMYVGVRVWNRKQAVKDPRTGQTVRRPNPESEWVRVEVPGLRIVSDDMWQAVKRRRDVLVEQYKPLLDGLRAAQASRMHRARRPVTLLSGLVECGVCGGTVGLAVNGRFGCINHHRRHICANNRTILRKKLEERALAGLRERLVSPEKVQAAVAAYAEHINRENREQRVQIEADRRALDKIERAIAGIMTAIEDGLYQPTMKARMAELERQKAEIATRMASAPQAVPDVHPGIAGIYEREVERFSQALEDPETRLDASDAIRSLIHRIVLHPGDKWGEIHATLHGALMGILDFAKETPRPAPVVTTKVAQGS

SEQ ID NO: 35337 - DNA, 50 bp, Sphingobium cupriresistens
  source 1..50: mol_type = genomic DNA
tgttacgacaaaggtggctcagggttcgcgggcccgcctttattgtaatt

SEQ ID NO: 35338 - DNA, 40 bp, Sphingobium cupriresistens
  source 1..40: mol_type = genomic DNA
accgcctgagaccccagccttcgctggggtgacgataagt

SEQ ID NO: 35339 - DNA, 50 bp, Sphingobium cupriresistens
  source 1..50: mol_type = genomic DNA
tgttacgacaaaggtggctcagggcccgcgggcccgcctttattgtaatt

SEQ ID NO: 35340 - DNA, 40 bp, Sphingobium cupriresistens
  source 1..40: mol_type = genomic DNA
acctcctgagacccccgccccagctgggcagcctctgagc

SEQ ID NO: 35341 - protein, 548 aa, Mycolicibacterium fortuitum; identical to SEQ ID NO: 9226

SEQ ID NO: 35342 - DNA, 50 bp, Mycolicibacterium fortuitum; identical to SEQ ID NO: 17512
  source 1..50: mol_type = genomic DNA

SEQ ID NO: 35343 - DNA, 40 bp, Mycolicibacterium fortuitum
  source 1..40: mol_type = genomic DNA
cgcctcacgctgtgtccgaggggggacttgaacccccacg

SEQ ID NO: 35344 - DNA, 50 bp, Mycolicibacterium fortuitum
  source 1..50: mol_type = genomic DNA
agtcgtgtcgccggacgtgtccgatgggggacttggccacttacgacacg

SEQ ID NO: 35345 - DNA, 40 bp, Mycolicibacterium fortuitum
  source 1..40: mol_type = genomic DNA
cacctcaccctgtgggggatgggggactcagagccccacc

SEQ ID NO: 35346 - protein, 548 aa, Mycolicibacterium fortuitum; identical to SEQ ID NO: 13166

SEQ ID NO: 35347 - DNA, 50 bp, Mycolicibacterium fortuitum; identical to SEQ ID NO: 442
  source 1..50: mol_type = genomic DNA

SEQ ID NO: 35348 - DNA, 40 bp, Mycolicibacterium fortuitum
  source 1..40: mol_type = genomic DNA
cgcctcacactgtgtccgaggggggacttgaacccccacg

SEQ ID NO: 35349 - DNA, 50 bp, Mycolicibacterium fortuitum
  source 1..50: mol_type = genomic DNA
agtcgtgtcgccggatgtgtccgatgggggacttgtccgtctacgacacg

SEQ ID NO: 35350 - DNA, 40 bp, Mycolicibacterium fortuitum; identical to SEQ ID NO: 35345
  source 1..40: mol_type = genomic DNA

SEQ ID NO: 35351 - protein, 484 aa, Mycobacteroides abscessus
MAGQSTAQVTQAIIYARVSSDKAAGRSVEEQEHECRAECERRAWPVAHVLTDNDLSASRFATKDRPEYKRLRDLLAPGDVLVTWEASRAQRDLARYVELRDLCAERGVRWSYSGRLFDLTDGDDRFATGLDALLAEKEAEQTRVRILRAHRANLAEGKPHGRVPYGYRIVRDPDTGKAVGRVVDPVRGPLVAEAARRVLDGQSLASMVRWIATKDPDPKWNEAKLRRILVNPTTAGYRTHSITEKGKRGPQVIHGEGTWEPIITREQHADLVALFATRKSGPRGSEPRHLLSGIVTCGVCENYLWLGKGGRKKDGSHYDVYSCQNRHAARNKQALDEVITSVIEGMLASPEALAALAAPPPDPSPSAVAELEELKRQLRGVEDQMAENKMPADVGARVATRLTERIAASEAAAAPVYTEPIVRELATAPDPVALWRSLALPQKREFIRAVMTVKIERVGRGRWHAKEAGIIITPRSKTSTVTPA

SEQ ID NO: 35352 - DNA, 50 bp, Mycobacteroides abscessus
  source 1..50: mol_type = genomic DNA
gtaagggggtacctagccaaataatggttatttgtcgtaaactccgcttt

SEQ ID NO: 35353 - DNA, 40 bp, Mycobacteroides abscessus
  source 1..40: mol_type = genomic DNA
gtagacggtgtcgaagaagtgcttgagggcgccggacatg

SEQ ID NO: 35354 - DNA, 50 bp, Mycobacteroides abscessus
  source 1..50: mol_type = genomic DNA
gtaagggggtacctagccaaataacagttatttgtcgtaaactccgcttt

SEQ ID NO: 35355 - DNA, 40 bp, Mycobacteroides abscessus
  source 1..40: mol_type = genomic DNA
gtagccggcctcgcaggagcactggaaggagccggccagg

SEQ ID NO: 35356 - protein, 484 aa, Mycobacteroides abscessus
MAGQSTAQVTQAIIYARVSSDKAAGRSVEEQEHECRAECERRAWPVAHVLTDNDLSASRFATKDRPEYKRLRDLLAPGDVLVTWEASRAQRDLARYVELRDLCAERGVRWSYSGRLFDLTDGDDRFATGLDALLAEKEAEQTRVRILRAHRANLAEGKPHGRVPYGYRIVRDPDTGKAVGRVVDPVRGPLVAEAARRVLDGQSLASMVRWIATKDPDPKWNEAKLRRILVNPTTAGYRTHSITEKGKRGPQVIHGEGTWEPIITREQHADLVALFATRKSGPRGSEPRHLLSAIVTCGVCENYLWLGKGGRKKDGSHYDVYSCQNRHAARNKQALDEVITSVIEGMLASPEALAALAAPPPDPSPSAVAELEELKRQLRGVEDQMAENKMPADVGARVATRLTERIAASEAAAAPVYTEPIVRELATAPDPVALWRSLALPQKREFIRAVMTVKIERVGRGRWHAKEAGIIITPRSKTSTVTPA

SEQ ID NO: 35357 - DNA, 50 bp, Mycobacteroides abscessus; identical to SEQ ID NO: 35352
  source 1..50: mol_type = genomic DNA

SEQ ID NO: 35358 - DNA, 40 bp, Mycobacteroides abscessus; identical to SEQ ID NO: 35353
  source 1..40: mol_type = genomic DNA

SEQ ID NO: 35359 - DNA, 50 bp, Mycobacteroides abscessus; identical to SEQ ID NO: 35354
  source 1..50: mol_type = genomic DNA

SEQ ID NO: 35360 - DNA, 40 bp, Mycobacteroides abscessus; identical to SEQ ID NO: 35355
  source 1..40: mol_type = genomic DNA

SEQ ID NO: 35361 - protein, 461 aa, Mycobacterium avium
MDAAIYLRISEDRTGEQLGVTRQREDCMTLCKERGWMPVEYLDNDTSATNGKPRRAYERMLADAREGRIGAVVVWDLDRLHRRPIELEAFMALADEKHLALATVSGDVDLSKPQGRLVARLKGSVAAHEGEHRKARQLRATRQLAERGVPNWTRAFGYLGDTRQPDPKTAPLVKQAYAATLSGASLGDVCRLFNDAGAHTVNGKPWTPTVVSKFLRKPRNAGLRTYGVRYGAVTRNDVVGKGNWPPLVDEQTFWAAQAILDAPGRTPGRKSVRKHLLTGVLGCGKCGGYLAGAPDTKTKKLMYRCKQCLSLSIRAEYVEPLLLDIVGGRLAMADAVDLLKAEIQDQAQAEAINAEINALYGELDALAVERAEGLMTARQVKISSDIIGEKIAKLERRQHDQERVRVFRDLPLGTPQVVDAVRALSPDRLRAVLGVLMSITVMPVGKSGRAFNPDRVQVAWH

SEQ ID NO: 35362 - DNA, 50 bp, Mycobacterium avium
  source 1..50: mol_type = genomic DNA
gaaggtacttacccaaaccgcggccaaccgtgggctgctgaagtactctt

SEQ ID NO: 35363 - DNA, 40 bp, Mycobacterium avium
  source 1..40: mol_type = genomic DNA
gccgcatctcgatcacggacaaccccgcaccaacccctac

SEQ ID NO: 35364 - DNA, 50 bp, Mycobacterium avium
  source 1..50: mol_type = genomic DNA
gaaggtacttacccaaaccgcggcgcaccgtgggctgctgaagtactctt

SEQ ID NO: 35365 - DNA, 40 bp, Mycobacterium avium
  source 1..40: mol_type = genomic DNA
cccccatctccaccccagggcaccccgcgccatcccctgc

SEQ ID NO: 35366 - protein, 472 aa, Rhodococcus ruber
MSTYTLLSMQAVIYARISRDREGAGVGVERQAADCRDLADRLGWTVVGTFTDNDVSAYSGKLRPGYRALLDTLEAGKAGAVLAWHTDRLHRSPVELEEFIDVCDRRGIDVRTVRAGTVDLSTASGKMVARMLGAAARHEVEHNIERQKRAKLQAALEGSFRGGRRSFGFEADGMTLRETEARAIRDATRRILAGTSIGQMVREWNEAGLVTAYSGKAWTSRDLRKVLTRPRNASLVTHEGEIVGSGKWPAIVDPDEWRALMALLSDPARRRSTSIERKYLGSGLYLCGKCGKPMLTATQVGSAARPRRVYKCSGGAHLGRIADRLDEYVTELTLARLSRDDAAIALGGPAVDAAALQTERAGVQARLDELAALFADAAIDGSQLRRGSETLRAQLAAIDQRLAEARASSTLADLVLAGDDLRAVWERLSVDVQAKVVDVLMTVTILPAPRGRRPGGDYFDPEYIRIDWKAGA

SEQ ID NO: 35367 - DNA, 50 bp, Rhodococcus ruber
  source 1..50: mol_type = genomic DNA
gacagttgcagcgtgccttatgacctagcgcaatgtcaacctatacgctg

SEQ ID NO: 35368 - DNA, 40 bp, Rhodococcus ruber
  source 1..40: mol_type = genomic DNA
ggtgggcagcgtctacgacctcgccctcgcgtgcgccgtg

SEQ ID NO: 35369 - DNA, 50 bp, Rhodococcus ruber
  source 1..50: mol_type = genomic DNA
gacagttgcagcgtgccttatgacgtagcgcaatgtcaacctatacgctg

SEQ ID NO: 35370 - DNA, 40 bp, Rhodococcus ruber
  source 1..40: mol_type = genomic DNA
ggtgggccgcgggtgcgacgtgggccgcgggtgcgaggtg

SEQ ID NO: 35371 - protein, 449 aa, Mycobacterium kyorinense
MGVARQLEDCRRLAADRGWPVGAEYVDNDVSAFSGKLRQQYARMLADLESGDRDAVIVYNLDRLHRRPVELEEFVTLCESVGVRDVATVTADIDLGNDDGLFMARIFAAFAAKESGRKSARVQRKMLQNAQAGLPHGSARPFGYEDDKITVRESEAAVVREMVDRYLAGQSLRSLTIWLNETGIAPSVAKSWQTTSVRQVMSSGRIAGLREHRGEVIGAAVWPAIITAAERDRVLARLSARSVTKTRTARTYLLSGMLRCGRCGNRLYSQARHSNPQNRVRRYVCLKGPDHGGCGRLTVVAAPVEELLTESVLTRLDSPQLADVLAGKASADHDVAALAAAVEADQERLDELAGLYADGAISAREWIAARDPITERITAARRDIAAATNTTTIFELVGTGGALRAGWTDLDLGRQQAIVKAVLDHAVIAPGTPGVRRLDIGRVAPVWRV

SEQ ID NO: 35372 - DNA, 50 bp, Mycobacterium kyorinense
  source 1..50: mol_type = genomic DNA
ggggtagtttgagaacttgtaagtaaggtcataagctgttaaactacccc

SEQ ID NO: 35373 - DNA, 40 bp, Mycobacterium kyorinense
  source 1..40: mol_type = genomic DNA
cggggccaccgagttgtccaacctggtgctggtctgcccg

SEQ ID NO: 35374 - DNA, 50 bp, Mycobacterium kyorinense
  source 1..50: mol_type = genomic DNA
ggggtagtttgagaacttgtaagttcggtcataagctgttaaactacccc

SEQ ID NO: 35375 - DNA, 40 bp, Mycobacterium kyorinense
  source 1..40: mol_type = genomic DNA
cgtggccaccacgtgctcctccctgctgcagccctgccct

SEQ ID NO: 35376 - protein, 480 aa, Oerskovia enterophila
MAARRRLAQVPDVPPRAVLYLRQSTYREESISLELQETAGRDYCARMGYTVVAVEADPGISGRTWARPAVQRVMAMVEGAEADVVVLWRWSRLSRSRKDWAVAADRVDVAGGRIESATEPNDPTAAGRFARGVMTELAAFESERISEQWKEVHANRVARGLPPGGRLPWGWTWSDGAVVPDPDKAPIIVEAYRRFLAGAGIRDLTRWLNGSGARPERAQEWDNQTITQCLDSPVHAGLVVYQGKTHPGAHEGLVDVATWEAYRREREHRAGEREVKRRYLLTGIATCPCGERMAGFTVNHAARKRAPFTGYRCRTLGKTDGHGSWSIVARALDEAVRTFLEEVAADVDNHAPKQASVQVDARLEAQRIAREITALDRQLGALTGHLASGLVPEAAYVVTRDEIMGRRAHLETGLAAAERYVVAIPTDPSAIARGLLAAWDTMPVESCRAALRALVRRVDVDYESRSGRVVPVWEAVPPTA

SEQ ID NO: 35377 - DNA, 50 bp, Oerskovia enterophila
  source 1..50: mol_type = genomic DNA
ggctgtacccccgaccgcataacggacggaacaacctgctgcgcatagcc

SEQ ID NO: 35378 - DNA, 40 bp, Oerskovia enterophila
  source 1..40: mol_type = genomic DNA
gctccacgtggtgatcccggacgtgacccgcgagcacttc

SEQ ID NO: 35379 - DNA, 50 bp, Oerskovia enterophila
  source 1..50: mol_type = genomic DNA
ggctgtacccccgaccgcataacgcgcggaacaacctgctgcgcatagcc

SEQ ID NO: 35380 - DNA, 40 bp, Oerskovia enterophila
  source 1..40: mol_type = genomic DNA
ccaccaaggggagacccctcgcgtgacccacgagctcatc

SEQ ID NO: 35381 - protein, 500 aa, Vibrio fluvialis
MSGKIHPIIRVSTEKQLQGHGLESQHRAISDWISRHPEYELGTSLELDGYSAYKGQHVEKLKAFVSMLPAGDTILMTEISRLSRLPIRQSYDLLYWILDRGVNIGFVTLDQVLTNSELDDSLYLRLSILFQNAKSESEIKSFRIRNVFADRIKRIEKGTHIKTTGLPAWVEVQNNAYHVHEYHAQTLRLMFELKLETGTYEVCKWLQENRKVFPRLSGWSASRVQAILKNRAVLGDYTPFTTYHEEGRAKRKALTPIPSVYPQVIDESLFARVQQSFNQQPAGRKPRAPNPLAGIFVCPECGGSTSINRTADRVYYRCERVKDRRGCTAKSIRQKRVLDAVDALIAQVDLSRVLQPQTSPEAIHEHITDLTKKIENLVSLVAQGVELPEVGAQLQQLEQQRSALRQQLIAHKQVTTPDFKNDKNKALRLLFNYITLIPDHIYEYPNPDTGEPTSRAVDTLRFQLVDVNNWGMPEVKVPVDRLEESKDLVNNLLDTLQKAL

SEQ ID NO: 35382 - DNA, 50 bp, Vibrio fluvialis
  source 1..50: mol_type = genomic DNA
tagtgggtatttaactctcttacatctgtaggagtggtaattacccacta

SEQ ID NO: 35383 - DNA, 40 bp, Vibrio fluvialis; identical to SEQ ID NO: 26903
  source 1..40: mol_type = genomic DNA

SEQ ID NO: 35384 - DNA, 50 bp, Vibrio fluvialis
  source 1..50: mol_type = genomic DNA
tagtgggtatttaactctcttacatttgtaggagtggtaattacccacta

SEQ ID NO: 35385 - DNA, 40 bp, Vibrio fluvialis
  source 1..40: mol_type = genomic DNA
gcgagtgttcatacatacatttcttggctctccaattaag

SEQ ID NO: 35386 - protein, 502 aa, Vibrio fluvialis
MSGKIHPIIRVSTDKQLQGHGLESQHRAITDWISRHPEYELGESLELDGYSAFKGQHVEKLKAFVSMLPAGDTILLTEISRLSRLPIRQSYDLLYWILDRGVNIGFVTLDQVLTSSELDDSLYLRLSILFQNAKSESEIKSFRIRNVFADRIKRIEKGTHIKTTGLPAWVEVQDNAYHVHEYHAQTLRLMFELKLETGTYKICKWLQENRKVFPRLSGWSASRVQAILKNRAVLGDYTPFTTYHEEGRAKRKALTPIPNVYPQVIDESLFARVQQSFNQQPAGRKPRVPNPLAGIFVCPECGGSTSINRVADRVYYRCERVRDRRGCTAKSIRQKRVLYAVDALIAQVDLSRVLQPQTSPEAIHERIADLTKKIENLVNLVAQGVDLPEVGAQLQQLEQQRSALHQQLIVHKQVITPDFKKDKNKALRLLFNYITLIPDHIYEYPNPETGEPTSRTVDTLRFQLVDVNNWGMPEVKVPVDRLQQSKDLVNNLLDVYKLKSEI

SEQ ID NO: 35387 - DNA, 50 bp, Vibrio fluvialis
  source 1..50: mol_type = genomic DNA
tagtgggtatttaaccttcctacgtctgtaggcaatgttattacccacta

SEQ ID NO: 35388 - DNA, 40 bp, Vibrio fluvialis
  source 1..40: mol_type = genomic DNA
gcgagtggtaatacgtacatcgcttggcacgccaccgcag

SEQ ID NO: 35389 - DNA, 50 bp, Vibrio fluvialis
  source 1..50: mol_type = genomic DNA
tagtgggtatttaaccttcctacgtttgtaggcaatgttattacccacta

SEQ ID NO: 35390 - DNA, 40 bp, Vibrio fluvialis; identical to SEQ ID NO: 35385
  source 1..40: mol_type = genomic DNA

SEQ ID NO: 35391 - protein, 493 aa, Oscillibacter sp
MNAIYARQSVDRADSISIESQIEFCRYELKGEPYKVYADRGYSGKNTDRPAFGEMMRDMENGTIHRVVVYKLDRISRSILDFSRMMERFEANRVEFVSTTEKFDTSSPMGRAMLNICIVFAQLERETIQKRVADAYYSRSQKSLYMGGRVPYGFRLSPTTVDGVRTSMYAVNEEEAKQVRLIYELYAKPECSCGDIARCLQANGMLKNGKPWVRTRLAEILRNPVYVRADLAVYRFYRDRGTVIVNDPGDFIGTNGCYHYKGRKFAHAPPEGDYLVLAPHEGIIPADLWLKCRAKCAEGQQVRPRQKAKNTWLAGKIKCGVCGYALVDKRYPASGSRYLQCSGKMNSGDCKGGGTIYTDEIEGIIGDEIRQKLTQLGTLVKCKAKSVDSDLPEQNTQLAQVEREIAALLERLPEADGVLLRYIKQRIEELDGKKRELTERISRHQRREEGGTEIGDPSALWGMLDFDDKRQVVEHLIRVIRVTGDHVRIEWRI

SEQ ID NO: 35392 - DNA, 50 bp, Oscillibacter sp
  source 1..50: mol_type = genomic DNA
cgtagccatcctgtacgctttggcgaagcaaagcgtacaagagggagggt

SEQ ID NO: 35393 - DNA, 40 bp, Oscillibacter sp
  source 1..40: mol_type = genomic DNA
ccatttccagcgctttggcgaagggcttcggttggccaag

SEQ ID NO: 35394 - DNA, 50 bp, Oscillibacter sp
  source 1..50: mol_type = genomic DNA
cgtagccatcctgtacgctttggcctagcaaagcgtacaagagggagggt

SEQ ID NO: 35395 - DNA, 40 bp, Oscillibacter sp
  source 1..40: mol_type = genomic DNA
ccacttacagcagtgtggcctagggcctcggttttcccat

SEQ ID NO: 35396 - protein, 478 aa, Streptococcus suis
MSKMALYLRLSVDEDGTDESNSITNQRYLLNQYLDQSSDFNHWERLEFVDDGFSGTSLNRPAFQRLMADVKSGIIRHIIVKDLSRFMRDYLELGNYLENIFPFLGVRFIAINDQYDSLTSEQNGLDIDVPFRNLLNDFYAKDVSEKVKSAMNSMKRSGKNMSWLPPFGYIKDPEDRFKIIIDEAVAPIVRRIFTLYLEGNSYQTIARILNKEQVITPAERKMQISQARYEKSLRLTREQERNVWSVINVAQILKNEAYKGTYLYNTRTYIRGKHVSLPESEWERIENNHEAIISPDQFEQVARLKAKKVTHKKHSQPPKIPSILTGLIRCEHCDHSLIGHYNHQGYQYFSCRYCKGQGEKMKSCRVDRIEQSIKEKLGQEVVKSRPKASKTRVLREIERLKRQKLSFFQDYKDSLMTREDYITKKMVIDKTVRNLEEQLKEVNTFQLLSNDRLTKEIVSTHIEKVVVDCLGFFTVIYK

SEQ ID NO: 35397 - DNA, 50 bp, Streptococcus suis
  source 1..50: mol_type = genomic DNA
agtgtcagttacttgacataagagggggattgtgtcataataatgacagg

SEQ ID NO: 35398 - DNA, 40 bp, Streptococcus suis
  source 1..40: mol_type = genomic DNA
tggtgtgactttccctgggggccatgtcgagccaaatgag

SEQ ID NO: 35399 - DNA, 50 bp, Streptococcus suis
  source 1..50: mol_type = genomic DNA
agtgtcagttacttgacataagagtgggattgtgtcataataatgacagg

SEQ ID NO: 35400 - DNA, 40 bp, Streptococcus suis
  source 1..40: mol_type = genomic DNA
tggtgtggctgttccccactggcatgtccagccaaataag

SEQ ID NO: 35401 - protein, 499 aa, Nocardioides dokdonensis
MPTQRCAIYVRISVAQEASVSLDRQIEAAEQYAAARGWQVVATFRDDGVSATHNKPEDRAGWRALLDSPEKFDAVLVWKIDRLARRVLDFLHADESLQARGAGIVAVEDPVDMTTAQGRAFATLLAVFGEMEAESIRARVKAARTHLLRSGRVVGGTVPYGWRSVLNPDGAGYVLAKDPDRLDYVRGMVDRTVAGHSIYSTVQWLNEVGAPTPTGKGAWVYSTVERILRHPVLAGMTPFNPGNSTKTRGTEVLRDADGLPVVDESVAVVSVGQWRAMVKSLDERNTAQALPRALRAKTSGLLSGLVYCAGCEVRMHRGTTQGRPGYACPSCHQSVTNFEHVVVDEFLRQKGEHVRWSVVEEVYEGGATLLPEIEHRLDELDDLIRQAPNRDTRQSLQVEQGNLLDLRDEKRAESPSVRLVPTRGTQTFGEDWADAETVVDQRAVLDDAVTRLWVRRGSRGRRTDAQLLARLTFDWKDPGTLGPVDAPSDAALAAWAEEG

SEQ ID NO: 35402 - DNA, 50 bp, Nocardioides dokdonensis
  source 1..50: mol_type = genomic DNA
acgcgttgtttgataccggcctgggtacagcccggtaggcgtccggtatt

SEQ ID NO: 35403 - DNA, 40 bp, Nocardioides dokdonensis
  source 1..40: mol_type = genomic DNA
ggtcgtcttgccggcctgggtcccgccggcgaccaggacg

SEQ ID NO: 35404 - DNA, 50 bp, Nocardioides dokdonensis
  source 1..50: mol_type = genomic DNA
acgcgttgtttgataccggcctggccacagcccggtaggcgtccggtatt

SEQ ID NO: 35405 - DNA, 40 bp, Nocardioides dokdonensis
  source 1..40: mol_type = genomic DNA
ggtcctctggcccgcctggcccgcgtcgccgcccgggggg

SEQ ID NO: 35406 - protein, 538 aa, Intestinimonas butyriciproducens
MLRQATYTTPVTALYARLSKDDEQQGPSLSIENQKRILETFARDNGFLNCRFFVDDGWSGANFQRPGFMEMMDCVESGEVKCVITKDLSRMGRNYLQVGMFTEITFPKKGVRFIAINDGVDSAQGENDLTPLKNLFNEWMVRDTSKKIKAVKRAKGMSGKPTTTQPVYGYLMGEDERFIVDEEAAPVVKQIYDLCLAGNGPSKIARVLTEQGVPTPGTLEYRRTGSTRRYHPGYECKWATNTIVHILERKEYLGHLVNFKTEKVSYKVKSSVENPEEKQVIFKNAHEPIIDPDTWERVQELRKQRKRPNRYDEVGLFSGLLFCADCGSVLYQQRYENKTRKQDCYICGNYKKRTHDCTAHFIRTDLLTAGVTANLKKITAYAAKHEKQFMKLLVQQNEDGGKRRNAAKKRELEAAEKRIGELSAIFKRLYEDSVAGRITDERFAELSADYEAEQRQVREHAAELQAELSKAQEASVNAERFMNIVRRHISFEELTPTLLREFIEKIVVHECSYDENKHRRQEIEIYYSFVGKVDLPDE

SEQ ID NO: 35407 - DNA, 50 bp, Intestinimonas butyriciproducens
  source 1..50: mol_type = genomic DNA
ttacttccttatctaacaacagcaaatgcgcacggttaataaagaagcaa

SEQ ID NO: 35408 - DNA, 40 bp, Intestinimonas butyriciproducens
  source 1..40: mol_type = genomic DNA
cgctgacataccgggccggaatgcccacggtccgcagcag

SEQ ID NO: 35409 - DNA, 50 bp, Intestinimonas butyriciproducens
  source 1..50: mol_type = genomic DNA
ttacttccttatctaacaacagcagctgcgcacggttaataaagaagcaa

SEQ ID NO: 35410 - DNA, 40 bp, Intestinimonas butyriciproducens
  source 1..40: mol_type = genomic DNA
cgctgacccgccgcgccgcgccgcgcactggccgcagctg

SEQ ID NO: 35411 - protein, 628 aa, Aeromonas hydrophila
MPKPKPMIYPYSRISSAKQAKGQGLAMQQEEELLEKLKERYGMEIYGGRMVDSGKSAFHGKHIADGQLGWFLAAVQSGEVAPGSILVVSSLDRFSRQQVRRASRDLVNVLDAEVGVYSVYEGRCFCDPKGNRGNDSADIQYATAVLDRANNESATKQARTHKIRDLAIARHLRGERHESGFAYSIKVVGNDVWWVDNSDGVVRPHEQYAPLAKQIALRLIARESPLNVTKWLNTEGITCPINRSDKKAKGAWSHHVIRRFHLNRALMGEKRINQTVLDGYYPAVLTEDEYLRLVHARTCSMRPKSSGRAKVISLFAGVEQVQCRHCGAGVHLNSEAGGYVNYRCSGFKTELACPGWSKRARDIESALLSVCLAETWKDPEQLPSSRVPVIQGEIYRLQASLDNLVEMARDKGFPKILISEIADLEAKIERLDSELEQARVEEVAKQVHSAASIRERWKAITDNVLDPTNDESRHHMRELLRDSIKSFRIGRPSYMGVEDRENALKAREMLDAAARGAIVLEEDERKFLEGVRNSLFNDEGKSKGHERFTVVLEMEFINGTRRVVTIGRNGPIAVAGIEREQLPPEVKAQLGEAPASLFNTYAPISLDDEAWLQEEFKGFPTNRETSDQ

SEQ ID NO: 35412 - DNA, 50 bp, Aeromonas hydrophila
  source 1..50: mol_type = genomic DNA
tacccccgacaaagtaactatggctggccgtagtgtctatgttagatgga

SEQ ID NO: 35413 - DNA, 40 bp, Aeromonas hydrophila
  source 1..40: mol_type = genomic DNA
atcctccagcgcgccgggctgaccgtaggcgccgttgttg

SEQ ID NO: 35414 - DNA, 50 bp, Aeromonas hydrophila
  source 1..50: mol_type = genomic DNA
tacccccgacaaagtaactatggcgagccgtagtgtctatgttagatgga

SEQ ID NO: 35415 - DNA, 40 bp, Aeromonas hydrophila
  source 1..40: mol_type = genomic DNA
atcctccggcccgcagggcgaggcggagacgcggtgtttg

SEQ ID NO: 35416 - protein, 526 aa, Sphingobacterium mizutaii
MSDTLFFDTFAKGKKEPKAMKTNKDCVIYTRVSSQQQADNLSLATQLKACTLYAERMQYNIAATFGGTYESAETDERKQFTAMISFVKRFKGKISYILVYSLERFSRNDNSIWLTNELRRLGIEIVSVTQPIDTSSASGQMQQKMLFLFGEFDNKLRRQKCMDGIRDTLLDGDWPTKPPMGFDAVRKNGKRKIIINEKGRLIRQAFYWKAFDNLSIEEIRVRLKEKGLKVCHQHLSKIFRNPFYCGKMVHNMLEGEVVNGNQEQMVSKEVFLKVNGLLKENAQGYRINEENAEIPLKRFLMCDHCGKPMRGYIVKRKNLYYYKCNTKACNNNKSANALNNLFEQLLHTFKVDTAKDMIKAITKQAVATFNQLTAGDQDEYRNLQNQHSDILKKIDRLEERYIEEEISGELYHKYRNKYNEEKAEIEKNLMRLSKQVSNLDESVGSAIKIALELPLKWVSADYNTKKRIQFLLFPEGITYSKKTDECRTPRINRFFSYIAYFQQIISNKKRGIPELGLDFTSFATLV

SEQ ID NO: 35417 - DNA, 50 bp, Sphingobacterium mizutaii
  source 1..50: mol_type = genomic DNA
ttttacctctttcgcaactttggtagagtcgagttgcggaaagtctaacc

SEQ ID NO: 35418 - DNA, 40 bp, Sphingobacterium mizutaii
  source 1..40: mol_type = genomic DNA
agatgagcttttttccagtagcggggagcaggatcgaact

SEQ ID NO: 35419 - DNA, 50 bp, Sphingobacterium mizutaii
  source 1..50: mol_type = genomic DNA
ttttacctctttcgcaactttggtctagtcgagttgcggaaagtctaacc

SEQ ID NO: 35420 - DNA, 40 bp, Sphingobacterium mizutaii
  source 1..40: mol_type = genomic DNA
agctcagcttgtttcaagtctgggggttcatgtacgaact

SEQ ID NO: 35421 - protein, 542 aa, Paracoccus denitrificans
MKVAIYARYSSDQQRDASITDQFRMCRLRAEKEGWRVVEEYSDHSISGASMIQRPGIQALVMDSTRGRFDLVLAEALDRISRDQEDIAGIYKRMRYADVKMFTLSEGEISELHVGLKGTMNALFLKDLADKTRRGQRGRVEAGKSGGGNSYGYDVVKKFDGDGEPSRGDRTINAAQAEVVRRIFRDYAAGKSAKAIAMALNKDGIPAPSGGDWGFSTINGNPKRGNGILNNEMYVGRIVWNRQRFIKDPDTGKRQARPNPEEDWVIQEVPELRILDDDLWNAVKARQKTNTVARDARGIADVRKVNHRRRPKYLFSGLTKCACCGGGYSAISKELIGCSTARNKGTCDNRMNIRRDELESRVLNALRTRLVDPDLFAEFCDAYTRETNRLRMESGAGIDKAEAELKRIAREEEKLMDLYMRDAISIEAVKERGDKLRARKAELQDFLASTDEPPPLLHPSMALQYRARVQQLYETLQSDDETQRIEAAEIIRSLIDRIVLTPGEDRIEIDVQGDLAGILTLSAQRKNPAADAAGAQVKMVAG

SEQ ID NO: 35422 - DNA, 50 bp, Paracoccus denitrificans
  source 1..50: mol_type = genomic DNA
ggcgcaagtaaagatggttgcgggggcacgcaaccatctttacttgcgac

SEQ ID NO: 35423 - DNA, 40 bp, Paracoccus denitrificans
  source 1..40: mol_type = genomic DNA
aattatcgttggttgcgggggtaggatttgaacctacgac

SEQ ID NO: 35424 - DNA, 50 bp, Paracoccus denitrificans
  source 1..50: mol_type = genomic DNA
ggcgcaagtaaagatggttgcgggtccacgcaaccatctttacttgcgac

SEQ ID NO: 35425 - DNA, 40 bp, Paracoccus denitrificans
  source 1..40: mol_type = genomic DNA
tatcctcgttggttgtgcatctgggacttgaacctaggtc

SEQ ID NO: 35426 - protein, 630 aa, Enterobacter chuandaensis
MRFSSVKQREGNSLERQQDTALKIAARYNLELDTTAFHDLGMSAFKGRNAHEGKLSEFIKQIGVKVPVGSWLVVENLDRISRDDAWTALDIFKSILSKGIVVVTGMDEKVYKYADVKNNPTDLIISLLMFTRAHDESLTKKNRVEAQARSLIRYNLTRKAGTPAKAIESVGQNVWWVDTKSGYVTPHPMYFSAAQKIIELKQNGETLLGIQRYLNEHYPAPKKRIYKDQTGQALKPKTEQWGKHLIRTFLNPTVYGQKVFTLDKRDESGVVIYDPDSEQPLKETFVIPDYYPALISEIDYLTLSKLDRHRAVTRSSSKYPEGNPEPEIPLLSGIGILFCGKCGSFMFKSGSNENKYRYICGSKIVQGKPCGKKGFTSYQLEHTILQLIADHVWNNHQEDKTAWYESEIEKTSESIDKLLKLAALTDSLEELAEQIRSYKHKKATLEREFQQYKISRSEIQTTGWDQFRNFDVHDTKNPDRKRIRLKIKQAIKRINCYDIDGRHGHFEVTFADETKQRIVIKFNRNRSPGVSYVEAQTVNDHDLLKMQGFVMHSFIDELISPDKFAQQIKDKHEVSILNPTFITKLEDGVNRDEGNGLAIKVDGTTSKSYATVNGIKYEINSLEDLEKLSQ

SEQ ID NO: 35427 - DNA, 50 bp, Enterobacter chuandaensis
  source 1..50: mol_type = genomic DNA
actatgtacaattgactatcaggcttgcctaacatataattattcactgt

SEQ ID NO: 35428 - DNA, 40 bp, Enterobacter chuandaensis
  source 1..40: mol_type = genomic DNA
gcagcgggtattggcgggcttgccctccggcatacctgga

SEQ ID NO: 35429 - DNA, 50 bp, Enterobacter chuandaensis; identical to SEQ ID NO: 35427
  source 1..50: mol_type = genomic DNA

SEQ ID NO: 35430 - DNA, 40 bp, Enterobacter chuandaensis
  source 1..40: mol_type = genomic DNA
ggtgctggtataggctgggttgctctccagcaaccctgga

SEQ ID NO: 35431 - protein, 638 aa, Enterobacter asburiae
MKPKLYSYVRFSSVKQREGNSLERQQDTALKIATRYNLELDTTAFHDLGMSAFKGKNAHEGKLSEFIKQIGVKVPVGSWLVVENLDRISRDDAWSALDIFKSILSKGIVVVTGMDEKVYKYADVKNNPTDLIISLLMFTRAHDESLTKKNRVEAQARSLIRHNLTREPGTPAKAIESVGQNVWWVDTKSGYVTPHSIYFAAAQKIIELKQNGETLLGIQRYLNEHYTAPKKRVYKDKTGQALTPKTEQWGKHLIRTFLNPTVHGQKIFTLDKRDESGAIIYDSESDEPLKETFIIPDYYPALMSEVDYLTLSKLDRHRAVTRSSSTYPGGNPEPEIPLLSGIGILFCGKCGSFMFKSGSSENKYRYICGSKIVQGKPCGKKGFTSYQLEHTVLQLIADHVWNNHQEDKTAWYESEIEKASEAVKKLLKLATLTDNIEELADQINANKQKKITLEKEFQQYKISRSEIQTTGWDQFRHFDVHDTKNPERKRIRLKVKQAIKRIECYDIDGRHSHFEVTFADETKQRIVIKFNRNRSPGISYVEAQTVNDHDLLKMQGLVLHSFIDELISPEKFAQHIKDKHEVSILNPTFITELEDGVTRDEDSGMAIRVDGITSKSYATVNGIKYEINSLEDLKKLSQ

SEQ ID NO: 35432 - DNA, 50 bp, Enterobacter asburiae
  source 1..50: mol_type = genomic DNA
actgagaataattgactgttaggtttccctaacatataattattcactgt

SEQ ID NO: 35433 - DNA, 40 bp, Enterobacter asburiae; identical to SEQ ID NO: 4743
  source 1..40: mol_type = genomic DNA

SEQ ID NO: 35434 - DNA, 50 bp, Enterobacter asburiae; identical to SEQ ID NO: 35432
  source 1..50: mol_type = genomic DNA

SEQ ID NO: 35435 - DNA, 40 bp, Enterobacter asburiae; identical to SEQ ID NO: 35430
  source 1..40: mol_type = genomic DNA

SEQ ID NO: 35436 - protein, 531 aa, Clostridium chauvoei
MIKIRAAIYVRKSRLSEKGESINNQIDLCKKYFYNLQLDTSIEFLVYQDEGFSGGNTNRPEFQKLIRDIKKKRFNYLICYKLDRISRNVADFTSTLKILEENNVNFISITEQFDTTSVMGRAMINISATFAQMERETIAERIRDNMLELSKTGRWLGGTCPLGFKSTSVNYESNGHKKKMYKLQVVDNEMDIVKLIFNLYIEKKSCSPIARYLCSNGIKGKNGGDFSRNTVLQILTNPVYCTADKKALDYFKNLGATIEGNANSNCGIMAYNKRKNGKKDNPINEWIISTGAHIGVISSTQWIQCQNILNDIRKKPNNRTGTGSKFLLSGLLRCAHCNSSMCSWSRNNPNGKYERYYRCELKNRASNRFICKMLNADKAESFVIDLLKNLDIKTIENYKNNSTIENASSIERKKTMLNKTLNENNKIISGLIKKLALLDDMDILNTIQNEIKSLKTENKTIEKNINNLSIKSFVVEDEKENKKAFIESLKLFKKTIDLIGDIEIKRNMIENLVEYFTYNSETKQIKFKLRL

SEQ ID NO: 35437 - DNA, 50 bp, Clostridium chauvoei
  source 1..50: mol_type = genomic DNA
acttgtgtaaatgacttggttgtatctgcaacttattcttatacacaaat

SEQ ID NO: 35438 - DNA, 40 bp, Clostridium chauvoei
  source 1..40: mol_type = genomic DNA
tacttgctgcattgttttgtctgctccttgacctgttgct

SEQ ID NO: 35439 - DNA, 50 bp, Clostridium chauvoei
  source 1..50: mol_type = genomic DNA
acttgtgtaaatgacttggttgtaagtgcaacttattcttatacacaaat

SEQ ID NO: 35440 - DNA, 40 bp, Clostridium chauvoei
  source 1..40: mol_type = genomic DNA
tactttctgggttgttgtgagaactccgtgagctgatgca

SEQ ID NO: 35441 - protein, 531 aa, Clostridium chauvoei
MIKIRAAIYVRKSRLSEKGESINNQIDLCKKYFYNLQLDTSIEFLVYQDEGFSGGNTNRPEFQKLIRDIKKKRFNYLICYKLDRISRNVADFTSTLKILEENNVNFISITEQFDTTSVMGRAMINISATFAQMERETIAERIRDNMLELSKTGRWLGGTCPLGFKSTSVNYESNGHKKKMYKLQVVDNEMDIVKLIFNLYIEKKSCSPIARYLCSNGIKGKNGGDFSRNTVLQILTNPVYCTADKKALDYFKNLGATIEGNANSNCGIMAYNKRKNGKKDNPINEWIISTGAHIGVISSTQWIQCQNILNDIRKKPNNRTGTGSKFLLSGLLRCAHCNSSMCSWSRNNPNGKYERYYRCELKNRASNRCICKMLNADKAESFVIDLLKNLDIKTIENYKNNSTIENASSIERKKTMLNKTLNENNKIISGLIKKLALLDDMDILNTIQNEIKSLKTENKTIEKNINNLSIKSFVVEDEKENKKAFIESLKLFKKTIDLIGDIEIKRNMIENLVEYFTYNSETKQIKFKLRL

SEQ ID NO: 35442 - DNA, 50 bp, Clostridium chauvoei; identical to SEQ ID NO: 35437
  source 1..50: mol_type = genomic DNA

SEQ ID NO: 35443 - DNA, 40 bp, Clostridium chauvoei; identical to SEQ ID NO: 35438
  source 1..40: mol_type = genomic DNA

SEQ ID NO: 35444 - DNA, 50 bp, Clostridium chauvoei; identical to SEQ ID NO: 35439
  source 1..50: mol_type = genomic DNA

SEQ ID NO: 35445 - DNA, 40 bp, Clostridium chauvoei; identical to SEQ ID NO: 35440
  source 1..40: mol_type = genomic DNA

SEQ ID NO: 35446 - protein, 493 aa, Streptomyces europaeiscabiei
MSYPAHTVFVMSRSKLPKAAITPGEPAAIYCRISHTRDEDQTGVDRQERICREIAERLQLRVESSHIYVDNNRSAWQRNRKRPGWEEMLRAMGEGEIRHVIVYHPDRLMRQPKDLEELLSIADDKRVLLHGEANRRDLSDPDDRFILRIEVAHACRSSDDTSRRLKDALKEHAREGRPHVGNRPYGYTRDGRAIVEKEAEIVREVYRRFLDGESPNRIAQDLAARDIPTSKGKTWNPENVRHLLASHFVAGLRFHLGEEVAIGTWPAIIDRGQWDEVQRLKEYRAQQHRDTKKRPLRNYILRGVVTCACGARMSGSNSVRYPYYRCTRADNTDQDKCNRSVSAVPLEAFVRDVTIKVLTKLDTAGYEPAATTRPEADVLADEKDRAKLGELKELWLNDDDFTTADFQSMRAPILKRMKERQRKTVKRPIAVLEGIAGPDAETNWKRLEEAEDHARMNAIYRFLFAAVIVRPPTRKGRGFDTDRVDIEPNPLDY

SEQ ID NO: 35447 - DNA, 50 bp, Streptomyces europaeiscabiei
  source 1..50: mol_type = genomic DNA
tcgctgtatgggcaggacttgaccgatgtcatatccggctcatacagtgt

SEQ ID NO: 35448 - DNA, 40 bp, Streptomyces europaeiscabiei
  source 1..40: mol_type = genomic DNA
cgccgcccccacgatgatcgacgactcccgcagggccgcg

SEQ ID NO: 35449 - DNA, 50 bp, Streptomyces europaeiscabiei
  source 1..50: mol_type = genomic DNA
tcgctgtatgggcaggacttgacccctgtcatatccggctcatacagtgt

SEQ ID NO: 35450 - DNA, 40 bp, Streptomyces europaeiscabiei
  source 1..40: mol_type = genomic DNA
agccctccccacgatgatccccgcagccagcagcaccccg

SEQ ID NO: 35451 - protein, 495 aa, Phascolarctobacterium faecium
MSNAVIYARYSSGHQREESIEGQIRECTNFAKRNGLTIVEHYIDRAISAKTDDRPSFQQMVADSSKKTFDTIIVYTLDRFARNRYDSAVYKAKLKRNGVRVLSAKENITSDPSGIILESVLEGMAEYYSVELAQKVKRGMTENALACRWASGRIPFGYTIDADKHLHPDPALVPIVQEAFEMYAAGAKIVDIARKINSYHVVTGMGNKFGRSSFDRMIRSETYIGVFKWNDIRKENAIPPIITPELFYKCQARYNARNRKNVARPSAIYLLSGKLRCGCCGGSMCGMSGKSRNGTMHYYYSCYSTRRRTSHCDIGNIRRDEIEHIIAAHAASILKKPINLDIIANQALKTNNSVKNYRLESLIQQEKDLTQKLENCMKAIDQGLVSITLMDRIKQYEADLQSVKNDISLEKIKSNPIQVTKEHIIFFLEKFALLEGEKFKDRIISTMVRDIVIKKEKDGNYLVTVQYNYANSKELPNEESYSVPESIGSQDVELV

SEQ ID NO: 35452 - DNA, 50 bp, Phascolarctobacterium faecium
  source 1..50: mol_type = genomic DNA
tggttcgcaagatgttgagttggtggacaatagcggagtcgttacgaaca

SEQ ID NO: 35453 - DNA, 40 bp, Phascolarctobacterium faecium
  source 1..40: mol_type = genomic DNA
ttctacattttcaagtggtggagacaagcgggatcgaacc

SEQ ID NO: 35454 - DNA, 50 bp, Phascolarctobacterium faecium
  source 1..50: mol_type = genomic DNA
tggttcgcaagatgttgagttggttcacaatagcggagtcgttacgaaca

SEQ ID NO: 35455 - DNA, 40 bp, Phascolarctobacterium faecium
  source 1..40: mol_type = genomic DNA
ttccaaatcagcaagtgtttcagaaaaacgggatcgaagt

SEQ ID NO: 35456 - protein, 530 aa, Halomonas titanicae
MFMLAHPNGCQTVRVRDMDNQQQRPKAYSYLRFSTPEQMQGDSFRRQSQLAKEYAEHNGLELDENSFDDFGLSAYQGRNQETGSLRLFMRAVEDGAIPSGSYLLVESLDRISRQSARKASNLLGEICDMGITVVTLFDGKAYDAKSLDSDPVAFIMAILIFQRAHEESATKAYRLRSVWQEKRKKIASGEPVRLTSRGPQWLRPAGDGVSFEIIPERGEVVRRIYQMALDGVGKKSISEALNTEGVQVFGRGQYWHTSYINKILNNPAAYGTLTPFTSRPESKTDREACDPIEGYYPAVIDKKTYEDFQALQSSKAPRRGRHSKSQVENVLGGLSVCPLCASTMARVSKNKAKGWVYLVCQRARQGAGCKYNAIRYDRVEPMIYSKIHRLVDACPSGDDSLDTQIEDAKLELKLKEKSIDRMLEVIEQGEMPPNAKGIPFLQERLAKRRLELDELKAGIADLHHQRSILGTELARHRAEGLRAVVLGTPEDKTLINTKMRECFSKVVVDFQTDSLVFHWKQGGHTSLRYK

SEQ ID NO: 35457 - DNA, 50 bp, Halomonas titanicae
  source 1..50: mol_type = genomic DNA
gtgggtctccaaaaccataacagtaacaggttgtgtatttcaagacccat

SEQ ID NO: 35458 - DNA, 40 bp, Halomonas titanicae
  source 1..40: mol_type = genomic DNA
gccgggtgggcctgcaaacaacaggttatggcccccggcc

SEQ ID NO: 35459 - DNA, 50 bp, Halomonas titanicae
  source 1..50: mol_type = genomic DNA
gtgggtctccaaaaccataacagttccaggttgtgtatttcaagacccat

SEQ ID NO: 35460 - DNA, 40 bp, Halomonas titanicae
  source 1..40: mol_type = genomic DNA
gctgggtgggccagcaacctccaggtgtgagcgccagggc

SEQ ID NO: 35461 - protein, 541 aa, Azospirillum doebereinerae
MRAAIYARFSSENQHERSIDDQVRLCRDFVEKAGGAVVTVYADYAMSGAHLRSRPQALRLLEDAKAGAFDTVVAEGLDRLSRDQEDIAGIHKRLGFARIRLVTVQEGDISELHVGLKGTMNALFLRDLAAKVRRGQTGRAMAGSIPAGLSYGYDVVREFDARGEPVRGKRRVNPQQADAIRRIYREFVAGISPRAIADGLNRDRIPSPAGGHWNASTINGNPARKNGILYNEAYIGFVIYNRLHMVKDPESGKRVPRLNPVADWIVTEAPELRIVDDGLWEHAQAIKDGFRHLRVDKTRRPKHLFSGLLRCGCCGGAYTVKSKDQLACSVYRESGPSVCPNNRTIRVPDLQGRVLDGIRSQLLSPSMLALYVRTYGEERRRLRTEAVEKRDAVAARVAKLARQIDNIVDAIAEGTAGPALKGKLAELERQKAEADAEMAGIEEAEAASDSVVELHPQAVQLYRDQIEALDKALTGGTESRQEAANTLRALLARVEIHPGERRGETHLTVHGRIEELLSLAQPKPDEGRRSVARTAMMVAAE

SEQ ID NO: 35462 - DNA, 50 bp, Azospirillum doebereinerae
  source 1..50: mol_type = genomic DNA
taggactgcaatgatggtagcagcggagagcgtcagtcattgcagtccta

SEQ ID NO: 35463 - DNA, 40 bp, Azospirillum doebereinerae
  source 1..40: mol_type = genomic DNA
ctttcctgatggtagcagcggagggatttgaacccccgac

SEQ ID NO: 35464 - DNA, 50 bp, Azospirillum doebereinerae
  source 1..50: mol_type = genomic DNA
taggactgcaatgatggtagcagcgcagagcgtcagtcattgcagtccta

SEQ ID NO: 35465 - DNA, 40 bp, Azospirillum doebereinerae; identical to SEQ ID NO: 9225
  source 1..40: mol_type = genomic DNA

SEQ ID NO: 35466 - protein, 673 aa, Vibrio cholerae
MIGEETLREEIFQYDKAKFKGICVPYARFSTKGQSKVGKKSLERQLSKAREYAKRNNLFINEDLIFTDKGVSGYSNQGELSKAFKKGQMATMLLLLEEVPPEERDNVYITFHNFDRFSRMSPDAAQAHFNKILNRGFKIVTTIDNQLYDRRDKGMSNMLISIIKMTTAWQESLNKSIYITDALSRKKKVIEYLYNHPSQKGKHKHIGVVQPSIPRWIDQENITYEYIDADGSKRTDTFKKFSLNQNKTEVVRKIFELKIAGLGYTRICQKLNNDGVEVFEQGRFKKAKKWHPYAVQNIITSDKVLGHITLKEMVTEEYHCKESDEIKTKKVKKEVTSKLENYYPAVVDEEVFRLANVLKFQEKKGKPLGRIGERTNIFATFMSCYCGATLQYSRSQVNTRSNKAPVYREQLRCNNALVKNGCFDDYINYVELEQAFFKYVNHIDFREVCLVGDKSLETEIKNLQAEITYLNGQKKELKLKNSGLEKTFESAISQGLNADYVLVALNEAKKSADLIETKINDLKVRITKLQLSLDSKESDFLDIFEYSKRINNSSTETKIMMRKKLNEFLHSKIKWMEVCSSKQSKFVILCFHDDVIRTFAYGEKYANDLMFNTIKISYEVDDAQLNYELFLIYIHQIKRSLRGETEVVSNGDLIEALQRLKRKFYAGKGIDYV

SEQ ID NO: 35467 - DNA, 50 bp, Vibrio cholerae
  source 1..50: mol_type = genomic DNA
gtgttggtaaatattggtttatctttagataaaatctttattaccaacag

SEQ ID NO: 35468 - DNA, 40 bp, Vibrio cholerae; identical to SEQ ID NO: 33968
  source 1..40: mol_type = genomic DNA

SEQ ID NO: 35469 - DNA, 50 bp, Vibrio cholerae
  source 1..50: mol_type = genomic DNA
gtgttggtaaatattggtttatctggagataaaatctttattaccaacag

SEQ ID NO: 35470 - DNA, 40 bp, Vibrio cholerae
  source 1..40: mol_type = genomic DNA
attgttgattttgattattggcttgttaaacatttggaga

SEQ ID NO: 35471 - protein, 538 aa, Brevundimonas diminuta
MSRPRIRCAIYTRKSTEEGLDQAFNSLDAQREACEAYIKSQAAEGWVLVPTAYDDGGFSGGNMDRPALQRLLAQVDAGLIDTIVVYKIDRLTRALSDFARIVERLDRRGASFVSVTQAFNTTTSMGRLTLNVLLSFAQFEREVTGERIRDKIAASKKKGMWMGGVPPLGYDLPTDAMTRALVVNEAEAEQVRTLYRLYLELGSVAALAQQLEAEGWLTRVRVSRKGNHSGGVPYSRGALFHLLKNRIYLGEIIHGELSMPGRHPAIVDPDLFEAAQQRLRANAVTHRDRPLRSADLPLKALVHDADGHRMSPSFGYGRGGKVYRYYVSAPLQQGRKIDRRDGALRRVRAEALHEVVEAALAPRHVHADDLPLAALLAPVRRIDLLAEEVRITLEADRLVPAARRGLEPVAGDGTVLALTIPVRCQARGGRVEQVGPDGRQLVHRHRRDPILIKGLRRAHKLASALGWNASDGALRHIDVAAPVGAYDRKLVRLAFLAPDLQRAILEGRQAPGLTLSRLLDEPISPDWGCQRRMFGAAA

SEQ ID NO: 35472 - DNA, 50 bp, Brevundimonas diminuta
  source 1..50: mol_type = genomic DNA
acgagctatgctgggtgtgtggcggtgctgtcagtccaacgctgacttgt

SEQ ID NO: 35473 - DNA, 40 bp, Brevundimonas diminuta
  source 1..40: mol_type = genomic DNA
ttgttaggaaataatggcggagagggggggattcgaaccc

SEQ ID NO: 35474 - DNA, 50 bp, Brevundimonas diminuta
  source 1..50: mol_type = genomic DNA
acgagctatgctgggtgtgtggcgcggctgtcagtccaacgctgacttgt

SEQ ID NO: 35475 - DNA, 40 bp, Brevundimonas diminuta
  source 1..40: mol_type = genomic DNA
atttttggaactaatgggtcgggggagaggattccaaccc

SEQ ID NO: 35476 - protein, 510 aa, Clostridium innocuum
MKQKYVIALYIRLSVEDFKTESLSIPNQKLLLLEKAMSLQEWDNSEVLEFVDNGHTGTNFERPAVQELLTMVQAGKIDCIIVKDLSRFGRNSIETGYFIERVFPLYHTRFISVSDDFDTANFKGDTGGIDIAFKYLISECYSRDMSMKTKSAKYAKMRRGEYQSVICPYGYRKSADGRMEPDEEVSEIVRQIFEWAADGNTAAEITRKLYAMKIPTPGEYRRNKGKDHYNVSRTHGVWNSSTVLRMLADQRYIGTYVIGKRKVQEIGSRRMKLKDESEWFKIPDHHQAIVSKELFEKANASIKRFSLPNKKQRDYLLRGKVFCGCCDHAMSLRNDVWFYCRHSEVAENLPCHGVRVKMVDLEQAVFEIIRAQMCPALGIDSSKDKLDLQTVQQAEHEDKLHSIQDSKRQLYEQYALGEIDLETYRERKAVYDAELVQAKNVHAAITAQTKQIQSDYEARLKQREIVQEVDSAGTLTQALIDRLINKVYIFPGDRIEIEYVTQDFLATAEP

SEQ ID NO: 35477 - DNA, 50 bp, Clostridium innocuum
  source 1..50: mol_type = genomic DNA
tttgtcgtgagcttgacatacgggtgccgttacggtataataacgacaaa

SEQ ID NO: 35478 - DNA, 40 bp, Clostridium innocuum
  source 1..40: mol_type = genomic DNA
aagcaaacttacatgtgaatgccttaatccatgaatacga

SEQ ID NO: 35479 - DNA, 50 bp, Clostridium innocuum
  source 1..50: mol_type = genomic DNA
tttgtcgtgagcttgacatacgggatccgttacggtataataacgacaaa

SEQ ID NO: 35480 - DNA, 40 bp, Clostridium innocuum
  source 1..40: mol_type = genomic DNA
aaggaaaatcacatttggaatcctgaacccatcaatccta

SEQ ID NO: 35481 - protein, 557 aa, Agrobacterium tumefaciens; identical to SEQ ID NO: 14041

SEQ ID NO: 35482 - DNA, 50 bp, Agrobacterium tumefaciens
  source 1..50: mol_type = genomic DNA
tttgtcggtctcggtagatacccggggcaggatttgaccgagaccgacat

SEQ ID NO: 35483 - DNA, 40 bp, Agrobacterium tumefaciens
  source 1..40: mol_type = genomic DNA
cctctcctccgtcatgctcggcctgtcccgagcatctgct

SEQ ID NO: 35484 - DNA, 50 bp, Agrobacterium tumefaciens
  source 1..50: mol_type = genomic DNA
tttgtcggtctcggtagatacccgccgcaggatttgaccgagaccgacat

SEQ ID NO: 35485 - DNA, 40 bp, Agrobacterium tumefaciens
  source 1..40: mol_type = genomic DNA
catctccttcttcatccacccccattccccagcctctggt

SEQ ID NO: 35486 - protein, 485 aa, Nocardioides dokdonensis
MTSKRVVLYARLSITTDESVSIERQLQAGRDTCKARGWTVVAEYVDDGVSASANAPENRRGWQQVLAHPKGTYDLVLIWKIDRLARKVLDFLHADQALQKRGAGVAAVEQNIDMTTTEGRGFATMLAVFAEMEADAIRSRVKAARRSLIAAGRVPGGAAPFGYRNIPNPDGPGKVLAKDPEQISYVIEAAERVMRGDSFNSVAGWLDEVAPRTARSNSAARWTITVTKRMLSNPVLAGMTAYNPGNNTKVRGADVLRGSEGMPVIREDLAILSISDFRKLQSILETSQPYASRSESYLSGLVWCGECNRKMHRNAKTVHGKKVRVFQCQGKDGCGQQVTNLEAIVERRYFRDFNGRWAMGYEVVSSDHDIDEINRQIHETTRAMQADDADMQALSERLQGLKELRKNTPPPQTRRTITGATSEEDWERDPRQALLRYAAGVRLKRGRVGSKFDDKRLSWINRGEVFTDIAAAFASLGIELNGDGT

SEQ ID NO: 35487 - DNA, 50 bp, Nocardioides dokdonensis
  source 1..50: mol_type = genomic DNA
tggtgacgtatttagccgggcagcacgcaaccagtccagatcagtaccct

SEQ ID NO: 35488 - DNA, 40 bp, Nocardioides dokdonensis
  source 1..40: mol_type = genomic DNA
gagcacggtcacggggagcacgaggaagacgaccggcacc

SEQ ID NO: 35489 - DNA, 50 bp, Nocardioides dokdonensis
  source 1..50: mol_type = genomic DNA
tggtgacgtatttagccgggcagcttgcaaccagtccagatcagtaccct

SEQ ID NO: 35490 - DNA, 40 bp, Nocardioides dokdonensis
  source 1..40: mol_type = genomic DNA
gagcacaggcaaggggtgcttgtggcagtggccgggcacc

SEQ ID NO: 35491 - protein, 525 aa, Roseburia hominis
MTDLRKTAVYIRLSAEDDNVDGRAKKESDSVTSQRILLKSFAIDELGVAESDILEYVDDGVSGTHFKRQGFQQLQDDMKSGEIGCVVVKDFSRFGRDYLEVGFYIEYIFPLLQIRFISINDSYDSAASSGMTGGMNVALQNLVYNMYSLDLSKKISSALQTRTRNGTRLPVNARYGYKKGKDGRLEVDPEAAKVVKMIFRMAAEGTSFADITRELNKQAIATCDEQKLSRRDQVQFQRFDTIKKKHWSPTTVAAIVRDEIYIGTRIWGKTRCSMHTGHKAVLNDETEWVRLENHHTAIIDRALFEKANEMHPKKKRSVAESRTNFTLERRKKQPALLICANCGHSLLKETEHLLKCSDARTNGDPVCRSLVIRREPLEENILGLVHQYAASMLEKEKKVSSNRQCDYKEINTAELQKQSRQLTSEKMKLYDDYKDGRIDRDSYKQRAGKISVQLEEIKRKIEDAENSKKLLEQNELSDKIKLKDFLGIQKFDTEKLREIIKVIRVHSQDEIEIEWNFDDIFSEQR

SEQ ID NO: 35492 - DNA, 50 bp, Roseburia hominis; identical to SEQ ID NO: 18562
  source 1..50: mol_type = genomic DNA

SEQ ID NO: 35493 - DNA, 40 bp, Roseburia hominis
  source 1..40: mol_type = genomic DNA
agagtccgagatcactccgcatatgctgcgacattctttt

SEQ ID NO: 35494 - DNA, 50 bp, Roseburia hominis; identical to SEQ ID NO: 18564
  source 1..50: mol_type = genomic DNA

SEQ ID NO: 35495 - DNA, 40 bp, Roseburia hominis
  source 1..40: mol_type = genomic DNA
gcagcctgacatcactgcgtttttgcttcaacattatttt

SEQ ID NO: 35496 - protein, 551 aa, Paenibacillus macerans
MAIGIYARVSTLQQTDNTSLDEQIRLCKEKAKELGYFESNIIIYREEGRSGEDIDTRVELTKLREDVASGRVSAIICTHPDRFSRDLTDKLIACREFEKNGAKLYFTDTQFNDSPEGQLFFNIMSAIASYELALIRKRTIRGRLSKVKNAKKIMPMRVAPFGYDKDENGQLVINDVERQYVQMIYEWYVFEKLTLREIGERLYGKIEPKRGESPNWNASSIRRILTSEIYIGKYYYNRRATEKKRGELTVGGNPKKTYKIRPEEEWLTVDVTPIVDEELWKLAQQQRIQNDTTKHVGNKKYEYLLKSLLKCGHCGRTYQATTYKGAKNKETGEIMKSRSYRCPNKNPRKYGPEVKKCEAPALNADLIEDFIWNQVLEIVTNPEKFVSRIKNKGNDSISGVREKLAVLEKQLLKKKQALEKAERSYFEAETLEDEKRYDNHRKIYKKEIAALEDEIVNYQSKIDSHRMEELTVDQIMSQVEKLRERISNSSEVPFELKRNIIEMLYDEIIITVKKPADGDTADGTELSITSVGLFDKWYQEEKNTGLCSQSQ

SEQ ID NO: 35497 - DNA, 50 bp, Paenibacillus macerans
  source 1..50: mol_type = genomic DNA
ataccggactttgttcacaatctcaagagattataaacaaagtccggcgt

SEQ ID NO: 35498 - DNA, 40 bp, Paenibacillus macerans
  source 1..40: mol_type = genomic DNA
gcttgtggcgcatatcgtgaagaagttcgacaacaccggc

SEQ ID NO: 35499 - DNA, 50 bp, Paenibacillus macerans
  source 1..50: mol_type = genomic DNA
ataccggactttgttcacaatctcctgagattataaacaaagtccggcgt

SEQ ID NO: 35500 - DNA, 40 bp, Paenibacillus macerans
  source 1..40: mol_type = genomic DNA
gcaggtggcgcagatgcagctgaagtactacaactccgac

SEQ ID NO: 35501 - protein, 484 aa, Mycobacterium avium
MTSKKARAAIYARISHDPAKANGDQPDDEPKPPGRGGDGLGVARQEQDCRELAARLGLTVADDHVYVDNDTSAYSGKRRPGFEAMLDAMKNHRFDVLLCWHTDRLYRSMKDLERLIDIAELARVPIRTAQGGELDLSTSAGRMVARILGSVARQESEHMSERRIRANRQKAEAGKWQSANRTFGYTMKGEPLEPEASAVRKAALEVLGGKSIQGVAREWKAAGLVGTRGRPFNAPGVRRLLINPRCAALKTHQGKVIGPGNWTPLIDANTHKGLVALLSDPERVICTSFERKYIGSGLYRCGICNDGTTMKAAQPGGKRAGGRRYVCREHAHLVRAGEPLDKFVERQIIDILSSPNAHLLLDNQDIDLDDLNVRREALVCRKDAVRRAHNAGSLDESEYLSDLADLAAQIAACDAELAAATRTSPAARLVAAGEQVWERWKAMSPSEQAQAVDEVATVTILPATRKGPGFNPDDVDIAPKRAIQ

SEQ ID NO: 35502 - DNA, 50 bp, Mycobacterium avium
  source 1..50: mol_type = genomic DNA
gtgtgcgcaacctcactttgtattcgcaccaaaagttaggttgtgcacgc

SEQ ID NO: 35503 - DNA, 40 bp, Mycobacterium avium
  source 1..40: mol_type = genomic DNA
gcgtgcagccgcggtccttcgcgtagaggacgatgcgctg

SEQ ID NO: 35504 - DNA, 50 bp, Mycobacterium avium
  source 1..50: mol_type = genomic DNA
gtgtgcgcaacctcactttgtattgccaccaaaagttaggttgtgcacgc

SEQ ID NO: 35505 - DNA, 40 bp, Mycobacterium avium
  source 1..40: mol_type = genomic DNA
gcgggcagcggcggtacctgcggaagacgaggatgtcctg

SEQ ID NO: 35506 - protein, 506 aa, Streptococcus porcinus; identical to SEQ ID NO: 14476

SEQ ID NO: 35507 - DNA, 50 bp, Streptococcus porcinus
  source 1..50: mol_type = genomic DNA
tatatcaattgcttgacattgtagggggacaatgctataatgatgatagt

SEQ ID NO: 35508 - DNA, 40 bp, Streptococcus porcinus
  source 1..40: mol_type = genomic DNA
agtcggggctaatggtgaagggaaatcaacctttatgagc

SEQ ID NO: 35509 - DNA, 50 bp, Streptococcus porcinus
  source 1..50: mol_type = genomic DNA
tatatcaattgcttgacattgtagctggacaatgctataatgatgatagt

SEQ ID NO: 35510 - DNA, 40 bp, Streptococcus porcinus
  source 1..40: mol_type = genomic DNA
agtaggagctaaaggtgaactgagggcaacctccctgggc

SEQ ID NO: 35511 - protein, 566 aa, Pseudomonas lundensis
MHRSTPVYAYIRMSTVEQAKGDSERRQLGQIERFLQENNGELVEPVFLDRLSSFNGKNIKKGAIKDFLDRVKKGEIEKGSVLVIESFDRISRQGGYLAHAVILDIIKNGVDIATLSPYKRYSINSENQFIEGIEIQTLLYRAHEESRTKSDRITRQHQARREKAKDKNVVYGSLPFWLIRTADWIEFKEPEATDVKLCLSLLKTYGMYTATAKINEQRKSSKIFSKETVSHLLNRSAVCGDLQTHRIEYDEAGNKIRVQGEVIHDYYPALISRAEFEELRAEIQSRRTTKSTGRVSGFKNIFRNVMTCSYCFAPMRLSHMKWKKGEKKYLVCTKSETNQCIDKGRLWYDYDDVERVFFNEVNLSILTKSLAQKTKIDDAEIEKLRSNLLKAEKQKSNILNAIELGTVSKSLVNRLEELEKDSDEIQKSIDELKAENALKRSQNETAIFDYEQLDTALNDEEQRAVINKILRTNQAEISILKGEIGCDFIIEISVGDRLETEISYHKQDDFINRYEHDLPENQTSDLVIHEDQTDPYAEENEGQVFEMFDSASMPIIEINQHNKKPD

SEQ ID NO: 35512 - DNA, 50 bp, Pseudomonas lundensis
  source 1..50: mol_type = genomic DNA
tctttatacgaattgactacgccttcatacaggcataacctgttcgtata

SEQ ID NO: 35513 - DNA, 40 bp, Pseudomonas lundensis
  source 1..40: mol_type = genomic DNA
ccgaccatttgctatgccttcatgcaagccagtggcatgg

SEQ ID NO: 35514 - DNA, 50 bp, Pseudomonas lundensis
  source 1..50: mol_type = genomic DNA
tctttatacgaattgactacgcctgtatacaggcataacctgttcgtata

SEQ ID NO: 35515 - DNA, 40 bp, Pseudomonas lundensis
  source 1..40: mol_type = genomic DNA
ctgaccatgtgctctgcaggtgtggaaggcagtgggctgg

SEQ ID NO: 35516 - protein, 498 aa, Nocardioides sp JS614
MSGCLCSMQRMTSLRAAIYVRVSKNRTDDSAKPERQIKSCSLLGKAKGLTLIAEPFVDDDVSAYKGKKKRPQYEALLDLIKAGEVDVVLSWHIDRMLRTTREMLEFITLAEETGVSIESVQGGSLDLSTPAGRMVATILASVSQAEVEMKAERHLLKNEQTRQAGGSTGGPVPFGWTLGEKVGHSRQFIVDEDAAKAIKTATTALIEGSENLSQIARDWNAQGLRTTFDKPWNHNSLKKVLVRPRNAGLVEHHGSILEGVEASWSPLVSVEEWHAVCSVLDGQRRAQSPRKHLLSNLLTCAKCGKPLVAGMTVKKVKGREYRYEQYKHAPGQGTGCGASIERTMVDKKVRTYVRHILTFQKIESLVPQSHDLTSALSLRSEVAGIEKRMQELEDLWADGEFSTDGYKKQRKALSEAREVALKGLAGLTERNAFAGLLSGLQKASFEDSVKMGQQFDALSLDHRKTVVSALFPKIVIEPGRGEDRVKLYNADGEEFELT

SEQ ID NO: 35517 - DNA, 50 bp, Nocardioides sp JS614
  source 1..50: mol_type = genomic DNA
aggcactacagagttaacgtgacacatgtcaggttgcctctgtagcatgc

SEQ ID NO: 35518 - DNA, 40 bp, Nocardioides sp JS614
  source 1..40: mol_type = genomic DNA
gacggtgtgcgacgtggggcagggcgacgggatcgcgctg

SEQ ID NO: 35519 - DNA, 50 bp, Nocardioides sp JS614; identical to SEQ ID NO: 35517
  source 1..50: mol_type = genomic DNA

SEQ ID NO: 35520 - DNA, 40 bp, Nocardioides sp JS614
  source 1..40: mol_type = genomic DNA
ggaggtgtgagacgtgggtcagggaagcgtggtcgggctg

SEQ ID NO: 35521 - protein, 514 aa, Chryseobacterium arthrosphaerae
MKIADLYIRVSTDEQADKGYSQRDQEERLRKHCSSLNIAIGNVIYEDHSAKTFERPEWKKYMYGFRRLRNIKEGRLLLFTKWDRFSRNTSEAYQMISNLNKLNITPQAIEQPLDLRVPENKLLLAIYLSTPEVENDRRAMNVTYGMRRAIREGRMMGIAPYGYINRSKEDGRKYVAVKEPEASNIIWAFKQVAKGHLPTAVVLKEMNKREGRKLTKNSFMEALRNIVYTGKLLLKAYNDEEERIIEGKHDALISEDLFLKVQSILFRKSNQDDFLPAGRIINEERYPLRGLLLCPKCNKNLTASSAKGRSKHYYYYHCTVDCGFRHNSEIVNDLFVEELSKFTFNNGAAKILKAIFVQNFAVASNSVGDERKVLQNKLTGIEQRIEKARDMFIEDKLDEEDFRSIKNKYKIEIENLKVKLNALKSSAENNNFEQRINKALDSIINISERYKNANTMDKRAIVGLIYPEKLIFDGENFQTTKINSFANSIFLIKKELGNKKNRQRSELSSNVGLV

SEQ ID NO: 35522 - DNA, 50 bp, Chryseobacterium arthrosphaerae
  source 1..50: mol_type = genomic DNA
tgaattatcttctaatgtcggtcttgtgaacttaacaggactctattcaa

SEQ ID NO: 35523 - DNA, 40 bp, Chryseobacterium arthrosphaerae
  source 1..40: mol_type = genomic DNA
atttgcgcatattgtcgtttgtgacctcgacaggattcaa

SEQ ID NO: 35524 - DNA, 50 bp, Chryseobacterium arthrosphaerae
  source 1..50: mol_type = genomic DNA
tgaattatcttctaatgtcggtctagtgaacttaacaggactctattcaa

SEQ ID NO: 35525 - DNA, 40 bp, Chryseobacterium arthrosphaerae
  source 1..40: mol_type = genomic DNA
ctttgcccattttgtctttagtgacattgacatttttgaa

SEQ ID NO: 35526 - protein, 484 aa, Bacillus thuringiensis
MKILKYAVYVRVSTDRDEQVSSVQNQVDICRYWLENNGYEWDSNAVYFDDGISGTAWLERHAMQLILEKARRNELDTVVFKSIHRLARDLRDALEIKEILIGHGIRLVTIEENYDSLYEGGNDIKFEMFAMFAAQLPKTLSVSVSAAMQAKARRGEYIGKPGLGYDVIDKKLVINEKEAEVVREIFDLSHKGYGFKKIANILNDKGTYTKFGQLWSHTTVGKILKNQTYKGNLVLNSYKTVKVDGKKKRIYTPKERLTIIEDHYPAIISKELWNAVNSNRTSKKKTKQDIRNEFRGMMFCKHCGGPITAKYTSRYAKGSKKEWVYMKCSNYIRFNRCVNFDPVKYDDIREVILYRLKQQEKELEIQFNPKMHQKRKDKSTEIKKQIKLLKVKKEKLIDLYLEGLIDKEMFSKRDFNFENEVKEQELALLKLTDQNKRNKEEQQIKKAFSMLDEEKDMHEVFKTLIKTITLSKDKYIEIEYTFSL

SEQ ID NO: 35527 - DNA, 50 bp, Bacillus thuringiensis
  source 1..50: mol_type = genomic DNA
agttggttattagttactgtgagatttgttacagtacctaataaccaacg

SEQ ID NO: 35528 - DNA, 40 bp, Bacillus thuringiensis
  source 1..40: mol_type = genomic DNA
aattggtgtaactgttgtatttgttacggtgctaccaaca

SEQ ID NO: 35529 - DNA, 50 bp, Bacillus thuringiensis
  source 1..50: mol_type = genomic DNA
agttggttattagttactgtgagaattgttacagtacctaataaccaacg

SEQ ID NO: 35530 - DNA, 40 bp, Bacillus thuringiensis
  source 1..40: mol_type = genomic DNA
tcttggtgttactactgtaattgttttggtgccacgaacc

SEQ ID NO: 35531 - protein, 490 aa, Bacillus thuringiensis
MYELKYAVYVRVSTDRDEQVSSIENQIDICRYWIEKNGYEWDENSIYKDEAVSGTAWLERHAMQLILEKVRRKELDTVVFKSIHRLGRDLRDALEIKEILLGHGVRLVTIEEGYDSYYEGKNDLKFEMYAMFASQLPKTVSVSVSAALAAKVRRGEYTGGIVPYGYKIVDQKYTINEEEAELVRKMYELYDNGLGYMKIADAINDMGVPSRTGKLWAYPSIRAIITNAAYKGDYIMQKYAEVKVDGRKKMIINPKEKWVVFENHHPAIITRDLWDRVNNSKTDKKTKRRVAIKNELRGLACCAHCRTPLALQQRMYKNKEGETRYYCYLICGRYKRMGARGCVKHSGLQYSDLRLFVLQKLKEKENDLEKVFNLNDTDKHQEKQKKLRKEKKELEIKRERLLDLYLDGGPIDKETFTKRDKNFEKIIKEKELEILKLDDVKTLVVEQQKVKEAFELLEKSEDLYSTFKKLITRIEVSQDGVINIVYRFEE

SEQ ID NO: 35532 - DNA, 50 bp, Bacillus thuringiensis
  source 1..50: mol_type = genomic DNA
ttttatccttattgacatatgaggaatgccatgtataattaggggataaa

SEQ ID NO: 35533 - DNA, 40 bp, Bacillus thuringiensis
  source 1..40: mol_type = genomic DNA
atttatcttttacaatgccaagcgggtatagcgggaaaaa

SEQ ID NO: 35534 - DNA, 50 bp, Bacillus thuringiensis
  source 1..50: mol_type = genomic DNA
ttttatccttattgacatatgaggcttgccatgtataattaggggataaa

SEQ ID NO: 35535 - DNA, 40 bp, Bacillus thuringiensis
  source 1..40: mol_type = genomic DNA
atttgccatgtacaaggccctggggatacagcaggaaaca

SEQ ID NO: 35536 - protein, 503 aa, Fusicatenibacter saccharivorans; identical to SEQ ID NO: 341

SEQ ID NO: 35537 - DNA, 50 bp, Fusicatenibacter saccharivorans; identical to SEQ ID NO: 12
  source 1..50: mol_type = genomic DNA

SEQ ID NO: 35538 - DNA, 40 bp, Fusicatenibacter saccharivorans
  source 1..40: mol_type = genomic DNA
cgcagtcttgtaatgtttcttcctgttgcttccatatcaa

SEQ ID NO: 35539 - DNA, 50 bp, Fusicatenibacter saccharivorans; identical to SEQ ID NO: 2479
  source 1..50: mol_type = genomic DNA

SEQ ID NO: 35540 - DNA, 40 bp, Fusicatenibacter saccharivorans
  source 1..40: mol_type = genomic DNA
tgcagccttgtgaggcttctcgcttttgcttccacctcca

SEQ ID NO: 35541 - protein, 561 aa, Clostridium symbiosum
MARTKNRGYQQTLAPTYTARLWKMGGYIRLSREDLQKINRGLDDSNSVKNQRDILNDFHHNHIDEFESYVEYVDDGHTGTDTERESFQRLLGDVMSGKINCVVVKDLSRFARNYSDAGSLIDNLFVQMGVRFISLAEGVDSYLNPDSVNSIIVPITNVMNDQYCYQTSKKIRQVFDYKRRNGQYIGSFAPYGYIKDPKDKHQLIVDPEAAEIVKKIYELCLQGTAKLQIVMYLNDHGIPSPTAYRKLKGLPYSPAISDAPMWGNKIITDILRNPIYTGDLVQGRRRVKSYKVHQIEAVPEEEWVRVPDTHEAIITHETFERVQELLKRDTRTAPKKRELHLFSGFLRCADCGKAVTRSQSGKNVYYSCSTYKKRSRTACTMHSIKHNRLEAAVLFAIQYQVSTAVSYSEIVARINAAPLKKSQSHRLNDQIAAKEKELTKITRYKQSLYQDWKDGEISQQEYREMKTDYERQAAGLSDLLARLTAERKQLSNGVDQQHPALVAFAKYQNIEKLTREILIELVDHIKVYENGNISVHFKFADEFRRIAEYIEINTTDTAEAG

SEQ ID NO: 35542 - DNA, 50 bp, Clostridium symbiosum
  source 1..50: mol_type = genomic DNA
tgttttcctaataaaacgcaatcatatgaatgagttttaataggaacact

SEQ ID NO: 35543 - DNA, 40 bp, Clostridium symbiosum
  source 1..40: mol_type = genomic DNA
gaattgggtaccgtattgataggatacatgagaagccatt

SEQ ID NO: 35544 - DNA, 50 bp, Clostridium symbiosum
  source 1..50: mol_type = genomic DNA
tgttttcctaataaaacgcaatcaggtgaatgagttttaataggaacact

SEQ ID NO: 35545 - DNA, 40 bp, Clostridium symbiosum
  source 1..40: mol_type = genomic DNA
acattgggtcctgtattgagggaaaacatggtaagcattt

SEQ ID NO: 35546 - protein, 546 aa, Actinomyces urogenitalis
MTITDRPANPRPGRATRTVVYPAFTQTGPEEPVEGTRGIYLYLRLSKYHRDGADAIERQRLDLLRKLNTEGGWTVLGEYIDNDSASASAVRNRKGWRQLNQDIQAGKVEAVAFWKLDRTNRVASKCIEWIGQCQKAGVYLVSHQDSDQELNTATAGAKLITGIKALMAEVETDSMSERQLAAKRHLAEAGFHHGGRPPLGWIPGPRVTDEQGRTGVRLVPHPVEHPALKRAVELVLDGVSLARIADYWKAEYGITTAKGAPIYEATIYRALVSPRMVGYRMRQVPEHQRGVKLNLLDYIARDAKGDPVISQEPVCDWVTWLRVKKRLEESKTSRTRRPWGSHEWLLTGLVFCQCGDRLYGHNKTRRRASGEKYQQYAYRCMANRKRGRGHCDIACVIDAAQGEAHVLGWFFAQLTDESVARARAQRRAANSDQALKSLFTSLEEARAERDELLARQGSQEFKGNMVRLLVSLLGDVEARIETLQQQIDAMDQDPTVIDDPAGLVASWNERSLSQRRSLLRRLIRRIDIAPGPGPASERMTITPVDT

SEQ ID NO: 35547 - DNA, 50 bp, Actinomyces urogenitalis
  source 1..50: mol_type = genomic DNA
ggggtgtgctttctatccggcgacgagtccggtgatggaaagtacacctc

SEQ ID NO: 35548 - DNA, 40 bp, Actinomyces urogenitalis
  source 1..40: mol_type = genomic DNA
aggggttctcttcctggacgaggcaccggagttctccagc

SEQ ID NO: 35549 - DNA, 50 bp, Actinomyces urogenitalis
  source 1..50: mol_type = genomic DNA
ggggtgtgctttctatccggcgacccgtccggtgatggaaagtacacctc

SEQ ID NO: 35550 - DNA, 40 bp, Actinomyces urogenitalis
  source 1..40: mol_type = genomic DNA
tggggctgtctaactggacccggcactggacagctccagg

SEQ ID NO: 35551 - protein, 508 aa, Clostridium spiroforme
MLNALYLRKSRQDSKDETIQETLAKHERALWKLINELNIDKNSVVVFKEVVSGDSISQRPEMIKLLDGVCEGIFENVIVMDVQRLARGDTIDQGQILRAFALHNTKIITPGKVINLENEYDEEFFEYDLFVGRREYKKITARLKRGKLQAVQEGSYQGSIAPYGYKKVVVNKTHTLEIVEEEAKIIRKIFDLFLYENLGTTNIAKYLNDLGVKPRNCNQWTPAIVRGKLTNNVYCGMIKWNQRKIVKVYKNKEIVSTRPLNKEPLIVKGLHQPIVSVEEFNRVQSLFKSRTSNKVPEKYNLKNPLAGLIICKDCGHKMVRRPYKNGRMETILCSRLNCHNVSCDLDILEDRVFKSIQEHLKNYKIFIKDYEKLYEEKVSNSKSLINLYNKKLEQNKQQEMKICELLETGIYNLDIYNQRIEILKNEREEILLKIKKLKQELKENPTKTKKNSIPILEKAIQCYWDCTPQEKNDILKSIILKCIYKKEKSGRWNPEAIDNFELDIFFRI

SEQ ID NO: 35552 - DNA, 50 bp, Clostridium spiroforme
  source 1..50: mol_type = genomic DNA
aacctataagaaaatagtactatttcgtcagtactgctatcttgtctgtg

SEQ ID NO: 35553 - DNA, 40 bp, Clostridium spiroforme
  source 1..40: mol_type = genomic DNA
tatttctacatgagcaagctcttcagttgcaatatcggtt

SEQ ID NO: 35554 - DNA, 50 bp, Clostridium spiroforme
  source 1..50: mol_type = genomic DNA
aacctataagaaaatagtactattgagtcagtactgctatcttgtctgtg

SEQ ID NO: 35555 - DNA, 40 bp, Clostridium spiroforme
  source 1..40: mol_type = genomic DNA
aatttctacatgagccagtgatatagttcgaatatttgtc

SEQ ID NO: 35556 - protein, 531 aa, Streptomyces purpureus
MDRMITTEYDGCGKCLVGVRRLSRKTDATNSPDRQLDQVLSAVEAIGGHVIAWADDWEVSGATDPLTRAGLGPWLRDEAGPYSGIAGAAVDRIGRNQRDVLNTAYMIHESGRLLVTYGHAGPWDLDDPNDEMRLSMEAFGSQMELRAIQKRNRDETLRARGAGQPHQKNSYGYQFVRLVPTGKVDHVAIDPVAALIIRDVAERILADETDTVTCSTEAARLTRAGVLSPADHRSVMYGRSPKGSPWRAKTLKGILTSEAALGFLMHGERPVLGADGHPVRLADPLWDRATRDALIAKTAPKRNHNVSRAPKSVNLLSGLAFCGNCGQRLYVTGRTGGPMAYACTGRVRGIPASAGCKPAPTSSIPMANAHVESRFLALYGSHQVKRREYDPGTGYAARILEFEADRKRLRDDRAAGLYDSADDAEWFRTRYAQTGREIDELRKLPERPAGMRSVSTGQTVEDLWTAAPDDPARREILTQFEVRVTLFPRAAKHRIRVTGLNPEQRAADRKAAQGHAEDVALAELEDAHTDH

SEQ ID NO: 35557 - DNA, 50 bp, Streptomyces purpureus
  source 1..50: mol_type = genomic DNA
gggtgtgtttagagcgggtacctgtccaggtacccccctaaaacacacgt

SEQ ID NO: 35558 - DNA, 40 bp, Streptomyces purpureus
  source 1..40: mol_type = genomic DNA
gatccagcgctccttccagtccagcagggagaggtacgag

SEQ ID NO: 35559 - DNA, 50 bp, Streptomyces purpureus
  source 1..50: mol_type = genomic DNA
gggtgtgtttagagcgggtacctgctcaggtacccccctaaaacacacgt

SEQ ID NO: 35560 - DNA, 40 bp, Streptomyces purpureus
  source 1..40: mol_type = genomic DNA
gctcaagcgatccttccagctctgcagctggaactacaag

SEQ ID NO: 35561 - protein, 587 aa, Enterobacter hormaechei
MPQLYSYIRWSSERQQKGTTRQRQVIGAKEFAIANGLELVEIEDPGVSAFRGKNTTHGKLGDFIDAVRQGAIPPDSWLYVENLDRLTRQEVTTAQKLFIELLDLGLTLVTGMDKRVYTLESVNKNPTDLMISLLLFSRANEESKTKQARTIGNVESLIERHRQGLPVNIKSCGKHPFWIDDSGSQYESVKRHAIYWEIAREAIELFLSGYGIYKVKRFLDEKYPNGLNGKEWGYQVLKKMRESRALIGERQINIGSHTYTLRDYYPCLCKNEVEFLHLQELKGQNSYKSKKNPLKEQIKLLSGLAILRCSKCGGTMSSFMNKGKPRYICLNGRHLQKGCVGWSLTAPLVDHCVIIALLMGYMDANRKERQDTSDISALIEAKNTSVGELNVSITNLVAVIEAGGNVSELASRLKVLSTERETFLKEIERLKERKALIDSKGSFEVSMMDFINLIHWNVFSDYAHESRDKIRSTINKIIEHVIIDKTDGCITIKIKCRGSDEQLIFCGIGRKPHWKFDIALYVEQDTDGDTTFEEKSILPMANQLMEEATKQFALIREGYISYFDKICKILAAIGYPDIDGSAFWPNR

SEQ ID NO: 35562 - DNA, 50 bp, Enterobacter hormaechei; identical to SEQ ID NO: 17382
  source 1..50: mol_type = genomic DNA

SEQ ID NO: 35563 - DNA, 40 bp, Enterobacter hormaechei; identical to SEQ ID NO: 32423
  source 1..40: mol_type = genomic DNA

SEQ ID NO: 35564 - DNA, 50 bp, Enterobacter hormaechei
  source 1..50: mol_type = genomic DNA
gcgcaatctttttcttgatgtttcaagcaccctaatgataaaaatccaat

SEQ ID NO: 35565 - DNA, 40 bp, Enterobacter hormaechei
  source 1..40: mol_type = genomic DNA
ggcgctcaccaggtccctcaaacagccctgtgacacagag

SEQ ID NO: 35566 - protein, 449 aa, Mycobacterium marinum
MGVARQLEDCRKLAEDRGWPVGAEYVDNDVSAFSGKPRREYARMLADLASGDRDAVIVYNLDRLHRRPVELEEFVTLCESVGVRDVATVTADIDLGNDDGLFMARIFAAFAAKESGRKSARIRRKMLQNAQAGLPHGSARPFGYEADKITVRESEAAVVREMVDRYLAGQSLRSLTIWLNESQITPSVAKSWQTSAVRQVLSSGRIAGLREHRGEVIGPAVWPAIITPAERDRVLARMAARSVTKSRTARTYLLSGLLRCRRCGNRLYSQARHSNPQNRVRRYVCLKGPDHGGCGRLTVVAAPVEELLTEAVLTRLDSAQLADALAGKANADADVTALAAQVDTDQGRLDELAGLYADGAITAREWIAARDPITERITAARRDIAAVTDTTAVFELVGTGGALRTEWDGLDLGRQQAIIKAVLDHAVIAPGTPGARRLDIDRVAPIWRV

SEQ ID NO: 35567 - DNA, 50 bp, Mycobacterium marinum
  source 1..50: mol_type = genomic DNA
ggggtagtttgagaacttgtaagtaaggtcataagttgttaaactaccct

SEQ ID NO: 35568 - DNA, 40 bp, Mycobacterium marinum
  source 1..40: mol_type = genomic DNA
cggcctcacgcacccctcgaacctgaaatgcctatgccgc

SEQ ID NO: 35569 - DNA, 50 bp, Mycobacterium marinum
  source 1..50: mol_type = genomic DNA
ggggtagtttgagaacttgtaagtccggtcataagttgttaaactaccct

SEQ ID NO: 35570 - DNA, 40 bp, Mycobacterium marinum
  source 1..40: mol_type = genomic DNA
cggcctcactgagccctcgccccggacctgccgactcccc

SEQ ID NO: 35571 - protein, 479 aa, Mycobacterium marinum
MSGRKATAQRAGVRSAAIYARISADVEGTGLGVARQLEDCRKLAADRGWPIGDEYVDNDVSAFSGKPRREYARMLADLQSGARDAVIVYNLDRLHRRPAELEEFVALCESVSVRDVATVTADIDLGNDDGLFMARIFAAFAAKESGRKSARIRRKMLQNAEQGRPHGSVRPFGYEPDKITVRPDEAAVVREMVDRYLAGASIRSLTMWLNDSGIAPAASKSWRTSAVRQILCSGRIAGLREHHGQVIGEAAWPAIITPAQRDQVLARMTARALTKTRAPRTYLLSGLLRCGRCGNRLYSQARHVNPENRVRRYVCLSGPDQGGCGRLTVVAQPVEDLLTDAVLTRLDSPALADALAGKASVDADVAALSAQLDADTTRLDELAALYASGTITAREWIAARDPITARIAETRKTIAAATDTADINELAGTGHLLRSQWVDLGIDHQQTIIKSVLDHAVIASGTPGARSLDINRVQPHWRV

SEQ ID NO: 35572 - DNA, 50 bp, Mycobacterium marinum
  source 1..50: mol_type = genomic DNA
ggggtagtttgagaacttgtaagtaagcttagatggtgttaaactaccct

SEQ ID NO: 35573 - DNA, 40 bp, Mycobacterium marinum; identical to SEQ ID NO: 35568
  source 1..40: mol_type = genomic DNA

SEQ ID NO: 35574 - DNA, 50 bp, Mycobacterium marinum
  source 1..50: mol_type = genomic DNA
ggggtagtttgagaacttgtaagtccgcttagatggtgttaaactaccct

SEQ ID NO: 35575 - DNA, 40 bp, Mycobacterium marinum; identical to SEQ ID NO: 35570
  source 1..40: mol_type = genomic DNA

SEQ ID NO: 35576 - protein, 499 aa, Mycobacteroides chelonae; identical to SEQ ID NO: 15531

SEQ ID NO: 35577 - DNA, 50 bp, Mycobacteroides chelonae; identical to SEQ ID NO: 15532
  source 1..50: mol_type = genomic DNA

SEQ ID NO: 35578 - DNA, 40 bp, Mycobacteroides chelonae
  source 1..40: mol_type = genomic DNA
gcggtcggcacattccaggcaactggtgatgccaggtaaa

SEQ ID NO: 35579 - DNA, 50 bp, Mycobacteroides chelonae
  source 1..50: mol_type = genomic DNA
gcttccctctagtgactgaccaggttactataatatccctaaagggaagt

SEQ ID NO: 35580 - DNA, 40 bp, Mycobacteroides chelonae
  source 1..40: mol_type = genomic DNA
gcaatctagacagtgcaggtttctggtgaggacaggtaaa

SEQ ID NO: 35581 - protein, 477 aa, Clavibacter michiganensis
MTMCAVYARQSLDRQQGIDIQLSSARVEAERRGWTIVEEYVDNDTSASKQRGPSSAWGRMLRDATAGRFEFVMATDLDRLLRGQRDLLDLMEAKAKPVLLSGQLDLASADGEFRATMLAAVARFEVVRKAERQVRAADARADRGIPHRGVRPYGWETDGITIRPDEARWVRYVADEIQRGASIASVTRALNEQGVLTTRGNAWSTITVKKMAIRARNAGLLERHGERQEQSLIEPIITIEQLEAVQAILGARRGTPGPQPIVHWASGLASCAVCGAALRGKHVTTKDGRSPWYICETKIKRATNDDRRHVSISGGILEGVLAEAVAAAFLFGGDALGGTADSPANAAHTALSGLQARQAELVGLVSEGLVTGAQIASELRGLKEQQAQLEQTIREAQSRDASMEMLSALRGDLLAGQRVAFGDALLAREALLERFKGMSIERRRQLVEQLLEVTVEKGKGGRRVRIHHRVVESLNEA

SEQ ID NO: 35582 - DNA, 50 bp, Clavibacter michiganensis
  source 1..50: mol_type = genomic DNA
cctgtccctgatccgaccaccggtaaacctatggttggatcaggggcatg

SEQ ID NO: 35583 - DNA, 40 bp, Clavibacter michiganensis
  source 1..40: mol_type = genomic DNA
gatgccggggaacagggcgaagacgatggtgagcgggagg

SEQ ID NO: 35584 - DNA, 50 bp, Clavibacter michiganensis
  source 1..50: mol_type = genomic DNA
cctgtccctgatccgaccaccggtcgacctatggttggatcaggggcatg

SEQ ID NO: 35585 - DNA, 40 bp, Clavibacter michiganensis
  source 1..40: mol_type = genomic DNA
gatagcaggggacagggagcgggccagggagagcaggagg

SEQ ID NO: 35586 - protein, 520 aa, Coprococcus comes
MSDQKLIIGYYRLSMEDDSEGESNSIINQRKLVKDYISNIPELASMPFQEFYDDGYSGSSMERPAIKQVLELARENKVQCIVVKDFSRFARNYIEMGTYLEQIFPFLGVRFISISDRYDSKDYIGKSSDIEVQFKGLIADFYVKDQSVKVKSAVSTRRGKGEYCCGSAPYGYRINPENKKELVIVEDEAEVIRRVFELTNQRYSKMEICRLFNEEGVLTPLQSMSRRQKSDSKKAASRGLQWTSDMIRKIVDDKTYIGCMVYGKTKISDPGTGKEVPVPRNQWKVMENHHEPIVSKEIFEKAQSLQIRYTKKSKFDRETTLLGGYVKCGNCRRSLTSSSPVHGHILYSCAYSKGKEDTGCFAGKADNKMLEHIVLAEIKAYLRQNISQEQMQQSMRKQHTDSIEAYELESTDCEKRQEQIKLQNRQNYEKYHEGQMNQKQFMEAKKQLEEERERLQKRIQELEELINGEKEILMKKNVPVEQMLMYLGYEKLTREMLEEYVQGIYVYDDGRVEVEWKSLA

SEQ ID NO: 35587 - DNA, 50 bp, Coprococcus comes; identical to SEQ ID NO: 12932
  source 1..50: mol_type = genomic DNA

SEQ ID NO: 35588 - DNA, 40 bp, Coprococcus comes
  source 1..40: mol_type = genomic DNA
gaatcgggaggtggggtatggggcactgtgcctggagaat

SEQ ID NO: 35589 - DNA, 50 bp, Coprococcus comes
  source 1..50: mol_type = genomic DNA
tgtagcaatgacttgacatcctcgtcggaggacgttataataaggttaca

SEQ ID NO: 35590 - DNA, 40 bp, Coprococcus comes
  source 1..40: mol_type = genomic DNA
gaagcgggaggtggagcgctcagccctgcggctggagaag

SEQ ID NO: 35591 - protein, 586 aa, Salmonella enterica
MPKIWPYIRFSSEEQKKGDSLRRQQDLIDKFAARPEIVAEGATIDTSLDLNDLGVSGYTGKNLTVGRFKEFLDAVDKGVVKSGDYLAVEALNRITRLNPTDSLPILLGLMKKGVKIAITADSQIYKQGGDITQLYIALGELQRGYNESNEKGRRVREAWSSKKKRAFATGEIATSRLPLWLRAVKTTERGVVVRSVEEIPERVEVIKEIYRLSDTNVGAIATARILTEKGIPTFTRENARKNPNYGDFWQPSYIKKVLENRSVMGHYQPMTWEKLPDNRRRRINDGPEIKNYFPQIIEPDLFRRVQEKRKSRANDGQGNKGRRFSNIFTKIAHCSKCGATASHVNKGPNPKKGGRYLVCYRARHGDCSYRAWRYDDIETVILKFLAEADIKKIIKDEDRAEVLINEKYEIEARISEIQEMLDNFKEDFKRLKGKVSDLERSMAIENEEAIKELKSKKESVELEIYDVLDRQKADVDSDIQSLRDLSNTEDDNTVFEIRSKINERLRLILECINIDFQDRTIEILFKSGVRRFLHEKGMYGNIPLRSEGEQRDKDLEEILSWANKTDEEKKEIYDNNNFKITPFSLD

SEQ ID NO: 35592 - DNA, 50 bp, Salmonella enterica
  source 1..50: mol_type = genomic DNA
ggggtctaatggttgcctaaaagaaggatttagtagagcattagacccca

SEQ ID NO: 35593 - DNA, 40 bp, Salmonella enterica
  source 1..40: mol_type = genomic DNA
acccggcgggccgatcaatagcagattatgtccccctgcc

SEQ ID NO: 35594 - DNA, 50 bp, Salmonella enterica
  source 1..50: mol_type = genomic DNA
ggggtctaatggttgcctaaaagactgatttagtagagcattagacccca

SEQ ID NO: 35595 - DNA, 40 bp, Salmonella enterica
  source 1..40: mol_type = genomic DNA
atcctgggggcccaggaagctcagcttagctccccctgcc

SEQ ID NO: 35596 - protein, 547 aa, Oscillibacter sp
  REGION 4..5: note = misc_feature - Xaa can be any naturally occurring amino acid
  REGION 7..8: note = misc_feature - Xaa can be any naturally occurring amino acid
  REGION 10..11: note = misc_feature - Xaa can be any naturally occurring amino acid
  SITE 14: note = misc_feature - Xaa can be any naturally occurring amino acid
  SITE 16: note = misc_feature - Xaa can be any naturally occurring amino acid
  REGION 18..21: note = misc_feature - Xaa can be any naturally occurring amino acid
  REGION 25..26: note = misc_feature - Xaa can be any naturally occurring amino acid
  REGION 36..37: note = misc_feature - Xaa can be any naturally occurring amino acid
  SITE 46: note = misc_feature - Xaa can be any naturally occurring amino acid
  REGION 52..54: note = misc_feature - Xaa can be any naturally occurring amino acid
  SITE 66: note = misc_feature - Xaa can be any naturally occurring amino acid
  REGION 70..71: note = misc_feature - Xaa can be any naturally occurring amino acid
  SITE 75: note = misc_feature - Xaa can be any naturally occurring amino acid
  SITE 194: note = misc_feature - Xaa can be any naturally occurring amino acid
  SITE 203: note = misc_feature - Xaa can be any naturally occurring amino acid
  SITE 206: note = misc_feature - Xaa can be any naturally occurring amino acid
  REGION 228..229: note = misc_feature - Xaa can be any naturally occurring amino acid
  SITE 234: note = misc_feature - Xaa can be any naturally occurring amino acid
  SITE 238: note = misc_feature - Xaa can be any naturally occurring amino acid
  REGION 241..243: note = misc_feature - Xaa can be any naturally occurring amino acid
  SITE 247: note = misc_feature - Xaa can be any naturally occurring amino acid
  SITE 250: note = misc_feature - Xaa can be any naturally occurring amino acid
  SITE 253: note = misc_feature - Xaa can be any naturally occurring amino acid
  SITE 255: note = misc_feature - Xaa can be any naturally occurring amino acid
  SITE 259: note = misc_feature - Xaa can be any naturally occurring amino acid
  SITE 273: note = misc_feature - Xaa can be any naturally occurring amino acid
  SITE 283: note = misc_feature - Xaa can be any naturally occurring amino acid
  REGION 285..286: note = misc_feature - Xaa can be any naturally occurring amino acid
  REGION 296..297: note = misc_feature - Xaa can be any naturally occurring amino acid
  SITE 303: note = misc_feature - Xaa can be any naturally occurring amino acid
  SITE 309: note = misc_feature - Xaa can be any naturally occurring amino acid
  REGION 317..318: note = misc_feature - Xaa can be any naturally occurring amino acid
  SITE 320: note = misc_feature - Xaa can be any naturally occurring amino acid
  SITE 343: note = misc_feature - Xaa can be any naturally occurring amino acid
  SITE 351: note = misc_feature - Xaa can be any naturally occurring amino acid
  SITE 354: note = misc_feature - Xaa can be any naturally occurring amino acid
  REGION 362..363: note = misc_feature - Xaa can be any naturally occurring amino acid
  SITE 365: note = misc_feature - Xaa can be any naturally occurring amino acid
  SITE 367: note = misc_feature - Xaa can be any naturally occurring amino acid
  SITE 371: note = misc_feature - Xaa can be any naturally occurring amino acid
  REGION 374..375: note = misc_feature - Xaa can be any naturally occurring amino acid
  REGION 380..381: note = misc_feature - Xaa can be any naturally occurring amino acid
  REGION 387..388: note = misc_feature - Xaa can be any naturally occurring amino acid
  SITE 401: note = misc_feature - Xaa can be any naturally occurring amino acid
  SITE 408: note = misc_feature - Xaa can be any naturally occurring amino acid
  REGION 411..412: note = misc_feature - Xaa can be any naturally occurring amino acid
  SITE 420: note = misc_feature - Xaa can be any naturally occurring amino acid
  SITE 425: note = misc_feature - Xaa can be any naturally occurring amino acid
  SITE 427: note = misc_feature - Xaa can be any naturally occurring amino acid
  SITE 438: note = misc_feature - Xaa can be any naturally occurring amino acid
  SITE 440: note = misc_feature - Xaa can be any naturally occurring amino acid
  SITE 442: note = misc_feature - Xaa can be any naturally occurring amino acid
  SITE 450: note = misc_feature - Xaa can be any naturally occurring amino acid
  REGION 453..454: note = misc_feature - Xaa can be any naturally occurring amino acid
  SITE 467: note = misc_feature - Xaa can be any naturally occurring amino acid
  SITE 474: note = misc_feature - Xaa can be any naturally occurring amino acid
  REGION 476..477: note = misc_feature - Xaa can be any naturally occurring amino acid
  SITE 479: note = misc_feature - Xaa can be any naturally occurring amino acid
  SITE 489: note = misc_feature - Xaa can be any naturally occurring amino acid
  SITE 495: note = misc_feature - Xaa can be any naturally occurring amino acid
  SITE 499: note = misc_feature - Xaa can be any naturally occurring amino acid
  SITE 502: note = misc_feature - Xaa can be any naturally occurring amino acid
  SITE 506: note = misc_feature - Xaa can be any naturally occurring amino acid
  REGION 508..509: note = misc_feature - Xaa can be any naturally occurring amino acid
  SITE 511: note = misc_feature - Xaa can be any naturally occurring amino acid
  REGION 514..517: note = misc_feature - Xaa can be any naturally occurring amino acid
  SITE 524: note = misc_feature - Xaa can be any naturally occurring amino acid
  SITE 526: note = misc_feature - Xaa can be any naturally occurring amino acid
  SITE 530: note = misc_feature - Xaa can be any naturally occurring amino acid
  SITE 535: note = misc_feature - Xaa can be any naturally occurring amino acid
  SITE 537: note = misc_feature - Xaa can be any naturally occurring amino acid
  SITE 540: note = misc_feature - Xaa can be any naturally occurring amino acid
MDIXXIXXTXXTKXIXDXXXXVTFXXRVSSESDEQXXSLGNQVSYXEEFIHXXXAWEYVQGYVDEXLSAXXTKNXEDFHRMVEDGKEGLFDLIITKEITRFARNTLDSILYTRELLGSGVGVFFQNDNINTFDEDSELRLTIMSGIAQDELRKISGRVKFGHAQAIKNGVVLGNSRIFGYVKDGGRLVIDESEXPMVRELFEXYAXGEYSMKQIETLFWDKGYRNHNXXKIAHXTMSXMIXXXKYKXYYXGNXVXVIDXFTKKQKFLPPEEWXMFKDETGEIXPXXVDEDLWDKAXXVLKKRXEDVKGXQGICNHAXXLXGKLYCTHCGAAYYRRESKDKNGXKNSKWVCXGKXKNGADSCXXFXIXEEEXKPXXFQVFXXTEADAXXLVAEYVEMYKSLXDGSGIAXQIXXLRQQIDLXQKKKXKXLGYNAAGQLSXRXFXSMNKDCDXEIXXAERQIYDLEQQQXSKDEFRXKXXTXRHVLDEARRXAAQGLXSKEXVDXYIDXIXXTXEEXXXXRLQIKVXTXESTXKYLQXLXRRXGHTFKKM

SEQ ID NO: 35597 - DNA, 50 bp, Oscillibacter sp
  misc_feature 3: note = n is a, c, g, or t
  misc_feature 10: note = n is a, c, g, or t
  misc_feature 35: note = n is a, c, g, or t
  source 1..50: mol_type = genomic DNA
aancgtcgtncgggtcacacgttcaagaagatgangcccgtacgaactgc

SEQ ID NO: 35598 - DNA, 40 bp, Oscillibacter sp
  source 1..40: mol_type = genomic DNA
cgtgggcggccagatggtcaagaagatgatcgagtcctac

SEQ ID NO: 35599 - DNA, 50 bp, Oscillibacter sp
  misc_feature 3: note = n is a, c, g, or t
  misc_feature 10: note = n is a, c, g, or t
  misc_feature 35: note = n is a, c, g, or t
  source 1..50: mol_type = genomic DNA
aancgtcgtncgggtcacacgttcttgaagatgangcccgtacgaactgc

SEQ ID NO: 35600 - DNA, 40 bp, Oscillibacter sp
  source 1..40: mol_type = genomic DNA
cgtgggcgaccccatggacttgaagatggtggagtctact

SEQ ID NO: 35601 - protein, 539 aa, Pseudomonas syringae
MAKIGARVYSYLRFSDPRQGSGGSADRQLLYAQRWAADKGLELDESLSMRDEGLSAYHQRHVTQGALGVFLRAIEDGRIASGSVLVVEGLDRLSRAEPIQAQAQLAQIINAGITVVTASDGKEYNRAGLKAQPMDLVYSLLVMIRAHEESDTKSKRVKASILRLCQAWQSGTYRGLIRNGKDPQWLRWTGSAWEMIPERVLAVRRALALYQEGMGAARATKILHAEGLDYSAGGISKQQIYRLIKLQALRGAKCLSVDGEDFILEDYYPRLLSESEWADLQHLAGQRLRRRGHGEIPGIITGIGLTYCGYCGTALVGQNMMTRQRADGTIADGHRRLHCVSYGVNGGCTAGGSCSVVPVERALLTFCSDQLNLQRLLKVGDDGQGIRQQLAVARSTAEKLSVQLGRITDALLADDSGTAPTAFIRRARELEAEQAEAHKKVQQLEYELATVSGSGKPAQAERWVELAELVRSGDYSAREKVRQLVMDTFERIVVFMRGMSAEDRSGRFIDVQLLSRTGQQRLLQINRKTGAWVASEDWD

SEQ ID NO: 35602 - DNA, 50 bp, Pseudomonas syringae
  source 1..50: mol_type = genomic DNA
agtatatttacaccatcattagggcaccctaacgatatcattcctacacg

SEQ ID NO: 35603 - DNA, 40 bp, Pseudomonas syringae
  source 1..40: mol_type = genomic DNA
gtcaacgagtgcctttgggcaacccagtgaaacgaatcca

SEQ ID NO: 35604 - DNA, 50 bp, Pseudomonas syringae
  source 1..50: mol_type = genomic DNA
agtatatttacaccatcattagggaaccctaacgatatcattcctacacg

SEQ ID NO: 35605 - DNA, 40 bp, Pseudomonas syringae
  source 1..40: mol_type = genomic DNA
gtcagcctctgccttggggaatcccagggaagggaatcct

SEQ ID NO: 35606 - protein, 539 aa, Pseudomonas syringae
MAKIGARVYSYLRFSDPRQGAGGSADRQLLYAQRWAADKGLELDESLSMRDEGLSAYHQRHVTQGALGVFLRAIEDGRIASGSVLVVEGLDRLSRAEPIQAQAQLAQIINAGITVVTASDGKEYNRAGLKAQPMDLVYSLLVMIRAHEESDTKSKRVKASILRLCQAWQSGTYRGLIRNGKDPQWLRWTGSAWEMIPERVLAVRRALALYQEGMGAARATKILHAEGLDYSASGISKQQIYRLIKLQALRGAKCLSVDGEDFILEDYYPRLLSESEWADLQHLAGQRLRRRGHGEIPGIITGIGLTYCGYCGTALVGQNMMTRQRADGTIADGHRRLHCVSYGVNGGCTAGGSCSVVPVERALLTFCSDQLNLQRLLKVGDDGQGIRQQLAVARSTAEKLSVQLGRITDALLADDSGAAPTAFIRRARELEAEQADAHKKVQQLEYELATVSGSGKPAQAEKWVELADLVRRGDYSAREKVRQLVMDTFERIVVFMRGMSAEDRSGKFIDVQLLSRTGQQRLLQINRKTGAWVASEDWD

SEQ ID NO: 35607 - DNA, 50 bp, Pseudomonas syringae
  source 1..50: mol_type = genomic DNA
ggtttattttcaatatctttaggccaccctaacgatatcattcctacacg

SEQ ID NO: 35608 - DNA, 40 bp, Pseudomonas syringae; identical to SEQ ID NO: 35603
  source 1..40: mol_type = genomic DNA

SEQ ID NO: 35609 - DNA, 50 bp, Pseudomonas syringae
  source 1..50: mol_type = genomic DNA
ggtttattttcaatatctttaggcaaccctaacgatatcattcctacacg

SEQ ID NO: 35610 - DNA, 40 bp, Pseudomonas syringae; identical to SEQ ID NO: 35605
  source 1..40: mol_type = genomic DNA

SEQ ID NO: 35611 - protein, 489 aa, Pseudomonas aeruginosa
MAKAYSYIRFSSAKQAQGSSLERQQENLSRFLAENPQYELAETRFEDLGISGWSGEHLGHGLGKLQAAVNAGIIEAGDIIVIEAIDRISRLPLEDAVSLTSGILNKGVAIHTVEDRTTYDKTTYRQGHTALALILKTFASWEYSERLSERVKASYSKRVEAVRKGETIRRKNACWHTSDGKAVEEVAVHIRWMFEEYIAGAGVRKLAGEMMGRHPAFARVNPSHIRRWLRDKSLIGTWAKRDGEEVPGAFEPVLTPDVFYQAQALMNPQKDYTHPAKNFLTGLVKCQECGGNFAVKSQGTGNPFMGCYARTYHRCANGTSIPLLVLHRVVMEEALDYIEDGIRASRLGEHDKHRLVVQGKLEEVQRGINGLSEAIAAHGFMPELNAKLAELKVTRTGLEAELARIPQKGDKEPVTNRELMAVWNGDKLKLNAMLQRAGFAVWCTGRKMKIGADGPEYEYLRYARRAKDFIVKTPVGEWELDGSQGNYHD

SEQ ID NO: 35612 - DNA, 50 bp, Pseudomonas aeruginosa; identical to SEQ ID NO: 15252
  source 1..50: mol_type = genomic DNA

SEQ ID NO: 35613 - DNA, 40 bp, Pseudomonas aeruginosa
  source 1..40: mol_type = genomic DNA
gcccgcgggatcgcgcaggccgcagtagtagccgaccgga

SEQ ID NO: 35614 - DNA, 50 bp, Pseudomonas aeruginosa
  source 1..50: mol_type = genomic DNA
cccggttatagcgtgcatcattgcgcgctgcgtgatacactctaactgag

SEQ ID NO: 35615 - DNA, 40 bp, Pseudomonas aeruginosa
  source 1..40: mol_type = genomic DNA
gctcgcgggcccgcgaaaggcgcaggagcagcggagccga

SEQ ID NO: 35616 - protein, 489 aa, Pseudomonas aeruginosa; identical to SEQ ID NO: 18516

SEQ ID NO: 35617 - DNA, 50 bp, Pseudomonas aeruginosa; identical to SEQ ID NO: 15252
  source 1..50: mol_type = genomic DNA

SEQ ID NO: 35618 - DNA, 40 bp, Pseudomonas aeruginosa; identical to SEQ ID NO: 35613
  source 1..40: mol_type = genomic DNA

SEQ ID NO: 35619 - DNA, 50 bp, Pseudomonas aeruginosa; identical to SEQ ID NO: 35614
  source 1..50: mol_type = genomic DNA

SEQ ID NO: 35620 - DNA, 40 bp, Pseudomonas aeruginosa; identical to SEQ ID NO: 35615
  source 1..40: mol_type = genomic DNA

SEQ ID NO: 35621 - protein, 489 aa, Pseudomonas aeruginosa; identical to SEQ ID NO: 15251

SEQ ID NO: 35622 - DNA, 50 bp, Pseudomonas aeruginosa; identical to SEQ ID NO: 15252
  source 1..50: mol_type = genomic DNA

SEQ ID NO: 35623 - DNA, 40 bp, Pseudomonas aeruginosa; identical to SEQ ID NO: 35613
  source 1..40: mol_type = genomic DNA

SEQ ID NO: 35624 - DNA, 50 bp, Pseudomonas aeruginosa; identical to SEQ ID NO: 35614
  source 1..50: mol_type = genomic DNA

SEQ ID NO: 35625 - DNA, 40 bp, Pseudomonas aeruginosa; identical to SEQ ID NO: 35615
  source 1..40: mol_type = genomic DNA

SEQ ID NO: 35626 - protein, 490 aa, Pseudomonas aeruginosa
MAKAYSYIRFSSAKQAQGSSLERQQENLSRFLAENPQYELAETRFEDLGISGWSGEHLGHGLGKLQAAVNAGIIEAGDIIVIEAIDRISRLPLEDAVGLTSGILNKGVAIHTVEDRTTYDKTTYRQGHTALALILKTFASWEYSERLSERVKASYSKRAEAVRKGETIRRKNACWHTSDGKVVEEVAVHIRWMFEEYIAGAGVRKLAGEMMGRHPVFARVNPSHIRRWLRDKSLIGTWAKRDGEEVPGAFEPVLTPAVFYQAQALMNPQKNYTHPAKNFLTGLVKCQECGGNFAVKSQGTGNPFMGCYARTYHKCANGTSIPLLVLHRVVMEEALDYIEDGIRASRLGEHDKHRLVVQGKMEEVQRGINGLSEAIAAHGFMPELNAKLAELKVTRTSLEAELARIPQKGDKEPVTNRELMAVWNGDKLKLNAMLQRAGFAVWCTGRKMKIGADGPEYEYLRYARRAKDFIVKTPIGEWELDGSQGNYQYE

SEQ ID NO: 35627 - DNA, 50 bp, Pseudomonas aeruginosa
  source 1..50: mol_type = genomic DNA
cccggttatagcgtgcatcattgcccgctgcgtgatacagtctaacagag

SEQ ID NO: 35628 - DNA, 40 bp, Pseudomonas aeruginosa; identical to SEQ ID NO: 35613
  source 1..40: mol_type = genomic DNA

SEQ ID NO: 35629 - DNA, 50 bp, Pseudomonas aeruginosa
  source 1..50: mol_type = genomic DNA
cccggttatagcgtgcatcattgcgcgctgcgtgatacagtctaacagag

SEQ ID NO: 35630 - DNA, 40 bp, Pseudomonas aeruginosa; identical to SEQ ID NO: 35615
  source 1..40: mol_type = genomic DNA

SEQ ID NO: 35631 - protein, 450 aa, Bacillus cereus
MTKAAIYIRVSTQDQVENYSIEVQRERIRAYCKAKGWDIYDEYIDGGYSGSNLDRPDIKRLLNDLKKIDVVVVYKLDRLSRSQRDTLELIEEHFLKNNVDFVSITETLDTSTPFGKAMIGILSVFAQLERETIAERMRMGHIKRAENGLRGNGGDYDPSGYTRVDGHLILNPNEAKHIKRAFDLYEQYHSITRVQEVLKEEGYTIWRFRRYRDVLSNTLYIGQITFAGKTYKGQHEPIVSLEQFKRVQALLKRHKGHNAHKAKQSLLSGLITCSCCGEKFVAYSTGKSKDIESKRYYYYICRAKRFPSEYDEKCLNKTWSRKKLEEVIFDELKNLTVKKSASQKKEKKINYEKLIKDIDKKMERLLDLFTNTTNISRQLLETKMDKLNLEKEHLILKQQSYEQEFSISKDMITTINESLETMDFKDKQIMINTFIQEIHIDHDVVDIIWR

SEQ ID NO: 35632 - DNA, 50 bp, Bacillus cereus
  source 1..50: mol_type = genomic DNA
tttatgtattcatttcgggctactcaagtagctagtcttgaataccgaaa

SEQ ID NO: 35633 - DNA, 40 bp, Bacillus cereus
  source 1..40: mol_type = genomic DNA
ttctgtttttccagcgccgcacacagcccaaataaaaaac

SEQ ID NO: 35634 - DNA, 50 bp, Bacillus cereus
  source 1..50: mol_type = genomic DNA
tttatgtattcatttcgggctactgtagtagctagtcttgaataccgaaa

SEQ ID NO: 35635 - DNA, 40 bp, Bacillus cereus
  source 1..40: mol_type = genomic DNA
ttctgtgtttcaaaggcaggtgacagccaggataaaacac

SEQ ID NO: 35636 - protein, 426 aa, Erysipelotrichaceae bacterium I46
MIAIYVRESTPRQYEKGFNFETQKEKSLQFLDLYDIDEEYKFYLEKGKSAWTTNRPVLKELMQDIVDGKITTLVIYKLDRLLRRHKGKEEILSLLEEYNVTLMSVSEKIDTSSSYGKLILNMMVSYSEWEEDVNSERTNDGLTMGAELGYFMNGGRCPFGWERYTVGNHKKIKVNRAEKEVIHKMAEYIHNGYSTYQVKMLINENEYLKSINKTFCENQIINILKDKKNVGIYEYKGKEYVLEGETIFTEAEYKQVQNDLAERSYTGRYSYLFDHKVRSIKGAKARLECSVKKDKVYLYYFDNQSKKRISESMVKKQFIKYMKESNLLYIQKRTKSRSADIRHIAALRRQLKNMYENMELTTEVYFEEMRKLDKEQRSADNYYKRYVQEFDIWFNSLDYDQQVKIIWQNIKCIEVDFETKELRFNS

SEQ ID NO: 35637 - DNA, 50 bp, Erysipelotrichaceae bacterium I46
  source 1..50: mol_type = genomic DNA
aaattcgatgggcgaaccaataatcgctccattagtgaattaacgaattt

SEQ ID NO: 35638 - DNA, 40 bp, Erysipelotrichaceae bacterium I46
  source 1..40: mol_type = genomic DNA
gagttcgattctcatcacccgctccatatatcaaacaagt

SEQ ID NO: 35639 - DNA, 50 bp, Erysipelotrichaceae bacterium I46
  source 1..50: mol_type = genomic DNA
aaattcgatgggcgaaccaataatctctccattagtgaattaacgaattt

SEQ ID NO: 35640 - DNA, 40 bp, Erysipelotrichaceae bacterium I46
  source 1..40: mol_type = genomic DNA
gagttagcttctcataacactctcaaaatactaagcacgt

SEQ ID NO: 35641 - protein, 676 aa, Phocaeicola vulgatus; identical to SEQ ID NO: 10976

SEQ ID NO: 35642 - DNA, 50 bp, Phocaeicola vulgatus; identical to SEQ ID NO: 10977
  source 1..50: mol_type = genomic DNA

SEQ ID NO: 35643 - DNA, 40 bp, Phocaeicola vulgatus; identical to SEQ ID NO: 27418
  source 1..40: mol_type = genomic DNA

SEQ ID NO: 35644 - DNA, 50 bp, Phocaeicola vulgatus
  source 1..50: mol_type = genomic DNA
aaggatgtgttcatttcggcagtagacataggtgcgattgacacatcctg

SEQ ID NO: 35645 - DNA, 40 bp, Phocaeicola vulgatus
  source 1..40: mol_type = genomic DNA
tatggattgctttctactagatattggagggttttcctat

SEQ ID NO: 35646 - protein, 540 aa, Ruminococcus torques; identical to SEQ ID NO: 14021

SEQ ID NO: 35647 - DNA, 50 bp, Ruminococcus torques
  source 1..50: mol_type = genomic DNA
caatatctttaactatgtgataccgggggttcacttagataaagatacca

SEQ ID NO: 35648 - DNA, 40 bp, Ruminococcus torques
  source 1..40: mol_type = genomic DNA
agtatcaaaatgggaacgaggcatttgcttacctgatgtg

SEQ ID NO: 35649 - DNA, 50 bp, Ruminococcus torques
  source 1..50: mol_type = genomic DNA
caatatctttaactatgtgatacctagggttcacttagataaagatacca

SEQ ID NO: 35650 - DNA, 40 bp, Ruminococcus torques
  source 1..40: mol_type = genomic DNA
acctgcaaaatgggaacgatagttatgcttacctcatagg

SEQ ID NO: 35651 - protein, 456 aa, Massiliimalia timonensis
MRACREYAAQKGLHVISTYADEAISGAGAKTASRAQYQRMLRDCRKGTFDIILIHKYDRIARNLGEHVNLEKRLNDLGIQLIATAQDFGISKEAKIMKSLVWAMSEYYLDNLSEEVQKGHKETALKALHNGGYPPFGYDVVDQHYVINEIEALYVKKIFQAAAECRGFTDLIREMESAGIRGKRGKVIRYPQIYEILKNEKYTGVYVYSPKEEKRRTDRRGKPNAIRIENALPVIIDKAQFMEVQKIMTQNKQVGKKAGYLCSGLVYCECGAKMHGMKSKRKGHEYEYFYCSARCGASVVHMEDIDNAVLKYLHDLLSKENQIKVAEAMRSYKGNEAERVKDFNTILNRKIQEKQAQYDSLMDNLTAGALPPAVLEDIGNKLQEIKTQIETLKKTEPPKDFTTEQVQAWLESIKAQPDREAVRLLVERIDVKKDKEKTVFNIQSTLNTVLGNTGCG

SEQ ID NO: 35652 - DNA, 50 bp, Massiliimalia timonensis
  source 1..50: mol_type = genomic DNA
gtcttaggtaatactggttgcggaggtttgcaacatagtttccctgaaat

SEQ ID NO: 35653 - DNA, 40 bp, Massiliimalia timonensis
  source 1..40: mol_type = genomic DNA
gcttttcaatggttgcggaggcaggatttgaacctacgac

SEQ ID NO: 35654 - DNA, 50 bp, Massiliimalia timonensis
  source 1..50: mol_type = genomic DNA
gtcttaggtaatactggttgcggagctttgcaacatagtttccctgaaat

SEQ ID NO: 35655 - DNA, 40 bp, Massiliimalia timonensis
  source 1..40: mol_type = genomic DNA
gcttgtccaaggtcgcatagccagaattagaacccaggac

SEQ ID NO: 35656 - protein, 477 aa, Streptomyces olivaceus
MARKVGVYTRISRDDEGESLGVARQQQDCERLADLRSWQVVKTYEDNDVSAFKRNVVRDEFELMLRDLRAGLIDGIVAYDLDRLARQPRDLERLIEIFDERPRLEFATVTNDINLGSPDGRTMARIMVAFANKSSHDASRRIKRKHLELAQQGKDSGGPAPYGWGKDDRTKVDPKAAEAIREAQREVLAGVRVGTIRTRWQQQGLGNPRAGTKRMAHHHVEQILTNPRLVGYRTYHGEILVGEDGEPVKGNWERINTLEEWEAVCAAVAERKQKHPGRSLARKYLLSGIARCGLCKTKIRGQINNRWQPGSKAARYTYQCSVVNGGCGKVGRVGEPVDNLIAQLALEEQRARAGVAAIPVDQQWSREAELLEITQDIAQLVEAERSKQITVATLLQLLPAKERLRDELKLERARFYKEQKQAEAKGEAANLTIDEFFALPVERQQEIVLHSISAVIIHPAGRGRRKFDPSLIEPVWR

SEQ ID NO: 35657 - DNA, 50 bp, Streptomyces olivaceus
  source 1..50: mol_type = genomic DNA
ccccgacttatgtactggaggcaagacgctctagctgacttgactcgatg

SEQ ID NO: 35658 - DNA, 40 bp, Streptomyces olivaceus
  source 1..40: mol_type = genomic DNA
gccgtacgacgggaggcaggacactccacgggaagttgat

SEQ ID NO: 35659 - DNA, 50 bp, Streptomyces olivaceus
  source 1..50: mol_type = genomic DNA
ccccgacttatgtactggaggcaaatcgctctagctgacttgactcgatg

SEQ ID NO: 35660 - DNA, 40 bp, Streptomyces olivaceus
  source 1..40: mol_type = genomic DNA
gccatttgccgcaaggcagatcagtgcaagggaagttgct

SEQ ID NO: 35661 - protein, 550 aa, Anaerostipes hadrus
MKKRRCYIYTRVSTSMQVEGYSLEAQKERLRKYADFQEMVIVGEYSDEGKSGKSIEGRQEFMQMLRDIEEGKDRVEFVLVYKLSRFGRNAADVLNSLQRMQDFGVNLICVEDGIDSSKDSGKLMISVLSAVAEIERENILVQTMEGRRQKARDGKWNGGFAPYGYKLLNGELEIAEDEAEIIRIIFDKYIHTNMGVNGIAAYLNEHGYKKKKRQNNTLDAFATSFIKGVLDNPIYCGKLAFGRRKTERVPGKRNEFRIVKQDSYILSDGIHEAIISEDDWNLAKQKRNINGVKHEKIHSLEHEHILSGILKCPICGKGMYGNVNRKKKKDGTFYKDYFYYACKHRYYVNGHKCDYRKQWNEEKVNDAVAEVIKKLVNNPKFEAAIRAKINSKIDTGELETEHENLKKQLRQVLGAKNRLGQQMDNLDISDKMYDRKYQDMQDRLNGLYDEIERLESLIDDIVSRKEYIRQQKISEDGVYQYLLYFDKLYDKFTDMEKKEFMNSFVERVDIYEDEQPNGRFLKHIKFKFPVFFDGEEIQELSWDNETTVET

SEQ ID NO: 35662 - DNA, 50 bp, Anaerostipes hadrus
  source 1..50: mol_type = genomic DNA
agttgggacaacgaaacaacagttgagacggttgttcttttgtcccaaca

SEQ ID NO: 35663 - DNA, 40 bp, Anaerostipes hadrus
  source 1..40: mol_type = genomic DNA
tccttcgacggtgcacgtggagacggtggtgttgctggag

SEQ ID NO: 35664 - DNA, 50 bp, Anaerostipes hadrus
  source 1..50: mol_type = genomic DNA
agttgggacaacgaaacaacagttgtgacggttgttcttttgtcccaaca

SEQ ID NO: 35665 - DNA, 40 bp, Anaerostipes hadrus
  source 1..40: mol_type = genomic DNA
tgcttagatggtggtggtggtgatggtggtggtggtggtg

SEQ ID NO: 35666 - protein, 480 aa, Streptococcus suis
MNVTKIALYLRLSVDEAETDESNSITNQRYLLNHYLDQATEFKNWERLEFVDDGFSGTSLNRPSFQRLMAAVKVGTIRHIIVKDLSRFMRDYLELGNYLENIFPFLGVRFIALNDHYDSLTSEQNGLDIDVPFRNLLNDFYAKDVSEKVKSAMNSMKRSGKNMSWLPPFGYLKDPEDRFKIIIDETVAPIVRRIFALYLDGNSYQTIARLLNEEQVITPAERKMQISQARYAKSLRLTTEQKRNVWSSTTVGQILKNEAYKGTYLFNTRTYVRGKHVFRPKSEWERIENNHEAIISSELFEQVVQLKRSKATKRKQHQIPKTSSVLTGLIRCEHCDHSLIGHYNHQGYQYFSCRYCKGQGEKMKSCRVDRIEQAIKGKLGDEAVKTHQKVSKPLVLREIERLKTEKLACFQDYKDSLLTREDYIAKKKEVDKSVQALEEQLKEASYVQLPTDKRLSKEIVVAHVDKVVVDCLGFFTVIYK

SEQ ID NO: 35667 - DNA, 50 bp, Streptococcus suis; identical to SEQ ID NO: 35397
  source 1..50: mol_type = genomic DNA

SEQ ID NO: 35668 - DNA, 40 bp, Streptococcus suis; identical to SEQ ID NO: 29073
  source 1..40: mol_type = genomic DNA

SEQ ID NO: 35669 - DNA, 50 bp, Streptococcus suis; identical to SEQ ID NO: 35399
  source 1..50: mol_type = genomic DNA

SEQ ID NO: 35670 - DNA, 40 bp, Streptococcus suis
  source 1..40: mol_type = genomic DNA
tagttttgcctttccagaatgtcatattaaagaatgcagc

SEQ ID NO: 35671 - protein, 478 aa, Streptococcus suis
MSKMALYLRLSVDEDGTDESNSITNQRYLLNHYLDQSPDFSRWERLEFVDDGFSGTSLNRPAFQRLMTDVKVGIIRHIIVKDLSRFMRDYLELGNYLENIFPFLGVRFIAINDQYDSLTSEQNGLDIDVPFRNLLNDFYAKDVSEKVKSAMNSMKRSGKNMSWLPPFGYIKDPEDRFKIIIDETVAPIVRRIFTLYLDGNSYQTIARLLNEEQVITPAERKMQISQARYAKSLRLTTEQKRNVWSSTTVGQILMNEAYKGTYLFNTRTYVRGKHVFRPKSEWERIENNHEAIISSELFEQVARLKAKKVIQKKHSHPPKIPSILTGLIRCEHCDHSLIGSYNHQGYQYFSCRYCKGQGEKMKSCRADKIEQAIKEKLGYEEDKSRPKASKTRVLREIERLKRQKLSFFQDYKDSLMTREDYITKKMVIDKTVRNLEEQLKEVNTFQLLSNDRLTKEIVSTHIEKVVVDCLGFFTVIYK

SEQ ID NO: 35672 - DNA, 50 bp, Streptococcus suis; identical to SEQ ID NO: 35397
  source 1..50: mol_type = genomic DNA

SEQ ID NO: 35673 - DNA, 40 bp, Streptococcus suis; identical to SEQ ID NO: 29073
  source 1..40: mol_type = genomic DNA

SEQ ID NO: 35674 - DNA, 50 bp, Streptococcus suis; identical to SEQ ID NO: 35399
  source 1..50: mol_type = genomic DNA

SEQ ID NO: 35675 - DNA, 40 bp, Streptococcus suis; identical to SEQ ID NO: 35670
  source 1..40: mol_type = genomic DNA

SEQ ID NO: 35676 - protein, 478 aa, Streptococcus suis; identical to SEQ ID NO: 35396

SEQ ID NO: 35677 - DNA, 50 bp, Streptococcus suis; identical to SEQ ID NO: 35397
  source 1..50: mol_type = genomic DNA

SEQ ID NO: 35678 - DNA, 40 bp, Streptococcus suis; identical to SEQ ID NO: 29073
  source 1..40: mol_type = genomic DNA

SEQ ID NO: 35679 - DNA, 50 bp, Streptococcus suis; identical to SEQ ID NO: 35399
  source 1..50: mol_type = genomic DNA

SEQ ID NO: 35680 - DNA, 40 bp, Streptococcus suis; identical to SEQ ID NO: 35670
  source 1..40: mol_type = genomic DNA

SEQ ID NO: 35681 - protein, 478 aa, Streptococcus suis
MSKMALYLRLSVDEDGTDESNSITNQRYLLNQYLDQSSDFNHWERLEFVDDGFSGTSLNRPAFQRLMADVKAGIIRHIIVKDLSRFMRDYLELGNYLENIFPFLGVRFIAINDQYDSLTSEQNGLDIDVPFRNLLNDFYAKDVSEKVKSAMNSMKRSGKNMSWLPPFGYIKDPEDRFKIIIDEAVAPIVRRIFTLYLDGNSYQKIARILNKEQVITPAERKMQISQARYEKSLRLTREQERNVWSVINVAQILKNEAYKGTYLYNTRTYIRGKHVSLPESEWERIENNHEAIISAELFEQVARLKAKKVTQKKHSQPTKIPSILTGLIRCEHCDHSLIGHYNHQGYQYFSCRYCKGQGEKMKSCRVDRIEQSIKEKLGQEVVKPRQITSKTRLLREIERLKKQKLSCYQDCKDNLVTRKEYITKKMDIDESVNNLEQQLNEANKVQLLTKDQLTKEIISSHIEKVVVDCLGFFTVIYK

SEQ ID NO: 35682 - DNA, 50 bp, Streptococcus suis; identical to SEQ ID NO: 35397
  source 1..50: mol_type = genomic DNA

SEQ ID NO: 35683 - DNA, 40 bp, Streptococcus suis; identical to SEQ ID NO: 29073
  source 1..40: mol_type = genomic DNA

SEQ ID NO: 35684 - DNA, 50 bp, Streptococcus suis; identical to SEQ ID NO: 35399
  source 1..50: mol_type = genomic DNA

SEQ ID NO: 35685 - DNA, 40 bp, Streptococcus suis; identical to SEQ ID NO: 35670
  source 1..40: mol_type = genomic DNA

SEQ ID NO: 35686 - protein, 478 aa, Streptococcus suis
MSKVALYLRLSVDEAGTDESISIVNQRYLLHHYLDNSSDFQNFQREEFVDDGFSGTTVNRPAFQRLMTKVKSGEIRHVIVKDLSRFMRDYLELGNYLENIFPFLGVRFIALNDQYDSLTSENNGVEIDVPFKNLLNEFYAKDVSEKIKSAMNSMKRSGKNMSWLPPFGYLKDPEDRFKIIIDETVAPIVRRIFALYLDGNSYQTIARLLNEEQVITPAERKMQISQARYAKSLRLTTEQKRNVWSSTTVGQILKNEAYKGTYLFNTRTYVRGKHVFRPKSEWERIENNHEAIISSELFEQVARLKAKKVIQKKHYHTPKIPSILTGLIRCEHCDHSLIGSYNHQGYQYFSCRYCKGQGEKMKSCRADKIEQAIKEKLGYEEDKSRPKASKTRVLREIERLKRQKLSFFQDYKDSLMTREDYITKKMVIDKTVRNLEEQLKEVNTFQLLSNDRLTKEIVSTHIEKVVVDCLGFFTVIYK

SEQ ID NO: 35687 - DNA, 50 bp, Streptococcus suis; identical to SEQ ID NO: 35397
  source 1..50: mol_type = genomic DNA

SEQ ID NO: 35688 - DNA, 40 bp, Streptococcus suis; identical to SEQ ID NO: 29073
  source 1..40: mol_type = genomic DNA

SEQ ID NO: 35689 - DNA, 50 bp, Streptococcus suis; identical to SEQ ID NO: 35399
  source 1..50: mol_type = genomic DNA

SEQ ID NO: 35690 - DNA, 40 bp, Streptococcus suis; identical to SEQ ID NO: 35670
  source 1..40: mol_type = genomic DNA

SEQ ID NO: 35691 - protein, 478 aa, Streptococcus suis
MSKMALYLRLSVDEDGTDESNSITNQRYLLNQYLDQSSDFNHWERLEFVDDGFSGTSLNRPAFQRLMADVKSGIIRHIIVKDLSRFMRDYLELGNYLENIFPFLGVRFIAINDQYDSLTSEQNGLDIDVPFRNLLNDFYAKDVSEKVKSAMNSMKRSGKNMSWLPPFGYIKDPEDRFKIIIDEAVAPIVRRIFTLYLEGNSYQTIARILNKEQVITPAERKMQISQARYEKSLRLTREQERNVWSVINVAQILKNEAYKGTYLYNTRTYIRGKHVSLPESEWERIENNHEAIISAELFEQVARLKAKKVIQKKHSHPPKIPSILTGLIRCEHCDHSLIGSYNHQGYQYFSCRYCKGQGEKMKSCRADKIEQAIKEKLGYEEDKSRPKASKTRVLREIERLKRQKLSFFQDYKDSLMTRDDYITKKMLIDETVKNLEEQLNEVNKVQLLSNDRLTKEIVSTHIEKVVVDCLGFFTVIYK

SEQ ID NO: 35692 - DNA, 50 bp, Streptococcus suis; identical to SEQ ID NO: 35397
  source 1..50: mol_type = genomic DNA

SEQ ID NO: 35693 - DNA, 40 bp, Streptococcus suis; identical to SEQ ID NO: 29073
  source 1..40: mol_type = genomic DNA

SEQ ID NO: 35694 - DNA, 50 bp, Streptococcus suis; identical to SEQ ID NO: 35399
  source 1..50: mol_type = genomic DNA

SEQ ID NO: 35695 - DNA, 40 bp, Streptococcus suis; identical to SEQ ID NO: 35670
  source 1..40: mol_type = genomic DNA

SEQ ID NO: 35696 - protein, 478 aa, Streptococcus suis; identical to SEQ ID NO: 6081

SEQ ID NO: 35697 - DNA, 50 bp, Streptococcus suis; identical to SEQ ID NO: 35397
  source 1..50: mol_type = genomic DNA

SEQ ID NO: 35698 - DNA, 40 bp, Streptococcus suis; identical to SEQ ID NO: 29073
  source 1..40: mol_type = genomic DNA

SEQ ID NO: 35699 - DNA, 50 bp, Streptococcus suis; identical to SEQ ID NO: 35399
  source 1..50: mol_type = genomic DNA

SEQ ID NO: 35700 - DNA, 40 bp, Streptococcus suis; identical to SEQ ID NO: 35670
  source 1..40: mol_type = genomic DNA

SEQ ID NO: 35701 - protein, 478 aa, Streptococcus suis; identical to SEQ ID NO: 6081

SEQ ID NO: 35702 - DNA, 50 bp, Streptococcus suis
  source 1..50: mol_type = genomic DNA
agtgtcagttacttgacataagaggggggggattgtgtcataataatgac

SEQ ID NO: 35703 - DNA, 40 bp, Streptococcus suis; identical to SEQ ID NO: 29073
  source 1..40: mol_type = genomic DNA

SEQ ID NO: 35704 - DNA, 50 bp, Streptococcus suis
  source 1..50: mol_type = genomic DNA
agtgtcagttacttgacataagagtggggggattgtgtcataataatgac

SEQ ID NO: 35705 - DNA, 40 bp, Streptococcus suis; identical to SEQ ID NO: 35670
  source 1..40: mol_type = genomic DNA

SEQ ID NO: 35706 - protein, 478 aa, Streptococcus suis
MTKIALYLRLSVDEAETDESNSITNQRYLLNHYLDQATEFKNWERLEFVDDGFSGTSLNRPSFQRLMAAVKVGTIRHIIVKDLSRFMRDYLELGNYLENIFPFLGVRFIALNDHYDSLTSEQNGLDIDVPFRNLLNDFYAKDVSEKVKSAMNSMKRSGKNMSWLPPFGYLKDPEDRFKIIIDETVAPIVRRIFALYLDGNSYQTIARLLNEEQVITPAERKMQISQARYAKSLRLTTEQKRNVWSSTTVGQILKNEAYKGTYLFNTRTYVRGKHVFRPKSEWERIENNHEAIISSELFEQVVQLKRSKATKRKQHQIPKTSSVLTGLIRCEHCDHSLIGHYNHQGYQYFSCRYCKGQGEKMKSCRVDRIEQAIKGKLGDEAVKTHQKVSKPLVLREIERLKTEKLACFQDYKDSLLTREDYIAKKKEVDKSVQALEEQLKEASYVQLPTDKRLSKEIVVAHVDKVVVDCLGFFTVIYK

SEQ ID NO: 35707 - DNA, 50 bp, Streptococcus suis; identical to SEQ ID NO: 35397
  source 1..50: mol_type = genomic DNA

SEQ ID NO: 35708 - DNA, 40 bp, Streptococcus suis; identical to SEQ ID NO: 29073
  source 1..40: mol_type = genomic DNA

SEQ ID NO: 35709 - DNA, 50 bp, Streptococcus suis; identical to SEQ ID NO: 35399
  source 1..50: mol_type = genomic DNA

SEQ ID NO: 35710 - DNA, 40 bp, Streptococcus suis; identical to SEQ ID NO: 35670
  source 1..40: mol_type = genomic DNA

SEQ ID NO: 35711 - protein, 574 aa, Rhodopseudomonas palustris
MKVAIYARYSSDNQRDASIADQLRMCRLHAEKQGWHVIEEYTDHAISGASLIRPGIQALMTDAMSGRFDVILSEAMDRLSRDQEDIAGIFKRMSYADVKMFTLSEGEVSHLHVGLKGTMNALFLKDLADKTRRGQRGRVEAGKSGGGNSYGYDVVKKLDVNGEPIRGDRTINEDQAAVVLRIFRDYAAGKSAKTIAFALNKDGIPAPSGGDWGFSTINGNPKRGNGILNNEMYVGKIVWNRQRFVKDPNTGRRQARPNPESEWVIQETPELRILDDDLWNAVKARQEKNKLTRDDNGNTDVRTVNHRRRPKYLFSGLTKCSCCGGGYSAISATLIGCSTARNKGTCDNRVNIRRDELESRVLNALRTRLVDPELFAHFCEVFTQEMNRLRMEGRAGIASAEAEIAKIDRELTKLLTAIKSGGPIEAIVEDMKQLEARKVELKHFLAEAEEPPPLLHPSMALQYRKRIQQLYESLQDEEEGKRVEAADTIRSLVDQIVLTPVEGKVEIDVQGDLAGILTISTQSKNPAAGATGLQVKMVAGAGSNLHLLPEQVKMVAGTGIDHNLQSTPVKMVAG

SEQ ID NO: 35712 - DNA, 50 bp, Rhodopseudomonas palustris
  source 1..50: mol_type = genomic DNA
gacgccggtaaagatggttgcgggaggctgcaaccaccattacttgcgac

SEQ ID NO: 35713 - DNA, 40 bp, Rhodopseudomonas palustris
  source 1..40: mol_type = genomic DNA
atcaaagcttggttgcgggagtaggatttgaacctacgac

SEQ ID NO: 35714 - DNA, 50 bp, Rhodopseudomonas palustris
  source 1..50: mol_type = genomic DNA
gacgccggtaaagatggttgcggggagctgcaaccaccattacttgcgac

SEQ ID NO: 35715 - DNA, 40 bp, Rhodopseudomonas palustris
  source 1..40: mol_type = genomic DNA
atcacagcttagtagcagagacaggatttgaacccagagc

SEQ ID NO: 35716 - protein, 467 aa, Mediterraneibacter glycyrrhizinilyticus
MLADIEAGKVGTVIVKDMSRLGRNYLQVGMYTEMIFPQKGVRFIAINDGVDSAQGDNDFAPLRNIFNEWLVRDTSKKIKAVKRSKGMSGKPITSKPVYGYLMDEDENFIIDEEAAPVVKQIYNLCLAGNGPTKIARMLTEQQIPTPGTLEYRRTGSTRRYHPGYECKWATNTVVHILENREYTGCLVNFKTEKLSYKVKHSVENPLEKQVIFENHHEPIIDTQTWERVQELRKQRKRPNRYDEVGLFSGILFCADCGSVMYQQRYQTDKRKQDCYICGNYKKRTHDCTAHFIRTDLLTAGVLSNLRKVTSYAAKHEARFMKLLIEQNEDGGKRRNAAKKKELEATEKRIAELSAIFKRLYEDSVTGRISDERFTELSADYEAEQRELKERAAAIQAELSKAQEATVNAEKFMNVVRRHTSFEELTPTLLREFVEKIVVHECSYDENKTRRQDIEIYYSFVGKVDLPE

SEQ ID NO: 35717 - DNA, 50 bp, Mediterraneibacter glycyrrhizinilyticus
  source 1..50: mol_type = genomic DNA
ttctttatcacacatcagtaaatgctcatgtacggtaaagaagcaagcaa

SEQ ID NO: 35718 - DNA, 40 bp, Mediterraneibacter glycyrrhizinilyticus
  source 1..40: mol_type = genomic DNA
ttcaatcacaggacggatgccctcggcttgtagtatggta

SEQ ID NO: 35719 - DNA, 50 bp, Mediterraneibacter glycyrrhizinilyticus
  source 1..50: mol_type = genomic DNA
ttctttatcacacatcagtaaatgtccatgtacggtaaagaagcaagcaa

SEQ ID NO: 35720 - DNA, 40 bp, Mediterraneibacter glycyrrhizinilyticus
  source 1..40: mol_type = genomic DNA
ttcattcacaggaagtatgtcctgggcctctaccatgttc

SEQ ID NO: 35721 - protein, 509 aa, Mameliella alba
MGRDYCARQGWEVVDVFTDSERTGRNLKRPGFQAMTAAATKQAFDVVVVEVIDRLTRKVRDALGIHELFAYQNIQLFSIQEGGEQNFMNVLFLGFSAQQFSDKISDHTKRGIKGALRRGVLLSRAYGYRKAPEGSEVNRVIDEFEANVVKRIYEMTAAGHSSFTIAKALNADLIPAPTGGSWDSSTIRGNPKRGEGILYNPLYIGRPQVCRNTGKYHPETAMRRTVPSPEEMVEAHHPSLQIISDDLWQQTREAIAVYRAKIKTNRNPRDARRNLYLLSGLMFCGCCGHKFVKTNATSYSCREASKGACSNKRAISRKRLEKRVFGRLRSAFRSPEMMDAFAAVVAAEKAKQDGGDMKSQIRVLEEKLKALTRGKKNIQAAIMEGAPYAEFRAQFDELVDQESAVQARLASLKEQMSRNLDDMPPVDVMFEQAITSMETILGNPDDVEQAHQYLKTLIRRIVLTSDENALHGMQVRVETDFANLFLGGQAEASDMDQTHLYCRSTSLPL

SEQ ID NO: 35722 - DNA, 50 bp, Mameliella alba
  source 1..50: mol_type = genomic DNA
aatgctagtaacagctggtgatggggctacacccaactttagttagctta

SEQ ID NO: 35723 - DNA, 40 bp, Mameliella alba
  source 1..40: mol_type = genomic DNA
caatactccgggggtgtgggggcagagcccccactgcgtc

SEQ ID NO: 35724 - DNA, 50 bp, Mameliella alba
  source 1..50: mol_type = genomic DNA
aatgctagtaacagctggtgatggatctacacccaactttagttagctta

SEQ ID NO: 35725 - DNA, 40 bp, Mameliella alba
  source 1..40: mol_type = genomic DNA
caagtggcagggggtgtggatgcaaaaccctcactgcctg

SEQ ID NO: 35726 - protein, 522 aa, Eubacterium ventriosum
MIESKSRVAIYCRLSEEDRNKQSETDDSNSIQNQKSMLLQYSLEHGWEVYNIYSDDDYTGSDRRRPEFNRLLEDAKNRKFDIVLCKTQSRFTRELELVEKYIHGLFPLWGIRFISIVDNADTANKGNKKSRQINGLVNEWYLEDMSENIKSVLTDRRKNGHHIGAFALYGYKKDPDVKGHLIIDEEAAEVVREVFTLFSQGYGKTAIARMLNDRGIPNPTEYKRLHGLRYKQPKTKNNTLWKYFNISDMLVNEMYIGNMVQGKYGSISYKTKQNKPRPKDQWYRVEGTHEPIIERELWDRVQAMVAQKAKPFIVGTIGLFARKARCMNCGYTMRSSKNRGKHYLQCSCRHISKDACIGSFISVDKLEKAVIDELNRLSAEYLDKDELEQNVQFNNDLRGQKEALEKGIAAYQKKIAEYTKGIRELYLDKVKGILSELDYLDLSKDFSTQKERLEKLVIDTQKQLDVIERKMLIGDNRRQLIEQYTNLEHLDRETVEKLIDYVLVGKKDPVTKEVPIEIHWNF

SEQ ID NO: 35727 - DNA, 50 bp, Eubacterium ventriosum
  source 1..50: mol_type = genomic DNA
tgttgtttttacataatcgtaccatctggtgcgacctcgtaagaacaaca

SEQ ID NO: 35728 - DNA, 40 bp, Eubacterium ventriosum
  source 1..40: mol_type = genomic DNA
tgtttttctggctttttgttccgcagccatatcttctata

SEQ ID NO: 35729 - DNA, 50 bp, Eubacterium ventriosum
  source 1..50: mol_type = genomic DNA
tgttgtttttacataatcgtaccatatggtgcgacctcgtaagaacaaca

SEQ ID NO: 35730 - DNA, 40 bp, Eubacterium ventriosum
  source 1..40: mol_type = genomic DNA
gatttttgtggctatttgttacgcagcattcttgtttata

SEQ ID NO: 35731 - protein, 512 aa, Rhodococcus hoagii
MKAAIYARISADPTGQELGVDRQREDCEQLAQQLGWEVVDRYTDNDVSASSGVARPEYERLLVDVEAGRIDAILSWHPDRLYRRTADLERLITITEKNRVTFRTVMAGDIDLSTASGRMVARMLGAASTHEVERAKERMVRAHQQAAASGKWRARRRVFGWVQGGTEVVPDEAAAIQAAATAVLSGTSLRAVARRWNELGLETTGSAKEFDASAVRDVLKSPRCAAIQVYRGKEVGKGNWPAILTEDEHRALIALFDNPARRRSVSYERRYQGSGVYRCGLCSAPMQSHQDGDRNVSYKCSASPAHVSRRAATLDEYISNLIVERLSKPDTFDRIYAPKDVADLGALSAERNGYTERLTQLASLFAEGVIDAEQLRTGSTDLRAKVEAIDTRLAENHSQPAPKEEFVARLVGESLSRIWNATAADVRGKVVAELFEVTILPSPRGRRKFCEEFIGIKELKPETLEPQDAIRIAGLLAASTESVAEDYRDWIDRPRQTFPSSMSARELVARKS

SEQ ID NO: 35732 - DNA, 50 bp, Rhodococcus hoagii
  source 1..50: mol_type = genomic DNA
gtggaatgtcgaccttctacggcttctaccggccgacatcaccgtctaat

SEQ ID NO: 35733 - DNA, 40 bp, Rhodococcus hoagii
  source 1..40: mol_type = genomic DNA
ggcatgggctttcacggcttctaccggcccaccgaatgag

SEQ ID NO: 35734 - DNA, 50 bp, Rhodococcus hoagii
  source 1..50: mol_type = genomic DNA
gtggaatgtcgaccttctacggctcataccggccgacatcaccgtctaat

SEQ ID NO: 35735 - DNA, 40 bp, Rhodococcus hoagii
  source 1..40: mol_type = genomic DNA
ggcacctgctctcacagctcagacaggcccagggagtgag

SEQ ID NO: 35736 - protein, 445 aa, Micromonospora carbonacea
MTRQEQDCRELADRHGLTVAQVYSDNDLSAYSGKPRPAYRRMLDDIAAARVDAVLAWHTDRLHRSPTELEEYISACEPRGVPTFTVKAGPLDLSTPSGRMVARQLGAVARYEVEHQVERQQRAKQQAAADGRWGGGRRPYGYEADGVTLRPDEARVVARATDAILAGGSLRAQAAELNGRGLVTSTGRPWTATELRKVLLRPRNAGLREHRGEIVGPAAWQPLVDEDRWRALVSVLTHPGRRTQWSSARRWLLSGLALCGVCGTPVRATLMSTTARSVPSYTCKVSRCIGRNAAEVDAYVSAVVVERLSRPDVTDLLAADSRPESSTLQRDAATLRERLDGLASAYADGAIDVRQLREGSERLRARLAEVEDRMASLGQGDALAGLLGVPDPQAAWDGLDLHRRRAVIDTLMTVTIHRSRKGRPPGWRPGSSYFNPSTVDIAWKG

SEQ ID NO: 35737 - DNA, 50 bp, Micromonospora carbonacea
  source 1..50: mol_type = genomic DNA
acgtgtcctatgttgcccttcgacctcgccatagtcaacttgtgacatac

SEQ ID NO: 35738 - DNA, 40 bp, Micromonospora carbonacea
  source 1..40: mol_type = genomic DNA
gttcggttcggccttcgacctggcgatcgcggtggcgctg

SEQ ID NO: 35739 - DNA, 50 bp, Micromonospora carbonacea
  source 1..50: mol_type = genomic DNA
acgtgtcctatgttgcccttcgacaacgccatagtcaacttgtgacatac

SEQ ID NO: 35740 - DNA, 40 bp, Micromonospora carbonacea
  source 1..40: mol_type = genomic DNA
gttttgtccccacttcgagaaagagatcgcggtggctctg

SEQ ID NO: 35741 - protein, 520 aa, Salinispora arenicola
MVRRKARSGNRGRFDSKDALSAGGADVRALRYQRTSQDKKEQGKSVHDQGVLNLAEITKRSWTDAGSFTDNHRSASRRATKEREQFELLIEQIRAGKGDVLVVWEISRKERDLAVFVKIRDMCHEVGLNFWLVGGVLYDLRDKNDRMMLGFQAVQAEWMADSIRDNVLRGIVGAAEAGRPHGKVTYGYRRIYDQRTRALLRQEPDTEIRTAVATDGTVTQYSRAQVVRDNFRKVSEGTPLIAVEAELNRLGIPASEGGLWRRGILRKQVMNPAYIGKRVLRGEIVGDGIWPALVEEETYWSVVRMLGDPSRTTTRPARAVHLLSYLVRCGVCDGPLSSQKVNRHGWTGQVYSCLHKRCAAVKAEYLDEYVQRTVVAWLSRPDVYDILTAASATDEEVAHARAEAQRLRGELEDWRKLGEEGEITAIAYTRAEKGLLAQIAEHEQRAADAGIPAVLRGRIGDEAVQAWQELGDDIAVKREIIRLVADIKLLRAGFKGERRTFGRHRLDWRWKFGPQDQQAA

SEQ ID NO: 35742 - DNA, 50 bp, Salinispora arenicola
  source 1..50: mol_type = genomic DNA
attggcttttatagacgcttgactaccgtcaaggatcgttagatgctagg

SEQ ID NO: 35743 - DNA, 40 bp, Salinispora arenicola
  source 1..40: mol_type = genomic DNA
gctcggctgccaggccggcacggtggccagtcagacggcc

SEQ ID NO: 35744 - DNA, 50 bp, Salinispora arenicola
  source 1..50: mol_type = genomic DNA
attggcttttatagacgcttgactgtcgtcaaggatcgttagatgctagg

SEQ ID NO: 35745 - DNA, 40 bp, Salinispora arenicola
  source 1..40: mol_type = genomic DNA
gggcggctggccggacggggtggtggccgggcagaggggc

SEQ ID NO: 35746 - protein, 503 aa, Eisenbergiella tayi; identical to SEQ ID NO: 3036

SEQ ID NO: 35747 - DNA, 50 bp, Eisenbergiella tayi; identical to SEQ ID NO: 3037
  source 1..50: mol_type = genomic DNA

SEQ ID NO: 35748 - DNA, 40 bp, Eisenbergiella tayi
  source 1..40: mol_type = genomic DNA
ctgttatttttactataccttccgcggtgtcaaaaaactg

SEQ ID NO: 35749 - DNA, 50 bp, Eisenbergiella tayi
  source 1..50: mol_type = genomic DNA
gtgtagtcccttgtaaactgtatttaaggtcagtttacaaggaactacac

SEQ ID NO: 35750 - DNA, 40 bp, Eisenbergiella tayi
  source 1..40: mol_type = genomic DNA
ctgtaatttttcctttacctacccctatcttataaaacgg

SEQ ID NO: 35751 - protein, 595 aa, Nocardia terpenica
MSVYSDSKVSHQAQRESGHRWCQANGAEVLDEFEDLGVSAIKVSTFERPDLGAWLTPERSHEWDTIVWAKVDRAWRSMRDGLAFMHWAEDNRKRVVFADDGLELDYRNGRKKGDMQAVITDMFMLLLSMFAQIEGERFVQRSLSAHGELKTTDRWQAGTPPFGYLTVDRPSGKGKGLAKNPDQQEILHEMARLFLEGWSYNRLAIWLNDNQIKTNHNLSVTAKAQKTGKSPKKPLSDRPWQDGTVKKILTSPATQGFKVINMQPDPEKRKHGIDPDYQIASDPVTGEPIRMADPTFDPETWAKIQDKAAERTAKPRDKTKWSNPMLGVVYCNCGAAFTRISKEDRNYFYFRCGRERGQACKDRTVRGDFLESTIREFFLQGHLAHRRVTQRKFVPGNDRSEEFEQIQTSIRNMRRNYEKGYYKGEEDEYEAKMDGLVAKRDRIESEGVVIRGGYVTEDTGRTWGDLFSESEDWSVIQEAVKDAGIRLMVEGTYPLIVRVDDPNERDGIPYFSVEMKRAPDLRSNQYRIWAAIQKDPEANDTVIGSRLGVHPVTVGRWRKRMPADGIDPKPEPQYWIEPFGGTPDPGESHPGDAAA

SEQ ID NO: 35752 - DNA, 50 bp, Nocardia terpenica
  source 1..50: mol_type = genomic DNA
ttgcgtctgagtacagttcactgccagcagtagatagcactcatatgccg

SEQ ID NO: 35753 - DNA, 40 bp, Nocardia terpenica
  source 1..40: mol_type = genomic DNA
cgatatcgcgggaccgcgccagcagtgggacgagatccag

SEQ ID NO: 35754 - DNA, 50 bp, Nocardia terpenica
  source 1..50: mol_type = genomic DNA
ttgcgtctgagtacagttcactgcttgcagtagatagcactcatatgccg

SEQ ID NO: 35755 - DNA, 40 bp, Nocardia terpenica
  source 1..40: mol_type = genomic DNA
cgaactcgggagacagaggttgcagtgagccgagatcaag

SEQ ID NO: 35756 - protein, 538 aa, Ruthenibacterium lactatiformans; identical to SEQ ID NO: 13576

SEQ ID NO: 35757 - DNA, 50 bp, Ruthenibacterium lactatiformans; identical to SEQ ID NO: 13577
  source 1..50: mol_type = genomic DNA

SEQ ID NO: 35758 - DNA, 40 bp, Ruthenibacterium lactatiformans
  source 1..40: mol_type = genomic DNA
caacgacaaccctggcgcaaaatctcagggcatgaagcag

SEQ ID NO: 35759 - DNA, 50 bp, Ruthenibacterium lactatiformans
  source 1..50: mol_type = genomic DNA
ttgcttctttatcacacataagcagttgctcatgtacggtaaggaagcaa

SEQ ID NO: 35760 - DNA, 40 bp, Ruthenibacterium lactatiformans
  source 1..40: mol_type = genomic DNA
aaaagacagggctggcgcagtggctcaaggctggaagcag

SEQ ID NO: 35761 - protein, 599 aa, Streptococcus equi
MATNKKITALYERLSRDDEMVGDSNSIINQKKMLEDYANKNGYTNIMHFTDDGYSGGSFDRPSWKKLIEGVENNIIDTVIVKDMSRVGRDYLQVGFYTEVMFREKGVHFIAVANSVDSNKTESAEFAPFLNIMNEWYIRDSSKKIKTVLKARGMEGEHHTSNHAIYGYRKDKDNPSKWVIDEEAAEVVRRIFQMSLEGNGPYQIAKILTEEKIERPSYYLAQRGMGNHISNYNSAEPYLWRGTTVSNILSRQEYMGHTVNFRTYKESYKSKRNKKAPKEDWIIFENTQEAIIDEETFNTVQKLRKVTRRTDSTGKANPLTGLVYCADCGAKMYNHRGKAGYKRDWLGRKTDRRRPPKDEYICSTYNLARGNFEEKCSSHYIRSEVLNKLVLDTIQEVSEYVKLNEEEFIKKVYSTSKEQQEKTSKILKKRLAKEEKRISEINSLIRKLYEDNVSGKLSNKHFDMMLKDFEKEQAVLEKSIEQAKDTLRDFEEDSIRADKFIALVKKYTDFSELTTPMINEFVDKILVHEGIWENYERTQEVEIYLNFIGKFEMPKKEPTKEELEEMEKLRKKREKKREYNYRYMRKLKERMNDRILLTK

SEQ ID NO: 35762 - DNA, 50 bp, Streptococcus equi; identical to SEQ ID NO: 3417
  source 1..50: mol_type = genomic DNA

SEQ ID NO: 35763 - DNA, 40 bp, Streptococcus equi
  source 1..40: mol_type = genomic DNA
acctccgaaacacttcacagaagatactctcttaaagtct

SEQ ID NO: 35764 - DNA, 50 bp, Streptococcus equi
  source 1..50: mol_type = genomic DNA
aaatacccttgacaaaagctatcaagggttatattctatgaagtgtagat

SEQ ID NO: 35765 - DNA, 40 bp, Streptococcus equi
  source 1..40: mol_type = genomic DNA
atctgggaaagacttcacaagtgatacgctctgaaaagca

SEQ ID NO: 35766 - protein, 509 aa, Burkholderia gladioli
MSKPRAYSYLRFSTPEQLKGDSYRRQTTMALEYATRKGLALDQDLTFEDLGVSAFRGTNAEAGRLAEFLEAVRAGLVPRGSYLLVEALDRLSRLSPRKAVRVLEDIVEEGITVVTLNDGREYTSANLDDDPTSLLIAIVLFMRANEESATKSRRLSAAWEGKRQRVEDRPLTAITPAWVSLNEASGKLELVPERAAIVQRIFDMYAAGIGYALIAETFNREGIPCFGRARHWHRTYIRKILVNDAVIGIFTPHRIVHEGGKKIRLPLEKVPGYFPSVISEDLFTKAQSQLNGNAGPAPKHRGAVISNLIAGLARCPICGSTMTRVMKGAGPKSGKPKLVCTKAKAGAGCQYHAVPLDSVETAVISNASYVTGTVPSGRDGLDSDLDAAEVRIEATQDEIENLLRALAVTPSTAIAERIKDLEVSLEALRTERDGLADQLMAANGPLLAKRVEELRQALEAAPLDRAKANAALRVLLSSVTVDYDSGKLLFQWKHGGETEVIYSMPREVR

SEQ ID NO: 35767 - DNA, 50 bp, Burkholderia gladioli
  source 1..50: mol_type = genomic DNA
ttggggtcttgtgaaaacaacatgctgatagtattctcaacggacccgat

SEQ ID NO: 35768 - DNA, 40 bp, Burkholderia gladioli
  source 1..40: mol_type = genomic DNA
ggcgggcggccatcacctgctgatgatcggcccgcccggc

SEQ ID NO: 35769 - DNA, 50 bp, Burkholderia gladioli
  source 1..50: mol_type = genomic DNA
ttggggtcttgtgaaaacaacatgccgatagtattctcaacggacccgat

SEQ ID NO: 35770 - DNA, 40 bp, Burkholderia gladioli
  source 1..40: mol_type = genomic DNA
ggcaggcggtcagcacctccccatgcacagccctccccgc

SEQ ID NO: 35771 - protein, 509 aa, Burkholderia gladioli
MSKPRAYSYLRFSTPEQLKGDSYRRQTTMALEYATRKGLALDQDLTFEDLGVSAFRGTNAETGRLGEFLEAVRAGLVPRGSYLLVEALDRLSRLSPRKAVRVLEDIVEEGITVVTLNDGREYTSANLDDDPTSLLIAFVLFMRANEESATKSRRLSAAWEGKRQRVEDRPLTAITPAWVSLNEASGKLELVPERAAIVQRIFDMYAAGIGYALIAETFNREGIPCFGRARHWHRTYIRKILVNDAVIGIFTPHRIVHEGGKKIRLPLEKVPGYFPPVISEDLFTKAQSQLNGNAGPAPKHRGAVISNLIAGLARCPICGSTMTRVMKGAGPKSGKPKLVCTKAKAGAGCQYHAVPLDSVETAVISNASYVTGTVPSGRDGLDSDLDAAEVRIEATQDEIENLLRALAVTPSTAIAERIKDLEVSLEALRTERDGLADQLMAANGPLLAKRVEELRQALEAAPLDRAKANAALRVLLSSVTVDYDSGKLLFQWKHGGETEVIYSMPREVR

SEQ ID NO: 35772 - DNA, 50 bp, Burkholderia gladioli; identical to SEQ ID NO: 35767
  source 1..50: mol_type = genomic DNA

SEQ ID NO: 35773 - DNA, 40 bp, Burkholderia gladioli; identical to SEQ ID NO: 35768
  source 1..40: mol_type = genomic DNA

SEQ ID NO: 35774 - DNA, 50 bp, Burkholderia gladioli; identical to SEQ ID NO: 35769
  source 1..50: mol_type = genomic DNA

SEQ ID NO: 35775 - DNA, 40 bp, Burkholderia gladioli; identical to SEQ ID NO: 35770
  source 1..40: mol_type = genomic DNA

SEQ ID NO: 35776 - protein, 509 aa, Burkholderia gladioli
MSKPRAYSYLRFSTPEQLKGDSYRRQTTMALEYATRKGLALDQDLTFEDLGVSAFRGTNAETGRLGEFLEAVRAGLVPRGSYLLVEALDRLSRLSPRKAVRVLEDIVEEGITVVTLNDGREYTSANLDDDPTSLLIAFVLFMRANEESATKSRRLSAAWEGKRQRVEDRPLTAITPAWVSLNEASGKLELVPERAAIVQRIFDMYAAGIGYALIAETFNREGIPCFARARHWHRTYIRKILVNDAVIGIFTPHRIVHEGGKKIRLPLEKVPGYFPPVISEDLFTKAQSQLNGNAGPAPKHRGAVISNLIAGLARCPICGSTMTRVMKGAGPKSGKPKLVCTKAKAGAGCQYHAVPLDSVETAVISNASYVTGTVPSGRDGLDSDLDAAEVRIEATQDEIENLLRALAVTPSTAIAERIKDLEISLEALRTERDGLADQLMAANGPLLAKRVEELRQALEAAPLDRAKANAALRVLLSSVTVDYDSGKLLFQWKHGGETEVIYSMPREVR

SEQ ID NO: 35777 - DNA, 50 bp, Burkholderia gladioli
  source 1..50: mol_type = genomic DNA
gaggggtcttgtgaaaacaacatgctaatagtattctcaacggacccgat

SEQ ID NO: 35778 - DNA, 40 bp, Burkholderia gladioli; identical to SEQ ID NO: 35768
  source 1..40: mol_type = genomic DNA

SEQ ID NO: 35779 - DNA, 50 bp, Burkholderia gladioli
  source 1..50: mol_type = genomic DNA
gaggggtcttgtgaaaacaacatgccaatagtattctcaacggacccgat

SEQ ID NO: 35780 - DNA, 40 bp, Burkholderia gladioli; identical to SEQ ID NO: 35770
  source 1..40: mol_type = genomic DNA

SEQ ID NO: 35781 - protein, 585 aa, Bradyrhizobium diazoefficiens
MKDAFSYIRFSSPEQAKGDSFRRQSEKADAWAKANGYRIVKSWEDLGVSGYRGQNATKGDFGEFLRAAAAGELARDSVLLVENLDRVSRQAPRKALSRFLSLIDCGIGVVTLTDGALYTAESLDQDKSGMLLFGSLMVMIRANNESRVKGERVAAAWERKRLAARDKAHRLSDRIPGWLTPGRDEAGRRTCTENTKRAGIVRRIFEETVQGLGHRAIAKGLNRDGELSFLSQTAWQPSSVSKIIRSRAAMGEYQPHKRDESGRRIPDGDPIKDYYPAVIDEGLWLRANAAVTVRRKDGGGRPQAKVANLIRGLAHCGCGSRMLFLNKGKPPKGGCYYVCSKAARDGGCDNKRLWNVKEVERHLLRQIDPASIAAAFEPAAKRKGPSPKEISLQIAELTAMRASALDAALRNAGKRVASVYEDRVEFYDGEIERLRERRDTAAAAERSKPHLPTTQSALGSVAALAAKLETASEAEKGSLRTSIVQQLRTAFAEIVFRPHALVGLVELPEKPKIRKGGFPLLVEIRPPGEPRTGAKARADDQDGAETRRIGESERYFLRHVFFRELDVEERAALGGGNSIVFPRYA

SEQ ID NO: 35782 - DNA, 50 bp, Bradyrhizobium diazoefficiens
  source 1..50: mol_type = genomic DNA
gctcgagaaatgtgtcacatcctcagcacgatgggctacatttactcggc

SEQ ID NO: 35783 - DNA, 40 bp, Bradyrhizobium diazoefficiens
  source 1..40: mol_type = genomic DNA
gccgggcgcgccgatcatgagcaggtgatgcccgccggcc

SEQ ID NO: 35784 - DNA, 50 bp, Bradyrhizobium diazoefficiens
  source 1..50: mol_type = genomic DNA
gctcgagaaatgtgtcacatcctcggcacgatgggctacatttactcggc

SEQ ID NO: 35785 - DNA, 40 bp, Bradyrhizobium diazoefficiens
  source 1..40: mol_type = genomic DNA
gcggggagggctgtgcatggggaggtgctgaccgcctgcc

SEQ ID NO: 35786 - protein, 528 aa, Bradyrhizobium canariense
MDTQRPPKAYSYVRFSTPEQAKGHSLQRQTDAAQAWAAANGVVLDDELTFEDKGVSGFHGANRETGALGVFVERVRDGTISPGSWLLVENLDRISRQVARKAVRAIEDIVEAGVTVVDMSDGGREYNAAALDNDPVLFLMMVLRFIRANEESATKGIRVAKAHAARRQKFAGQEKLTKPYTLRLPAWIRWSTETSSYELIEERAVLLRWMFEMADEGMGAHSIAAQLNDAKEDTWGAGGWKAAYWHRSYVRKLLTNKAAIGVFVPHTVRKVEGQRTKQRIPQEPIAHRFPAAVDRELFERVNARLTTTEARGRNAKAPVRSIFAGVMKCQHCDGTVTRVNKGDHVYLVCSAAHAKAGTHPYESVPYGQAVKAFRHSLKLTLDTAPRGNDTGEIEGKIGQLKVEVDAGDERVGALLELTISDKSRAARQALQRAEQELEATQDALRKAIERRDTLTSTNVMKRLEAVEKTLTAEPMDTDVANKALRGAVRKMVMRPQEGRLDILWHHAEEPQETLFMTNRFDWDAQQID

SEQ ID NO: 35787 - DNA, 50 bp, Bradyrhizobium canariense
  source 1..50: mol_type = genomic DNA
atttcccattgacgaaatcatctgctcatgtgattgcttcagtgcccacg

SEQ ID NO: 35788 - DNA, 40 bp, Bradyrhizobium canariense
  source 1..40: mol_type = genomic DNA
cgccggcggtcatcacctgctcatgatcggcgcgcccggc

SEQ ID NO: 35789 - DNA, 50 bp, Bradyrhizobium canariense
  source 1..50: mol_type = genomic DNA
atttcccattgacgaaatcatctgcccatgtgattgcttcagtgcccacg

SEQ ID NO: 35790 - DNA, 40 bp, Bradyrhizobium canariense; identical to SEQ ID NO: 35770
  source 1..40: mol_type = genomic DNA

SEQ ID NO: 35791 - protein, 512 aa, Rhizobium phaseoli
MKQPPVSRPKAYSYVRFSTPEQEKGDSLRRQTAAAEAYAQRHGLDLDDRLTFRDLGVSAFLGANEEAGRLGEFLAAVEHGDIKLGSYLLVESLDRLSRKKPRKAVRLLERICEAGITLVTLDDQRVYTEEVLDEDQTALMVALLVAMRAHEESAKKGRRVGQAWENKRANAANKPLTSKAPGWLKLRGDRSGFDLIPERAEIVRRIFQQTLEGRGQHAIAESLNREGVPVFGRGKIWHRSYIKKMLEDASVVGVYVPHRADRSSGKKVRIPTQPVEGYFPAAIDREVFERVAALSNGRTANTKSGMANILAGLAKCPRCGATMTRVNKGSGPKGGRPYLVCTVAKAGAGCEYEASPCDQIETAIVNYASAFYASAPSADAALQTEWENARSIAEGIGVEIDRIVDAIRETGHSPMLLAELRRLEQLLDEAERSAGEAERRASAATTNRTNNTLDKLVAQLTEEERDIAAINATMRQLFEGVVVDRSTGDLWFRWKHAPGKTTNVVFAWPKGE

SEQ ID NO: 35792 - DNA, 50 bp, Rhizobium phaseoli
  source 1..50: mol_type = genomic DNA
aacgggtctttcgtttatgccatcagaaaggtatgtacaaaagaccctga

SEQ ID NO: 35793 - DNA, 40 bp, Rhizobium phaseoli
  source 1..40: mol_type = genomic DNA
gccgggagggccgaccatcagcaggttatggccgccggcc

SEQ ID NO: 35794 - DNA, 50 bp, Rhizobium phaseoli
  source 1..50: mol_type = genomic DNA
aacgggtctttcgtttatgccatcggaaaggtatgtacaaaagaccctga

SEQ ID NO: 35795 - DNA, 40 bp, Rhizobium phaseoli; identical to SEQ ID NO: 35785
  source 1..40: mol_type = genomic DNA

SEQ ID NO: 35796 - protein, 509 aa, Burkholderia gladioli
MSKPRAYSYLRFSTPEQLKGDSYRRQTTMALEYATRKGLALDQDLTFEDLGVSAFRGTNAEAGRLAEFLEAVRAGLVPRGSYLLVEALDRLSRLSPRKAVRVLEDIVEEGITVVTLNDGREYTSANLDDDPTALLIAIVLFMRANEESATKSRRLSAAWEGKRQRVEDRPLTAITPAWVSLNEASGKLELVPERAAIVQRIFDMYAAGIGYALIAETFNREGIPCFGRARHWHRTYIRKILVNDAVIGIFTPHRIVHEGGKKIRLPLEKVPGYFPSVISEDLFTKAQSQLNGNAGPAPKHRGAVISNLIAGLARCPICGSTMTRVMKGAGPKSGKPKLVCTKAKAGAGCQYHAVPLDSVETAVISNASYVTGTVPSGRDGLDSDLDAAEVRIEATQDEIENLLRALAVTPSTAIAERIKDLEVSLEALRTERDGLADQLMAANGPLLAKRVEELRQALEAAPLDRAKANAALRVLLSSVTVDYDSGKLLFQWKHGGETEVIYSMPREVR

SEQ ID NO: 35797 - DNA, 50 bp, Burkholderia gladioli
  source 1..50: mol_type = genomic DNA
taggggtcttgtgaaaacaacatgctaatagtattctcaacggacccgat

SEQ ID NO: 35798 - DNA, 40 bp, Burkholderia gladioli; identical to SEQ ID NO: 35768
  source 1..40: mol_type = genomic DNA

SEQ ID NO: 35799 - DNA, 50 bp, Burkholderia gladioli
  source 1..50: mol_type = genomic DNA
taggggtcttgtgaaaacaacatgccaatagtattctcaacggacccgat

SEQ ID NO: 35800 - DNA, 40 bp, Burkholderia gladioli; identical to SEQ ID NO: 35770
  source 1..40: mol_type = genomic DNA

SEQ ID NO: 35801 - protein, 509 aa, Burkholderia gladioli
MSKPRAYSYLRFSTPEQLKGDSYRRQTTMALEYATRKGLALDQDLTFEDLGVSAFRGTNAEAGRLAEFLEAVRAGLVPRGSYLLVEALDRLSRLSPRKAVRVLEDIVEEGITVVTLNDGREYTSANLDDDPTSLLIAIVLFMRANEESATKSRRLSAAWEGKRQRVEDRPLTAITPAWVSLNEASGKLELVPERAAIVQRIFDMYAAGIGYALIAETFNREGIPCFGRARHWHRTYIRKILVNDAVIGIFTPHRIVHEGGKKIRLPLEKVPGYFPSVISEDLFTKAQSQLNGNAGPAPKHRGAVISNLIAGLARCPICGSTMTRVMKGAGPKSGKPKLVCTKAKASAGCQYHAVPLDSVETAVISNASYVTGTVPSGRDGLDSDLDAAEVRIEATQDEIENLLRALAVTPSTAIAERIKDLEVSLEALRTERDGLADQLMAANGPLLAKRVEELRQALEAAPLDRAKANAALRVLLSSVTVDYDSGKLLFQWKHGGETEVIYSMPREVR

SEQ ID NO: 35802 - DNA, 50 bp, Burkholderia gladioli; identical to SEQ ID NO: 35767
  source 1..50: mol_type = genomic DNA

SEQ ID NO: 35803 - DNA, 40 bp, Burkholderia gladioli; identical to SEQ ID NO: 35768
  source 1..40: mol_type = genomic DNA

SEQ ID NO: 35804 - DNA, 50 bp, Burkholderia gladioli; identical to SEQ ID NO: 35769
  source 1..50: mol_type = genomic DNA

SEQ ID NO: 35805 - DNA, 40 bp, Burkholderia gladioli; identical to SEQ ID NO: 35770
  source 1..40: mol_type = genomic DNA

SEQ ID NO: 35806 - protein, 542 aa, Amedibacterium intestinale
MIYQKGSNLFNVAIYIRLSREDGDKEESDSVGNQRKLLTEYVNKHDDFILYDVYIDDGFTGTNFNRPDFHRMIADIEDNKVNCVVVKDLSRFGRDYIDTGRYLERIFPELNVRFISVTDNIDSMKQAYDMLLPIKNIFNEQYARDISNKIQATVKSKQKAGEFIGAFTSYGYKKSPANKNKLVIDEYASEVVKRVFTMYAQGIGKQSIAKILNAEGILCPSEYKKLNGENYKNCNRLEKTSYWTYSTIKVMLQNELYIGNMVQGKKHQRMRSKQRPVEKENWIRVENTHEPIIDRQLWDKVQKLLTKKHRDIDLETNKNIFAGFIKCGDCGRAMMKNFWRRADGSKSYSFYCGTYKRSGKDYCTPHTLPFQVLNDIVLGDLKQIIRNVENLQELVKSQSFTATKIRKSTDIELTKLKAELERVKKLKKSIYEDYKDELISKEEFLSYREDYQQKETLYSKQIETLEEKKKESVTEDVFETPWLRRLLELKDIEELDRDIIVEMIDQITVYENRKLKISYNFGNELEHLFSSVYCEDLEKKAI

SEQ ID NO: 35807 - DNA, 50 bp, Amedibacterium intestinale
  source 1..50: mol_type = genomic DNA
aatttgcgtaaactacaatcagcacatgacggttgtagatagcgcaagta

SEQ ID NO: 35808 - DNA, 40 bp, Amedibacterium intestinale
  source 1..40: mol_type = genomic DNA
cataggattggatgcaggacatgggggaaaagacggtggt

SEQ ID NO: 35809 - DNA, 50 bp, Amedibacterium intestinale
  source 1..50: mol_type = genomic DNA
aatttgcgtaaactacaatcagcatgtgacggttgtagatagcgcaagta

SEQ ID NO: 35810 - DNA, 40 bp, Amedibacterium intestinale
  source 1..40: mol_type = genomic DNA
gggtggattggatgcaggatgtgagggaaagagaggaggt

SEQ ID NO: 35811 - protein, 473 aa, Mycobacteroides chelonae
MAKKVSEVRSAAVYARISADVEGKSLGVQRQLEDCRKLAAERGWVVGHEYVDNDVSAFSGKRRPGYEAMCSDLAAGVRDAVIVYNLDRLHRRPAELEDFVALCEAAGVNQVATVTADIDLGNDDGLFMARIFAAFAAKESGRKSARMKRKYEQKAAQGLPHGPNRPFGYEDDKITIRESEAEVIRELVARVIAGESVNSLTVWLNETGVAPVRGARWASTAVRGIVSSPRIAGLRAYKGEVVGQAAWEPIIDTAQRDQVLAALAVRSWNRKRSPRKYVLSGLCRCGRCQSRMFSAARLEAGASKRRYVCSSSPDHGGCGRMTVVAEPLEKLIADAVLTRLDSRVLADALAGKVRANPDTAALSAQVEAAQARLDELTGLYSSGAITAREWIMARDPITNTMTRLRREIADTADTGPLADLAGKGSALRAQWDDLGLDRCHAIIRAVIDHVVINPGQPGARGLDMGRIDPIWRT

SEQ ID NO: 35812 - DNA, 50 bp, Mycobacteroides chelonae
  source 1..50: mol_type = genomic DNA
agggcatattaatgacttgttaggttacttatatgttgttaagctgacct

SEQ ID NO: 35813 - DNA, 40 bp, Mycobacteroides chelonae
  source 1..40: mol_type = genomic DNA
gccgcaggcgaaggtcaggttgtcgatgtcggtcggtccg

SEQ ID NO: 35814 - DNA, 50 bp, Mycobacteroides chelonae
  source 1..50: mol_type = genomic DNA
agggcatattaatgacttgttagggaacttatatgttgttaagctgacct

SEQ ID NO: 35815 - DNA, 40 bp, Mycobacteroides chelonae
  source 1..40: mol_type = genomic DNA
gcggcaggccaaggcccaggaggagatgtcggactgtctg

SEQ ID NO: 35816 - protein, 479 aa, Mycobacteroides abscessus; identical to SEQ ID NO: 17141

SEQ ID NO: 35817 - DNA, 50 bp, Mycobacteroides abscessus; identical to SEQ ID NO: 17142
  source 1..50: mol_type = genomic DNA

SEQ ID NO: 35818 - DNA, 40 bp, Mycobacteroides abscessus
  source 1..40: mol_type = genomic DNA
cggccccaccgacatcgacaacctcaccttcgcctgcgca

SEQ ID NO: 35819 - DNA, 50 bp, Mycobacteroides abscessus; identical to SEQ ID NO: 17144
  source 1..50: mol_type = genomic DNA

SEQ ID NO: 35820 - DNA, 40 bp, Mycobacteroides abscessus
  source 1..40: mol_type = genomic DNA
cgacccctcccgcctcggccccctcacctcctcccgcgcc

SEQ ID NO: 35821 - protein, 479 aa, Mycobacteroides abscessus; identical to SEQ ID NO: 3691

SEQ ID NO: 35822 - DNA, 50 bp, Mycobacteroides abscessus; identical to SEQ ID NO: 3692
  source 1..50: mol_type = genomic DNA

SEQ ID NO: 35823 - DNA, 40 bp, Mycobacteroides abscessus; identical to SEQ ID NO: 35818
  source 1..40: mol_type = genomic DNA

SEQ ID NO: 35824 - DNA, 50 bp, Mycobacteroides abscessus; identical to SEQ ID NO: 17149
  source 1..50: mol_type = genomic DNA

SEQ ID NO: 35825 - DNA, 40 bp, Mycobacteroides abscessus; identical to SEQ ID NO: 35820
  source 1..40: mol_type = genomic DNA

SEQ ID NO: 35826 - protein, 461 aa, Mycobacteroides abscessus
MYARISADVEGKSLGVQRQLEDCRKLAAERGWVVGHEYVDNDISAYSGKARPGYEAMCSDLAAGVRDAVIVYNLDRLHRRPVELEEFVALCEAAGVNQVATVTADIDLGNDDGLFMARIFAAFAAKESGRKSARMKRKYEQKAAQGLPHGPNRPFGYDDDKITIRDAEAEVVRQLVVRVIAGESVNSLTAWLNETDVKPVRGGRWASTAVRNIVSSPRIAGLRAYKGEVVGEAAWEPIIPVAQRDQVLAALSVRSWNRKRSPRKYLLSGLCRCGRCQSRMFSAARLEAGAHKRRYVCSSSPDHGGCGRMTVVADPLEKLIADAVLTRLDSKVLADALAGKVRANPDTAALSAEVEQAQARLDELTGLYSSGAITAREWIMARDPITDTISRLRREIADTADTGPLAELAGKGSVLRAQWDDLGLDRCHAIIRAVVDHVVIKPGKPGARGLDMGRIDPIWRM

SEQ ID NO: 35827 - DNA, 50 bp, Mycobacteroides abscessus
  source 1..50: mol_type = genomic DNA
gggtcacatttatgacttgttgggttgctgatttttcgttaaactgacct

SEQ ID NO: 35828 - DNA, 40 bp, Mycobacteroides abscessus
  source 1..40: mol_type = genomic DNA
tgcgcaggcgaaggtgaggttgtcgatgtcggtggggccg

SEQ ID NO: 35829 - DNA, 50 bp, Mycobacteroides abscessus
  source 1..50: mol_type = genomic DNA
gggtcacatttatgacttgttggggggctgatttttcgttaaactgacct

SEQ ID NO: 35830 - DNA, 40 bp, Mycobacteroides abscessus
  source 1..40: mol_type = genomic DNA
ggcgcgggaggaggtgagggggccgaggcgggaggggtcg

SEQ ID NO: 35831 - protein, 473 aa, Mycobacteroides abscessus
MAKTVPAVRSAAVYARISADVEGKSLGVQRQLEDCRKLAADRGWVVGREYVDNDVSAYSGKVRLGYEAMCSDLASGVRDAVIVYNLDRLHRRPAELEEFVALCEAAGVNQVATVTADIDLGNDDGLFMARIFAAFAAKESGRKSARMRRKYEQKAAQGLPHGPNRPFGYEPDKITIRESEAEVIRELVTRVVAGESVNALTVWLNETGVAPVRGTRWASTAVRNIVSSPRIAGLRAYKGEVVGEAAWPAIISTAQRDQVLAALAVRSWNRKRSPRKYLLSGLCRCGRCQARMFSAARLEAGAHKRRYVCSSSPDHGGCGRMTVVAEPLEKLITDAVLTRLDSKALADALAGKARANPDTAALSAQVETAQARLDELTGLYSTGAISAREWIMARDPITDTISRLRREIAETLDTGPLAELAGQGSVLRGQWDELGLDRCHAIIRTVIDHVVIKPGQPGTRGLDMGRVDPIWRT

SEQ ID NO: 35832 - DNA, 50 bp, Mycobacteroides abscessus
  source 1..50: mol_type = genomic DNA
aggtcagatttatgacttgttaggttacttatttttcgttaagctgacct

SEQ ID NO: 35833 - DNA, 40 bp, Mycobacteroides abscessus; identical to SEQ ID NO: 35828
  source 1..40: mol_type = genomic DNA

SEQ ID NO: 35834 - DNA, 50 bp, Mycobacteroides abscessus
  source 1..50: mol_type = genomic DNA
aggtcagatttatgacttgttaggggacttatttttcgttaagctgacct

SEQ ID NO: 35835 - DNA, 40 bp, Mycobacteroides abscessus; identical to SEQ ID NO: 35830
  source 1..40: mol_type = genomic DNA

SEQ ID NO: 35836 - protein, 479 aa, Mycobacteroides abscessus
MAKVKSPGQRVGVRSVAIYARISADVEGTGLGVARQLEDCRKLAADRGWPIGDEYVDNDVSAYSGKPRREYARMLADLTSGARDAVIVYNLDRLHRRPVELEEFVTLCESSGVRDVATVTADIDLGNDDGLFMARIFAAFAAKESGRKSARVRRKLLQNAEQGLPHGSVRPFGYESDKITLRDAEAKVIREMVDRYLAGASIRSLTIWLNDAGIAPAVAKSWQTSAVRQILTSGRIAGLREHHGEVIGPATWTAIITPAERDRILARMATRALTKTRAPRTYLLSGMLRCGRCGNRLFSQARHSNPDNRVRRYVCLKGPDHGGCGRLTVVASPVEELLTDAVLTRLDSPQLAEALAGKSSVDADVAALATQLEADQARLDELAGLYAAGAVSAREWIAARDPITERIAQARRDIAHATDTSSVVDLAGCGEVLRGQWDDLDIDRQQAIIKSVLDHAVIAPGNPGSRSLDINRVQPAWRI

SEQ ID NO: 35837 - DNA, 50 bp, Mycobacteroides abscessus
  source 1..50: mol_type = genomic DNA
gggacgtattaacgacttgtcaccaagcttaggtgctagtaaactaccct

SEQ ID NO: 35838 - DNA, 40 bp, Mycobacteroides abscessus; identical to SEQ ID NO: 35818
  source 1..40: mol_type = genomic DNA

SEQ ID NO: 35839 - DNA, 50 bp, Mycobacteroides abscessus
  source 1..50: mol_type = genomic DNA
gggacgtattaacgacttgtcaccccgcttaggtgctagtaaactaccct

SEQ ID NO: 35840 - DNA, 40 bp, Mycobacteroides abscessus; identical to SEQ ID NO: 35820
  source 1..40: mol_type = genomic DNA

SEQ ID NO: 35841 - protein, 473 aa, Mycobacteroides abscessus
MAKKIPAVRSAAVYARISADVEGKSLGVQRQLEDCRKLAAERGWVVGREYVDNDVSAYSGKARAGYEAMCTDLAAGVRDAVIVYNLDRLHRRPVELEDFVALCEAAGVNQVATVTADIDLGNDDGLFMARIFAAFAAKESGRKSARMKRKYEQKAAQGLPHGPNRPFGYEEDKITIREAEADVVRELVTRVIAGESLNALTVWLNESGAKPVRGARWASTAVRGIVSSPRIAGLRAYKGEVVGDAAWPAIISVAERDQVLAALAVRAWNRKRSPRKYLLSGLCRCGRCQARMFSAARLEAGAHKRRYVCSSSPDHGGCGRMTVVAEPLEKLITDAVLTRLDSKALADALAGKARANPDTAALSAQVEAAQARLDELTGLYSSGAISAREWIMARDPITDTIARLRREIAETVDTGPLAELAGQGSVLRGQWDDLGLDRCHAIIRTVIDHVVIKPGQPGARGLDMNRIDPVWRI

SEQ ID NO: 35842 - DNA, 50 bp, Mycobacteroides abscessus
  source 1..50: mol_type = genomic DNA
aggtcagttttatgacttgttgggttgcttatttttcgttaaactgacct

SEQ ID NO: 35843 - DNA, 40 bp, Mycobacteroides abscessus; identical to SEQ ID NO: 35828
  source 1..40: mol_type = genomic DNA

SEQ ID NO: 35844 - DNA, 50 bp, Mycobacteroides abscessus
  source 1..50: mol_type = genomic DNA
aggtcagttttatgacttgttggggggcttatttttcgttaaactgacct

SEQ ID NO: 35845 - DNA, 40 bp, Mycobacteroides abscessus; identical to SEQ ID NO: 35830
  source 1..40: mol_type = genomic DNA

SEQ ID NO: 35846 - protein, 573 aa, Agrobacterium tumefaciens
MIKAYSYIRFSTPEQSRGDSLRRQTSKAEAWALQRGLVLDNSLRDLGVSAYHGANRTTGALRSFLDMVEKDQIERGSYLIVESLDRISRETVIDAATQLFALIQAGITVVTLSDGQEYSSERLRHDWTPLIISLAVMARAHDESRVKSERVGEAWRQKKKRAREEGKPLTPRCPEWLEVCDGKFQQRPERVEIVRRVFRETIDGFGRREIVRRLNLAGVPTFRGGIGWQTSSIAKIIQSRAVLGEYQPHRGTHKNRNRVPEGDPIPDFYPRIIEEETYWLAQTATEGRRHAASGRKGDKGSHILQGLAICTACSGPMHIVNKGRPPKGGVYLACSNNMRNAGCENTRRWRVDVLERDLLIAVDQLDAESLESLDNGPSKAAARVAALKAELADLQRRQKTLVPLVELGDETATERSMSLAKTIKITKAELKTAESENRRLDADQDLPARIIEAASFSRTLVTLSEEDTEARREVRIRLRELLRRILQRVECDFRFGASVVFVPKLVWHHRTRGRSPYAVKITAQEGTNDGVAEVLLERDIDDELSDDWLGLSPEIRKWKKEEMARGNDEGGGS

SEQ ID NO: 35847 - DNA, 50 bp, Agrobacterium tumefaciens
  source 1..50: mol_type = genomic DNA
acatcattaatgtatcacaatgttagcagattgggctacattaatatacg

SEQ ID NO: 35848 - DNA, 40 bp, Agrobacterium tumefaciens
  source 1..40: mol_type = genomic DNA
gccgggtggaccgaccatgagcaggttgtggccgccggcg

SEQ ID NO: 35849 - DNA, 50 bp, Agrobacterium tumefaciens
  source 1..50: mol_type = genomic DNA
acatcattaatgtatcacaatgttgccagattgggctacattaatatacg

SEQ ID NO: 35850 - DNA, 40 bp, Agrobacterium tumefaciens
  source 1..40: mol_type = genomic DNA
gcggggagggccgggtagggccagggtggggccgccgggg

SEQ ID NO: 35851 - protein, 542 aa, Roseburia hominis
MIYQKGSNLFNVAIYIRLSREDGDKEESDSVGNQRKLLTEYVNKHDDFILYDVYIDDGFTGTNFNRPDFHRMIADIEDNKVNCVVVKDLSRFGRDYIDTGRYLERIFPELNVRFISVTDNIDSMKQAYDMLLPIKNIFNEQYARDISNKIQATVKSKQKAGEFIGAFTSYGYKKSPANKNKLVIDEYASEVVKRVFTMYAQGIGKQSIAKTLNAEGILCPSEYKKLNGENYKNCNRLEKTSYWTYSTIKVMLQNELYIGNMVQGKKHQRMRSKQRPVEKENWIRVENTHEPIIDRQLWGKVQKLLTKKHRDIDLETNKNIFAGFIKCGDCGRAMMKNFWRRADGSKSYSFYCGTYKRSGKDYCTPHTLPFQVLNDIVLGDLKQIIRNVENLQELVKSQSFTATKIRKSTDIELTKLKAELERVKKLKKSIYEDYKDELISKDEFLSYREDYQQKETLYSKQIETLEEKKKESVTEDVFETPWLRRLLELKDIEELDRDIIVEMIDQITVYENRKLKISYNFGNELEHLFSSVYCEDLEKKAI

SEQ ID NO: 35852 - DNA, 50 bp, Roseburia hominis
  source 1..50: mol_type = genomic DNA
aatttgcgtaaactacaatcagcacatgggggttgtagataacgcaagtg

SEQ ID NO: 35853 - DNA, 40 bp, Roseburia hominis
  source 1..40: mol_type = genomic DNA
gattcttatagatcccggacatggggaggatgatcctggg

SEQ ID NO: 35854 - DNA, 50 bp, Roseburia hominis; identical to SEQ ID NO: 35852
  source 1..50: mol_type = genomic DNA

SEQ ID NO: 35855 - DNA, 40 bp, Roseburia hominis
  source 1..40: mol_type = genomic DNA
gactctgactgagcccatacatgggcagggtgaccctggg

SEQ ID NO: 35856 - protein, 542 aa, Blautia obeum
MIYQKGSNLFNVAIYIRLSREDGDKEESDSVGNQRKLLTEYVNKHDDFILYDVYIDDGFTGTNFNRPDFHRMIADIEDNKVNCVVVKDLSRFGRDYIDTGRYLERIFPELNVRFISVTDNIDSMKQAYDMLLPIKNIFNEQYARDISNKIQATVKSKQKAGEFIGAFTSYGYKKSPANKNKLVIDEYASEVVKRVFTMYAQGIGKQSIAKILNAEGILCPSEYKKLNGENYKNCNRLEKTSYWTYSTIKVMLQNEIYIGNMVQGKKHQRMRSKQRLVEKENWIRVENTHEPIIDRQLWDKVQKLLTKKHRDIDLETNKNIFAGFIKCGDCGRAMMKNFWRRADGSKSYSFYCGTYKRSGKDYCTPHTLPFQVLNDIVLGDLKQIIRNVENLQELVKSQSFTATKIRKSTDIELIKLKAELERVKKLKKSIYEDYKDELISKEEFLSYREDYQQKETLYSKQIETLEEKKKESVTEDVFETPWLRRLLELKDIEELDRDIIVEMIDQITVYENRKLKISYNFGNELEHLFSSVYCEDLEKKAI

SEQ ID NO: 35857 - DNA, 50 bp, Blautia obeum
  source 1..50: mol_type = genomic DNA
aatttgcgtaaactacaaccagcacatgggggttgtagataacgcaagta

SEQ ID NO: 35858 - DNA, 40 bp, Blautia obeum; identical to SEQ ID NO: 35853
  source 1..40: mol_type = genomic DNA

SEQ ID NO: 35859 - DNA, 50 bp, Blautia obeum; identical to SEQ ID NO: 35857
  source 1..50: mol_type = genomic DNA

SEQ ID NO: 35860 - DNA, 40 bp, Blautia obeum; identical to SEQ ID NO: 35855
  source 1..40: mol_type = genomic DNA

SEQ ID NO: 35861 - protein, 576 aa, Bacillus atrophaeus
MASKLRVWASYRVSTDRQGAEGDDIPLQKAQCHAYADKNGWEITKELTEKISGYKTAIEDRNTLKVIKQGAVNGEFDILLLYHSDRLGRQMEYSLYVASLYELGVEVWTVKEGEIKNQDHADSLMNFIRYWQSEGESKKTSMRVSDAMRQLNEVNEEGAYLGGTVPYGYMLEDTGKKRNSKKDKTIKKLVVNPDEAKIVKMMFEWVTDRSLGGALIAQELNAMGATNRGKQWRHNTITRMLRNPAYMGYKRYNTTKNVGTRGNTRKEVKRDEWLLQPFNPNIVIVSEEQFKKVQDIMDKRAKSGEESSNESREPAPVFNGIAVNKNRVPTSSKLLLSGMAICGYCGKKLNADFTIKKNTRVDGSFRKHRTYRYTCNNSKNNPNGHNQRAFGAVTIDKQVEEEVLSTISTIDLDAFDAEKDSFDFEELDSRKVQLKELEVQYAEVSKALSSVESLFDDVMLGKSSMGLDFVSKKMEDYGARKIELLSKIDTLNKEIKEAEVKSTDLEKLKYQLDNWVETYKNSVSLAEKKSMLYKVIDEVVISKETIIIRFNITIEKALEGAYNPVNQGRVNDPTGT

SEQ ID NO: 35862 - DNA, 50 bp, Bacillus atrophaeus
  source 1..50: mol_type = genomic DNA
gggagggttaatgacccaacaggaacaggtactgagccaaatacccgccc

SEQ ID NO: 35863 - DNA, 40 bp, Bacillus atrophaeus
  source 1..40: mol_type = genomic DNA
gggcggtgacccaacaggaacaggagcaggcggcccagga

SEQ ID NO: 35864 - DNA, 50 bp, Bacillus atrophaeus
  source 1..50: mol_type = genomic DNA
gggagggttaatgacccaacaggaggaggtactgagccaaatacccgccc

SEQ ID NO: 35865 - DNA, 40 bp, Bacillus atrophaeus
  source 1..40: mol_type = genomic DNA
gggcggcgacccagcagtaggaggaggaggagggcgggcg

SEQ ID NO: 35866 - protein, 504 aa, Mesorhizobium sp
MLQPRDLKGRNAISYARWSSGKQASGDSLDRQTKKAEEFCTSFGLTLDKRLLDEGVSAFKGANLEASLGKFVGDVKSGRIPSDVVLIVENIDRITRVKPTRAIRYFLDLLDTGLTLVTLTDQRVHTSEGYDDNFANLMMSLMAMQAAHEYSAKLSYRVSEAWGRKPEKARAAVASGGRIKVAKLPFWIDRDTNRLNERADDARLIFELAKEGHGQQAIAQILNTRGIPSPAGNTWSQVVVGDVLRSPATYGCLVLKGVEVPGYFPALISETEWLATRQRTKARRHSRQIGRTANLFSRMVYCAHCRSPMVLTSSKKGGVSWGYFICTGKTFKRTGCTAPNWRYDQFERELIDRIGFLAVPIPQDHTAPNLSDKLEEDIRALEFKQSNILAGIADAETADVRKVLLGQADALTRQIEVKRREIVAVRENDARYRESAAAVVDFTADQEEIRRLAKEDRKGAQGLISNLVQHIDLESASKTLRRAMVTMRSGYTHTIVFDGTGEPG

SEQ ID NO: 35867 - DNA, 50 bp, Mesorhizobium sp
  source 1..50: mol_type = genomic DNA
attccgtaaaacaaaagccaaatctggactagactttaactctacagagt

SEQ ID NO: 35868 - DNA, 40 bp, Mesorhizobium sp
  source 1..40: mol_type = genomic DNA
gatctgcaggagccagacctggcacaagctctgatcgttt

SEQ ID NO: 35869 - DNA, 50 bp, Mesorhizobium sp
  source 1..50: mol_type = genomic DNA
attccgtaaaacaaaagccaaatcgagactagactttaactctacagagt

SEQ ID NO: 35870 - DNA, 40 bp, Mesorhizobium sp; identical to SEQ ID NO: 9280
  source 1..40: mol_type = genomic DNA

SEQ ID NO: 35871 - protein, 504 aa, Mesorhizobium sp
MLQPRDLKGRLAISYARWSSGKQASGDSLARQTKNAEEFCASFGLTLDRQLVDDGVSAFKGANLEASLGKFVGDVKSGKIPSGVILIVENIDRITRVKPTRAIRYFLDLLDTGLTLVTLTDQRVHTSEGYDDNFANLMMSLMAMQAAHEYSAKLSYRVSEAWGRKPEKARAAVASGGRIKVAKLPFWIDRDTNGLNERADDARLIFELAKEGHGQQAIAQILNTRGIPSPAGNTWSQVVVGDVLRSPAAYGCLVLKGEEVPGYFPSLISETEWLATRQRTKARLHSRQVGRTSNLFSRMVHCGHCGSPVVLTSSKKGGVSWGYYICTGKTFKRTGCTAPNWRYDHFERELIDRIGFLAVPIPQDHTAPNLSDKLEEDIRALEFKQSNILAGIADAETADVRKVLLGQADAMTRQIEAKRKEIVAIRENDARYRESAAAVVDFDKDQEEIRRLALEDRKGAQGLISNLVQRIDLESDSKTLRRAVVTMRSGYSQALIFDSTGEPG

SEQ ID NO: 35872 - DNA, 50 bp, Mesorhizobium sp
  source 1..50: mol_type = genomic DNA
attccgtaaaataaaagccaagcctggactagactttaactctgcatact

SEQ ID NO: 35873 - DNA, 40 bp, Mesorhizobium sp; identical to SEQ ID NO: 35868
  source 1..40: mol_type = genomic DNA

SEQ ID NO: 35874 - DNA, 50 bp, Mesorhizobium sp
  source 1..50: mol_type = genomic DNA
attccgtaaaataaaagccaagccgagactagactttaactctgcatact

SEQ ID NO: 35875 - DNA, 40 bp, Mesorhizobium sp; identical to SEQ ID NO: 9280
  source 1..40: mol_type = genomic DNA

SEQ ID NO: 35876 - protein, 485 aa, Longicatena caecimuris
MKGVIYARYSSDNQREESIEGQLRECKEYAERNDIMILGTYIDRALSAKTDNRPEFQHMIKDSAKGLFDVVLVWKLDRFARNRYDSARYKNILKKNGVKVISARENISEGSEGIILEAMLEGYAEYYSAELSEKVIRGLTDNALKCKYNGGTVPIGYYIDEQQYYQIDPKTAPVVLEMFTRYSEGATMQELVNLLNSRGMRSIRGGKITLNIMNHLLKNRRYMGEYSYRDVVKEDGIPAIVPKELFERVQERLAKNKKAPARHKAEDDYLLTTKLYCGKCGSFMVGESGTSHTMKVHRYYRCVNTKKKKLCDKKAVKKDWIEDLVVSYTMKAIMNDEVMERLIDTLMELQKRESTDLPLLKKQLAETEKGINNMLNAIQAGIFTPSTKQRLDELEETKSQLEISILQEEMHKPMLTREQIAFFIYRFRKFDVTKREQRQRLIDSFVNAVYLYEDKIILTFNYKDGSKTITLAEVEGSDLSVLGAP

SEQ ID NO: 35877 - DNA, 50 bp, Longicatena caecimuris
  source 1..50: mol_type = genomic DNA
ggttcagatttatccgtactcggtgcaccagataatgataatccgaaccc

SEQ ID NO: 35878 - DNA, 40 bp, Longicatena caecimuris
  source 1..40: mol_type = genomic DNA
agttcaagtctcatcggctgcaccaatgaaaatcaaaaaa

SEQ ID NO: 35879 - DNA, 50 bp, Longicatena caecimuris
  source 1..50: mol_type = genomic DNA
ggttcagatttatccgtactcggtataccagataatgataatccgaaccc

SEQ ID NO: 35880 - DNA, 40 bp, Longicatena caecimuris
  source 1..40: mol_type = genomic DNA
agttcaagtctcacctcctattaaaaaaaaaaaaaaaaaa

SEQ ID NO: 35881 - protein, 532 aa, Pseudomonas fluorescens
MKQAISYVRFSSDRQRHGSSVERQEGMIADWLKRHPDYEMSDLKFSDLGKSGYHGEHIKEAGGFGKLLKALEDGFIRAGDVVLVEAIDRTGRLEPMDMLTLVINPILKAGVSIITLDDNTTYSKESVNTAQIFLLVAKIQAAHGYSAALSTRVADSYKKRRKDAAKYGIVPRRITPVWLNPDGTVREDVAPWIKTAFELYVSGVGKSTIAKRMRESGVERLAKASGPGVEGWLRNKAVIGKWETLEGTPDHQIIDDIYPAIIEPSLFYKAQVHAEKMKTQRPIKTASHFLVGLVRCGECGKNYIVQNLHGKPHSMRCRTRQSQNECTNSHCVPKPVLDAIYRYTSVTAAIEAVQQQQMGVNDKEIVTREAELLAITKRVDGLVQALTQTGPIPEVIEALKQSRIEREAAESALVILRSTVVPSAGTHWQEMGKVWKLEAADAQRLAAMLKLVDYHITVAPTGEITASHSEVLYRYIGVDRALDKYKLLANGKLMLIPKGYVDDFPYHEPFQEMQSENTWDEADYDNLRQQHQ

SEQ ID NO: 35882 - DNA, 50 bp, Pseudomonas fluorescens
  source 1..50: mol_type = genomic DNA
cagtgttacttacgaaaagcttgctcccaacaatatcgtatgtaacactg

SEQ ID NO: 35883 - DNA, 40 bp, Pseudomonas fluorescens
  source 1..40: mol_type = genomic DNA
catccccatgatcccctgatcccaacccttgatcacccga

SEQ ID NO: 35884 - DNA, 50 bp, Pseudomonas fluorescens; identical to SEQ ID NO: 35882
  source 1..50: mol_type = genomic DNA

SEQ ID NO: 35885 - DNA, 40 bp, Pseudomonas fluorescens
  source 1..40: mol_type = genomic DNA
catccccatgcaccccctctcccatcctctgatcacccag

SEQ ID NO: 35886 - protein, 547 aa, Salmonella enterica; identical to SEQ ID NO: 10611

SEQ ID NO: 35887 - DNA, 50 bp, Salmonella enterica; identical to SEQ ID NO: 10667
  source 1..50: mol_type = genomic DNA

SEQ ID NO: 35888 - DNA, 40 bp, Salmonella enterica
  source 1..40: mol_type = genomic DNA
gtacatggaataatagagcaccaggatctttgccatttgt

SEQ ID NO: 35889 - DNA, 50 bp, Salmonella enterica
  source 1..50: mol_type = genomic DNA
gtgcgtgtttagctatgtaaaagcagtagtattcttgccttaacactcat

SEQ ID NO: 35890 - DNA, 40 bp, Salmonella enterica
  source 1..40: mol_type = genomic DNA
ataggtggaacaggatagcagcaggaacttttccatttgc

SEQ ID NO: 35891 - protein, 493 aa, Saccharomonospora cyanea
MAQTTQGGIRFYLRVSTDTSGREKSPHEQSDDLARDAEHQQWTVHPDPYRDVGSASRYARGTRDGYERLVDDLRADRFGAGILGLWESSRGSRRVGEWAVLLDLLEDRGVRVWVHTHGRLYDPANGRDRRTMLEDAVDSEYESSKTSERLRRDAAALAREGRPTGRIPYGYERVYDVRGGKRVIVEQRPHPVEAEHVRELYRRLLAGDTFLAIEEDWARRGITTRYGKRWTNTHLASLALSPTNAGLRLHAPGARGRRHMGMGTVTKGQWPPLVDEADFLTVQRMLRDPARRTWRPGGARHWLSRIAVCGPCGRPLTVIERRGADRYRCGRGCVLVRKDQLDGWVESVLLEYLARPDVHAAISAHRSGADDELARLDTEIARLRLEMAEAERSDPESVHEARILAKLVERLAGQITDLEARQAELSTPSVLHGLVGEGAADRWAATDIHVRREVARAVFSPEWLGVVRVMRSATRGRHRVPAPVSDRVVFDRG

SEQ ID NO: 35892 - DNA, 50 bp, Saccharomonospora cyanea
  source 1..50: mol_type = genomic DNA
acctaggtggtgtctccgacgggatcaaccggcagaggtaccgtaacggg

SEQ ID NO: 35893 - DNA, 40 bp, Saccharomonospora cyanea
  source 1..40: mol_type = genomic DNA
ctctcggtctccgacgggatcagcatgggccaccagggga

SEQ ID NO: 35894 - DNA, 50 bp, Saccharomonospora cyanea
  source 1..50: mol_type = genomic DNA
acctaggtggtgtctccgacgggacaaaccggcagaggtaccgtaacggg

SEQ ID NO: 35895 - DNA, 40 bp, Saccharomonospora cyanea
  source 1..40: mol_type = genomic DNA
gtctcggtctcccacgagacaggcctgggataacaggcgt

SEQ ID NO: 35896 - protein, 538 aa, Coprococcus comes; identical to SEQ ID NO: 13576

SEQ ID NO: 35897 - DNA, 50 bp, Coprococcus comes; identical to SEQ ID NO: 13577
  source 1..50: mol_type = genomic DNA

SEQ ID NO: 35898 - DNA, 40 bp, Coprococcus comes
  source 1..40: mol_type = genomic DNA
ctaagacattcccggagcaaatgctcatggcattgaagcg

SEQ ID NO: 35899 - DNA, 50 bp, Coprococcus comes
  source 1..50: mol_type = genomic DNA
ttgcttctttatcacacataagcagatgctcatgtacggtaaggaagcaa

SEQ ID NO: 35900 - DNA, 40 bp, Coprococcus comes
  source 1..40: mol_type = genomic DNA
ctctggcattcccgcagcagatgcacatggccctgcactg

SEQ ID NO: 35901 - protein, 613 aa, Moritella viscosa
MKKAYSYIRYSSPQQAKGDSFRRQLATTQAYCDKHGFKLDEELSLYKELGVSGFSGDQENLKRFISDCVSGKIEKGSLLIVENLDRLSRQKINIAMRQFLHLLEYVDIYTIQDEKKYLHISDTDEEKNDNQMLDIMTSLIIMSRAYEESATKQKRLKESWDERRANIGTKKLTSLIPHWLKLSKDKSSFHIKKERVEIIKHIYDKCIEGVGVTQLIRQLNNNLEQFPTPTTKSKLWARTSVSRILTDRSVLGEYQPHVGKHSGIGDKKRKPLGDPILDYYPQIIDEETFLKAQIARKSRFVGKRSGKLSNDHFSNLFRSFMKCGHCDGKMEFVNKGSDKSRGGKYLTCASSKRGGGCTQNKHYKYLSLELMLLHLTTENGFMPKPEPPTKLNLRLAKLQDVNEKASNDLNFLLNGDFTALLIQNKISELSKDIENCSSEIKILEEQVLTFKPDYHYDELHYDVIIEEDKLKLYSNRINFNSYLLKKIDSAYLIYDRCPFILFKMKDDHVHTIILDENYNFGGCTLPNGEVSYKRLNGASTPIDPMIWQIQENFIALIDDAKNIKSKKLENYLNKINKLINKIIMVQDVEILDQISYQITKATKLLSQLLIKNQ

SEQ ID NO: 35902 - DNA, 50 bp, Moritella viscosa
  source 1..50: mol_type = genomic DNA
tcgttaggttaatgacataactacaactagttatgctataatccgcataa

SEQ ID NO: 35903 - DNA, 40 bp, Moritella viscosa
  source 1..40: mol_type = genomic DNA
cccgggaggaccaaacaacaataaattatgattacctgct

SEQ ID NO: 35904 - DNA, 50 bp, Moritella viscosa
  source 1..50: mol_type = genomic DNA
tcgttaggttaatgacataactacacctagttatgctataatccgcataa

SEQ ID NO: 35905 - DNA, 40 bp, Moritella viscosa
  source 1..40: mol_type = genomic DNA
cccttgtgtccccaaccccaccacattatgattacctgct

SEQ ID NO: 35906 - protein, 613 aa, Moritella viscosa
MKKAYSYIRYSSPQQAKGDSFRRQLATTQAYCDKHGFKLDEELSLYKELGVSGFSGDQENLKRFISDCVSGKIEKGSLLIVENLDRLSRQKINIAMRQFLHLLEYVDIYTIQDEKKYLHISDTDEEKNDNQMLDIMTSLIIMSRAYEESATKQKRLKESWDERRANIGTKKLTSLIPHWLKLSKDKSSFHIKKERVEIIKHIYDKCIEGVGVTQLIRQLNNNLEQFPTPTTKSKLWARTSVSRILTDRSVLGEYQPHVGKHSGIGDKKRKPLGDPILDYYPQIIDEETFLKAQIARKSRFVGKRSGKLSNDHFSNLFRSFMKCGHCDGKMEFVNKGSDKSRGGKYLTCASSKRGGGCTQNKHYKYLSLELMLLHLTTENGFMPKPEPPTKLNLRLAKLQDVNEKASNDLNFLLNGDFTALPIQNKISELSKDIENCSSEIKILEEQVLTFKPDYHYDELHYDVIIEEDKLKLYSNRINFNSYLLKKIDSAYLIYDRCPFILFKMKDDHVHTIILDENYNFGGCTLPNGEVSYKRLNGASTPIDPMIWQIQENFIALIDDAKNIKSKKLENYLNKINKLINKIIMVQDVEILDQISYQITKATKLLSQLLIKNQ

SEQ ID NO: 35907 - DNA, 50 bp, Moritella viscosa; identical to SEQ ID NO: 35902
  source 1..50: mol_type = genomic DNA

SEQ ID NO: 35908 - DNA, 40 bp, Moritella viscosa; identical to SEQ ID NO: 35903
  source 1..40: mol_type = genomic DNA

SEQ ID NO: 35909 - DNA, 50 bp, Moritella viscosa; identical to SEQ ID NO: 35904
  source 1..50: mol_type = genomic DNA

SEQ ID NO: 35910 - DNA, 40 bp, Moritella viscosa; identical to SEQ ID NO: 35905
  source 1..40: mol_type = genomic DNA

SEQ ID NO: 35911 - protein, 586 aa, Rummeliibacillus stabekisii
MNEKKKAVGYIRVSFMGPKNKKADKESPHTQLNAIKRYCEFKGYELDEESDIYRDLDYSGANDKRPDFQRLFSDIKKKRKDIDVIVVYNLSRFARDVLDLNKYLQILNEHEIDFASSQEDFLRTDSSMGKFMINIIGAVAQLQREQIAESVRDNMIHAALHKGKHQGGIPALGYTVNPKTHLYEINEDEARIVRLIFNKYVEGETTGSITKYLTEIKALGRNKFSTTSIDSILKNDRYTGDYIYNKMRNISGTKKKKKNPRKSWVSKPNNHPAIISWDLFKKAQEVRKERATNKKYFVNKGKKASKHILSGLIECGNPNCKNHYFGNQRKNGKGIAYDYYFCSGKQRHTSAFCHQRGIRVEKLDAIVIDTLSDVISHDYLMKLWEEDFHIITEEIKVEKANEIYLKNTIEELQAEQENIVERASKTSVDDFAKQLEERHYKIGLQIKELQEQLSLGEVEGVFDFEAASDFKKMISGMGDTKLDVKFLKMFDKKVIRKVVHQFIEKITVTDLEDGSTKIGIDYKVNKNNLELILKINKQKGLFEVTDKEQYFTLESENEKHTFFLNKVNEMISEVDCVHRAQHGPPV

SEQ ID NO: 35912 - DNA, 50 bp, Rummeliibacillus stabekisii
  source 1..50: mol_type = genomic DNA
tgtgtgcatagagcccaacacggtccaccggtaccaaccttatacacaca

SEQ ID NO: 35913 - DNA, 40 bp, Rummeliibacillus stabekisii
  source 1..40: mol_type = genomic DNA
agtgtcggttcgaccccgaccaccggtatcataacatcgt

SEQ ID NO: 35914 - DNA, 50 bp, Rummeliibacillus stabekisii
  source 1..50: mol_type = genomic DNA
tgtgtgcatagagcccaacacggtataccggtaccaaccttatacacaca

SEQ ID NO: 35915 - DNA, 40 bp, Rummeliibacillus stabekisii
  source 1..40: mol_type = genomic DNA
agggttggttggacccctgattttgatatcatatcatcgt

SEQ ID NO: 35916 - protein, 488 aa, Bacillus cereus
MKLVIKLNYAVYVRVSTDKDEQVSSVENQIDICRYWLEKNGYEWDDSAVYFDDGISGTAWLERHAMQLILEKARKKELDTVVFKSIHRLARDLKDALAIKEILIGHGIRMVTIEENYDSLYEGKNDMKFEMYAMFASQLPKTLSVSVSAALTAKIRRGEHTGIIPFGYDRVDKKLVINEEEAKIVREIFELQEKQIGYKTISKYLNEKGIRTKAGNNWSGTTIKHILTNSLYKGEYIMNQYGYVKVDGRKKRIINPKEKWTIFEDHHPAIIPKEQWDHVNNLGDEKRTRTKVDKKNEFRGIVYCAHCDSAIRAVYSGRYSRGEKKEWVYMKCARYKRYGTCVNHVPIQYHELREVILSMLKDKEKELNIQFSPQNEKKHKEKMQKVKKEIQQLKMKKDKLIELYIEGLIGKEAFVQRDKKFEGEIKEKELQLIKLSDVKAQSNEQKEVKKAFALLQEEQDLHETLKILVKKISLYKDKRMQIKYTFDI

SEQ ID NO: 35917 - DNA, 50 bp, Bacillus cereus
  source 1..50: mol_type = genomic DNA
aactagttattaatgacaatcacaactgtgaatagtactaataactagtg

SEQ ID NO: 35918 - DNA, 40 bp, Bacillus cereus
  source 1..40: mol_type = genomic DNA
gattgggctgacaatggaaacgatgattgtaacaccgata

SEQ ID NO: 35919 - DNA, 50 bp, Bacillus cereus
  source 1..50: mol_type = genomic DNA
aactagttattaatgacaatcacagttgtgaatagtactaataactagtg

SEQ ID NO: 35920 - DNA, 40 bp, Bacillus cereus
  source 1..40: mol_type = genomic DNA
gattgtgatggcaatgaaagtgatgatggtgatggtgata

SEQ ID NO: 35921 - protein, 545 aa, Luteococcus japonicus
MSTAIVNPASIETKAPVLLAVSYLRVSTREQAERGGTDEGFSIPAQREANARKAAELGARVVREFIDAGESARSADRDGLKEMLAFITATRVTFCLVHKLDRLARNRADDVAIHQALLSAGVTLVSATESIDQTPSGMLVHGIMSSIAEFYSRNLATEVTKGLTQKLAQGGTPMRAPVGYLNVRRTDEAGREVRTVEVDPERAPLVRWAFETYAKGETSVTGLLGDLTARGLTTVPSPKRPSKPLGKNTLYKLLTNPYYAGVIRYKGAVHPGAHEPLIEPALFDQVQSLLKARNAKMTRHVQHAHHLKGLLHCGSCGSRMLLDFATNPRGTTYAYFICSGRAAKRTTCTRRAVPVQVAERLVEDSYRDITISEDDYRHLAAEVDAAFDEQSTGRDQEFADLTTNRARLEAESDKLLAAHFADAIDLPTLKRHQDRLRAGLADIEQRLSEHDEHHSGARAFLHDSLRLLTDAHHAYAHSDDGNRRLANQAFYTRLEITEDEQLRPRLAEPFKTIITEIRGPTGGKNAKREHSTSTDVACSRKALWV

SEQ ID NO: 35922 - DNA, 50 bp, Luteococcus japonicus
  source 1..50: mol_type = genomic DNA
gtgttcccgtaaggcactttgggtggacgcaatggagcactacgggaaca

SEQ ID NO: 35923 - DNA, 40 bp, Luteococcus japonicus
  source 1..40: mol_type = genomic DNA
ggcaaaggcaagcattggtggggcgtgcggggctcgaacc

SEQ ID NO: 35924 - DNA, 50 bp, Luteococcus japonicus
  source 1..50: mol_type = genomic DNA
gtgttcccgtaaggcactttgggtgaacgcaatggagcactacgggaaca

SEQ ID NO: 35925 - DNA, 40 bp, Luteococcus japonicus
  source 1..40: mol_type = genomic DNA
gggaggggcaagcacgtgtgaggcgggcggggcgcgaagg

SEQ ID NO: 35926 - protein, 606 aa, Faecalibacterium prausnitzii
MAKNKDCIAVYSRKSKFTGKGESIGNQVELSREYIRTHYGDAYAESMVVYEDEGFSGGNLNRPDFKRMMKAAHEHKFKAIVVYRLDRISRNVSDFSTLIEELSRLDIAFVSIREQFDTGTPMGRAMMYIASVFSQLERETIAERIRDNMHELAKTGRWLGGTTPTGYASESVKHITVDGKSKKACKLKLVPEEADTIRLIYKIFQESDSLTYTEAELMKRGIKTKNGKYHTRFSIKSILQNPVYVIADDEVYNYLVNKDADLFSDKAAFDGVHGLMVYNRTDQEKGRATRYLSPEEWIVSVGEHPGIIPGREWIRIQESLYRNKSKAYRKPRGNEALLTGLLFCRCGSRMYPKLSKRKTADGKRIYTYVCKMKDRSKHKLCNERNANGNTLDLAIIEQIKVMEDNQGTFIAQLEQSRKFYTGNRTDYEDRLAAARRDKSEAEKKVEALVDSLAAVDDSTAKGLVIKRIEKLSQECRNIDSRIQELESLTEQYHLSDIEFDVFRQLLTMFKSNIDTMTVEEKRAAIRTLVRKVFWDGTNAHVVLFGVPDEEIEYPDLPTVSGGSDDEDDTDDLEAFADVDYEDEEDDSLGKTQPLSSAKARWGEDSE

SEQ ID NO: 35927 - DNA, 50 bp, Faecalibacterium prausnitzii
  source 1..50: mol_type = genomic DNA
aagcgcgttggggggaggatagcgaatgctatcctcaccccaacgcgctt

SEQ ID NO: 35928 - DNA, 40 bp, Faecalibacterium prausnitzii
  source 1..40: mol_type = genomic DNA
tgcgagcagatgtattgagaatgagctccgcatggacctg

SEQ ID NO: 35929 - DNA, 50 bp, Faecalibacterium prausnitzii
  source 1..50: mol_type = genomic DNA
aagcgcgttggggggaggatagcggctgctatcctcaccccaacgcgctt

SEQ ID NO: 35930 - DNA, 40 bp, Faecalibacterium prausnitzii
  source 1..40: mol_type = genomic DNA
tgtctgcagatgtgttggggctgtgctctgctgggtcctg

SEQ ID NO: 35931 - protein, 606 aa, Faecalibacterium prausnitzii
MAKNKDCIAVYSRKSKFTGKGESIGNQVELSREYIRTHYGDAYAESMVVYEDEGFSGGNLNRPDFKRMMKAAHEHKFKAIVVYRLDRISRNVSDFSTLIEELSRLDIAFVSIREQFDTGTPMGRAMMYIASVFSQLERETIAERIRDNMHELAKTGRWLGGTTPTGYASESVKHITVDGKSKKACKLKLVPEEADTIRLIYKIFQESDSLTYTEAELMKRGIKTKNGKYHTRFSIKSILQNPVYVIADDEVYNYLVNKDADIFSDKAAFDGVHGLMVYNRTDQEKGRATRYLSPEEWIVSVGEHPGIIPGREWIRIQESLYRNKSKAYRKPRGNEALLTGLLFCRCGSRMYPKLSKRKTADGKRIYTYVCKIKDRSKHKLCDERNANGNTLDLAIIEQIKMMEDNQGTFIAQLEQSRKFYTGNRTDYEDRLAAARRDKAEAEKKVEALVDSLAAVDDSTAKGLVIKRIEKLSQECRNIDSRIQELEGLTEQYHLSDIEFDVFRQLLTMFKSNIDTMTVEEKRAAIRTLVRKVVWDGTNAHVVLFGVPDEEIEYPDLPTVSGGSDDEDDTDDLEPFADVDYEDEEDDSLGKTQPLSAAKARWGENSK

SEQ ID NO: 35932 - DNA, 50 bp, Faecalibacterium prausnitzii
  source 1..50: mol_type = genomic DNA
aagcgcgttggggggagaatagcaaatgctatcctcaccccaacgcgctt

SEQ ID NO: 35933 - DNA, 40 bp, Faecalibacterium prausnitzii; identical to SEQ ID NO: 35928
  source 1..40: mol_type = genomic DNA

SEQ ID NO: 35934 - DNA, 50 bp, Faecalibacterium prausnitzii
  source 1..50: mol_type = genomic DNA
aagcgcgttggggggagaatagcagctgctatcctcaccccaacgcgctt

SEQ ID NO: 35935 - DNA, 40 bp, Faecalibacterium prausnitzii; identical to SEQ ID NO: 35930
  source 1..40: mol_type = genomic DNA

SEQ ID NO: 35936 - protein, 476 aa, Planomonospora parontospora
MAPTRAVALLRISDDDTGEAAGVERQGVDTRKLGGRLGWTIGPAETHVVVENDTSAFKRRKIRLPDGTTALRTVRPGFRRVLEMLASGEADGLLAYDLDRVARDPRDLEDLIDVVESRRVPTAAVTGSLDLNTDAGIAQARIMVAIANKSSRDTSRRVVRALEELAEQGKWSGGGYRPYGYEPDGTTIQEEEAAIVREMADRIISGWSPHRIATDLNSRGIRPARAEKWKSSAVTSLLTGPRIAGLRTHRAQVVGKAAWPAILPMETWEAVCAAIAGRARGNSNKLTRWLTGALFCSACGHRLTGSPVGDGSAHRYWCNTSRGGCGKISINAELTEAEVERQILEYLEMPGVLERIRSATSSSTADEARKDASEDEAQLKELARMWAQKRITLAEYTEARKIIEDRLKETKAFLTASAPLVLRGLLSGNVRAKWAKKTPAERREIVLALLPGYRVMPHVGGVRTFDPSRLQPIDHE

SEQ ID NO: 35937 - DNA, 50 bp, Planomonospora parontospora
  source 1..50: mol_type = genomic DNA
atgggttacagattgcctatcggctcggccacgtcttcaaggtaacctat

SEQ ID NO: 35938 - DNA, 40 bp, Planomonospora parontospora
  source 1..40: mol_type = genomic DNA
cctggtcctccgggtcggctcggccacgctcgtcactgta

SEQ ID NO: 35939 - DNA, 50 bp, Planomonospora parontospora
  source 1..50: mol_type = genomic DNA
atgggttacagattgcctatcggccaggccacgtcttcaaggtaacctat

SEQ ID NO: 35940 - DNA, 40 bp, Planomonospora parontospora
  source 1..40: mol_type = genomic DNA
ccgggtcccatgggccagccaggcaaggctggccactgta

SEQ ID NO: 35941 - protein, 416 aa, Agrobacterium tumefaciens
MPMTRVALYARYSSDNQREASIVDQFRLCDEYARREGWQVAGSYQDAAISGSSTILSHGIQQVVRDAQRGLFTVVIAEALDRISRDQADVATLYKHLKFAGVTIVTLAEGEISELHVGLKGTMNALFLKDLAMKTHRGLRGRVEKGKAGGGLCYGYRVLKQFDGNGEPVRGDREIIAEEADIICRIFREFASGKSPKAIATDLNSEGIPGPLGRAWGDTSIRGHVTRGTGILNNELYTGVLVWNRQRFIKDPSTGKRVSRPNPESQWIRTEVPHLRMIEDDLWQAVRNRQKQISAIFGPNPANTLEGRMKRLHLTVRPVSLLTGLLTCGCCGGKFGIITPSRYACLNHHRRGICDNGRSITREKIEARVLSGIKDKLVSSQAVAEAVKAYAEEMNRLNHDRRAQAAVDRKNLAKVE

SEQ ID NO: 35942 - DNA, 50 bp, Agrobacterium tumefaciens
  source 1..50: mol_type = genomic DNA
ttttatgccattcgttgaagcgagcccccgcaaccaattcaaacataagt

SEQ ID NO: 35943 - DNA, 40 bp, Agrobacterium tumefaciens
  source 1..40: mol_type = genomic DNA
aggaatcgtgtgttgcgagcccccgcaaccaatattccaa

SEQ ID NO: 35944 - DNA, 50 bp, Agrobacterium tumefaciens
  source 1..50: mol_type = genomic DNA
ttttatgccattcgttgaagcgagaacccgcaaccaattcaaacataagt

SEQ ID NO: 35945 - DNA, 40 bp, Agrobacterium tumefaciens
  source 1..40: mol_type = genomic DNA
gagaaatgagtattgcgggaacccgcccccaatatttcaa

SEQ ID NO: 35946 - protein, 542 aa, Ruminococcus gnavus
MKLQKVLDLFNVAIYIRLSREDGDKEESDSVGNQRKLLAEYIAKKEDFILYDVYVDDGYSGTNFNRPSFQRMIADIEDGKVNCVVVKDLSRFGRDYIDTGRYLERYFPEMGVRFISVTDGIDSMKQAYDMLLPIKNIFNEQYARDISKKIQATVKSKQKAGEFIGAFTSYGYKKSPVDKNKLVIDDYAADVVRRIFSLYIQGYGKQKIAKLLNAEGVLCPAEYKKVNGENYKNCNRLESTTYWSYSTINSILHREMYVGNMVQGTKHQRMRSKQKKMPKEEWIVVENTHEPIIDKATWEKAQSLLQKRTRELDLETNKNIFAGFVKCGDCGRAMAKNMWRRADGSKTYSLYCGTYKRNGKQYCTPHTLPMVVLEDIVLGDLKAIVDNVDNLKELVQSQSFTASKVKRIADTELSKIKAELERVKKLKKSVYEDYREELISKEEFLSYREDYLKKEELYSKQIEALEEKKNDNVTEDVFETPWLKRLLELKDIEALDRNIVVEMISEIKVYENRKIKITYNFGNELEHLFSSVYSVESEEKVI

SEQ ID NO: 35947 - DNA, 50 bp, Ruminococcus gnavus
  source 1..50: mol_type = genomic DNA
catttgcgcaattaacaccctgcacatgggggaacacagttgcgcaagta

SEQ ID NO: 35948 - DNA, 40 bp, Ruminococcus gnavus
  source 1..40: mol_type = genomic DNA
ggttgtgattgattccggacacgggggaaaagatcccgga

SEQ ID NO: 35949 - DNA, 50 bp, Ruminococcus gnavus; identical to SEQ ID NO: 35947
  source 1..50: mol_type = genomic DNA

SEQ ID NO: 35950 - DNA, 40 bp, Ruminococcus gnavus
  source 1..40: mol_type = genomic DNA
ggtagtgattgttttggatcacggggcactagatcccaga

SEQ ID NO: 35951 - protein, 563 aa, Clostridium fessum
MLKNIQSVTTGNTFTTSPIKETDTGITALYCRLSQDDGNVGDSDSIINQKKILAEYAERNGYTPYQFYIDDGFSGTNFERPQFKQMIEDAKKGTVKRIICKDLSRFGRDYIKVGLYTEFIFPDKDIHFIAVNDDVDSNVQKDNDLAPFKNLFNEWYARDTSKKIKAVKKAKGLAGEHMSCVAPYGYRKNPDNPKEWLIDEESAEVVREIFRLCVDGYGPRRIANILTERKILIPSAYALEKGYAVRNNIPKNPCQWSSTVVVDVLERMDYLGHTVNFKTHRKSYKQKKKIENDKSEWKIFENTHEPIIDKSTFDIVQKIRANRKRPTKMGEMPMFSGILYCADCGKKLSFHRRANDPDTKHNFVCSNYRSDTHNCSMHYIRNVVVEQLVLENLREVVSYVKAYEDEFVQMVMDADIKQKSKELAKKKRVLSDKEKRYTQLDGLFQRIYEDNVSGKLSDERFVKLSQGYEAEQKDLQSEIEALRMELSQEKQQSVNVKSFLSTVKKYTEIPELTSEIVHEFIDRIIVHEADKSSGKRIQEIEIIYNHIGVFDRSKVNVYMGKAV

SEQ ID NO: 35952 - DNA, 50 bp, Clostridium fessum
  source 1..50: mol_type = genomic DNA
aagtatccttatgaaatccctacaaaatgtgggctgtcataaggattgtt

SEQ ID NO: 35953 - DNA, 40 bp, Clostridium fessum
  source 1..40: mol_type = genomic DNA
aatcccgaaaatccttgtaaaatacggcttttcaggcata

SEQ ID NO: 35954 - DNA, 50 bp, Clostridium fessum
  source 1..50: mol_type = genomic DNA
aagtatccttatgaaatccctacaagatgtgggctgtcataaggattgtt

SEQ ID NO: 35955 - DNA, 40 bp, Clostridium fessum
  source 1..40: mol_type = genomic DNA
aatacagaaaatccatggaagaaaaggcttttttggaaaa

SEQ ID NO: 35956 - protein, 467 aa, Micrococcus luteus
MSPAALYLRQSKDRARDEAAVERQEAACRALAEAKGITELRLYVDNDRSATAGERPEFERLLEDVRAGHVSVVIVFHLDRLTRSIRDLTRVIEAGQPRRLNIASVHGVGIDLGDPTGVAVATILTAVAAMEVQHKGTRQRAANRQRAERGAAFWTRRPFGYDREGGRVYVVEREAEAIREGARMILEDGATLSAVMRAWDAAGLRTTGKNRAGEPGRWSVTKVRSVLLNPRYAGRRMYNGEDVGPGDWPAILDRDTFDDLTVKLTDPRRRTAPDDLNAKHLLSGILTCGKCGARMFAAPSKYRGNVRMTYRCHGGYCMGRGMEDVDRVVTAVLLARLAQPDALAAMSPTEDVQALHARAADLRDRRDALAELLADGLMSPTAVREQAGRLNRDLTDLEGRLAAATGSDPVVNLIQSEDVAASWEAAPVAERRRIVRTLMEVTLLPVGKGTRFAPEHVRIAWKGGNDD

SEQ ID NO: 35957 - DNA, 50 bp, Micrococcus luteus
  source 1..50: mol_type = genomic DNA
tacggacgatgacacatgacagtcccgcatgtcaaccgctaggattacta

SEQ ID NO: 35958 - DNA, 40 bp, Micrococcus luteus
  source 1..40: mol_type = genomic DNA
ggagatccagatgatggtgcccctcgtgttcggcatcctc

SEQ ID NO: 35959 - DNA, 50 bp, Micrococcus luteus
  source 1..50: mol_type = genomic DNA
tacggacgatgacacatgacagtcctgcatgtcaaccgctaggattacta

SEQ ID NO: 35960 - DNA, 40 bp, Micrococcus luteus
  source 1..40: mol_type = genomic DNA
taagatctggctgacggtgctcttcatcttccgcatcctc

SEQ ID NO: 35961 - protein, 502 aa, Micrococcus luteus
MTSKRAVIYTRISRDDRGVEAGVTRQEEDCRAKAAGLGFEVVRVYTDNDIGASTRSRKVRPEYAQMLEAARRGAFGAILAYSTSRLTRRPREAEDLIDLVERHGVQIKTVVSGDWNLETADGRAVVRTLAAWDAAEAERTAERVARACEQRAAEGRTHGAVPYGWTRDADGTEHLHPERAQVIRDAAAHVLEGGSLRSFTLDLNARGVGSPRGGKWTAPQLKQLLLRERNAGRLVRRDPNNPRHRPVVGKGIWPQILDEETHDRLVAHLTDPTRRKSRGSELKHMMSGILICGVCGARCRLMPGGKSPDGTPRPPSYGCRECFGVKRRVAQVDEWVSYMARVRLAEKDAPALLAGDDEGARKAQRERDEARAKLDRAADAYAEGLIDSHQLTRISANLHKKREDAEARLARARPLGGLSFDRGASPVQVWRRAPVAVRRTLVEMMMTVTLLPGGRGSRFDPEQHLRIVMNDLKTSVSDILVTSGTVPDRPTGSEDSDPPRRE

SEQ ID NO: 35962 - DNA, 50 bp, Micrococcus luteus
  source 1..50: mol_type = genomic DNA
aagtgcatctaacgggtgacgataggttccattactcgtacgggttactc

SEQ ID NO: 35963 - DNA, 40 bp, Micrococcus luteus
  source 1..40: mol_type = genomic DNA
gaggatgccgaacacgaggggcaccatcatctggatctcc

SEQ ID NO: 35964 - DNA, 50 bp, Micrococcus luteus
  source 1..50: mol_type = genomic DNA
aagtgcatctaacgggtgacgataagttccattactcgtacgggttactc

SEQ ID NO: 35965 - DNA, 40 bp, Micrococcus luteus
  source 1..40: mol_type = genomic DNA
gaggatgcggaagatgaagagcaccgtcagccagatctta

SEQ ID NO: 35966 - protein, 506 aa, Eggerthia catenaformis
MNRIAIYLRLSEEDYKKTDESISIVNQRDYIRSYIENENSLKDSEIEEYIDDGYSATNTNRPSFLRLVDDIKNGRVGTIIVKDMSRFSRDYILLGDYLSNILPFLKIRFIAINDNYDSLKEQGNGIDTDAQFKTLYYDLFSKELSEKVRSSLKQIKSQGKNTNWSAPFGYIKDPKDKYHIIIDKKTAFIVKEAFYLLLKGYSCIQVANIFNEKGYITRSERKQELKISDYSRNIITGSKVSKRAWTSVCISQITRNELYTGDYVYNKYKETRIGGRKKILLPEEEWKVIHNTHEAIISREIFDEVKKIKEKRKFYVYTGKKNRSIFSDKIFCKECGRHMGFRSDSRQKKNTDKVYKYRNYYCYFCKTSRTPNNVKERKIIEFIKPKLERFKIKNGVNEERMIHPENSREDLLKEIDLLNSNLQIIYENYKKHILSKERYLQEKALIQNKKEQQENKLEEVKSDKSYSHKEFNANSLDEDSLLKAYVDSCIDRIIVSRSGKIEIIEK

SEQ ID NO: 35967 - DNA, 50 bp, Eggerthia catenaformis
  source 1..50: mol_type = genomic DNA
tatagcaattacttgacattgtagggggataacgctataatgatgacagt

SEQ ID NO: 35968 - DNA, 40 bp, Eggerthia catenaformis
  source 1..40: mol_type = genomic DNA
tttaggaccatcaggttcgggaaaaacaacattattaaat

SEQ ID NO: 35969 - DNA, 50 bp, Eggerthia catenaformis; identical to SEQ ID NO: 35967
  source 1..50: mol_type = genomic DNA

SEQ ID NO: 35970 - DNA, 40 bp, Eggerthia catenaformis
  source 1..40: mol_type = genomic DNA
tttagcaccatcagaatagggaaaaatcacttctttaaaa

SEQ ID NO: 35971 - protein, 478 aa, Streptomyces malaysiensis
MATKTAKRQPITPGTAAAIYCRISHTDDDDQTGVDRQERICREIAERLGLVVPPSLVFVDNNRSAWRRDRKRPGWDAMLKEMEEGEIRHLIAYHPDRLMRQPRDLEELLTISDSNHITMHGEANRRDLSDPDDRFILRIEVAHACRSSDDTSRRLKDAMDDRARAGTPHTGRRRYGYTKNGMEIIEEEAEIVREIFRRYLAGEAPRAIARDLNERGVRTALGKSWGPDTVRALIDSRHVAGIRMFRGEEHGVGNWPAIIDRGQWDEAQERRKYRAERSAEKNKRSRYYLLRSVVMCTCGRTMGGSGGNVFEYRCTRRVAVDGTACKRTIAAEPLERFARAVAIDVLSKLDVSGRPPATTTRPAADVEADERDAQKLKDLYEMWDADEMPTREYRQKRREIEARIKERQKQTRIRPVVVLEGIAGPHAEENWKRLEKDEDYARINAIFRFLFGGIVIGPASGVGNFDTDRISIRPNPLD

SEQ ID NO: 35972 - DNA, 50 bp, Streptomyces malaysiensis
  source 1..50: mol_type = genomic DNA
gatgtgtatcaagaagggttgacctgagccattcccttttcatacactcc

SEQ ID NO: 35973 - DNA, 40 bp, Streptomyces malaysiensis
  source 1..40: mol_type = genomic DNA
caccgggtggaaggtcggatgggtgaccggcactcccgag

SEQ ID NO: 35974 - DNA, 50 bp, Streptomyces malaysiensis
  source 1..50: mol_type = genomic DNA
gatgtgtatcaagaagggttgaccaaagccattcccttttcatacactcc

SEQ ID NO: 35975 - DNA, 40 bp, Streptomyces malaysiensis
  source 1..40: mol_type = genomic DNA
tccaggggggaggttcgggaaggtgaccggcgctgccggg

SEQ ID NO: 35976 - protein, 503 aa, Roseburia inulinivorans; identical to SEQ ID NO: 341

SEQ ID NO: 35977 - DNA, 50 bp, Roseburia inulinivorans; identical to SEQ ID NO: 12
  source 1..50: mol_type = genomic DNA

SEQ ID NO: 35978 - DNA, 40 bp, Roseburia inulinivorans
  source 1..40: mol_type = genomic DNA
gtgatacttacaattccatttcgtgtgtgctaaactattt

SEQ ID NO: 35979 - DNA, 50 bp, Roseburia inulinivorans; identical to SEQ ID NO: 12
  source 1..50: mol_type = genomic DNA

SEQ ID NO: 35980 - DNA, 40 bp, Roseburia inulinivorans
  source 1..40: mol_type = genomic DNA
gtaatatttaaatttccacttcatgatttcaaaactattt

SEQ ID NO: 35981 - protein, 503 aa, Roseburia inulinivorans
MNNRIDAIYARQSVDKKDSISIESQIEFCKYELKGGNCKEYTDKGYSGKNTDRPKFQELVRDIKRGLIAKVVVYKLDRISRSILDFANMMELFQQYNVEFVSSTEKFDTSTPMGRAMLNICIVFAQLERETIQKRVTDAYYSRSQRGFKMGGKAPYGFHTEPIKMDGINTKKLVVNPDEAANIRLMFEMYAQPTTSYGDITRYFAEQGILFHGKELIRPTLAQMLRNPVYVQADLDVYEFFKSQGTVIVNDAADFTGMNGCYLYQGRDVKPSKKNDLKDQMLVLAPHEGIVPSDIWLTCRKKLMNNMKIQSARKATHTWLAGKIKCGNCGYALMSINNPVGKQYLRCTKRLDNKSCAGCGKIITSELEAVVYQQMVKKLEKHKTLTGRKKAAKANPKIAALQVELAHVDGEIEKLVDSLTSANNVLLSYVNVKIAELDGRKQELLARIAELTVEAISPEQVSQISGYLDTWENVSFDDKRRVVDLMITTIAATSDSLNITWKI

SEQ ID NO: 35982 - DNA, 50 bp, Roseburia inulinivorans; identical to SEQ ID NO: 12
  source 1..50: mol_type = genomic DNA

SEQ ID NO: 35983 - DNA, 40 bp, Roseburia inulinivorans; identical to SEQ ID NO: 35978
  source 1..40: mol_type = genomic DNA

SEQ ID NO: 35984 - DNA, 50 bp, Roseburia inulinivorans; identical to SEQ ID NO: 12
  source 1..50: mol_type = genomic DNA

SEQ ID NO: 35985 - DNA, 40 bp, Roseburia inulinivorans; identical to SEQ ID NO: 35980
  source 1..40: mol_type = genomic DNA

SEQ ID NO: 35986 - protein, 525 aa, Brevibacterium casei
MSMNTTTTNTNTTTTNRLLELPLLTPELRTAVERLREMAEDDWTASILYGRASQDRHKLMRSIDDQLTDMVGWCLPIEWYPEAIVRDADRSASQWRRHEREGFDEAMALIESGRYGGFASWEPSRAGRDMEVYVQLRKACQRAGVLYLTHGRVYDFSRSDDTFMMGFEFLRAEADANTMRERQLRTVKLNADKGRPHGRLPYGYRRVYDQHTGVLLRQEPDPHTGQIVRDAARDVLAGKSMYSIAMRLQDAGEPTPKKPWAESPRGWDTYTVRQVLQNPTIAGKRVYRGEVIGQAQWEALIEWEDFQKIQRLFADPGRLVKGGGGMAAKTLMVHIARCHYCGRPLKRATMRKKERTPAVKYQCQFRGCYKTMISQPGLDAYVEQVVLEWFQNPTNLAWLTGDDDGDWLKVAEAAEQKRAALQARLDEVIAQYAAGSLNLDTLTKLEAALRPQIAEAEQALIPPVTDERVRALVTAEDVPAAWAGLPLLERRKIIKATFNVRIQQTQNRGQNAFEPERVLIEPRAL

SEQ ID NO: 35987 - DNA, 50 bp, Brevibacterium casei
  source 1..50: mol_type = genomic DNA
gtatctcccttgagcatcttcggctcgtcgatcaagttcaaggggcagag

SEQ ID NO: 35988 - DNA, 40 bp, Brevibacterium casei
  source 1..40: mol_type = genomic DNA
gtcgaggccggtggtcggctcgtcgaagaggaggagttcg

SEQ ID NO: 35989 - DNA, 50 bp, Brevibacterium casei
  source 1..50: mol_type = genomic DNA
gtatctcccttgagcatcttcggcgagtcgatcaagttcaaggggcagag

SEQ ID NO: 35990 - DNA, 40 bp, Brevibacterium casei
  source 1..40: mol_type = genomic DNA
gtcgaggcaggtggcccgcgagtctcggaggtgccggtcg

SEQ ID NO: 35991 - protein, 537 aa, Hungatella hathewayi; identical to SEQ ID NO: 10201

SEQ ID NO: 35992 - DNA, 50 bp, Hungatella hathewayi
  source 1..50: mol_type = genomic DNA
ttttcctgtatctggcggcagcgtttctgtggtatgttttttagagatgg

SEQ ID NO: 35993 - DNA, 40 bp, Hungatella hathewayi
  source 1..40: mol_type = genomic DNA
tgcgtgacagtgcggcgctgtctgtgtctggtacccgtgg

SEQ ID NO: 35994 - DNA, 50 bp, Hungatella hathewayi
  source 1..50: mol_type = genomic DNA
ttttcctgtatctggcggcagcgtggctgtggtatgttttttagagatgg

SEQ ID NO: 35995 - DNA, 40 bp, Hungatella hathewayi
  source 1..40: mol_type = genomic DNA
cgcgtgactatgcggcttgggctgtgtgtggtggccctgg

SEQ ID NO: 35996 - protein, 493 aa, Dorea longicatena
MSVKYAYGYIRVSTHDQEEISPDSQEHLLRDYAAKNNIVILKIFMDLGISGRKANKRPGFQEMIGLAKGDDHPVDQILVWKFSRFARNQEESIVYKSLLKKQHNVDVVSVSEPLSDDPFGSLIERIIEWMDEYYSIRLSGEVYRGMKENAIRGAYQARPPLGYKVVEHGKPPVIVPKEAKIVRTIFEKYTNEGMSFFDIARYLNSLGLKTSHGKPFERRSVEYIIQNPSYCGMIRWNRTENSTNRIKDKDEWIVTEGQQPAIISKELFESAQERFKATYKPVGKRPSSTYKHWLSGLLKCPDCGRTLTSTTMKRVNGEKYSYFSCYGYSKGKCKKPNGISSLVLEKEVLASIKEILDTKDIVYELREYQPTGQFDERKAITEQLESLTGKEERIKASYREGIDTLEEYKANKAIIQKERESLEQQLKELKKAARKSDQDPADAMLQKVRSVYDILISNNYTYIQKNEALKQIIDKIIYDRKNDSLKIYFFLYR

SEQ ID NO: 35997 - DNA, 50 bp, Dorea longicatena
  source 1..50: mol_type = genomic DNA
ctttataggttgtgacaatttggatgacctttttgctataacccataaag

SEQ ID NO: 35998 - DNA, 40 bp, Dorea longicatena
  source 1..40: mol_type = genomic DNA
gtacaatgtccgaattggatgacccaatggggatccaaat

SEQ ID NO: 35999 - DNA, 50 bp, Dorea longicatena
  source 1..50: mol_type = genomic DNA
ctttataggttgtgacaatttggattacctttttgctataacccataaag

SEQ ID NO: 36000 - DNA, 40 bp, Dorea longicatena
  source 1..40: mol_type = genomic DNA
ggacaatagaggaatgtgatttcccaaagaggatccaaat

SEQ ID NO: 36001 - protein, 597 aa, Enterobacter cloacae
MGHADLLTLDQWRGILMSSKQKLYSYVRWSSEKQSTGTSSERQTSRAMRFAEENELEYVEIKDAGVSAFKGKNTTQGKLGVFISEVDKGVIPRDSWLYVENLDRLTREDVLTANELFLRLLRMGLTIVTGMDNRVFTRESVNNNPMDLMASILMFMRAHEESKTKSDRVTSHVLALLERQRKGLPVNIKAIGKHPFWIDDSGSAHEKVKKHPDFWLPAQEAVRLFLEGHGAFYVTDYLNQNYPVPPAFKKTQRREGGWPLQAIKKMRANMALVGTRIFNLSGKEYRLENYYPPLCTLGEFAQLQDIKTNNKRYSGKTSTAINLLGGMKILRCGHCKGTMTAFLQRGQLRYICEYGRSGGNCTAWSLKASIVERCLMPVLITGFLIGAYKTHSDLSLLDKQTNELKEQLKKVQSQQDNVIDAIADLGRTPKLDAKFKALENEEQRVCGKLQQLHQAKSLYASTKDFSENIVDFVAGQCHWMIVSDVHNPKREALRERIRSVINEAIVTKDNRCIRIEFRFPTGETFVFAGSRPGEYEVFLPRKVHDIPPDATEQEINEWERSDYEYNKNFLKLWYEVVNKNLLSHYPAIDGKDFWPKR

SEQ ID NO: 36002 - DNA, 50 bp, Enterobacter cloacae
  source 1..50: mol_type = genomic DNA
aatgtattatttttgactttcgggcagcctaaagatataaatcctacttt

SEQ ID NO: 36003 - DNA, 40 bp, Enterobacter cloacae
  source 1..40: mol_type = genomic DNA
gtccaccaggttcttcgggcagcccagggagacaaagccg

SEQ ID NO: 36004 - DNA, 50 bp, Enterobacter cloacae
  source 1..50: mol_type = genomic DNA
aatgtattatttttgactttcgggaggcctaaagatataaatcctacttt

SEQ ID NO: 36005 - DNA, 40 bp, Enterobacter cloacae
  source 1..40: mol_type = genomic DNA
gtgccccagttccttctggaggcccaggggtacacagaag

SEQ ID NO: 36006 - protein, 550 aa, Flavonifractor plautii
MTANTNYPDNITALYARLSQEDALDGESNSIANQKKILLKYATDNHFSNPTFFIDDGVSGVTFDRPGWNEMIRLAEAGKVQTVIVKDMSRMGRDYLKVGYYTESFFAERDIRYIAINDGVDSDKGDNDFTPFRNLFNDFYARDTSKKIRAVMRAKGNAGEHLCTNPPYGYMKDPADKKKWIVDEEAAEIVKRIFDLCIAGKGPMQIAKLLTAERVLTVKAHYAQRAGKPLPEKPYHWDPKSVAGILERPEYTGCTVNFKTYSKSHKLKKRLHNVPENQRIFPNTQPAIIDEQVFVRVQELRENKRRPAKQAERQGLFSGLLYCADCGSKLHFATGKNMTPQQDCYRCSRYKSNTGDCTMHFIREETLKLFVLQRIFDVTALFFDDAMAFEEAAKKQHFQEAEKEAQKRKREIAQAEKRIAELDRIFKRIYEDDISGTISHERFLKLSADYEAEQRELTEQVKTWQEVVETFEQDRSDFDSFAAIVRKYVGIRELTPTIVNEFVKKIIVHAPDKFSGHRRQKIELVWNFIGEVNLPGDDQTVERQRKDRTA

SEQ ID NO: 36007 - DNA, 50 bp, Flavonifractor plautii
  source 1..50: mol_type = genomic DNA
ttacttccttatgggggcgcgcctttggatgaacgccgataaggaagtag

SEQ ID NO: 36008 - DNA, 40 bp, Flavonifractor plautii
  source 1..40: mol_type = genomic DNA
gagaaaagaggctgctccattatggagcagcctctttttc

SEQ ID NO: 36009 - DNA, 50 bp, Flavonifractor plautii
  source 1..50: mol_type = genomic DNA
ttacttccttatgggggcgcgcctagggatgaacgccgataaggaagtag

SEQ ID NO: 36010 - DNA, 40 bp, Flavonifractor plautii
  source 1..40: mol_type = genomic DNA
gagaaaccatgctgccctgagatggagccgcctctgctcc

SEQ ID NO: 36011 - protein, 552 aa, Microbacterium lacticum
MTTTAPTLTPMGVTADHGDDKPVLLAVSYLRVSTREQAERGGTEEGFSIPAQREANQRKADELGARVVREFIDAGESARSADRDGLQEMLAFIAATRVTFCIVHKLDRLARNRADDVAIHQALLTAGVTLVSATESIDQTPSGMLVHGIMSSIAEFYSRNLATEVTKGLTQKVAQGGTPMRAPIGYLNVRKTDDNGREVRTVEVDPERAPLITWAFEHYATGETSVTGLLRDLTARGLLTVPTPKRPLKPLGKNTLYKLLTNPYYAGVIRYKGALHPGAHEPIVGPELFDKVQSLLKARTAKMTRHVQHAHHLKGLLHCGTCGSRMLLDFATNPRGTTYAYFICSGRAAKKTSCTRRAVPVAVAERLVADSYASITISDSTYQRLAADVDAAFDKRNTGQDREVADLTANRARLEAESDKLLAAHFADAIDLDTLKRHQDRIRAGLADINRRLAEHSEHHTGGRAFLHDSLRLLTDAHRAYAHSGDADRRLANQAFYTRLDITDNEQLRPHLAEPFATIFRQAHDSGDEGKEAKREHTTSTDVACSRKTLWV

SEQ ID NO: 36012 - DNA, 50 bp, Microbacterium lacticum
  source 1..50: mol_type = genomic DNA
atgttcccgtaagacactatgggtggaagcaatggagcgctgcgggaaca

SEQ ID NO: 36013 - DNA, 40 bp, Microbacterium lacticum
  source 1..40: mol_type = genomic DNA
gatgctgaggatgaactgtggagcctaggagattcgaact

SEQ ID NO: 36014 - DNA, 50 bp, Microbacterium lacticum
  source 1..50: mol_type = genomic DNA
atgttcccgtaagacactatgggttgaagcaatggagcgctgcgggaaca

SEQ ID NO: 36015 - DNA, 40 bp, Microbacterium lacticum
  source 1..40: mol_type = genomic DNA
gaggctgaggtggaaggcttgagcccaggagtttgaaact

SEQ ID NO: 36016 - protein, 517 aa, Saccharopolyspora erythraea
MAHELADLYLRLSLDREGKTAIERQDADCTAWCERQGIRVRTRHIDRGRSGYKRRTKRAAFTEAIRAATSGEVSTLVVWKLDRLSRQGIGQVGLVLDQLELVGSRIVFVVDGLDSSVSGHRSVIAFLAERARDESETLSFRVKNAKDHLRPAGGWLGGPLPYGLRSGKNGLERDPTTAPVIRDIVSRYLGGLSMVKIARALNSEGVKPSRGEQWTAGTIAQILKSPTLAGLMPISTTRVDPETGETVYTGDIQPYRDPETGDVVEILDEDERLISPTERQLILKRIAERTTPTWKGVRPKRKPTALLTGLVYCECGARMSASGSSYVCGSKRSGGHCPGASAMVEVLDRYVVGQWFDRLSGATFDPDNPDPFLIAVAERWGRYTDPAGANERDELEARIADAEARLSDLEAARYERGEFSDPGGTDRYARLHEKVSGALVTLVKRRADLGPGALDIGGFLEPELVLEAWESQGDNDERRELLRLAFERVEVKKARGRGYRFKPDERVNLVPVGYDAD

SEQ ID NO: 36017 - DNA, 50 bp, Saccharopolyspora erythraea
  source 1..50: mol_type = genomic DNA
ggtcgttgtttggtactcgacttctggacgtccatgacagaagagtaaac

SEQ ID NO: 36018 - DNA, 40 bp, Saccharopolyspora erythraea
  source 1..40: mol_type = genomic DNA
ggttctcgtcctggacttctggacgttctgctgcatcaac

SEQ ID NO: 36019 - DNA, 50 bp, Saccharopolyspora erythraea
  source 1..50: mol_type = genomic DNA
ggtcgttgtttggtactcgacttcacgacgtccatgacagaagagtaaac

SEQ ID NO: 36020 - DNA, 40 bp, Saccharopolyspora erythraea
  source 1..40: mol_type = genomic DNA
ggctcccctcctggggttcacgccattctcctgcctcagc

SEQ ID NO: 36021 - protein, 463 aa, Staphylococcus aureus
MKVAIYTRVSSAEQANEGYSIHEQKRKLISFCEVNDWNRYEVFSDPGVSGGSMKRPSLQKLFDRLEEFDLVLVYKLDRLTRNVRDLLEMLEVFEKNNIAFKSATEVFDTNSAIGKLFITMVGAMAEWERETIRERSLMGSHAAIRSGKYIRARPFCYDLIDDKLKPNQHAKYIRFMVDKLMIGKSASEVVRQLESKKKPPGITKWNRKMILNWIKNPVMRGHTKFGDLLIENTHEPIISEDEYLKLIDIIEKRTYKTKSKHKAIFRGVLECPRCQSKLHLSRSIKKYDNGKTREVRRYSCDKCHRDNTVKNISFNESEIERQFINTLLKKGTDNFKISVPKKKSYDIEDNKVKINEQRANYTRSWSLGYIKDEEYFMLMDETENLLKDIEEKAKSHTDEKLNEEQIRTVKNLLIKGFKIATLEDKEDLITSSVDVIKFEFIPKEFNKNKTLNTVKINEIQFKF

SEQ ID NO: 36022 - DNA, 50 bp, Staphylococcus aureus
  source 1..50: mol_type = genomic DNA
gatgaatggtgtgttacgcggtagactgtagttgttacaaaacattcacg

SEQ ID NO: 36023 - DNA, 40 bp, Staphylococcus aureus
  source 1..40: mol_type = genomic DNA
catgaatggtaccacttctaccgcacacgttcccccaata

SEQ ID NO: 36024 - DNA, 50 bp, Staphylococcus aureus
  source 1..50: mol_type = genomic DNA
gatgaatggtgtgttacgcggtaggatgtagttgttacaaaacattcacg

SEQ ID NO: 36025 - DNA, 40 bp, Staphylococcus aureus
  source 1..40: mol_type = genomic DNA
cctgactgcaaccacgcctgaagtacactttccccccata

SEQ ID NO: 36026 - protein, 463 aa, Staphylococcus aureus
MKVAIYTRVSSAEQANEGYSIHEQKRKLISFCEVNDWNRYEVFSDPGVSGGSMKRPSLQKLFDRLEEFDLVLVYKLDRLTRNVRDLLEMLEVFEKNNIAFKSATELFDTTSAIGKLFITMVGAMAEWERETIRERSLIGARAAVRSGKYIKVQPFCYDLVDQKLKPNQYAEYIRFIVDKLLSGKSANEVVRLLESKKKPPGITKWNRKTVLGWMRNPILRGHTKHGDLLIKNTHEPIISEDEHSKMLDIIDKRTHKSKTKHNSIFRGVIECPQCQNKLYLFSSIQKRANGGSYEVRRYTCATCHKNKEVKDVSFNESEIEREFINTLLKKGTDNFMVNIPKPKDYDIENNKEKILEQRTNYTRAWSLGYIKDEEYFVLMDETDKLLKDIEEKESPRINIELNEQQIRTVKNLLIKGFKMATAENKEELITSTVDLIKIDFIPRRLNKESNINTVKINEIHFKY

SEQ ID NO: 36027 - DNA, 50 bp, Staphylococcus aureus
  source 1..50: mol_type = genomic DNA
aatgagtgttatgtaactagaaagaccgcaatagttacaaaacattcatt

SEQ ID NO: 36028 - DNA, 40 bp, Staphylococcus aureus; identical to SEQ ID NO: 36023
  source 1..40: mol_type = genomic DNA

SEQ ID NO: 36029 - DNA, 50 bp, Staphylococcus aureus
  source 1..50: mol_type = genomic DNA
aatgagtgttatgtaactagaaaggacgcaatagttacaaaacattcatt

SEQ ID NO: 36030 - DNA, 40 bp, Staphylococcus aureus; identical to SEQ ID NO: 36025
  source 1..40: mol_type = genomic DNA

SEQ ID NO: 36031 - protein, 463 aa, Staphylococcus aureus; identical to SEQ ID NO: 14001

SEQ ID NO: 36032 - DNA, 50 bp, Staphylococcus aureus; identical to SEQ ID NO: 36027
  source 1..50: mol_type = genomic DNA

SEQ ID NO: 36033 - DNA, 40 bp, Staphylococcus aureus; identical to SEQ ID NO: 36023
  source 1..40: mol_type = genomic DNA

SEQ ID NO: 36034 - DNA, 50 bp, Staphylococcus aureus; identical to SEQ ID NO: 36029
  source 1..50: mol_type = genomic DNA

SEQ ID NO: 36035 - DNA, 40 bp, Staphylococcus aureus; identical to SEQ ID NO: 36025
  source 1..40: mol_type = genomic DNA

SEQ ID NO: 36036 - protein, 463 aa, Staphylococcus aureus; identical to SEQ ID NO: 36021

SEQ ID NO: 36037 - DNA, 50 bp, Staphylococcus aureus; identical to SEQ ID NO: 36022
  source 1..50: mol_type = genomic DNA

SEQ ID NO: 36038 - DNA, 40 bp, Staphylococcus aureus
  source 1..40: mol_type = genomic DNA
catgaatggtaccacatctaccgcacacgttcccccaata

SEQ ID NO: 36039 - DNA, 50 bp, Staphylococcus aureus; identical to SEQ ID NO: 36024
  source 1..50: mol_type = genomic DNA

SEQ ID NO: 36040 - DNA, 40 bp, Staphylococcus aureus; identical to SEQ ID NO: 36025
  source 1..40: mol_type = genomic DNA

SEQ ID NO: 36041 - protein, 463 aa, Staphylococcus aureus
MKVAIYTRVSSAEQANEGYSIHEQKRKLISFCEVNDWNRYEVFSDPGVSGGSMKRPSLQKLFDRLEEFDLVLVYKLDRLTRNVRDLLEMLEVFEKNNIAFKSATEVFDTNSAIGKLFITMVGAMAEWERETIRERSLMGSHAAIRSGKYIRARPFCYDLIDDKLKPNQHAKYIRFMVDKLMIGKSASEVVRQLESKKKPPGITKWNRKMILNWIKNPVMRGHTKFGDLLIENTHEPIISEDEYLKLIDIIEKRTYKTKSKHKAIFRGVLECPRCQSKLHLSRSIKKYDNGKTREVRRYSCDKCHRDNTVKNISFNESEIERQFINTLLKKGTDNFKISVPKKKSYDIEDNKVKINEQRANYTRSWSLGYIKDEEYFMLMDETENLLKDIEEKAKSHTDEKLNEEQIRTVKNLLIKGFKIATLEDKEDLITSSVDVIKFEFIPKEFNKNKTLNTVKINEIQFKY

SEQ ID NO: 36042 - DNA, 50 bp, Staphylococcus aureus; identical to SEQ ID NO: 36022
  source 1..50: mol_type = genomic DNA

SEQ ID NO: 36043 - DNA, 40 bp, Staphylococcus aureus; identical to SEQ ID NO: 36023
  source 1..40: mol_type = genomic DNA

SEQ ID NO: 36044 - DNA, 50 bp, Staphylococcus aureus; identical to SEQ ID NO: 36024
  source 1..50: mol_type = genomic DNA

SEQ ID NO: 36045 - DNA, 40 bp, Staphylococcus aureus; identical to SEQ ID NO: 36025
  source 1..40: mol_type = genomic DNA

SEQ ID NO: 36046 - protein, 463 aa, Staphylococcus aureus; identical to SEQ ID NO: 14001

SEQ ID NO: 36047 - DNA, 50 bp, Staphylococcus aureus
  source 1..50: mol_type = genomic DNA
aatgagtgttatgtaactagaaagaccgtagtagttacaaaacattcacg

SEQ ID NO: 36048 - DNA, 40 bp, Staphylococcus aureus; identical to SEQ ID NO: 36023
  source 1..40: mol_type = genomic DNA

SEQ ID NO: 36049 - DNA, 50 bp, Staphylococcus aureus
  source 1..50: mol_type = genomic DNA
aatgagtgttatgtaactagaaaggacgtagtagttacaaaacattcacg

SEQ ID NO: 36050 - DNA, 40 bp, Staphylococcus aureus; identical to SEQ ID NO: 36025
  source 1..40: mol_type = genomic DNA

SEQ ID NO: 36051 - protein, 463 aa, Staphylococcus aureus
MKVAIYTRVSSAEQANEGYSIHEQKRKLISFCEVNDWNRYEVFSDPGVSGGSMKRPSLQKLFDRLEEFDLVLVYKLDRLTRNVRDLLEMLEVFEKNNIAFKSATEVFDTNSAIGKLFITMVGAMAEWERETIRERSLMGSHAAIRSGKYIRARPFCYDLIDDKLKPNQHAKYIRFMVDKLMIGKSASEVVRQLESKKKPPGITKWNRKMILNKSPNPVMRGHTKFGDLLIENTHEPIISEDEYLKLIDIIEKRTYKTKSKHKAIFRGVLECPRCQSKLHLSRSIKKYDNGKTREVRRYSCDKCHRDNTVKNISFNESEIERQFINTLLKKGTDNFKISVPKKKSYDIEDNKVKINEQRANYTRSWSLGYIKDEEYFMLMDETENLLKDIEEKAKSHTDEKLNEEQIRTVKNLLIKGFKIATLEDKEDLITSSVDVIKFEFIPKEFNKNKTLNTVKINEIQFKF

SEQ ID NO: 36052 - DNA, 50 bp, Staphylococcus aureus; identical to SEQ ID NO: 36022
  source 1..50: mol_type = genomic DNA

SEQ ID NO: 36053 - DNA, 40 bp, Staphylococcus aureus; identical to SEQ ID NO: 36023
  source 1..40: mol_type = genomic DNA

SEQ ID NO: 36054 - DNA, 50 bp, Staphylococcus aureus; identical to SEQ ID NO: 36024
  source 1..50: mol_type = genomic DNA

SEQ ID NO: 36055 - DNA, 40 bp, Staphylococcus aureus; identical to SEQ ID NO: 36025
  source 1..40: mol_type = genomic DNA

SEQ ID NO: 36056 - protein, 522 aa, Clostridioides difficile
MNTKSKVAIYCRLSEEDRNKQHETDDSNSIQNQKSMLIQYVLEQGWEVYNIYSDDDYTGSDRRRPEFNKLLNDAEHRKFDIILCKTQSRFTRELELVEKYIHGLFPIWGIRFISIVDNADTANKGNKKSRQINGLVNEWYLEDMSENIRSVLTDRRKNGFHIGAFALYGYKKDPEQKGHLIIDEEAAAVVREVFTLFSQGYGKTAIARMLNDRGIPNPTEYKRLHGLRYKQPTRKNSTLWKYFAISDMLTNEIYIGNMVQGKYGSVSYKTKQNKPRPKEEWYRVEGTHEPIIDRELWDRVQSMVAEKAKPFTVGTIGLFARKARCMNCGYTMRSNKQTDGRHYLQCSNRHVAKDACIGSFISVKKLEQAVISELNKLSQEYLDKDELEQNVEFHSNVKEKKTALETQLATYQKKIEEDAKVIRELYLDKVKGILSENDFLNLSKDFTNDRERLEKLVIETQKQLDVIERKIQTGDNRRQLIEQYTNLEHLDRETVETLIDYILVGKRIPGTRNVPIEIHWNF

SEQ ID NO: 36057 - DNA, 50 bp, Clostridioides difficile
  source 1..50: mol_type = genomic DNA
tgttgcacttatgcagttgcaccatctggggcgaccttgtaagtacaaca

SEQ ID NO: 36058 - DNA, 40 bp, Clostridioides difficile
  source 1..40: mol_type = genomic DNA
agttgcaagtgctttttgttcagctgccatatcctcatgt

SEQ ID NO: 36059 - DNA, 50 bp, Clostridioides difficile
  source 1..50: mol_type = genomic DNA
tgttgcacttatgcagttgcaccatttggggcgaccttgtaagtacaaca

SEQ ID NO: 36060 - DNA, 40 bp, Clostridioides difficile
  source 1..40: mol_type = genomic DNA
atttgcacatgttatttcttttgctgccatgtccttctgt

SEQ ID NO: 36061 - protein, 522 aa, Clostridioides difficile; identical to SEQ ID NO: 3426

SEQ ID NO: 36062 - DNA, 50 bp, Clostridioides difficile; identical to SEQ ID NO: 3427
  source 1..50: mol_type = genomic DNA

SEQ ID NO: 36063 - DNA, 40 bp, Clostridioides difficile; identical to SEQ ID NO: 36058
  source 1..40: mol_type = genomic DNA

SEQ ID NO: 36064 - DNA, 50 bp, Clostridioides difficile
  source 1..50: mol_type = genomic DNA
tgttgcacttatgtagttgcaccatttggggcgaccttgtaagtacaaca

SEQ ID NO: 36065 - DNA, 40 bp, Clostridioides difficile; identical to SEQ ID NO: 36060
  source 1..40: mol_type = genomic DNA

SEQ ID NO: 36066 - protein, 472 aa, Mycobacteroides chelonae
MRVLGRIRLSRLTEESTSVDRQRELIEKWSEMHDHVIVGWAEDVDVSGSIDPFEAPQLGPWFREENRDKWDILVAWKLDRIGRRAIPLNKVFGWMLEYEKTLVCVSDNIDLSTWVGRLVANVIAGVAEGELEAIRERTKASRKKLLESGRWTGGPVPYWLTPEKVPEGGWVLSLNTETAPILRRAIDEVLDGSAVHTAAERLNEHGVPSPGGKKWTSQTLWRILQHKYLKGHSTDRGKTVRDSSGVPISNCEALLSPSEWDRLQATLSEMKLPETSNRTKSTSPLLGVVVCFICERPLYYRSYTRNYGKGVYCSYYCSTHRTPGIDADMLEAFVEESLLAEVGHENVRERFYVPAENHQLELDEAVRAVEELTSLLGTITSATMRSSITAQLTALDSRITALEQLPSSEARWEYRELERTYEDDWKSNEDIQFRRQLLLKSGITVAATKLGGLQMELRIPENLRERLALKGE

SEQ ID NO: 36067 - DNA, 50 bp, Mycobacteroides chelonae
  source 1..50: mol_type = genomic DNA
gatctacaatatgtgggctatgacctatcatatacaaaccattgtagact

SEQ ID NO: 36068 - DNA, 40 bp, Mycobacteroides chelonae
  source 1..40: mol_type = genomic DNA
tggcgtcatcacctatgacctggcatgtgccgtgcagatg

SEQ ID NO: 36069 - DNA, 50 bp, Mycobacteroides chelonae
  source 1..50: mol_type = genomic DNA
gatctacaatatgtgggctatgaccaatcatatacaaaccattgtagact

SEQ ID NO: 36070 - DNA, 40 bp, Mycobacteroides chelonae
  source 1..40: mol_type = genomic DNA
tgacttcctgacctattcccatgcatgtgctgttcagatc

SEQ ID NO: 36071 - protein, 472 aa, Mycobacteroides chelonae
MRVLGRIRLSRLTEESTSVDRQRELIEKWSDMNDHTIVGWAEDVDVSGSVDPFEAPQLGHWFREENRDKWDILVAWKLDRIGRRAIPLNKVFGWMLEYEKTLVCVSDNIDLSTWVGRLVANVLAGVAEGEIEAIKERTRSSRKKLLESGRWTGGPVPYWLTPEKVPEGGWVLSLNTETAPILRRAIDEVLDGSAVHTAAERLNEHGVPSPGGKKWTSQTLWRILQHKYLKGHSTDRGKTVRDSSGVPISNCEALLTPAEWDRLQATLSEMKLPETSNRTKSTSPLLGVVVCFICERPLYYRSYTRNYGKGLYRSYYCSTHRTPGIDADMLEAFVEESLLAEVGHENVRERFYVPAENHQLELDEAVRAVEELTSLLGTITSATMRSSITAQLTALDSRITALEQLPSSEARWEYRELERTYEDDWKSNEDIQFRRQLLLKSGITVAATKLGGLQMELRIPENLRERLALKGE

SEQ ID NO: 36072 - DNA, 50 bp, Mycobacteroides chelonae
  source 1..50: mol_type = genomic DNA
catctataatacatggggtatgacctgtcgtacgcaaaccattgtagact

SEQ ID NO: 36073 - DNA, 40 bp, Mycobacteroides chelonae; identical to SEQ ID NO: 36068
  source 1..40: mol_type = genomic DNA

SEQ ID NO: 36074 - DNA, 50 bp, Mycobacteroides chelonae
  source 1..50: mol_type = genomic DNA
catctataatacatggggtatgaccagtcgtacgcaaaccattgtagact

SEQ ID NO: 36075 - DNA, 40 bp, Mycobacteroides chelonae; identical to SEQ ID NO: 36070
  source 1..40: mol_type = genomic DNA

SEQ ID NO: 36076 - protein, 559 aa, Pseudomonas simiae
MNTRAKAYSYIRFSSPEQAKGDSYRRQRTAAEDYCRKHDIELASSREYTFLDKGRSAYTGRHLDDEGQLRRFLDLVESGAIERGSYLLVESLDRLSREKVSTALPRFMDLLNSGIRVVTLSDERLYTEEFNELDLIISIVHMSRAHSESSIKAQRLSAVWDKKKNLARTELKPLGKACPAWLELVDGQYQPSPNRVETILMIFELAIAGYGQGVIPRILNERGVAVFGSRNRNHSGAWGTSSVSKILGNRALLGEYQPTHIVNGVRTNHGEPIAAFFPAVITEEIFYQAQTVRAERRVHKTGGQTKHFNVLQGLMKCDVCGDAMHLVNKGRPPKGTTYIQCHSARKGVCKNGYIRAERAEAVLREILAKVDSLSLVQSSDGEARKQLTTVTGKLEMVTLRHAQMTDDYFASPSTGVAQMIARLEGEQTALRAEQEHLKETLATNQVVSKEDFFDKLDLITFEGRHAANSLLKRLGVKASVMSEGPSQQWYRVNTETLALFLISHNSDQIKVGTFDSRILDLQEAQGEISAEEKRQLALAPALLNELAREVIKKLDLGKK

SEQ ID NO: 36077 - DNA, 50 bp, Pseudomonas simiae
  source 1..50: mol_type = genomic DNA
cgttttgcaaccttacacaacctgctgccattatgataggttacaaaaca

SEQ ID NO: 36078 - DNA, 40 bp, Pseudomonas simiae
  source 1..40: mol_type = genomic DNA
ggcgggggcgcataacctgctgttaagcggcccgcccggc

SEQ ID NO: 36079 - DNA, 50 bp, Pseudomonas simiae
  source 1..50: mol_type = genomic DNA
cgttttgcaaccttacacaacctgaggccattatgataggttacaaaaca

SEQ ID NO: 36080 - DNA, 40 bp, Pseudomonas simiae
  source 1..40: mol_type = genomic DNA
gaggcgggcggatcacctgaggtcaagagaccagcctggc

SEQ ID NO: 36081 - protein, 520 aa, Mycobacteroides abscessus
MRQQLRAIVGSRVSHLSDQVETTSKVSHLAQRAEGERWAKSRGYEVVGAFEDLGVSAGRTTPFERPDLGKWLAPERLHEWDVLVFSKIDRAFRSTSDCVDFARWAEGNRKIIAFSGDGLVLDYLNPKSDSLDQMMSELFIYIGSFFAQLELNRFKTRATDRISHLRMTDRVSHGVPPLGFRTVPHPSGQGKALERDPEGYALLHEMKDKLLYENYSITALVKWLHDPRCLANKEIDPSTKRSRPTHVTNCSCRQTNAASARGGDKWWSATTVRRVLTSERTQGIRMSGGNPVLDSQGMPVRLAKPTFTDDEWIQIQQVLNRRSESGKARQMTPNPLAGIGYCVCGYALCLHRRKSSAGTLHTYVRCGQGCRGAWKLADVDELLDGAFLASYGDEEMTRSVFVPGEDRSEELAGIERSITRLRWESDNDLVDDEQLYQTRMGSLLTRKRDIGQIVVPARWERRGTGKTYRELWADPETDRRQVMRDARIRLVLHFVPKGSDAPFVRRAEFQDLWHSEQGSS

SEQ ID NO: 36082 - DNA, 50 bp, Mycobacteroides abscessus
  source 1..50: mol_type = genomic DNA
gttgtgtgtgcagccttcacgttgtactgtgccatacatgagacaacagc

SEQ ID NO: 36083 - DNA, 40 bp, Mycobacteroides abscessus
  source 1..40: mol_type = genomic DNA
gccggtggccttcacgttgtactgcgccacctcgatgttg

SEQ ID NO: 36084 - DNA, 50 bp, Mycobacteroides abscessus
  source 1..50: mol_type = genomic DNA
gttgtgtgtgcagccttcacgttgtcctgtgccatacatgagacaacagc

SEQ ID NO: 36085 - DNA, 40 bp, Mycobacteroides abscessus
  source 1..40: mol_type = genomic DNA
gcagatgaccttcctctggtccagcaccacctggatgttg

SEQ ID NO: 36086 - protein, 520 aa, Mycobacteroides abscessus
MRQQLRAIVGSRVSHLSDQVETTSKVSHLAQRAEGERWAKSRGYEVVGAFEDLGVSAGRTTPFERPDLGKWLAPERLHEWDVLVFSKIDRAFRSTSDCVDFARWAEGNRKIIAFSGDGLVLDYLNPKSDSLDQMMSELFIYIGSFFAQLELNRFKTRATDRISHLRMTDRVSHGVPPLGFRTVPHPSGQGKALERDPEGYALLHEMKDKLLYENYSITALVKWLHDPRCLANKEIDPSTKRSRPTHVTNCSCRQTNAASARGGDKWWSATTVRRVLTSERTQGIRMSGGNPVLDSQGMPVRLAKPTFTDDEWIQIQQVLNRRSESGKARQMTPNPLAGIGYCVCGYALCLHRRKSSAGTLHTYVRCGQGCRGAWKLADVDELLDGAFLASYGDEEMTRSVFVPGEDRSDELAGIERSITRLRWESDNDLVDDEQLYQTRMGSLLTRKRDIGQIVVPARWERRGTGKTYRELWADPETDRRQVMRDARIRLVLHFVPKGSDAPFVRRAEFQDLWHSEQGSS

SEQ ID NO: 36087 - DNA, 50 bp, Mycobacteroides abscessus; identical to SEQ ID NO: 36082
  source 1..50: mol_type = genomic DNA

SEQ ID NO: 36088 - DNA, 40 bp, Mycobacteroides abscessus; identical to SEQ ID NO: 36083
  source 1..40: mol_type = genomic DNA

SEQ ID NO: 36089 - DNA, 50 bp, Mycobacteroides abscessus; identical to SEQ ID NO: 36084
  source 1..50: mol_type = genomic DNA

SEQ ID NO: 36090 - DNA, 40 bp, Mycobacteroides abscessus; identical to SEQ ID NO: 36085
  source 1..40: mol_type = genomic DNA

SEQ ID NO: 36091 - protein, 558 aa, Anaerotruncus colihominis
MLQAGKITALYCRLSQEDMQAGESESIQNQKLILQRYADEHFFLNTRFFIDDGFSGVSFEREGLQAMLREVEAGNVATVITKDLSRLGRNYLKTGELIEIVFPEYDVRYIAINDGVDTAREDNEFTPLRNWFNEFYARDTSKKIRAVKQAKAQRGERVNGEVPYGYLADPDDRNHLIPDPETAHIVKQIFAMYVRGDRMCEIQNWLRDNEILTVGELRYRRTGSTRHPRPQLNAWYNWPDKTLYDILTRQEYLGHTITAKTCKVSYKSKKTRKNPEDKRYFFPNTHEPLVDEETFALAQKRIATRHRPTKSEEIDLFSGLLFCGDCGYKMYLQKGAGTLERKHAYTCGNYRNRARNDFLCTTHYIRKSVLKELVLADLQRVLVYVKEHEQEFVRTAAECGEQAAKKALAQKRKELGKAERRMDELNLLFRKLYEDMALGRLSSEQFALLTSGYEDEKAAMAKRTAELRKEIDSAAERGADVKRFVALVCRYSEISELTYESVHEFIDRILVHELDRETNTRKIEIFYSFVGKVDSGDEPTESTSYFRQIGADVKSFAV

SEQ ID NO: 36092 - DNA, 50 bp, Anaerotruncus colihominis
  source 1..50: mol_type = genomic DNA
tggttacgctatcttaccccagcaaaaggcggcgttagataacgatactt

SEQ ID NO: 36093 - DNA, 40 bp, Anaerotruncus colihominis
  source 1..40: mol_type = genomic DNA
tttccacgccggtctgtcgaagttgccgcccgaccatccg

SEQ ID NO: 36094 - DNA, 50 bp, Anaerotruncus colihominis
  source 1..50: mol_type = genomic DNA
tggttacgctatcttaccccagcagaaggcggcgttagataacgatactt

SEQ ID NO: 36095 - DNA, 40 bp, Anaerotruncus colihominis
  source 1..40: mol_type = genomic DNA
tttccactccagtctgtgggactggcagcccagccctcag

SEQ ID NO: 36096 - protein, 570 aa, Sinorhizobium fredii
MCSYDPAYFNDRMLLGLKGTMSEAELHILKSRLQGGILNKARRGELEMPLPIGLVYTPDARVVLDPDRQIQDTVRLLFDTFRETGSACAVVRRLRGEKILFPRRIRRGIGKGDVLWSEIDHSRVLQIVHNPRYAGAFAYGRTRTAYNAKLKPVQLRVPRSDWQVLIPNAHEGYISWAEYERNQTTLEQNAAGFSPGLRGRMPRQGSGLLQGRLLCGRCGARMRVHYEPFEGRLRPYYVCNEAVVRQAGKHCQWVRGAPVDEAVSALLLEAMAPAAIDVALAVQQEITQRVEQAAALRGTQLQRTRYEAELARRRYLKVDPDNRLVADALEADWNARLRDLDALQREHERQNEADRSLLDEPAQERIRALTADFPRIWNDERTGAVERKRMLGLLIEDVTLLVDEQVNIHIRWRGGRTQSLSVTRPRPMSVIRKTPAQVVALINELLETANDRQIAARLNELGHRNWRGEPFTLKKVMLVRRTYGLKSRYERLRESGMLTGEEVAQQLGVCVSTVHQLGRKGILKRHRYATNHRYLYEPPGNVRLEKGAGSRYGGRPPRLIVAQPLQQGAS

SEQ ID NO: 36097 - DNA, 50 bp, Sinorhizobium fredii
  source 1..50: mol_type = genomic DNA
aaggtgcatcgtgatgcctgctccttctttcaagtccaggactgcagttc

SEQ ID NO: 36098 - DNA, 40 bp, Sinorhizobium fredii
  source 1..40: mol_type = genomic DNA
ggcgcgctcgacgcgccccttggcctgcggggtattggcg

SEQ ID NO: 36099 - DNA, 50 bp, Sinorhizobium fredii
  source 1..50: mol_type = genomic DNA
aaggtgcatcgtgatgcctgctccggctttcaagtccaggactgcagttc

SEQ ID NO: 36100 - DNA, 40 bp, Sinorhizobium fredii
  source 1..40: mol_type = genomic DNA
ggcgccctcgccccggcctgggccctgccggcgatgggcg

SEQ ID NO: 36101 - protein, 598 aa, Blautia faecis
MNTAVNEYNYRFKLTDYSLFDRNRARKVAIYGRVSTEHEAQLSALENQLQWYDDQVKYHPNWTVCERYIDEGITGTQAKKRPAFLKMIEDAKQGKFDLIVTREVCRFARNVVDTLVVTRELKGIGVEVFFIDDNIWTMDGDGELRLSLMATLAQEESRKTSERVKAGQKISRDNGVLYGNGNILGYDRVGDTYVINEEQAETVRMIYDLYLQGYGSMKIAKILTERKRKTASGLIKWSVSNIMRAIKNATYTGTKCYNKSRSNNFLEQKRINNLDMSTYEYVEGDFPSIISQEIWNKAQAIRESRVKPVCVSAGKNTHSKRDSRDIWVNKLRCSCGSSYRKNKWHTKLDGKTSYGYQCYNQLNNGIKRKRAEIGLDTEGYCDSRMITDWKLDFMAKALLEHLWTERKESVLIALDLIKYYYKEEKSNETQSDTVTIQAKLDKANSRLTNLIAMRADGEISKDEYQAMRSPVDEEIKKLQKALDEIPQEKSNPKGLDIEGIRSTLNSFIDFSGSTISHDVVNQFVYLITPTSDTTFDWYVNLNGTADVKATFTAEGRKKNCIIKLEEIEKISSVHREKNEDNAHFIKNPHIFTYLHRQL

SEQ ID NO: 36102 - DNA, 50 bp, Blautia faecis
  source 1..50: mol_type = genomic DNA
cccccatatttttacctatctgcacaggctgctattgcaaataggtagga

SEQ ID NO: 36103 - DNA, 40 bp, Blautia faecis
  source 1..40: mol_type = genomic DNA
tgctcgtctggcagcagctcaggcagctatcgctcagaaa

SEQ ID NO: 36104 - DNA, 50 bp, Blautia faecis
  source 1..50: mol_type = genomic DNA
cccccatatttttacctatctgcactggctgctattgcaaataggtagga

SEQ ID NO: 36105 - DNA, 40 bp, Blautia faecis
  source 1..40: mol_type = genomic DNA
gacttgtctggcagcagctctgggaaggctcgctcacaca

SEQ ID NO: 36106 - protein, 621 aa, Vibrio genomosp F6
MKIHKTLAPQVYSYSRFSDMEQKKGSSLARQEDYAKKAAEQHGLELNDELVFTDLGKSAFHAIHKKAGAYGAFLKAIEKGLVAKGSYLIVENFDRLSREEAYKAQSDITRLIEADINIITAADGQLYNKQTLAQNPGLLFLMTGTMIRAHEESLTKQKRSVAAIEKKLGKFFDGELVDVGGPTPFWIQRSKGDRESLFSFSEDHNRVEGARIITHSFINGKSYGQIQDLLLEKEILSPKGDVKWGTTTISKVLENEALYGRKTVRLPALKDGTKDAQEHTLDGYFPALISKDDFDLIQQIKRVKKKGRTGYRFNSAKEEGVTSVVYLLSGYGKDKNGDARSVCSRCGGALGSRLQEQFTRKKEYVRTVMRLDCLSRTRKKSCDAKGIAQRELEKSFLQAVSEHVDYNLLNKDDSDARAVEIIDSRLEDLEGVIQRAAELFLLTDDTTAHEIARQKLNDAKAEKAELLKQKDDGKEFVISAEAIKEFEGYIQRAYEDENDFEARSYVKDILLQCVEKLVIDTEPRSVESLGYKNLYRGAKVWTVTVDFRSGKRITIYHDVDTNMSLFNQVEGAGNSFHTFTPEALKIWDQQGDEAFVKHLSETGYGLNSSYVQDFISSLDDK

SEQ ID NO: 36107 - DNA, 50 bp, Vibrio genomosp F6
  source 1..50: mol_type = genomic DNA
ttgtgagttacattacgcttcttaccatccgtttggttggtaatgtaact

SEQ ID NO: 36108 - DNA, 40 bp, Vibrio genomosp F6
  source 1..40: mol_type = genomic DNA
tgggaaatacccaaaactgccgtctgtccagtggatatct

SEQ ID NO: 36109 - DNA, 50 bp, Vibrio genomosp F6
  source 1..50: mol_type = genomic DNA
ttgtgagttacattacgcttcttagaatccgtttggttggtaatgtaact

SEQ ID NO: 36110 - DNA, 40 bp, Vibrio genomosp F6
  source 1..40: mol_type = genomic DNA
tggaaaaatcctaacaatggagtctgtgcagaggctattt

SEQ ID NO: 36111 - protein, 554 aa, Pseudomonas sp MYb193
MPKAYAYIRYSRAIQQTGDSEHRQLTALDLFESYTGTPIAEVVYDKGKSAFRGDNARSGNFKEMLDRMGSGAIRAGDYLVVESIDRITRQRVLDGVELLQGILKKGINIYTTVDQKTYSYNDPSRDFENLLMISLIAKRANEESETKSGRLLSAWKARKAKAENGEVIIKKGKSIPYGLRVEHGKFVIHKEEQEEIQKLFELLLKFGLNTAITKTNETSLKKWNNGTVNKILKNKTVIGCMATHRIEYTADGKARKILTGFIENYYPNLIEPGLFYKVVDTMSNRKQKNWSGRRTEQDFNIFKHCIYCEQCGGKMYYDHRGSRYKGKIYPFFKCDNSRVQKHICNADNVRFEYVFGSLLECVYLINRVATGITKDFKGISTQARYLNPRINNLLKIDDSQQNIELEEKRKKLVASRTKLDGMNLRMIEADYNVPTEYMRQMSSLEIEIESLKRSIALLDDAGSDGITIEDTQTIIDLFQTDDGRAKLNSFFKSNDIVFYASHIKSTRSTVFRMHRKNSNVDERISGTTKVFPLKNILQEFGLGDLQTMFDLTID

SEQ ID NO: 36112 - DNA, 50 bp, Pseudomonas sp MYb193
  source 1..50: mol_type = genomic DNA
ctcggtaaatatgtatgcccaatcatgatctggtgttataatttaccgag

SEQ ID NO: 36113 - DNA, 40 bp, Pseudomonas sp MYb193
  source 1..40: mol_type = genomic DNA
gcctaacgacagcccgctgataatccggttgcgccttggg

SEQ ID NO: 36114 - DNA, 50 bp, Pseudomonas sp MYb193
  source 1..50: mol_type = genomic DNA
ctcggtaaatatgtatgcccaatcctgatctggtgttataatttaccgag

SEQ ID NO: 36115 - DNA, 40 bp, Pseudomonas sp MYb193
  source 1..40: mol_type = genomic DNA
gctcaacgagagctctctgctaaccccgataagccttggg

SEQ ID NO: 36116 - protein, 482 aa, Streptococcus pyogenes
MITTNKVAIYVRVSTTNQAEEGYSIEEQKDKLSSYCNIKDWSVYKIYTDGGFSGSNTKRPALEQLIKDAKKKLFDTVLVYKLDRLSRSQKDTLYLIEDVFLENKIDFVSLLENFDTSTPFGKAVVGILSVFAQLEREQIKERMQLGKLGRAKSGKSMMWARTSYGYDYHRETGTMTINPVQSLAIKFIFEQYLSGRSITKLRDDLNDKYPKDIDWNYRAVRMILANPVYCGYNQYKGQVYPGNHEPIITEEIYNKTQEELKIRQIAAAEFSNNSRPFRAKYMLSGIAQCGYCGAPLTITLGTRRKDGSRNIRYQCKNRFPRTTRGVTTYNDNKKCDSRFYEKADVEENVLNQISKLQNDTSYLDELFSSTEDNGIDRDSYQKQIEELTAKLSRLNDLYIDDRITLEELQRRSAEFTLMRGMLEAELENDQALKQQERKDDMRQILTRGDVLDMDYEGQKVVVRALINKVQVTSEEIVIKWKI

SEQ ID NO: 36117 - DNA, 50 bp, Streptococcus pyogenes; identical to SEQ ID NO: 2447
  source 1..50: mol_type = genomic DNA

SEQ ID NO: 36118 - DNA, 40 bp, Streptococcus pyogenes; identical to SEQ ID NO: 5248
  source 1..40: mol_type = genomic DNA

SEQ ID NO: 36119 - DNA, 50 bp, Streptococcus pyogenes
  source 1..50: mol_type = genomic DNA
ctaagaattttactatcctacatcaaaatgaaagatactaaaattcctag

SEQ ID NO: 36120 - DNA, 40 bp, Streptococcus pyogenes
  source 1..40: mol_type = genomic DNA
atccaacacattttgaattaaaatgttcaagagattctgt

SEQ ID NO: 36121 - protein, 482 aa, Streptococcus pyogenes
MITTNKVAIYVRVSTTNQAEEGYSIEEQKDKLSSYCNIKDWSVYKIYTDGGFSGSNTKRPALEQLIKDAKKKLFDTVLVYKLDRLSRSQKDTLYLIEDVFLENKIDFVSLLENFDTSTPFGKAVVGILSVFAQLEREQIKERMQLGKLGRAKSGKSMMWARTSYGYDYHRETGTMTINPVQSLAIKFIFEQYLSGRSITKLRDDLNDKYPKEIDWNYRAVRMILANPVYCGYNQYKGQVYPGNHEPIITEEIYNKTQEELKIRQIAAAEFSNNPRPFRAKYMLSGIAQCGYCGAPLTITLGTRRKDGSRNIRYQCKNRFPRTTRGVTTYNDNKKCDSHFYEKADIEENVLNQISKLQNDTSYLDELFSSTEDNGIDRDSYQKQIEELTAKLSRLNDLYIDDRITLEELQRRSAEFTLMRGMLEAELENDQALKQQERKDDMRQVLNRGDVLSMDYEGQTVVVRALINKVQVTSEEIVIKWKI

SEQ ID NO: 36122 - DNA, 50 bp, Streptococcus pyogenes; identical to SEQ ID NO: 2447
  source 1..50: mol_type = genomic DNA

SEQ ID NO: 36123 - DNA, 40 bp, Streptococcus pyogenes; identical to SEQ ID NO: 5248
  source 1..40: mol_type = genomic DNA

SEQ ID NO: 36124 - DNA, 50 bp, Streptococcus pyogenes; identical to SEQ ID NO: 36119
  source 1..50: mol_type = genomic DNA

SEQ ID NO: 36125 - DNA, 40 bp, Streptococcus pyogenes; identical to SEQ ID NO: 36120
  source 1..40: mol_type = genomic DNA

SEQ ID NO: 36126 - protein, 482 aa, Streptococcus pyogenes; identical to SEQ ID NO: 2446

SEQ ID NO: 36127 - DNA, 50 bp, Streptococcus pyogenes; identical to SEQ ID NO: 2447
  source 1..50: mol_type = genomic DNA

SEQ ID NO: 36128 - DNA, 40 bp, Streptococcus pyogenes; identical to SEQ ID NO: 5248
  source 1..40: mol_type = genomic DNA

SEQ ID NO: 36129 - DNA, 50 bp, Streptococcus pyogenes; identical to SEQ ID NO: 36119
  source 1..50: mol_type = genomic DNA

SEQ ID NO: 36130 - DNA, 40 bp, Streptococcus pyogenes; identical to SEQ ID NO: 36120
  source 1..40: mol_type = genomic DNA

SEQ ID NO: 36131 - protein, 539 aa, Streptomyces dengpaensis
MISPELQVEHATKLAQGEDIEIVMDPIIDIGKSGRAFDDRSIADIIDMARRREFDVLILWIWSRFGRNLRESLQHLDTLTNYGIEVRAAREDFDGRTTIGKFAIAQMLNIAELESNQKSDSWKDTIERRRRAGLAHGSRGRFGYFRCDACPPPERGKQLLTCPRCKDGILKIDPVTGPILASLYRRYAAGESVRGMVLWLKEQGVKHYTGTDIDAGALYQILDSGFGLGFVRYQIPELLHRTVETPDGGTKLERTSLHRDLTTYLYYRGAHDAVIDDTMECERLWDAYVERRLSSSDDKGHSFRAKYSVSGLLSCAGCRRSMHSMLRAKKVQRPWVNSVPDPRDVLYRCTRHMKFKDCPGNGVYATLAGAEEAVVQWLRDLVEQEPTLEMSVGQQAVEVVSNPESPAVEQAVRRLREIEGVLTEITTREDKLTDAVLDGLVSADAARRKRAELETQRAGLRAEEETLKHRLQDQPTVLPRPDRSMFVKILDLWKAAAHDDRRSLLKPVIRTVEVSRGRNHSDKYTVYPMWEAPPGPIAL

SEQ ID NO: 36132 - DNA, 50 bp, Streptomyces dengpaensis
  source 1..50: mol_type = genomic DNA
cagtgatgcaaacaggttgcgacgttcgtggctccgagttaacatcactg

SEQ ID NO: 36133 - DNA, 40 bp, Streptomyces dengpaensis
  source 1..40: mol_type = genomic DNA
ggcgatgttcggggcgtcgttcgtggcacccgtgctcatg

SEQ ID NO: 36134 - DNA, 50 bp, Streptomyces dengpaensis
  source 1..50: mol_type = genomic DNA
cagtgatgcaaacaggttgcgacgggcgtggctccgagttaacatcactg

SEQ ID NO: 36135 - DNA, 40 bp, Streptomyces dengpaensis
  source 1..40: mol_type = genomic DNA
ggccaggttgcgggaggcaggcctggcaccagtgcccatg

SEQ ID NO: 36136 - protein, 569 aa, Flavonifractor plautii
MKQSKSRIARENTAILYERLSRDDNLEGDSYSIQNQKKLLTKIAKEKGYTHLIHFYDDGISGVTMERPGFQAMLAEIEQGKASAVFVKDLSRLGRNYIEVGKLMEEFFPEHDIRFVSVSDNIDTDEGENELAPIKNLFNEWYSRDISKKRRISNKIKGNAGEPMGQPPYGYRKDPHNPKRWIIDEDAAVVVRRIYRMSLDGYGVEQIADALSKDGILTPRFYWQQKGIHRPGKAPKYGPCHWNGSTITRILTLQEYCGDVLNFKTYSKSYKNKRRLENDRENWAIFLDVHEPIIQRAAWEKVQEKRGKIRKRRTHEGEKNMFSGLLVCADCGNNLHFHFNQGNPEITYFNCSNYKGNRGTCTSTHYIRADFLEQVVLAEIRRLTKFVSQYEKEFAKLMMGFSQKAAADEVRTMHRELDAAIYRDKELDSLFERLYEDNVAGKITDERFARMSSKYEAEQKELRDKIKALQDAVERTKSKAVTADMFISAVRKYTRARKLTPRMLNELIEKIEVHQAEKVDGVWQQKLTIHYHCVGVVSIPQALPLPMPDITMNTRKGVYVSYVPAEKAG

SEQ ID NO: 36137 - DNA, 50 bp, Flavonifractor plautii
  source 1..50: mol_type = genomic DNA
caaatactgtatcaccattcgcattggtgcgagtggccttataggattta

SEQ ID NO: 36138 - DNA, 40 bp, Flavonifractor plautii
  source 1..40: mol_type = genomic DNA
tttcggatgtcctttcatctggtgcgcgaggcgggacttg

SEQ ID NO: 36139 - DNA, 50 bp, Flavonifractor plautii
  source 1..50: mol_type = genomic DNA
caaatactgtatcaccattcgcatatgtgcgagtggccttataggattta

SEQ ID NO: 36140 - DNA, 40 bp, Flavonifractor plautii
  source 1..40: mol_type = genomic DNA
gttgagatggggtttcatcatgttggcgaggctggtcttg

SEQ ID NO: 36141 - protein, 481 aa, Streptomyces sp CMB-StM0423
MRRRAAIYCRISQDRGGAGLGVARQEEDCRALCARAGWDVVSVHTDNDISAYSGAPRPAWQELLAEVRRGEIDAIAVWHVDRMTRNPRELEDVIDLADRHGIELATVSGEIDLATPTGRMVARMLGAAARHEAEHKAERQQRQRRQAAEAGRISGGGGRPFGYEDDRITIRESEAELLREGVRRVLASESLASICRDWHARGVVSPAGKPWKPSGLRRLLAAARISGRREHMPRHSWEHTRPLLGEIVADAVWPGIISHEDSDRVRKILTDPARKRDVEGSTRRSYLLSGILRCGKPKPDGHPCGWGMIGRPRSGVPRYVCPNTPGTDSCAGTAVNAERADNHVRDMVLAALESPAFIERLRDHDEPGSDLYEEVRTDEQELEELARDMGERRISRKEWMIARQPIEERLERNRARLAKVSRTGILNGFVGTFEDMQERWKKLNQSQRRAIITACVRSIEVRPANPRKRWDPDRFVFDWFA

SEQ ID NO: 36142 - DNA, 50 bp, Streptomyces sp CMB-StM0423
  source 1..50: mol_type = genomic DNA
tggtcacttagcttgacgcccgtgcctacgagggtgtaccaaagtatccc

SEQ ID NO: 36143 - DNA, 40 bp, Streptomyces sp CMB-StM0423
  source 1..40: mol_type = genomic DNA
cgggcacgccaccccggtcccgccggtgccgcagtagccg

SEQ ID NO: 36144 - DNA, 50 bp, Streptomyces sp CMB-StM0423; identical to SEQ ID NO: 36142
  source 1..50: mol_type = genomic DNA

SEQ ID NO: 36145 - DNA, 40 bp, Streptomyces sp CMB-StM0423
  source 1..40: mol_type = genomic DNA
ctggcccgcccccccgcttccgccgccgccgccgccgccg

SEQ ID NO: 36146 - protein, 549 aa, Clostridium leptum
MTAKNYPDNITALYARLSQEDALDGESNSIANQKKILLKYAMDNGFPNPTFFIDDGVSGVTFDRPGWNEMIGLSEAGKVKKVIVKDMSRMGRDYLKVGYYTESFFAERDIRYIAINDGVDSDKGDNDFTPFRNLFNDFYARDTSKKIRAVMRSKGNAGEHLCTNPPYGYRKDPADKKKWIVDEEAAEVVKRIFDLCIAGKGPMQIAKMLTADKVLTVKAHYAKQNGRTMPDNPYRWSVESIRGILERPEYTGCTVNFKTHSKSHKLKKRLQNAPENQRIFLNTQPAIIEEQVFERVQELRANKRRPAKQAERQGLFSGLLYCADCGSKLHFATGKNMTPEQDCYRCSKYKSNTGDCTMHYIREETLKLFVLQRIFDVTAMFFDDIQSFQNMVYQQRFEEAEKAVKRQKKELEQARKRIAELDRIFKRIYEDDINGTISHERFLKLSAEYEAEQKELTEFVKVGQAAVDTYEQDRTDFDSFAAVIRKYVGIRELTPAIVNEFVKKIIVHAPDKSSGHRRQKIEIVWNFIGELEQDENKQTIERQRKGRTA

SEQ ID NO: 36147 - DNA, 50 bp, Clostridium leptum
  source 1..50: mol_type = genomic DNA
ttacttccttatgggcgtgtgcctttagataaacgccgataaggaagttc

SEQ ID NO: 36148 - DNA, 40 bp, Clostridium leptum
  source 1..40: mol_type = genomic DNA
aaaagaagaactgcgaggtttccccttacagctcttcttt

SEQ ID NO: 36149 - DNA, 50 bp, Clostridium leptum
  source 1..50: mol_type = genomic DNA
ttacttccttatgggcgtgtgcctaaagataaacgccgataaggaagttc

SEQ ID NO: 36150 - DNA, 40 bp, Clostridium leptum
  source 1..40: mol_type = genomic DNA
aaaaaaaaaaaatcaaggtaaccccttatagcttctctat

SEQ ID NO: 36151 - protein, 545 aa, Pseudomonas sihuiensis
MSSLITGECKISARVYSYLRFSDPRQATGSSADRQLQYAQRWAGERGLVLDESLSLRDEGLSAYHQNHVKQGALGAFLRAVDEGRIPDGSVLIVEGLDRLSRAEPLQAQAQLGQIINAGITVVTASDGREYNRAGLKAQPMDLVYSLLVMIRAHEESDTKSKRVKASIRRLCEGWVAGTYRGLIRNGQDPQWLRWDGQAWHLIPERVEAVRYAIELYKQGEGATRAARKLAERGYVLSDWGIAGQQIYRLVKLPALRGAKRISVDGEDYLLEGYYPPVLTDEEYEALQAATETRHGRRGAPEIVGLVTGLGIAYCGYCGTAVVAQNLLSRAREDGTVADGHRRLHCTSYSKSTGCKAASCSVVPVEKALLSYCSDQINLARLLEPVDDGQQLRQRLQACRRKQADVERQLQRITEALLADDQGAAPLAFVRKARELEAELGQLQAEAEHLEREQGKVGQTQTPAGAELWRKLAIEAQDIKSPAREQLRQLVLDTFSRITVYMRGLVPDPKSKVIHLVLVSRAGQRVALDVDRRSGAWKAGRDRRG

SEQ ID NO: 36152 - DNA, 50 bp, Pseudomonas sihuiensis
  source 1..50: mol_type = genomic DNA
agtttagataatgtgcgctatgggcaccccaaggaaataaaccctacact

SEQ ID NO: 36153 - DNA, 40 bp, Pseudomonas sihuiensis
  source 1..40: mol_type = genomic DNA
gtcaaccgtcgcttttggacagccaagggagacaaaccct

SEQ ID NO: 36154 - DNA, 50 bp, Pseudomonas sihuiensis
  source 1..50: mol_type = genomic DNA
agtttagataatgtgcgctatggggaccccaaggaaataaaccctacact

SEQ ID NO: 36155 - DNA, 40 bp, Pseudomonas sihuiensis
  source 1..40: mol_type = genomic DNA
gtccaccttagcgtttggagaaccaaagcagacaaacgtg

SEQ ID NO: 36156 - protein, 480 aa, Paenibacillus odorifer
MKKIALYIRVSTDEQALKGNSLNEQEERLRAYCHAMELEGEIETFIDDGYSAGSMKRPALTRMLKMAREKKLSMVVITKIDRLCRNLKDLLLLVDELDEIQCGFASAGERFDTSTAAGRMVLQILGAFAEFERGRNRERVRENMLSIVTNTDKAVSRPCFGYNVVDSKYVINQEEAEVVRKMVEWMLQGEGAHRVMRRLNDMGVKTKDGKSFTQLSVGKLMRRETIAGMFVYNRGYSLRGKSLIRPEEEWIVIEEHHEPIIDRETFKRLQIAITARKTSGKQADNERWLLTGLVHCTHCGRPMFGRYRKKPSGKEYFHYVCSSYMKRAECFHHFIDRDLLENTVFDYLMDAKNYSGRTEEITTKDSQNEVDAAQLKAGLKKLDIKMQRQIELFEDADISKEDFRIARDRIHKERMAIEERLHEAETGTRVALENEFIKRLGSMNNELHSKNRGEQKNALRQLIKVVEVTNASIINVDVRL

SEQ ID NO: 36157 - DNA, 50 bp, Paenibacillus odorifer
  source 1..50: mol_type = genomic DNA
ggtatctctaaaattacttttggctggggtaaggtatacttagaaatacc

SEQ ID NO: 36158 - DNA, 40 bp, Paenibacillus odorifer
  source 1..40: mol_type = genomic DNA
tggcattccgccttttctttgaccaaggaaggtagagccc

SEQ ID NO: 36159 - DNA, 50 bp, Paenibacillus odorifer; identical to SEQ ID NO: 36157
  source 1..50: mol_type = genomic DNA

SEQ ID NO: 36160 - DNA, 40 bp, Paenibacillus odorifer
  source 1..40: mol_type = genomic DNA
tggaattctcacttgtatttgaccaagtgaggtagagctg

SEQ ID NO: 36161 - protein, 463 aa, Staphylococcus aureus
MKVAIYTRVSSAEQANEGYSIHEQKRKLISFCEVNDWNRYEVFSDPGVSGGSMERPSLQKLFDRLEEFDLVLVYKLDRLTRNVRDLLEMLEVFEKNNIAFKSATEVFDTTSAIGKLFITIVGAMAEWERETIRERSLMGSHAAVRSGKYIRAQPFCYDLIDDKLKPNQHAKYIRFMVDKLMIGKSASEVVRQLESKKKPPGITKWNRKTVLNWIKNPVMRGHTKFGDLLIENTHEPIISEDEYLKLIDIIEKRTYKTKSKHKAIFRGVLECPQCQSKLHLSRSIKKYDSGKTLEVRRYSCDKCHRDNSVKNISFNESEIEREFINTLLKKGTDNFKISVPKKKSYDIEDNKVKINEQRANYTRSWSLGYIKDEEYFMLMDETENLLKDIEEKAKSHTDEKLNEEQIRTVKNLLIKGFKIATLEDKEDLITSSVDVIKFEFIPKKFNKNKPLNTVKINEIQFRF

SEQ ID NO: 36162 - DNA, 50 bp, Staphylococcus aureus
  source 1..50: mol_type = genomic DNA
gatgaatggtgtgttacgaggtaggtcgtagtagttacaaaacattcacg

SEQ ID NO: 36163 - DNA, 40 bp, Staphylococcus aureus
  source 1..40: mol_type = genomic DNA
catgaacgggacgaccaatgttgcacccgtacctccaaaa

SEQ ID NO: 36164 - DNA, 50 bp, Staphylococcus aureus
  source 1..50: mol_type = genomic DNA
gatgaatggtgtgttacgaggtaggccgtagtagttacaaaacattcacg

SEQ ID NO: 36165 - DNA, 40 bp, Staphylococcus aureus
  source 1..40: mol_type = genomic DNA
cattcatgggacgatcaatgctgaaccagtaactatataa

SEQ ID NO: 36166 - protein, 458 aa, Tsukamurella pulmonis
MTSMDAVIYARVSQDHGTRSVQEQERECREFCDRQGWNVTRVLTDNDIGASRYSGKDRPAYRELKEILRPGDVLVTWEASRAQRDLAAYVVLRDLCADRGVKWAYNGRVFDLSDGDDRFGTGLDALLAEKEAEQIRARVLRGKRSAAAEGRPHGKSPAGYQPVRDPRTGRTVTWEPDEHAPVMQEAARRFLEGETLREVTRWANEHGVTGTHRQMRDRLHLAAYAGLRVHQGEIVGAANWPALWSPEQRDQIIAAFADPARRASGGGGMPVQHLLSGIARCGVCGAGMRHYWPPSAQKVSAPPAYLCSNGMHVRRQAKPLEKAVVRATLARIRKFDPAQLSEDGGAAAAEARAEAQALQDRLDEFTVAAAEPGGPSPRALAAIEQKLQPQIDAALARARASYRSPLVGRLVEKPEDWKVLSLVERREVIRSMVSVRVLPTQSRGVAGFRREDIEILPV

SEQ ID NO: 36167 - DNA, 50 bp, Tsukamurella pulmonis
  source 1..50: mol_type = genomic DNA
ctgaacctatctgaacgaccggcctcagacaagttcgcctataggttcag

SEQ ID NO: 36168 - DNA, 40 bp, Tsukamurella pulmonis
  source 1..40: mol_type = genomic DNA
ctgcaccggatcaccggcctccaccatccggccgtcgccg

SEQ ID NO: 36169 - DNA, 50 bp, Tsukamurella pulmonis
  source 1..50: mol_type = genomic DNA
ctgaacctatctgaacgaccggcctgagacaagttcgcctataggttcag

SEQ ID NO: 36170 - DNA, 40 bp, Tsukamurella pulmonis
  source 1..40: mol_type = genomic DNA
cagcgcgggaggactcagctgcaccatgcggccgtcgccg

SEQ ID NO: 36171 - protein, 483 aa, Alicyclobacillus acidoterrestris
MRAAIYTRVSSDMQVADGFSLDAQLSRLRSYCDSQGWSVAAIYTDEGISAKDMQRPSLNRLIEDIKHGKIDVVVVYRLDRLTRSVRDLDELLTFFEQHNVGFKSATEMYDTTSATGRLFLRLVASLAQWERENLAERTRMGQVEMTNQGKWSGGHAAFGYDYKEGKLIVNEAQALVVREIFNRYVRGEGTKAILSWLNDPDHSQLAPNRRWTQSALKYLLRNPLYAGYVRYGYRTVGGRRQPDHIVAKGEHEAIISQELWERADQMRIRRTRMPANSSIGTYPLSGIARCGKCGSALSGRTSPKKMSNGKQTIGRHYICNERQHSNLCDMPMIRQQALEDAVLAEIEKFYTTISDTAPITDNSKAIERLKTEIAQVNKRRDRWMDAFEDGNITSAELRMRLDALNEQEEVLRLQLSELEDMQPVDHAFVRDVLKSFRAAWDAAEPYERKELIRIIVKRIDVHINGKVISRRPAPFRVDIEFNV

SEQ ID NO: 36172 - DNA, 50 bp, Alicyclobacillus acidoterrestris
  source 1..50: mol_type = genomic DNA
tatgtgcgaatggggtgtcatgcgttcgcttgacgacccgatacacatac

SEQ ID NO: 36173 - DNA, 40 bp, Alicyclobacillus acidoterrestris
  source 1..40: mol_type = genomic DNA
gtggtggtggtggctggcgttcgcttggattttctggctt

SEQ ID NO: 36174 - DNA, 50 bp, Alicyclobacillus acidoterrestris
  source 1..50: mol_type = genomic DNA
tatgtgcgaatggggtgtcatgcggacgcttgacgacccgatacacatac

SEQ ID NO: 36175 - DNA, 40 bp, Alicyclobacillus acidoterrestris
  source 1..40: mol_type = genomic DNA
gtggtggtggtggatgggggagggtggtattttccagagt

SEQ ID NO: 36176 - protein, 522 aa, Micrococcus luteus
MFSPAKFVFRVCSMTTHSPVQSVILYARVSHTDTDSSRSVTDQLAELRAWAQREDWEVVREYAEQGSASRFASRERPEWREVMAAVGRREADALLTWEASRATRDLGDFAALRDACASAGMSWGYSGTLHDLTDRSARFRTGLEALLAEDEAAKIRERVVRGVRAAAERGAPHGRQLYGYRREYEGEGDARRVVAVVPDPVRAPIVREATRRVLAGESLNAVARALNTAEAPTAATDSEEGGRLWTASKVRQMLRRPGYAGLRTYRGEVVGEAAWEPLIAREDWEELQALFEAARTAQGPQDHRAAYLLTGIARCGVCGSKLVRRKTRSGKVVRKDGTVAEPRRYDTYACAAGIDRTGGGFHVSMSQQHLDDYVSRLVVARLAQPDVLEALAGAEGAQSDERAALRAEIAGYREHLEAARAFAAEHLRMDLLVDQEARLKPRIDAAERRLRELAGVHPEVRRLAEATDVQAAWDALDLEGQRHVVRMLLVPSVLPRTRPGRRGLDPERVSVNWVSGAGDCLR

SEQ ID NO: 36177 - DNA, 50 bp, Micrococcus luteus
  source 1..50: mol_type = genomic DNA
caccccctgtaatagatgttgtccccggcaaagttcgtatttagggtgtg

SEQ ID NO: 36178 - DNA, 40 bp, Micrococcus luteus
  source 1..40: mol_type = genomic DNA
gtcccgggagatgttctccccggccagcagcggcagcgtg

SEQ ID NO: 36179 - DNA, 50 bp, Micrococcus luteus
  source 1..50: mol_type = genomic DNA
caccccctgtaatagatgttgtccttggcaaagttcgtatttagggtgtg

SEQ ID NO: 36180 - DNA, 40 bp, Micrococcus luteus
  source 1..40: mol_type = genomic DNA
gtcaagggcgatgttttccttggaaagctgctcctgcgtg

SEQ ID NO: 36181 - protein, 450 aa, Rhodococcus sp YL-1
MRTAIYTRISLDRTGEGLGVERHFEDCSALAKSLNWEVVEHYSDNDISASRGLVRPRYEDMLADIQAGKIDAVIVYHADRLYRSPLELERLIAIFANTEIRTVKSGTLDLTTYSGRMVARILGSVARAEVDAMSDRRKRANDQKAASGLWIASRRPFGYTIDGELLEPEATAIREAVQSVLSGMSVRQVAREWNAAGLRTAHGGQQWKSTSVRRVLKNPRYAALRVHRGAVVGSGQWPAIIDVDAHFGIVAFLDDPKRSSSLGFERKWQGSGVYRCGVCDERMVVHVDANKRRSYKCPQNHVRRQGVALDELVDGVVIARLSMPDAAVVLQSDEIDVAGLQVERDSLQVRAEQIAGMFGSGAMDAGQFEAANAALQLQVDRVDAELGKARMGDPLVELVLAGGRLVEVWEGKSPDLRGKIIDALMVVRVHPSDKGLRRFDPRFIEIERKV

SEQ ID NO: 36182 - DNA, 50 bp, Rhodococcus sp YL-1
  source 1..50: mol_type = genomic DNA
cagtggacaaccctgacatctgttgggactgattgtcaagtactacacgc

SEQ ID NO: 36183 - DNA, 40 bp, Rhodococcus sp YL-1
  source 1..40: mol_type = genomic DNA
aggtggtgcaacctttctcggcctcgaggaggcaccgcat

SEQ ID NO: 36184 - DNA, 50 bp, Rhodococcus sp YL-1
  source 1..50: mol_type = genomic DNA
cagtggacaaccctgacatctgttaagactgattgtcaagtactacacgc

SEQ ID NO: 36185 - DNA, 40 bp, Rhodococcus sp YL-1
  source 1..40: mol_type = genomic DNA
gccttgtgtaacctttgtcaacctcgaggagacactgaag

SEQ ID NO: 36186 - protein, 577 aa, Dehalococcoides mccartyi
MKEKALTTERFDSLVDMAAKEARYEEGFGVKGCDLTNSCWWAAYTRQSWEEQANNNRLPEYLLTCAKEAKKLGVVVPLEYILYDTVTGEHLERPDMIRLRKLLTKRLISGVIFPALDRLSREPLHQQIFELEATHYEIQIHYADVPNGNDPNSQFTRTILAHAAKLVKLANRRNNRGGNIGRVVSGNVPAGKPSYGYIYRAEYQALEHGRRKLIRAWWEINALEADGTYKIGSEAWVVKEIFRWIGLEGRSTFWVAEELNRMRIKPRYAEKWSPALVGFICKNRAYTGKHAYNKACYVTNPNRPLTDITAEIKRTLRKAKPEDDWAHFEVPLLVSEELWQRANDNIHERGKGRGKAGKSIPALFRARVFCPKCGHIMRLHRDSTCSWLTYYVCRTQGCSMKFIRVSHLDDIGWENVAAILQDHSFIDAKAENTSRDDGGIQKRIRLELFQKREAERKIARIQDDLLSDEPVITRQEAVAKIGELRKVVEKTDTEIARLQGIVQTAKQAEEKIEALKKALEDSRDINLNTATFQQKAEWIARLGVKVYPAKDLTNYHIKCGIKITEPQKVSCYKTSIA

SEQ ID NO: 36187 - DNA, 50 bp, Dehalococcoides mccartyi
  source 1..50: mol_type = genomic DNA
tcatgttacaaaaccagcatcgcatcgcctatactggcttttagacacgt

SEQ ID NO: 36188 - DNA, 40 bp, Dehalococcoides mccartyi
  source 1..40: mol_type = genomic DNA
ttataaaaccagcatggcatcaccaaagctgtaaaaacgg

SEQ ID NO: 36189 - DNA, 50 bp, Dehalococcoides mccartyi
  source 1..50: mol_type = genomic DNA
tcatgttacaaaaccagcatcgcatagcctatactggcttttagacacgt

SEQ ID NO: 36190 - DNA, 40 bp, Dehalococcoides mccartyi; identical to SEQ ID NO: 9380
  source 1..40: mol_type = genomic DNA

SEQ ID NO: 36191 - protein, 499 aa, Escherichia coli
MRFSSAIQGAEGADSTRRQNDLFKQWLKKNSDAQVVASFSDEGLSGYKGKHLTGQFGDMLARIESGEFPEGTILLVESIDRIGRLEHLETEALMNRILGNGLEIHTLQDGLIYTKDALADDLGISIIQRVKAYIAHQESKQKSFRVSQKWGQRAKLALAGKQRLTKMVPGWIDPDTFKCNEHAETVRLIFKLLLDGESLHNIARHLQSNGIKSFSRRKDANGFSVHSVRTVLRSESVIGTLPASQRNDRPAIPNYYEAAIDAATFNKAQEILDKNRKGRTPASDNPLTINIFKGLFRCQCGASVHPTGTKNKYAGVYRCNNHLDGRCDVPPLKRKPFDRWMIDNFLGMIDVGNDGESERKIAALQHEVETVTARIKKATALLLEMDDIDELKIQLKELNQKRTELQTTIDSMRRKASLTDKELPQLKDIDLTTKAGRVECQLILSKHLKGLTLGKDSVTVTLQNDTEITIPTNPLPLNDGSPIFEIADKELLDIDAYQL

SEQ ID NO: 36192 - DNA, 50 bp, Escherichia coli
  source 1..50: mol_type = genomic DNA
aaaccgaatagactttattcaagggtcattgtattgtagctattcggcat

SEQ ID NO: 36193 - DNA, 40 bp, Escherichia coli; identical to SEQ ID NO: 20038
  source 1..40: mol_type = genomic DNA

SEQ ID NO: 36194 - DNA, 50 bp, Escherichia coli
  source 1..50: mol_type = genomic DNA
aaaccgaatagactttattcaaggttcattgtattgtagctattcggcat

SEQ ID NO: 36195 - DNA, 40 bp, Escherichia coli
  source 1..40: mol_type = genomic DNA
ggggtgaggtgaagaaaagttactttaagaaataatcatt

SEQ ID NO: 36196 - protein, 506 aa, Escherichia coli
MRSVITYLRYSSAIQGAEGADSTRRQNDLFKQWLKKNSDAQVVASFSDEGLSGYKGKHLTGQFGDMLARIESGEFPEGTILLVESIDRIGRLEHLETEALMNRILGNGLEIHTLQDGLIYTKDALADDLGISIIQRVKAYIAHQESKQKSFRVSQKWEQRAKLALAGEQRLTKMVPGWIDPDTFKLNEHAETVRLIFKLLLSGESLHNIARHLQSNGIKSFSRRKDANGFSVHSVRTILRSETTIGTLPASQRNDRPAIPNYYEAAIDASTFNKAQEILGKNRIGRTPASDNPLTINIFKGLFRCQCGASVHPTGTKNKYQGVYRCNNHLDGRCDVPPLKRKPFDKWMIDNFLGMIDVGNDGEAEGKIASLQHEVEIVTTRIKKATALLLEMDDIDELKIQLKELNQKRTELQTTIDNMRRKASLTDKELPQLKDIDLTTKAGRVECQLILSKHLKGLTLGKDSVTVTLQNDTEITIPTNPLPLNDGSPIFEIADKELLDIDAYQL

SEQ ID NO: 36197 - DNA, 50 bp, Escherichia coli; identical to SEQ ID NO: 36192
  source 1..50: mol_type = genomic DNA

SEQ ID NO: 36198 - DNA, 40 bp, Escherichia coli; identical to SEQ ID NO: 20038
  source 1..40: mol_type = genomic DNA

SEQ ID NO: 36199 - DNA, 50 bp, Escherichia coli; identical to SEQ ID NO: 36194
  source 1..50: mol_type = genomic DNA

SEQ ID NO: 36200 - DNA, 40 bp, Escherichia coli; identical to SEQ ID NO: 36195
  source 1..40: mol_type = genomic DNA

SEQ ID NO: 36201 - protein, 506 aa, Escherichia coli
MRSVITYLRYSSAIQGAEGADSTRRQNDLFKQWLKKNSDAQVVASFSDEGLSGYKGKHLTGQFGDMLARIESGEFPEGTILLVESIDRIGRLELLETEALMNRILGNGLEIHTLQDGLIYTKDALADDLGISIIQRVKAYIAHQESKQKSFRVSQKWEQRAKLALAGEQRLTKMVPGWIDPDTFKLNEHAETVRLIFKLLLSGESLHNIARHLQSNGIKSFSRRKDANGFSVHSVRTILRSETTIGTLPASQRNDRPAIPNYYEAAIDASTFNKAQEILGKNRIGRTPASDNPLTINIFKGLFRCQCGASVHPTGTKNKYQGVYRCNNHLDGRCDVPPLKRKPFDKWMIDNFLGMIDVGNDGEAEGKIASLQHEVEIVTTRIKKATALLLEMDDIDELKIQLKELNQKRTELQTTIDNMRRKASLTDKELPQLKDIDLTTKAGRVECQLILSKHLKGLTLGKDSVTVTLQNDTEITIPTNPLPLNDGSPIFEIADKELLDIDAYQL

SEQ ID NO: 36202 - DNA, 50 bp, Escherichia coli; identical to SEQ ID NO: 36192
  source 1..50: mol_type = genomic DNA

SEQ ID NO: 36203 - DNA, 40 bp, Escherichia coli; identical to SEQ ID NO: 20038
  source 1..40: mol_type = genomic DNA

SEQ ID NO: 36204 - DNA, 50 bp, Escherichia coli; identical to SEQ ID NO: 36194
  source 1..50: mol_type = genomic DNA

SEQ ID NO: 36205 - DNA, 40 bp, Escherichia coli; identical to SEQ ID NO: 36195
  source 1..40: mol_type = genomic DNA

SEQ ID NO: 36206 - protein, 506 aa, Escherichia coli; identical to SEQ ID NO: 29881

SEQ ID NO: 36207 - DNA, 50 bp, Escherichia coli; identical to SEQ ID NO: 36192
  source 1..50: mol_type = genomic DNA

SEQ ID NO: 36208 - DNA, 40 bp, Escherichia coli; identical to SEQ ID NO: 20038
  source 1..40: mol_type = genomic DNA

SEQ ID NO: 36209 - DNA, 50 bp, Escherichia coli; identical to SEQ ID NO: 36194
  source 1..50: mol_type = genomic DNA

SEQ ID NO: 36210 - DNA, 40 bp, Escherichia coli; identical to SEQ ID NO: 36195
  source 1..40: mol_type = genomic DNA

SEQ ID NO: 36211 - protein, 494 aa, Fusobacterium necrophorum; identical to SEQ ID NO: 10131

SEQ ID NO: 36212 - DNA, 50 bp, Fusobacterium necrophorum; identical to SEQ ID NO: 10132
  source 1..50: mol_type = genomic DNA

SEQ ID NO: 36213 - DNA, 40 bp, Fusobacterium necrophorum
  source 1..40: mol_type = genomic DNA
aaaaaagtatggcggaagtagagggaatcgaacccacaag

SEQ ID NO: 36214 - DNA, 50 bp, Fusobacterium necrophorum
  source 1..50: mol_type = genomic DNA
gatatgagtaaagatggcggaagtcaagactttcattttttactaaaatt

SEQ ID NO: 36215 - DNA, 40 bp, Fusobacterium necrophorum
  source 1..40: mol_type = genomic DNA
aaaaaagtctgttggaaatcaaggctattaaacacacatg

SEQ ID NO: 36216 - protein, 504 aa, Cellulosimicrobium sp TH-20
MPKRAVVYVRLSDFRGDADPTLSPETQEEKCRAYCTAKGWDVVEVVRDLDVSGSDKGLRLDRPGLSRVRALLPSVDVVVFAKLDRLARNVIDFRTFAEEAEEQGATLASVAESLDLSTAAGRFVATILAAFAEMEAAAIADRVRDSRAAKAQALRWGGAPPPYGYESIPHPEGKGRGLALKADEVAVIHEMADRVLAGEALTSIALDFNRRGVPRRRGTWAASTVARILRNDATVGRLTHRGAPVLGDDGLPATPWPAALPPTTWRTVGAVLDANAERIAGSRRPARKRASRLLSGYLYCETCNRPLALQTYKAGPTYVCKAKANAKPCATGGSVLAERVEEEVVAQFLGSVGRLPATRVVAAGDAEAADRLAAANAALDDLARRLRDADDDETLALLARRATLRALVEDLSEAAATPRVREEPTGRTVGEEWEAADALARRALLGRALDHVVVRPIGRGHHRRPVADRLVVVWHPDEPTAEDAGGESLNVPDYVLAASVSAAG

SEQ ID NO: 36217 - DNA, 50 bp, Cellulosimicrobium sp TH-20
  source 1..50: mol_type = genomic DNA
gaccgtcctcccctctcatgaggcgagcatccggcgacgggatgacggtc

SEQ ID NO: 36218 - DNA, 40 bp, Cellulosimicrobium sp TH-20
  source 1..40: mol_type = genomic DNA
ggacgcccgcacgcgcggtgagctcgaggcccgccagtcg

SEQ ID NO: 36219 - DNA, 50 bp, Cellulosimicrobium sp TH-20
  source 1..50: mol_type = genomic DNA
gaccgtcctcccctctcatgaggcccgcatccggcgacgggatgacggtc

SEQ ID NO: 36220 - DNA, 40 bp, Cellulosimicrobium sp TH-20
  source 1..40: mol_type = genomic DNA
ggccggccgcacccccgggccgcacgaggctcgcccgcca

SEQ ID NO: 36221 - protein, 563 aa, Vibrio navarrensis
MQKIIYPYVRFSSEQQSGGSSYKRQLGDILKYAKENGYTVNDSLELRDLGLSAYNADHIKKGSLGDFFDAIDMGIIETDGTAYLCVEQFDRLSRQSLDDASDVLRKILRANINVITLMDKRVYTKESLNDLMSVMYSSMLMAQANEESAKKSERILKSFDARLDALHDGKQIQYVGVFPGWIDNKGTKKETNFVLNKKAEIVKKIFKMYINGTSFNEIARTLNYEKIPQVAKKRQRNFTNLWSSAKVNHILKNRCVLGELYIRKTGDTFKNYYPQIISNDDWDIVQSMTKTKKIIKTSGRNSINIFTGKLFCSGCGQKYYFETDDKTLKTGKKYYHMLKCSGRRGLQCKSASIKYDDFLTSMPNMFGLIDKKPQDYSDKIKKIKEKITEISGYSKDINEKLLLLEELNNNNELDFTIYLKESSKLQKQIRENDARIASFKVSISRLSSDNKLDYFDKNDPISIKKAKKFINDNFAGFIVSSDSRNCTALYNNGQIIHFKVKNSKIEKTKNIIEKADGFKEFFDLKEEVVQAYKNGTMDGRFAEVLKATNFWGIETPEKDYTLE

SEQ ID NO: 36222 - DNA, 50 bp, Vibrio navarrensis
  source 1..50: mol_type = genomic DNA
ttcctgtaaatcttgcgtaatactgtgctttttaatataatttacaggaa

SEQ ID NO: 36223 - DNA, 40 bp, Vibrio navarrensis
  source 1..40: mol_type = genomic DNA
ggctggcgccaaattgaccgtgatccgtttggcgggaaac

SEQ ID NO: 36224 - DNA, 50 bp, Vibrio navarrensis
  source 1..50: mol_type = genomic DNA
ttcctgtaaatcttgcgtaatactaagctttttaatataatttacaggaa

SEQ ID NO: 36225 - DNA, 40 bp, Vibrio navarrensis
  source 1..40: mol_type = genomic DNA
ggctgccaccaagctgaccaagattccttgggtggaaagc

SEQ ID NO: 36226 - protein, 538 aa, Eubacterium siraeum; identical to SEQ ID NO: 13576

SEQ ID NO: 36227 - DNA, 50 bp, Eubacterium siraeum; identical to SEQ ID NO: 13577
  source 1..50: mol_type = genomic DNA

SEQ ID NO: 36228 - DNA, 40 bp, Eubacterium siraeum
  source 1..40: mol_type = genomic DNA
ataatgaaagccctgagcaaacgctcagggctttttgtgt

SEQ ID NO: 36229 - DNA, 50 bp, Eubacterium siraeum; identical to SEQ ID NO: 35759
  source 1..50: mol_type = genomic DNA

SEQ ID NO: 36230 - DNA, 40 bp, Eubacterium siraeum
  source 1..40: mol_type = genomic DNA
ataataggacccctgaacagtctgtgagggagttttgtgt

SEQ ID NO: 36231 - protein, 515 aa, Bacillus anthracis
MKTAIYLRKSRADLEAEARGEGETLAKHRTTLLKIAKEMNLNVLSVREEIVSGESLVKRPEMLALLEEIEDNKYDVVLCMDMDRLGRGGMKEQGIILETFKRSNTKIMTPRKTYDLNDEWDEEYSEFEAFMARKELKIITRRMQRGRVASVEAGNYLGTHAPFGYDIHRLNKRERTLTINPEEASVVRMIFDWYANEDMGANAIRSKLNDLGYKSKLSNEWNPYSILDILKNNIYIGKVTWQKRKEVKRPDAVKRSCARQDKSDWIIADGKHEPIIPESLFEQVQDKLNSRYHVPYNTNGIKNPLAGIIKCSKCGYSMVQRYPKNRKETMDCKHRGCENKSSYTELIEKRLIEALKEWYINYKADFEKHKQDDKLKETQVIQMNEAALRKLDKELVDVEKQKNNLHDLLERGVYTVDMFLERSNVVSDRITEITSTMENLKKEIKTEIKKEKVKQDTIPQVEHVLDLYFKTDDPKKKNSLLKSVLEKAVYKKEKWQRLDDFELVLYPKLPQDGDI

SEQ ID NO: 36232 - DNA, 50 bp, Bacillus anthracis
  source 1..50: mol_type = genomic DNA
tgtcgccaccttgttggtgtaattaggttgacgccaacagggtgataaca

SEQ ID NO: 36233 - DNA, 40 bp, Bacillus anthracis
  source 1..40: mol_type = genomic DNA
tgttgccattaggcgcatgaggtttaccccatttaatcct

SEQ ID NO: 36234 - DNA, 50 bp, Bacillus anthracis
  source 1..50: mol_type = genomic DNA
tgtcgccaccttgttggtgtaattgtgttgacgccaacagggtgataaca

SEQ ID NO: 36235 - DNA, 40 bp, Bacillus anthracis
  source 1..40: mol_type = genomic DNA
tgctgccataatgggcatggtgtctggcacctgtaatcct

SEQ ID NO: 36236 - protein, 515 aa, Bacillus anthracis
MKTAIYLRKSRADLEAEARGEGETLAKHRTTLLKIAKEMNLNVLSVREEIVSGESLVKRPEMLALLEEIEDNKYDVVLCMDMDRLGRGGMKEQGIILETFKRSNTKIMTPRKTYDLNDEWDEEYSEFEAFMARKELKIITRRMQRGRVASVEAGNYLGTHAPFGYDIHRLNKRERTLTINSEEASVVRMIFDWYANEDMGANAIRSKLNDLGYKSKLGNEWNPYSILDILKNNVYIGKVTWQKRKEVKRPDAVKRSCARQDKSDWIIADGKHEPIIPESLFEQVQEKLNSRYHVPYNTNGIKNPLAGIIKCAKCGYSMVQRYPKNRKETMDCKHRGCENKSSYTELIERRLLEALKEWYINYKADFEKHKQDDKLKETQVIQMNEAALRKLEKELVDVQKQKNNLHDLLERGVYTVDMFLERSNVVSDRITEITSTMGNLKKEIKTEIKKEKGKKDTIPQVEHVLDLYFKTDDPKKKNSLLKSVLEKAVYKKEKWQRLDDFELVLYPKLPQDGDI

SEQ ID NO: 36237 - DNA, 50 bp, Bacillus anthracis; identical to SEQ ID NO: 1612
  source 1..50: mol_type = genomic DNA

SEQ ID NO: 36238 - DNA, 40 bp, Bacillus anthracis; identical to SEQ ID NO: 36233
  source 1..40: mol_type = genomic DNA

SEQ ID NO: 36239 - DNA, 50 bp, Bacillus anthracis
  source 1..50: mol_type = genomic DNA
tgtcgtcaccttgttggtgtaattgtgttgacgccaacagggtgataaca

SEQ ID NO: 36240 - DNA, 40 bp, Bacillus anthracis; identical to SEQ ID NO: 36235
  source 1..40: mol_type = genomic DNA

SEQ ID NO: 36241 - protein, 474 aa, Microbacterium foliorum
MIRVSKERDGMTSPEVQRHAIEQYAARQNIDITEWVEGLDESGSQARSAWWPRLDYAIGKIENAEADVILVWKFSRVGRRRVRWAVALDRVDTAGGAIESATEQADATPSGRLQRGMMGEFNAYQAELIGETWREAHSRRVRNGLPPTGGHRFGYRRENGTYLPDPETGPILRDLYLQYLGGIGYAALTRILNEGGHTDGRARWTYQGVVRMLDSGFAAGLLGRTVVFGGKRRTPPPWERTYDEGAHEPIVTNEEWAAYVARRQQAGGTRTQERAKYLLAGLARCGDCGSSMHGKSNPNLIYMCSRASNTTGMKKVSIDAKRVDQAVMAWLFEFASDTDVRINAAAANRKRRDDSAFIIRRSTAIITKADERLAALTIKLADGTITDAAYKAAAELIEAERATAAAAVRSAAVNPVHERAPARVPKDIAMLWSRLTTDERNVLLRSLIDRVEIAPAKHRGDISPRWKIVPQWEA

SEQ ID NO: 36242 - DNA, 50 bp, Microbacterium foliorum
  source 1..50: mol_type = genomic DNA
cggtcggcctttacctgtacacgatgtcgaatgaagaatccatacggcca

SEQ ID NO: 36243 - DNA, 40 bp, Microbacterium foliorum
  source 1..40: mol_type = genomic DNA
cgatccaccttggacacgatgtcgaatgagctgtcagcca

SEQ ID NO: 36244 - DNA, 50 bp, Microbacterium foliorum
  source 1..50: mol_type = genomic DNA
cggtcggcctttacctgtacacgaagtcgaatgaagaatccatacggcca

SEQ ID NO: 36245 - DNA, 40 bp, Microbacterium foliorum
  source 1..40: mol_type = genomic DNA
ccagccacctaggacagggagatgagggagctgtcagcct

SEQ ID NO: 36246 - protein, 521 aa, Rhodanobacter denitrificans
MAETETTCVLYARVSDRKQSEQDVSIPTQIEVAERRATELGARVLRVFTDDAKSAWREKNRPAFEAAIDMACGMEATFFVCWDSARFARNKYEAMINKRLLDDAGVQLIYISSPIDRTSDMGWAMDGVMEIFNELQSRRISADTRRSMMRNAKLGYWVGGRPPFGYQSIPAPDNPKRRRLVPVPDEVDQVRQIFAMRAKGQGAFQIAAWLNSRDIPRRGNKWTKQTVINELRNEIMIGNIIFGRRGKTSRGVRDRDTWIIVPSHEAIIDRPLWDQVQGLMDEAADITKASGSPKSTHAFTGILRCGKCGSSMQIETSRGRGGKLYFYYRCRKSMQNRECDPRRIRADLVDDWLSNVILKRVLCRRNVASIVELMEAEAGNWAADHRKRRAAALAKISRLQESNNKLYSVLELYGKDAPNLGDMTTRLRQNNALQKEAEAMLAAIDAEQPPATAMSSGEIDELTGFLHNLVKDDRNAARSRSFYNSFVDSITLDGEELLISYNPNRLLTPNTEVVRSKRKWR

SEQ ID NO: 36247 - DNA, 50 bp, Rhodanobacter denitrificans
  source 1..50: mol_type = genomic DNA
gtggtgcgcagtaagcgaaagtggcgccccgtgcttggcttactgcgcac

SEQ ID NO: 36248 - DNA, 40 bp, Rhodanobacter denitrificans
  source 1..40: mol_type = genomic DNA
gacccttgtttgcatttggcgcccgaagttggactcgaac

SEQ ID NO: 36249 - DNA, 50 bp, Rhodanobacter denitrificans
  source 1..50: mol_type = genomic DNA
gtggtgcgcagtaagcgaaagtgggaccccgtgcttggcttactgcgcac

SEQ ID NO: 36250 - DNA, 40 bp, Rhodanobacter denitrificans
  source 1..40: mol_type = genomic DNA
gaccccaccatgcatttgggacctgaacttgggccagaac

SEQ ID NO: 36251 - protein, 554 aa, Kocuria flava
MTTTTTATDPAASLIDPPISTAVAISYLRVSTREQASKGGTDEGFSIPAQRDAVRRKADQLGAAIVEEFVDAGASAKSADRPDLMRMIQYVKTNKVAYCIVHKVDRLARNRADDVTIHLALQQAGVMLVSATENIDETPSGMLLHGIMSTIAEFYSRNLATEVTKGMTQKAISGGTLGKAPIGYLNVRTRDDQGREVRTVELDPERAPLIEWAFKAYASGNWTVSQLHDELTSRGLVSLPTPKRPSKPLAVSSVHRLLTNPYYKGDVVYRGTRYKGTHRALVPPEVWYQVQSVLTAHKTAAEATQVHDHYLKGTIHCGQCGSRLIVSNAKNRHGNVYCYFVCSGRHSKRTDCTRGAILIEDVEKLIEDYYTRVQISPAQRDALSGMLHHEFDRLMAAETDELERLTTHRDRLEHEQDRLMQAHYADAIPLPVLKREQDRILGELDRLNRRIDAHHGDYADARAHLDDALGLLANCADIYQRCDDANRRLCNQAFFTKVYIDEDNELRVENNRPFEMLLDPEVNANALNWTQNGDKARTPANDSIGKGSSLVRGV

SEQ ID NO: 36252 - DNA, 50 bp, Kocuria flava
  source 1..50: mol_type = genomic DNA
gggttcgagccttgtgcgcggggtggacctccgtagagagttcgagaacc

SEQ ID NO: 36253 - DNA, 40 bp, Kocuria flava
  source 1..40: mol_type = genomic DNA
cccgccgctcgttcctggtggagctgaggggactcgaacc

SEQ ID NO: 36254 - DNA, 50 bp, Kocuria flava
  source 1..50: mol_type = genomic DNA
gggttcgagccttgtgcgcggggtcaacctccgtagagagttcgagaacc

SEQ ID NO: 36255 - DNA, 40 bp, Kocuria flava
  source 1..40: mol_type = genomic DNA
cccgtggctcactccaggtcaagttcaggtgactccaccc

SEQ ID NO: 36256 - protein, 485 aa, Thermobifida fusca
MIAWVKAQDDIDYIIVYHFNRIFRNSIDAAITKRELGKLGVRVVSTVLDMGETPESQMVETIIHAVDQYQSQASGADIAYKMGQKAKNGGTVAKAKIGYLNVREQIDGREIRTIALDDKRAPLVLKAFELYATGDYTGEQVHQVVTAAGLTTRATKRKPEQPVSLNTLYEMLQDPYYKGIVTYKGEEYEGRHPAIVTPELFDRAQRVLALRNGGGTRERQHNHYLKGAIWCARCHRRFVVQRAKGNGGTYFYFFCVGRQKGICDQPYLSTDQVEAEVIRHYATVRLADQFQQQLRRQLDDALVYELHSMDALRKQLSARLDELSVQEDRFLDLVGDPEWPQRKIKQRLAKIDNERGDILNKLADTTGKIDIGRRFFLSALDLLRDPQRFYTDAGTSLRRALNKVIFERLYVDVDGVTGHVLKDGLSALVQSASRRYLRPAPRGGLAWATNETSPTLTGEAGDRTTEAGRLALILSDQGSNRTALV

SEQ ID NO: 36257 - DNA, 50 bp, Thermobifida fusca
  source 1..50: mol_type = genomic DNA
gggttcgaatagaaccgctttggtggacctcctgtccgcttattcgaacc

SEQ ID NO: 36258 - DNA, 40 bp, Thermobifida fusca
  source 1..40: mol_type = genomic DNA
ctttctgagctgtgctggtgggcgatactgggattgaacc

SEQ ID NO: 36259 - DNA, 50 bp, Thermobifida fusca
  source 1..50: mol_type = genomic DNA
gggttcgaatagaaccgctttggtctacctcctgtccgcttattcgaacc

SEQ ID NO: 36260 - DNA, 40 bp, Thermobifida fusca
  source 1..40: mol_type = genomic DNA
ctggctgtgctgtgctgtgctgccatagtaggtttgtacc

SEQ ID NO: 36261 - protein, 464 aa, Mycobacterium asiaticum
MRAAIYLRQSQDRTGDGLGIDRQRDEVRQLITARGWTVAGEFVDNDVSALSRKSRPQFDRMMARVDAGEFDVIVARHIDRLLRRLAELENVLERCQATNTAVVTAADGVDTSSDGGRLVARILSSVAQGEVERKGARQRSAAVQAAQQGRWVGGRRAFGYEADGVTVREDEAALIKQGYADLLAGESISEIARRWNAAGAVTGQGHEWRRGAVKDVLTNPRNAGLRRYRPTEDRWKVRVNPELGITGTAEWPGIVDETTWRAAVRKLSDPARRRAPIGGKGLLTGLAVCGVCAETVHRGGASHHKPMYRCRSGRHVGRMSEPVDEYVTEVVLARLTQPDAAELWAAELPDASELMAEADTLRRRRDDLALDYADGAMTREQFRAANTRVLERLGELEARIAAAGTTSPLAIVAAADVRGTWATLSTAQRRAIIAALMTPALHLVGAGVRNFRPESVEIRWKVGA

SEQ ID NO: 36262 - DNA, 50 bp, Mycobacterium asiaticum
  source 1..50: mol_type = genomic DNA
atccgctaatttgcagcgtttgcagtcacgtacgcaacaaaatagcttag

SEQ ID NO: 36263 - DNA, 40 bp, Mycobacterium asiaticum
  source 1..40: mol_type = genomic DNA
cgtggaccgcacgctgcgcgtcgcgtggagcctggccgac

SEQ ID NO: 36264 - DNA, 50 bp, Mycobacterium asiaticum
  source 1..50: mol_type = genomic DNA
atccgctaatttgcagcgtttgcagccacgtacgcaacaaaatagcttag

SEQ ID NO: 36265 - DNA, 40 bp, Mycobacterium asiaticum
  source 1..40: mol_type = genomic DNA
cggggacccccagctccgcgccgctcgctgcctggccgag

SEQ ID NO: 36266 - protein, 518 aa, Pseudomonas furukawaii
MRAAIYARYSSDKQNESSVADQFAVCQHRAEREGWQVALSHSDNAISGSTTVASRPGGAVLLADALSGRFEVLLLEGLDRLSRDQVEQESIVRRLEHRGIRIIGVADGYDSNLAGRKVMRGVRGLINELFLDDLRHKTQRGMHGQVDRGFIASGKCYGYRIVREEAGSRYEIDPEQSHWVKWIFEQAASGRTYRAIVHELNARGVPSPRNSSWAVSAVFGSPVKGSGLLNNQLYAGRYIWNRSQWIKDPDTGRRKRTDRPRTEWRVVEVPELRIVPEDTWLKVRHRMDDGRDDSGRKRQQRPSTTLLGGLLRCPNCGGPMIALNTRTYGCNIRHDRGPTECEGFTIRRDLAERRLVTSVREDLLSPAAAAAFEKAFQRKLAERAGGNPVMEAMQQRATELEAEVGRLVDAIASVGVSQALATRLATAERQQANLVRELEEMKAASVAAPDIRGTFQRLLMNLTDSLKRDSTQARAALAEIFSRVDIELRGQEVWAHIEEGPALRIAVGADVYKSGCGS

SEQ ID NO: 36267 - DNA, 50 bp, Pseudomonas furukawaii
  source 1..50: mol_type = genomic DNA
gacgtctacaagagtggttgcgggagcccgcaaccagcgttgtcaatccg

SEQ ID NO: 36268 - DNA, 40 bp, Pseudomonas furukawaii
  source 1..40: mol_type = genomic DNA
ttccgtatttggttgcgggagctggatttgaaccaacgac

SEQ ID NO: 36269 - DNA, 50 bp, Pseudomonas furukawaii
  source 1..50: mol_type = genomic DNA
gacgtctacaagagtggttgcgggggcccgcaaccagcgttgtcaatccg

SEQ ID NO: 36270 - DNA, 40 bp, Pseudomonas furukawaii
  source 1..40: mol_type = genomic DNA
ttatgtagtgggtggcaggggctgaatttgaacccaggtc

SEQ ID NO: 36271 - protein, 596 aa, Enterobacter asburiae
MIPSECLLFSVLAMKKLYSYIRWSTDKQTGNTSLERQTEKAKQYAAIHGLEYVQILDAGVSAFRGKNTTQGAFAGFINAVNAGVIPSDSWLYVENLDRLTRQDVMTALNLFTSLLKLGLTIVTGMDGKTYTEESVSKNVHDLMMSLFLFSRANEESLTKQKRAFETTLKLIERHKSGQPTNIKSAGSTPFWIDATGPNTEAVKPHPIYFKAAKEAVRLLLSGWGNYRVTNYLNENSDIYPPPPGKKTQNEKKEVRWTVPNIKKMRLNRALMGEKVLTLNNVTHHLENYFPPVCTPAEFARLQDVASNNKMPQGDQKKVVTLLSGMGILRCGHCGGAMTSFSKLGKIRYMCESGKKRMSSCKAWSVSGALVERCLLYPLISGYMSLVMEDQNAGESLADQIDSKRSELELIESQIGNLTTAITMGGNLGSLVTQLQEMESRKRRLLLELDKLAQRELLQGSREQQIEKIVDTVELITPQLLDDTTHPDRLNIREVVRAVITRVTVSKAIDKTLTLRYDVYDKQRYLFEGQIKTDNNGDKCCGYAMYVEDPTVLVDSDSPEISGALKKVTDSTKLLQRRIDEILDGFPRIKPSDFVSK

SEQ ID NO: 36272 - DNA, 50 bp, Enterobacter asburiae; identical to SEQ ID NO: 13587
  source 1..50: mol_type = genomic DNA

SEQ ID NO: 36273 - DNA, 40 bp, Enterobacter asburiae
  source 1..40: mol_type = genomic DNA
cggattagccaacttagtgttgcccataagtcctcaaaaa

SEQ ID NO: 36274 - DNA, 50 bp, Enterobacter asburiae
  source 1..50: mol_type = genomic DNA
agattcgtctaaatgaaaatgggcaggcccaagttcgaaaagatgatacc

SEQ ID NO: 36275 - DNA, 40 bp, Enterobacter asburiae
  source 1..40: mol_type = genomic DNA
cagtctaggcaacatagtgagacccatatctctacaaaaa

SEQ ID NO: 36276 - protein, 581 aa, Leclercia adecarboxylata
MKKLYSYIRWSTDKQTGNTSLERQTEKAKQYAAIHGLEYVQLLDAGVSAFRAKNSTSGKLAGFISAVESGVIPSDSWLYVENLDRLSRADATTANELFLRLLRLGLTLVTGMDGKTFTRDSVNQNPTDLMLSILLFMRANEESLTKQKRAFETTLKLIERYRSGLPVNIKSAGSSPWWIDASGPNNEAVKAHPTHFKAAKEAVRLLLSGWGNYRVTNYLNDNCEIYPPPAGKKSKNERKEVRWTVPNIKKMRLNRALMGEKVLTLNNVTHHLENYFPPVCTPAEFARLQDVASNNKMPQGEQKQVITLLSGMGILRCGHCGGAMTSFSKQGKIRYMCESGKKRMSSCRAWSVSGELVERCLLQPLITGYISLVMDKQDSEQSIAGLIDSKRGELEAIQSQIDNITTAISMGGNLGSLVEMLQGFESRKSAILVDLDKLTQRELLQGSRDQQIEKIVDTMELITPELLEDTTDPDRLNIREVVRAVIARVTIGKSEDKALKLIFDVYDRQQFIYQGEIQTDDRGWIRRGYSLHIEDQSVEMHDGIEPDLSSKLKELIKEQHDKVDEILSAFPPLKASWFVSK

SEQ ID NO: 36277 - DNA, 50 bp, Leclercia adecarboxylata; identical to SEQ ID NO: 13582
  source 1..50: mol_type = genomic DNA

SEQ ID NO: 36278 - DNA, 40 bp, Leclercia adecarboxylata; identical to SEQ ID NO: 36273
  source 1..40: mol_type = genomic DNA

SEQ ID NO: 36279 - DNA, 50 bp, Leclercia adecarboxylata
  source 1..50: mol_type = genomic DNA
ttctttgccaaaatgaattttggcaggcccaagttcgaaaaggtgataat

SEQ ID NO: 36280 - DNA, 40 bp, Leclercia adecarboxylata; identical to SEQ ID NO: 36275
  source 1..40: mol_type = genomic DNA

SEQ ID NO: 36281 - protein, 564 aa, Rhodococcus erythropolis
MRNLSPHSRAVLYLRVSTKDQAQRGGELEGFSIPAQREACRRKATSMGATVISEFVDAGESARSTDRPELQRMLLMLSSEAVDFVIVHKVDRLARNRVDDVEINVAIQKTGARLVSVTENIDETPSGMLMHGIMSSIAEFYSRNLANEVVKGMQQKVQSGGTTALAPIGYENVRKVVGGREVRTVRIDRERAEHIVWAFSAYSSGEWSLRNLAAALESRGLAQKATAKRAERPLRPNRLQTILRNRYYLGFVSWKGVEHVGQHEPLVSPEVFEQVQKVLDAHRQSGERAQKHHHYLIGSLHCARCKSKLIYSVSKGNGGAYQYFVCLGHHSKTSDCGLPYLSVETVEKQVVTAWHREKSKWNELAVRAIESTLAEDLRAHRDEAAQQLGAFTRRIEKIQRERLQWAEKAMDGLVPDDIARSKQAQLGRQLGSLQEQQALLDSTNADYSGTLARIANLIRNCGDIYERASDRLRRDLNQSWFKQLHVDETDGDVSVSTADRTRLMATLHQAGPSVHDAPSVASPQPRDISLSTFFSDNENGEDRSPRRFSRVRGANEHFLVELRG

SEQ ID NO: 36282 - DNA, 50 bp, Rhodococcus erythropolis
  source 1..50: mol_type = genomic DNA
gtggtgctaacgaacactttttggtggaactaagtggactatgttcgcac

SEQ ID NO: 36283 - DNA, 40 bp, Rhodococcus erythropolis
  source 1..40: mol_type = genomic DNA
gcagagcatttgtcttgggtggagctaaggggactcgaac

SEQ ID NO: 36284 - DNA, 50 bp, Rhodococcus erythropolis; identical to SEQ ID NO: 36282
  source 1..50: mol_type = genomic DNA

SEQ ID NO: 36285 - DNA, 40 bp, Rhodococcus erythropolis
  source 1..40: mol_type = genomic DNA
ccagagtcttgggcttctgtggagctaaggggaatagaat

SEQ ID NO: 36286 - protein, 543 aa, Butyrivibrio proteoclasticus
MTYAEEIRRKINNSEPLKAVAYYRVSTDNEGQKESCANQQLLAKQYLSTHQSIVLIAEYVDDGISGKNTFTRPQYNAMLQKILTGDIDLVITKSLSRLNRDQENTFVLKNILIDTETALLTLEDYQVLDLEDMNSDLLLSFKSTMDAQYVRQQSIYGKNAQKVRCEKRILGSRDVSFGYTWNKETKTISINETEAEAVRWLFEEYVYRNATPSSIYKHLKSMGFQVCERTIINYIKDERYIGRFYMNKWDSRLGTGSKHSKKFKLPKEKWVLVERPDLQIIDDDLFNLAQKIRQARMNKYDKPDSKTTQARFQGTHKYSGKVFCPVCGKSYQFDYADTKRTIPLYRIKKHSECSNNVCRITEQDLENITRQSLIKTLEQQDSICDSLEKILTDCVKSVNESDAEITKLHKQIVSKESQVNSLIDTLAEGGLTEVASSKIKERINKITSDIEDLTETIKYKESCKLDDSYISEKISKIKAGLDELKTFDIIDRNRILTFIDRIELPPDGTIHITLKSGQTYGFTNDYNTHFHDILNTGKMRNTN

SEQ ID NO: 36287 - DNA, 50 bp, Butyrivibrio proteoclasticus
  source 1..50: mol_type = genomic DNA
tacaggcaagatgcgcaatactaatgcgtctctttctcatcatgccttta

SEQ ID NO: 36288 - DNA, 40 bp, Butyrivibrio proteoclasticus
  source 1..40: mol_type = genomic DNA
tcctgtggacatggccatatgacccgtgttcatcgcctgt

SEQ ID NO: 36289 - DNA, 50 bp, Butyrivibrio proteoclasticus
  source 1..50: mol_type = genomic DNA
tacaggcaagatgcgcaatactaattcgtctctttctcatcatgccttta

SEQ ID NO: 36290 - DNA, 40 bp, Butyrivibrio proteoclasticus
  source 1..40: mol_type = genomic DNA
ttctgtggccatggcacttttgcccgtgttcttgtcctgc

SEQ ID NO: 36291 - protein, 587 aa, Klebsiella aerogenes; identical to SEQ ID NO: 17381

SEQ ID NO: 36292 - DNA, 50 bp, Klebsiella aerogenes; identical to SEQ ID NO: 17382
  source 1..50: mol_type = genomic DNA

SEQ ID NO: 36293 - DNA, 40 bp, Klebsiella aerogenes
  source 1..40: mol_type = genomic DNA
tgagtctaccaggtttttcgggcagcccagggagacgaag

SEQ ID NO: 36294 - DNA, 50 bp, Klebsiella aerogenes; identical to SEQ ID NO: 17384
  source 1..50: mol_type = genomic DNA

SEQ ID NO: 36295 - DNA, 40 bp, Klebsiella aerogenes
  source 1..40: mol_type = genomic DNA
tgattctaccagtttgttctatcagcccagggttggggaa

SEQ ID NO: 36296 - protein, 466 aa, Staphylococcus cohnii
MIKKVAIYTRVSTLEQANEGYSIEGQEQRLKAYCKVHDWDNFEFFVDAGQSASNTDRAGLQNLLNRLDEFDLVLVYKLDRLTRSVRDLMSLLDTFEEKDVKFRSATEVFDTTSAIGKLFITLVGAMAEWERSTITERTTQGRRVATEKGIYTTVPPFFYDKIEGKLYPNDKKEIVDYIVSRAKAGVSIRGITEELNNSIYNPPKGQRWDKSMISYVLMSPVSRGHTHIGDVYVENTHEPVISEDDYNIYMQSISQRTHSRGVKHTAIFRGKLTCPNCGHSLTLNTSKRTKRDGSVDYDERYVCDRCRSDKSAENITIQSKEVERAFIDFIQHGEIEVDVEDTEEQEEQSVIDVDKIKRQRKKYQQAWAMDLMSDDEFQALIKETDDLLDQHNRQQLRKKENKDNHKQIEATHDLILNVWDKMASNDKEDLINASISNIDYNFYRGHGHGKNRTPNSMSVTHIDYKV

SEQ ID NO: 36297 - DNA, 50 bp, Staphylococcus cohnii
  source 1..50: mol_type = genomic DNA
gatggggtttgtgggtacaggctcccgaataacacaccaaaacccccaca

SEQ ID NO: 36298 - DNA, 40 bp, Staphylococcus cohnii; identical to SEQ ID NO: 32548
  source 1..40: mol_type = genomic DNA

SEQ ID NO: 36299 - DNA, 50 bp, Staphylococcus cohnii; identical to SEQ ID NO: 36297
  source 1..50: mol_type = genomic DNA

SEQ ID NO: 36300 - DNA, 40 bp, Staphylococcus cohnii
  source 1..40: mol_type = genomic DNA
agaagtaggtttccaaattccacaatgacctccctccatt

SEQ ID NO: 36301 - protein, 615 aa, Klebsiella variicola
MLIQTKIRRSPMKKVFVYHRVSSDQQLDGSGIARQAELLEGYLERTGICAEMDDPAPVVLSDQGVSAFKGLNISEGELGAWMEQVRNGMWDSSILVVESIDRFSRQNPFDVMGYINALMAHNVAIHDVMANIVISRSNSKDLPFVMMNAQRAYDESKYKSDRIRKGWAKKREQAFNKGTIVTNKRPQWIEVENDKYVVNEKAAVVKEIFALYQTGMGCPTIAKQLQRKEGEQYKFNRPWTGELVHKILTNRRVTGKIFISEIIRNHDDFENPVTQKKYDMDVYPVVINEEEFELVQELLKSRRPNAGRVTVKKDGQEEVLIKSNLFSGIARCTECGGPMYHNVVRAKRTPKKGDPKIEEYRYIRCLNERDGLCENKAMTYETVERFVVEHLLGMDLSTVIKEQEFNPEIEVLRIQIDQIKDQITNYENGIERRKSAGKPISFEMREELDDAKSELERLLARQASLATVQVDVPVLQDVNVTELYDVNNVDIRTRYESELNKIVSKIRLKRNGTSYTIDINYKQNELKRHVLFVENKKKEQTLISEVIIEDVDGAKFYYTPSFMIMLKDGEIRFQQTNDDLSIIDYSLLLNYIDAVDRNDAVGVWMRNQFNFLTSN

SEQ ID NO: 36302 - DNA, 50 bp, Klebsiella variicola
  source 1..50: mol_type = genomic DNA
atgttgtaataagcgatacacgctcaagtgtgttatgcttatacaaacaa

SEQ ID NO: 36303 - DNA, 40 bp, Klebsiella variicola; identical to SEQ ID NO: 20913
  source 1..40: mol_type = genomic DNA

SEQ ID NO: 36304 - DNA, 50 bp, Klebsiella variicola
  source 1..50: mol_type = genomic DNA
atgttgtaataagcgatacacgctagagtgtgttatgcttatacaaacaa

SEQ ID NO: 36305 - DNA, 40 bp, Klebsiella variicola
  source 1..40: mol_type = genomic DNA
cttgtgggaaataccaataagaaaatgtgcaattacaaca

SEQ ID NO: 36306 - protein, 620 aa, Streptococcus parasanguinis
MAGIRTENKIYEVGIYCRLSKDDGTDNESASIATQKSILTDYVKRQGWHLAKTYVDDGYSGTNFQRPSFQNMIKDIENGLINCVITKDLSRLGRNYLDCGLYLEVFFPEHNVRYIAVNDGVDTLNKSAMDITPFRNILNEMYSADVSVKIKSAYRARFQQGKFMGTTAPYGYVKDPADHNHLLIDDKVAHVVREIFDLALAGNGIAKIRKHINKQHILRPAAYAVEQGATGYERYFEDNEENRYIWSENSVRGILRSPIYAGNLAGYKRIAANMKSKKRPSKLPEEWEVIPDTHEGIVTQEEFDTVQQLMTSRRREQNAGGFENIFSGVIKCADCGYAMRAASANRRKRPDIIDCVQYTCNNYGRYGNVMCTAHSIEARDLFNAVLADINRFADMAVNDEKAVRAIERRLTETDQSRAKSLEKEKKKLNKRLAELDRLFSSLYEDKVMERITERNFEMMSGKYQKEQLEIEARLKEVTETLNDSYEKSQGVRDFLSLIRNYQGLKELDATIINALIDKILVSEREKLADGTVRQEIKIYYKFIGFVGELHITPTKRWTALKPKNCTVCGVEYVPSSGISKYCPACAKRIQREKSNESKRRSRERNRRACIELSAKNDRLM

SEQ ID NO: 36307 - DNA, 50 bp, Streptococcus parasanguinis; identical to SEQ ID NO: 11112
  source 1..50: mol_type = genomic DNA

SEQ ID NO: 36308 - DNA, 40 bp, Streptococcus parasanguinis
  source 1..40: mol_type = genomic DNA
ctggtcttctaacccaagggatgttggtcgctttggtcaa

SEQ ID NO: 36309 - DNA, 50 bp, Streptococcus parasanguinis
  source 1..50: mol_type = genomic DNA
actgtccgcaaaaaatgaccgactcttgtaggacggattttgcggacatt

SEQ ID NO: 36310 - DNA, 40 bp, Streptococcus parasanguinis
  source 1..40: mol_type = genomic DNA
tgggtcatctaacccacgtctactttgtgactttggtcaa

SEQ ID NO: 36311 - protein, 533 aa, Aeromonas caviae
MTKKCFPYVRFSSTRQEDGSTRTRQNGLIEAFVAKHGLEVDRHLEDAGTSAFHGKHAGSEGVLGQFLKEVRKGEIEKGSYLLIENFDRLSRDKIVRSNKIFTDLLFSGIKIVILDKNKVYDADNLDFGDWITALVEFERANAESQRKSDFSSKAWKLNRDKMHNGEIVTKKVPTWLKVENNTFIIDEVKIDRIRTLFRLSLSKGLQEATKEYNTLYGEKLAIHQAQYLLGNRKLIGEHQPQKIHYNENGRLIRKDEGNPIPDYYPQVIDEDLFLKVQSVITSRKPFSGRYSAQRYNVFRDLIFCRFCGGTIRYMNKGERDYFICTNSMTGKCGLKGQQSIRGKKVFSRFFKFTNGINIGTLLEENTNADEIKNELMKLENQKTKISNRLDDFKSQIKKMIMEGETIPETYNEIIVDLENSIIKYDDEIEIKNKELDKIISSFRSFYDLKGIDIEKIIYDKSQEAVEKRVQYNNELKNIIKKIQIDYLNDILHVEFSNCVIRHILNDELANEYNKDEIENSWASVVKSIAQKTN

SEQ ID NO: 36312 - DNA, 50 bp, Aeromonas caviae
  source 1..50: mol_type = genomic DNA
atggaaccttttgcagagcatatccagacatgctatgttattggttccac

SEQ ID NO: 36313 - DNA, 40 bp, Aeromonas caviae
  source 1..40: mol_type = genomic DNA
tctggcatagcagtagatgcagccatgctcgcacccctga

SEQ ID NO: 36314 - DNA, 50 bp, Aeromonas caviae
  source 1..50: mol_type = genomic DNA
atggaaccttttgcagagcatatcacgacatgctatgttattggttccac

SEQ ID NO: 36315 - DNA, 40 bp, Aeromonas caviae
  source 1..40: mol_type = genomic DNA
tgtaacattgcagtagataacgcaatgctcaaaatcctga

SEQ ID NO: 36316 - protein, 408 aa, Lysinibacillus boronitolerans
MNEIRRVAIYCRVSTEEQATEGYSISAQLQTLRQYAQLYGWEIAGEYVDEGISGKNITGRPAIQKLIADVENNKFQAVLVWKISRLSRNMLDTLTLLDLFEANDVKFISYSENFDTGTPIGRLVVQLMASIAEMERNTLSENVKLGMKQRAYEGYWNGGIVFGYDVVDKALVINEKEAFIVKLAFELYAEGKGLKAVANHLNKAGYRTKRGHHFSVNGVAQILDNIVYNGKISWAKVENWDSKRRKGKNPNSIIVEGKHEAIIPDDLWNIVQAKRKSRSFKQRQSNEPFLLSSLLRCPTCNQGMVPAITTWKSKDGTKKKYRYYVCSDFHNKGSSACHANSTKAYEAEAQLIERIEKFAHSEQQLFSKLQALNTTSIELLHSLSTELEDIKKTTARNTVASKPIFRCL

SEQ ID NO: 36317 - DNA, 50 bp, Lysinibacillus boronitolerans
  source 1..50: mol_type = genomic DNA
ttttgcctctatttatgatacggttcaccgtgacaatttaaaaggcaaaa

SEQ ID NO: 36318 - DNA, 40 bp, Lysinibacillus boronitolerans
  source 1..40: mol_type = genomic DNA
cacttacttatgataaggttctcccttcataatcctaaaa

SEQ ID NO: 36319 - DNA, 50 bp, Lysinibacillus boronitolerans
  source 1..50: mol_type = genomic DNA
ttttgcctctatttatgatacggtctaccgtgacaatttaaaaggcaaaa

SEQ ID NO: 36320 - DNA, 40 bp, Lysinibacillus boronitolerans
  source 1..40: mol_type = genomic DNA
aaattacttaaaataagttcttctcttcatattccccgaa

SEQ ID NO: 36321 - protein, 556 aa, Faecalibacterium prausnitzii
MAMMNEMEYRTIGSALAGGYRAAVYCRLSKDDDLQGESASIANQRDMLEKYCEKQGWEVVAVYQDDGFTGLNMERPDLQRMLRAIERRQINLVITKDLSRLGRNYLQTGHLIEDFFPRNGVRYIAMNDGIDTLRDNNDIAPFKNILNEMYSKDISKKVHSSYLLKAQKGQFTGCLAPFGYRKDPEDKNHLLIDEETAPIVRLIFGYALNGHGPNYIRRRLEEEKIPCPTWWNRERGLRNTRTKWEKKDPEKGRYMWDFSVIKDLLMNPVYTGAIASQKKDYRFKIGTIGEKKPEDWIVVEGQHEPLIDRMSFDIVQNKLKSRQRPGQTNEISLFAGLIKCGECGKSLTVRYTNAKHPQQIYSCKTYNAFGKNHCTQHRIDYDTLYSHVLRKIRECARAALMDGEAVADRLTNTCEAEQREQREAMERSLTRDEERIEILDKMVMRLYEDMIAGRISEQNFNTMLEKTQTEQTELKTKVSEGRKRLSDEVQLANDAKQWVEAIQEYANITELDAATLNRLIKEIVVHERIDEDKTRHISIEIHFNLKPIPEVEQVTA

SEQ ID NO: 36322 - DNA, 50 bp, Faecalibacterium prausnitzii; identical to SEQ ID NO: 10877
  source 1..50: mol_type = genomic DNA

SEQ ID NO: 36323 - DNA, 40 bp, Faecalibacterium prausnitzii
  source 1..40: mol_type = genomic DNA
caagagtcagggtataaagcagctcatggctggcggcggt

SEQ ID NO: 36324 - DNA, 50 bp, Faecalibacterium prausnitzii
  source 1..50: mol_type = genomic DNA
ttttacacctaattggggataaaatggttcatggctaattaaaggtaaca

SEQ ID NO: 36325 - DNA, 40 bp, Faecalibacterium prausnitzii
  source 1..40: mol_type = genomic DNA
aaagacctaatgtagaaagtggctcctggctgggcgcggt

SEQ ID NO: 36326 - protein, 548 aa, Phocea massiliensis
MLIKNAGADKIGVSNPVLADCPPMKGAETMLRQSGKITALYCRLSRDDELQGDSNSIVNQKAILSKYAKENHFSNTAFFVDDGYSGTNFNRPSWSELLERIENGEVATLIVKDMSRLGRDYLKVGFYTEVLFVEKGVRFIAINNGIDSANQQDSDFTPFLNIINEWYAKDTSKKIRAVMKSKGEAAEVVKRIFALCLDGYGPSQIARILKEDKVITPTIHFQQTGRATRNTSPDNLYDWDNKTVAGILERPEYQGHTVNFKTYKQSYKSKKTCYNPEEKWLVFENTHEAIIDADTWKRVQELRKNKRRPTRTGKTNMFSGIVRCADCGEKLYYCTSKNFEARQDHFVCSTSRLKGKEVCSTHFIRAVVLEQGVLAHMRLTIACVANHEEQFRKAMGAKQKAEAKKELAAKRRQLTQAERRIEELDRLFKRIYEDNANGKLSDNRFQMLSDDYEQEQEELRKKLLRLNEEINEQEEQAENIDRFISKVQKYLDLDKLTPSVLNDMVKAVYVHAPDKSKGHREQQIDISYDLVGILPASLLNDLQNGETA

SEQ ID NO: 36327 - DNA, 50 bp, Phocea massiliensis
  source 1..50: mol_type = genomic DNA
atactgtcttatgagtgccgcccttttggtagctactcataaaacagtat

SEQ ID NO: 36328 - DNA, 40 bp, Phocea massiliensis
  source 1..40: mol_type = genomic DNA
tttaaaaatgagctgcgccttgacgcagctctttttcctt

SEQ ID NO: 36329 - DNA, 50 bp, Phocea massiliensis; identical to SEQ ID NO: 36327
  source 1..50: mol_type = genomic DNA

SEQ ID NO: 36330 - DNA, 40 bp, Phocea massiliensis
  source 1..40: mol_type = genomic DNA
tttagaagtgaccggcgccttgtcgcagccatacttactt

SEQ ID NO: 36331 - protein, 486 aa, Mycobacteroides chelonae
MPREIQRQIRAGCYLRISSDPRDRREGVDRQREDTQALCEVKGWEAARYYVDNDRSASNGKDRPEWDRLLADIKTGDIDAIAAWDQDRGWRMMSELEELRRFFNSLGKRRVQFATTGQGDIDLYSPTGVLAVQIKTAVSEHEIAMMKVRMLRAARQKAEQGKPKWRKAFGYLPEARPKHADDGRREVDPVTAPLVRQAYATVLAGGSLMDITRDWNTREVYGLNGQPWTAATLSLFLRAPRNAGLRAHNGEIVGPGTWEPLVDESTWRAVQAVMNAPGRAPGRKSVRKHLLTGVMLCGKCVRELGSRLSGRWAMQSGGTGPRAHSIVYACNICRGCSIRAEHVEPMLYQLVSGRLARPDAVDLLKAEQHDAAEAEALRSERMTLLARLDEIADDRADGHLDGPQARRASERIRAKLDDIERRQQDGERVRVFDGIPLGKPEVASAVDKLSADRFRAVLDVLCVITVLPVGKGGKAFKPERVQVDWR

SEQ ID NO: 36332 - DNA, 50 bp, Mycobacteroides chelonae
  source 1..50: mol_type = genomic DNA
aagagttttttccgcagtcgatagtgttattgactgcgcgaagtacacta

SEQ ID NO: 36333 - DNA, 40 bp, Mycobacteroides chelonae; identical to SEQ ID NO: 26633
  source 1..40: mol_type = genomic DNA

SEQ ID NO: 36334 - DNA, 50 bp, Mycobacteroides chelonae
  source 1..50: mol_type = genomic DNA
aagagttttttccgcagtcgatagggttattgactgcgcgaagtacacta

SEQ ID NO: 36335 - DNA, 40 bp, Mycobacteroides chelonae
  source 1..40: mol_type = genomic DNA
gaagccttccaggggttgtggtttgcagctcaaggccttc

SEQ ID NO: 36336 - protein, 485 aa, Mycobacteroides chelonae
MVGGTQQLVRAGCYLRISSDPRDRREGVDRQREDTSALCEVKGWEAARYYIDNDRSASNGKDRPEWDRLLADIESGDIDAIAAWDQDRGWRMMSELEELRRFFKSLGRRVQFATTGQGDIDLYSPTGVLAVQIKTAVSEHEIAMMKVRMLRAARHKAEQGKPKWRKAFGYLPETRAKHEDDGRRELDPVTAPLVQQAYAAILAGGSLMDITRDWNAREVYGLNGQPWTAATLSLFLRAPRNAGLRAHNGEIVGPGTWEPLVDEATWRAAQAVMNAPGRAPGRKSVRKHLLTGVMSCGKCIRELDSRLAGRWAMQAHGAGPRAHSIVYACKTCRGCSIRAEHVEPLLYQLISARLARPDAVDLLKAEQHDAAEAEALRLERMTLLARLDEVADERADGLIDGRGYRRATERIQAKLDDIERRQQDGERLRVFDGIPLGKPEVTDAVEKLSADRFRAVLDVLCVITVLPVGKGGKAFKPERVQIDWR

SEQ ID NO: 36337 - DNA, 50 bp, Mycobacteroides chelonae
  source 1..50: mol_type = genomic DNA
aagagtattttccgcagtcgataatgttattgactgcgcaaagtacacta

SEQ ID NO: 36338 - DNA, 40 bp, Mycobacteroides chelonae; identical to SEQ ID NO: 26633
  source 1..40: mol_type = genomic DNA

SEQ ID NO: 36339 - DNA, 50 bp, Mycobacteroides chelonae
  source 1..50: mol_type = genomic DNA
aagagtattttccgcagtcgataaggttattgactgcgcaaagtacacta

SEQ ID NO: 36340 - DNA, 40 bp, Mycobacteroides chelonae; identical to SEQ ID NO: 36335
  source 1..40: mol_type = genomic DNA

SEQ ID NO: 36341 - protein, 485 aa, Mycobacteroides abscessus
MAGGTQQRVRAGCYLRISSDPRDRREGVDRQREDTSALCEVKGWEAARYYIDNDRSASNGKDRPEWDRLLADIESGDIDAIAAWDQDRGWRMMSELEELRRFFKSLGRRVQFATTGQGDIDLYSPTGVLAVQIKTAVSEHEIAMMKVRMLRAARHKAEQGRPKWRTAFGYLPETRPKHEDDGRRELDPVTAPLVQQAYAAVLAGGSLMDITRDWNAREVYGLNGQPWTAATLSLFLRAPRNAGLRTHNREIVGPGTWEPLVDESTWRAAQAVMNAPGRAPGRKSVRKHLLTGVMLCGKCVRELDSRLSGRWAMQAHGTGPRAHSIVYACNTCRGCSIRAEHVEPLLYQLISARLARPDAVDLLKAEQHDAAEAEALRLERMTLLARLDEVADERADGLIDGRGYQRATERIQAKLDGIERRQQDGERIRVFDGIPLGKPEVADAVKKLSADRFRAVLDVLCVITVQSVGKGGKAFRPDRVQVDWR

SEQ ID NO: 36342 - DNA, 50 bp, Mycobacteroides abscessus
  source 1..50: mol_type = genomic DNA
aagagtagtttccgcagtcgatagtgttattgactgcgcgaagtacacta

SEQ ID NO: 36343 - DNA, 40 bp, Mycobacteroides abscessus
  source 1..40: mol_type = genomic DNA
gaaggtcttcaggagatgatgcttgcggcacaaggccttc

SEQ ID NO: 36344 - DNA, 50 bp, Mycobacteroides abscessus
  source 1..50: mol_type = genomic DNA
aagagtagtttccgcagtcgatagggttattgactgcgcgaagtacacta

SEQ ID NO: 36345 - DNA, 40 bp, Mycobacteroides abscessus; identical to SEQ ID NO: 36335
  source 1..40: mol_type = genomic DNA

SEQ ID NO: 36346 - protein, 526 aa, Paraclostridium bifermentans
MKIAIYSRKSVFTGKGESIENQIQLCSDYAKSHFGASQSDIFVYEDEGFSGKNLDRPEFQKLLSDAKNKKFDILICYRLDRVSRNIADFSSLIEDLQKYNISFVSIREQFDTSTPMGRAMMFIASVFAQLERETIAERVRDNMLELAKSGRWLGGTAPLGFNSENISYIDDELKERKMSKLIPNKEELEIIQLIYRKYLELGSITQVVAFMYTTNFTGKRNKEFSASTISKILRNPIYVKSDESVLNYLKNKGINVSGDPNGCGILTYNKKSKGVKQDKSEWIAAVCNSKGIINGNDWLLVQQLLDKNKDNTKSLRLGTSKKGLLTGIIRCSKCGSPMRVTYGRNYHYYTCTKKVNSKGVACDNKNVKGPDIEKVIIESIMDIDTNMLLSNLNDGESSTSSREKEITDIQSKIKSKKIQLNSLFERMVDFDDELSDLFKEKINELGKEIKELNKKYSDLVNEVDNNKRDFRNVELVINAVNEFKSYFDCIEDFNKRKFMLGVIVDKINWDGEKQEVDIEFWGSKKK

SEQ ID NO: 36347 - DNA, 50 bp, Paraclostridium bifermentans; identical to SEQ ID NO: 12587
  source 1..50: mol_type = genomic DNA

SEQ ID NO: 36348 - DNA, 40 bp, Paraclostridium bifermentans
  source 1..40: mol_type = genomic DNA
tggtgccattagttttgcatgacctgtatctattagaatt

SEQ ID NO: 36349 - DNA, 50 bp, Paraclostridium bifermentans
  source 1..50: mol_type = genomic DNA
tgtcgcaatacatacaatcatgcaacacctcggttgttagtattgcaact

SEQ ID NO: 36350 - DNA, 40 bp, Paraclostridium bifermentans
  source 1..40: mol_type = genomic DNA
tggttctatttgttttgtaacaactctttctgttacaatg

SEQ ID NO: 36351 - protein, 526 aa, Paraclostridium bifermentans
MKIAIYSRKSVFTGKGESIENQIQLCSDYAKSHFGASQSDIFVYEDEGFSGKNLDRPEFQKLLSDAKNKKFDILICYRLDRVSRNIADFSSLIEDLQKYNISFVSIREQFDTSTPMGRAMMFIASVFAQLERETIAERVRDNMLELAKSGRWLGGTAPLGFNSENISYIDDELKERKMSKLIPNKEELEIIQLIYRKYLELGSITQVVAFMYTTNFTGKRNKEFSASTISKILRNPIYVKSDESVLNYLKNKGINVSGDPNGCGILTYNKKSKGVKQDKSEWIAAVCNSKGIINGNDWLLVQQLLDKNKDNTKSLRLGTSKKGLLTGIIRCSKCGSPMRVTYGRNYHYYTCTKKVNSKGVACDNKNVKGPDIEKVIIESIMDIDTNMLLSNLNDGESSASSREKDITDIQAKIKSKKIQLNSLFERMVDFDDELSDLFKEKINDLGKEIKELNKKYSDLVNEVDSNKRDFRNVELVINAVNEFKSYFDCIEDFHKRKFMLGVIVDKINWDGEKQEVDIEFWGSKKK

SEQ ID NO: 36352 - DNA, 50 bp, Paraclostridium bifermentans
  source 1..50: mol_type = genomic DNA
tatcgcaatacatacaatcatgcatgacctcggttgttagtattgcaact

SEQ ID NO: 36353 - DNA, 40 bp, Paraclostridium bifermentans; identical to SEQ ID NO: 36348
  source 1..40: mol_type = genomic DNA

SEQ ID NO: 36354 - DNA, 50 bp, Paraclostridium bifermentans
  source 1..50: mol_type = genomic DNA
tatcgcaatacatacaatcatgcaacacctcggttgttagtattgcaact

SEQ ID NO: 36355 - DNA, 40 bp, Paraclostridium bifermentans; identical to SEQ ID NO: 36350
  source 1..40: mol_type = genomic DNA

SEQ ID NO: 36356 - protein, 520 aa, Blautia obeum
MSDQKLLIGYYRLSREDDNAGDSNSIINQRKLVKDYISHMSDLEEMSFQEFYDDGYSGSSMDRPGIKKVLALARENKVQCIIVKDFSRFARNYIEMGTYLEQIFPFLGVRFISISDHYDSRDYRGKSTDIDVQFKGLVADFYVKDQSVKLKSAFSTRRSKGEYCCGVAPYGYERNPENKKNLLIVEEEAKVVRRIFDLTIQRYSKMEICRILNEEKVPTPYQAISKRLNWKINEKSSRGMQWVNDSIRKILDDKTYIGCMVYGKTWIPDPGTGKEEHVPRDQWKVIEDHHKPIVSKEVFEKVQSMQIRHVSKSRYDRTSTVLTGYVKCGECKNRLTGSKEERGHVYYSCAYSRGKKDTGCFAGKVDNKILEQILLEKIKIYLQQNINQEQMQQAMKKQHEDNIAAYKEEYRDCQKKQDQMKNKSIQNYEAYRAGEITREQFGAAKKQLEEEKDILRKRIQEVEELIHNEKEILVKRNIPVEQMIEFMGYDKLTREMLEEYVEEILVYDDGKMEIKWKELK

SEQ ID NO: 36357 - DNA, 50 bp, Blautia obeum
  source 1..50: mol_type = genomic DNA
tgtagtctttacttgacatcctcgggggaggacgttataataaggctaca

SEQ ID NO: 36358 - DNA, 40 bp, Blautia obeum
  source 1..40: mol_type = genomic DNA
caacccggactggggatatggcagagtagacttgtatcat

SEQ ID NO: 36359 - DNA, 50 bp, Blautia obeum
  source 1..50: mol_type = genomic DNA
tgtagtctttacttgacatcctcgcaggaggacgttataataaggctaca

SEQ ID NO: 36360 - DNA, 40 bp, Blautia obeum
  source 1..40: mol_type = genomic DNA
caacttgggatggtgatatcacactgttttcttgtatcat

SEQ ID NO: 36361 - protein, 508 aa, Clostridium beijerinckii
MKRIAIYSRKSKETDKGESIMTQIKMCKDYFLRYDEESTFEVFEDEGFSGKNTDRPAFKRMMMLASHKKFDIVACYKVDRIARNIIDFMNTFDILRKNDVSLVSITEGFDPNTPVGMMMMTLIAGFAEMERMNIAQRIKDNMKSLAELGRWSGGTPPTGYKSIQLESGNKIITYLELLPEWKEKIKLSFETLANGHTIRQSANILNMPVKTVANIINNPTYCKSDELSANYLKTLGYEVYGELNGNGYIPYNRRPRTKNGKKEFNAKGMFVAVSKHEAIVDSDLWIAANEQIKQRGAEARPRISQNSFLAHLVKCSCGSGMYLEPGKTRKDGTRTYYFRCSRQRYDKTLCNTGWVNATYLEEDILESLNVWALDKSELESYVNKRPSGDITKNIKKIKKAIDKNNSDLHKLTEKLILLEGSAIDAVTNKMNEISRDNEKLNESLLLLERKNLTNDVDALNIEILQNKIKEIVSTWSELTIDDKQLLVKAVIKNIVWDGGKVFTIQPNL

SEQ ID NO: 36362 - DNA, 50 bp, Clostridium beijerinckii
  source 1..50: mol_type = genomic DNA
tgacggtatttaaactgggttgcacatccagaccatcataaataccagta

SEQ ID NO: 36363 - DNA, 40 bp, Clostridium beijerinckii
  source 1..40: mol_type = genomic DNA
acttgaaattgctgctgcgcatccagaccaacctccgcca

SEQ ID NO: 36364 - DNA, 50 bp, Clostridium beijerinckii
  source 1..50: mol_type = genomic DNA
tgacggtatttaaactgggttgcaaatccagaccatcataaataccagta

SEQ ID NO: 36365 - DNA, 40 bp, Clostridium beijerinckii
  source 1..40: mol_type = genomic DNA
acttgctatttcttctccaaatgcagaccttcctccgcaa

SEQ ID NO: 36366 - protein, 507 aa, Alkalihalobacillus hwajinpoensis
MNSELIKYVAIYLRKSRGDLEKDLTKHKQMLTEIAEEKGWQYKLYYEIGSADNIQFRPKMQELLLDITNKLFDAVLVMDFDRLGRGEKVDQANIESTFRESNTLLITPHKVFDLHNETDAMLSDVQGMLSRFEYIQIKKRLNQGKKIGAKFGNWTNGTPPFPYYYDHQSKSLKVDETKRIIFDELKQRVLEGIPLHTIAVQFNRKGYRTNRSKLWTDVALHRLLTNEVHLGKIIYGKTSGSGHINKKTSRLMKRPRENWIIANDSHEPVLSLEEFSEIQSIFCKNKLLPKRARSAVYPLTGLIKCGKCGSSMNFTKKNAKDGVAVYIKKCQKPDWMGNRCGNRGIKEEVILSELRGELERYYNELSIISKSNQKSKGNDLLEILNKKVEKQKRSEKALARTRELYELGEYSRTVFTDRSNKWQMEINNLKNEINQLNIALYSVNELNNNELSSIILSLINFISHRGSSITNLTQSKVNGFNKDLRKIIKSIDYLREEDHQIKVHFSI

SEQ ID NO: 36367 - DNA, 50 bp, Alkalihalobacillus hwajinpoensis
  source 1..50: mol_type = genomic DNA
tagtggaattaatctacatgtcattggtgtcatgtaggttaattccacct

SEQ ID NO: 36368 - DNA, 40 bp, Alkalihalobacillus hwajinpoensis
  source 1..40: mol_type = genomic DNA
cggatattcgacttgccattggtgtcatgtaatggaaaga

SEQ ID NO: 36369 - DNA, 50 bp, Alkalihalobacillus hwajinpoensis
  source 1..50: mol_type = genomic DNA
tagtggaattaatctacatgtcatctgtgtcatgtaggttaattccacct

SEQ ID NO: 36370 - DNA, 40 bp, Alkalihalobacillus hwajinpoensis
  source 1..40: mol_type = genomic DNA
ctgatgtttgccttgaaatctttgtcatataatgctaaga

SEQ ID NO: 36371 - protein, 567 aa, Streptococcus periodonticum
MNRTLTISDYRQVDTSKLSDITVVYCRLSQDDGLDGDSNSIINQKKILLDVVARENLPNPILFVDDGFSGTNFDRPAISEALRLVENRQVSNFIVKDLSRLGRSYIKVGQLTEITFPSFDVRFIALNDGVDSNKPNETNSIFLPIKSLMDEMYAADTSKKIRAVVQSKARAGERVTVNPPYGYLKDPNNPKNWIIDPVASEVVKRIFKEAKSGKSLSEISKGLENDKVFKPDRHRIEIGLKPISASSNVETLPYFWTRETLSAILGREEYLGHTVNLRTRKKSYKDKRKVDNPKEDWLIFKNTHEAIIDQETFDIVQKMRSHKRSNQRYKNRAGHENLFAGLVFCGTCGRKHYFCPQEKNGLNHDHYKCSGYRKPINGCENPHYIQKSALIEIVSDKLRQTIHECQLDQEAFLKKLEQQNRAQFSKDNKRQQLQLQKDEHRSKEIDNIIQKLYEDNLLGKISDERFVKLSQSYEEEQHQLQTSISDLTEKLTKQQEDSLNISKFMARISKYTELPKLTVEIVNELIDKIVIHKPTGTKRNRIIQIDIYYNFIGKLNNEKSEPNELAR

SEQ ID NO: 36372 - DNA, 50 bp, Streptococcus periodonticum
  source 1..50: mol_type = genomic DNA
aaactgctatgtgtcaggtcagccaaaggaagtatgacatttagcagttt

SEQ ID NO: 36373 - DNA, 40 bp, Streptococcus periodonticum
  source 1..40: mol_type = genomic DNA
tataagaaaagggcacgggaaagcgtgcctttttctataa

SEQ ID NO: 36374 - DNA, 50 bp, Streptococcus periodonticum
  source 1..50: mol_type = genomic DNA
aaactgctatgtgtcaggtcagccgaaggaagtatgacatttagcagttt

SEQ ID NO: 36375 - DNA, 40 bp, Streptococcus periodonticum
  source 1..40: mol_type = genomic DNA
gaaaagaaaagggcagggggatgcgtacccatttcttaat

SEQ ID NO: 36376 - protein, 568 aa, Streptomyces chartreusis
MAASPQVRAGRYPTRSYTPMNSQLRGVSALRLSVLTDETTSPERQREANQGAAASLGIDLADREAVDLGVSASKTTPFERPGLGAWLRRPADFDALVFWRFDRAVRSMDDMHELAKWARDHRKLIVFAEGPGGRLDLDFRNPMNPMTTLMVTLFAFAAQMEAQAIRERVTGAQAAMRLMPLRWRGSRPPYGYMPAPLEGGGVTLIQDPDAVKVLERIIKELKGDPFNGVAPKGTAAIARDLNADGIPSSRDHWSLKQGRKTGGKTGGNPGETVVREQFKWTHGSIKELLTSERLLGWKVTEKGVVRDSEGRPVMATADPILTREEFDAVGAILNERSVDNKKPDRVDTVALLLRVIHCAGCGERMYLHQPSPNSKSTSKTHTYKCSAHNQGRTCETRAIIKREWAEEYAEREFLRMLGALEVTQTRTIPGYDPQPEIDATIAEFEAHQEQQGRQKSAAAKAAWQRHAAALDSRLAELETREKVEPRIEETRTGKNYADLWAKADTAGRRQLMQGAGARLDVSRGKRGRQFKLDEGRVDFSVRDPFFSEAAAELTAMADEERTAEAAWL

SEQ ID NO: 36377 - DNA, 50 bp, Streptomyces chartreusis
  source 1..50: mol_type = genomic DNA
aactggaagtcacgaccctttgggtttccagagggtctccgactagcagt

SEQ ID NO: 36378 - DNA, 40 bp, Streptomyces chartreusis
  source 1..40: mol_type = genomic DNA
agccgggtgaccgtaggggttgtccgcccccgcggagatc

SEQ ID NO: 36379 - DNA, 50 bp, Streptomyces chartreusis
  source 1..50: mol_type = genomic DNA
aactggaagtcacgaccctttgggcatccagagggtctccgactagcagt

SEQ ID NO: 36380 - DNA, 40 bp, Streptomyces chartreusis
  source 1..40: mol_type = genomic DNA
aggcggaaggccggaggggcagtccgccgcgggggcgagc

SEQ ID NO: 36381 - protein, 503 aa, Clostridium innocuum
MNNRIDAIYARQSVDKKDSISIESQIEFCKYELKGGNCKEYTDKGYSGKNTDRPKFQELVRDIKRGLIAKVVVYKLDRISRSILDFANMMELFQQYNVEFVSSTEKFDTSTPMGRAMLNICIVFAQLERETIQKRVTDAYYSRSQRGFKMGGKAPYGFHTEPIKMDGINTKKLVVNPDEAANIRLMFEMYAQPTTSYGDITRYFAEQGILFHGKELIRPTLAQMLRNPVYVQADLDVYEFFKSQGTVIVNDAADFTGMNGCYLYQGRDVKPSKKNDLKDQMLVLAPHEGIVPSDIWLTCRKKLMNNMKIQSARKATHTWLAGKIKCGNCGYALMSINNPVGKQYLRCTKRLDNKSCAGCGKIITSELETVVYQQMIKKLASYKTLTGRKKAAKANPKIAALQVDLAHVDSEIEKLVDSLTGANNVLLSYVNVKIAELDGRKQDLLARIAELTVEAISPEQVSQISGYLDTWENVSFDDKRRVVDLMITTVAATSDSLNITWKI

SEQ ID NO: 36382 - DNA, 50 bp, Clostridium innocuum; identical to SEQ ID NO: 12
  source 1..50: mol_type = genomic DNA

SEQ ID NO: 36383 - DNA, 40 bp, Clostridium innocuum
  source 1..40: mol_type = genomic DNA
ccacagtttataaaactctttcctgttgataaagcttatt

SEQ ID NO: 36384 - DNA, 50 bp, Clostridium innocuum
  source 1..50: mol_type = genomic DNA
gtgtagtcccttgtaaactgtactccaggtcagtttacaaggaactacac

SEQ ID NO: 36385 - DNA, 40 bp, Clostridium innocuum
  source 1..40: mol_type = genomic DNA
tcacattttctacaactctcccctcttcatcaaagttagt

SEQ ID NO: 36386 - protein, 482 aa, Catenulispora pinisilvae
MGKSEFEGESAAIYCRISHIKDDDQTGVERQERICRDMAARYGLRVSPEHVFIDPSRSAWQRNRKRPGWDKMLEAMDAGAFRHVLAYHPDRLMRQPPDLEQLLIKAEERNVILHGQANRRDLSNADDRFFLRIEVAHACKSSDDTSRRVKSAQEDALAAGKAHGGRRTYGYTKDSTAIVPEEKEIVQEIFRRFLDGDAIWAIFQDLHKRQVPSAGGGLWTVGRVRATLDLPKHAGLITFQGEVQKDANGDYRTGAWPAIVSVGEWEEVHRLRQQRSADYADARRSFRKYLLTGLVICTNCTRSMVGEKVGGVRGVPYYRCTRKTSSMPEACTRKIKAVELEEFVKDAAKDFLTSLSPSDLVAPSVTMDPVDAEQAEADDKVKLAEIREMWDAKEITTAEMREMQAKIKARMAARNKATVIRPLTALEGIVIGEGAAESFDGLTEDRQAAALRFLFPAVRIKASSVRGVVDFGRVDIDPPQLH

SEQ ID NO: 36387 - DNA, 50 bp, Catenulispora pinisilvae
  source 1..50: mol_type = genomic DNA
atggtgtgcgaacaaatattcggcacgctcaaaggttgtttgcccaccat

SEQ ID NO: 36388 - DNA, 40 bp, Catenulispora pinisilvae
  source 1..40: mol_type = genomic DNA
actggggtgctccacgggcaccgtaaagagccagacggcg

SEQ ID NO: 36389 - DNA, 50 bp, Catenulispora pinisilvae
  source 1..50: mol_type = genomic DNA
atggtgtgcgaacaaatattcggcttgctcaaaggttgtttgcccaccat

SEQ ID NO: 36390 - DNA, 40 bp, Catenulispora pinisilvae
  source 1..40: mol_type = genomic DNA
gctgggttcctctacggacttcctaaagagcaaggctgtg

SEQ ID NO: 36391 - protein, 551 aa, Clostridium butyricum
MNKKSAIYVRVSTSHQIDKDSLPLQRKDLINYSKLILGINDYVIFEDAGYSGKNTDRPAFKDMFNRIKEGEFSHLLVWKIDRISRNLLDFCSMYDELKKYNCTFISKNEQFDTSSAMGEAMLKIILVFAELERKLTGERVAATMLDRATKGLWNGAPIPLGYKWDKTIKFPIIDDEEKLTVESIYNKYIETESTSAVMKYLNQENIKTKRNGSWTTKTVGDILRNPFYKGTYRYNFRESARGKKKKENEWIVLDNNHDPIIALDLWTKCNNILDENAKKNSARFRAKSKTHIFAGLLECGECHKSFYSKSDKTSLDGYTPSIYTCSSRYNHLGCNQKTISDTIIGNFTLNFISNMIKLSKTYKKLSPEDIEKNLLSGPSFNDVKGIIEIDDIFNSFYNTSSKIFKPNKQETKPANVDLNKLDADLKKQHRALERLENLYLYAEDEMSEKDYILKKNIINTKIKEIDTKIKSSATISTSTYNINFFLNTATLELSKEIIEGNINMKSLIQRAGRDIIKEFVNSLITKITVRDRKIISIQFTNGLISTFIYEV

SEQ ID NO: 36392 - DNA, 50 bp, Clostridium butyricum
  source 1..50: mol_type = genomic DNA
ttcttcttttcttctactaacgcacatccgaatgtagaaataaagaagaa

SEQ ID NO: 36393 - DNA, 40 bp, Clostridium butyricum
  source 1..40: mol_type = genomic DNA
atcttcttcattcatctgacatccgaatgtttgaataaag

SEQ ID NO: 36394 - DNA, 50 bp, Clostridium butyricum
  source 1..50: mol_type = genomic DNA
ttcttcttttcttctactaacgcatgtccgaatgtagaaataaagaagaa

SEQ ID NO: 36395 - DNA, 40 bp, Clostridium butyricum
  source 1..40: mol_type = genomic DNA
agcttcttcatgcagctgatgcgcaaagttttgcatagag

SEQ ID NO: 36396 - protein, 551 aa, Clostridium butyricum
MNKKSAIYVRVSTSHQIDKDSLPLQRKDLINYSKLILGINDYVIFEDAGYSGKNTDRPAFKDMFNRIKEGEFSHLLVWKIDRISRNLLDFCSMYDELKKYNCTFISKNEQFDTSSAMGEAMLKIILVFAELERKLTGERVAATMLDRATKGLWNGAPIPLGYKWDKAIKFPVIDDEERLTVELIYDKYIETESTSAVMKYLNQENIKTKRNGSWTTKTVGDILRNPFYKGTYRYNFRESARGKKKKENEWIVLDNNHDPIIALDLWTKCNNILDENAKKNSARFRAKSKTHIFAGLLECGECHKSFYSKSDKTSLDGYTPSIYTCSSRYNHLGCNQKTISDTIIGNFTLNFISNMIKLSKTYKKLSPEDIEKNLLSGSSFNDVKGIIEIDDLFNSFYNTSSKIFKPNKQETKPANVDLNKLDADLKKQHRALERLENLYLYAEDEMSEKDYILKKNIINTKIKEIDTKIKSSATISTSTYNINFFLNTATLELSKEIIEGNINMKSLIQRVGRDIIKEFVNSLITKITVRDRKVISIQFTNGLISTFIYEV

SEQ ID NO: 36397 - DNA, 50 bp, Clostridium butyricum; identical to SEQ ID NO: 36392
  source 1..50: mol_type = genomic DNA

SEQ ID NO: 36398 - DNA, 40 bp, Clostridium butyricum; identical to SEQ ID NO: 36393
  source 1..40: mol_type = genomic DNA

SEQ ID NO: 36399 - DNA, 50 bp, Clostridium butyricum; identical to SEQ ID NO: 36394
  source 1..50: mol_type = genomic DNA

SEQ ID NO: 36400 - DNA, 40 bp, Clostridium butyricum; identical to SEQ ID NO: 36395
  source 1..40: mol_type = genomic DNA

SEQ ID NO: 36401 - protein, 551 aa, Clostridium butyricum
MNKKSAIYVRVSTSHQIDKDSLPLQRKDLINYSKLILGIDNYVVFEDAGYSGKNTDRPAFKDMFNRIKEGEFSHLLVWKIDRISRNLLDFCSMYDELKKYNCTFISKNEQFDTSSAMGEAMLKIILVFAELERKLTGERVAATMLDRATKGLWNGAPIPLGYKWDKAIKFPVIDNEERLTVELIYNKYIETESTSAVVKYLNQHNIRTKRDGSWTTKTVGDILRNPFYKGTYRYNFRESARGKKKKENEWIVLDNNHDPIIDLDLWTKCNNILDENAKKNSARFRAKSKTHIFAGLLECGECHKSFYSKSDKTSLDGYTPSIYTCSSRYNHLGCNQKTISDTIIGNFTLNFISNMIKLYKTYKKLSPEDIEKKLLLGSSFNDVKGIIEIDDIFNSFYNTSSKIFKPNKQETKPANVDLNKLDADLKKQHRALERLENLYLYAEDEMSEKDYILKKNIINTKIKEIDTKIKSSATISTSTYNINFFLNTATLELSKEIIEGNINMKSLIQRVGRDIIKEFVNSLITKITVRDRKVISIQFTNGLISTFIYEV

SEQ ID NO: 36402 - DNA, 50 bp, Clostridium butyricum; identical to SEQ ID NO: 36392
  source 1..50: mol_type = genomic DNA

SEQ ID NO: 36403 - DNA, 40 bp, Clostridium butyricum; identical to SEQ ID NO: 36393
  source 1..40: mol_type = genomic DNA

SEQ ID NO: 36404 - DNA, 50 bp, Clostridium butyricum; identical to SEQ ID NO: 36394
  source 1..50: mol_type = genomic DNA

SEQ ID NO: 36405 - DNA, 40 bp, Clostridium butyricum; identical to SEQ ID NO: 36395
  source 1..40: mol_type = genomic DNA

SEQ ID NO: 36406 - protein, 551 aa, Clostridium butyricum
MNKKSAIYVRVSTSHQIDKDSLPLQRKDLINYSKLILGINDYVIFEDAGYSGKNTDRPAFKDMFNRIKEGEFSHLLVWKIDRISRNLLDFCSMYDELKKYNCTFISKNEQFDTSSAMGEAMLKIILVFAELERKLTGERVAATMLDRATKGLWNGAPIPLGYKWDKTIKFPIIDDEERLTVESIYNKYIETESTSAVMKYLNQENIKTKRNGSWTTKTVGDILRNPFYKGTYRYNFRESARGKKKKENEWIVLDNNHDPIIALDLWTKCNNILDENAKKNSARFRAKSKTHIFAGLLECGECHKSFYSKSDKTSLDGYTPSIYTCSSRYNHLGCNQKTISDTIIGNFTLNFISNMIKLSKTYKKLSPEDIEKNLLSGSSFNDVKGIIEIDDIFNSFYNTSSKIFKPNKQETKPANVDLNKLDADLKKQHRALERLENLYLYAEDEMSEKDYILKKNIINTKIKEIDTKIKSSATISTSTYNINFFLNTATLELSKEIIEGNINMKSLIQRVGRDIIKEFVNSLITKITVRDRKVISIQFTNGLISTFIYEV

SEQ ID NO: 36407 - DNA, 50 bp, Clostridium butyricum; identical to SEQ ID NO: 36392
  source 1..50: mol_type = genomic DNA

SEQ ID NO: 36408 - DNA, 40 bp, Clostridium butyricum; identical to SEQ ID NO: 36393
  source 1..40: mol_type = genomic DNA

SEQ ID NO: 36409 - DNA, 50 bp, Clostridium butyricum; identical to SEQ ID NO: 36394
  source 1..50: mol_type = genomic DNA

SEQ ID NO: 36410 - DNA, 40 bp, Clostridium butyricum; identical to SEQ ID NO: 36395
  source 1..40: mol_type = genomic DNA

SEQ ID NO: 36411 - protein, 551 aa, Clostridium butyricum
MNKKSAIYVRVSTSHQIDKDSLPLQRKDLINYSKLILGIDNYVVFEDAGYSGKNTDRPAFKDMFNRIKEGEFSHLLVWKIDRISRNLLDFCSMYDELKKYNCTFISKNEQFDTSSAMGEAMLKIILVFAELERKLTGERVAATMLDRATKGLWNGAPIPLGYKWDKIIKFPVIDDEERLTVELIYNKYIETESTSAVVKYLNQHNIRTKRDGNWSTKTVGDILRNPFYKGTYRYNFRESARGKKKKENEWIVLDNNHDPIIALDLWTKCNNILDENAKKNSARFRAKSKTHIFAGLLECGECHKSFYSKSDKTSLDGYTPSIYTCSSRYNHLGCNQKTISDTIIGNFTLNFISNMIKLSKTYKKLSPEDIEKNLLSGSSFNDVKGIIEIDDIFNSFYNTSSKIFKPNKQETKPANIDLNKLDADLKKQHRALERLENLYLYDEKEMSEKDYILKKNIINTKIKEIDAKIKSSATISTSTYNINFFLNTATLELSKEIIEGNINMKSLIQRVGRDIIKEFVNSLITKITVRDRKVISIQFTNGLISTFIYEV

SEQ ID NO: 36412 - DNA, 50 bp, Clostridium butyricum; identical to SEQ ID NO: 36392
  source 1..50: mol_type = genomic DNA

SEQ ID NO: 36413 - DNA, 40 bp, Clostridium butyricum; identical to SEQ ID NO: 36393
  source 1..40: mol_type = genomic DNA

SEQ ID NO: 36414 - DNA, 50 bp, Clostridium butyricum; identical to SEQ ID NO: 36394
  source 1..50: mol_type = genomic DNA

SEQ ID NO: 36415 - DNA, 40 bp, Clostridium butyricum; identical to SEQ ID NO: 36395
  source 1..40: mol_type = genomic DNA

SEQ ID NO: 36416 - protein, 551 aa, Clostridium butyricum
MNKKSAIYVRVSTSHQIDKDSLPLQRKDLINYSKLILGINDYVIFEDAGYSGKNTDRPAFKDMFNRIKEGEFSHLLVWKIDRISRNLLDFCSMYDELKKYNCTFISKNEQFDTSSAMGEAMLKIILVFAELERKLTGERVAATMLDRATKGLWNGAPIPLGYKWDKAIKFPVIDDEERLTVELIYDKYIETESTSAVMKYLNQENIKTKRNGSWTTKTVGDILRNPFYKGTYRYNFRESARGKKKKENEWIVLDNNHDPIIDLDLWTKCNNILDENAKKNSARFRAKSKTHIFAGLLECGECHKSFYSKSDKTSLDGYTPSIYTCSSRYNHLGCNQKTISDTIIGNFTLNFISNMIKLSKTYKKLSPEDIEKKLLLGSSFNDVKGIIEIDDIFNSFYNTSSKIFKPNKQETKPANVDLNKLDADLKKQHRALERLENLYLYAEDEMSEKDYILKKNIINTKIKEIDTKIKSSATISTSTYNINFFLNTATLELSKEIIEGNINMKSLIQRVGRDIIKEFVNSLITKITVRDRKVISIQFTNGLISTFIYEV

SEQ ID NO: 36417 - DNA, 50 bp, Clostridium butyricum; identical to SEQ ID NO: 36392
  source 1..50: mol_type = genomic DNA

SEQ ID NO: 36418 - DNA, 40 bp, Clostridium butyricum; identical to SEQ ID NO: 36393
  source 1..40: mol_type = genomic DNA

SEQ ID NO: 36419 - DNA, 50 bp, Clostridium butyricum; identical to SEQ ID NO: 36394
  source 1..50: mol_type = genomic DNA

SEQ ID NO: 36420 - DNA, 40 bp, Clostridium butyricum; identical to SEQ ID NO: 36395
  source 1..40: mol_type = genomic DNA

SEQ ID NO: 36421 - protein, 521 aa, Streptococcus suis; identical to SEQ ID NO: 23021

SEQ ID NO: 36422 - DNA, 50 bp, Streptococcus suis
  source 1..50: mol_type = genomic DNA
tgtatgataaaattaatcgcaacagaaatcggagtaaggaaattgataca

SEQ ID NO: 36423 - DNA, 40 bp, Streptococcus suis; identical to SEQ ID NO: 26288
  source 1..40: mol_type = genomic DNA

SEQ ID NO: 36424 - DNA, 50 bp, Streptococcus suis
  source 1..50: mol_type = genomic DNA
tgtatgataaaattaatcgcaacagtaatcggagtaaggaaattgataca

SEQ ID NO: 36425 - DNA, 40 bp, Streptococcus suis
  source 1..40: mol_type = genomic DNA
ttttccataaaatgtaacagtcatggaaaggatcttttca

SEQ ID NO: 36426 - protein, 458 aa, Anaerostipes hadrus
MKKAKSETTLVRAALYIRVSGEEQKIKGLSLEAQEERLRDFCKERGWLICGVFIDAAKTARKNIRKRVEFQHMIDGVKKDQYDILVFCRLDRWFRSVADYYKIMDILNAHNCGWVTSDEDYDTTTANGRLYINVKLSIAQNESDICSERISVVFDSKIQHGTVLSGFSPFWLDVKDKKLVVNDERAAIVRDAIDYFEKDMTQNGTVRYIRNKYGINWDINMLKRVFKNKLLIGVYDSNGRYNDHFCDPIISVDQFNRVQSIFDKRIKVVPTKRVYIFTSILKCPVCGCRLSGQAAGTNTRYYYRCNRHFIRKDCSYGKITNERLIEKWLLENLKSKLSECEVAWNVKQVKKRLEPSAKQKASLKRKLSKLKDLYLNELIDLEDYKRDYIMYSSALSELSTSQKEETPPDFAAVHRILDNDFLSTYNTMDRTEKRTFWQSIIKEMVLDDNGHVTSLSFV

SEQ ID NO: 36427 - DNA, 50 bp, Anaerostipes hadrus
  source 1..50: mol_type = genomic DNA
acgtttactaacacactataacccgtcggttatagtgtgttagtaaacaa

SEQ ID NO: 36428 - DNA, 40 bp, Anaerostipes hadrus
  source 1..40: mol_type = genomic DNA
catacttttactaacacctgtttgttctgatagtacatca

SEQ ID NO: 36429 - DNA, 50 bp, Anaerostipes hadrus
  source 1..50: mol_type = genomic DNA
acgtttactaacacactataaccctacggttatagtgtgttagtaaacaa

SEQ ID NO: 36430 - DNA, 40 bp, Anaerostipes hadrus
  source 1..40: mol_type = genomic DNA
cataattgtacttacatcttagtgttcagaagttacacca

SEQ ID NO: 36431 - protein, 503 aa, Dehalogenimonas alkenigignens
MKAVLYCRVSSEAQDTVLSLSAQLRALREYAEKNGHVVVREFIDEAESGRSTDRPAFMEMISLSRLKPPPFQAILVWKLNRFARSRSDSVTFKMLLKKQGISVISISEPVDDSPTGHLLEGVIESIDEFYSLNMGQDIKRGQMENAKRGFFNGSRPPYGYKVIKVKDGEKLRNKLEPMPDDSVPIQVVKLQFEMALKDQCCKAIACKLNADGLRTLKGEYWGRSTVYQVLTNEAYAGVLVWGSVRLKNAWPAVIPHEDFYLVQKKVGNKSPAVAHPRTVTSQYLLSSFLFCSCGHSMTGHSAKSGEYAYYQCMRNYKQGKEACCARSLPKEKLERLVTQNLKSTILNEQNLEELVKLVNEDLRSGHTALYERLSNIDSELEEVNTRLLKLYEALETGLLTLHDLAPRIRELRNKQDELSKVKVQLDADAVVDKMDQLNLEAIKTHARDLRALLEDADVVRRKAFIKTFVKRVTVEGNTVKVEYRLPIPGGDGETVLPIDSFGG

SEQ ID NO: 36432 - DNA, 50 bp, Dehalogenimonas alkenigignens
  source 1..50: mol_type = genomic DNA
gttctacctattgatagttttggtggagcgaaggtatcaaaaggtagaac

SEQ ID NO: 36433 - DNA, 40 bp, Dehalogenimonas alkenigignens
  source 1..40: mol_type = genomic DNA
attttggaaaaacgaaaatggagctgaggggactcgaacc

SEQ ID NO: 36434 - DNA, 50 bp, Dehalogenimonas alkenigignens
  source 1..50: mol_type = genomic DNA
gttctacctattgatagttttggtaaagcgaaggtatcaaaaggtagaac

SEQ ID NO: 36435 - DNA, 40 bp, Dehalogenimonas alkenigignens
  source 1..40: mol_type = genomic DNA
ataccagaaaaatgaaaataatgctgaagggactttaaca

SEQ ID NO: 36436 - protein, 626 aa, Mycobacterium pseudokansasii
MTDTLIADADGMYHPGDYNDRLVLGLKGTMSEAELHVLRSRLNAGLRHKAARGELRQLLPVGLDYDQDDRVVLSRDEAVRAAITAVFDRFDELGSARQVVLSLRADGLRLPRRSAGARVIRWAEATYPAVHDFLTNPAYGGAYVFGRTKVSRRLDEAGRIVVRDQELPREQWEVTIPDHHPGYVSWQTYLANQDRLRANVHPPKGQGGGAVREGRALLQGLVVCGKCGRRMLVGYSGPDGRVPRYLCAQGLRLYGSARSCQSLSGRRLDAAVVEEMFTVLQPAALAATAAALAEAEDQHARRVRAFELGVERARYEAQRARRQFDAVEPENRLVARSLERDWEVRLGTLRQAEADLAAQQSRRPAVLTEEEVAWLSHAGADLRAVFDADTTTIRERKQLLRLLIGEVVINVDRDAGQAAIRIRWEGSAHTDITVALPRRGVDSAIRTEADTLERIRRLAAHYDDATIARLLARQGVITATGLPFTRDRVGSLRRKHRIAGPSEPVGPIDEDVHMVSIAEAQTLLGTSRATLYRWLASGFIRGEQHGPGGPWRIRIDAELQAKITPDAPEGWVGLEAAARRLGVAKQTVLDRIQRGELNAVHVNRGQRKGLAIQLPPPEDALFAATP

SEQ ID NO: 36437 - DNA, 50 bp, Mycobacterium pseudokansasii
  source 1..50: mol_type = genomic DNA
aattagtagtgagaacccggctcgacagcgcaggcgacagactgcaacag

SEQ ID NO: 36438 - DNA, 40 bp, Mycobacterium pseudokansasii
  source 1..40: mol_type = genomic DNA
aagcgtgttgaccacgtcaacacgcccgaggaaaaccgct

SEQ ID NO: 36439 - DNA, 50 bp, Mycobacterium pseudokansasii
  source 1..50: mol_type = genomic DNA
aattagtagtgagaacccggctcgggagcgcaggcgacagactgcaacag

SEQ ID NO: 36440 - DNA, 40 bp, Mycobacterium pseudokansasii
  source 1..40: mol_type = genomic DNA
aagtgtgatgagcaacacaggacccccgaagaaagccact

SEQ ID NO: 36441 - protein, 515 aa, Bacillus thuringiensis
MKTAIYLRKSRADLEAEARGEGETLAKHRTTLLKIAKEMNLNVLSVREEIVSGESLVKRPEMLALLEEIEDNKYDVVLCMDMDRLGRGGMKEQGIILETFKRSNTKIMTPRKTYDLNDEWDEEYSEFEAFMARKELKIITRRMQRGRVASVEAGNYLGTHAPFGYDIHRLNKRERTLTINPEEASVVRMIFDWYANEDMGANAIRSKLNDLGYKSKLGNEWNPYSILDILKNNVYIGKVTWQKRKEVKRPDAVKRSCTRQDKSDWIIADGKHEPIIPESLFEQVQEKLNSRYHIPYNTNGIKNPLAGIIKCSKCGYSMVQRYPKNRKETMDCKHRGCENKSSYTELIEKRLLEALKEWYINYKADFEKHKQDDKLKETQVIQMNEAALRKLEKELVDVQKQKNNLHDLLERGVYTVDMFLERSNVVSDRITEITSTMENLKKEIKTEIKKEKVKKDTIPQVEHVLDLYFKTDDPKKKNSLLKSVLEKAVYKKEKWQRLDDFELVLYPKLPQDGDI

SEQ ID NO: 36442 - DNA, 50 bp, Bacillus thuringiensis
  source 1..50: mol_type = genomic DNA
tgttgtcaccttgttggtgtaattaggttgacgacaacatggtagcgaca

SEQ ID NO: 36443 - DNA, 40 bp, Bacillus thuringiensis
  source 1..40: mol_type = genomic DNA
tgttgccattaggcgcatgagatttaccccatttaatcct

SEQ ID NO: 36444 - DNA, 50 bp, Bacillus thuringiensis
  source 1..50: mol_type = genomic DNA
tgttgtcaccttgttggtgtaattatgttgacgacaacatggtagcgaca

SEQ ID NO: 36445 - DNA, 40 bp, Bacillus thuringiensis; identical to SEQ ID NO: 1615
  source 1..40: mol_type = genomic DNA

SEQ ID NO: 36446 - protein, 515 aa, Bacillus thuringiensis
MKTAIYLRKSRADLEAEARGEGETLAKHRTTLLKIAKEMNLNVLAVREEIVSGESLVKRPEMLALLEEIEDNKYDIVLCMDMDRLGRGGMKEQGIILETFKRSNTKIMTPRKTYDLNDEWDEEYSEFEAFMARKELKIITRRMQRGRVASVEAGNYLGTHAPFGYDIHRLNKRERTLTINSEEASVVRMIFDWYANEDMGANAIRSKLNDLGYKSKLGNEWNPYSILDILKNNVYIGKVTWQKRKEVKRPDAVKRSCARQDKSDWIIADGKHEPIIPESLFEQVQEKLNSRYHVPYNTNGIRNPLAGIIKCSKCGYSMVQRYPKNRKETMDCKHRGCENKSSYTELIEKRLLEALKEWYINYKADFEKHKQGDKLKETQVIQMNEAALRKLEKELVDVQKQKNNLHDLLERGVYTVDIFLERSKAVSDRINEITSTMENLKKEIKTEIKKEKVKKDTIPQVEHVLDLYFKTDDPKKKNSLLKSVLEKAVYKKEKWQRLDDFELVLYPKLPQDGDI

SEQ ID NO: 36447 - DNA, 50 bp, Bacillus thuringiensis
  source 1..50: mol_type = genomic DNA
tgtcgtcaccttgttggtgtaattaggttgacgccaacatggtagcgaca

SEQ ID NO: 36448 - DNA, 40 bp, Bacillus thuringiensis; identical to SEQ ID NO: 36443
  source 1..40: mol_type = genomic DNA

SEQ ID NO: 36449 - DNA, 50 bp, Bacillus thuringiensis
  source 1..50: mol_type = genomic DNA
tgtcgtcaccttgttggtgtaattatgttgacgccaacatggtagcgaca

SEQ ID NO: 36450 - DNA, 40 bp, Bacillus thuringiensis; identical to SEQ ID NO: 1615
  source 1..40: mol_type = genomic DNA

SEQ ID NO: 36451 - protein, 515 aa, Bacillus thuringiensis
MKTAIYLRKSRADLEAEARGEGETLAKHRSTLLKIAKEMNLNVLSVREEIVSGESLVKRPEMLALLEEIEDNKYDVVLCMDMDRLGRGGMKEQGIILETFKRSNTKIMTPRKTYDLNDEWDEEYSEFEAFMARKELKIITRRMQRGRVASVEAGNYLGTHAPFGYDIHRLNKRERTLTINSEEASVVRMIFDWYANEDMGANAIRSKLNDLGYKSKLGNEWNPYSILDILKNNVYIGKVTWQKRKEVKQPDAVKRSCTRQDKSDWIIADGKHEPIIPESLFEQVQEKLNSRYHVPYNTNGIKNPLAGIIKCSKCGYSMVQRYPKNRKETMDCKHRGCENKSSYTELIEKRLLEALKEWYINYKADFEKHKQDDKLKETQVIQMNEAALRKLEKELVDVQKQKNNLHDLLERGVYTVDMFLERSNVVSDRITEITSTMENLKKEIKTEIKKEKVKKDTIPQVENVLDLYFKTDDPKKKNSLLKSVLEKAVYKKEKWQRLDDFELVLYPKLPQDGDI

SEQ ID NO: 36452 - DNA, 50 bp, Bacillus thuringiensis; identical to SEQ ID NO: 36232
  source 1..50: mol_type = genomic DNA

SEQ ID NO: 36453 - DNA, 40 bp, Bacillus thuringiensis; identical to SEQ ID NO: 36443
  source 1..40: mol_type = genomic DNA

SEQ ID NO: 36454 - DNA, 50 bp, Bacillus thuringiensis
  source 1..50: mol_type = genomic DNA
tgtcgccaccttgttggtgtaattatgttgacgccaacagggtgataaca

SEQ ID NO: 36455 - DNA, 40 bp, Bacillus thuringiensis; identical to SEQ ID NO: 1615
  source 1..40: mol_type = genomic DNA

SEQ ID NO: 36456 - protein, 515 aa, Bacillus thuringiensis
MKTAIYLRKSRADLEAEARGEGETLAKHRTTLMKIAKEMNLNVLAVREEIVSGESLVKRPEMLALLEEIEDNKYDVVLCMDMDRLGRGGMKEQGIILETFKRSNTKIMTPRKTYDLNDEWDEEYSEFEAFMARKELKIITRRMQRGRVASVEAGNYLGTHAPFGYDIHRLNKRERTLTINPEEASVVRMIFDWYAHEDMGANAIRSKLNDLGYKSKLGNEWNPYSILDILKNNVYIGKVTWQKRKEVKRPDAVKRSCARQDKSDWIIADGKHEPIIPESLFEQVQEKLNSRYHIPYNTNGIKNPLAGIIKCSKCGYSMVQRYPKNRKETMDCKHRGCENKSSYTELIEKRLLEALKKWYINYKADFEKHKQDDKLKETQIIQMNEAALRKLEKELVDVQKQKNNLHDLLERGVYTVDMFLERSNVVSDRITEITSTMENLKKEIKTEIKKEKVKKDTIPQVEHVLDLYFKTDDPKKKNSLLKSVLEKAVYKKEKWQRLDDFELVLYPKLPQDGDI

SEQ ID NO: 36457 - DNA, 50 bp, Bacillus thuringiensis
  source 1..50: mol_type = genomic DNA
tgtcgtcaccttgttggtgtaattaggttgacgccaacagggtgatgaca

SEQ ID NO: 36458 - DNA, 40 bp, Bacillus thuringiensis; identical to SEQ ID NO: 36443
  source 1..40: mol_type = genomic DNA

SEQ ID NO: 36459 - DNA, 50 bp, Bacillus thuringiensis
  source 1..50: mol_type = genomic DNA
tgtcgtcaccttgttggtgtaattatgttgacgccaacagggtgatgaca

SEQ ID NO: 36460 - DNA, 40 bp, Bacillus thuringiensis; identical to SEQ ID NO: 1615
  source 1..40: mol_type = genomic DNA

SEQ ID NO: 36461 - protein, 515 aa, Bacillus thuringiensis
MKTAIYLRKSRADLEAEARGEGETLAKHRSTLLKIAKEMNLNVLAVREEIVSGESLVKRPEMLALLEEIEDNKYDVVLCMDMDRLGRGGMKEQGIILETFKRSNTKIMTPRKTYDLNDEWDEEYSEFEAFMARKELKIITRRMQRGRVASVEAGNYLGTHAPFGYNIHRLNKRERTLTINSEEASVVRMIFDWYANEDMGANAIRSKLNDLGYKSKLGNEWNPYSILDILKNNVYIGKVTWQKRKEVKRPDAVKRSCARQDKSDWIIADGKHEPIIPESLFEQVQEKLNSRYHVPYNTNGIKNPLAGIIKCSKCGYSMVQRYPKNRKETMDCKHRGCENKSSYTELIEKRLLEALKEWYINYKADFEKHKQDDKLKETQVIQMNEAALRKLEKELVDVQKQKNNLHDLLERGVYTVDMFLERSNVVSDRITEITSTMENLKKEIKTEIKKEKVKKDTIPQVEHVLDLYFKTDDPKKKNSLLKSVLEKAVYKKEKWQRLDDFELVLYPKLPQDGDI

SEQ ID NO: 36462 - DNA, 50 bp, Bacillus thuringiensis
  source 1..50: mol_type = genomic DNA
tgtcgttaccttgttggtgtaattaggttgacgccaacatggtagcgaca

SEQ ID NO: 36463 - DNA, 40 bp, Bacillus thuringiensis; identical to SEQ ID NO: 36443
  source 1..40: mol_type = genomic DNA

SEQ ID NO: 36464 - DNA, 50 bp, Bacillus thuringiensis
  source 1..50: mol_type = genomic DNA
tgtcgttaccttgttggtgtaattatgttgacgccaacatggtagcgaca

SEQ ID NO: 36465 - DNA, 40 bp, Bacillus thuringiensis; identical to SEQ ID NO: 1615
  source 1..40: mol_type = genomic DNA

SEQ ID NO: 36466 - protein, 515 aa, Bacillus thuringiensis
MKTAIYLRKSRADLEAEARGEGETLAKHRTTLLKIAKEMNLNVLSVREEIVSGESLVKRPEMLALLEEIEDNKYDVVLCMDMDRLGRGGMKEQGIILETFKRSNTKIMTPRKTYDLNDEWDEEYSEFEAFMARKELKIITRRMQRGRVASVEAGNYLGTHAPFGYDIHRLNKRERTLTINSEEASVVRMIFDWYANEDMGANAIRSKLNDLGYKSKLGNEWNPYSILDILKNNVYIGKVTWQKRKEVKQPDAVKRSCARQDKSDWIIADGKHEPIIPESLFEQVQEKLNSRYHVPYNTNGIKNPLAGIIKCSKCGYSMVQRYPKNRKETMDCKHRGCENKSSYTELIEKRLLEALKEWYINYKADFEKHKQDNKLKETQVIQMNEAALRKLDKELVDVQKQKNNLHDLLERGVYTVDMFLERSNVISNRITEITSTMENLKKEIKTEIKKEKVKKDTIPQVEHVLDLYFKTDDPKKKNSLLKSVLEKAVYKKEKWQRLDDFELVLYPKLPQDGDI

SEQ ID NO: 36467 - DNA, 50 bp, Bacillus thuringiensis; identical to SEQ ID NO: 1612
  source 1..50: mol_type = genomic DNA

SEQ ID NO: 36468 - DNA, 40 bp, Bacillus thuringiensis; identical to SEQ ID NO: 36443
  source 1..40: mol_type = genomic DNA

SEQ ID NO: 36469 - DNA, 50 bp, Bacillus thuringiensis; identical to SEQ ID NO: 1614
  source 1..50: mol_type = genomic DNA

SEQ ID NO: 36470 - DNA, 40 bp, Bacillus thuringiensis; identical to SEQ ID NO: 1615
  source 1..40: mol_type = genomic DNA

SEQ ID NO: 36471 - protein, 515 aa, Bacillus thuringiensis; identical to SEQ ID NO: 36456

SEQ ID NO: 36472 - DNA, 50 bp, Bacillus thuringiensis
  source 1..50: mol_type = genomic DNA
tgtcgtcaccttgttggtgtaattaggttgacgccaacagggtaataaca

SEQ ID NO: 36473 - DNA, 40 bp, Bacillus thuringiensis; identical to SEQ ID NO: 36443
  source 1..40: mol_type = genomic DNA

SEQ ID NO: 36474 - DNA, 50 bp, Bacillus thuringiensis
  source 1..50: mol_type = genomic DNA
tgtcgtcaccttgttggtgtaattatgttgacgccaacagggtaataaca

SEQ ID NO: 36475 - DNA, 40 bp, Bacillus thuringiensis; identical to SEQ ID NO: 1615
  source 1..40: mol_type = genomic DNA

SEQ ID NO: 36476 - protein, 515 aa, Bacillus thuringiensis
MKTAIYLRKSRADLEAEARGEGETLAKHRTTLLKIAKEMNLNVLSVREEIVSGESLVKRPEMLALLEEIEDNKYDVVLCMDMDRLGRGGMKEQGIILETFKRSNTKIMTPRKTYDLNDEWDEEYSEFEAFMARKELKIITRRMQRGRIASVEAGNYLGTHAPYGYDIHRLNKRERTLTINPEEASVVRMIFDWYAHEEMGANAIRSKLNDLGYKSKLGNEWNPYSILDILKNNVYIGKVTWQKRKEVKRPDAVKRSCARQDKSDWIIADGKHESIIPESLFEQVQEKLNSRYHIPYNTNGIKNPLAGIIKCSKCGYSMVQRYPKNRKETMDCKHRGCENKSSYTELIEKRLLEALKEWYINYKADFEKHKQDDKLKETQVIQMNEAALRKLEKELVDVQKQKNNLHDLLERGVYTVDMFLERSNVVSDRITEITSTMENLKKEIKTEIKKEKVKQDTIPQVENVLDLYFKTDDPKKKNSLLKSVLEKAVYKKEKWQRLDDFELVLYPKLPQDGDI

SEQ ID NO: 36477 - DNA, 50 bp, Bacillus thuringiensis
  source 1..50: mol_type = genomic DNA
tgtcgtcaccttgttggtgtaattaggttgactccaacagggtgataaca

SEQ ID NO: 36478 - DNA, 40 bp, Bacillus thuringiensis; identical to SEQ ID NO: 36443
  source 1..40: mol_type = genomic DNA

SEQ ID NO: 36479 - DNA, 50 bp, Bacillus thuringiensis
  source 1..50: mol_type = genomic DNA
tgtcgtcaccttgttggtgtaattatgttgactccaacagggtgataaca

SEQ ID NO: 36480 - DNA, 40 bp, Bacillus thuringiensis; identical to SEQ ID NO: 1615
  source 1..40: mol_type = genomic DNA

SEQ ID NO: 36481 - protein, 515 aa, Bacillus thuringiensis
MKTAIYLRKSRADLEAEARGEGETLAKHRSTLLKIAKEMNLNVLSVREEIVSGESLVKRPEMLALLEEIEDNKYDVVLCMDMDRLGRGGMKEQGIILETFKRSNTKIMTPRKTYDLNDEWDEEYSEFEAFMARKELKIITRRMQRGRVASVEAGNYLGTHAPFGYDIHRLNKRERTLTINSEEASVVRMIFDWYANEDMGANAIRSKLNDLGYKSKLGNEWNPYSILDILKNNVYIGKVTWQKRKEVKQPDAVKRSCTRQDKSDWIIADGKHEPIIPESLFEQVQEKLNSRYHVPYNTNGIKNPLAGIIKCSKCGYSMVQRYPKNRKETMDCKHRGCENKTSYTELIEKRLLEALKEWYINYKADFEKHKQDDKLKETQVIQMNEAALRKLEKELVDVQKQKNNLHDLLERGVYTVDMFLERSNAVSDRITEITSTMENLKKEIKTEIKKEKVKKDTIPQVENVLDLYFKTDDPKKKNSLLKSVLEKAVYKKEKWQRLDDFELVLYPKLPQDGDI

SEQ ID NO: 36482 - DNA, 50 bp, Bacillus thuringiensis; identical to SEQ ID NO: 36232
  source 1..50: mol_type = genomic DNA

SEQ ID NO: 36483 - DNA, 40 bp, Bacillus thuringiensis; identical to SEQ ID NO: 36443
  source 1..40: mol_type = genomic DNA

SEQ ID NO: 36484 - DNA, 50 bp, Bacillus thuringiensis; identical to SEQ ID NO: 36454
  source 1..50: mol_type = genomic DNA

SEQ ID NO: 36485 - DNA, 40 bp, Bacillus thuringiensis; identical to SEQ ID NO: 1615
  source 1..40: mol_type = genomic DNA

SEQ ID NO: 36486 - protein, 515 aa, Bacillus thuringiensis
MKTAIYLRKSRADLEAEARGEGETLAKHRTTLLKIAKEMNLNVLAVREEIVSGESLVKRPEMLALLEEIEDNKYDVVLCMDMDRLGRGGMKEQGIILETFKRSNTKIMTPRKTYDLNDEWDEEYSEFEAFMARKELKIITRRMQRGRVASVEAGNYLGTHAPFGYDIHRLNKRERTLTLNPEEASVVRMIFDWYANEDMGANAIRSKLNDLGYKSKLGNEWNPYSILDILKNNVYIGKVTWQKRKEVKRPDAVKRSCARQDKSDWIIADGKHEPIIPESLFEQVQEKLNSRYHVPYNTNGIKNPLAGIIKCSKCGYSMVQRYPKNRKETMDCKHRGCENKSSYTELIEKRLLEALKEWYINYKADFEKHKQDDKLKETQVIQMNEAALRKLEKELVDVQKQKNNLHDLLERGVYTVDMFLERSNVVSDRITEITSTMENLKKEIKTEIKKEKVKKDTIPQVEHVLDLYFKTGDPKKKNSLLKSVLEKAVYKKEKWQRLDDFELVLYPKLPQDGDI

SEQ ID NO: 36487 - DNA, 50 bp, Bacillus thuringiensis
  source 1..50: mol_type = genomic DNA
tgtcgtcaccttgttggtgtaattaggttgacgccaacagggtgactaca

SEQ ID NO: 36488 - DNA, 40 bp, Bacillus thuringiensis; identical to SEQ ID NO: 36443
  source 1..40: mol_type = genomic DNA

SEQ ID NO: 36489 - DNA, 50 bp, Bacillus thuringiensis
  source 1..50: mol_type = genomic DNA
tgtcgtcaccttgttggtgtaattatgttgacgccaacagggtgactaca

SEQ ID NO: 36490 - DNA, 40 bp, Bacillus thuringiensis; identical to SEQ ID NO: 1615
  source 1..40: mol_type = genomic DNA

SEQ ID NO: 36491 - protein, 515 aa, Bacillus thuringiensis
MRTAIYLRKSRADLEAEARGEGETLSKHRTTLLKIAKEMNLNVLSVREEIVSGESLVKRPEMLALLEEIEDNKYDVVLCMDMDRLGRGGMKEQGIILETFKRSNTKIMTPRKTYDLNDEWDEEYSEFEAFMARKELKIITRRMQRGRIASVEAGNYLGTHAPYGYDIHRLNKRERTLTINSEEASVVRMIFDWYANEDMGANAIRSKLNDLGYKSKLGNEWNPYSILDILKNNVYIGKVTWQKRKEVKQPDAVKRSCARQDKSDWIIADGKHEPIIPGSLFEQVQEKLNSRYHVPYNTNGIKNPLAGIIKCSKCGYSMVQRYPKNRKETMDCKHRGCENKSSYTELIEKRLLEALKEWYINYKADFEKHKQDDKLKETQVIQMNEAALRKLEKELVDVQKQKNNLHDLLERGVYTVDMFLERSNVVSDRITEITSTMENLKKEIKTEIKKEKVKKDTIPQVEHVLDLYFKTDDPKKKNSLLKSVLEKAVYKKEKWQRLDDFELVLYPKLPQDGDI

SEQ ID NO: 36492 - DNA, 50 bp, Bacillus thuringiensis; identical to SEQ ID NO: 36447
  source 1..50: mol_type = genomic DNA

SEQ ID NO: 36493 - DNA, 40 bp, Bacillus thuringiensis; identical to SEQ ID NO: 36443
  source 1..40: mol_type = genomic DNA

SEQ ID NO: 36494 - DNA, 50 bp, Bacillus thuringiensis; identical to SEQ ID NO: 36449
  source 1..50: mol_type = genomic DNA

SEQ ID NO: 36495 - DNA, 40 bp, Bacillus thuringiensis; identical to SEQ ID NO: 1615
  source 1..40: mol_type = genomic DNA

SEQ ID NO: 36496 - protein, 515 aa, Bacillus thuringiensis
MKTAIYLRKSRADLEAEARGEGETLAKHRTTLLKIAKEMNLNVLSIREEIVSGESLVKRPEMLALLEEIEDNTYDVVLCMDMDRLGRGGMKEQGIILETFKRSNTKIMTPRKTYDLNDEWDEEYSEFEAFMARKELKIITRRMQRGRVASVEAGNYLGTHAPFGYDIHRLNKRERTLTINSEEASVVRMIFDWYANEDMGANAIRSKLNDLGYKSKLGNEWNPYSILDILKNNVYIGKVTWQKRKEVKRPDAVKRSCARQDKSDWIIADGKHEPIIPESLFEQVQEKLNSRYHIPYNTNGIKNPLAGIIKCAKCGYSMVQRYPKNRKETMDCKHRGCENKSSYTELIEKRLLEALKEWYINYKADFEKHKQDDKLKETQVIQMNEAALRKLEKELVDVQKQKNNLHDLLERGVYTVDMFLERSNVISDRITEITSTMENLKKEIKTEIKKEKVKKDTIPQVEHVLDLYFKTDDPKKKNSLLKSVLEKAVYKKEKWQRLDDFELVLYPKLPQDGDI

SEQ ID NO: 36497 - DNA, 50 bp, Bacillus thuringiensis
  source 1..50: mol_type = genomic DNA
tgtcgtcaccttgttggtgtaattaggttaacgccaacatggtagcgaca

SEQ ID NO: 36498 - DNA, 40 bp, Bacillus thuringiensis; identical to SEQ ID NO: 36443
  source 1..40: mol_type = genomic DNA

SEQ ID NO: 36499 - DNA, 50 bp, Bacillus thuringiensis
  source 1..50: mol_type = genomic DNA
tgtcgtcaccttgttggtgtaattatgttaacgccaacatggtagcgaca

SEQ ID NO: 36500 - DNA, 40 bp, Bacillus thuringiensis; identical to SEQ ID NO: 1615
  source 1..40: mol_type = genomic DNA

SEQ ID NO: 36501 - protein, 434 aa, Bacillus thuringiensis
MDRLGRGGMKEQGIILETFKRSNTKIMTPRKTYDLNDEWDEEYSEFEAFMARKELKIITRRMQRGRVASVEAGNYLGTHAPFGYDIHRLNKRERTLTINPEEASVVRMIFDWYANEDMGANAIRSKLNDLGYKSKLGNEWNPYSILDILKNNVYIGKVTWQKRKEVKRPDAVKRSCTRQDKSDWIIADGKHEPIIPESLFEQVQEKLNSRYHIPYNTNGIKNPLAGIIKCSKCGYSMVQRYPKNRKETMDCKHRGCENKSSYTELIEKRLLEALKEWYINYKADFEKHKQDDKLKETQVIQMNEAALRKLEKELVDVQKQKNNLHDLLERGVYTVDMFLERSNVVSDRITEITSTMENLKKEIKTEIKKEKVKKDTIPQVEHVLDLYFKTDDPKKKNSLLKSVLEKAVYKKEKWQRLDDFELVLYPKLPQDGDI

SEQ ID NO: 36502 - DNA, 50 bp, Bacillus thuringiensis; identical to SEQ ID NO: 36442
  source 1..50: mol_type = genomic DNA

SEQ ID NO: 36503 - DNA, 40 bp, Bacillus thuringiensis; identical to SEQ ID NO: 36443
  source 1..40: mol_type = genomic DNA

SEQ ID NO: 36504 - DNA, 50 bp, Bacillus thuringiensis; identical to SEQ ID NO: 36444
  source 1..50: mol_type = genomic DNA

SEQ ID NO: 36505 - DNA, 40 bp, Bacillus thuringiensis; identical to SEQ ID NO: 1615
  source 1..40: mol_type = genomic DNA

SEQ ID NO: 36506 - protein, 515 aa, Bacillus thuringiensis
MKTAIYLRKSRADLEAEARGEGETLAKHRTTLLKIAKEMNLNVLSVREEIVSGESLVKRPEMLALLEEIEDNKYDVVLCMDMDRLGRGGMKEQGIILETFKRSNTKIMTPRKTYDLNDEWDEEYSEFEAFMARKELKIITRRMQRGRVASVEAGNYLGTHAPFGYDIHRLNKRERTLTINSEEASVVRMIFDWYANEDMGANAIRSKLNDLGYKSKLGNEWNPYSILDILKNNVYIGKVTWQKRKEVKQPDAVKRSCARQDKSDWIIADGKHEPIIPESLFEQVQEKLNSRYHVPYNTNGIKNPLAGIIKCSKCGYSMVQRYPKNRKETMDCKHRGCENKSSYTELIEKRLLEALKEWYINYKADFEKHKQDNKLKETQVIQMNKAALRKLEKELVDVQKQKNNLHDLLERGVYTVDMFLERSNVVSDRITEITSTMENLKKEIKTEIKKEKVKKDTIPQVEHVLDLYFKTDDPKKKNSLLKSVLEKAVYKKEKWQRLDDFELVLYPKLPQDGDI

SEQ ID NO: 36507 - DNA, 50 bp, Bacillus thuringiensis
  source 1..50: mol_type = genomic DNA
tgtcgtcaccttgttggtgtaattaggttgacgccaatagggtaataaca

SEQ ID NO: 36508 - DNA, 40 bp, Bacillus thuringiensis; identical to SEQ ID NO: 36443
  source 1..40: mol_type = genomic DNA

SEQ ID NO: 36509 - DNA, 50 bp, Bacillus thuringiensis
  source 1..50: mol_type = genomic DNA
tgtcgtcaccttgttggtgtaattatgttgacgccaatagggtaataaca

SEQ ID NO: 36510 - DNA, 40 bp, Bacillus thuringiensis; identical to SEQ ID NO: 1615
  source 1..40: mol_type = genomic DNA

SEQ ID NO: 36511 - protein, 515 aa, Bacillus cereus
MKTAIYLRKSRADLESEARGEGETLAKHRTTLLKIAKEMNLNVLAVHEEIVSGESLVKRPEMLALLEEIEDNKYDVVLCMDMDRLGRGGMKEQGIILETFKRSNTKIMTPRKTYDLNDEWDEEYSEFEAFMARKELKIITRRMQRGRVASVEAGNYLGTHAPFGYDIHRLNKRERTLTINPEEASVVRMIFDWYAHEDMGANAIRSKLNDLGYKSKLGNDWNPYSILDILKNNVYIGKVTWQKRKEVKRPDAMKRSCARQDKSDWIVADGKHEPIIPESLFEQVQEKLNSRYHVPYNTNGIKNPLAGIIKCSKCGYSMVQRYPKNRKETMDCKHRGCENKSSYTELIEKRLLEALKEWYINYKADFEKHKQDDKLKETQVIQMNEAALRKLEKELVDVQKQKNNLHDLLERGVYTVDMFLERSNVVSDRITEITSTMENLKKEIKTEIKKEKVKKDTIPQVEHVLDLYFKTDDPKKKNSLLKSVLEKAVYKKEKWQRLDDFELVLYPKLPQDGDI

SEQ ID NO: 36512 - DNA, 50 bp, Bacillus cereus; identical to SEQ ID NO: 36477
  source 1..50: mol_type = genomic DNA

SEQ ID NO: 36513 - DNA, 40 bp, Bacillus cereus; identical to SEQ ID NO: 36443
  source 1..40: mol_type = genomic DNA

SEQ ID NO: 36514 - DNA, 50 bp, Bacillus cereus; identical to SEQ ID NO: 36479
  source 1..50: mol_type = genomic DNA

SEQ ID NO: 36515 - DNA, 40 bp, Bacillus cereus; identical to SEQ ID NO: 1615
  source 1..40: mol_type = genomic DNA

SEQ ID NO: 36516 - protein, 515 aa, Bacillus cereus; identical to SEQ ID NO: 36446

SEQ ID NO: 36517 - DNA, 50 bp, Bacillus cereus
  source 1..50: mol_type = genomic DNA
tgtcgtcaccttgttggtgtaattaggttgacgccgacatggtagcgaca

SEQ ID NO: 36518 - DNA, 40 bp, Bacillus cereus; identical to SEQ ID NO: 36443
  source 1..40: mol_type = genomic DNA

SEQ ID NO: 36519 - DNA, 50 bp, Bacillus cereus
  source 1..50: mol_type = genomic DNA
tgtcgtcaccttgttggtgtaattatgttgacgccgacatggtagcgaca

SEQ ID NO: 36520 - DNA, 40 bp, Bacillus cereus; identical to SEQ ID NO: 1615
  source 1..40: mol_type = genomic DNA

SEQ ID NO: 36521 - protein, 515 aa, Bacillus cereus
MRTAIYLRKSRADLEAEARGEGETLAKHRSTLLKIAKEMNLNVLAVREEIVSGESLVKRPEMLALLEEIEDNKYDVVLCMDMDRLGRGGMKEQGIILETFKRSNTKIMTPRKTYDLNDEWDEEYSEFEAFMARKELKIITRRMQRGRVASVEAGNYLGTHAPFGYDIHRLNKRERTLTINSEEASVVRMIFDWYANEDMGANAIRSKLNDLGYKSKLGNDWNPYSILDILKNNVYIGKVTWQKRKEVKRPDAIKRSCARQDKSDWIIADGKHEPIIPESLFEQVQEKLNSRYHIPYNTSGIKNPLAGIIKCAKCGYSMVQRYPKNRKETMDCKHRGCENKSSYTELIEKRLLEALKEWYINYKADFEKHKQDDKLKEIQVIQMNEAALRKLEKELVDVQKQKNNLHDLLERGVYTVDMFLERSNVVSDRITEITSTMENVKKEIKTEIKKEKVKKDTIPQVEHVLDLYFKTDDPKKKNSLLKSVLEKAVYKKEKWQRLDDFELVLYPKLPQDGDI

SEQ ID NO: 36522 - DNA, 50 bp, Bacillus cereus; identical to SEQ ID NO: 36447
  source 1..50: mol_type = genomic DNA

SEQ ID NO: 36523 - DNA, 40 bp, Bacillus cereus; identical to SEQ ID NO: 36443
  source 1..40: mol_type = genomic DNA

SEQ ID NO: 36524 - DNA, 50 bp, Bacillus cereus; identical to SEQ ID NO: 36449
  source 1..50: mol_type = genomic DNA

SEQ ID NO: 36525 - DNA, 40 bp, Bacillus cereus; identical to SEQ ID NO: 1615
  source 1..40: mol_type = genomic DNA

SEQ ID NO: 36526 - protein, 515 aa, Bacillus cereus
MKTAIYLRKSRADLEAEARGEGETLAKHRSTLLKIAKEMNLNVLSVREEIVSGESLVKRPEMLALLEEIEDNKYDVVLCMDMDRLGRGGMKEQGIILETFKRSNTKIMTPRKTYDLNDEWDEEYSEFEAFMARKELKIITRRMQRGRVASVEAGNYLGTHAPFGYDIHRLNKRERTLTINSEEASVVRMIFDWYANEDMGANAIRSKLNDLGYKSKLGNEWNPYSILDILKNNVYIGKVTWQKRKEVKQPDAVKRSCTRQDKSDWIIADGKHEPIIPESLFEQVQEKLNSRYHIPYNTNGIKNPLAGIIKCAKCGYSMVQRYPKNRKETMDCKHRGCENKSSYTELIEKRLLEALKEWYINYKADFEKHKQDDKLKETQVIQMNEAALRKLEKELVDVQKQKNNLHDLLERGVYTVDMFLERSNVVSNRITEITSTMENLKKEIKTEIKKEKVKKDTIPQVENVLDLYFKTDNPKKKNSLLKSVLEKAVYKKEKWQRLDDFELVLYPKLPQDGDI

SEQ ID NO: 36527 - DNA, 50 bp, Bacillus cereus; identical to SEQ ID NO: 1612
  source 1..50: mol_type = genomic DNA

SEQ ID NO: 36528 - DNA, 40 bp, Bacillus cereus; identical to SEQ ID NO: 36443
  source 1..40: mol_type = genomic DNA

SEQ ID NO: 36529 - DNA, 50 bp, Bacillus cereus; identical to SEQ ID NO: 1614
  source 1..50: mol_type = genomic DNA

SEQ ID NO: 36530 - DNA, 40 bp, Bacillus cereus; identical to SEQ ID NO: 1615
  source 1..40: mol_type = genomic DNA

SEQ ID NO: 36531 - protein, 515 aa, Bacillus cereus
MKTAIYLRKSRADLESEARGEGETLAKHRTTLLKIAKEMNLNVLAVREEIVSGESLVKRPEMLALLEEIEDNKYDVVLCMDMDRLGRGGMKEQGIILETFKRSNTKIMTPRKTYDLNDEWDEEYSEFEAFMARKELKIITRRMQRGRVASVEAGNYLGTHAPFGYDIHRLNKRERTLTINPEEASVVRMIFDWYANKDMGANAIRSKLNDLGYKSKLGNEWNPYSILDILKNNVYIGKVTWQKRKEVKRPDAVKRSCARQDKSDWIIANGKHEPIIPQSLFEQVQEKLNSRYHVPYNTNGIKNPLAGIIKCSKCGYSMVQRYPKNRKETMDCKHRGCENKSSYTELIEKRLLEALKEWYINYKADFEKHKQDDKLKETQVIQMSEAALRKLEKELVDVQKQKNNLHDLLERGVYTVDMFLERSNVVSDRITEITSTMEKLKTEIKTEIKKEKVKKDTIPQVEHVLDLYFKTDDPKKKNSLLKSVLEKAVYKKEKWQRLDDFELVLYPKLPQDGDI

SEQ ID NO: 36532 - DNA, 50 bp, Bacillus cereus
  source 1..50: mol_type = genomic DNA
tgtcgtcaccttgttggtgtaattaggttgacgccaacacggtagcgaca

SEQ ID NO: 36533 - DNA, 40 bp, Bacillus cereus; identical to SEQ ID NO: 36443
  source 1..40: mol_type = genomic DNA

SEQ ID NO: 36534 - DNA, 50 bp, Bacillus cereus
  source 1..50: mol_type = genomic DNA
tgtcgtcaccttgttggtgtaattatgttgacgccaacacggtagcgaca

SEQ ID NO: 36535 - DNA, 40 bp, Bacillus cereus; identical to SEQ ID NO: 1615
  source 1..40: mol_type = genomic DNA

SEQ ID NO: 36536 - protein, 515 aa, Bacillus cereus
MKTAIYLRKSRADLEAEARGEGETLAKHRSTLLKIAKEMNLNVLAVREEIVSGESLVKRPEMLALLEEIEDNKYDVVLCMDMDRLGRGGMKEQGIILETFKRSNTKIMTPRKTYDLNDEWDEEYSEFEAFMARKELKIITRRMQRGRVASVEAGNYLGTHAPFGYDIHRLNKRERTLTINPEEASVVRMIFDWYANEDMGANAIRSKLNDLGYKSKLGNEWNPYSILDILKNNVYIGKVTWQKRKEVKRPDAVKRSCARQDKSDWIIADGKHEPIIPESLFEQVQEKLNSRYHIPYNTNGIKNPLAGIIKCAKCGYSMVQRYPKNRKETMDCKHRGCENKSSYTELIEKRLLEALKEWYINYKADFEKHKQDDKLKETQVIQMNEAALRKLDKELVDVQKQKNNLHDLLERGVYTVDMFLERSNVVSDRITEITFTMENLKKEIKTEIKKEKVKKDTIPQVEHVLDLYFKTDDPKKKNSLLKSVLEKAVYKKEKWQRLDDFELVLYPKLPQDGDI

SEQ ID NO: 36537 - DNA, 50 bp, Bacillus cereus; identical to SEQ ID NO: 36477
  source 1..50: mol_type = genomic DNA

SEQ ID NO: 36538 - DNA, 40 bp, Bacillus cereus; identical to SEQ ID NO: 36443
  source 1..40: mol_type = genomic DNA

SEQ ID NO: 36539 - DNA, 50 bp, Bacillus cereus; identical to SEQ ID NO: 36479
  source 1..50: mol_type = genomic DNA

SEQ ID NO: 36540 - DNA, 40 bp, Bacillus cereus; identical to SEQ ID NO: 1615
  source 1..40: mol_type = genomic DNA

SEQ ID NO: 36541 - protein, 515 aa, Bacillus cereus
MKTAIYLRKSRADLEAEARGEGETLAKHRTTLLKIAKEMNLNVLAVREEIVSGESLVKRPEMLALLEEIEDNKYDVVLCMDMDRLGRGGMKEQGIILETFKRSNTKIMTPRKTYDLNDEWDEEYSEFEAFMARKELKIITRRMQRGRVASVEAGNYLGTHAPFGYDIHRLNKRERTLTINPEEASVVRMIFDWYAHEDMGANAIRSKLNYLGYKSKLGNEWNPYSILDILKNNVYIGKVTWQKRKEVKRPDAVKRSCARQDKSDWIIADGKHEPIIPESLFEQVQEKLNSRYHIPYNTNGIKNPLAGIIKCSKCGYSMVQRYPKNRKETMDCKHRGCENKSSYTELIEKRLLEALKEWYINYKADFEKHKQDDKLKETQVIQMNEAALRKLEKELVDVQKQKNNLHDLLERGVYTVDMFLERSNVVCDRITEITSTMENLKKEIKTEIKKEKVKKDTIPQVEHVLDLYFKTDDPKKKNSLLKSVLEKAVYKKEKWQRLDDFELVLYPKLPQDGDI

SEQ ID NO: 36542 - DNA, 50 bp, Bacillus cereus; identical to SEQ ID NO: 36447
  source 1..50: mol_type = genomic DNA

SEQ ID NO: 36543 - DNA, 40 bp, Bacillus cereus; identical to SEQ ID NO: 36443
  source 1..40: mol_type = genomic DNA

SEQ ID NO: 36544 - DNA, 50 bp, Bacillus cereus; identical to SEQ ID NO: 36449
  source 1..50: mol_type = genomic DNA

SEQ ID NO: 36545 - DNA, 40 bp, Bacillus cereus; identical to SEQ ID NO: 1615
  source 1..40: mol_type = genomic DNA

SEQ ID NO: 36546 - protein, 515 aa, Bacillus wiedmannii
MKTAIYLRKSRADLEAEARGEGETLAKHRTTLLKIAKEMNLNVLAVREEIVSGESLVKRPEMLALLEEIEDNKYDVVLCMDMDRLGRGGMKEQGIILETFKRSNTKIMTPRKTYDLNDEWDEEYSEFEAFMARKELKIITRRMQRGRVASVEAGNYLGTHAPFGYDIHRLNKRERTLTINPEEASVVRMIFDWYANEDMGANAIRSKLNDLGYKSKLGNEWNPYSILDILKNNVYIGKVTWQKRKEVKQPDAVKRSCARQDKSDWIIADGKHEPIIPESLFEQVQEKLNSRYHVPYNTNGIKNPLAGIIKCSKCGYSMVQRYPKNRKETMDCKHRGCENKSSYTELIEKRLLEALKEWYINYKADFEKHKQDDKLKETQVIQMNEAALRKLEKELVDVQKQKNNLHDLLERGIYTVDMFLERSNVISDRITEITSTMENLKKEIKTEIKKEKVKKDTIPQVEHVLDLYFKTDDPKKKNSLLKSVLEKAVYKKEKWQRLDDFELVLYPKLPQDGDI

SEQ ID NO: 36547 - DNA, 50 bp, Bacillus wiedmannii
  source 1..50: mol_type = genomic DNA
tgtcgtcaccttgttggtgtaattaggttgacacccacagggtgataaca

SEQ ID NO: 36548 - DNA, 40 bp, Bacillus wiedmannii
  source 1..40: mol_type = genomic DNA
tgttgccattaggcgcatgagatttactccattcagccct

SEQ ID NO: 36549 - DNA, 50 bp, Bacillus wiedmannii
  source 1..50: mol_type = genomic DNA
tgtcgtcaccttgttggtgtaattatgttgacacccacagggtgataaca

SEQ ID NO: 36550 - DNA, 40 bp, Bacillus wiedmannii; identical to SEQ ID NO: 1615
  source 1..40: mol_type = genomic DNA

SEQ ID NO: 36551 - protein, 515 aa, Bacillus wiedmannii
MKTALYLRKSRADLEAEARGEGETLAKHRSTLLKIAKEMNLNVLSVREEIVSGESLVKRPEMLALLEEIEDKKYDVVLCMDMDRLGRGGMKEQGIILETFKRSNTKIMTPRKTYDLNDEWDEEYSEFEAFMARKELKIITRRMQRGRIASVEAGNYLGTHAPYGYDIHRLNKRERTLTINSEEASVVRMIFDWYANEDMGANAIRSKLNDLGYKSKLGNEWNPYSILDILKNNVYIGKVTWQKRKEVKQPDAVKRSCARQDKSDWIIADGKHEPIIPESLFEQVQEKLNSRYHVPYNTNGIKNPLAGIIKCSKCGYSMVQRYPKNRKETMDCKHRGCENKSSYTELIEKRLLEALKEWYINYKADFEKHKQDDKLKETQVIQMNEAALRKLEKELVDVQKQKNNLHDLLERGVYTVDMFLERSNVVSDRITEITSTMENLKKEIKTEIKKERVKKDTIPQVEHVLDLYFKTDDPKKKNSLLKSVLEKAVYKKEKWQRLDDFELVLYPKLPQDGDI

SEQ ID NO: 36552 - DNA, 50 bp, Bacillus wiedmannii; identical to SEQ ID NO: 1612
  source 1..50: mol_type = genomic DNA

SEQ ID NO: 36553 - DNA, 40 bp, Bacillus wiedmannii; identical to SEQ ID NO: 36548
  source 1..40: mol_type = genomic DNA

SEQ ID NO: 36554 - DNA, 50 bp, Bacillus wiedmannii; identical to SEQ ID NO: 1614
  source 1..50: mol_type = genomic DNA

SEQ ID NO: 36555 - DNA, 40 bp, Bacillus wiedmannii; identical to SEQ ID NO: 1615
  source 1..40: mol_type = genomic DNA

SEQ ID NO: 36556 - protein, 515 aa, Bacillus wiedmannii
MKTAIYLRKSRADLEAEARGEGETLAKHRTTLLKIAKEMNLNVLSVREEIVSGESLVKRPEMLALLEEIEDNKYDVVLCMDMDRLGRGGMKEQGIILETFKRSNTKIMTPRKTYDLNDEWDEEYSEFEAFMARKELKIITRRMQRGRVASVEAGNYLGTHAPFGYDIHRLNKRERTLTINSEEASVVRMIFDWYANEDMGANAIRSKLNDLGYKSKLGNEWNPYSILDILKNNVYIGKVTWQKRKEVKRPDAVKRSCARQDKSDWIIADGKHEPIIPESLFEQVQEKLNSRYHVPYNTNGIKNPLAGIIKCSKCGYSMVQRYPKNRKETMDCKHRGCENKSSYTELIEKRLLEALKEWYINYKADFEKHKQDDKLKETQVIQMNEAALRKLEKELVDVQKQKNNLHDLLERGVYTVDMFLERSNVVSDRITEITSTMENLKKEIKTEIKKEKVKKDTIPQVEHVLDLYFKTDDPKKKNSLLKSVLEKAVYKKEKWQRLDDFELVLYPKLPQDGDI

SEQ ID NO: 36557 - DNA, 50 bp, Bacillus wiedmannii
  source 1..50: mol_type = genomic DNA
tgtcgtcaccttgctggtgtaattaggttgacgccaacagggtgataaca

SEQ ID NO: 36558 - DNA, 40 bp, Bacillus wiedmannii; identical to SEQ ID NO: 36548
  source 1..40: mol_type = genomic DNA

SEQ ID NO: 36559 - DNA, 50 bp, Bacillus wiedmannii
  source 1..50: mol_type = genomic DNA
tgtcgtcaccttgctggtgtaattatgttgacgccaacagggtgataaca

SEQ ID NO: 36560 - DNA, 40 bp, Bacillus wiedmannii; identical to SEQ ID NO: 1615
  source 1..40: mol_type = genomic DNA

SEQ ID NO: 36561 - protein, 515 aa, Bacillus wiedmannii
MKTAIYLRKSRADLEAEARGEGETLAKHRTTLLKIAKEMNLNVLAVREEIVSGESLVKRPEMLALLEEIEDNKYDVVLCMDMDRLGRGGMKEQGIILETFKRSNTKIMTPRKTYDLNDEWDEEYSEFEAFMARKELKIITRRMQRGRVASVEAGNYLGTHAPFGYDIHRLNKRERTLTINPEEASVVRMIFDWYANEDMGANAIRSKLNDLGYKSKLGNEWNPYSILDILKNNVYIGKVTWQKRKEVKQPDAVKRSCARQDKSDWIIADGKHEPIIPESLFEQVQEKLNSRYHVPYNTNGIKNPLAGIIKCSKCGYSMVQRYPKNRKETMDCKHRGCENKSSYTELIEKRLLEALKEWYINYKADFEKHKQDDKLKETQVIQMNEAALRKLEKELVDVQKQKNNLHDLLERGIYTVDMFLERSNVVSDRITEITSTMENLKKEIKTEIKKEKVKKDTIPQVEHVLDLYFKTDDPKKKNSLLKSVLEKAVYKKEKWQRLDDFELVLYPKLPQDGDI

SEQ ID NO: 36562 - DNA, 50 bp, Bacillus wiedmannii; identical to SEQ ID NO: 36547
  source 1..50: mol_type = genomic DNA

SEQ ID NO: 36563 - DNA, 40 bp, Bacillus wiedmannii; identical to SEQ ID NO: 36548
  source 1..40: mol_type = genomic DNA

SEQ ID NO: 36564 - DNA, 50 bp, Bacillus wiedmannii; identical to SEQ ID NO: 36549
  source 1..50: mol_type = genomic DNA

SEQ ID NO: 36565 - DNA, 40 bp, Bacillus wiedmannii; identical to SEQ ID NO: 1615
  source 1..40: mol_type = genomic DNA

SEQ ID NO: 36566 - protein, 532 aa, Mycobacterium simulans
MRALIVVRLSRVTDATSSPARQLEICQELCRQRGYDVVGVAEDLDVSGAVDPFDRKKRPNLSRWLAGEHLGEDGHPVPFDVVVTYRVDRLTRSIKYLQKLVAWAEDHGKLVVSATESHFDMESPFAAILIALIGTVAEMELEAISERNASAKRRDIRMGKYRGGTPPWGYMAQRDDAGVWRLVQDDEQTKVIREVVQRVLDGDPLQRIAHDLTRRRVPTVKDRIAHLQGKPIKGTPWNATPLKRSLLSEAMLGYAADAKGRPLRSDDGSPIVRAEPILTREVFDRLGVELANRSKRGEPTRRSTSLLLRVIHCGICGLPGYRFNGGSHSQFPRYRCSSMTKADKCGNRTLRLDYADSVVERTLLRLLGDSERLERVWDSGSDHSAELAEVNDILTDLVSLIGTDVYRLGTPQRTQLDARIAGYASRRDELSAQAVKPARWTWRPTGEKFSDWWARQDITGRNVWLRSMGVRLEFDHERVHLILGELLMMAEQLNPSGPIVDLQQTFADMRSSGIQGATIGLGGNIELTRVSD

SEQ ID NO: 36567 - DNA, 50 bp, Mycobacterium simulans
  source 1..50: mol_type = genomic DNA
cggcttactttctcgaccaccaccgtctcggtagtgttagatataagcca

SEQ ID NO: 36568 - DNA, 40 bp, Mycobacterium simulans
  source 1..40: mol_type = genomic DNA
gggcttgtcgacaacggccgtctcggtggtgagaaccata

SEQ ID NO: 36569 - DNA, 50 bp, Mycobacterium simulans
  source 1..50: mol_type = genomic DNA
cggcttactttctcgaccaccaccgactcggtagtgttagatataagcca

SEQ ID NO: 36570 - DNA, 40 bp, Mycobacterium simulans
  source 1..40: mol_type = genomic DNA
gggcttcctgagaagggccgactccctggtgagcgccaca

SEQ ID NO: 36571 - protein, 511 aa, Ruminococcus gnavus
MNIAAYCRVSTDKSDQLNSLEAQKKFFAEFTERNGHNLVRLYADEGISGTKIKNRKEFQKLMRDAKQGLFDMVVVKDISRFARNTVDFLQSIRALKALGIETTFLTANMTVLGNSEFVLTIFGALAQEESANTSKRVKFGKKMNAEKGRVPNIVYGYDKTIGDYFNLEINKEEARNVRQIYKWYIDEGYGAAKIANMLNEQGIKTKRNCAWSQNAICRILTNELYTGKIINGKEEVEDFLTGVRTTKEESEWLITDKPELRIIEPEIFDKAQEVLKSRHKAFKLNKERQSNKYIFSTLIKCKECGWSFRRTVRTYKNTYIRWVCSGHNGKGVDNCPNAVTIDEAELIQALDEYFKEILKDKKNIINRIVKEFNRIYKKKEDNEQYENELMTELAKLKKTREKYMDMYTDDLISREELNEKIGGMKKKIEKLENELKLVEYNLNKGDQLEEIVQHTFKNIEGITSVADMTNEQLKQIIQKIEVDKEGNVDIYLRIFGDLGLDDSVLISYDHT

SEQ ID NO: 36572 - DNA, 50 bp, Ruminococcus gnavus
  source 1..50: mol_type = genomic DNA
gcgttctaattagttacgaccatacatatggcagtaacaaaatagaaaga

SEQ ID NO: 36573 - DNA, 40 bp, Ruminococcus gnavus
  source 1..40: mol_type = genomic DNA
gattagtaagagtacggtgcacaaggatgtgacagaaaga

SEQ ID NO: 36574 - DNA, 50 bp, Ruminococcus gnavus
  source 1..50: mol_type = genomic DNA
gcgttctaattagttacgaccatatgtatggcagtaacaaaatagaaaga

SEQ ID NO: 36575 - DNA, 40 bp, Ruminococcus gnavus
  source 1..40: mol_type = genomic DNA
gattggtcagagtacagggtgaagtcataagacagaaaga

SEQ ID NO: 36576 - protein, 522 aa, Anaerobutyricum hallii
MIESKSRVAIYCRLSEEDRNKQSETDDSNSIQNQKSMLLQYSLEHGWEVYNIYSDDDYTGSDRRRPEFNRLLEDAKNRKFDIVLCKTQSRFTRELELVEKYIHGLFPIWGIRFISIVDNADTANKGNKKSRQINGLVNEWYLEDMSENIKSVLTDRRKNGHHIGAFALYGYKKDPDVKGHLIIDEEAAEVVREVFTLFSQGYGKTAIARMLNDRGIPNPTEYKRLHGLRYKQPKTKNSTLWKYFAISDMLVNEIYIGNMVQGKYGSVSYKTKQNKPRPKDEWYRVEGTHEPIIDRELWDRVQALVAQKAKPFTVGTIGLFARKARCMNCGYTMRSSKNHGKHYLQCSNRHVAKDACIGSFISVDKLEKAVIDELNKLSAEYLDKDKLEQNVQFNNDLRGQKEALETEIAAYQKKIAEYTKGIRELYLDKVKGILSELDYLDLSKDFSTQKERLEKLVIDTQKQLDVIERKMLIGDNRRQLIEQYTNLEHLDRETVEKLIDYVLVGKKDPVTKEVPIEIHWNF

SEQ ID NO: 36577 - DNA, 50 bp, Anaerobutyricum hallii; identical to SEQ ID NO: 12237
  source 1..50: mol_type = genomic DNA

SEQ ID NO: 36578 - DNA, 40 bp, Anaerobutyricum hallii
  source 1..40: mol_type = genomic DNA
agttgcacgtgctttttgttctgcggcaagatcttcaaac

SEQ ID NO: 36579 - DNA, 50 bp, Anaerobutyricum hallii
  source 1..50: mol_type = genomic DNA
tgttgtctttacacaatcgtaccaggtggtgcgacctcgtaagaacaaca

SEQ ID NO: 36580 - DNA, 40 bp, Anaerobutyricum hallii
  source 1..40: mol_type = genomic DNA
ccttccaaggcctttttttggtgagaaaagatcttcaaac

SEQ ID NO: 36581 - protein, 536 aa, Pectobacterium aquaticum
MRKAISYIRFSSKAQATGDSTKRQSRLITNWLKQHPDYYLDDSLRFQDLGISGFSGANAKTGAFGEILAAIQSGFIEAGSVLLVESLDRVSRQDIDLAGEQLRKILRAGVDVVTLVDNEHYTKESLKDALSMIKALLVMERAHEESVMKSHRLRAVWASKRDKALSDGTIMSKRCVAWLKVSDDRKTFEFIPDNVMAVQRVFQLRLEGLSHIKIARQMNIEGFATLNQYSPKANNGWSQTSVTELLSNRAVIGVKVPSKSMLAKGTPDIPNYYPAVITSEQFYAVQQLKILSKGRRPSSDNPFATNLFKGVMRCSECGLIMIVSGATADGKRQGLYKCSNKGVGRCNSAGISRLQTDKALVQGLLYNTNRLDLQATSDITPLQEELSELVTRKEKLLKLAELADDVQSVAIRLKELNANITSVNAAIADHHQRLASSHTETLLHLDLSEKKHRVEAQIIIKRIIKSIVMNTAKRTCDITFHNGVKLNNYPLSYIIDGSRFGDMVSLMDDKEFTFTENSRAFTPPHIRPDWVSEYDE

SEQ ID NO: 36582 - DNA, 50 bp, Pectobacterium aquaticum
  source 1..50: mol_type = genomic DNA
gtgcattattagatatgtctcttcaggattacacccatcttatgatacac

SEQ ID NO: 36583 - DNA, 40 bp, Pectobacterium aquaticum
  source 1..40: mol_type = genomic DNA
gtgaaccgggcggctgtcgaggatcacgcggttaattcta

SEQ ID NO: 36584 - DNA, 50 bp, Pectobacterium aquaticum
  source 1..50: mol_type = genomic DNA
gtgcattattagatatgtctcttctggattacacccatcttatgatacac

SEQ ID NO: 36585 - DNA, 40 bp, Pectobacterium aquaticum
  source 1..40: mol_type = genomic DNA
gtgaaccggctgggtgtagtggctcatgccggtaatccca

SEQ ID NO: 36586 - protein, 589 aa, Streptococcus constellatus
MKKEVKVIKGDTTLKRTASGCVERSIKRVAAYCRVSTDTEDQINSYNSQVEHYTEFIQKNNEWTLAGIYADEAITGTQVDRRIDFQRLINDCMNGDIDMIITKSISRFARNTLDTLKYVRKLKEFNVAVFFEEENINTLTMDGELLLTILSSVAQQEVENISANVKKGLRMKMERGEMVGFQGCLGYDYDPETKSISINEKEAEIVRYIFRRYIEGVGGMVISRELEEQGYLSPRGNKRWTETTVLGIIKNEKYKGDLMMGKTYTVDPISKRRLDNFGEQDKFYIENHHEPIISEEDFEKAQGIRLRRSKNRNTVANNGGKREKYSRKYAFSSMLECGFCGHNLSRRNWHSSSEYTKVIWQCVNATKNGKKYCPHSKGIEEEAIEKAFMESYRQVCHNNVEITNEFLKTVEEELKDNSLAKDLKKITNQLDKILKKEKDLVELRLNESISMDIYQDKYNEIAISKEKLLAEKRTLEVTLTDEKALKKRLEGFKKLLESNKYLEEFDRAVFESIVDKIIIGGTNDEGEIDPAMITIIYKTGKKDSQDGRLFKSRRKNAKEVNEKADSKLYPQSSDEVNNLCSYPMDNTCG

SEQ ID NO: 36587 - DNA, 50 bp, Streptococcus constellatus; identical to SEQ ID NO: 1787
  source 1..50: mol_type = genomic DNA

SEQ ID NO: 36588 - DNA, 40 bp, Streptococcus constellatus
  source 1..40: mol_type = genomic DNA
ttatttcctcaaacgcatcatgtggagacggtagcgctat

SEQ ID NO: 36589 - DNA, 50 bp, Streptococcus constellatus; identical to SEQ ID NO: 1789
  source 1..50: mol_type = genomic DNA

SEQ ID NO: 36590 - DNA, 40 bp, Streptococcus constellatus
  source 1..40: mol_type = genomic DNA
tttattcctcaaactgcacttgtgaaaactgtagggctat

SEQ ID NO: 36591 - protein, 536 aa, Solibacillus silvestris
MNGCVKMKRVWCLFRVSKKQQVSTDDDIPMQKNSCHEFVKSKTNWIITNELYEKGVSGWKKTVNERDEMAILKEGALNKEFDVLLVFMFDRLGRREDETPVMVNFLVQNDIEVWSVKEGQRKIESHTDKLLNYISFWLSDGESQKTSIRVKEAKKQLSEQGYFQGGSPPIGYKIVETAEQHWKNKERRVKELVPDEDESEMIKLIYKLYVNKHMGYRKIADYLNENGYRNRDGKVFIVSTLQRILSNSIYIGLKRYKNAVGGTQPYNEKLRIIPDELFNQAEQIRNTRSSNINEQDKSAIPRAGKLMFSGMAYCKYCGSKLTSNYLYRNSKYNNKDGFYKNTIYRYKCPLNKGKLYCDHQQNIWGGKKFDTLIINKIKFILSQFELKSFLDISKNTKADLLKIKERNVHTLEKEYLALTKQQEKLNLEIGKTLIGESSFTTEQLSAAINVIEKQTEEKLSQLNSLKEELERERENYSDVNYLANELDNWEQKFNDADDDLKKAMLSRIIDKVYLGKNEIEIELNIWLSDYFEGKFD

SEQ ID NO: 36592 - DNA, 50 bp, Solibacillus silvestris
  source 1..50: mol_type = genomic DNA
tagtgttttttgtaactggtagccttagcgtgagggtacaagaaacacta

SEQ ID NO: 36593 - DNA, 40 bp, Solibacillus silvestris
  source 1..40: mol_type = genomic DNA
tgccaatattgcgaatgcctttgcttcaggtacaggtgat

SEQ ID NO: 36594 - DNA, 50 bp, Solibacillus silvestris; identical to SEQ ID NO: 36592
  source 1..50: mol_type = genomic DNA

SEQ ID NO: 36595 - DNA, 40 bp, Solibacillus silvestris
  source 1..40: mol_type = genomic DNA
tgccaatactgagaatgcctttggttcatctgcagcctag

SEQ ID NO: 36596 - protein, 504 aa, Bacillus subtilis
MRCAVYVRVSTDKEEQKSSLENQKDLFIRYISDRGWDIHNFYVDVESGTTEKRPQLQQLIADARAKKFDVILAKELSRLARNGRLSYEIRDIAEQSKIHIITLDNAINTLEGNGQMFGIYAWMYEQESQRTSERVKAALRSRAQKGLFKGSTPPYGYIVEGGRLKLSPDETPDIVKRIFRDYLSGKGFDRIARELYEEGFATPAQIAGKKNSSDKWHGSTVRKILENPHYTGDLVQGRTTTRSVTNKNRDQVDSEKFIIVPNTHEAIISKNDFEAVQQLMKSRKRTRPQAEMHLFTNTAFCADCGRGMHYKKNCKGYMCGNYNKHGIKACTDHLIREADLKLAILNDLKNLASVLDNQEILQTLEAKLNQQKKNSEKQIRGFERELDRLKQKKKKSLNLFIDEKISKADYDDFINDINNQMNSINSKIEQLKSSLEANNDELAFNEVKQQLDAFIEFQELTPEMLHRFIERIEIKADGSPRIFYRFSNPSALYLINSINAQHST

SEQ ID NO: 36597 - DNA, 50 bp, Bacillus subtilis
  source 1..50: mol_type = genomic DNA
tctatcaacgcacagcactcaacatgtgtggagtactgacggtagtagaa

SEQ ID NO: 36598 - DNA, 40 bp, Bacillus subtilis
  source 1..40: mol_type = genomic DNA
cacagccacacactccacatgattcgtatgcggaaacata

SEQ ID NO: 36599 - DNA, 50 bp, Bacillus subtilis
  source 1..50: mol_type = genomic DNA
tctatcaacgcacagcactcaacaaatgtggagtactgacggtagtagaa

SEQ ID NO: 36600 - DNA, 40 bp, Bacillus subtilis
  source 1..40: mol_type = genomic DNA
cacacacacacacacaacaaaatacttttgctgaaccatt

SEQ ID NO: 36601 - protein, 538 aa, Brevundimonas diminuta; identical to SEQ ID NO: 35471

SEQ ID NO: 36602 - DNA, 50 bp, Brevundimonas diminuta
  source 1..50: mol_type = genomic DNA
agacgagctatgctgggtgtgtggcggtgctgtcagtccaacgctgactt

SEQ ID NO: 36603 - DNA, 40 bp, Brevundimonas diminuta
  source 1..40: mol_type = genomic DNA
gcttgttaggaaataatggcggagagggggggattcgaac

SEQ ID NO: 36604 - DNA, 50 bp, Brevundimonas diminuta
  source 1..50: mol_type = genomic DNA
agacgagctatgctgggtgtgtggtggtgctgtcagtccaacgctgactt

SEQ ID NO: 36605 - DNA, 40 bp, Brevundimonas diminuta
  source 1..40: mol_type = genomic DNA
gcttgttgggaaaaaatgttggaagggggagcattaggaa

SEQ ID NO: 36606 - protein, 516 aa, Clostridium botulinum
MKRIAIYSRKSRETDTGESIKNQIDMCKTYFNRADEDCSFEIFQDEGFSGGNINRPSFQRMLELAKHKQFDIIAVYKVDRIARNIVDFVNIYDELENHDIKLVSITEGFDPSTPIGKMMMMLLASFAEMERMNIAERVRDNMKGLAKIGRWSGGTPPTGYKNKTIINDNGKKESYLELIPEKKQLLISIFGKAADGYTTYQIGKMFNMSPKTVSNILCNPTYVKSDELSANYLKSIGYSVFGELNGNGYLSYNRRPKKKGKKLFNAKGMFTAVSTHEAPIDSKTWIKANNNLKDRSTEAKPRISSNSFLAHLVKCSCGSGMYIHTGHAKKDGTKNLYFVCSKKKGGSKCTSRWLRVDGVEKKVLSVLKKISLNPKLLESYLKQKNKHIDYTESIKNIKKQINKNDEKINSLTDKIIFLKGTAIDIVSKKINNLADENSRLNEQLLALERKKMFSEVDGENIRLLTVNINQFLQNFDKIDTTERQIFIKSIIKKIVWNSNANNNKGKKGKISIEFLE

SEQ ID NO: 36607 - DNA, 50 bp, Clostridium botulinum
  source 1..50: mol_type = genomic DNA
agacataattttgactgtattgcatgtgcaatacagttaaaattgatgct

SEQ ID NO: 36608 - DNA, 40 bp, Clostridium botulinum
  source 1..40: mol_type = genomic DNA
cggtggcggttgggccggatgtgccgcagctataagtgct

SEQ ID NO: 36609 - DNA, 50 bp, Clostridium botulinum
  source 1..50: mol_type = genomic DNA
agacataattttgactgtattgcaactgcaatacagttaaaattgatgct

SEQ ID NO: 36610 - DNA, 40 bp, Clostridium botulinum
  source 1..40: mol_type = genomic DNA
gggtgctgcatggggaggaactgccgctgctataggttct

SEQ ID NO: 36611 - protein, 654 aa, Enterobacter asburiae
MKPKLYSYVRFSSAKQRDGNSLERQQDTAAKIAERYDLELDSTAYHDLGMSAFKGKNAYEGKLSEFISQIGKKVPKGSWLVVENLDRISRDDAWSALDIFKSLLKKGIIVVTGMDEKVYKYADVKNNPTDLIISLLMFTRAHDESLTKKNRVEAQARTLIRYNLSRQPGTAAKAIESIGQNVWWVDTKSGNVEPHPVYYNTAQKIIELKQSGETLLGIQRYLNEHYPAPKKRVYKNQEGNIQPPKTEKWGKHLLRTFLNPTVHGQKTFTLDKRDESGAVIYDTDTDEPLKETYTIPDYYPALMSEIDYLTLSQLDHHRAVTRSSFNHPEGNPEPEIPLLSELGILFCGNCGSFMFKSGSSKNKYRYICGSKIVQGKPCGKKGFTSYQLEHAVLQLIADHVWTNHLEDKTDWYKSEIAKESERIEKLLKLAILTDDIDALAEQINDRKKIKAQLENEFKRYKISRSETQTSGWEQFKHFDVHDTKNPDRKRIRLRVRQAIKRIDCYDINDRYGHFSILFADDKKQRIAIKFNRNRSPGTTYVESQTIKNHDLIKTQGLVLHSFIDELIDPEKFASQLKKDQEASILKPTFITELEEGLHQEIEGKVATYVVTSNESGKATVIIDGVIHDINSLEDIDKFEVDKKHVLLNPQTNHR

SEQ ID NO: 36612 - DNA, 50 bp, Enterobacter asburiae
  source 1..50: mol_type = genomic DNA
actgcgaataattgactattaggcttgccaaaagtacaattattcattgt

SEQ ID NO: 36613 - DNA, 40 bp, Enterobacter asburiae
  source 1..40: mol_type = genomic DNA
gcagcgggtattggcaggcttgccctccggcattcctggg

SEQ ID NO: 36614 - DNA, 50 bp, Enterobacter asburiae
  source 1..50: mol_type = genomic DNA
actgcgaataattgactattaggcaagccaaaagtacaattattcattgt

SEQ ID NO: 36615 - DNA, 40 bp, Enterobacter asburiae; identical to SEQ ID NO: 9770
  source 1..40: mol_type = genomic DNA

SEQ ID NO: 36616 - protein, 578 aa, Intestinimonas butyriciproducens
MSNDVSLDINQESNPVQTVAPPKEDNDMLRATDKITALYCRLSVEDTKEKGGKDDPSNSIQHQQLMLMEYAKSQHFPNPTFFIDDGYSGVDFSNRPGFQKMLAEIEAGHVEVVITKDLSRLGRNSSLTGLYINYTFPQYGVRYIAINDHFDTIDPNSTDSDMAGIKNWFNEWYSKDTSRKIRAVNKAKGERGERLTTNVPYGYKRDSDDPKKWVIDEEAAQVVKRIFALCMEGKGPSQIAALLEKEKVLNPTAYKQREGRKTPHQTPENEYRWHESTVAYILEYMEYTGCTVNFKTYTNSIWDKKQRENPMENRRIFYNTHPAIISLEVFDKVQEIRQQRHRRTATGKSNMFSGLVFCNDCKQKLYYSTTSYFEKRQDFFICSTHRVNKDKCSGHYIRAVVLEQIVWKHIQEVISVVTRYEAYFRSEMEQKLRIQSEESLRLHQKRLAQAEKRIGEIDRLFIRIYEDNVAGRLDDERFAMMSKNYTEEQKDLKAEVKNLQQQIHEQEQQAENIEQFVQRVKRNSTLTELTPYALRELVKVVYVDAPDKSSGKRRQKVHIEYDLVGYIPVDKLLKAEQA

SEQ ID NO: 36617 - DNA, 50 bp, Intestinimonas butyriciproducens
  source 1..50: mol_type = genomic DNA
ttactgtcttaccagcagggagcctttgccgtgtgccgataagacagtaa

SEQ ID NO: 36618 - DNA, 40 bp, Intestinimonas butyriciproducens
  source 1..40: mol_type = genomic DNA
ccacaggaaaagcgccgcattgcggcgctttttttaatat

SEQ ID NO: 36619 - DNA, 50 bp, Intestinimonas butyriciproducens; identical to SEQ ID NO: 36617
  source 1..50: mol_type = genomic DNA

SEQ ID NO: 36620 - DNA, 40 bp, Intestinimonas butyriciproducens
  source 1..40: mol_type = genomic DNA
ctacagtaaaagtgcctcattggagggcttttattaaaaa

SEQ ID NO: 36621 - protein, 487 aa, Butyrivibrio crossotus
MTLKNACAYIRVSTDKQEELSPDAQKRLIIDYCKKNGYTITNENIFIENGISGKKADKRPEFKRMIALAKSKEHPFDVILVWKFSRFARNQEESIVYKSMLKKANVDVVSVSEPVIDGPFGSLIERIIEWMDEYYSIRLSGEVIRGMTEKALRGGYNAQPPLGYRKNSDTGVPEIYEPEAVIVRNIFSFISQGLSLIDTARSINNMGFHTRRGGMFEQRTIRYIIENPFYYGYVRWNRQNPSEHTIKDKSEWIIAPGAHPVLINKESWDFANEQLIKISRPYKERGTSGIKHWLSGIVKCSSCGSSLVSNSLWKGHSTSFQCSGYNKCKCKVSHYIKTERLEAGIYEGFLKVLSSKNVTYEKVSEHSYEEKVDTAALLKNIEDKERRIKQAYRDGIDTLEEYKDNKAILQKEREKVMEIISRQQPTVQDEDNETMLRQIKNAYEIIKNEDLDKLTRANAIRSVVSKAVYDNEKDTLDIYFRLIEKSL

SEQ ID NO: 36622 - DNA, 50 bp, Butyrivibrio crossotus
  source 1..50: mol_type = genomic DNA
gattataccttacggaagtacggtggttcgtacttctgtaaggtatagtg

SEQ ID NO: 36623 - DNA, 40 bp, Butyrivibrio crossotus
  source 1..40: mol_type = genomic DNA
gatcataagccagtacggtggtccggatggtgaggcaggt

SEQ ID NO: 36624 - DNA, 50 bp, Butyrivibrio crossotus
  source 1..50: mol_type = genomic DNA
gattataccttacggaagtacggtgtttcgtacttctgtaaggtatagtg

SEQ ID NO: 36625 - DNA, 40 bp, Butyrivibrio crossotus
  source 1..40: mol_type = genomic DNA
gagcaaaatccaatactgggtcctggatggcgaggaaggt

SEQ ID NO: 36626 - protein, 647 aa, Enterobacter hormaechei
MLRPISYERVSTFQQVEMGKGLVDQRSSLTAFLDKNADKFTNERIFITDEGVSAFKNANISPESNLGKFLQDVRDRKYGKGDALIVTSLDRLSRRSSWSENTIQFIVAAGIVIYDISTDVVLRDDDSFSKILMEIILQRSHNESLMKSVRAKVAWQNKVMRAAANGEVVSNRMPFWLENIDNKYSVKEDQAALIVKCFELYKSGFSTGEIVKRLDDPKWQMVRVSRLIRDRRLLGEHKRYNDEVISNVYPKIIDDELFLTANRMMDTVMTDKKKPAEDLLLEPSVVKQIFSLSESGLGSGAIVKRLPKGWSTVNVLRVLRDKKVVEMKIIDNLTFERINAKLTANGVANRIRKDVTIAQDDYITNLFPRILKCGCCGGNIAIHYNHVRTKYVICRTREEKKRCDAKSIQYTRIEKNILSVVMNVDFGKVLSEDSTKKDKVLEALKIELSALRKEEITYQLKIDERKKSGKKTSLPLMEGLTDVQDRIEETLEQISRSSTINELPKFDYDINCLLDPMNVELRAKVRKELKHVISKVTYQVIDKYILVRLHYYTDVLSHVLIIDNKRGGGDIVSQIAIYTKDSTTIYTTPSFALTTSNDEIPRIHFMENVPLNQIDYELLLISADYVECSDSVTSWMRHNHNFLFANN

SEQ ID NO: 36627 - DNA, 50 bp, Enterobacter hormaechei
  source 1..50: mol_type = genomic DNA
atgttcctattgatgatcgtatgcgtcctttcgtataatctgggaacatt

SEQ ID NO: 36628 - DNA, 40 bp, Enterobacter hormaechei; identical to SEQ ID NO: 20373
  source 1..40: mol_type = genomic DNA

SEQ ID NO: 36629 - DNA, 50 bp, Enterobacter hormaechei
  source 1..50: mol_type = genomic DNA
atgttcctattgatgatcgtatgcagcctttcgtataatctgggaacatt

SEQ ID NO: 36630 - DNA, 40 bp, Enterobacter hormaechei
  source 1..40: mol_type = genomic DNA
aacatatacattgcatctgagctttttttttttttgcaca

SEQ ID NO: 36631 - protein, 557 aa, Ruminococcus bromii
MLQSNKITALYCRLSQEDMQAGESGSIQHQKMILQRYADEHHFLNTKFFVDDGFSGVSFEREGLQAMLQEVEAGRVATVITKDLSRLGRNYLKTGELIEIVFPENGVRYIAINDGVDTAREDNEFTPLRNWFNEFYARDTSKKIRAVKQAQAQKGERVNGEYPYGYIPDPNNRHHLIPDPETAPIVKQVFAMFVSGVRMCEIQKWLAENKVLTIGALRYQRTGQARYQRAMIAPYTWPDKTLYDILARQEYLGHTITAKTHKVSYKSKKTRKNEEEQRYFFPNTHEPLVDEETFELAQKRIATRHRPTKAAEIDIFSGLLFCAGCGHKMYYQQGVNIEPRRFSYSCGAWRNRARTGSECTSHYIRKNVLLDLVLEDMRRVLQYVKEHEQDFICKATEYGDMEARKALAQQQKELSKAQARMTELDTLFRKLYEDNALGRLTDERFVFLTSGYEDEKKSLAARIDELQQQIATVTERKRDISRFIQIVGKYSDIQELTYENVHEFIDRILIHELDRETNTRKIEIHYSFVGQVDTEQEPTQVVNHDRRNMVDVKSIAI

SEQ ID NO: 36632 - DNA, 50 bp, Ruminococcus bromii; identical to SEQ ID NO: 11442
  source 1..50: mol_type = genomic DNA

SEQ ID NO: 36633 - DNA, 40 bp, Ruminococcus bromii
  source 1..40: mol_type = genomic DNA
tcaaaactccgggcggttcaatgaccttccaccattcatt

SEQ ID NO: 36634 - DNA, 50 bp, Ruminococcus bromii
  source 1..50: mol_type = genomic DNA
aagtatcgctatctaaccccagcagttaatgaggtgtgatagcgatagcg

SEQ ID NO: 36635 - DNA, 40 bp, Ruminococcus bromii
  source 1..40: mol_type = genomic DNA
tcaaaacttgcagcagtttgttgaacttcaaccattaata

SEQ ID NO: 36636 - protein, 534 aa, Dehalococcoides mccartyi
MTVKLEADMVNNLGKAAIYARVSSERQAEKDLSIPAQIKALRKYALERGWDVVVEYVDEAESARTANRPAFKEMIAMAKKKEKPFDTILVWKLSRFARNREDSILYKSLLRKRGISVISINEQVDESPAGHLLEGIIEVIDEFYSINLSQDTVRGMKENASRGFYNGGFTPFGYKRTKVKIGMADKTKLIPDENEANVVKKIFEMAVGGLGGKEITKSLNAAGTRTKSGKQFSTTAINHILRNEVYTGALVWRFRNNGYGNSRKAASNDIIRVPNCHEAVVSTEDFGRVQQLLTRRRPVSQHPRTISSQYLLSGLLHCGKCGAAMSGCWAKSGKYFYYDCVQHQKKGKEVCNCRLMSKDKLESFVLERIRENILTDENIKQLVQLVNEELVKNSGYFEEQLSEVGQQLGQVKSKLSKLYAALETGKIDLEDLAPRIKELRSQQIELEEKRNGLLDEMNEESPQSLNIKTIQEYVSSMKALLASSSFIEQKSFLRSFVKRIELNEPHVVIDYTMPLPINGLTTTEEVLCIDKLGS

SEQ ID NO: 36637 - DNA, 50 bp, Dehalococcoides mccartyi
  source 1..50: mol_type = genomic DNA
gttctgtgtattgataaacttggctccccgaatgggtcaatacacagaac

SEQ ID NO: 36638 - DNA, 40 bp, Dehalococcoides mccartyi
  source 1..40: mol_type = genomic DNA
cggttttatatactttggctcccgaggtaggactcgaacc

SEQ ID NO: 36639 - DNA, 50 bp, Dehalococcoides mccartyi
  source 1..50: mol_type = genomic DNA
gttctgtgtattgataaacttggcagcccgaatgggtcaatacacagaac

SEQ ID NO: 36640 - DNA, 40 bp, Dehalococcoides mccartyi
  source 1..40: mol_type = genomic DNA
tggtgttctattctcctgcagccgagctagcactcaaacc

SEQ ID NO: 36641 - protein, 613 aa, Vibrio splendidus
MAVPTIVNYARVSSTKQLQGVGLETQLQREILEELSLEHGLHIHHEAYVDYGLSAYNGEHKTGDLGRLLSHIEEGKIASGSIIVIYSLDRLSRQEVNEAMSDLLYILNRGVRIYSQADDQLYCRRSSSMFIDLMKSLISMERAHEESRVKSQRVKDAMKVGLKQWYETGKPQSTLGRVPLWIDQPTNEFNDNAQGIQKAVDLLLEGKTPYGVKIYLDKHFPFKVVKKRKFENDKMWSIDTITALHTRVSLIGTKVVRVDEVSHELEGYYPPLIDQKTFFRLKQIRAKTSGRATKNDKIHVLKGLATCHHCGSKMVFVDKGRPEPTYICSNASKGNHPREAFNVRVLEYLSLEISKDIYLSEKASLELIDNSEVRVKEELESAHERLEDLTKLYREKKSLTIAELIVEAEEQIELLTSNKKDLKDEQFRVTSNYLKDDLYTDAVRKDFTEQSRAKHSEGLRNVLDRVILSRVEQVSQFTKTGSVSCIKICWLFKNGQKRELTVNPFEYVNDDESKEIYIPYRYKYDVPIDEFTRSSTLIHHCLKRLHEWNLLEKLYPSKGRYQWKERKLNLGQVSSAMTNMMPKGVDLGNCESIRRAFSVSGIQHTQIESNFRY

SEQ ID NO: 36642 - DNA, 50 bp, Vibrio splendidus
  source 1..50: mol_type = genomic DNA
cgaagaaaaatacttgacattggttcgccaaaaaagaacaatttccttcg

SEQ ID NO: 36643 - DNA, 40 bp, Vibrio splendidus
  source 1..40: mol_type = genomic DNA
gaagaatatttgctgtggttcgataaaaaagggttcccct

SEQ ID NO: 36644 - DNA, 50 bp, Vibrio splendidus
  source 1..50: mol_type = genomic DNA
cgaagaaaaatacttgacattggtctgccaaaaaagaacaatttccttcg

SEQ ID NO: 36645 - DNA, 40 bp, Vibrio splendidus
  source 1..40: mol_type = genomic DNA
gaaaaatatttggtattctctgataaaaaattcttcctcg

SEQ ID NO: 36646 - protein, 534 aa, Longicatena caecimuris
MDILSWKRKMTYGMILSEATVCAVAFFVERGIFMARKSRKHQHAEMVKTSIAKAVGYVRLSVANQEESSSIQNQKFIIECWGDQHQIPISNYYIDNGFSGKRFDRPAFQKMSKDILAGKINCVIVKDLSRLGRDYITTGYYIEVIFPANGVRFVSVNDQFDTIDGITNQERPYSSRIRVPITNAFNEQVSIGIKKKVEANLDMKAQHGTFIGPRAPFGYQKSESNRDQLIPDPKAAIIVRKIFELAANGTGVTAIVRYLNEKDIPTPIQYARSNGLAGNYDDGRGDWNSRSVKYILTNRTYTGMLVQGKEKRAVAATHEPLVDTDTFDAIQRSFQAKAFNLTTNSQSTENVLKGKVICGCCGGKMQRKRGTNHADWYFFTCITKNRLGAGKCTGMYVREEDVFSAVYYQLKLYINYHFITKDQYKQEIQHLDSTIEAASIKYGEATDFSMKLYEKYVMGEGSKEAIAAARPAKEQAEVELNRAIANKVAYEEQYRVFCKLLKASRKEVPLNEIVDCIEQIVVDVDGRIMVKWTK

SEQ ID NO: 36647 - DNA, 50 bp, Longicatena caecimuris
  source 1..50: mol_type = genomic DNA
ttgtcgtgggcttgacatacgggtgcctaagctcgtggaagcgacaaatg

SEQ ID NO: 36648 - DNA, 40 bp, Longicatena caecimuris
  source 1..40: mol_type = genomic DNA
aataaagacacgtgagagtggcgcaaatcatgaatgcgta

SEQ ID NO: 36649 - DNA, 50 bp, Longicatena caecimuris
  source 1..50: mol_type = genomic DNA
ttgtcgtgggcttgacatacgggtcactaagctcgtggaagcgacaaatg

SEQ ID NO: 36650 - DNA, 40 bp, Longicatena caecimuris
  source 1..40: mol_type = genomic DNA
aatcaaaacagctgatagtcacccacatcatgtatgtgtg

SEQ ID NO: 36651 - protein, 557 aa, Hungatella hathewayi; identical to SEQ ID NO: 11441

SEQ ID NO: 36652 - DNA, 50 bp, Hungatella hathewayi; identical to SEQ ID NO: 11442
  source 1..50: mol_type = genomic DNA

SEQ ID NO: 36653 - DNA, 40 bp, Hungatella hathewayi
  source 1..40: mol_type = genomic DNA
aaagaatccgggaaagaaaaagggcggcgcaggctcctcc

SEQ ID NO: 36654 - DNA, 50 bp, Hungatella hathewayi
  source 1..50: mol_type = genomic DNA
aagtatcgctatctaaccccagcaggtaatgaggtgtgatagcgatagcg

SEQ ID NO: 36655 - DNA, 40 bp, Hungatella hathewayi
  source 1..40: mol_type = genomic DNA
aaaggatccggaagaaaaagggggctggtctggctactca

SEQ ID NO: 36656 - protein, 459 aa, Lachnospira eligens; identical to SEQ ID NO: 12866

SEQ ID NO: 36657 - DNA, 50 bp, Lachnospira eligens; identical to SEQ ID NO: 12867
  source 1..50: mol_type = genomic DNA

SEQ ID NO: 36658 - DNA, 40 bp, Lachnospira eligens
  source 1..40: mol_type = genomic DNA
cttagaatcaagattgcctgtcggctcatctgcaaatata

SEQ ID NO: 36659 - DNA, 50 bp, Lachnospira eligens
  source 1..50: mol_type = genomic DNA
tgttgtactatctcatacgctcctataggtgcgttatagttagtacaaca

SEQ ID NO: 36660 - DNA, 40 bp, Lachnospira eligens
  source 1..40: mol_type = genomic DNA
catggaattaaggttgccaatcagctaaccttaaaatata

SEQ ID NO: 36661 - protein, 537 aa, Enterococcus faecalis
MREQQNYRAAIYCRLSSEDGADHESMSIGNQRALLAEYVQKQGWEIVDTYIDDGFSGTNFDRPGFQRMIADIEKGRINLVITKDLSRLGRNYIMCGQYTEIYFPERHVRYIALNDGVDTLNQTSSMDITPFKHILNDMYAKDISTKIKSTLHTKAKRGEYLGALDPYGYLRHPDDKHKLIINEETAPVVRRMFEMCAAGIGSKSIATTLNREGILSPTEYTRFRKHNPERDGEFERRSFWTRTYVQFMLKNEIYVGSMVQGRQYTPSYRSKKREPIPKKDWIVVPNMHEPIVSRELFDEAQKRMGARKKTIKAKDEPDLFAGLFFCEACGTSMVPKVSQQKYFYYTCGRSHAIGNLACSAHYINRDTFHQAVLEDIRRNARLFSEDTEKAAQKLMELKCADQQKQTAAMKRDLASAKKRLADLDVKLKRTYEDNMSGKLPDHIFAMFIADYDTERETLKAKVAELEKALEKVRDAKADIDRFAALIQKYTSFEKLDRFMLHELIDRITIYETPGMGRCRKGKEKRITIYYKFVGTIQ

SEQ ID NO: 36662 - DNA, 50 bp, Enterococcus faecalis
  source 1..50: mol_type = genomic DNA
ttacgtccttttgacatatcatcatctgacgaccagacgaatagacgtag

SEQ ID NO: 36663 - DNA, 40 bp, Enterococcus faecalis
  source 1..40: mol_type = genomic DNA
gacaccaggtaaaacatcttctgttgttaaatgttctaat

SEQ ID NO: 36664 - DNA, 50 bp, Enterococcus faecalis
  source 1..50: mol_type = genomic DNA
ttacgtccttttgacatatcatcagatgacgaccagacgaatagacgtag

SEQ ID NO: 36665 - DNA, 40 bp, Enterococcus faecalis
  source 1..40: mol_type = genomic DNA
tactgcaaataaaacatcagaagtagttaaattttctaaa

SEQ ID NO: 36666 - protein, 545 aa, Sphingobium yanoikuyae
MNRIALYARYSSDQQSAASIEDQLRICRERAAREDWHVVGVYEDAAISGSSMILRPGIQSLVQDAQAGKFDIVLAEALDRVSRDQADVATLFKHLQFARVPLVTLAEGEISELHVGLKGTMNALFLKDLAKKTHRGQRGRVEKGFSAGPVGYGYRTVRRLSSEGELVRGECRIEPSEVPIVERIFREFAAGKSPRAIARDLNADGIPGPSGRPWSDTTIRGKRARGIGIINNEMYVGVRVWNHKHHLKDPRTGRAVARTNPESEWVRVEVPQLRILSDQMWQAVKERQDALAVEYKPQIDGFHSAQASRMHMARRPAYLLSGLVECGVCGDKMGVVTKGRIGCLNHHRRHVCTNHRTIRRELLEQRALSGLAERLVSPDKVQAAVAAYAEYINRENRQQRAQADADAKALEKIDKAVAGIMAAIEDGLYQPVMKARMAELERQKAEITARMAQAPQAIPDVHPGIAEIYKREMQRFTQALEDPETRLDAADAIRSLIERIVLHPGEKHGEIRATLHGALMGILDFVQDTPRPKAIVTTKVALGSL

SEQ ID NO: 36667 - DNA, 50 bp, Sphingobium yanoikuyae
  source 1..50: mol_type = genomic DNA
tgttacgacaaaggtggccttgggttcactggccccccattggtgtaatt

SEQ ID NO: 36668 - DNA, 40 bp, Sphingobium yanoikuyae
  source 1..40: mol_type = genomic DNA
aagaagagagatgccagccttcgctggcatgacgaacggt

SEQ ID NO: 36669 - DNA, 50 bp, Sphingobium yanoikuyae
  source 1..50: mol_type = genomic DNA
tgttacgacaaaggtggccttgggtacactggccccccattggtgtaatt

SEQ ID NO: 36670 - DNA, 40 bp, Sphingobium yanoikuyae
  source 1..40: mol_type = genomic DNA
aggaagggagatctcagcttaccctggcaggatgaacaga

SEQ ID NO: 36671 - protein, 632 aa, Roseburia intestinalis
MRKAGGCNNMTYDSIDLNSSLRVVIYNRCSTEELAQVDALERQVEYSRDYCLKRNWIIVHQYVEAKSGTSAEHRYEYRKLYAGLSTMDYDLVVVKSQDRLMRSDLEWNLFIRELLKTGKRLFFYIDSKLYNHEQDHMVYSMISKFNEFQSVMLSEKIRDAHAKRQEFKTGINVCREMFGWDKIETNVYRINEEEAAAIREAFELVRDGMGFYRLAKYMYEKGYRSKGTSGTRSMEPGMISATWWRNGCIYNPRMHGTIVMNKDNMNFWTKKREQNPEEEWIYYENALPAIVSKEYQEETIEMLKNRGYKTGLGDRILTGKHLYTNKIVCKSCGCYYYCYRVKAGTENELKNWKCSKKLQLGQEQCNNIIIEETVLSDLIDEKAKEKFSQLFQKDTGIIDKAMKYIEIALKDDSNDSILSNLEEELQRQEKKKDILFNKLMDGVINDSDFQEYNEKLQNEIKKLTDKISVLKSMRYSYNDYKAKLEQIRKVLHNSSIEHDAITIQLKNIIEKIEVEPNSHVTVTFEKDKLSDLLGLYNVIEIIDKIDKDIFTLEFDYYREKKWEKQRRETNEKILKLFSENPSLQIPECAKILDMKYSYVYTSIAQLRKMGKLEHKQLDFTTGIWIVKQGGQA

SEQ ID NO: 36672 - DNA, 50 bp, Roseburia intestinalis
  source 1..50: mol_type = genomic DNA
tagatttaaaataagaacactgtcaagacagtgttctttttgaacacctg

SEQ ID NO: 36673 - DNA, 40 bp, Roseburia intestinalis
  source 1..40: mol_type = genomic DNA
ggggattatgaactcatgcaatcctgtttttattgagctt

SEQ ID NO: 36674 - DNA, 50 bp, Roseburia intestinalis
  source 1..50: mol_type = genomic DNA
tagatttaaaataagaacactgtcttgacagtgttctttttgaacacctg

SEQ ID NO: 36675 - DNA, 40 bp, Roseburia intestinalis
  source 1..40: mol_type = genomic DNA
gaggaagatgaccactggctttcctcattttattgtgctt

SEQ ID NO: 36676 - protein, 583 aa, Enterococcus faecalis
MNTKVKLIKASNTGARNRNALHLDLKRVAAYCRVSTDSKDQLESYKSQVDYYTNLIKNNKNWTLAGIYADEATTGTTATKRADFMRLISDCQNGDIDMIITKSISRFARNTLDTLKYVRLLKENNVGVVFEEENIDTLTMDGELLLTILSSVAQQEVENTSAHVKKGLKMKMEKGELIGFQGCLGYDYDPITKSISINEEEAKIVRYIFKRYLEGNGGSVIGRELEEQGYLTPRGKTKWSDTTVLGVIKNEKYIGDILMGKTFTVDPITKRRLANFGESDKYHIENHHEPIISKEDFEKAQEIRLRRAQNRNTIANKDRKREKLSRQYAFSSMLECGFCGEILSRRTWHTSSIYKKINWQCVKSTKKGKKYCPHSKGIQEAAIEKAFVESYRQLCHADSTIIDDFLKIVEEEINDETLVKDLKKLENQLNRIISQERKLVDLHLEDSIDEEVYAKKYKKLTKQKEELLDEKKTLELTIKDEDSIKERLKQFKKVLENREIIEDFNRTVFESIVDKVVVGRIDKDGTVHPYDLTFYFKTGVKDSQDSNNFKDKRKNAKDNDINKLCSYKNDEDKKLCSQAKDNA

SEQ ID NO: 36677 - DNA, 50 bp, Enterococcus faecalis
  source 1..50: mol_type = genomic DNA
ttatgttcccaagcaaaagacaatgcatgtggagactatagcgttgatac

SEQ ID NO: 36678 - DNA, 40 bp, Enterococcus faecalis
  source 1..40: mol_type = genomic DNA
ataatttcccacaaacgacccacattgaatctgtcacgtt

SEQ ID NO: 36679 - DNA, 50 bp, Enterococcus faecalis
  source 1..50: mol_type = genomic DNA
ttatgttcccaagcaaaagacaatcaatgtggagactatagcgttgatac

SEQ ID NO: 36680 - DNA, 40 bp, Enterococcus faecalis
  source 1..40: mol_type = genomic DNA
ataaatgccaagaaaagaccaccaagtaatctgtcacttt

SEQ ID NO: 36681 - protein, 581 aa, Escherichia coli; identical to SEQ ID NO: 1621

SEQ ID NO: 36682 - DNA, 50 bp, Escherichia coli; identical to SEQ ID NO: 1622
  source 1..50: mol_type = genomic DNA

SEQ ID NO: 36683 - DNA, 40 bp, Escherichia coli
  source 1..40: mol_type = genomic DNA
aatcgacaaggtttttcggacagccaagggaaacaaagcc

SEQ ID NO: 36684 - DNA, 50 bp, Escherichia coli; identical to SEQ ID NO: 1624
  source 1..50: mol_type = genomic DNA

SEQ ID NO: 36685 - DNA, 40 bp, Escherichia coli; identical to SEQ ID NO: 1625
  source 1..40: mol_type = genomic DNA

SEQ ID NO: 36686 - protein, 581 aa, Escherichia coli
MPQLYSYIRWSSDRQDKGTTKSRQVAAAKAYAEEAGLELVEIIDPGVSAFRGKNRAGKLGDFIDAVKNNAIPSDSWLYCENLDRLSRDQVDEALRLFLELIGLGLTIVTGMDRKVYNRESIRQNPTDLMISILMFIRGNEESETKSHRTIGNVVALVERHKNGLPVNIKSVGRHPFWIDDSGSQYEAVKKHPVYWSIAREALDMFISGHGVYSVKRALDKKYPNGLRGKEWDYQVLKKMRDNRALIGERTIKVDGQPYKLCNYYPALCKDETEFLILAEKKKQNKFISKKCTTDKIRLLSGFSILRCSKCGGTMHSFMNKNVHRYICTNGTHKQKNCSGWSVIGSLVEHCTMIALLIGYINQSRKNGCDTTSIDEDIINKQSVIEGLNSKITNLTLAISIAKDVNELATLLQSLNTQREKLLVEIEKLKERSVSLKAKGSFEIEITDFLILIQYATFKNLEDENRNKIRKVIHSIIEFIVIDKTDSCITIYIKCYGIDEVFIFGGVQRKPYWRFDIGIINDSKLQMISNYDKNIGRTKERKNKEYLDGLRESYQGLYESAVLMLNEMGYPDINGALFWPNR

SEQ ID NO: 36687 - DNA, 50 bp, Escherichia coli; identical to SEQ ID NO: 1622
  source 1..50: mol_type = genomic DNA

SEQ ID NO: 36688 - DNA, 40 bp, Escherichia coli; identical to SEQ ID NO: 36683
  source 1..40: mol_type = genomic DNA

SEQ ID NO: 36689 - DNA, 50 bp, Escherichia coli; identical to SEQ ID NO: 1624
  source 1..50: mol_type = genomic DNA

SEQ ID NO: 36690 - DNA, 40 bp, Escherichia coli; identical to SEQ ID NO: 1625
  source 1..40: mol_type = genomic DNA

SEQ ID NO: 36691 - protein, 581 aa, Escherichia coli
MPQLYSYIRWSSDRQDKGTTKSRQVAAAKAYAEEAGLELVEIIDPGVSAFRGKNRAGKLGDFIDAVKNNAIPSDSWLYCENLDRLSRDQVDEALRLFLELIGLGLTIVTGMDRKVYNRESIRQNPTDLMISILMFIRGNEESETKSHRTIGNVVALVERHKNGLPVNIKSVGRHPFWIDDSGSQYEAVKKHPVYWSIAREALDMFISGHGVYSVKRALDKKYPNGLRGKEWDYQVLKKMRDNRALIGERTIKVDGQSYKLCNYYPALCKDETEFLILAEKKKQNKFISKKCTTDKIRLLSGFSILRCSKCGGTMHSFMNKNVHRYICTNGTHKQKNCSGWSVIGSLVEHCTMIALLIGYINQSRKNGCDTTSIDEDIINKQSVIEGLNSKITNLTLAISIAKDVNELATLLQSLNTQREKLLVEIEKLKERSVSLKAKGSFEIEITDFLILIQYATFKNLEDENRNKIRKVIHSIIEFIVIDKTDSCITIYIKCYGIDEVFIFGGVQRKPYWRFDIGIVNDSKLQMISNYDKNIGRTKERKNKEYLDGLRESYQGLYESAVLMLNEMGYPDINGALFWPNR

SEQ ID NO: 36692 - DNA, 50 bp, Escherichia coli; identical to SEQ ID NO: 1622
  source 1..50: mol_type = genomic DNA

SEQ ID NO: 36693 - DNA, 40 bp, Escherichia coli; identical to SEQ ID NO: 36683
  source 1..40: mol_type = genomic DNA

SEQ ID NO: 36694 - DNA, 50 bp, Escherichia coli; identical to SEQ ID NO: 1624
  source 1..50: mol_type = genomic DNA

SEQ ID NO: 36695 - DNA, 40 bp, Escherichia coli; identical to SEQ ID NO: 1625
  source 1..40: mol_type = genomic DNA

SEQ ID NO: 36696 - protein, 542 aa, Flavonifractor plautii
MMTIRKLREQMRMGRSIYDLPLRVTYYARVSTEKVEQQGSLENQVQYYTEFIQKNPNWTFVQGYVDEGISGTSTYKRESFLRMIDDAHRGLFDFIITKEISRFSRSTLDSIQYTQELLDANVGVLFQNDNINTLDTDSEFRLVVMAGVAQDEVRKLSERLKFGFRQSIKNGHVLGNNRLWGYDKKDCKLTIIPEQAEAVKLVFELYATGKYGIRKIAQELTRRGHTSLLGNEFNQLTIKHMLTNPKYKGWYCGNKTQTLDYRTKKKAFLEESEWVMYPDPNIPAIVSEELWDRANAIFKQRSREVRTKSTSYHNRYAYSGKIVCGIHGTSLQRQSFKTQKGVREFWRCKMYRQKGKDACSLPSVRSDEVDLVLADLFQKVVTEKAQIIRLVLNSIGETNNSVDYSAQIGRIEVQISQIEEKKDKLLELSMADAITLSEFKVRNDRFNRQISALEEQKATLQQQEQVQKGTEINAEALEKALWEELDFTNGIHSEVVATILDHIVVLEQSNDKQIHLEIYLRLGQQASVHFQRGELVVCNSPS

SEQ ID NO: 36697 - DNA, 50 bp, Flavonifractor plautii
  source 1..50: mol_type = genomic DNA
attagtcgtttgcaatagtccttctttaacggctaaagcaaacgaccaat

SEQ ID NO: 36698 - DNA, 40 bp, Flavonifractor plautii
  source 1..40: mol_type = genomic DNA
attgggggtatagtacttcttaacaatgtgggccaccaag

SEQ ID NO: 36699 - DNA, 50 bp, Flavonifractor plautii
  source 1..50: mol_type = genomic DNA
attagtcgtttgcaatagtccttcactaacggctaaagcaaacgaccaat

SEQ ID NO: 36700 - DNA, 40 bp, Flavonifractor plautii
  source 1..40: mol_type = genomic DNA
atggggactataaagcttcacatcaattttggccaccaaa

SEQ ID NO: 36701 - protein, 620 aa, Escherichia coli; identical to SEQ ID NO: 2676

SEQ ID NO: 36702 - DNA, 50 bp, Escherichia coli; identical to SEQ ID NO: 2677
  source 1..50: mol_type = genomic DNA

SEQ ID NO: 36703 - DNA, 40 bp, Escherichia coli
  source 1..40: mol_type = genomic DNA
gtgcagcgtcaatggcttcttccagcgttgcgtacatggt

SEQ ID NO: 36704 - DNA, 50 bp, Escherichia coli
  source 1..50: mol_type = genomic DNA
aaatgtaaaaatattctcaacttctgcaagcgttgcataaaaatacatgt

SEQ ID NO: 36705 - DNA, 40 bp, Escherichia coli
  source 1..40: mol_type = genomic DNA
gtgcagtttcaaccttttctgccagcgttttgtaaatgtt

SEQ ID NO: 36706 - protein, 620 aa, Escherichia coli
MLLSDIILSLSEQIIVMIQSIDADSKSVKPLVHVTIYCRVSSLMQTDGYGLQRQQDAIRAYLEDFDVPKELGYEIDRDNYVLLEDAGKSAYHGYHFSKGQLGQFRQKVLDGEITSGLFIIENVDRFCRMEEYLAIQEFTNLINNGIDILEVDTGEIFSRKVRKSLNKLMVSIERAYAESERKSRISTRSWKNRKRKSLEEGIAINNNTPDWLSLSEDKQSYIVNKERVEILNQIFKMYAEGFGGTAIVNKLNKEKRYYNKTSWSTNKFYHLLRNRRLIGFLGDERHYPAVIDSILFEQVQSLLNGNVRKGKKAGTMMRSIFNGIAKCGFCGNGMICQTMTSSASYLRCIAERSKTTKCTHAKLIRYKESEQVILEHLCNINWDELKKGNSTHRDDIDVLKTQMSIITDKLQKLDLLIQETEDDDDKISLINIKNKNKKELAAIDEKISALTTNLEIPDMEVLSSLKEIQDLDNVELRQKVYSLLSKTVSSIECTRTDSPDPFYTFIINYIGASEKHLLIVELKNNCKVTRFVEKITDDIVTYYTPSFVVAYSNNWESGLPEIRGLQDCDGITIKAELMDCMHLFSILDRTNRGEAKVIRDWLVIPRVQEFFFHTSAYEGE

SEQ ID NO: 36707 - DNA, 50 bp, Escherichia coli; identical to SEQ ID NO: 2677
  source 1..50: mol_type = genomic DNA

SEQ ID NO: 36708 - DNA, 40 bp, Escherichia coli; identical to SEQ ID NO: 36703
  source 1..40: mol_type = genomic DNA

SEQ ID NO: 36709 - DNA, 50 bp, Escherichia coli; identical to SEQ ID NO: 36704
  source 1..50: mol_type = genomic DNA

SEQ ID NO: 36710 - DNA, 40 bp, Escherichia coli; identical to SEQ ID NO: 36705
  source 1..40: mol_type = genomic DNA

SEQ ID NO: 36711 - protein, 411 aa, Burkholderia sp CCGE1001
MPTAYSYIRFSTPEQSKGDSLRRQLELSEQYAFDNGLTLDTTLTFHDLGVSAYRGGNVERGRLGEFLQACDGGLVLPGSYLLVESLDRLSREAVMEALELFLSILNRGITIVTLGDRRVYRKSSGIDVSMDLIISITIMTRAHDESLTKSRRQRAAWNNKRANIATKKLTARCPLWLKLNDDRTEFSFIPDRAELVREIIGLAKNGMGQAAIAKILNERGTPVFSGNPNGWYPSYIQKILTSKQLYGEFQPGETQNGQKVIKGEPIDDYYPPLITKDEFYSLQAFRAQNYVGGGRAKKGTTIPNLLSGMLKCGYCGSTMVIAGAAAKRIKTADGVTVRPPKKVLVCDAGRRGKGCYAVQWGFNEFETAFLTFCRGVNLDGLLADLRRNSGLPTPASLEDQVKAEEQKISDI

SEQ ID NO: 36712 - DNA, 50 bp, Burkholderia sp CCGE1001
  source 1..50: mol_type = genomic DNA
gtgtgtgttcttcaccacattatggcgaattgacggttatgaacacatga

SEQ ID NO: 36713 - DNA, 40 bp, Burkholderia sp CCGE1001
  source 1..40: mol_type = genomic DNA
gatatgcaagcccgaaatcgccaccagatggctcgtgccg

SEQ ID NO: 36714 - DNA, 50 bp, Burkholderia sp CCGE1001
  source 1..50: mol_type = genomic DNA
gtgtgtgttcttcaccacattatgttgaattgacggttatgaacacatga

SEQ ID NO: 36715 - DNA, 40 bp, Burkholderia sp CCGE1001
  source 1..40: mol_type = genomic DNA
gagatgtaagccagaaatattcaccagctggttagtttag

SEQ ID NO: 36716 - protein, 553 aa, Phytobacter diazotrophicus
MKTKKVYCYCRVSSGRQKTEMGGFGMSRQQNLLMQYINNYDDELKLGYTLDTSDVVFLNAEGVSGFSGKNIAPGSVLHGFIDDIVKGRIKNAVLVLENIDRFSRVNPNTATELFLKLINNGCDIHEAEQETVHHQLSDTNLISAGLTRSHKESLRKQKLSTKNWDKRFDNLIKNKEVHTARCPGWLKVLNGEYNIIEEHARAIRLIFELYNKGYGQAFIRDELNTRGWLYNGKTWGGWNIHRVLTDVRVTGKYRPQSKIRQEYDGMIIYPEIISQSEFKTAEQKLKSKGRSKTISRSANNLFSGMLMCGICNEAHLFVMIDYKNRYCRCSHVVAGNKRCSARGFKYEFLEVALLNHLRKLNDVIIAPVQNEEFDKINDELIYTIKYRDEVRSDIDQEDIPDPSDRRILKNLQIKIRELENRLDDLKKNSTIKDEVNAIAQNITDGLLDRKNVAMRQEFNVHLRKVIKRIAAFRTNSDTILISIEYYSGKELQWLNVDAKDGQVIGNVYISEDEVTFLTKQGTVIYNQKNNTYIQGENIISKDEVLNLLPKDTL

SEQ ID NO: 36717 - DNA, 50 bp, Phytobacter diazotrophicus
  source 1..50: mol_type = genomic DNA
aactgtagattagctgtgcttaccaccatgtatcatgctactatacagta

SEQ ID NO: 36718 - DNA, 40 bp, Phytobacter diazotrophicus
  source 1..40: mol_type = genomic DNA
tcctgttagtccttataccacgataatgtcactacttttc

SEQ ID NO: 36719 - DNA, 50 bp, Phytobacter diazotrophicus
  source 1..50: mol_type = genomic DNA
aactgtagattagctgtgcttacccacatgtatcatgctactatacagta

SEQ ID NO: 36720 - DNA, 40 bp, Phytobacter diazotrophicus
  source 1..40: mol_type = genomic DNA
ttctgagattccttacatccagataatggcacttctatcc

SEQ ID NO: 36721 - protein, 545 aa, Neomicrococcus aestuarii
MSTATTIGSSPLDAASATPMLLAVSYLRVSTREQAERGGTDDGFSIPAQREANARKADDLGARVVREFVDAGESARSVDRDGLKEMLAFIAATRVTFCIVHKLDRLARNRADDVKIHEALISAGVTLVSATESIDQTPSGMLVHGIMSSIAEFYSRNLATEVTNGLTQKLAQGGTPMRAPVGYLNVRRTDEQGREVRTVEVDPERAPLVRWAFETYAKGDTSVTGLLRDLTARGLTTVPSPKRPSKALGKNTLYKLLTNPYYAGVIRYKGALHPGAHEPLIEPTLFDQVQSLLKARNARMTRHVQHAHHLKGLLYCGSCGSRMLLDFATNPRGTTYAYFICSGRAAKKTTCTRRAVPVDVAERLVEDSYRGITISKTDYRPLAAEVAAVFDEQSAGREQEFADLTANRAMLEAESDKLLTAHFADALDLPTLKRHQDRIRAGLTDVEQRLAQHDEHHAGARAFLHDSLRLLTDAHRAYAHSDDGNRRLATQAFYTRLEITDDEQLRPRLAEPFATIVNQATGGEEAKRQHSTSSDVACSRKTLWV

SEQ ID NO: 36722 - DNA, 50 bp, Neomicrococcus aestuarii
  source 1..50: mol_type = genomic DNA
gtgttcccgcaagacactttgggtggacgcaatggagcactccgggaaca

SEQ ID NO: 36723 - DNA, 40 bp, Neomicrococcus aestuarii
  source 1..40: mol_type = genomic DNA
cccaggacactacaaatgtggagcttacgggaatcgaacc

SEQ ID NO: 36724 - DNA, 50 bp, Neomicrococcus aestuarii
  source 1..50: mol_type = genomic DNA
gtgttcccgcaagacactttgggtccacgcaatggagcactccgggaaca

SEQ ID NO: 36725 - DNA, 40 bp, Neomicrococcus aestuarii
  source 1..40: mol_type = genomic DNA
tccaggaaaccacagatttccaggctaaggcaatcgatcc

SEQ ID NO: 36726 - protein, 527 aa, Clostridium innocuum
MSRQSDNKITALYCRLSRDDELQGDSNSIVNQKAILSKYAKENGFKNTLFFVDDGYSGANFDRPSWNELVEKIENGEVATLIVKDMSRLGRDYLRVGLYTDVLFPEKGVRFIAISNGVDSAQQQENDFTPFLNIINEWYCRDTSKKIRAVMKSKGEAGEHLCTNPPYGYMKDPDNKKRWIVDEAAAEVVKRIFALCLEGYGPSQIARILKEDKVITPTIHFQRTDRATRNTPPDNPYNWTGDTIADILERPEYQGHTVNFKTYKQSYKSKKTCYNPKEKQLVFENTHEAIIDADTWELVQELRKNKRRPTRTGKTNLFSGIVRCADCGEKLYYCTSKNFEARQDHFVCSTSRLKGKEVCPTHFIRAVVLEQGVLAHMRLVIACVSTHEERFRKAMGAKQKAEAKKELAAKQRQLTQAERRIEELDRIFKRIYEDNANGKISDSRFQMLSDDYEQEQEELREKLLQLNEEIIQQEEQAENIDRFIDKVRKYLDLDELTPAVLNDMVKAVYVHTPDKSNEHREQQIDIL

SEQ ID NO: 36727 - DNA, 50 bp, Clostridium innocuum
  source 1..50: mol_type = genomic DNA
atgctgttttatgagtgccgccctaaaggtagctactcataaaacagtat

SEQ ID NO: 36728 - DNA, 40 bp, Clostridium innocuum
  source 1..40: mol_type = genomic DNA
acgtaaaaagactcccccaaagggaagagcctttcacaca

SEQ ID NO: 36729 - DNA, 50 bp, Clostridium innocuum
  source 1..50: mol_type = genomic DNA
atgctgttttatgagtgccgccctctaggtagctactcataaaacagtat

SEQ ID NO: 36730 - DNA, 40 bp, Clostridium innocuum
  source 1..40: mol_type = genomic DNA
acataaaatgtgtccccctctgtcaacatcccttcacaca

SEQ ID NO: 36731 - protein, 520 aa, Pectinatus frisingensis
MNIMTAAAYARYSTDGQTVNSIAYQMHEITGYCRQHNIQLTHSFVDEGMSGTNTDRGGFQDMVSAAQRQEFTDIIIYDVTRGSRDVADWFRFRKHMREFGVNVISCKQDLGDPLDPNDFLRELLTVGLGQHSVLETRQKVLDGVASAARAGKFLGGWAPFGYEIVKDATSKGSRYSIVPSEAAIVRKAFELYAVGFTYNYILDQLHLRGVVGRHGKTMSANSLYYMFKNQRYAGTYIWNEYTFQCMRKYIGRKENSRMVKIDDAIPAIVDKETFEKVQERLQINKSRCTRASKRRVFLLTGLIQCAVCGAGYIAHQSRSKGKEYTYYCCSGRYGKKNKPDSCQSSPARGEDLEKFVIEAVKQYLVSGTDFESLAQQVADRFSAASVDVSAEKNELSGIDTKIANGVQAILSGFDAPELRQQIEQLKMRKAELQTVIGSAEQNRRRIDVPTLAAMLRADVENLDSQDDEVVRAAIRRHVPFITANEDGSFTVSIGYTLNKKARKKTPSSEENEVARSMAGA

SEQ ID NO: 36732 - DNA, 50 bp, Pectinatus frisingensis
  source 1..50: mol_type = genomic DNA
cgaggttgcacgttctatggcaggggcagacgaagcaatgtcaaatgtgc

SEQ ID NO: 36733 - DNA, 40 bp, Pectinatus frisingensis
  source 1..40: mol_type = genomic DNA
gtattaataaaatggcaggggcagaaggacttgaaccctc

SEQ ID NO: 36734 - DNA, 50 bp, Pectinatus frisingensis
  source 1..50: mol_type = genomic DNA
cgaggttgcacgttctatggcaggtccagacgaagcaatgtcaaatgtgc

SEQ ID NO: 36735 - DNA, 40 bp, Pectinatus frisingensis
  source 1..40: mol_type = genomic DNA
gtattaagaaaatggaaggtctagaagtatttgacctgat

SEQ ID NO: 36736 - protein, 567 aa, Candidatus Thiodiazotropha taylori
MKVAIYARKSTDDDRNEDNKSVKRQVRSAKAYAKKMQWTVDDDHIYIDDGISGAEYQNRPGFTRLLTNLKEFDILLMSESSRLGRDMLRNAYHVGEIIDKGVRIFYYLTGEEEKADTPEQKIMITLKSYASEVEREKASQRSRDALERKAMKGYNTGGVVYGYDNHQVMVTNAQGEEVKSHTEFRINDDQADVIRSIYRMYADGHGHTTIARTLNGDPRYKHKSEKYFKGQTPPSPRKGTGSWAPSSIRAILYNIRYTGVIPFGKHKKAYRNGTKKRIKQESYHQIEVPELRIVSEKLWSEVQKRLESVKKTYIRDTNGNLWGRPGMGRESKYLLTGLGRCACCGSNITLIGGKSGSPGKRKSVYYYGCSYHKNRGQTVCANDHKEQMDVLDNAVLDAIEQQILTPEAVAYTVEKALEIVEQQLKTDPDQMPRLEAERTKLRGELDRFMNLIASGKAPEAVLEQITQREERIKALEMELGQLGTAETASELDLKRLRKALEERMGRFKDLVYSDVPLARQALRKLLVEPIEFRPVVRNGRKTYSFEGKTRIGDLLDPGYIAMASPRG

SEQ ID NO: 36737 - DNA, 50 bp, Candidatus Thiodiazotropha taylori
  source 1..50: mol_type = genomic DNA
gggttatatagcgatggcgtccccaaggggatttgatgccaatataacta

SEQ ID NO: 36738 - DNA, 40 bp, Candidatus Thiodiazotropha taylori
  source 1..40: mol_type = genomic DNA
ttgttttattggcgtccccaaggggagtcgaacccctgtt

SEQ ID NO: 36739 - DNA, 50 bp, Candidatus Thiodiazotropha taylori
  source 1..50: mol_type = genomic DNA
gggttatatagcgatggcgtccccttggggatttgatgccaatataacta

SEQ ID NO: 36740 - DNA, 40 bp, Candidatus Thiodiazotropha taylori
  source 1..40: mol_type = genomic DNA
ttgttttattggtgagtctttgggaattggaaggcctgtt

SEQ ID NO: 36741 - protein, 684 aa, Paraburkholderia youngii
MTDQTHAKVQARHLKRNAYLYVRQSTLRQLFENTESTERQYNLRQRAIALGWRTDQVVVIDSDLGLSGASSVDRQGFQRLVAEVSLGRAGIVMGLEVSRLARNSTDWHRLLEICALADCLILDEDGVYDPAHFNDRLLLGLKGTMSEAELHVMRARLRGGILNKARRGELETRLPIGFVYDTESRVRLDPDARIQESIRHLFRTFRRTGSATATVKAFREQGLLFPHRVHHGVRKDDVLWSELEHSRVLWVLHHPRYAGAYCFGRTRYRNHPDGQKVSARLPSAEWLSLIPDAHEAYVSWEEFEQNVQVLRENAHALGIDRERGAPREGPALLQGLAICARCGERMTVRYHVKGTHRVPDYMCQRHGVKHGRPVCQHVHGGELDKAIGRLLVETVTPVTLEVALAVQEELESRSDERDRLHRQEFERARYEADLARRRYMQVDPANRLVADSLESEWNQALRALTEAQDHYEKQREADRAGLNDKQRANIMTLARDFPRLWNDPRTPDRERKRMARLLIADATLLKGADICVQIRFNGGATHTLHVPLSKPAWILRQTPRAVIAEMDRLLNEYTESETAEQLNRQGLASGWGKRFTSRMITRLRLSHKLPSHHDRLRARGMLTLDEIAERLNVMPTTIKTWRRAGLLIAHRYDDKGGYLFEPPGAEAPVKFQHQGKTRGRRSAA

SEQ ID NO: 36742 - DNA, 50 bp, Paraburkholderia youngii
  source 1..50: mol_type = genomic DNA
gaggtgcactatgcagcgcagcccttggcaaaagcagtcaactgcacgcg

SEQ ID NO: 36743 - DNA, 40 bp, Paraburkholderia youngii
  source 1..40: mol_type = genomic DNA
cagccgttcgacgatcccgttggtctgcggcgacttggcc

SEQ ID NO: 36744 - DNA, 50 bp, Paraburkholderia youngii
  source 1..50: mol_type = genomic DNA
gaggtgcactatgcagcgcagccccaggcaaaagcagtcaactgcacgcg

SEQ ID NO: 36745 - DNA, 40 bp, Paraburkholderia youngii
  source 1..40: mol_type = genomic DNA
cagcccttcgacgaactctcaggtgtgtggccttctggcc

SEQ ID NO: 36746 - protein, 497 aa, Streptococcus pneumoniae
MSKIALYIRLSVEDQMKKDESESIINQRYFLNDFLDRNDEFKSFQREEYIDDGYTGTNEKRPSFQRMLEEVKSGKINAIIVKDLSRFMRDYISLGDYLENIFPFLGVRFIAINDGYDSAKEKGNGTDLDIQFKGLLYDFYTKDISQKVKTVTTELKKQGKFLAWSPPFGYMKDPDDKHNIIIDEKTAWIVRKVYDLALTGLASRKIAAVMNEENIPTPNERKKELTNMDYEYNIVSSDTRDAPTWTNGTVVDILSNENYTGTYVFNMQEKSVLTPGSFKFNPKEEWGRVYDHHEAIVSREEFERVQAIKENNSFLKGKNTDYPWRKHSPLQGFARCPTCNHILGLTQSKFKRPDGSMRIHKYFHCRICKCNNVEHKNSRVDKLEEQVLSFIKEKYGEAEVKPKEKISIKDIEKKIEKLQAKKMSDFEKYKLGKMTKAKFVESKNQIDNEIDRLKEKIKLSSNEAEVVTDNELTRELMEKYVESVICEGNVVQKIIWK

SEQ ID NO: 36747 - DNA, 50 bp, Streptococcus pneumoniae; identical to SEQ ID NO: 14077
  source 1..50: mol_type = genomic DNA

SEQ ID NO: 36748 - DNA, 40 bp, Streptococcus pneumoniae; identical to SEQ ID NO: 34813
  source 1..40: mol_type = genomic DNA

SEQ ID NO: 36749 - DNA, 50 bp, Streptococcus pneumoniae
  source 1..50: mol_type = genomic DNA
tgtgtcagtcgcttgacacgagagtcgtttcgtgtcataataatgacaca

SEQ ID NO: 36750 - DNA, 40 bp, Streptococcus pneumoniae
  source 1..40: mol_type = genomic DNA
catttaagatccccccatgtcttttcatggcttgatagca

SEQ ID NO: 36751 - protein, 497 aa, Streptococcus pneumoniae; identical to SEQ ID NO: 14101

SEQ ID NO: 36752 - DNA, 50 bp, Streptococcus pneumoniae; identical to SEQ ID NO: 14077
  source 1..50: mol_type = genomic DNA

SEQ ID NO: 36753 - DNA, 40 bp, Streptococcus pneumoniae; identical to SEQ ID NO: 34813
  source 1..40: mol_type = genomic DNA

SEQ ID NO: 36754 - DNA, 50 bp, Streptococcus pneumoniae; identical to SEQ ID NO: 36749
  source 1..50: mol_type = genomic DNA

SEQ ID NO: 36755 - DNA, 40 bp, Streptococcus pneumoniae; identical to SEQ ID NO: 36750
  source 1..40: mol_type = genomic DNA

SEQ ID NO: 36756 - protein, 497 aa, Streptococcus pneumoniae
MSKIALYIRLSVEDQMKKDESESIINQRYFLNDFLDRNDEFKSFQREEYIDDGYTGTNEKRPSFQRMLEGVKNGKINAIIVKDLSRFMRDYISLGDYLENIFPFLGIRFIAINDGYDSDKEKGNGTDLDIQFKGLLYDFYTKDISQKVKTVTTELKKQGKFLAWSPAFGYMKDPDDKHNIIIDDKTAWIVRKVYDLALTGLASRKIAAVMNEENIPTPNERKKELTNMDYEYNIVSSDTRDAPTWTNGTVVDILSNENYTGTYVFNMQEKSVLTPGSFKFNPKEEWGRVYDHHEAIVSREEFERVQAIKENNSFLKGKNTDYPWRKHSPLQGFARCPTCNHILGLTQSKFKRPDGSMRIHKYFHCRICKCNNVEHKNSRVDKLEEQVLSLIKEKYGEVEVKLKEKISIKDIEKKIEKLQAKKMSDFEKYKLGKMTKVKFVESKNQIDNEISKLEEKIKLSSNETEVVTDNELTRELMEKYVESVICEGSIVQKIIWK

SEQ ID NO: 36757 - DNA, 50 bp, Streptococcus pneumoniae; identical to SEQ ID NO: 14077
  source 1..50: mol_type = genomic DNA

SEQ ID NO: 36758 - DNA, 40 bp, Streptococcus pneumoniae; identical to SEQ ID NO: 34813
  source 1..40: mol_type = genomic DNA

SEQ ID NO: 36759 - DNA, 50 bp, Streptococcus pneumoniae; identical to SEQ ID NO: 36749
  source 1..50: mol_type = genomic DNA

SEQ ID NO: 36760 - DNA, 40 bp, Streptococcus pneumoniae; identical to SEQ ID NO: 36750
  source 1..40: mol_type = genomic DNA

SEQ ID NO: 36761 - protein, 497 aa, Streptococcus pneumoniae; identical to SEQ ID NO: 14076

SEQ ID NO: 36762 - DNA, 50 bp, Streptococcus pneumoniae; identical to SEQ ID NO: 14077
  source 1..50: mol_type = genomic DNA

SEQ ID NO: 36763 - DNA, 40 bp, Streptococcus pneumoniae; identical to SEQ ID NO: 34813
  source 1..40: mol_type = genomic DNA

SEQ ID NO: 36764 - DNA, 50 bp, Streptococcus pneumoniae; identical to SEQ ID NO: 36749
  source 1..50: mol_type = genomic DNA

SEQ ID NO: 36765 - DNA, 40 bp, Streptococcus pneumoniae; identical to SEQ ID NO: 36750
  source 1..40: mol_type = genomic DNA

SEQ ID NO: 36766 - protein, 497 aa, Streptococcus pneumoniae
MSKIALYIRLSVEDQMKKDESESIINQRYFLNDFLDRNDEFKSFQREEYIDDGYTGTNEKRPSFQRMLEEVKNGKINAIIVKDLSRFMRDYISLGDYLENIFPFLGIRFIAINDGYDSAKEKGNGTDLDIQFKGLLYDFYTKDISQKIKTVTTELKKQGKFLAWSPPFGYMKDPDDKHNIIIDEKTAWIVKKVYDLALTGLASRKIAAVMNEENIPTPNERKKELTNMDYEYNIVSSDTRDAPTWTNGTVVDILSNENYTGTYVFNMQEKSVLTPGSFKFNPKEEWGRVYDHHEAIISREEFDKVQEIKEKNSFLKGKNTDYPWRTKSPLQGFARCPTCNHILGLTQSKFKRPDGSMRIHKYFHCRICKCNNVEHRNSRVDKLEDQVLALIKEKYGEVEVKPKEKISIKDIENKIEKLQAKKMADFEKYKLDKMTKAKFVENKNQIDNEISNLEEKIKLYSNETEVVTDNELTRELMEKYVESVICEGSIVQKTIWK

SEQ ID NO: 36767 - DNA, 50 bp, Streptococcus pneumoniae
  source 1..50: mol_type = genomic DNA
tgtgtcagttgcttgacacgagaggggtttcgtgtcataataatgacaca

SEQ ID NO: 36768 - DNA, 40 bp, Streptococcus pneumoniae; identical to SEQ ID NO: 34813
  source 1..40: mol_type = genomic DNA

SEQ ID NO: 36769 - DNA, 50 bp, Streptococcus pneumoniae
  source 1..50: mol_type = genomic DNA
tgtgtcagttgcttgacacgagagtcgtttcgtgtcataataatgacaca

SEQ ID NO: 36770 - DNA, 40 bp, Streptococcus pneumoniae; identical to SEQ ID NO: 36750
  source 1..40: mol_type = genomic DNA

SEQ ID NO: 36771 - protein, 497 aa, Streptococcus pneumoniae
MSKIALYIRLSVEDQMKKDESESIINQRYFLNDFLDRNDEFKSFKREEYVDDGYTGTNEKRPSFQRMLEEVKSGKINAIIVKDLSRFMRDYISLGDYLENIFPFLGIRFIAINDGYDSDKEKGNGTDLDIQFKGLLYDFYTKDISHKVKTVTTELKKQGKFLAWSPPFGYMKDPDDKHNIIIDEKTAWIVRKVYDLALTGLASRKIAAVMNEENIPTPNERKKELTNMDYEYNIVSSDTRDAPTWTNGTVVDILSNENYTGTYVFNMQEKSVLTPGSFKFNPKEEWGRVYNHHESIISREEFDKVQEIKEKNSFLKGKNTDYPWRTKSPLQGFARCPTCNHILGLTQSKFKRPDGSMRIHKYFHCRICKCNNIEHKNSRVDKLEEQVLALIKEKYGEVEVKPKEKISIKDIEKKIEKLQAKKMSDFEKYKLGKMTKVKFVESKNQIDKEIDRLEEKIKLSSNETEVVTDNELTQELMEKYVESVICEGSIVQKIIWK

SEQ ID NO: 36772 - DNA, 50 bp, Streptococcus pneumoniae
  source 1..50: mol_type = genomic DNA
tgtgtcagtcgcttgacacgagaggggtttcgtgtcataataatgataca

SEQ ID NO: 36773 - DNA, 40 bp, Streptococcus pneumoniae; identical to SEQ ID NO: 34813
  source 1..40: mol_type = genomic DNA

SEQ ID NO: 36774 - DNA, 50 bp, Streptococcus pneumoniae
  source 1..50: mol_type = genomic DNA
tgtgtcagtcgcttgacacgagagtcgtttcgtgtcataataatgataca

SEQ ID NO: 36775 - DNA, 40 bp, Streptococcus pneumoniae; identical to SEQ ID NO: 36750
  source 1..40: mol_type = genomic DNA

SEQ ID NO: 36776 - protein, 497 aa, Streptococcus pneumoniae
MSKIALYIRLSVEDQMKKDESESIINQRYFLNDFLDRNDELKSFQREEYIDDGYTGTNEKRPSFQRMLEEVKSGKINAIIVKDLSRFMRDYISLGDYLENIFPFLGIRFIAINDGYDSAKEKGNGTDLDIQFKGLLYDFYTKDISQKVKTVTTELKKQGKFLAWSPPFGYMKDPDDKHNIIIDDKTAWIVRKVYDLALTGLASRKIAAVMNEENISTPNERKKELTNMDYEYNIVSSDTRDAPTWTNGTVVDILSNENYTGTYVFNMQEKSILTPGSFKFNPKEEWGRVYEHHEAIISREEFEKVQAIKENNSFLKGKNTDYPWRKHSPLQGFARCPTCNHILGLTQSKFKRPDGSMRIHKYFHCRICKCNNVEHKNSRVDKLEDQVLALIKEKYGEAEVKPKEKISIKDIEKKMEKLQAKKMSDFEKYKLGKMTKAKFVESKKQIDNEFDRLDEKIKLSSNETEVVTDNELTRELMEKYVESVICEGSIVQKIIWK

SEQ ID NO: 36777 - DNA, 50 bp, Streptococcus pneumoniae; identical to SEQ ID NO: 14077
  source 1..50: mol_type = genomic DNA

SEQ ID NO: 36778 - DNA, 40 bp, Streptococcus pneumoniae; identical to SEQ ID NO: 34813
  source 1..40: mol_type = genomic DNA

SEQ ID NO: 36779 - DNA, 50 bp, Streptococcus pneumoniae; identical to SEQ ID NO: 36749
  source 1..50: mol_type = genomic DNA

SEQ ID NO: 36780 - DNA, 40 bp, Streptococcus pneumoniae; identical to SEQ ID NO: 36750
  source 1..40: mol_type = genomic DNA

SEQ ID NO: 36781 - protein, 508 aa, Clostridium botulinum
MKIAIYSRKSIETDTGESIKNQIQICKDYFLRRKNNIEFEIFEDEGFSGGNTNRPAFKLMMSKIKEFNIVACYKIDRIARNIVDFVNVYNELEKHNIKLVSITEGFDPSTPLGKLIMMILASFAEMERENIRQRVKDNMKELAKAGRWTGGNVPFGYISKRIDEGNKKATYLVLDPLKENLIKEIFNTYISTNSMHKVQKWLYDTKNIKWCLSTIKNILTSPVYVKCNKEIIKYLSNFGEVFGDPNGVNGMITYNRRPYTNGKHRWNDKSMFYAVSKHTGVIDPNIWLKVQSIQEKSKITPRPKNSQVSYLTGVLKCAKCKAPMTISYNHKNKDGSITYVYLCTGRKTYGKKYCDCKQIKQNIIDPLVEEGLNAYAKLDIKQFNKIVGTRSKPENNISKIEKSIQKNNIKINNLVDKISMLSNAASNVLLKKIEELTSQNEEFKRELLFLKQEEINNQMTSPEEKFEKIKLFSNALKYADIDTKRELLHSITEEIYWDEDIKDINIVI

SEQ ID NO: 36782 - DNA, 50 bp, Clostridium botulinum
  source 1..50: mol_type = genomic DNA
tactgtatttatatttgtcgtggaacagcaacgcaaatataaataccgta

SEQ ID NO: 36783 - DNA, 40 bp, Clostridium botulinum
  source 1..40: mol_type = genomic DNA
cactgtaggctggattggaacagcatgcactaaaccccct

SEQ ID NO: 36784 - DNA, 50 bp, Clostridium botulinum
  source 1..50: mol_type = genomic DNA
tactgtatttatatttgtcgtggagtagcaacgcaaatataaataccgta

SEQ ID NO: 36785 - DNA, 40 bp, Clostridium botulinum
  source 1..40: mol_type = genomic DNA
cactccaggctggagtgcagtggcatgaacacaactcact

SEQ ID NO: 36786 - protein, 683 aa, Actinomyces oris
MNKNDADERMVSHSTEGSIGGGEHRSEPIVGDVLDNFGDRSGNRSMQVSPSPTIQNSAEQLAQELTPRRAVSYLRVSTREQARRGGREEGFSIPAQRAANKRKAMSIGAIVSKEFTEGGVSATTTRRPALQAMLTYLEEEARAGRPVDYVIVHKLDRLVRNRYDDTTLGKRFDELGVRLVSTSENIDQTPGGLLVHGIMASIAEFYSKNLSNEVKKGMAEKVRNGGCIGRAPLGYRNVITTKNGQEARIVVVDEVRGPLVAWAFKAYASGEWTLRRLAEELTLRGLTTVPTASLPEKPVTVQLLSKVLHNPFYVGEVVYQGVHYAGSHEPLVDRATYESVQTLLATRVNGERTVKHAHYLKSTIYCGICGSRLIVTNVKPRGVVYEYFVCLGRHSKKQPQCLFRATLAEQIEDEIVRLYDRVALRPGQRAVLETALQRQLAVLVAESTQRLTEAKTVRRRLERERDKLLQAHYADAIPLDVLKREQSRISRELRSVERQMTGLEGEMTERQALVGQALDIAQHMATAYRQAPEHIRRMLNQVLFDKVYITPDDETGLLTAMVRYQPPFDGVLGVRDVTTTGDGLQRVDGNAAGAVEEMDDDLDATDGGTGESKTMASDTSASPRDDEVTSSQPSDIVVSAPEGPGLHGLPDDGLPTPKPSKNKQKPTSWGFHDVGLSVDSMVG

SEQ ID NO: 36787 - DNA, 50 bp, Actinomyces oris
  source 1..50: mol_type = genomic DNA
gtgggtttgagtgttgactcaatggtcggggtattcggcctggcggcctc

SEQ ID NO: 36788 - DNA, 40 bp, Actinomyces oris
  source 1..40: mol_type = genomic DNA
ctcatgggtttcctccttggtcggggtggcgggatttgaa

SEQ ID NO: 36789 - DNA, 50 bp, Actinomyces oris
  source 1..50: mol_type = genomic DNA
gtgggtttgagtgttgactcaatgctcggggtattcggcctggcggcctc

SEQ ID NO: 36790 - DNA, 40 bp, Actinomyces oris
  source 1..40: mol_type = genomic DNA
ctgaggggtgtcccccacgctctgggtggcgagattaaaa

SEQ ID NO: 36791 - protein, 551 aa, Stenotrophomonas maltophilia
MATKARVYSYLRFSDPKQATGSSADRQLEYAKRWAAEHGMALDAALSMQDEGLSAYHQRHVTKGALGVFLAAIDEGRIPAGSVLIVEGLDRLSRAEPIQAQAQLAQIINAGITVVTASDGREYNRAGLKAQPMDLVYSLLVMIRAHEESDTKSKRVRAAIHRQCKGWQDGTWRGVIRNGKDPSWTRLDPETKAFQLVPERAEAVRLAIRMFRDGHGAVKIMRTLAEEGLQLTNGGNPAGQLYRILRNRALIGEKVLEIDGEEYRLAGYYPPLLSAEQFADLQQATEQRAKQKGTGEIPGLITGLRISYCGYCGSAMVAQNLMNRGRREDGGPQHGHRRLICVGNSQGMGCAVAGSCSVVPIEHAIMSYCADQMNLARLFEGGDRSEALAGKLAIARARVADTTAKVERITDAMLADDAGDAPAAFMRRARELEASLVEQQAEVDALEHELAAVASSPTPAVAKAWAGLQEGVKTLNYDARTKARQLVADTFERISIYHRGTEPEQTRSWKGTIDLVLVAKRGSARILHVDRQTGEWRGGEEVQDLPDDPIQ

SEQ ID NO: 36792 - DNA, 50 bp, Stenotrophomonas maltophilia
  source 1..50: mol_type = genomic DNA
agtctatttcagccagctttcgggcaccccaatgaaataaaccctatact

SEQ ID NO: 36793 - DNA, 40 bp, Stenotrophomonas maltophilia; identical to SEQ ID NO: 28338
  source 1..40: mol_type = genomic DNA

SEQ ID NO: 36794 - DNA, 50 bp, Stenotrophomonas maltophilia
  source 1..50: mol_type = genomic DNA
agtctatttcagccagctttcgggaaccccaatgaaataaaccctatact

SEQ ID NO: 36795 - DNA, 40 bp, Stenotrophomonas maltophilia
  source 1..40: mol_type = genomic DNA
ctctacaagggccctcgggaaagccaggctgacgacatgg

SEQ ID NO: 36796 - protein, 551 aa, Stenotrophomonas maltophilia
MATKARVYSYLRFSDPKQAAGSSADRQLEYAKRWAAEHGMALDAALSMQDEGLSAYHQRHVTKGALGVFLAAIDEGRIPAGSVLIVEGLDRLSRAEPIQAQAQLAQIINAGITVVTASDGREYNRAGLKAQPMDLVYSLLVMIRAHEESDTKSKRVRAAIHRQCKGWQDGTWRGVIRNGKDPSWTRLDPETKAFQLVPERAEAVKLAIRMFRDGHGAVRIMRTLAEEGLQLTNGGNPAGQLYRILRNRALIGEKVLEIDGEEYRLAGYYPSLLSAEQFADLQQATEQRAKQKGTGEIPGLITGLRISYCGYCGSAMVAQNLMNRGRREDGGPQHGHRRLICVGNSQGMGCAVAGSCSVVPIEHAIMSYCADQMNLARLFEGGDRSEALAGKLAIARARVADTTAKVERITDAMLADDAGDAPAAFMRRARELETSLVEQQAEVDALEHELAAVASSPTPAVAKAWADLQEGVKALDYDARTKARQLVADTFERISIYHRGTEPEQTRSWKGTIDLVLVAKRGSARILHVDRQTGEWRGGEEVRDLPDDPIQ

SEQ ID NO: 36797 - DNA, 50 bp, Stenotrophomonas maltophilia
  source 1..50: mol_type = genomic DNA
agtataggtatttaatccttcgggcaccccaatgaaacaaaccctatact

SEQ ID NO: 36798 - DNA, 40 bp, Stenotrophomonas maltophilia; identical to SEQ ID NO: 28338
  source 1..40: mol_type = genomic DNA

SEQ ID NO: 36799 - DNA, 50 bp, Stenotrophomonas maltophilia
  source 1..50: mol_type = genomic DNA
agtataggtatttaatccttcgggaaccccaatgaaacaaaccctatact

SEQ ID NO: 36800 - DNA, 40 bp, Stenotrophomonas maltophilia; identical to SEQ ID NO: 36795
  source 1..40: mol_type = genomic DNA

SEQ ID NO: 36801 - protein, 551 aa, Stenotrophomonas maltophilia
MATKARVYSYLRFSDPKQAAGSSADRQLEYAKRWAAAHGMALDAALSMQDEGLSAYHQRHVTKGALGVFLAAIDKGRIPAGSVLIVEGLDRLSRAEPIQAQAQLAQIINAGITVVTASDGREYNRAGLKAQPMDLVYSLLVMIRAHEESDTKSKRVRAAIHRQCKGWQDGTWRGVIRNGKDPSWTRLDPETKAFQLVPERAEAVKLAIRMFRDGHGAVRIMRTLAEEGLQLTNGGNPAGQLYRILRNRALIGEKVLEIDGEEYRLAGYYPALLSAEQFADLQQATEQRAKQKGTGEIPGLITGLRISYCGYCGSAMVAQNLMNRGRREDGGPQHGHRRLICVGNSQGMGCAVAGSCSVVPIEHAIMSYCADQMNLARLFEGGDRSGALAGKLAIARARVADTTAKVERITDAMLADDAGDAPAAFMRRARELEAALVEQQAEVDALEHELAAVASSPTPAVAKAWADLQEGVKALDYDARTKARQLVADTFERISIYHRGTEPEQTRSWKGTIDLVLVAKRGSARILHVDRQTGEWRGGEEVRDLPDDAIQ

SEQ ID NO: 36802 - DNA, 50 bp, Stenotrophomonas maltophilia
  source 1..50: mol_type = genomic DNA
agtatagagattcatgccttcgggcaccccaatgaaacaaaccctatact

SEQ ID NO: 36803 - DNA, 40 bp, Stenotrophomonas maltophilia; identical to SEQ ID NO: 28338
  source 1..40: mol_type = genomic DNA

SEQ ID NO: 36804 - DNA, 50 bp, Stenotrophomonas maltophilia
  source 1..50: mol_type = genomic DNA
agtatagagattcatgccttcgggaaccccaatgaaacaaaccctatact

SEQ ID NO: 36805 - DNA, 40 bp, Stenotrophomonas maltophilia; identical to SEQ ID NO: 36795
  source 1..40: mol_type = genomic DNA

SEQ ID NO: 36806 - protein, 551 aa, Stenotrophomonas maltophilia
MATKARVYSYLRFSDPKQATGSSADRQLEYAKRWAAEHGMALDAALSMQDEGLSAYHQRHVTKGALGVFLAAIDEGRIPAGSVLIVEGLDRLSRAEPIQAQAQLAQIINAGITVVTASDGREYNRAGLKAQPMDLVYSLLVMIRAHEESDTKSKRVRAAIHRQCKGWQDGTWRGVIRNGKDPSWTRLDPETKAFQLVPERAEAVRLAIRMFRDGHGAVRIMRTLAEEGLQLTNGGNPAGQLYRILRNRALIGEKVLEIDGEEYRLAGYYPPLLSAEQFADLQQATEQRAKQKGTGEIPGLITGLRISYCGYCGSAMVAQNLMNRGRREDGGPQHGHRRLICVGNSQGMGCAVAGSCSVVPIEHAIMSYCADQMNLARLFEGGDRSEALAGKLAIARARVADTTAKVERITDAMLADDAGDAPAAFMRRARELEASLVEQQAEVDALEHELAAVASSPTPAVAKAWAGLQEGVKTLNYDARTKARQLVADTFERISIYHRGTEPEQTRSWKGTIDLVLVAKRGSARILHVDRQTGEWRGGEEVQDLPDDPIQ

SEQ ID NO: 36807 - DNA, 50 bp, Stenotrophomonas maltophilia; identical to SEQ ID NO: 36792
  source 1..50: mol_type = genomic DNA

SEQ ID NO: 36808 - DNA, 40 bp, Stenotrophomonas maltophilia; identical to SEQ ID NO: 28338
  source 1..40: mol_type = genomic DNA

SEQ ID NO: 36809 - DNA, 50 bp, Stenotrophomonas maltophilia; identical to SEQ ID NO: 36794
  source 1..50: mol_type = genomic DNA

SEQ ID NO: 36810 - DNA, 40 bp, Stenotrophomonas maltophilia; identical to SEQ ID NO: 36795
  source 1..40: mol_type = genomic DNA

SEQ ID NO: 36811 - protein, 561 aa, Delftia acidovorans
MGKTSLKGLVYSYLRFSDPKQSTGSSTDRQLAYAEKWASEHGLQLDSSLTLRDEGLSAYHQQHIKSGALGVFLRAVEDGRVPHGSVLIVEGLDRLSRAEPIQAQAQLAQIVNAGITVVTASDGKAYSRARLKDNPMDLVYSLLVMIRAHEESDTKSKRVKASIRRLCEGWQNGTYRGHVRQGHDPEWVKEVEGGWEIDAGRAAAVRRTVQLYVQGHGGKGIVQHLDAEGLQLYTTSAENRTHQIYRLLKMPQLAGIKPVAIDGEEYQLRDYYPALLSADEWTELQRVAAQSGRRRVKGDLPHVITGLGITICGYCGRPMSGQHLATKNRLPDGRLRDGNRRLLCASAAAYGGGCPVSGSTSAAPVERAIMSYCSDIVNLQALYGADRSQAPRAQVVAARQDVDQISAQLDKLTDAMLASADEGTPAVFARRARQLEVDLAAAQAKLQAAELDLAGAARTDISGADAAWRALAAGVEAQEIEPRLQARQLVADTFERIVVYARGVNPDPDASERDYKIDLVLIARGGVARLLTVDRQGNWIAGEQSSTAHESEHPNEPTTLS

SEQ ID NO: 36812 - DNA, 50 bp, Delftia acidovorans
  source 1..50: mol_type = genomic DNA
atgctaaatacagtatcctttgggcacccaagcgataccatacctatacg

SEQ ID NO: 36813 - DNA, 40 bp, Delftia acidovorans
  source 1..40: mol_type = genomic DNA
gtccgtgagtgccttggggcacccaagagacacgaagccc

SEQ ID NO: 36814 - DNA, 50 bp, Delftia acidovorans
  source 1..50: mol_type = genomic DNA
atgctaaatacagtatcctttgggcccccaagcgataccatacctatacg

SEQ ID NO: 36815 - DNA, 40 bp, Delftia acidovorans
  source 1..40: mol_type = genomic DNA
agctgtgagagacttggggcctccaagagacaaggagagc

SEQ ID NO: 36816 - protein, 513 aa, Elizabethkingia anophelis; identical to SEQ ID NO: 28686

SEQ ID NO: 36817 - DNA, 50 bp, Elizabethkingia anophelis
  source 1..50: mol_type = genomic DNA
aataatcacttttcctgtgtagtacccaacaccgacgaaatatcgaaaca

SEQ ID NO: 36818 - DNA, 40 bp, Elizabethkingia anophelis
  source 1..40: mol_type = genomic DNA
tttaaacctttccattgtacccagtgccggaatcgaaccg

SEQ ID NO: 36819 - DNA, 50 bp, Elizabethkingia anophelis
  source 1..50: mol_type = genomic DNA
aataatcacttttcctgtgtagtatccaacaccgacgaaatatcgaaaca

SEQ ID NO: 36820 - DNA, 40 bp, Elizabethkingia anophelis
  source 1..40: mol_type = genomic DNA
attaaaccttttcaaagtatccaatgcatgaattgaagtg

SEQ ID NO: 36821 - protein, 626 aa, Vibrio mediterranei
MHSMQIITHGKPQIYSYRRFSNLKQEKGRSLARQKKLTEEIAEKFNLPFNEDFLMTDKGLSAFHGHHKSKGALGVFLAAVESKMVKPGSVLIVESLDRLSREQPYVAQATLAALVSSDITVVTATDGKVYSKETMAKDPLGTMIMSVLEMIRAHNESLTKTEKSVDFIHAEILKHEEGKVADVAGSIPFWISRKPSPHKKIKTGFELNEHESTIRLLIDMYHVQGKGLRTISRELHSLGIKAPKGGEVWGVSTLSSVFSNPALCGRHKFNLEYLKDGAKQQEAYTLELYYPPIMSAEDFESMQALKKRRSGASKGDKSDKGGLVYLLTDYGKKSFCAKCGSSIGSQPQKQKYRIRRRLHCSKHKETEDCCKSIVQDHLEDAFLVSVARHIDYNLINTQVKPEDIIKNSERLEDIDLEMANVLDMLRVVRDSKSKLKLLEDYKNLEEEKEDLVKQKTDFKQHKISSEDIKRFISKVSDARDYRNNEARKFVKNILMQCIRKISVHMEKKKLECYGYPNICKNSLVNVIDVEFYTDKSLSIFVSAETDELLFSKVSDEFADESLGSFTEEELQIWNSEGWERLQQIFEANGNVDADPLSAENLWTTSVVAEEIVKAIIEEVADDGIAE

SEQ ID NO: 36822 - DNA, 50 bp, Vibrio mediterranei
  source 1..50: mol_type = genomic DNA
ggtgtgattagtgttcgctcagggtcaccctcgtgaacactcatcacttt

SEQ ID NO: 36823 - DNA, 40 bp, Vibrio mediterranei
  source 1..40: mol_type = genomic DNA
gaaataaccaaaggcaccatctgtccagtgaatgtcctgc

SEQ ID NO: 36824 - DNA, 50 bp, Vibrio mediterranei
  source 1..50: mol_type = genomic DNA
ggtgtgattagtgttcgctcagggaaaccctcgtgaacactcatcacttt

SEQ ID NO: 36825 - DNA, 40 bp, Vibrio mediterranei
  source 1..40: mol_type = genomic DNA
ggaataacaaaatgcacaaaatgacctgggaattcactgc

SEQ ID NO: 36826 - protein, 644 aa, Klebsiella quasipneumoniae; identical to SEQ ID NO: 17871

SEQ ID NO: 36827 - DNA, 50 bp, Klebsiella quasipneumoniae
  source 1..50: mol_type = genomic DNA
aatgttcctattgatgatcgtatgcgtccttttgtataatctgggaacat

SEQ ID NO: 36828 - DNA, 40 bp, Klebsiella quasipneumoniae; identical to SEQ ID NO: 5553
  source 1..40: mol_type = genomic DNA

SEQ ID NO: 36829 - DNA, 50 bp, Klebsiella quasipneumoniae
  source 1..50: mol_type = genomic DNA
aatgttcctattgatgatcgtatgagtccttttgtataatctgggaacat

SEQ ID NO: 36830 - DNA, 40 bp, Klebsiella quasipneumoniae; identical to SEQ ID NO: 9905
  source 1..40: mol_type = genomic DNA

SEQ ID NO: 36831 - protein, 644 aa, Enterobacter kobei
MLRPICYERVSSIQQVEMGNGLDDQRSSLTAYLDKNSDKFTNDRVFITDAGLSAFKNANISPESQLGIFLQDVGNRKYGKGDALIVISLDRLSRRSSWAESTIQYIVNSGVEIHDISTNLVLRADDPMSKIHMELIQHRSHNESLMKSVRAKLAWDNKILRALQNGEVISNRMPNWLKNVDNKYQVIPEQAELIVKCFEWYREGLSTGEIVKRIGKKWQMVTVSRLIRDRRLLGEHERYNGEVVPNVYPKIIDEDLFLTANRMMDRVMLEKKKPAEDLLLEPDVVREIFKLYESGLGSGAIVKRLPKGWSTVNVLRVLRDKKVVTMKIIDNLTFERVNEKLSRNGIANRIRKDITIAQDDYITNLFPKILKCGNCGGNIAIHYNHVRTKYVICRNREEKKICDAKSFQYTRIEKNILQLVKNIDFNKLMMEGQSDSDLLLASLREELSTLKKEEETYQIKINERKVAGKKTSLPLMTGLTEVQDRIEEIESDILNAKNIKEIPVFDFDINKVLDPMNVELRAKLRKELRLVLKLVKYWIFGKRIFVQLEYFNEILSHVLVIDNKRGGGEVLHEIVISESNGERVYTVNEEGKTVFIASVTSGTDMWSLAISRTKTLDDVGLYLNLLNRENFEIVVNEDLIDWID

SEQ ID NO: 36832 - DNA, 50 bp, Enterobacter kobei; identical to SEQ ID NO: 36827
  source 1..50: mol_type = genomic DNA

SEQ ID NO: 36833 - DNA, 40 bp, Enterobacter kobei; identical to SEQ ID NO: 5553
  source 1..40: mol_type = genomic DNA

SEQ ID NO: 36834 - DNA, 50 bp, Enterobacter kobei; identical to SEQ ID NO: 36829
  source 1..50: mol_type = genomic DNA

SEQ ID NO: 36835 - DNA, 40 bp, Enterobacter kobei; identical to SEQ ID NO: 9905
  source 1..40: mol_type = genomic DNA

SEQ ID NO: 36836 - protein, 648 aa, Enterobacter genomosp O
MLRPICYERVSSLQQVSGGGGLDDQRSASDAYFAKNPDIFSTEVVYLQDAGTSAFRNDNISPGSVLGDFLEGIRKQEYGEGHALIVMSLDRISRRSSWSENTISFIVDSGIEIHSISDNLVLKRDDPHSKLIMELIQSRSHNESMMKSVRAKAAHERKVKEAISTGKIISKRMPVWLKDVDGKYAVNEEKAELIRSCFRLYANGMSTGEIVKHHKEHNLQMVTVSNWVRDRRLLGEYRQYNDVVYAGVYPAVIDEELFLTANRMMNRVGLEKKKPREDLLLDPELIRKIFRLYEEGTGTGAIVKELPEGWSTVNVLRVLREKKVVQDKIIDNLTFERVNQKLSLNGVANRIRKDLSIAQDDYITNLFPKILKCGCCGGNISIHYNHVRMKYVICRTREEKKECDAKSIQYLRIEKNILETVKKVDFQKLMLESTGQDSSPIDVLREELSELRAEEARYIQTIAERKKKRLIIRSQQSDALTSVQDRIDEVENELAQLMEVKEVPKLDFDMDAVLEPTNVELRAKVRKELRLVLKSIKYRVIAHVIFVHLEYFNDYLTHVLVINNKRGGGDLLTEFVIEQASNVRRYNTDSFSLTYTDGTDMPVFSTPDSRPISFVEYVLLRDYIREIEGEESLTLGWMNRNEQFIFQS

SEQ ID NO: 36837 - DNA, 50 bp, Enterobacter genomosp O
  source 1..50: mol_type = genomic DNA
aatgttcccattgatagtggagggcgtcctgttataatcattgggaacat

SEQ ID NO: 36838 - DNA, 40 bp, Enterobacter genomosp O; identical to SEQ ID NO: 5553
  source 1..40: mol_type = genomic DNA

SEQ ID NO: 36839 - DNA, 50 bp, Enterobacter genomosp O
  source 1..50: mol_type = genomic DNA
aatgttcccattgatagtggagggagtcctgttataatcattgggaacat

SEQ ID NO: 36840 - DNA, 40 bp, Enterobacter genomosp O; identical to SEQ ID NO: 9905
  source 1..40: mol_type = genomic DNA

SEQ ID NO: 36841 - protein, 644 aa, Enterobacter ludwigii
MLRPICYERVSTIYQAVMANGLDDQRSSLTAYLDRNADKFSTGRIFIQDAGLSAYKNANISPTSNLGKFLQDVRDRKYGKGDALIVISLDRLSRRSSWAESTIQFIVNSGIEIHDISTNLVLREDDPMSKIHMELIQHRSHNESLMKSVRAKLAWDNKILRALQNGEVISNRMPNWLKNVDNKYQVIPEQAELIVKCFEWYREGLSTGEIVKRIGKKWQMVTVSRLIRDRRLLGEHERYNGEVVPNVYPKIIDEDLFLTANRMMDRVMLEKKKPAEDLLLEPDVVREIFKLYESGLGSGAIVKRLPKGWSTVNVLRVLRDKKVVTMKIIDNLTFERVNEKLSRNGIANRIRKDITIAQDDYITNLFPKILKCGNCGGNIAIHYNHVRTKYVICRNREEKKICDAKSFQYTRIEKNILQLVKNIDFNKLMMEGQSDSDLLLASLREELSTLKKEEETYQIKINERKVAGKKTSLPLMTGLTEVQDRIEEIESDILNAKNIKEIPVFDFDINKVLDPMNVELRAKLRKELRLVLKSVKYWIFGKHIFVQLEYFNEILSHVLVIDNKRGGGEVLHEIVISESNGERVYTVNEEGKTVFIASVTSGTDMWSLAISRTKTLDDVGLYLNLLNRENFEIVVNEDLIDWID

SEQ ID NO: 36842 - DNA, 50 bp, Enterobacter ludwigii; identical to SEQ ID NO: 36827
  source 1..50: mol_type = genomic DNA

SEQ ID NO: 36843 - DNA, 40 bp, Enterobacter ludwigii; identical to SEQ ID NO: 5553
  source 1..40: mol_type = genomic DNA

SEQ ID NO: 36844 - DNA, 50 bp, Enterobacter ludwigii; identical to SEQ ID NO: 36829
  source 1..50: mol_type = genomic DNA

SEQ ID NO: 36845 - DNA, 40 bp, Enterobacter ludwigii; identical to SEQ ID NO: 9905
  source 1..40: mol_type = genomic DNA

SEQ ID NO: 36846 - protein, 644 aa, Enterobacter cloacae
MLRPICYERVSSIQQVEMGNGLDDQRSSLTAYLDKNSDKFTNDRVFITDAGLSAFKNANISPESQLGIFLQDVGNRKYGKGDALIVISLDRLSRRSSWAESTIQYIVNSGVEIHDISTNLVLRADDPMSKIHMELIQHRSHNESLMKSVCAKLAWDNKILRALQNGEVISNRMPNWLKNVDNKYQVIPEQAELIVKCFEWYRQGLSTGEIVKRIGKKWQMVTVSRLIRDRRLLGEHERYNGEVVPNVYPKIIDEDLFLTANRMMDRVMLEKKKPAEDLLLEPDVVREIFKLYESGLGSGAIVKRLPKGWSTVNVLRVLRDKKVVTMKIIDNLTFERVNEKLSRSGIANRIRKDITIAQDDYITNLFPKILKCGHCGGNIAIHYNHVRTKYVICRNREEKKICDAKSFQYTRIEKNILQLVKNIDFNKLMMEGQSDSDLLLASLREELSTLKKEEETYQIKINERKVAGKKTSLPLMTGLTEVQDRIEEIESDILNAKNIKEIPVFDFDINKVLDPLNVELRAKLRKELRLVLKSVKYWIFGKRIFVQLEYFNEILSHVLVIDNKRGGGEVLHEIVISESNGERVYTVNEEGKTVFIASVTSGTDVWSLAISRTKTLDDVGLYLNLLNRENFEIVVNEDLIDWID

SEQ ID NO: 36847 - DNA, 50 bp, Enterobacter cloacae; identical to SEQ ID NO: 36827
  source 1..50: mol_type = genomic DNA

SEQ ID NO: 36848 - DNA, 40 bp, Enterobacter cloacae; identical to SEQ ID NO: 5553
  source 1..40: mol_type = genomic DNA

SEQ ID NO: 36849 - DNA, 50 bp, Enterobacter cloacae; identical to SEQ ID NO: 36829
  source 1..50: mol_type = genomic DNA

SEQ ID NO: 36850 - DNA, 40 bp, Enterobacter cloacae; identical to SEQ ID NO: 9905
  source 1..40: mol_type = genomic DNA

SEQ ID NO: 36851 - protein, 644 aa, Enterobacter cloacae; identical to SEQ ID NO: 17871

SEQ ID NO: 36852 - DNA, 50 bp, Enterobacter cloacae
  source 1..50: mol_type = genomic DNA
aatgttcctattgatgatcatatgcgtccttttgtataatctgggaacat

SEQ ID NO: 36853 - DNA, 40 bp, Enterobacter cloacae; identical to SEQ ID NO: 5553
  source 1..40: mol_type = genomic DNA

SEQ ID NO: 36854 - DNA, 50 bp, Enterobacter cloacae
  source 1..50: mol_type = genomic DNA
aatgttcctattgatgatcatatgagtccttttgtataatctgggaacat

SEQ ID NO: 36855 - DNA, 40 bp, Enterobacter cloacae; identical to SEQ ID NO: 9905
  source 1..40: mol_type = genomic DNA

SEQ ID NO: 36856 - protein, 644 aa, Escherichia coli
MLRPICYERVSSIQQIEGGGGLDDQRSALEGYLDKNAGLFENDRLFIQDRGVSAFKNSNISSESQLGIFLQDVQNRKYGEGDALIVMSLDRISRRSSWAEDTIRFIVNSGIEVHDISASTVLRKDDPHSKLIMELIQMRSHNESLMKSVRAKAAWDRKIIEAVQNGTVISNKMPMWLKNVDNRYQVIQEKADLIIRCFEWYRDGFSTGEIVKRIADPKWQMVTVSRLVRDRRLLGEHKRYNDEVIHNVYPKVIDDDLFLTANRMMDRVMLEKNKPAEDLLLESDVVQEIFQLYESGLGSGAIVKRLPKGWSTVNVLRVLRDKNVVTQKIIDNLTFERVNQKLSMNGVANRIRKDITIAQDDYITNLFPKILKCGYCGGNVAIHYNHVRTKYVICRNREERKICDAKSIQYIRIEKNILKCVKNVDFQKLMIESTGSETSVLDGLHEELSSLRREENSYSDKINERKLAGKRVGIHLNDGLTEVQDRIEEIEKEIINAQTVREIPKFDFDMDEVLDPMNIELRAKVRKQLRLVLKAVKYWMFDKRIFIQLEYFNDVLSHMLVIDNKRGGGDVIYEMSIEERKGERIYTVHENGHAVFIASVTIGTDIWSLALSRTRTIDSIGNYLSLLAREGFEIFVNEDQIDWF

SEQ ID NO: 36857 - DNA, 50 bp, Escherichia coli
  source 1..50: mol_type = genomic DNA
tcccattgattgtggtgtgcgtcctttcgtatactatgggaacattttga

SEQ ID NO: 36858 - DNA, 40 bp, Escherichia coli; identical to SEQ ID NO: 27093
  source 1..40: mol_type = genomic DNA

SEQ ID NO: 36859 - DNA, 50 bp, Escherichia coli
  source 1..50: mol_type = genomic DNA
tcccattgattgtggtgtgcgtcctctcgtatactatgggaacattttga

SEQ ID NO: 36860 - DNA, 40 bp, Escherichia coli
  source 1..40: mol_type = genomic DNA
tgttcctggtatacagtgctctaggtttttagcactgggg

SEQ ID NO: 36861 - protein, 576 aa, Enterobacter roggenkampii
MTKAYIYTRVSTLQQIDGFGIDRQINTLMDFLENAVLPKELGYQLDPKNYEILDSDEGLSGYKGHNFTKGSLGKFKNRVANGEITSGCLLIESVDRFSRRQGYDAIDEFTFLLKRNIDIIEVETEQIFSYRLDHKLTQLSTSIERAYQESKRKSRLITKSWANLKRKAVDEGIALKRNVPYWLILNGDHYQLNMPEVERIRAIFEDYANGKGVTAIVRDLNNIGGKYDKRVFSTNFINVMLRDRRLIGWLTGKRKKDETIADWKSREIKIYPEIVDANLFELVQRKIDANAAMKKVRTSSKQVSLFNGVARCGICNEPLVGHFTQKGSYLRCLGKRSKSGTCNSSLIRYKECEFAVISYVKNIDFKSLYGNNKNNTPAINSLQQRMTVVTAEINGIESLLYTSDNSSEIVALTKARRERVKERDKISYELTELMRTIDVGDEDFMLDLELICNHGNVELREKYNAVLKKVIKSIKIIQDNGSDDKIFIIKFEYHTDYAMHCVALNLDGSLIGYSYIEDKGELCLKSSCMDVNFKTGDITTKHAPNYIEKLGNDSNLLIVFYVQIMPDDLVMQLHRF

SEQ ID NO: 36862 - DNA, 50 bp, Enterobacter roggenkampii
  source 1..50: mol_type = genomic DNA
ggttgtatttgtgttagatgttgggtacaaatgctaacattgatacaaac

SEQ ID NO: 36863 - DNA, 40 bp, Enterobacter roggenkampii
  source 1..40: mol_type = genomic DNA
agtctgcactattgcctgggttcacggcgtcgttcagggc

SEQ ID NO: 36864 - DNA, 50 bp, Enterobacter roggenkampii
  source 1..50: mol_type = genomic DNA
ggttgtatttgtgttagatgttggagacaaatgctaacattgatacaaac

SEQ ID NO: 36865 - DNA, 40 bp, Enterobacter roggenkampii
  source 1..40: mol_type = genomic DNA
actctggtctactccctggagacagggcctctttcatggc

SEQ ID NO: 36866 - protein, 463 aa, Coprococcus comes
MPSKIERCAIYIRVSTAEQMMHGKSLEAQKQYLTNYAKEHNMTVAGVYADEGKTARKELKKRKAIHSLLEDVKAGKIDVIIFWRIDRWFRNLSDFYKVQEVLDDNNVHWISTSEPGINMETRDGRLQLNVVLSIGQNEVDTTSERIKFVNEASIRQGKLIFGDVNMGYGYKSGIIDGVKRMVKDPDREDTVNAFYRFFFKHHAKGLSMRYIQENYDPDFTWANMRTLLSSEFYKGTYRGIPYCPAYLTESEWNNLQEIQNANVKRAPSGRIYLFSGTINCPICGRRLSARGGSSIINRKTGAKKVYCYYRCNKAFIDHKCSYRHMVSQNLIERYLIDHLEYEYNKFKIKCEKIEKDQEKKKKVQTPEKLQKELERLNLLFQKGRIEWDYYSKEYDRIENELNELLNAAPELEPDYAYLEELLNTDFRTMYYNLTQENRRAFWHSIIREIHLNTDHTVDSVDFL

SEQ ID NO: 36867 - DNA, 50 bp, Coprococcus comes
  source 1..50: mol_type = genomic DNA
tcttgtactaactggttgactccgtttggggtagtttagttagtacaaga

SEQ ID NO: 36868 - DNA, 40 bp, Coprococcus comes; identical to SEQ ID NO: 29943
  source 1..40: mol_type = genomic DNA

SEQ ID NO: 36869 - DNA, 50 bp, Coprococcus comes
  source 1..50: mol_type = genomic DNA
tcttgtactaactggttgactccgtatggggtagtttagttagtacaaga

SEQ ID NO: 36870 - DNA, 40 bp, Coprococcus comes
  source 1..40: mol_type = genomic DNA
cttcactcttgttgcttgttattggtctgttcaggttatg

SEQ ID NO: 36871 - protein, 487 aa, Faecalibacterium sp
MTAVIYARYSSDNQREESIEGQIRECTAYAEKKDITIVKHYIDRAISAKTDNRPQFQQMIKDSDKKLFDIVLVWKLDRFARNRYDSARYKIQLKKNGVKLMSATEIISEGPEGIILESVLEGYAEYYSADLAEKVVRGQTENILKGRCNGGRGAFGYTLDPERKFHIDPLTSPFVLESFKKYNEGSTMKEIRDWLNENGIKNPVGGEFTYNSVEHMLKNRRYIGELKFRDVVVPDAIPPIIPLELFEDVQEKIAKNKKAPASRKAEDDYLLTTKLHCGCCGALMFGESGTSRTGEVHRYYKCATAKKHKGCKKKTVRKQWLEDLVVNQTMQLVRDDAAMESIIAKVMELQDQENTNLPLYEKQLRDAESGIQNMLNAIQAGILTSSTKERLEQLEETKRELEARIAEEKLAKPKVTEEFIRFWLLRFRKLDMSLKDQRQALVDTFINAIYLYDDKVLITFNYKEGTQTVTFGEATEVASEGNGSDLD

SEQ ID NO: 36872 - DNA, 50 bp, Faecalibacterium sp
  source 1..50: mol_type = genomic DNA
gcgtttcaccgcctcctctttggtggtctttttgggagcttctaccggga

SEQ ID NO: 36873 - DNA, 40 bp, Faecalibacterium sp
  source 1..40: mol_type = genomic DNA
agatgctgcgctcttgggtgggaaagctctcccatttgtc

SEQ ID NO: 36874 - DNA, 50 bp, Faecalibacterium sp
  source 1..50: mol_type = genomic DNA
gcgtttcaccgcctcctctttggttttctttttgggagcttctaccggga

SEQ ID NO: 36875 - DNA, 40 bp, Faecalibacterium sp
  source 1..40: mol_type = genomic DNA
agatgctgcacttgtggagttgaaataactctcatttgtg

SEQ ID NO: 36876 - protein, 530 aa, Acidaminococcus fermentans
MQVDGYSLDAQRDKLRKYAAYEDMVVAGEYSDEGFSGKNIQGRQEFQRMLNDIQDGKDGVSYVLVFKLSRFGRNAADVLNSLQLMQDFGVNLICVEDGIDSSKDAGKLMISVLSAVAEIERENIRTQTMAGREQKAREGKWNGGFAPYGYKLENGNLVIAEDEVEVIRVIYDRYIHTNEGVAGVAKYLNRNGFIKKLRQNNTIPGFSRNFVQDVLDNPVYMGKIAYGRRRTEKKQGTRNEMHVVEQSEFPVYEGQHEAIISEEDWYLAQEKRKINSFKREKVNNPDHAHILSGILKCPCCGKSMYGNIAKAHSKDKKTRYYYYCKNTVTPTGHECSFRLNIEQTEINKFVAKIISAMVNNPRFVEAIQAKIGTAVDTEDMEKQIAVLQGQLKQAFGTKNRLERQMDTLDINDAHYDRKILDLQRRYDEQYDTIEEIEVQIGELQSQMRSIQQEKISGDNIYRLLLAFDEVYHSATEAEQKEFMKAFIERIEMFPEKRKDGSWIKKIVFNFPVPVDGEEVKEFPLETETTV

SEQ ID NO: 36877 - DNA, 50 bp, Acidaminococcus fermentans
  source 1..50: mol_type = genomic DNA
cccttggaaactgaaacaaccgttgagacggttgtcttgctttccaaggg

SEQ ID NO: 36878 - DNA, 40 bp, Acidaminococcus fermentans
  source 1..40: mol_type = genomic DNA
cccccacaccagccatgtggaaaccgtctgtctgctgacg

SEQ ID NO: 36879 - DNA, 50 bp, Acidaminococcus fermentans
  source 1..50: mol_type = genomic DNA
cccttggaaactgaaacaaccgttgtgacggttgtcttgctttccaaggg

SEQ ID NO: 36880 - DNA, 40 bp, Acidaminococcus fermentans
  source 1..40: mol_type = genomic DNA
cccccacaccaggcttctggtaaccatcattctactctct

SEQ ID NO: 36881 - protein, 452 aa, Listeria aquatica
MKAAIYIRVSTQEQTENYSIPAQTEKLQALCMSKGWDVYDIFIDGGYSGSNINRPALQGMLSKLDKIDAVVVYRLDRLSRSQRDTLLLIEEYFLKNDVEFVSLSETLDTSSPFGRAMIGILSVFAQLERETIRDRLVMGKIKRIEEGLPMVTAKGRTFGYDVVDTKLYVNKEEAEQLQVIYDTFEDVQTINLLQKEMHNKGYKVFNRKRYLNLLSNDVYIGYVGYADKVHRKGIHEPIIKEDQFYRIQEILKRMQKFPNINKESKSLLASLLVCGKCGLPYLHASKSTTSRGHVYRYRYYMCKSKKRLYQYEPCDNKMLRADELEKIVLDRVANYSQPSQLKKQERDLSKIKNKIIEQQNKKKRLFDLYLSGNYDKKELDRMMLQIDTKLSELEEKKEQHENSLSKNDLKSIFEMNDFKNIYEMDFKNQQKLLRALIESIVINEDNIEINWK

SEQ ID NO: 36882 - DNA, 50 bp, Listeria aquatica
  source 1..50: mol_type = genomic DNA
ttttgtgcctcgtggagtcttgcaggtagaagaatccacgagacactaaa

SEQ ID NO: 36883 - DNA, 40 bp, Listeria aquatica
  source 1..40: mol_type = genomic DNA
ttttggtgccaattatgacggacgtaaagaagggacaaag

SEQ ID NO: 36884 - DNA, 50 bp, Listeria aquatica
  source 1..50: mol_type = genomic DNA
ttttgtgcctcgtggagtcttgcaagtagaagaatccacgagacactaaa

SEQ ID NO: 36885 - DNA, 40 bp, Listeria aquatica
  source 1..40: mol_type = genomic DNA
ttatggtgcaaataaagatagaattaaagaaagaacaaaa

SEQ ID NO: 36886 - protein, 612 aa, Streptococcus agalactiae
MRNFEKITALYERLSRDDELQGESNSIINQKKILEEYASKNNLSNIIHFTDDGISGTQFDRPGFMAMMNGVNQGNIGCIIVKDMSRLGRDYLKVGQCMEILRQKGVRLIAINDNVDSFYREDDFTPFRNIMNEWYARDTSRKIQSTFRSKGESGKHTASTPPYGYIKDEKDKNKWIVDEKAAEIVRRIFNLTMQGNGPYRIAKILESEKVDIPAYHQQKLGYGLYQSKSFEHPYRWCSSTIASILKKQEYLGHTVNFKTRKHFKDKKSKYVSEDNWLIFENTHEPIIDQETFDNVQRIRGNVKRYPDGWGEYHPLTGLMYCADCGSKMYVHRTSNYKNIPYYTCSAYTKTPCGMLCPSAHRIKAEVVLNLIQDTLKDIKKYLDEDNEAFICSIQNEMEEKEKIEIEKKKVRLTESQNRLRELERLMCRIYEDMILNKIPNSRYEILNNQYETEQITLSKEIKDLEQQVSRYEKETDRARKFISLISRYENFDELTTTMINEFVEKIIVHERDRKGSQTSKQKIEIYFNFIGNYELPQAELSEEKKQKLEEEERKIEERKDKLHQNYLKRKASGKQKEYEDKYKARREQKKQEKIKVLKRVGIPVSEYIKTNI

SEQ ID NO: 36887 - DNA, 50 bp, Streptococcus agalactiae; identical to SEQ ID NO: 9697
  source 1..50: mol_type = genomic DNA

SEQ ID NO: 36888 - DNA, 40 bp, Streptococcus agalactiae
  source 1..40: mol_type = genomic DNA
agaaatataagcttgcagcaggaaaaactgctaaatcaat

SEQ ID NO: 36889 - DNA, 50 bp, Streptococcus agalactiae; identical to SEQ ID NO: 9699
  source 1..50: mol_type = genomic DNA

SEQ ID NO: 36890 - DNA, 40 bp, Streptococcus agalactiae
  source 1..40: mol_type = genomic DNA
agagctataagcctgaagttagaaaacatactaaattaaa

SEQ ID NO: 36891 - protein, 463 aa, Hungatella hathewayi
MAKPQTALQRVALYIRVSSDEQAERGDSIRDQKERGTKYINDHQNMILQDTYIDDGVSGQKLDRDDFTRLIRNVKAGLVDLIIFTKLDRWFRSLRHYLNTQVILDKYNVAWTAIDQPYFDTSTPYGRAFVAQSMTWAELEAQNGGLRVADVFRSKVEHGEVITGKVPRGYMIQNKHLVFSDEAPAMLDSIQYFHREQGLAKTVNYMRETHGINMSIQNLKNSILRNEKYTGRYRGNENYCPRLISDEMYQDIQRVLDNNSTIRSSQKYPYIFSGILICDECGHKMCGCHINVVSRRTSGKVYRYKYPAYECLQYRAYKKCSNGGEIREMRIEEYLLEHIREELSGYLVDFETGEAKRIDNRAKKNKIRRKLDRLKDLYLNEVINLEEYKKDRAEYEEQLAALPDMEQPIKNLKPLKQVLDCNFEIIYNNLNNEEKRAFWRSIIKEIRVSKSIGRNRKYQIIFL

SEQ ID NO: 36892 - DNA, 50 bp, Hungatella hathewayi
  source 1..50: mol_type = genomic DNA
ttttaccgttaagttaagttaccggtcggttactattaattaccggtaaa

SEQ ID NO: 36893 - DNA, 40 bp, Hungatella hathewayi
  source 1..40: mol_type = genomic DNA
ttttccgggccagtttccggtatgctgattcattcctgtc

SEQ ID NO: 36894 - DNA, 50 bp, Hungatella hathewayi
  source 1..50: mol_type = genomic DNA
ttttaccgttaagttaagttaccgatcggttactattaattaccggtaaa

SEQ ID NO: 36895 - DNA, 40 bp, Hungatella hathewayi
  source 1..40: mol_type = genomic DNA
tcattcaggccatgttcagatgtgatgaatcattcctgtc

SEQ ID NO: 36896 - protein, 554 aa, Anaerobutyricum hallii
MESIISIRLKARENVKVISCFFYLFCYNKVVTERLKYNRKALNMNIAAYCRVSTDKADQLNSLEAQKQFFSEYTQRTGDNLVRLYADEGISGTKIKNRKEFLRMMADAEHGLFDMVVVKDISRFARNTVDLLQNVRKLKALGIETQFLTANMTSMGNSEFVLTIFGALAQEESANTSKRVKFGKKMNAEKGRVPNIVYGYDKTIGDYFNLAINEEEAAVIRQIYKWYIEEGYGAAKIANMLNAKGIRTKRNCQWSQNATCRILTNELYTGKIINGKQEVADFLTGQRTEKDETEWMVTERPELRIIEPEMYEKAQEILECRSKTFKLTKERQSNKYLFSTLIKCKECGWSFRRTVRTYKNTYIRWVCSGHNGRGADSCPNAQTVDEEELIEVLSEYFSELLKAKKNVIRHVTGEFQRVYKAKDENLNYEKELNAQLHKLKKMRQKYMDMYTDDLITREELNEKIGGTKQEIERLENELKMVAYHLTKGEQLETILNRTFKEIEDISDVHQMTNAQLKRIIQKIEVDKDGNVDIYLRIFGDLGLDETVLISDNQT

SEQ ID NO: 36897 - DNA, 50 bp, Anaerobutyricum hallii; identical to SEQ ID NO: 9937
  source 1..50: mol_type = genomic DNA

SEQ ID NO: 36898 - DNA, 40 bp, Anaerobutyricum hallii
  source 1..40: mol_type = genomic DNA
gattagtaagagcactgtacataaggactgcactgaccgt

SEQ ID NO: 36899 - DNA, 50 bp, Anaerobutyricum hallii; identical to SEQ ID NO: 9939
  source 1..50: mol_type = genomic DNA

SEQ ID NO: 36900 - DNA, 40 bp, Anaerobutyricum hallii; identical to SEQ ID NO: 9940
  source 1..40: mol_type = genomic DNA

SEQ ID NO: 36901 - protein, 551 aa, Blautia sp; identical to SEQ ID NO: 9941

SEQ ID NO: 36902 - DNA, 50 bp, Blautia sp; identical to SEQ ID NO: 9937
  source 1..50: mol_type = genomic DNA

SEQ ID NO: 36903 - DNA, 40 bp, Blautia sp; identical to SEQ ID NO: 36898
  source 1..40: mol_type = genomic DNA

SEQ ID NO: 36904 - DNA, 50 bp, Blautia sp; identical to SEQ ID NO: 9939
  source 1..50: mol_type = genomic DNA

SEQ ID NO: 36905 - DNA, 40 bp, Blautia sp; identical to SEQ ID NO: 9940
  source 1..40: mol_type = genomic DNA

SEQ ID NO: 36906 - protein, 511 aa, Blautia wexlerae
MNIAAYCRVSTDKADQLNSLEAQKEFFSEYTQRTGDNLVRLYADEGISGTKIKNRKEFLRMMVDAEHGLFDMVVVKDISRFARNTVDLLQNVRKLKALGIETQFLTANMTSMGNSEFVLTIFGALAQEESANTSKRVKFGKKMNAEKGRVPNIVYGYDKTIGDYFNLAINEEEAAVIRQIYRWYIEEGYGAAKIANMLNAKGIRTKRNCQWSQNATCRILTNELYTGKIINGKQEVADFLTGQRTEKDETEWMVTERPELRIIEPEMYEKAQEILECRSKTFKLTKERQSNKYLFSTLIKCKECGWSFRRTVRTYKNTYIRWVCSGHNGRGADSCPNAQTVDEEELIEVLSEYFSELLKAKKNVIRHVTGEFQRVYKAKDENLNYEKELNAQLHKLQKMRQKYMDMYTDDLITREELNEKIGGTKQEIERLENELKMVAYHLTKGEQLETILNRTFKEIEDISDVHQMTNAQLKRIIQKIEVDKDGNVDIYLRIFGDLGLDEIVLISDNQT

SEQ ID NO: 36907 - DNA, 50 bp, Blautia wexlerae
  source 1..50: mol_type = genomic DNA
tcgttctaattagtgacaaccaaacatatggaagtaacaatatagaacgg

SEQ ID NO: 36908 - DNA, 40 bp, Blautia wexlerae; identical to SEQ ID NO: 36898
  source 1..40: mol_type = genomic DNA

SEQ ID NO: 36909 - DNA, 50 bp, Blautia wexlerae
  source 1..50: mol_type = genomic DNA
tcgttctaattagtgacaaccaaacttatggaagtaacaatatagaacgg

SEQ ID NO: 36910 - DNA, 40 bp, Blautia wexlerae; identical to SEQ ID NO: 9940
  source 1..40: mol_type = genomic DNA

SEQ ID NO: 36911 - protein, 551 aa, Blautia wexlerae
MHIRNILKKGYSLFCYLQLYFRWYNKVVTERLKYNRKVLDMNIAAYCRVSTDKADQLNSLEAQKEFFSEYTQRTGDNLVRLYADEGISGTKIKNRKEFLRMMADAEHGLFDMVVVKDISRFARNTVDLLQNVRKLKALGIETQFLTANMTSMGNSEFVLTIFGALAQEESANTSKRVKFGKKMNAEKGRVPNIVYGYDKTIGDYFNLAINEEEAAVIRQIYKWYIEEGYGAAKIANMLNAKGIRTKRNCQWSQNATCRILTNELYTGKIINGKQEVADFLTGQRTEKDETEWMVTERPELRIIEPEMYEKAQEILECRSKTFKLTKERQSNKYLFSTLIKCKECGWSFRRTVRTYKNTYIRWVCSGHNGRGADSCPNAQTVDEEELIEVLSEYFSELLKAKKNVIRHVTGEFQRVYKAKDENLNYEKELNAQLHKLQKMRQKYMDMYTDDLITREELNEKIGGTKQEIERLENELKMVAYHLTKGEQLEIILNRTFKEIEDISDVHQMTNAQLKRIIQKIEVDKDGNVDIYLRIFGDLGLDETVLISDNQT

SEQ ID NO: 36912 - DNA, 50 bp, Blautia wexlerae; identical to SEQ ID NO: 15517
  source 1..50: mol_type = genomic DNA

SEQ ID NO: 36913 - DNA, 40 bp, Blautia wexlerae; identical to SEQ ID NO: 36898
  source 1..40: mol_type = genomic DNA

SEQ ID NO: 36914 - DNA, 50 bp, Blautia wexlerae
  source 1..50: mol_type = genomic DNA
ccgttctaattagtgacaaccaaacttatagaagtaacaaaatagaacgg

SEQ ID NO: 36915 - DNA, 40 bp, Blautia wexlerae; identical to SEQ ID NO: 9940
  source 1..40: mol_type = genomic DNA

SEQ ID NO: 36916 - protein, 551 aa, Blautia wexlerae; identical to SEQ ID NO: 15516

SEQ ID NO: 36917 - DNA, 50 bp, Blautia wexlerae; identical to SEQ ID NO: 9937
  source 1..50: mol_type = genomic DNA

SEQ ID NO: 36918 - DNA, 40 bp, Blautia wexlerae; identical to SEQ ID NO: 36898
  source 1..40: mol_type = genomic DNA

SEQ ID NO: 36919 - DNA, 50 bp, Blautia wexlerae; identical to SEQ ID NO: 9939
  source 1..50: mol_type = genomic DNA

SEQ ID NO: 36920 - DNA, 40 bp, Blautia wexlerae; identical to SEQ ID NO: 9940
  source 1..40: mol_type = genomic DNA

SEQ ID NO: 36921 - protein, 554 aa, Blautia wexlerae; identical to SEQ ID NO: 9936

SEQ ID NO: 36922 - DNA, 50 bp, Blautia wexlerae; identical to SEQ ID NO: 9937
  source 1..50: mol_type = genomic DNA

SEQ ID NO: 36923 - DNA, 40 bp, Blautia wexlerae; identical to SEQ ID NO: 36898
  source 1..40: mol_type = genomic DNA

SEQ ID NO: 36924 - DNA, 50 bp, Blautia wexlerae; identical to SEQ ID NO: 9939
  source 1..50: mol_type = genomic DNA

SEQ ID NO: 36925 - DNA, 40 bp, Blautia wexlerae; identical to SEQ ID NO: 9940
  source 1..40: mol_type = genomic DNA

SEQ ID NO: 36926 - protein, 548 aa, Flavobacterium kingsejongi
MSTAIIYIRVSTDEQAQKGYSQRSQEEKLNKYCRDNHIEIVQTIFEDHSAKNFDRPAWTSMIKELNMNRATRPNLILFTRWDRFSRNTANAYYTITQLQKIGIEPQATDQPLDMSVPENKVLLAMYIVTAEVENDRRSLNIKQGIHKAKKEGRYMGRAPIGYLNISLPDGTKTIVPREPEATLIKKAFRDFDENISVRSYHKTVLRGGLKCSLNAFFNILQNPVYCGKIRVPSLNGKTIVEVQGIHKPLISIEIFDEVQSRIKRRDKKYIKQSDNSELMFRGILSCPLCSKKMSGSGSKGRSKKYFYYHCSSSCGYRVRADQVNENLLSGIRLLKPNVEYTPIFEDLIRKIYGKLYEQKSIDKTNINRSLYKMIERVANARELLVKGTIDEEDYHSIKSDCENRIGILGTQLNDAYKLDIQQKQSLKKLTKCFLKPALIFRGTDNSIELKVASLFLNKDFVYSDADFTSHLKDEVRIVYVSQHSNTKENFEEAGVIKNISKEQEDIISNVIEIELIKGNKISTQNATKVLSFLLKLAEICISIKIKIG

SEQ ID NO: 36927 - DNA, 50 bp, Flavobacterium kingsejongi
  source 1..50: mol_type = genomic DNA
aatggcaccatttgtcgttttagtcgtcctgtcgggacaattttcgaacc

SEQ ID NO: 36928 - DNA, 40 bp, Flavobacterium kingsejongi
  source 1..40: mol_type = genomic DNA
agagcttttattactttgtcggggtggcaggattcgaacc

SEQ ID NO: 36929 - DNA, 50 bp, Flavobacterium kingsejongi
  source 1..50: mol_type = genomic DNA
aatggcaccatttgtcgttttagtcctcctgtcgggacaattttcgaacc

SEQ ID NO: 36930 - DNA, 40 bp, Flavobacterium kingsejongi
  source 1..40: mol_type = genomic DNA
caggattttcttcctgagtccgggtggcaggattccatcc

SEQ ID NO: 36931 - protein, 525 aa, Acidaminococcus intestini
MAKTVRAIPATISRYTSSPINSRKKRKVAGYARVSTDHDDQITSYEAQVDYYTNYIKGRDDWEFVGIYTDEGISGTNTRHRDGFKRMVNDALEGKIDLIITKSVSRFARNTVDSLSTIRKLKEHKIECYFEKENIWTFDSKGELLLTIMSSLAQEESRSISENVTWGHRKRFADGKVSVAYSRFLGYKKGPNGGLVVVPEEATTIKLIYKLFLEGLGTTTIAKQLTKRGLKTPGGKSKWSARTVYSILQNEKYKGDALLQKSYTVDFLTKKTKINEGEVPQYYVEHDHEAIIEPQTFEMVQAELKHRNKARKYFSGTSIFSTKIQCAECGGWYGAKVWHSNDKYRRIIYQCNNKFRNKTGCRTPHLTEEEIKAYFVRAMNQIIADKDEIIQTIEDARQVICDNGDLLAKRDAMQKEIGILVEMAQNAVERNARVAQNQEEYQKQYDDIISRYDAMKTEYEQLCEKIENRQDRNEQLGRFIQELKGRDSLLTEFDQSLWCVLVDKMVVKDKENVTVVFQDGTEIKA

SEQ ID NO: 36932 - DNA, 50 bp, Acidaminococcus intestini
  source 1..50: mol_type = genomic DNA
tgtatcaaatgttgtaaggcaaccaaaataagcctttccgtattgataaa

SEQ ID NO: 36933 - DNA, 40 bp, Acidaminococcus intestini
  source 1..40: mol_type = genomic DNA
ataaatgataaagatgataaagtccaaaatgtgttccggg

SEQ ID NO: 36934 - DNA, 50 bp, Acidaminococcus intestini
  source 1..50: mol_type = genomic DNA
tgtatcaaatgttgtaaggcaaccataataagcctttccgtattgataaa

SEQ ID NO: 36935 - DNA, 40 bp, Acidaminococcus intestini
  source 1..40: mol_type = genomic DNA
atcattggtaaagaggataatgtcaacaattttttcctga

SEQ ID NO: 36936 - protein, 582 aa, Pseudomonas lundensis
MTSPSPAAYAYIRHSTKRQGAEDKDSVTRQKESIRVLAEQYKVQIPDENFFYENGVSAYNGKNRTHGKLKELIDQIDSLRIRPGDIVFVESIDRLSRQRLLQAKELVNGILEKGIVLVTTIDNQRYEKASDKNGIDDLSQDILLSVISKRSHEESKTKSVRRLSAWAKAKKDAVEKSIPFNKKRPPFGIQYNELTQKFEPHPEQAEELNRIFESLRLQGVTATIKEINKTSSVKWTQNRVKDIFEKKYPLGYMYSQVKKDGKMQFDKYIENYYPQIISFELFEQARQAMQGRKVNRRAGRSSQDNSNIFRHTAMCGICGESMFFMNNFGSQTKRYFYMSCRSNFEQNNKCKNRFRYDFGVSVLFHIIASSFFWNMLSKRPALFEAVKKSTFYSEGDFGTKVETADDMTSYAKVGEHFIRFLEGNTDNKSQNKERIEKEILLSKKKMTLENLEKSVETIQDGAIPASILKMLMNAEEEVSRLKEELEELTVNSIDTKTTLHVKTVEEFVELFKKEHGRLQIINFLASNGITFFFTYNKDAKTLNTKVAIDGEVVCTYNTLYEINALEKYGIGNIAEEFKLPDA

SEQ ID NO: 36937 - DNA, 50 bp, Pseudomonas lundensis
  source 1..50: mol_type = genomic DNA
atgttagattcaggtgggttggtcttgtataataggtcttaatctaacaa

SEQ ID NO: 36938 - DNA, 40 bp, Pseudomonas lundensis
  source 1..40: mol_type = genomic DNA
caccggcatgtggttggtcttgaaataaatcccgaccatg

SEQ ID NO: 36939 - DNA, 50 bp, Pseudomonas lundensis
  source 1..50: mol_type = genomic DNA
atgttagattcaggtgggttggtcatgtataataggtcttaatctaacaa

SEQ ID NO: 36940 - DNA, 40 bp, Pseudomonas lundensis
  source 1..40: mol_type = genomic DNA
caccagcatgtggattttgatgaaacagatcctatccatg

SEQ ID NO: 36941 - protein, 481 aa, Streptococcus agalactiae; identical to SEQ ID NO: 391

SEQ ID NO: 36942 - DNA, 50 bp, Streptococcus agalactiae
  source 1..50: mol_type = genomic DNA
taaagaaatttactatccttgatttcaatgaaccgctctacaacttgacc

SEQ ID NO: 36943 - DNA, 40 bp, Streptococcus agalactiae; identical to SEQ ID NO: 22358
  source 1..40: mol_type = genomic DNA

SEQ ID NO: 36944 - DNA, 50 bp, Streptococcus agalactiae; identical to SEQ ID NO: 36942
  source 1..50: mol_type = genomic DNA

SEQ ID NO: 36945 - DNA, 40 bp, Streptococcus agalactiae
  source 1..40: mol_type = genomic DNA
acccactgttacaaaatcttctaaaaatgtaaattctatc

SEQ ID NO: 36946 - protein, 510 aa, Hafnia alvei
MVDKTEKIHKVRVAQYLRMSTNLQEFSLDNQAQFIKKYANEHNMEILYTYDDAGKSGVSTTGRHDFNKLVNDVLTKEINIDAVLVYDVSRFGRFKDPQEGIYYKYLLKMNNVDVIYCAENLPENSETETFILSSLMYAAGAFSKNLSIKVFAGHVNLVKRGYYQGGKAGYGLKRKLLDNNNKHKMILAQGERKSLQTDRIVLVPGTKKEVELVKKIFNMFIFEGLNEYLIASRLNREGYRFSDKTEWTRGRIHSVLINSRYTGKYTYNRTSQKLKTKKIKNPENEWIEYNSFFKPIISEEKFKLAKEIIDNRSVKMSNEKILDCLRKTLSKHGKISGFIIDEEDSSPSSSVIANRFGGLLNAYKLIDYTPERDYQYLEINSYLRKKHCDIVKKIKNEILSSEVNILENKLITVNKALNFSIVLSRCKKIGSNRHRWIVRLDRSLNPEISIIARMNSLNTEPIDYYILPSIDFFENELKLKDNNNLLFEMYRFDDIKPFFNMLSTDDKDVI

SEQ ID NO: 36947 - DNA, 50 bp, Hafnia alvei
  source 1..50: mol_type = genomic DNA
cacacgccgatgatgcagcagtatctataaacatctattaatagactgtt

SEQ ID NO: 36948 - DNA, 40 bp, Hafnia alvei
  source 1..40: mol_type = genomic DNA
ccccatgatgcagcagtatcttaagctgaaagctcagcat

SEQ ID NO: 36949 - DNA, 50 bp, Hafnia alvei
  source 1..50: mol_type = genomic DNA
cacacgccgatgatgcagcagtatgtataaacatctattaatagactgtt

SEQ ID NO: 36950 - DNA, 40 bp, Hafnia alvei
  source 1..40: mol_type = genomic DNA
cagcattattcatcaaaatgttaagctataagctcagcag

SEQ ID NO: 36951 - protein, 522 aa, Bacillus thuringiensis
MNHSKRKVAIYIRVSTEEQANEGFSLGAQEDYLKQYANVKGYEVYDIYVDDGYSGKDYNRPEIQRLFKDLYQEKFTGILVKSVDRISRRVSDVTKLIDDVLAPRKCCVLVSDNNLDSSTTGGTAFIQLLATFAEYERSMIVQRVKSGMSKRAELGYWNGGHVLGYDVKNKELKINKEEAEIVRKVFDLRAEGKGYKSIAIILNQQGFKTKRGRLFSIGTIKTILENPLYIGYCRWGRYKNWNVERRKGKTDEYKFVKGKHEPIVSEELWKRVQGVNYAHKKSISKNRNFNGEFVLSGILRCPSCGAGMVMSKIKKRDKSGYHLYYMCQAFHSKGKLACKSNLIRKEDIEEKVLQCINKIILIPSIVGKTFERIQEKKERGIERIKNDLSYINEELKRKKQSIQKLNKDYFDEKIRVETYTELSEPLREEIVELEREKSKLDKKIESSEIPITKEMVIKALENFTNLYENATYEQKKSLLRAIIKKIEVQPNRKEIKGITYWFDCDNGQDDALLVSKEGRTVS

SEQ ID NO: 36952 - DNA, 50 bp, Bacillus thuringiensis; identical to SEQ ID NO: 14487
  source 1..50: mol_type = genomic DNA

SEQ ID NO: 36953 - DNA, 40 bp, Bacillus thuringiensis
  source 1..40: mol_type = genomic DNA
gtttcggattaatcgtggagaaccgtatcataagtaatgt

SEQ ID NO: 36954 - DNA, 50 bp, Bacillus thuringiensis; identical to SEQ ID NO: 14487
  source 1..50: mol_type = genomic DNA

SEQ ID NO: 36955 - DNA, 40 bp, Bacillus thuringiensis
  source 1..40: mol_type = genomic DNA
gtttggtataaaacgtggagatgtgaatcataagcaaggt

SEQ ID NO: 36956 - protein, 522 aa, Bacillus cereus
MNHSKRKVAIYIRVSTEEQANEGFSLGAQEDYLKQYANTKGYEVYDIYIDDGYSGKDYNRPEIQRLFKDLYQEKFTGILVKSVDRISRRVSDVTKLIDDVLTPRKCYVLVSDNNLDSSTTGGTAFIQLLATFAEYERSMIVQRVKAGMSKRAELGYWNGGRVLGYDVKNKELKINKEEADIVRKVFHLRAEGKGYKSIAIVLNQQGFKTKGGKLFSICTIKTILENPLYIGYCRWGQHKNWSVERRKGKTDEYNFIKGKHEPIVSEDLWKKVQGVNYAHKKSISKNRNFNGEFVLSGILRCPSCGAGMVMCKTQKRDKSGYHLYYMCQAFHSKGKLACKSNLIRKEDIEEKVLQCINKIILIPSIVDKTFERIQEKKERGMESVKSDLLYINEELKRRKQFIKKLNKDYFDEKIRVEAYTELSEPLRKEIEELESEKSKLDRKIESAEIPITKERVIKALENFTNLYENATYEQKKSLLRAIIKKIEVQPNRKEIKRITYWFDCDNGQDDALLVSKEGRTVS

SEQ ID NO: 36957 - DNA, 50 bp, Bacillus cereus; identical to SEQ ID NO: 14487
  source 1..50: mol_type = genomic DNA

SEQ ID NO: 36958 - DNA, 40 bp, Bacillus cereus; identical to SEQ ID NO: 36953
  source 1..40: mol_type = genomic DNA

SEQ ID NO: 36959 - DNA, 50 bp, Bacillus cereus; identical to SEQ ID NO: 14487
  source 1..50: mol_type = genomic DNA

SEQ ID NO: 36960 - DNA, 40 bp, Bacillus cereus; identical to SEQ ID NO: 36955
  source 1..40: mol_type = genomic DNA

SEQ ID NO: 36961 - protein, 522 aa, Butyrivibrio crossotus
MMESKSRVAIYCRLSEEDRNKQSETDDSNSIQNQKSMLLQYSLEHGWEVYNIYSDDDYTGSDRRRPEFNRLLEDAKNRKFDIVLCKTQSRFTRELELVEKYIHSLFPLWGIRFISIVDNADTANKGNKKSRQINGLVNEWYLEDMSENIKSVLTDRRKNGHHIGAFALYGYKKDPDIKGHLIIDEEAAEVVREVFTLFSQGYGKTAIARMLNDRGIPNPTEYKRLHGLRYKQPKTKNSTLWKYFAISDMLVNEIYIGNMVQGKYGSVSYKTKQNKPRPKNEWYRVESTHEPIIDRELWDRVQALVAQKAKPFTVGTIGLFARKARCMNCGYTMRSSKNRGKHYLQCSNRHVAKDACIGSFISVDKLEKAVIDELNKLSTEYLDKDELEQNVQFNNDLRGQKEAMETEIAAYQKKIAEYTKGIRELYLDKVKGILSELDYLDLSKDFSTQKERLEKLVIDTQKQLDIIERKMLIGDNRRQLIEQYTNLEHLDRETVEKLIDYVLVGKKDPVTKEIPIEIHWNF

SEQ ID NO: 36962 - DNA, 50 bp, Butyrivibrio crossotus
  source 1..50: mol_type = genomic DNA
tgttgtctttacacaagcgcaccatctggtgcgacctcgtaagaacaaca

SEQ ID NO: 36963 - DNA, 40 bp, Butyrivibrio crossotus
  source 1..40: mol_type = genomic DNA
tacgactctggctttctgttcggcagccatatcctccaca

SEQ ID NO: 36964 - DNA, 50 bp, Butyrivibrio crossotus
  source 1..50: mol_type = genomic DNA
tgttgtctttacacaagcgcaccaactggtgcgacctcgtaagaacaaca

SEQ ID NO: 36965 - DNA, 40 bp, Butyrivibrio crossotus
  source 1..40: mol_type = genomic DNA
taccactcttgctttctgtactccagccatacaagctact

SEQ ID NO: 36966 - protein, 506 aa, Streptococcus suis
MNRIAIYLRLSEEDYKKADESISITNQRDYIRSYIENESSLKNSEIEEYVDDGYSATNINRPSFLRLIDDIKGGRVGTIIVKDMSRFSRDYILLGDYLSNIFPFLKIRFIAINDNYDSINENGNGIDTDVQFKTLYYDLFSKELSEKVRSSVKQIKSQGKNTNWAAPFGYIKDPEDKYHIIIDKKTAFIVKEAFDLLLKGYSCIQIANRFNEKDYITRSERKEELKLSDYTGNLVTGSKVKKRVWTNASISQITSNELYTGDYVYNKYKETKIGGRKKILLPEEEWKIIPSTHEAIISREVFDKVKRIKEKRSFGGYTGNKNRSIFSDKIFCKECGRHMSFRSDSRQKKNSDKICKYKSYYCNLCKAEKTPNNIKEKDIIELIKPKLKDFKIQKTLKEERVIEHKNVKEDILKEISILNSSLQIIYENYKKKNISKDEYLKEKNLIRDKKLLLENKLEELKSEKIDSKKEFDANSSDENSLFKAYVDDSIDKIIVSRTGEIEIVEK

SEQ ID NO: 36967 - DNA, 50 bp, Streptococcus suis; identical to SEQ ID NO: 12242
  source 1..50: mol_type = genomic DNA

SEQ ID NO: 36968 - DNA, 40 bp, Streptococcus suis
  source 1..40: mol_type = genomic DNA
gataggtgccagtggtagcggaaaaacgaccttgctgaat

SEQ ID NO: 36969 - DNA, 50 bp, Streptococcus suis; identical to SEQ ID NO: 12242
  source 1..50: mol_type = genomic DNA

SEQ ID NO: 36970 - DNA, 40 bp, Streptococcus suis
  source 1..40: mol_type = genomic DNA
ggttggtggcggtggtactggaaaaactactttggtgaaa

SEQ ID NO: 36971 - protein, 518 aa, Aeromonas hydrophila
MYNLHDSNDPRCDKVFIMKSKAWLYARFSSSKQIDGDSINRQQKKAEEWCCSNGVELQQTSFHDLGVSGWKSVKRPMFEQLIKAMEEGKIPSGSYVLFESTDRLSRRGWEHTRELIKQITVKHGCKLVIMDKGQVHTRENVNDVVQNTFLMFSADLAEKESQRKSDLVAAAYKSKRQNGDVSRWPFWLDKQGDKFVFNERADIARLILELRLKGIGALGIAAELNRRGYKPIRGKSWGHTSVRIVIANSAMYGTKDFFTTKSKTELDDLCNEVRTSPKELVSSIPNAFPAICDFDTWSKIQINGVKPGRKSTGTAFHNMIFCSCGSAMGIQVGSSGERYRKCSRAKVGACSQKMIRNFDQTLVECLGKITYKSVVNQHQNKLPELTERLTKLEKVKTMLIDSGDVDSLKEVYKDITTVKGEIAAESRIVTVPTTVIKEVFSLSIDEQRLTLRKLISNVVVDRKNNLCKIRVNLTNGHKMVFGVNIGTGVKSGINQIVFETNTEKFLAEIKNLTANELP

SEQ ID NO: 36972 - DNA, 50 bp, Aeromonas hydrophila
  source 1..50: mol_type = genomic DNA
gtcgtgtgtaatttgcattgtagcttgttcatatgtataatctgcacgac

SEQ ID NO: 36973 - DNA, 40 bp, Aeromonas hydrophila
  source 1..40: mol_type = genomic DNA
aaccgtgttccagtgctgcttgttcatgtgccagcccggt

SEQ ID NO: 36974 - DNA, 50 bp, Aeromonas hydrophila
  source 1..50: mol_type = genomic DNA
gtcgtgtgtaatttgcattgtagcaggttcatatgtataatctgcacgac

SEQ ID NO: 36975 - DNA, 40 bp, Aeromonas hydrophila
  source 1..40: mol_type = genomic DNA
aactgagttcaagggctgtaggttcatgcccaagccctga

SEQ ID NO: 36976 - protein, 503 aa, Aeromonas hydrophila
MKPRAWLYARFSSTQQQDGDSINRQVNAAQQWCMTNGVELQKTSFRDLAVSGWKSIKRPMFEQLIKAMAEGKIPRGSYVLFESTDRLSRRGWWHTQQLIRTITCVHDCKLVILDKGQIYTKENVNDVGQNIMLMVSADMAEKESQRKSDLVSAAYRSKRQDGDVSRWPFWIDKTDNGFVLNDNADTIRLIIELRLKGVGALGIAAELNRRGIKSSRGGSWGHTSVRVVLSNSALYGTKDFYSMKTIAKFDEHGEEIRVADNQLVQSMPDVFPPVCDFTTWQQIQINGEKPGRKGTLSPFHNILFCQCGAALGLQVGSAGERYRKCARSKVGSCDQKMIRNFDETLIECLGRITYVSSAIQKDEVPELRARLVKLEGVKDALVAAGALDALVDVYKDIAKAKDAIAAAQKVAVVPTTELKEVFAGSIDEQRIALKRLVEKVVVTRVGNTAHVKVHLTNGHFKVFGVNVGVKRASGKNTIFTKSDTEKLANWVSVATDELHPWET

SEQ ID NO: 36977 - DNA, 50 bp, Aeromonas hydrophila
  source 1..50: mol_type = genomic DNA
ggcgtgttgaattgacactgtaacttgttcaagtgtaaaatacccacgag

SEQ ID NO: 36978 - DNA, 40 bp, Aeromonas hydrophila; identical to SEQ ID NO: 36973
  source 1..40: mol_type = genomic DNA

SEQ ID NO: 36979 - DNA, 50 bp, Aeromonas hydrophila
  source 1..50: mol_type = genomic DNA
ggcgtgttgaattgacactgtaacaggttcaagtgtaaaatacccacgag

SEQ ID NO: 36980 - DNA, 40 bp, Aeromonas hydrophila; identical to SEQ ID NO: 36975
  source 1..40: mol_type = genomic DNA

SEQ ID NO: 36981 - protein, 463 aa, Staphylococcus aureus
MKVAIYTRVSSAEQANEGYSIHEQKRKLISFCEVNDWNRYEVFSDPGVSGGSMKRPSLQKLFDRLEEFDLVLVYKLDRLTRNVRDLLEMLEVFEKNNIAFKSATELFDTTSAIGKLFITMVGAMAEWERETIRERSLIGARAAVRSGKYIKVQPFCYDLVDQKLKPNQYAEYIRFIVDKLLSGKSANEVVRLLESKKKPPGITKWNRKTVLGWMRNPILRGHTKHGDLLIKNTHEPIISEDEHSKMLDIIDKRTHKSKTKHNSIFRGVIECPQCQNKLYLFSSIQKRANGGSYEVRRYTCATCHKNKEVKDVSFNESEIEREFINTLLKKGTDNFMVNIPKPKDYDIENNKEKILEQRTNYTRAWSLGYIKDEEYFVLMAETDKLLKDIEEKESPRINIELNEQQIRTVKNLLIKGFKMATAENKEELITSTVDLIKIDFIPRRLNKEGNINTVKINEIHFKY

SEQ ID NO: 36982 - DNA, 50 bp, Staphylococcus aureus
  source 1..50: mol_type = genomic DNA
aatgagtgttatgtaactagaaagaacgtagtagttacataacattcacg

SEQ ID NO: 36983 - DNA, 40 bp, Staphylococcus aureus
  source 1..40: mol_type = genomic DNA
catgaatggtaccacttctaacgcacatgttccaccaata

SEQ ID NO: 36984 - DNA, 50 bp, Staphylococcus aureus
  source 1..50: mol_type = genomic DNA
aatgagtgttatgtaactagaaagtccgtagtagttacataacattcacg

SEQ ID NO: 36985 - DNA, 40 bp, Staphylococcus aureus
  source 1..40: mol_type = genomic DNA
catgaatggtacctcttcttcagctctcattcaattcata

SEQ ID NO: 36986 - protein, 463 aa, Staphylococcus aureus; identical to SEQ ID NO: 14001

SEQ ID NO: 36987 - DNA, 50 bp, Staphylococcus aureus
  source 1..50: mol_type = genomic DNA
aatgagtgttatgtaactagaaagaacgtagtagttacaaaacattcacg

SEQ ID NO: 36988 - DNA, 40 bp, Staphylococcus aureus; identical to SEQ ID NO: 36983
  source 1..40: mol_type = genomic DNA

SEQ ID NO: 36989 - DNA, 50 bp, Staphylococcus aureus
  source 1..50: mol_type = genomic DNA
aatgagtgttatgtaactagaaagtccgtagtagttacaaaacattcacg

SEQ ID NO: 36990 - DNA, 40 bp, Staphylococcus aureus; identical to SEQ ID NO: 36985
  source 1..40: mol_type = genomic DNA

SEQ ID NO: 36991 - protein, 463 aa, Staphylococcus aureus
MKVAIYTRVSSAEQANEGYSIHEQKRKLISFCEVNDWNRYEVFSDPGVSGGSMKRPSLQKLFDRLEEFDLVLVYKLDRLTRNVRDLLEMLEVFEKNNIAFKSATELFDTTSAIGKLFITMVGAMAEWERETIRERSLIGARAAVRSGKYIKVQPFCYDLVDQKLKPNQYAEYIRFIVDKLLSGKSANEVVRLLESKKKPPGITKWNRKTVLGWMRNPILRGHTKHGDLLIKNTHEPIISEDEHSKMLDIIDKRTHKSKTKHNSIFRGVIECPQCQNKLYLFSSIQKRANGGSYEVRRYTCATCHKNKEVKDVSFNESEIEREFINTLLKKGTDNFMVNIPKPKDYDIENNKEKILEQRTNYTRAWSLGYIKDEEYFVLMDETDKLLKDIEEKESPRINIELNEQQIRTVKNLLIKGFKMATAENKEELITSTVDLIKIDFIPRRLNKEGNINTVKINEIHFKY

SEQ ID NO: 36992 - DNA, 50 bp, Staphylococcus aureus
  source 1..50: mol_type = genomic DNA
aatgagtgttatgtaactagaaagaacatagtagttacataacattcacg

SEQ ID NO: 36993 - DNA, 40 bp, Staphylococcus aureus; identical to SEQ ID NO: 36983
  source 1..40: mol_type = genomic DNA

SEQ ID NO: 36994 - DNA, 50 bp, Staphylococcus aureus
  source 1..50: mol_type = genomic DNA
aatgagtgttatgtaactagaaagtccatagtagttacataacattcacg

SEQ ID NO: 36995 - DNA, 40 bp, Staphylococcus aureus; identical to SEQ ID NO: 36985
  source 1..40: mol_type = genomic DNA

SEQ ID NO: 36996 - protein, 463 aa, Staphylococcus aureus; identical to SEQ ID NO: 36021

SEQ ID NO: 36997 - DNA, 50 bp, Staphylococcus aureus; identical to SEQ ID NO: 36022
  source 1..50: mol_type = genomic DNA

SEQ ID NO: 36998 - DNA, 40 bp, Staphylococcus aureus
  source 1..40: mol_type = genomic DNA
catgaatggtaccacttctaccgcacatgttccaccaata

SEQ ID NO: 36999 - DNA, 50 bp, Staphylococcus aureus
  source 1..50: mol_type = genomic DNA
gatgaatggtgtgttacgcggtagtctgtagttgttacaaaacattcacg

SEQ ID NO: 37000 - DNA, 40 bp, Staphylococcus aureus; identical to SEQ ID NO: 36985
  source 1..40: mol_type = genomic DNA

SEQ ID NO: 37001 - protein, 600 aa, Vibrio vulnificus
MIHPKEQLDAYIYSRVSKDVQVQGDGIRRQIDGAIRFVESKNKENLQNGLPTYAIADEFITDRGLSAYKGFNTAANGGLGAFLEAARKGDIKRGSLLVVEAVDRISRMPADESRKTFSLFKEYGIDVAIVKFGIIIKHSESTTLENDLLITAAIHLAHMESQQKSNRINDYFENKRMKEKEGGEKRTSICPSWMKLSEDKRSFELIPDRERVMKRIINMKLDGLGCHRIASTLNSEGVPYFNGKTWSTEIVRKYCKMIQLYGAFQRVKHVRTDAGTKKQPWGDIEQNYYPAIIDEQTFLRLKKSFKRSGGRQTGAFSNLFSKLLFCPQCGSSMSYYKPNRGRKKVRCRKQIDNQGCTQRALNYEEIETRLVKALAGLDYAKINDSSFTDLSAELSSLEANIAELNENVEVVTKQLMENTNPRLYSILTDKLTKLDDEIHSEKAKFDELSILHRNYDTTIINSLKLDNNEDRERYNNFVKQFVKYIICTDEEQGGSLRVVFKADAIGELPFSFSDEKNDKAVSEVFTANRSISDTQAVRSINLDKSSGMYLPLLKEITDVKQPNDLSDSRELIRYMHAVRMAVKRNPSKWKEIAEQAKLRY

SEQ ID NO: 37002 - DNA, 50 bp, Vibrio vulnificus
  source 1..50: mol_type = genomic DNA
tgcaatactaatataaacccaaccaacgaagagtttgtaatagtatcgca

SEQ ID NO: 37003 - DNA, 40 bp, Vibrio vulnificus
  source 1..40: mol_type = genomic DNA
ggcgatggttattccaaccaacgaagaattcgtgattgct

SEQ ID NO: 37004 - DNA, 50 bp, Vibrio vulnificus
  source 1..50: mol_type = genomic DNA
tgcaatactaatataaacccaaccagcgaagagtttgtaatagtatcgca

SEQ ID NO: 37005 - DNA, 40 bp, Vibrio vulnificus
  source 1..40: mol_type = genomic DNA
ggggatgattatacctaacagcgaacatttattgagtgct

SEQ ID NO: 37006 - protein, 604 aa, Vibrio vulnificus
MNKATTLLNTNTAYIYSRVSKEAQVNGDGLRRQIDNAFRFIDSKNRELIEKGLPTYIVADELITDRGLSAYKGYNTAANGGLGAFLEAAKRGEVKRGSLLVVEAVDRISRMPADESRKTFSLFKEYGIDVAIVKFGVIIKHSESTTLENDLLITAAIHLAHMESQQKSNRINDRFEEKRRLEKLGGAKRTTICPLWMKISEDKKSFELIPDRARVMRRIIDMKLNGIGCQRIASILNEEGVPYFNGKTWSTRIVLKYCKMIQLYGAFQRVRHIRTENGTQKQPWGDIEKDYYPALIDEQTFLRLKNSFKKSGGRQTGAFSNLFSGLLCCPKCGSSMSYYKPNRGTLKVRCRKQLDKQGCDQRALNYEEIEERLIRALAGLDYAKLNDSSFVDVSAELSLLEATMAELKENVNVVSTQLMKNTDPRICETLTDKLSQLYSDIDSNKAKFDELSTLHSNYDISVIDNLELAENKDRERYNHFVKQFIKYIICTDKKQGGSIRVVFKADAIGELPFNYDSDDRNDKAISEVFTANRPITNADTVRTINMDKSSTVYLPLLKEITDVKQPSDLSDTRDRLKYMHAVRVAVSRDPKKWGEIAKKAQLKY

SEQ ID NO: 37007 - DNA, 50 bp, Vibrio vulnificus
  source 1..50: mol_type = genomic DNA
tgcgatactattgatctgccgactaatgaagagtttgtaatagtacagca

SEQ ID NO: 37008 - DNA, 40 bp, Vibrio vulnificus; identical to SEQ ID NO: 37003
  source 1..40: mol_type = genomic DNA

SEQ ID NO: 37009 - DNA, 50 bp, Vibrio vulnificus
  source 1..50: mol_type = genomic DNA
tgcgatactattgatctgccgactagtgaagagtttgtaatagtacagca

SEQ ID NO: 37010 - DNA, 40 bp, Vibrio vulnificus; identical to SEQ ID NO: 37005
  source 1..40: mol_type = genomic DNA

SEQ ID NO: 37011 - protein, 598 aa, Vibrio vulnificus
MDEKPRIAHIYSRVSKGTQVKGDGLRRQIEIASKFIEDVNISNSRDGLPVYTLADSPIYDRGLSAYFGLNTDENAGLGAFLKAAENGQVEKGTLLIVEAIDRISRLPVDDARALFARFKKYGIDVAICRFNLIIYHDKSSDLGQDLLITTAIHLAHLESEQKSKRIRARFTHKRLLEKEGGERRTSMSPSWIELSKDKTHFVLIPERARIVRKMVDLKLQGWGAHRITVYLNDQGYPCWNRSNTWYTKIVEKYLKMIQLVGDFQPVEHVHGEKGVRKEPVGDVIKGYYPALITEEEWIRLKASFKRSGGRQTGAFSNLFSNMLYCPTCGSCMSYYKPNRGRIKVRCRKQIDKQGCDQRALNYEEIEPRLIKALAGLDYAKINNNSFASLQKELNTLEAQVAELEASADDIKTQMLEQSDPRIISVYVNKLKAIYTEQDKAKARFEKLSTQTSDYDVNTLEQLQLERNEDRERYNGFVRSFVKYVIASDSKLGKPLRIVFKSEAVGEVPVFFNDDKNNKAISDIFTEQKDVNEAAPIRLINMSRVHGNLGKLAAIDTVPVPDDLGDPLERIKYLFAVRQAVRQNPEKWQAIADEARLFA

SEQ ID NO: 37012 - DNA, 50 bp, Vibrio vulnificus
  source 1..50: mol_type = genomic DNA
tgcaatactaatagaaacccaaccaatgaagagtgggtgatagcatcgca

SEQ ID NO: 37013 - DNA, 40 bp, Vibrio vulnificus; identical to SEQ ID NO: 37003
  source 1..40: mol_type = genomic DNA

SEQ ID NO: 37014 - DNA, 50 bp, Vibrio vulnificus
  source 1..50: mol_type = genomic DNA
tgcaatactaatagaaacccaaccagtgaagagtgggtgatagcatcgca

SEQ ID NO: 37015 - DNA, 40 bp, Vibrio vulnificus; identical to SEQ ID NO: 37005
  source 1..40: mol_type = genomic DNA

SEQ ID NO: 37016 - protein, 598 aa, Vibrio vulnificus; identical to SEQ ID NO: 37011

SEQ ID NO: 37017 - DNA, 50 bp, Vibrio vulnificus
  source 1..50: mol_type = genomic DNA
tgcgatactaatagcaatcctaccaatgaagagtgggtgatagcatcgca

SEQ ID NO: 37018 - DNA, 40 bp, Vibrio vulnificus; identical to SEQ ID NO: 37003
  source 1..40: mol_type = genomic DNA

SEQ ID NO: 37019 - DNA, 50 bp, Vibrio vulnificus
  source 1..50: mol_type = genomic DNA
tgcgatactaatagcaatcctaccagtgaagagtgggtgatagcatcgca

SEQ ID NO: 37020 - DNA, 40 bp, Vibrio vulnificus; identical to SEQ ID NO: 37005
  source 1..40: mol_type = genomic DNA

SEQ ID NO: 37021 - protein, 522 aa, Mesorhizobium plurifarium
MNQRLVRIAKPTGLVKALLYARVSSKEQEKEGFSIPAQCKLLRDYALQQRFDIVQEFIDVETAKTTGRTNFTEMVKYLRKHPGIRSVLVEKTDRLYRNLKDWVTLDELDVEIHLAKEGVTLSRDSRSSEKFMHGIKVLMAKNYIDNLSEEARKGQMEKAEQGIWPTKAPLGYVNTTGKDGRKVIEPHPELAPVVTQLFERYATGQYSLKALAKAAHGDGLIYPKSGNPVPVSTVHMILRNRLYTGLFQWNGKLHHGKHEPLVSIELWERVQGILTGRNAVPTHPIGNEFAFTGLMTCTECGCAIVAEIKKGKYVYYHCTGHTNKGRGGYGDCRRKYVREEVLDQAFANLLDRLHFDEEILEWVRVALMASHADERREHEQAIYRCQLEYKRLEDRLHAMYLDKLDGRIDNAFYDRMSAQWRTEQTRLLREIERHGSAEESYMEDGIRLLELARNASRLFAKQPVHEKKRLLNLVLSNCQWDQGEVHAVFRQPFDLLAKTVASGAATSARHTALSRESPVWLG

SEQ ID NO: 37022 - DNA, 50 bp, Mesorhizobium plurifarium
  source 1..50: mol_type = genomic DNA
tatcgagagagagtccagtttggctggggttcctggaagcttttcgaact

SEQ ID NO: 37023 - DNA, 40 bp, Mesorhizobium plurifarium
  source 1..40: mol_type = genomic DNA
ctgcatgacggcagttggctggggcgccaggattcgaacc

SEQ ID NO: 37024 - DNA, 50 bp, Mesorhizobium plurifarium
  source 1..50: mol_type = genomic DNA
tatcgagagagagtccagtttggcgggggttcctggaagcttttcgaact

SEQ ID NO: 37025 - DNA, 40 bp, Mesorhizobium plurifarium
  source 1..40: mol_type = genomic DNA
ctgtagctaggcagttggcgggtggagcaggattcaaacc

SEQ ID NO: 37026 - protein, 554 aa, Eubacterium ramulus
MMNGYEYTDMDAILAGSFRAAIYCRLSKDDDLDGESASIANQRDMLEKYCEKQGWEVVAVYQDDGYTGLNMERPDLKRMLKAIERRQINLVITKDLSRLGRNYLQTGTLIEDFFPRHGVRYIAMNDGIDTMRENNDIAPFKNILNEMYSKDISKKVHSSYLLKAQQGQFTGCIAPFGYQKDPEDKNHLLVDEETAPIVRQIFRWALEGHGPNFIRRRLEEQKVPCPTWWNRERGFRNVRTKWEKKDPVNGRYMWDFSVIKDILMNPVYTGAIASQKKDYRFKIGTIGEKKPQDWIVVEERHEPIVDRKSFDIVQDKLKSRQRSRQTGEISLFAGLLKCGECGKSLTIRYTNDKHPKQIYSCKTYNAYGKQHCTQHRVEYETLYRLVLNKIRECAKAALMDGEAVAGRLTNTCEAEQKGQREALERSLTKHEERIEVLEKMVLRLYEDMVAGRISEANFNLMLDKTQKEQAELKERVEQGRRKLADEIRLAVDAKQWVDAIQEYADITELDAATLNRLIKEIVVHEHIDSDKTRHISIEIHFNLKPIPEVEQVTA

SEQ ID NO: 37027 - DNA, 50 bp, Eubacterium ramulus
  source 1..50: mol_type = genomic DNA
ttttacacctattttggtatgaaacagctcatggctaattagatgtaata

SEQ ID NO: 37028 - DNA, 40 bp, Eubacterium ramulus
  source 1..40: mol_type = genomic DNA
aaaatcacagggaatcaaacagcttatggcaggcggaggt

SEQ ID NO: 37029 - DNA, 50 bp, Eubacterium ramulus
  source 1..50: mol_type = genomic DNA
ttttacacctattttggtatgaaagcgctcatggctaattagatgtaata

SEQ ID NO: 37030 - DNA, 40 bp, Eubacterium ramulus
  source 1..40: mol_type = genomic DNA
aaaatctcaggaactcaaagcaatttttgcaggcagaaga

SEQ ID NO: 37031 - protein, 587 aa, Streptococcus pneumoniae; identical to SEQ ID NO: 10016

SEQ ID NO: 37032 - DNA, 50 bp, Streptococcus pneumoniae; identical to SEQ ID NO: 1787
  source 1..50: mol_type = genomic DNA

SEQ ID NO: 37033 - DNA, 40 bp, Streptococcus pneumoniae
  source 1..40: mol_type = genomic DNA
ctatttcctcaaacgcatcacgtcgagacggtagcacttt

SEQ ID NO: 37034 - DNA, 50 bp, Streptococcus pneumoniae; identical to SEQ ID NO: 1787
  source 1..50: mol_type = genomic DNA

SEQ ID NO: 37035 - DNA, 40 bp, Streptococcus pneumoniae; identical to SEQ ID NO: 10010
  source 1..40: mol_type = genomic DNA

SEQ ID NO: 37036 - protein, 607 aa, Streptococcus pneumoniae; identical to SEQ ID NO: 10731

SEQ ID NO: 37037 - DNA, 50 bp, Streptococcus pneumoniae; identical to SEQ ID NO: 1792
  source 1..50: mol_type = genomic DNA

SEQ ID NO: 37038 - DNA, 40 bp, Streptococcus pneumoniae; identical to SEQ ID NO: 37033
  source 1..40: mol_type = genomic DNA

SEQ ID NO: 37039 - DNA, 50 bp, Streptococcus pneumoniae; identical to SEQ ID NO: 1792
  source 1..50: mol_type = genomic DNA

SEQ ID NO: 37040 - DNA, 40 bp, Streptococcus pneumoniae; identical to SEQ ID NO: 10010
  source 1..40: mol_type = genomic DNA

SEQ ID NO: 37041 - protein, 584 aa, Streptococcus pneumoniae; identical to SEQ ID NO: 9321

SEQ ID NO: 37042 - DNA, 50 bp, Streptococcus pneumoniae; identical to SEQ ID NO: 15117
  source 1..50: mol_type = genomic DNA

SEQ ID NO: 37043 - DNA, 40 bp, Streptococcus pneumoniae; identical to SEQ ID NO: 37033
  source 1..40: mol_type = genomic DNA

SEQ ID NO: 37044 - DNA, 50 bp, Streptococcus pneumoniae
  source 1..50: mol_type = genomic DNA
gtattctcaaggaacagactacacatgtggagtgcgtagtgttgctacaa

SEQ ID NO: 37045 - DNA, 40 bp, Streptococcus pneumoniae; identical to SEQ ID NO: 10010
  source 1..40: mol_type = genomic DNA

SEQ ID NO: 37046 - protein, 583 aa, Streptococcus pneumoniae
MSNNVEIIKANPLVTRRNDNSGSSSRRVAAYCRVSSDSDDQKNSYDSQVRHYREYISQHQDWNLVDIYADEGISGTQVGKRQDFQRLISDCLDGKIDYIITKAIARFARNTLDTLKYVRLLKDKQIGVFFEEENIDTLTMDGELLLTILSSVAQQEVENTSAHVKKGLKMKMQRGELIGFQGCLGYDYNQDTKSISINEKEAKIVRYIFERYIDGIGGKAIARELDELGYKTPRGLDHWQDTTVLGIIKNEKYKGDILMGKTFTVDPISKRRLINFGEEDKYYIKNNHDAIISPEIFTQAQEIRLRRSGNKKTIANTKGKRERYSRMYPFSSRLECGFCGTVLSRRSWHSSSEYKKIIWHCTTSIKKGKKHCIHSKGIEEKAIENAFLQSYQQLFYENNNLTEDFLEIIKEELTDDTLKVELNKIVSKLNSLYKKEEKLVSMNLDGKISDSVYEDKFNQIQIEKEKLLEEKVNLEVTLKSEVDIKSRLENFKEILTSQKTLTEFDKDIFDSIVEKIIVGGINSDGEIDPAMLTIIFKTGDSSTKDAKSYKSKRKNAKIENDKLCFNTVTDDEKKCTNKENNAR

SEQ ID NO: 37047 - DNA, 50 bp, Streptococcus pneumoniae
  source 1..50: mol_type = genomic DNA
gtgtacaaataaagaaaacaacgcacgtggagtgtgtagtgttgctacaa

SEQ ID NO: 37048 - DNA, 40 bp, Streptococcus pneumoniae; identical to SEQ ID NO: 37033
  source 1..40: mol_type = genomic DNA

SEQ ID NO: 37049 - DNA, 50 bp, Streptococcus pneumoniae
  source 1..50: mol_type = genomic DNA
gtgtacaaataaagaaaacaacgcatgtggagtgtgtagtgttgctacaa

SEQ ID NO: 37050 - DNA, 40 bp, Streptococcus pneumoniae; identical to SEQ ID NO: 10010
  source 1..40: mol_type = genomic DNA

SEQ ID NO: 37051 - protein, 583 aa, Streptococcus pneumoniae
MTNNVEIIKANPLVTRRNDSNGSLLRRVAAYCRVSSDSDDQKNSYDSQVRHYREYISQHKDWNLVDIYADEGISGTQVGKRQDFQRLISDCLDGKIDYIITKAIARFARNTLDTLKYVRLLKDKQIGVFFEEENIDTLTMDGELLLTILSSVAQQEVENTSAHVKKGLKMKMQRGELIGFQGCLGYDYNQDTKSISINEKEAKIVRYIFERYIDGIGGRAIARELDELGYKTPRGLDHWQDTTVLGIIKNEKYKGDILMGKTFTVDPISKRRLINFGEEDKYYIKNNHDAIISPEIFTQAQEIRLRRSGNKKTIANTKGKRERYSRMYPFSSRLECGFCGTVLSRRSWHSSSEYKKIIWHCTTSIKRGKKYCTHSKGIEEKAIENAFLQSYQQLFYENNNLTEDFLEIIKEELTDDTLKVELTKIVSKLNSLYKKEEKLVSMNLDGKISDSVYEDKFNQIQIEKEKLLEEKVNLEVTLKSEVDIKSRLENFKEILTSQKTLTEFDKDIFESIVEKIIVGGINSDGEIDPAMLTIIFKTGDSSTKDAKSYKSKRKNAKIDNDKLCFNAVTDDEKKCTNKENNAR

SEQ ID NO: 37052 - DNA, 50 bp, Streptococcus pneumoniae; identical to SEQ ID NO: 37047
  source 1..50: mol_type = genomic DNA

SEQ ID NO: 37053 - DNA, 40 bp, Streptococcus pneumoniae; identical to SEQ ID NO: 37033
  source 1..40: mol_type = genomic DNA

SEQ ID NO: 37054 - DNA, 50 bp, Streptococcus pneumoniae; identical to SEQ ID NO: 37049
  source 1..50: mol_type = genomic DNA

SEQ ID NO: 37055 - DNA, 40 bp, Streptococcus pneumoniae; identical to SEQ ID NO: 10010
  source 1..40: mol_type = genomic DNA

SEQ ID NO: 37056 - protein, 589 aa, Streptococcus pneumoniae
MKKDVKVIKGDTTLKRTASGCVERSIKRVAAYCRVSTDTEDQINSYNSQVEHYTEFIQKNKEWTLAGIYADEAITGTQVDRRIDFQRLINDCMNGDIDMIITKSISRFARNTLDTLKYVRKLKEFNVAVFFEEENINTLTMDGELLLTILSSVAQQEVENISANVKKGLRMKMERGEMVGFQGCLGYDYDPETKSISINEKEAEIVRYIFRRYIEGVGGMVISRELEEQGYLSPRGNKRWTETTVLGIIKNEKYKGDLMMGKTYTVDPISKRRLDNFGEQDKFYIENHHEPIISEEDFEKAQGIRLRRSKNRNTVANNGGKREKYSRKYAFSSMLECGFCGHNLSRRNWHSSSEYTKVIWQCVNATKNGKKYCPHSKGIEEEAIEKAFMESYRQVCQNNVEITNEFLKTVEEELKDNSLAKDLKKITNQLDKILKKEKDLVELRLNESISMDIYQDKYNEIAISKEKLLAEKRTLEVTLTDEKALKKRLEGFKKLLESNKYLEEFDRAVFESIVDKIIIGGTNDEGEIDPAMITIIYKTGKKDSQDGRLFKSRRKNAKEVNEETDNKLYPRSSDEVNNLCSYPMDNTRR

SEQ ID NO: 37057 - DNA, 50 bp, Streptococcus pneumoniae
  source 1..50: mol_type = genomic DNA
gtgttcctatcctatggacaacacatgtcgagtgcatagcgttgatacaa

SEQ ID NO: 37058 - DNA, 40 bp, Streptococcus pneumoniae; identical to SEQ ID NO: 37033
  source 1..40: mol_type = genomic DNA

SEQ ID NO: 37059 - DNA, 50 bp, Streptococcus pneumoniae; identical to SEQ ID NO: 37057
  source 1..50: mol_type = genomic DNA

SEQ ID NO: 37060 - DNA, 40 bp, Streptococcus pneumoniae; identical to SEQ ID NO: 10010
  source 1..40: mol_type = genomic DNA

SEQ ID NO: 37061 - protein, 589 aa, Streptococcus pneumoniae
MKKDVKVIKGDTTLKRTASGCVERSIKRVAAYCRVSTDTEDQINSYNSQVEHYTEFIQKNNEWTLAGIYADEAITGTQVDRRIDFQRLINDCINGDIDMIITKSISRFARNTLDTLKYVRKLKEFNVAVFFEEENINTLTMDGELLLTILSSVAQQEVENISANVKKGLRMKMERGEMVGFQGCLGYDYDPETKSISINEKEAEIVRYIFRRYIEGVGGMLISRELEEQGYLSPRGNKRWTETTVLGIIKNEKYKGDLMMGKTYTVDPISKRRLDNYGEQDKFYIENHHEPIISEEDFEKAQGIRLRRSKNRNTVANNGGKREKYSRKYAFSSMLECGFCGHNLSRRNWHSSSEYTKVIWQCVNATKNGKKYCPHSKGIEEEAIEKAFMESYRQVCHNNVEITNEFLKTVEEELKDNSLAKDLKKINNQLDKILKKEKDLVELRLNESISMDIYQDKYNEIAISKEKLLAEKRTLEVTLTDEKALKKRLEGFKKLLESNKYLEEFDRAVFESIVDKIIIGGTNDEGEIDPAMITIIYKTGKKDSQDGRLFKSRRKNAKEVDEKTDNKLYPQSSDEVNNLCSYPMDNTRR

SEQ ID NO: 37062 - DNA, 50 bp, Streptococcus pneumoniae; identical to SEQ ID NO: 18952
  source 1..50: mol_type = genomic DNA

SEQ ID NO: 37063 - DNA, 40 bp, Streptococcus pneumoniae; identical to SEQ ID NO: 37033
  source 1..40: mol_type = genomic DNA

SEQ ID NO: 37064 - DNA, 50 bp, Streptococcus pneumoniae; identical to SEQ ID NO: 37057
  source 1..50: mol_type = genomic DNA

SEQ ID NO: 37065 - DNA, 40 bp, Streptococcus pneumoniae; identical to SEQ ID NO: 10010
  source 1..40: mol_type = genomic DNA

SEQ ID NO: 37066 - protein, 589 aa, Streptococcus pneumoniae
MKKDVKVIKGDTTLKRTASGCVERSIKRVAAYCRVSTDTEDQINSYNSQVEHYTEFIQKNNEWTLAGIYADEAITGTQVDRRIDFQRLINDCINGDIDMIITKSISRFARNTLDTLKYVRKLKEFNVAVFFEEENINTLTMDGELLLTILSSVAQQEVENISANVKKGLRMKMERGEMVGFQGCLGYDYDPETKSISINEKEAEIVRYIFRRYIEGVGGMVISRELEEQGYLSPRGNKRWTETTVLGIIKNEKYKGDLMMGKTYTVDPISKRRLDNYGEQDKFYIENHHEPIISEEDFEKAQGIRLRRSKNRNTVANNGGKREKYSRKYAFSSMLECGFCGHNLSRRNWHSSSEYTKVIWQCVNATKNGKKYCPHSKGIEEEAIEKAFMESYRQVCHNNVEITNEFLKTVEEELKDNSLAKDLKKINNQLDKILKKEKDLVELRLNESISMDIYQDKYNEIAISKEKLLAEKRTLEVTLTDEKALKKRLEGFKKLLESNKYLEEFDRAVFESIVDKIIIGGTNDEGEIDPAMITIIYKTGKKDSQDGRLFKSRRKNAKEVDEKTDNKLYPQSSDEVNNLCSYPMDNTRR

SEQ ID NO: 37067 - DNA, 50 bp, Streptococcus pneumoniae; identical to SEQ ID NO: 18952
  source 1..50: mol_type = genomic DNA

SEQ ID NO: 37068 - DNA, 40 bp, Streptococcus pneumoniae; identical to SEQ ID NO: 37033
  source 1..40: mol_type = genomic DNA

SEQ ID NO: 37069 - DNA, 50 bp, Streptococcus pneumoniae; identical to SEQ ID NO: 37057
  source 1..50: mol_type = genomic DNA

SEQ ID NO: 37070 - DNA, 40 bp, Streptococcus pneumoniae; identical to SEQ ID NO: 10010
  source 1..40: mol_type = genomic DNA

SEQ ID NO: 37071 - protein, 460 aa, Streptococcus pneumoniae
MQIGVYFEEENIDTLTMDGELLLTILSSVAQQEVENTSAHVKKGLKMKMQRGELVGFQGCLGYDYDVETKQISINKKEAKIVRYIFERYLEGIGGKVIARELDELGYKSPRGLEHWNDTTVLGIIKNEKYKGDILMGKTFTVDPISKRRLSNFGEEDKYYIKDNHEPIISKEDFEKAQEIRLRRAGNKKTAANVNGKRERYSKMYAFSSMLECGFCGSILSRRSWHCRSDYRKVVWHCVTSIKKGKKFCKHSKGLEEIAIEGAFLEAYRQVYHSNENLMTDLLETIESELNDNSLNKELKRITNKLRILLKKEENLVNLRLEGKVSDSIYNEKYNEISSEKEFLAEEKVNIETTLKSEIDVKKRLTEFKHLLSSQKMLTEFDRTVFESIVEKIIVGGVNIDGEIDPAMLTIIFKTGETQNKEGKKFKSKRKNAKLEPDKLCPQNSDEDKKLYSQGTDNTR

SEQ ID NO: 37072 - DNA, 50 bp, Streptococcus pneumoniae
  source 1..50: mol_type = genomic DNA
gtattctcaagggacagacaacacacgtggagtgcgtagtattgctacaa

SEQ ID NO: 37073 - DNA, 40 bp, Streptococcus pneumoniae; identical to SEQ ID NO: 37033
  source 1..40: mol_type = genomic DNA

SEQ ID NO: 37074 - DNA, 50 bp, Streptococcus pneumoniae
  source 1..50: mol_type = genomic DNA
gtattctcaagggacagacaacacatgtggagtgcgtagtattgctacaa

SEQ ID NO: 37075 - DNA, 40 bp, Streptococcus pneumoniae; identical to SEQ ID NO: 10010
  source 1..40: mol_type = genomic DNA

SEQ ID NO: 37076 - protein, 587 aa, Streptococcus pneumoniae; identical to SEQ ID NO: 9821

SEQ ID NO: 37077 - DNA, 50 bp, Streptococcus pneumoniae
  source 1..50: mol_type = genomic DNA
gtgttcctatcctatggacaacacatgtagagtgcatagcgttgatacaa

SEQ ID NO: 37078 - DNA, 40 bp, Streptococcus pneumoniae; identical to SEQ ID NO: 37033
  source 1..40: mol_type = genomic DNA

SEQ ID NO: 37079 - DNA, 50 bp, Streptococcus pneumoniae; identical to SEQ ID NO: 37077
  source 1..50: mol_type = genomic DNA

SEQ ID NO: 37080 - DNA, 40 bp, Streptococcus pneumoniae; identical to SEQ ID NO: 10010
  source 1..40: mol_type = genomic DNA

SEQ ID NO: 37081 - protein, 587 aa, Streptococcus pneumoniae
MKRDVKVIKGDTTLKRTASGCVERSIKRVAAYCRVSTDTEDQINSYNSQVEHYTDFIKQNNEWTLAGIYADEAITGTQVDRRIDFQRLINDCMNGDIDMVITKSISRFARNTLDTLKYVRKLKEYNVAVFFEEENINTLTMDGELLLTILSSVAQQEVENISANVKKGLRMKMERGEMVGFQGCLGYDYDPETKSISVNEKEAEIVRYIFRRYLEGVGGMVISRELEEQGYLSPRGHKRWTETTVLGIIKNEKYKGDLLMGKTFTVDPISKRRLDNFGEQDKFYIENHHEPIISEEDFEKAQGIRLRRAKNRNTVANNGGKREKYSRKYAFSSMLECGFCGHMLSRRNWHSSSEYTKVIWQCVNATKNGKKYCPHSKGIEEEAIEKAFMESYRQVCHNNVEITNEFLKTVEEELKDNSLAKDLKKISNQLDKILKKEKDLVELRLNEAISMEIYQEKYNEIAISKEKLLEEKRTLEVTLTDEKALKKRLEGFKKLLESNKYLEEFDRTVFESIVDKIVIGGTNDDGDIDPAMITIIYKTGKKDSQNGRLFKSRRKNAKVVEENDGDKLYSQSSNEVNKLCSYSTDNT

SEQ ID NO: 37082 - DNA, 50 bp, Streptococcus pneumoniae; identical to SEQ ID NO: 19727
  source 1..50: mol_type = genomic DNA

SEQ ID NO: 37083 - DNA, 40 bp, Streptococcus pneumoniae; identical to SEQ ID NO: 37033
  source 1..40: mol_type = genomic DNA

SEQ ID NO: 37084 - DNA, 50 bp, Streptococcus pneumoniae; identical to SEQ ID NO: 19727
  source 1..50: mol_type = genomic DNA

SEQ ID NO: 37085 - DNA, 40 bp, Streptococcus pneumoniae; identical to SEQ ID NO: 10010
  source 1..40: mol_type = genomic DNA

SEQ ID NO: 37086 - protein, 594 aa, Streptococcus pneumoniae
MKKDVKVIKGDTTLKRTASGCVERSIKRVAAYCRVSTDTEDQINSYNSQVEHYTEFIKKNKEWTLAGIYADEAITGTQVDRRIDFQRLINDCMNGDIDMIITKSISRFARNTLDTLKYVRKLKEFNVAVFFEEENINTLTMDGELLLTILSSVAQQEVENISANVKKGLRMKMERGEMVGFQGCLGYDYDSETKSISINEKEAEIVRYIFRRYIEGVGGMVISRELEEQGYLSPRGNKRWTETTVLGIIKNEKYKGDLMMGKTYTVDPMTYTVDPISKRRLDNFGEQDKFYIENHHEPIISEEDFEKAQGIRLRRSKNRNTVANNGGKREKYSRKYAFSSMLECGFCGHNLSRRNWHSSSEYTKVIWQCVNATKNGKKYCPHSKGIEEEAIEKAFMESYRQVCHNNVEITNEFLKTVEEELKDNSLAKDLKKITNQLDKILKKEKDLVELRLNESISMDIYQDKYNEIAISKEKLLAEKRTLEVTLTDEKALKKRLEGFKKLLESNKYLDEFDRAVFESIVDKIIIGGTNDEGEIDPAMITIIYKTGKKDSQDGRLFKSRRKNAKEVNEETDNKLYPHSSDEVNNLCSYPMDNT

SEQ ID NO: 37087 - DNA, 50 bp, Streptococcus pneumoniae; identical to SEQ ID NO: 1787
  source 1..50: mol_type = genomic DNA

SEQ ID NO: 37088 - DNA, 40 bp, Streptococcus pneumoniae; identical to SEQ ID NO: 37033
  source 1..40: mol_type = genomic DNA

SEQ ID NO: 37089 - DNA, 50 bp, Streptococcus pneumoniae; identical to SEQ ID NO: 1787
  source 1..50: mol_type = genomic DNA

SEQ ID NO: 37090 - DNA, 40 bp, Streptococcus pneumoniae; identical to SEQ ID NO: 10010
  source 1..40: mol_type = genomic DNA

SEQ ID NO: 37091 - protein, 601 aa, Streptococcus pneumoniae
MKKDVKVIKGDTTLKRTASGCVERSIKRVAAYCRVSTDTEDQINSYNSQVEHYTEFIKKNKEWTLAGIYADEAITGTQVDRRIDFQRLINDCMNGDIDMIITKSISRFARNTLDTLKYVRKLKEFNVAVFFEEENINTLTMDGELLLTILSSVAQQEVENISANVKKGLRMKMERGEMVGFQGCLGYDYDSETKSISINEKEAEIVRYIFRRYIEGVGGMVISRELEEQGYLSPRGNKRWTETTVLGIIKNEKYKGDLMMGKTYTVDPMTYTVDPMTYTVDPISKRRLDNFGEQDKFYIENHHEPIISEEDFEKAQGIRLRRSKNRNTVANNGGKREKYSRKYAFSSMLECGFCGHNLSRRNWHSSSEYTKVIWQCVNATKNGKKYCPHSKGIEEEAIEKAFMESYRQVCHNNVEITNEFLKTVEEELKDNSLAKDLKKITNQLDKILKKEKDLVELRLNESISMDIYQDKYNEIAISKEKLLAEKRTLEVTLTDEKALKKRLEGFKKLLESNKYLDEFDRAVFESIVDKIIIGGTNDEGEIDPAMITIIYKTGKKDSQDGRLFKSRRKNAKEVNEETDNKLYPHSSDEVNNLCSYPMDNT

SEQ ID NO: 37092 - DNA, 50 bp, Streptococcus pneumoniae; identical to SEQ ID NO: 1787
  source 1..50: mol_type = genomic DNA

SEQ ID NO: 37093 - DNA, 40 bp, Streptococcus pneumoniae; identical to SEQ ID NO: 37033
  source 1..40: mol_type = genomic DNA

SEQ ID NO: 37094 - DNA, 50 bp, Streptococcus pneumoniae; identical to SEQ ID NO: 1787
  source 1..50: mol_type = genomic DNA

SEQ ID NO: 37095 - DNA, 40 bp, Streptococcus pneumoniae; identical to SEQ ID NO: 10010
  source 1..40: mol_type = genomic DNA

SEQ ID NO: 37096 - protein, 587 aa, Streptococcus pneumoniae
MKKDVKVIKGDTTLKRTASGCVERSIKRVAAYCRVSTDTEDQINSYNSQVEHYTEFIQKNKEWTLAGIYADEAITGTQVDRRIDFQRLINDCMNGDIDMIITKSISRFARNTLDTLKYVRKLKEFNVAVFFEEENINTLTMDGELLLTILSSVAQQEVENISANVKKGLRMKMERGEMVGFQGCLGYDYDPETKSISINEKEAEIVRYIFRRYIEGVGGMVISRELEEQGYLSPRGNKRWTETTVLGIIKNEKYKGDLMMGKTYTVDPISKRRLDNFGEQDKFYIENHHEPIISEEDFEKAQGIRLRRSKNRNTVANNGGKREKYSRKYAFSSMLECGFCGHNLSRRNWHSSSEYTKVIWQCVNATKNGKKYCPHSKGIEEEAIEKAFMESYRQVCHNNVEITNEFLKTVEEELKDNSLAKDLKKITNQLDKILKKEKDLVELRLNESISMDIYQDKYNEIAISKEKLLAEKRTLEVTLTDEKALKKRLEGFKKLLESNKYLEEFDRAVFESIVDKIIIGGTNDEGEIDPAMITIIYKTGKKDSQDGRLFKSRRKNAKEVNEETDNKLYPRSSDEVNNLCSYPMDNT

SEQ ID NO: 37097 - DNA, 50 bp, Streptococcus pneumoniae; identical to SEQ ID NO: 1787
  source 1..50: mol_type = genomic DNA

SEQ ID NO: 37098 - DNA, 40 bp, Streptococcus pneumoniae; identical to SEQ ID NO: 37033
  source 1..40: mol_type = genomic DNA

SEQ ID NO: 37099 - DNA, 50 bp, Streptococcus pneumoniae; identical to SEQ ID NO: 1787
  source 1..50: mol_type = genomic DNA

SEQ ID NO: 37100 - DNA, 40 bp, Streptococcus pneumoniae; identical to SEQ ID NO: 10010
  source 1..40: mol_type = genomic DNA

SEQ ID NO: 37101 - protein, 443 aa, Streptococcus pneumoniae
MLLTILSSVAQQEVENISANVKKGLRMKMERGEMVGFQGCLGYDYDPETKSISINEKEAEIVRYIFRRYIEGVGGMVISRELEEQGYLSPRGNKRWTETTVLGIIKNEKYKGDLMMGKTYTVDPISKRRLDNFGEQDKFYIENHHEPIISEEDFEKAQGIRLRRSKNRNTVANNGGKREKYSRKYAFSSMLECGFCGHNLSRRNWHSSSEYTKVIWQCVNATKNGKKYCPHSKGIEEEAIEKAFMESYRQVCHNNVEITNEFLKTVEEELKDNSLAKDLKKITNQLDKILKKEKDLVELRLNESISMDIYQDKYNEIAISKEKLLAEKRTLEVTLTDEKALKKRLEGFKKLLESNKYLEEFDRAVFESIVDKIIIGGTNDEGEIDPAMITIIYKTGKKDSQDGRLFKSRRKNAKEVNEKADSKLYPQSSDEVNNLCSYPMDNT

SEQ ID NO: 37102 - DNA, 50 bp, Streptococcus pneumoniae; identical to SEQ ID NO: 1787
  source 1..50: mol_type = genomic DNA

SEQ ID NO: 37103 - DNA, 40 bp, Streptococcus pneumoniae; identical to SEQ ID NO: 37033
  source 1..40: mol_type = genomic DNA

SEQ ID NO: 37104 - DNA, 50 bp, Streptococcus pneumoniae; identical to SEQ ID NO: 1787
  source 1..50: mol_type = genomic DNA

SEQ ID NO: 37105 - DNA, 40 bp, Streptococcus pneumoniae; identical to SEQ ID NO: 10010
  source 1..40: mol_type = genomic DNA

SEQ ID NO: 37106 - protein, 607 aa, Streptococcus pneumoniae
MFCKCGIIELHRKIQKGGGAVKKDVKVIKGDTTLKRTASGCVQRSIKRVAAYCRVSTDTEDQINSYNSQVEHYTEFIQKNKEWTLAGIYADEAITGTQVDRRIDFQRLINDCMNGDIDMIITKSISRFARNTLDTLKYVRKLKEFNVAVFFEEENINTLTMDGELLLTILSSVAQQEVENISANVKKGLRMKMERGEMVGFQGCLGYDYDPETKSISINEKEAEIVRYIFRRYIEGVGGMVISRELEEQGYLSPRGNKRWTETTVLGIIKNEKYKGDLMMGKTYTVDPISKRRLDNFGEQDKFYIENHHEPIISEEDFEKAQGIRLRRSKNRNTVANNGGKREKYSRKYAFSSMLECGFCGHNLSRRNWHSSSEYTKVIWQCVNATKNGKKYCPHSKGIEEEAIEKAFMESYRQVCHNNVEITNEFLKTVEEELKDNSLAKDLKKITNQLDKILKKEKDLVELRLNESISMDIYQDKYNEIAISKEKLLAEKRTLEVTLTDEKALKKRLEGFKKLLESNKYLEEFDRSVFESIVDKIIIGGTNDEGEIDPAMITIIYKTGKKDSQDGRLFKSRRKNAKEVNEETDNKLYPHSSDEVNNLYSYPIDNT

SEQ ID NO: 37107 - DNA, 50 bp, Streptococcus pneumoniae; identical to SEQ ID NO: 1792
  source 1..50: mol_type = genomic DNA

SEQ ID NO: 37108 - DNA, 40 bp, Streptococcus pneumoniae; identical to SEQ ID NO: 37033
  source 1..40: mol_type = genomic DNA

SEQ ID NO: 37109 - DNA, 50 bp, Streptococcus pneumoniae; identical to SEQ ID NO: 1792
  source 1..50: mol_type = genomic DNA

SEQ ID NO: 37110 - DNA, 40 bp, Streptococcus pneumoniae; identical to SEQ ID NO: 10010
  source 1..40: mol_type = genomic DNA

SEQ ID NO: 37111 - protein, 587 aa, Streptococcus pneumoniae
MKKEVKVIKGDTTLKRTASGCVERSIKRVAAYCRVSTDTEDQINSYNSQVEHYTEFIQKNNEWTLAGIYADEAITGTQVDRRIDFQRLINDCMNGDIDMIITKSISRFARNTLDTLKYVRKLKEFNVAVFFEEENINTLTMDGELLLTILSSVAQQEVENISANVKKGLRMKMERGEMVGFQGCLGYDYDPETKSISINEKEAEIVRYIFRRYIEGVGGMVISRELEEQGYLSPRGNKRWTETTVLGIIKNEKYKGDLMMGKTYTVDPISKRRLDNFGEQDKFYIENHHEPIISEEDFEKAQGIRLRRSKNRNTVANNGGKREKYSRKYAFSSMLECGFCGHNLSRRNWHSSSEYTKVIWQCVNATKNGKKYCPHSKGIEEEAIEKAFMESYRQVCHNNVEITNEFLKTVEEELKDNSLAKDLKKITNQLDKILKKEKDLVELRLNESISMDIYQDKYNEIAISKEKLLAEKRTLEVTLTDEKALKKRLEGFKKLLESNKYLEEFDRAVFESIVDKIIIGGTNDEGEIDPAMITIIYKTGKKDSQDGRLFKSRRKNAKEVNEKADSKLYPQSSDEVNNLCSYPMDKT

SEQ ID NO: 37112 - DNA, 50 bp, Streptococcus pneumoniae
  source 1..50: mol_type = genomic DNA
gtgttcctatcctatggacaaaacatgtggagtgcatagcgttgatacaa

SEQ ID NO: 37113 - DNA, 40 bp, Streptococcus pneumoniae; identical to SEQ ID NO: 37033
  source 1..40: mol_type = genomic DNA

SEQ ID NO: 37114 - DNA, 50 bp, Streptococcus pneumoniae; identical to SEQ ID NO: 37112
  source 1..50: mol_type = genomic DNA

SEQ ID NO: 37115 - DNA, 40 bp, Streptococcus pneumoniae; identical to SEQ ID NO: 10010
  source 1..40: mol_type = genomic DNA

SEQ ID NO: 37116 - protein, 547 aa, Streptococcus pyogenes; identical to SEQ ID NO: 23251

SEQ ID NO: 37117 - DNA, 50 bp, Streptococcus pyogenes
  source 1..50: mol_type = genomic DNA
aatataggtttggacaacgatgaacatgtggagacggtagcacttttgtc

SEQ ID NO: 37118 - DNA, 40 bp, Streptococcus pyogenes
  source 1..40: mol_type = genomic DNA
tttgtttccgcaaacgcatcacgttgagtgcgtagtgttg

SEQ ID NO: 37119 - DNA, 50 bp, Streptococcus pyogenes
  source 1..50: mol_type = genomic DNA
aatataggtttggacaacgatgaaattgtggagacggtagcacttttgtc

SEQ ID NO: 37120 - DNA, 40 bp, Streptococcus pyogenes; identical to SEQ ID NO: 10020
  source 1..40: mol_type = genomic DNA

SEQ ID NO: 37121 - protein, 521 aa, Streptococcus agalactiae; identical to SEQ ID NO: 3046

SEQ ID NO: 37122 - DNA, 50 bp, Streptococcus agalactiae; identical to SEQ ID NO: 3047
  source 1..50: mol_type = genomic DNA

SEQ ID NO: 37123 - DNA, 40 bp, Streptococcus agalactiae; identical to SEQ ID NO: 21358
  source 1..40: mol_type = genomic DNA

SEQ ID NO: 37124 - DNA, 50 bp, Streptococcus agalactiae
  source 1..50: mol_type = genomic DNA
tgtatgattaaattgatagcgacaagaatcggagtaaggaaattgataca

SEQ ID NO: 37125 - DNA, 40 bp, Streptococcus agalactiae
  source 1..40: mol_type = genomic DNA
cataggattagtggccaccaggatggacagtagagactta

SEQ ID NO: 37126 - protein, 475 aa, Bacillus thuringiensis; identical to SEQ ID NO: 27751

SEQ ID NO: 37127 - DNA, 50 bp, Bacillus thuringiensis
  source 1..50: mol_type = genomic DNA
tgtagctattgatataatgaacatctgtgaaacgtagactaatggagttg

SEQ ID NO: 37128 - DNA, 40 bp, Bacillus thuringiensis
  source 1..40: mol_type = genomic DNA
ggtggacacggtgggacatcaagtaataactggcagcaaa

SEQ ID NO: 37129 - DNA, 50 bp, Bacillus thuringiensis
  source 1..50: mol_type = genomic DNA
tgtagctattgatataatgaacatgagtgaaacgtagactaatggagttg

SEQ ID NO: 37130 - DNA, 40 bp, Bacillus thuringiensis
  source 1..40: mol_type = genomic DNA
ggtggactctgtggagaatgaagacagaactagctgcaaa

SEQ ID NO: 37131 - protein, 461 aa, Staphylococcus aureus; identical to SEQ ID NO: 10486

SEQ ID NO: 37132 - DNA, 50 bp, Staphylococcus aureus
  source 1..50: mol_type = genomic DNA
ttggaagttcggaataactatgcagatacctgatacacacttccaacaaa

SEQ ID NO: 37133 - DNA, 40 bp, Staphylococcus aureus
  source 1..40: mol_type = genomic DNA
ttggcggatgaggtatcctgttacctcgttcgccaattat

SEQ ID NO: 37134 - DNA, 50 bp, Staphylococcus aureus
  source 1..50: mol_type = genomic DNA
ttggaagttcggaataactatgcatctacctgatacacacttccaacaaa

SEQ ID NO: 37135 - DNA, 40 bp, Staphylococcus aureus
  source 1..40: mol_type = genomic DNA
tttgaggctgatgtatctttctacctcctcccccaaccat

SEQ ID NO: 37136 - protein, 535 aa, Brevundimonas aurantiaca
MTVPLRAALYLRVSTARQAEHDVSIPDQRKQGEAYCLSRGLELVDTFVEAGASATNDRRPEFQRMIEAGTSKPAPFDVVVVHSFSRFFRDHFELEFYVRKLAKNGVKLLSITQEMGDDPMHVMMRQIMALFDEYQSKENAKHVLRALKENARQGFWNGSLPPIGYRVVAAEQRGAKVKKKLEIDPLHADTVRLAFKLALEGDGTSGPMGVKTITKHLNERRIFTRDGGRWGIGTVHRMLTRATYAGRHEFNKRGKSKELKPADEVIAVEVPPIIDQATFDAVQAHLKSRSPKVAHPQVVGGPTLLTGLIYCGKCGGAMTIRTGKGGRYRYYTCSMKARQGETACEGMTVAMERLDDLVAGHLSERLLDPDRLEDVLSDVLDRRQERSDRRREHIAELNRRASETELRLKRLYDAIESGIADLDDPALKDRIDGLKATRDQARADSERASALLHSSAQQAITPTMLHKFASTARRRIRVEGGGYRRDHLRALAQRVEVDRGEVRIMGSKSSLLRLLSANGVATAAGGVPTVVPKWR

SEQ ID NO: 37137 - DNA, 50 bp, Brevundimonas aurantiaca
  source 1..50: mol_type = genomic DNA
tgcccaccgttgttccgaagtggcgggccacgcccgatgatgatgggcat

SEQ ID NO: 37138 - DNA, 40 bp, Brevundimonas aurantiaca
  source 1..40: mol_type = genomic DNA
gggacggcaggatgatggcggagagggtgggattcgaacc

SEQ ID NO: 37139 - DNA, 50 bp, Brevundimonas aurantiaca
  source 1..50: mol_type = genomic DNA
tgcccaccgttgttccgaagtggctggccacgcccgatgatgatgggcat

SEQ ID NO: 37140 - DNA, 40 bp, Brevundimonas aurantiaca
  source 1..40: mol_type = genomic DNA
gggaccccaggacaatggctgtccgtgtgggatctgaacc

SEQ ID NO: 37141 - protein, 434 aa, Clostridium cocleatum
MGRIIAGYVRVSTLKQKNDGVSVDMQKEMIIKHALMMELVKNADEIEFFIDDGYSGKSLERPKIKELIEKIKKDEVYAVICYDLSRLSREMFDSNSLLRMFNNHGAALKCIYDQTSIKTASDRFSTNIKILNNQYERERIVERTNDGLLSIAESGRYPCGGIVSFGYFRGEDKNIYIHPTDSKIVRRMFEMAKKGYSIDDIRITVNAISNSRNIIFDNAHIRRILKNKIYTGLLHYKGKDYTDIVPRIIEDSLFDEAQRVTRRYSKTGEGYIYNQRLYCKSCGKFFINTHGTSATGQRYNYYKCPECNTIISENKLDTVFAEQEPDVSVSKMKAELVNNIDYQLKLLNMRIRRIKNKYLKAVINDEDYIELLKPINKAIDRLEDKKRGIDRVTINKQRYGDMRSCEEKYKYVRNNVDKIIIEPETKKIYKILMK

SEQ ID NO: 37142 - DNA, 50 bp, Clostridium cocleatum
  source 1..50: mol_type = genomic DNA
ttgttcgaagtggaaaaaatggtgcgatatgagcatttacactcgaacat

SEQ ID NO: 37143 - DNA, 40 bp, Clostridium cocleatum
  source 1..40: mol_type = genomic DNA
cgtttttttcttactggtgccagagccaagaatcgaactt

SEQ ID NO: 37144 - DNA, 50 bp, Clostridium cocleatum
  source 1..50: mol_type = genomic DNA
ttgttcgaagtggaaaaaatggtgccatatgagcatttacactcgaacat

SEQ ID NO: 37145 - DNA, 40 bp, Clostridium cocleatum
  source 1..40: mol_type = genomic DNA
ctgttttttgttacaggggcctcagccatgaatctaagtt

SEQ ID NO: 37146 - protein, 568 aa, Thermoanaerobacter mathranii
MKQLIKRAAVLCRVSTEDQAEGTSLDTQAEICMEEAKRCGYHVTEEDVFKEDGYSGALGVDARPVLHQLWEKYQAGEYDAIFVYRQDRLSRSLALFAALRDEARKVRRCGLKGDGFIFVQGSNDDTPEGKLQSNILATFAEYEREVIKLRTVTGKKKLAKAGKYSGGSQPFGYRWDDEKEEWAIREDEAKIVKLIFQWYVYGDESGQPLGMVRIAEKLTELGIPTPNQFRKTRKGRAGKMQAYWSDATVQRILTHTVYAGTNYLWRGDKMQVSPEQVEKIKKEKTDGWFEVDFPPIIDKMLWEKAQEKRVQSRGGFNRKRPKPILAGRIFCGVCQRPFHDAMYNKGAKLVFKCNGKLKQYHLDGSPKCDSPVLDGEAVTAEVKKRLIDMLQDKDQMRKAIEEYVGSLERRKEELETLLSPISEQISQLQEKQKRLATVYVDGALSHEDYKRQINELKEQELAVRKQYENYWPEMENLTKLEQNIAVVKEAIEEELFDVRYQPDDNTVTENIAFVKVHDEKYLTVGFPQKVVTWEELLDRLQVKLWVYPDRLEVRGIVPIEDIANPKCC

SEQ ID NO: 37147 - DNA, 50 bp, Thermoanaerobacter mathranii; identical to SEQ ID NO: 2
  source 1..50: mol_type = genomic DNA

SEQ ID NO: 37148 - DNA, 40 bp, Thermoanaerobacter mathranii
  source 1..40: mol_type = genomic DNA
cgacgaaaattaaataattttgactattttatatcccgca

SEQ ID NO: 37149 - DNA, 50 bp, Thermoanaerobacter mathranii; identical to SEQ ID NO: 2
  source 1..50: mol_type = genomic DNA

SEQ ID NO: 37150 - DNA, 40 bp, Thermoanaerobacter mathranii
  source 1..40: mol_type = genomic DNA
ctcagaaaattaaatagttttaattatttcagctccccca

SEQ ID NO: 37151 - protein, 618 aa, Anaerobutyricum hallii; identical to SEQ ID NO: 11111

SEQ ID NO: 37152 - DNA, 50 bp, Anaerobutyricum hallii; identical to SEQ ID NO: 11112
  source 1..50: mol_type = genomic DNA

SEQ ID NO: 37153 - DNA, 40 bp, Anaerobutyricum hallii
  source 1..40: mol_type = genomic DNA
ctgtccgtggaagccgtctgatctggaacagcaggaagga

SEQ ID NO: 37154 - DNA, 50 bp, Anaerobutyricum hallii
  source 1..50: mol_type = genomic DNA
actgtccgcaaaaaatgaccgacttgtgtaggacggattttgcggacatt

SEQ ID NO: 37155 - DNA, 40 bp, Anaerobutyricum hallii
  source 1..40: mol_type = genomic DNA
ttatccttggaaaccttattgttgggcagagcaggaagga

SEQ ID NO: 37156 - protein, 594 aa, Clostridium symbiosum
MAKRELMKTLMSDSFRRVAIYIRVSTHYQVDKDSLPLQREELINYCKYVLGIEDFEIFEDAGFSAKNTDRPGYQKMMKMVRAGLFSHVLVWKLDRISRNLLDFAYMYEELKKLDVAFISKNEQFDTSTAMGEAMLKIILVFAELERKTTSERVAATMISRAASGKWNGGRVPYGYSYDYEQKEFSINPEEQKVALLMCDLYEASNSLVFVSRKLNEMGYRSRAGNLWSPVQVRKVLVNPFNTGKYVYNQTSLSTGTQLPNKEEDFIVFENHHVSLFPIERQEKLIARLNRNARSKSTANNTVNRKNIHVFSGLIYCENCGNMLTSSVGKKLAGDGWRPSIYLCPSKRRHVSEGCRDTTDSSIGEFVLNFIMNMLNAQRNFQLVRSAADLQRLLLYGKVFDAVDHLDQDSLNDMYTVLSSNLPQNVKAGMKKKMRKPSANPEVTKLSKEKQRLERAMERLERAMERLKRLYMYSEDSMTEQEYITEKNRIAEAYSEAEARLVEITNYERMERSISDEDFVRQATAFILSKKLSGSSYINYRKLAVSTDPLILKEFFNSILDSITINTDGKIGSIVFKNGLRHEFIYSEDSNSQEN

SEQ ID NO: 37157 - DNA, 50 bp, Clostridium symbiosum
  source 1..50: mol_type = genomic DNA
tggtgttatagtataagcatggcatcccccatactcacgggtctgcgcca

SEQ ID NO: 37158 - DNA, 40 bp, Clostridium symbiosum
  source 1..40: mol_type = genomic DNA
tgatgcaataaacatcgcatccccgaagctgaagaaacgg

SEQ ID NO: 37159 - DNA, 50 bp, Clostridium symbiosum
  source 1..50: mol_type = genomic DNA
tggtgttatagtataagcatggcataccccatactcacgggtctgcgcca

SEQ ID NO: 37160 - DNA, 40 bp, Clostridium symbiosum
  source 1..40: mol_type = genomic DNA
tgctgcaataagaaacacctacctgaagataaagaaaggg

SEQ ID NO: 37161 - protein, 521 aa, Hydrogeniiclostidium mannosilyticum
MARKKTKLNDNNLAIAYYRYSSHSQNEASIEQQRELAHEWADAHGLKIVREYEDAAISGTKEDRPGFQLMLSEVAKIRPNTLIAWKTDRLGRDKYVLAMAKKKIRDAGCEIHLLAENIPTDTAEGILIEGLMEALAEYYSRNLSVHIQRGMDFNAEHANFNGHKVFGFKTEKVDKKRKYVIDPDTAPFVQLMFAKYAEGEPMQSICDEFNEAGLRTSRGNPFGVKTMHRMLKNRAYIGEYRHGEFVVPGGMPALVDGETFDRAQKRLAENKRKGSQRARGMDEDGAPRYWLTGKLYCGECGETMQGVSGTSKTGRTYYYYYCSAQRKKLCAKKKVKKDWIEDLVTDVLRYIIDDSENLMSLAVDAAVYYKEHYKETGYLEGLEAKRKEVEKGIANLMKAIEGGALSDTLIERLNQLEAQKASLNDAIQAENVKVSLCEDEHSIKAYFEKFLHADFDNPETRDKILEYFVDKIYLYDEKLVVTSWYSEDKTEITWDMLKGADGDPFVKGEAAEFDCFPLGST

SEQ ID NO: 37162 - DNA, 50 bp, Hydrogeniiclostidium mannosilyticum
  source 1..50: mol_type = genomic DNA
agttcgactgcttccccttaggctccaccaaaagaggaagcgtcgaactc

SEQ ID NO: 37163 - DNA, 40 bp, Hydrogeniiclostidium mannosilyticum
  source 1..40: mol_type = genomic DNA
agttcgattctcctcatctccaccacaacaaacaaaaccg

SEQ ID NO: 37164 - DNA, 50 bp, Hydrogeniiclostidium mannosilyticum; identical to SEQ ID NO: 37162
  source 1..50: mol_type = genomic DNA

SEQ ID NO: 37165 - DNA, 40 bp, Hydrogeniiclostidium mannosilyticum
  source 1..40: mol_type = genomic DNA
atcactcttctcctcctctccaccacaccaaaaaaaaagg

SEQ ID NO: 37166 - protein, 545 aa, Tissierella pigra
MPMMEHKKEMKLMKDKILNVALYCRLSKEDGDSEASDSIENQKDALTRYANEQNWNIYDIYIDDGYTGLNMERPNFQRLIRDIEDGYINVILVKNQSRISRDNAEVDIFLNKYLIERNVRCIGIIDKLDNMDRTTKKSSQINGLVNEWYSEDISNNVRLAQDSLRLQGKFIGSHSPYGYIKDPEDKHHLLVDENVRDIIVKIYDLYLDGYGYVKIAKTLNEKNIPCPAEYKEIFNYNREKIKKSQWSYHTVRTILKNEVYAGHMVQKKTTSLSYKTNKRVDIPEDKQIRVLNTHEAIIPQSKFNLVQDMMSKNIYTKPTGGGKKKHILAGLMYCRDCGRAMRYRNDSKTFNCNTYIVYGGEACTPHKIRLDDVLEIVLEEIQSISRLYVEVKRLKSDYDKVMNTKSKRDNTNIRLSVEQKRFNEVETLQKKLVENFLLGKIDDDIYNKMLDDYRKEKEELSKKIEQLRKEREELQSIITQHNDWSSVFEKYVNIKELDRTIINELIDRIDVSEDEEGELSIYINFKHKNPFMDDINMYKDYISVG

SEQ ID NO: 37167 - DNA, 50 bp, Tissierella pigra
  source 1..50: mol_type = genomic DNA
atatgtataaagattatatctcggtggggggatatgatattggtacagag

SEQ ID NO: 37168 - DNA, 40 bp, Tissierella pigra
  source 1..40: mol_type = genomic DNA
tattagttttgatgcagcttggggtgatgaatatactaat

SEQ ID NO: 37169 - DNA, 50 bp, Tissierella pigra
  source 1..50: mol_type = genomic DNA
atatgtataaagattatatctcggttgggggatatgatattggtacagag

SEQ ID NO: 37170 - DNA, 40 bp, Tissierella pigra
  source 1..40: mol_type = genomic DNA
tataggtgtggctgctgttttggctgatgagtatactaaa

SEQ ID NO: 37171 - protein, 509 aa, Escherichia coli; identical to SEQ ID NO: 17101

SEQ ID NO: 37172 - DNA, 50 bp, Escherichia coli
  source 1..50: mol_type = genomic DNA
tagtgtatttagggaacaaatatcagtataataggttcctaaacacatca

SEQ ID NO: 37173 - DNA, 40 bp, Escherichia coli; identical to SEQ ID NO: 5293
  source 1..40: mol_type = genomic DNA

SEQ ID NO: 37174 - DNA, 50 bp, Escherichia coli
  source 1..50: mol_type = genomic DNA
tagtgtatttagggaacaaatatcactataataggttcctaaacacatca

SEQ ID NO: 37175 - DNA, 40 bp, Escherichia coli
  source 1..40: mol_type = genomic DNA
gagatctggtactatctttaccactacatttttattgtga

SEQ ID NO: 37176 - protein, 509 aa, Escherichia coli
MRRAISYIRFSSERQLKGDSVRRQSKLVTDWLDKNPEFYLDSSLSFKDLGKSAFSGKHLKGGLGDFLTAIEKGLVKAGDTLLIESLDRLSRQDIDIASELLRRILRAGVDVVTLSDGEHYTRESLKDPLALIKSILIMQRAHEESLRKSERVQAAWNRKKELISEGIKVSRRCPAWLKLNDDRRTFTIIPDKVEVVKRAFDLRLQGLSFWAITRTLNDEGHLSLNQYTPKQKGWSDTAVKKLLRNRAVIGCFTPAGREEVQGYYPAIISESLFYRVQQLNTGQYGRASVSSNPLSVNLFRGIIKCSECGATIVLGGYALKRFGMYRCPNRSANRCSAKAISRKQTDATILYMLALCDRFETENTDIIDSLKLQREDLQRKISKMAELAIELDDMTIITEKLRDMKNALSKLNHDIEEETKRIKAITTGSLKDIDRTTKEGMIETQLLIKGVLKEIVIDAAKRRCKVTFHNGRIIDLSITENPSEDVTEAIQSLSEVTERGLIDVDEVII

SEQ ID NO: 37177 - DNA, 50 bp, Escherichia coli; identical to SEQ ID NO: 37172
  source 1..50: mol_type = genomic DNA

SEQ ID NO: 37178 - DNA, 40 bp, Escherichia coli; identical to SEQ ID NO: 5293
  source 1..40: mol_type = genomic DNA

SEQ ID NO: 37179 - DNA, 50 bp, Escherichia coli; identical to SEQ ID NO: 37174
  source 1..50: mol_type = genomic DNA

SEQ ID NO: 37180 - DNA, 40 bp, Escherichia coli; identical to SEQ ID NO: 37175
  source 1..40: mol_type = genomic DNA

SEQ ID NO: 37181 - protein, 509 aa, Escherichia coli
MRRAISYIRFSSERQLKGDSVRRQSKLVTDWLDKNPEFYLDSSLSFKDLGKSAFSGKHLKGGLGDFLTAIEKGLVKAGDTLLIESLDRLSRQDIDIASELLRRILRAGVDVVTLSDGEHYTRESLKDPLALIKSILIMQRAHEESLRKSERVQAAWNRKKELISEGIKVSRRCPAWLKLNDDRRTFTIIPDKVEVVKRAFDLRLQGLSFWAITRTLNDEGHLSLNQYTPKQKGWSDTAVKKLLRNRAVIGCFTPAGREEVQGYYPAIISESLFYRVQQLNTGQYGRASVSSNPLSVNLFRGIIKCSECGATIVLGGYALKRFGMYRCPNRSANRCSAKAISRKQTDATILYMLALCDRFETENTDIIDSLKLQREDLQRKISKMAELAIELDDMTIITEKLRDMKNALSKLNHDIEEETQRIKAITTGSLKDIDRTTKEGMVETQLLIKGVLKEIVIDAAKRRCKVTFHNGKAITLPIIEDPSKDVTEAIQSLSEVTERGLIDVDVVEI

SEQ ID NO: 37182 - DNA, 50 bp, Escherichia coli; identical to SEQ ID NO: 37172
  source 1..50: mol_type = genomic DNA

SEQ ID NO: 37183 - DNA, 40 bp, Escherichia coli; identical to SEQ ID NO: 5293
  source 1..40: mol_type = genomic DNA

SEQ ID NO: 37184 - DNA, 50 bp, Escherichia coli; identical to SEQ ID NO: 37174
  source 1..50: mol_type = genomic DNA

SEQ ID NO: 37185 - DNA, 40 bp, Escherichia coli; identical to SEQ ID NO: 37175
  source 1..40: mol_type = genomic DNA

SEQ ID NO: 37186 - protein, 509 aa, Escherichia coli
MRRAISYIRFSSERQLKGDSVRRQSKLVTDWLDKNPEFYLDSSLSFKDLGKSAFSGKHLKGGLGDFLTAIEKGLVKAGDTLLIESLDRLSRQDIDIASELLRRILRAGVDVVTLSDGEHYTRESLKDPLALIKSILIMQRAHEESLRKSERVQAAWNRKKELISEGIKVSRRCPAWLKLNDDRRTFTIIPDKVEVVKRAFDLRLQGLSFWAITRTLNDEGHLSLNQYTPKQKGWSDTAVKKLLRNRAVIGCFTPAGREEVQGYYPAIISESLFYRVQQLNTGQYGRASVSSNPLSVNLFRGIIKCSECGATIVLGGYALKRFGMYRCPNRSANRCSAKAISRKQTDATILYMLALCDRFETENTDIIDSLKLQREDLQRKISKMAELAIELDDMTIITEKLRDMKNALSKLNHDIEEETQRIKAITTGSLKDIDRTTKEGMVETQLLIKGVLKEIVIDAAKRRCKVTFHNGKAITLSITENPSEDVTEAIQSLSEVTERGLIDVDEVII

SEQ ID NO: 37187 - DNA, 50 bp, Escherichia coli; identical to SEQ ID NO: 37172
  source 1..50: mol_type = genomic DNA

SEQ ID NO: 37188 - DNA, 40 bp, Escherichia coli; identical to SEQ ID NO: 5293
  source 1..40: mol_type = genomic DNA

SEQ ID NO: 37189 - DNA, 50 bp, Escherichia coli; identical to SEQ ID NO: 37174
  source 1..50: mol_type = genomic DNA

SEQ ID NO: 37190 - DNA, 40 bp, Escherichia coli; identical to SEQ ID NO: 37175
  source 1..40: mol_type = genomic DNA
